United States Patent Application Publication US 2012/0017292 A1 - sequence listing, part 4

SEQ ID NO: 12447 - DNA, 1212 bp, Zea mays
  Peptide Sequence Number=SeqID_55822
atgcatcgcgtccttccaccttccgagcccctggatggggagcgcccgcggttcttctgtcttgtcatcgttggaggaacgcaacttcgcggaagttggtacctttcagccatcgctcggcttcaaggattttcatcaggcagcccggctgcatcccctcgccggtggtcacccaagacggtgacaaccagtttgatggtggggagaagcaaaccgggctgcggcctctgccccgccctcatcttcaaggatgctcatcttcctggctggggcagaggccaggctgagccgaagctctacctcccgcgtggcgcgttgggctcgctggctcagctggctctggctcggctcccggtgccccctcccaccgcacgagcggttgtcgcgccgcacgcaccggaggaccgcccaagacgtcgcgcgctgctagggcggcgttcgtgttcttgggctgtcctgcctttgctccggtacgacgcctctgcgtggaggtcggtgctcgcccgttcgggaggatccgagtggggatctgccggtgggcagatggcttccgtcgtcggcgctgaggtggtggcggctgaagaagtcctcgtcgccgacgggatcaccgccaccatccgcgctccgagcctccagctctttggctttgatagcttgtcctcgccactcgagtggggacgtgggcgagggccttgtcgcagcagcgtctgccctgaggtcatcactgctgctgtttggccacccggagcggaggtcgttgtcgctgctgccggagcgggtgtcggcgagccacctggggtttcgtcgccccgcaggccctccaatgtggggggttgttcgtacctgcaggggcggaaccagagttccgtttgtaatggcaccttgagtgccggtgtctgttcattgtggctgtcgaggcctgaacatagatggctcgaaaagaagcttcgtcggccggagcctggctgggtcgtccactggcgggaccgacgccggagtcaggttgccgaggccacgagccgggctgatgtcctcgaaggacagctggctgaggctacggagcggccggtcgagtcgtctgctcgggccgggttcccagaggagaccccggcgatgatggcccaggcgtggtgccaacagaaggtgacgagtgaggtatccgtattccggaggcgtaggagtccctcggctcggtcggccttgcttgcttaa

SEQ ID NO: 12448 - DNA, 144 bp, Zea mays
  Peptide Sequence Number=SeqID_55823
atgcaggtggcatgcaaccgtaccaaggggacgcaccctttcgactccgacgcgtccagcatgggggcccagggaccgggaaagggtatacttcgaaagggatccttctccatgaaggaagcgggcctcgagcccccctactga

SEQ ID NO: 12449 - DNA, 303 bp, Zea mays
  Peptide Sequence Number=SeqID_55824
atgaacgtatttgatctcccttcgttgagttacaacgcaacttctcatgacttgggattgccctcattcttttctaatcttcagatatggcctagcgatactctaatcttgaggagaaacatcttcaacatcaggccgactcaacccgatggtactccgagcttaaggagaagtattcccaagcttgactctgaaagggcagttaacgagaattcagtagtcgtcctgaacgattgtggaagtaagtgcaacgtgctggtttttgagtcttttcctgatttacgccaattgattggctgctaa

SEQ ID NO: 12450 - DNA, 381 bp, Zea mays
  Peptide Sequence Number=SeqID_55825
atggaggcagccatgcaagatgcagcacgacgtgcactttctcagtattgctcgttgttcagcggggtagctgatggccttgacctgaagtactaccctcaccattcgactgtagcgctggtgttgtgctcaacactgagctggaccacgcccttgacaagttgggcaaggttcgggcggaggttgcggaattgcgtactgagtgcgcagcacgccactatctggatggtggttctcccgcccctgtcgggattcagcacccttaccgttcaccgccccgtggtcgcttcgagtatgatgtctgagaacaggcgcagagttacaaggcgtgctcagccagaacagcaggcacctcaagaggaggcagctcagcagcattag

SEQ ID NO: 12451 - DNA, 189 bp, Zea mays
  Peptide Sequence Number=SeqID_55826
atggtctcccattccagttatggtgggtacaagtgcggtcactgcacgacggcagtcgaggtcagtgaggcattgtacgccaaggcggtgagccctgatctgttgccagggaatcgatgggaacggttgatgtacctccttgttatggttaatggtgtgacttggccttcatccctgccatcgggatag

SEQ ID NO: 12452 - DNA, 279 bp, Zea mays
  Peptide Sequence Number=SeqID_55827
atggagcttctgctggcgaccctggagctcctgcgctggctgctgttgtcgtgggaggactcctgcgcgaggagaagtatgagactgaccagaaatgagagatttagacaaatcaacatccgatacttgagaacaagttatagcatatatccagataatagggcaggattaataggggatccggagattcggatgataagccacaacatgattcaccaaggtaaagatttaccagattcggacgaaggagaggtaggaaaacaagatctgctaggatga

SEQ ID NO: 12453 - DNA, 75 bp, Zea mays
  Peptide Sequence Number=SeqID_55828
atggagcttctgctggcgaccctggagctcctgcgctggctgctgttgccgtgggaggactcctgtgcgagataa

SEQ ID NO: 12454 - DNA, 543 bp, Zea mays
  Peptide Sequence Number=SeqID_55829
atggaccagccgactccgaccacctccgacgccaacccgtacctctacgtgaccgccgtaacctccccgacctccctggacgcctcaccggagctatctcgccgccgctatggtgggtacaagtgcggtcactgcacgacggcagccggggtcagtggagcattgtatgccaaggcgaaaggagcgaacctagatgacttcacccaccccatcaatggaggagacactcgtttcagttccgactaccttttccatgagggtttcccttccatcttgtgggaggtgctctactctgccgggttaccctacacccctctctatacggtgcaactatacgaggagcatcgggtgccacgttgtaaggtttggctgactctggaggctcaccctctgcagccgagttggcgttcccttgactccaagactattggattcagggcggacgacaccactgaggatgcagctatgaaagaccctgacgactttctacggataccatcccctggaaatggtaatgcacccacctggtactcttcctgttga

SEQ ID NO: 12455 - DNA, 561 bp, Zea mays
  Peptide Sequence Number=SeqID_55830
atgtaccccctgtggcatggtcggtccgaggctaaggtcgggcgaggcggtgactcctccgagatcgaggttgaggccgagccctggggtcgggcgaggcggagaccgtcttctgaggtcgaggttgagtccgagccccggggtcgggcgaggcggagaccgtcttccgaggtcgaggttgagtccgagccctggggtcaggcgaggcggagaccgtcttccgaggtcgaggcgggggccgagtcctggggtcgggcgaggcggagaccgtcttccgaggtcgaggcgggggccgagccccggggtcgggcgaggcggagcttcctatggcgcctgaggctggactcggctgctgtcagcctcaccctggcgggtggcacagcagtcggagcagggcaggcggcgctgttttcctgtcaggcgatccttgcattgaatgctcctgcgatacggtcagttggcgaggcgatctggccaaggttgcttcactacgaagcctgcccgagctgggcctcgggcgagtcgaagcttgtgctgatggtgattaccagccgagtttag

SEQ ID NO: 12456 - DNA, 378 bp, Zea mays
  Peptide Sequence Number=SeqID_55831
atggcctgcggcaatgtacttggcttcggcggtggaaagaccaagacaccaaggatctccccagaaactgacaagtccctgatgtgctctttctatcaattttacaccctgcccaatcggcatcgaaatatcctattaaatcaaagatttacctcccgtgtcgaggtcgagatgcccattggttcccattggtgtcttgatgggtttgccatccttcatcccaaacttcttaagaatgtcttgaatgtactttgtctggctgatgaaggtgccctcttagagttgcttgatttgaaatccaaggaaatacttcaactcccccatcatcgacatctcgaatttttgtatcatgatcctactaaactcttcacaagttga

SEQ ID NO: 12457 - DNA, 2760 bp, Zea mays
  Peptide Sequence Number=SeqID_55832
atggcggggaccttccgcgagggcgcggggccgggggacgcccatgcgcccccgcccacgcctacgccgcccctctcgcagttcctcgcgctggatgcgctcccgtcctggggctccgaccccaagcagccgcactggcgccaccccgagctccgccgggcgctcgcctccgacgaccaagccgacgagctcaggcggatccgtgccagcgtccaggactccgcgggcaaggccaaggagaaggtcaggtcgctgcacgaggcaatccagaagctcgacaagtacaagaacattgtcacccgcaaacgccagcgcgccacagaggcgtcggccgcgcccgacaagctgggccctgccggcgcctcctcctccggcgcgctcaggatgggcgcacagaacaactctgctgtccttagcaagcgcgtgcgctcgtcgctcgccgatgcccgggtggaagggcgtggtagtgttcctacaaggcaaggccctttgattagtactgagaaaaattcacctctagagaaggaaaagagcagcgcaagaatatctgctacagtttctggcctttctgatgacaaattgcggggtctatctactggcagtgaagggtgggaaaaaaagatgaagcgtaagcgctctgttggaacaatgctcagcagaggcagtgatgtggatcgagatgtcaaatccgcgggccagcatagaccagccaatgaagtacgcccacggtctagtgatggccttgggtatagacatggagtttcggccggagcactagtaggtaacaagttggatggcacttctcagcagaataacattgtatcccgcattctgtccaagtcagatgccgattatgtggctcagccaaatgaaagaagagaacgtcatcctggagttgaaaaagaaaggaccacattaaaaggaaacaaggcaaattcttctgatgatatgcaaaacgtaagcttaaacccattgcccaaggctaaagcatgcagggcaccaagaactagttcacttgctatgaactcgtcttctaatttccaacgttcaactggaggaagtgatgagtgggaagaaacaccttacccaaataaagcctcgcctttgggaggcatgacaaatcgcaaacgttccacacattcaaatgcttcctcacctcctattgcctgggttgggcaacgcccacagaagatgtcaaggacaagaagagcaaatgttgtttctccagtgtcaaattttgatgaagcgttatctgaaggatcaccacttgacactgccactagatcggcacctatagagtctggcagtgtcttgctgacaaagaacacatcaacaaccaaaatggataacatctcatctcctgctgggttgtcagaaagtgagggatcggctgtgaatgaaagcaagtccaaggagaaagccatgcatagtggtgaagtcgggaacgagggtgcaaatgcagcccataatgcaatgggattgatattttcatcaaataaaaataggattcctttgaaagaggagcttgaagatggcagtattcgtcgtcaagggaggagtggaaggggagctatgcatgtcaaggggtgttctcccataccaaaagaaaaactggacactgcagaaacaagaaagccaacaaaaggtggaagacctggatctgaaaagaacgagagtaagttggggcggccaccaatgaaaaaagcctctgaccgtaaagcttcatcctggcattcacaagctctaaatagtgatattacagacataacaggtgaaccagaagatgaccaagaggagcttttagctgctgttaatgctgctcgcagcgctattgtttgtggtcagatcaaccttgttgaagagcttgaagtgagcatgtcctgcatgtctgacggtgaacatgatattatagcatcagttggtcacagaagaatgtcaaagatggaggagcattcatctcagggactggttccatctaatttttctccctcatctcagcaaagtaaaactaatggagtcggagaaaaaggattagtcggctgtttctctcatggtgacgaaagtcgtactggaccacaaaagctggaagctgataaatggtttaatgaaatggctccaatgacacacagactcctttcggctttaattatggaagatgacctacctgattccaatggggtgcaaagagatatacttgttgaatttccaaatagccacaatccttacactgtcaacagatacttagaaaatgaacttcaagctagtgccataacatctaattttgggctgagcgtggatttcgtgcactcaaacagtacttctgtggtacatcagagcatgtgcaatggttttacagcttcaagcaatttcattaattcaaacagtgaaaattcagttcatagtgagaatttatcagacggactaaattttacagtatacccagaaagtggccctttgcatgacttgataccactgactccacggcaatgtcaaaatccagggaaagatttccctttgtctccatatgagtatcaatatgggcagatgtctatggaagataagattttaattgagctgcaaagtattggcatttgtccagagacagtgccaaagctagatgacggagaagatgaggacattaataaaatgatttcagagctgaggaaaaggctgcatgatcagatcaatgttaactgtcataatctctattatgttttggaaccttggttgtgtgaaccagaagaaatgcagattacataa

SEQ ID NO: 12458 - DNA, 363 bp, Zea mays
  Peptide Sequence Number=SeqID_55833
atggcgccctgcaggggatcctcggcgagcagcgccatggcaaggtgggtgaggccgctccttactgctggccgagcagagaggggtgctgtgcagaggggcgtcgagctccctgcgttccagaagagagagagaggtggaagaaggggcgcctgcaccttcctgcgcgatggcgaggccgagctaggagatgcaacgtgcgcgaggaaaaaggagcaggggcgccgcgtttggaacctgcgccaatgggagaaaggctggaaatctaggcgccatgggtggaggaagctccctgcacgctggggaagaaggtgctgctgcgcgtgggggaagaagccagggagagaagaaagtggcagctag

SEQ ID NO: 12459 - DNA, 1029 bp, Zea mays
  Peptide Sequence Number=SeqID_55834
atggatcctgacacacatatgatggttcgcactctccaaactacccgcatcagcaccagctatgcccctcagccccggcagatcccgatctacccagtggtagtcgaggaagttccggcggatctccctcccatccgagtggagaatgtagtcaacctggaggacagctcggaggaacagctgccgacgcctaccccgttggcagagtccctggccttcgcagctgggtcatcgacgtcagcatcgtctgcactagccttccaagcacctgcacccggaggcaacgaccccgacgactccggagacgacgatgacgaggatgatgacgtcgacgaaggtggagacgaacacgtccacgaggaagctgactacgcccagcaggacaacttcatggggttcggtcctgttgttgaacattacacatcaatgttcgagacggggcacttccccaacctgctgcaagaagtgctgcatgcgctaggaacctacatctgccccctgtacgaaacaaggcgagtgagcgagcctccccgggcttgctattacatcactcgcatcaacgtcagggtgatggatgcaggtgacaggggattcaggactctgcctgctcacgagtccctgacaccactgtccacctacgctgcctcggtcagcgacgctgcccgtcggaccctgtggtcactcagccacacctaccggcagcagctgcagaacacgaggttcaggcatcttcctcagtgtctgcgtggaggaagccagaccaacatcgtcccaggtgaagctggtaaggatcgcctcaacaccctagctagtgtagtggccggtctcaacaccgacctagacagtgccaccctggatctctacagggtgcacttggagctggagaatgcccacgccaggattgcagccctggaagcccaactgcaaggactggatccacctgaagctcaggtccctgccatggcgttgtctcctccccgtaagaggctgcgctatggagagcccggatccgtcactaggctgctttaa

SEQ ID NO: 12460 - DNA, 876 bp, Zea mays
  Peptide Sequence Number=SeqID_55835
atggtggtggccccctgggtgaggtaccttagccaagaatacgtctccatgttaacgtgggctgccagcacctaccgctccccctctttcccatatttcaggcgggcagcgctgagaaacggaagaggacacgaagcagaagcaaagaaaaaaagtaaaaccaagaaccgccgcctcgccgttcgagagaagggaagaggggggaaaaagatgctcgccagaaccatcggaggcgccgtccgaacccgcctcgcgccgtccctcgcgagccttctctgccgcggctacgcgtcccccgcctcctccgccgacgaccttgtcatcgacgaggacccgccgcgcgccgcctcgacgtccgttgccgccaccaccgtggcggccaccgtgccgaccctcctgcagccgcgggtgctcatctacgacggcgtctgtcacctctgccaccgcggtgagtggaacagcgacaccctgctctggggggtgaagtgggtgattaggacggataagcacgccaagatcaagttctgctgcgtgcagtccaaggccgccgagccatacctgaggctggtgggcatggacagggaggatgtgctgcggcgtgtcctctttgtcgagggccccgaggcctattacgagggctctacggctgcgctgaaagtcgcatcgtacctgcctcctccttactcggtcctgagttccttgctgatcgtccccaccccactgcgggatgcggtctatgattacattgcgaagaaccgctatgactggtttggcaaagatgatgagtgcattgtcaccaaggacaaggaaattctggagcgcttcattgaccgggaggaaatgcttggtggcggtcccagcaatagcttcttttga

SEQ ID NO: 12461 - DNA, 552 bp, Zea mays
  Peptide Sequence Number=SeqID_55836
atgaggacatttcacagcatgcgcgcaccatcgttttcgccttcgtcggacgtcccattcgtcttcctagacttcgcgctgttcttcctccccaacctactgcccccgcccacgatcgcagtcgcgagccgaccgatgctcgtcgacgcgggtacggggcgagtcggtcttggtcctagcatttcttcgatgcccaggtcttcgtcgtgtccttctccggcaacgaacaagtgtcaaaggttcatctacaactatactaaatcgactgtccggaataccgtagattatttcggacaggagaagctttttggaaaaacaggccaagcgcggaccgtccgggcccttgcggcggaccgtccgcaacaccaggatgacactcggacagaaccaatgcaaaaatccaagtatgcactacggaccgtccgaaggaaaagcaaggaccgtccgagaccgtgcgcggaccgtccaggctcaggcgcggaccgtccggcgcggaccgtccggaccaggcgggcggaccgtccgcggtcggcagaatggagcaacggctag

SEQ ID NO: 12462 - DNA, 468 bp, Zea mays
  Peptide Sequence Number=SeqID_55837
atgggcaagaacaacaagcgcaagcgtgagccgactcctccatcggaggagtttggtgactcggaatactcggaggaggagttctcctccgagtccgaggggtctccggctcccgtctctcccccggcgtcgtccgatgactcggacgactcccaggggatagccgcggaggtctggacgtacatccgggccgtcgagcgcgccgggctcgaaggctcggatgagtcggagtactcctcggatgaggaggactcggacggcggcgacgagggtgaagacgacgacgacgacgacgacggcgacggtggcggcagtggcagtggcaggggcggcggcgacggcagcagggacaacaccaagggcgacagcaggggcagcaccaagggcgacagcaggggcagcaccaagggcagcagcaggggcagcaccaagggcggcggcggcggcaggggcagggccagtggctag

SEQ ID NO: 12463 - DNA, 465 bp, Zea mays
  Peptide Sequence Number=SeqID_55838
atgggcaagaacaacaagcgcaagcgtgagccgactcctccatcggaggagtttggtgactcggaatactcggaggaggagttctcctccgagtccgaggggtctccggctcccgtctctcccccggcgtcgtccgatgactcggacgactcccaggggatagccgtggaggtctggacgtacatccgggccgtcgagcgcgccgggctcgaaggctcggatgagtcggagtgctcctcggatgaggaggactcggacggcggcgacgagggtgaagacgacgacgacgacggcgacgacggtggcggtagtggcagtggcaggggcggcggcgacggcagcagggacagcaccaagggcgacagcaggggcagcaccaagggcgacagcaggggcagcaccaagggcagcagcaggggcagcaccaagggcggcggcggcggcaggggcagggccagtggctag

SEQ ID NO: 12464 - DNA, 297 bp, Zea mays
  Peptide Sequence Number=SeqID_55839
atgaagtatccagactatgaaagacttgacgagggggccgggggagcgaaaagaaaaagagttgtcagcgttctgagcagacaagctgcccggtccgtgaaggcggacaaagaggctctgaagaaagcagcgccagagaagaaggcactagctcctaagaaaaggaaacttgaagagataccttctgccgaaccgaagctgctaagtcctttgggattggaactgacaaaccttttacagaagaagaaaatgcattcggccgcggaggagaaggttggagggcagaagaagcgatag

SEQ ID NO: 12465 - DNA, 531 bp, Zea mays
  Peptide Sequence Number=SeqID_55840
atggtcatcatagaatgttctgggctcttcaatactcctgtacggaacataggtaatccaattgcaccggtacgcattggtgctagcttcactctaccttggttttactgcattgatcatttgggttggagctttgatgataccattaataatcctggtcctaagacaacttttgaagttggaatgttagctggcgattcatggaagaaggcttttgctggtgatgatgttgaagctgaatttgagaaatccaaaatggatgttttaagtgtgaagaaccttgaatctgaaaagcttgcttttgttcgttgctgggtccagtggacagacatccaacagaaaaaaggacttccctcatggatggtaaaagactatgaagttgctaaaagaaatagagaggaagccttgaagaggaaggactcaaagcttaagcacgtcatcatttctaaacatgtagataagaagttaaagttgtatttgattcgttacatgcacatgcttgatgtttctgttatttatgtaaagtgctaa

SEQ ID NO: 12466 - DNA, 387 bp, Zea mays
  Peptide Sequence Number=SeqID_55841
atggagtgcgggagtcttagaatgttcagagtatgcttgggtgactcctccatgcgcctaggcgtcccgtttatagccccaaggcagctaggagccgttgagagcaatctgggaaggcaattcttgccttctgtcgggtggcgcaccggacagtccggtgtgccaccgaacaggcactgttcagtgtccggtgcagattgctttcctaaattggcgcagccgaccgttgaagatttggagccgttggcgcaccggacactgtccgatgcacaccggacagtccggtgcccccatcagactgttggctcggccacgcgtcacgcgcggattgcgcggccgaccgttggctcaccggacagtccggtgcaccaccggatagtccggtga

SEQ ID NO: 12467 - DNA, 592 bp, Zea mays
  Peptide Sequence Number=SeqID_55842
atggagctattcccggcgattgtgatgggtctcatgtccttcgcctcgctcattacctgtgaaggagctgcaaatgctttgtcccacgagggatgcaggcacttcgaatccgctggggcgctttatgataggatgtggggcttgcacgaccgtgataccatctgggagaggtcggaccaggcgctggagcagatggcgaatgatgaagaagtcgacaacttcggaggcctggaaagctcggtgacccaggcggaagatgtgaggatggaggttggggagcaaccggctccactgaccggcccttgtgaggaccctacggcggccgttgtcccgactggcgaagaccctccagcgacggctgccgaagaccctgccgcgccgatcgctccttcgcaggtggcggggatcgtgttaggggagtcttcggatgaggatttggattattttgctgtgttggatgtggccgcggtggagtctgtgccgcgactcgaagggcatgaagcgttcgatcctccgactggggcgaggaccgaggagcaccgccggcgcaaagtggtgtcaaagcatagtgtcggtgagatgtcgcgaagtg

SEQ ID NO: 12468 - DNA, 306 bp, Zea mays
  Peptide Sequence Number=SeqID_55843
atggtgctagaaagccatggatcgcttcgtgaagtcccatatgctcggactgtgcacatgctgtccattagcaacagtgactaccagaccccgccgatggctgatgtcgaggccgagtctgtgtgcggcgccttggttgatgaaggagtgggtggagccgaagaccacaagagccgtcggctcttccccttggatcttggcatgaagacaaatggtgttgcccacagggacgctcgtcaacatgttcagcgagatgcggacttctttctccgtgatgttgtcgtcctccgatgcagcgtcgtctag

SEQ ID NO: 12469 - DNA, 114 bp, Zea mays
  Peptide Sequence Number=SeqID_55844
atggccggcccttgttcggccgcatgggcactcctacaggcggtagcatcccttttggcgggttcaccgatggtggccatgttcgacgctgaggcccttgtgccatttttgtga

SEQ ID NO: 12470 - DNA, 396 bp, Zea mays
  Peptide Sequence Number=SeqID_55845
atgggaaacccatatagccgaacaatctcatcaaagaaagcttttgcaacagaggtggttgaatatggatggttgagtgggatgaaattaaatcccaacatttggcgcccaccgttcgtgctacaaaaacaacccgtgatggctcctaagcgagctaattcgaaggctgtcccatccattgacgacgcagcgaaggcagcactactggcggaaaagaaaggcaaggccctcgtggacaacacccccaagaggccttcgaagatgacgctgtcaacagcaaaagacagcgccatgaccatcccacccccgagggcactgtatgcacctgcagctctgaaggcgcaccacaagcaccaccgccaggcttcgctccaccagagggcgaagacaccatag

SEQ ID NO: 12471 - DNA, 471 bp, Zea mays
  Peptide Sequence Number=SeqID_55846
atggcgcctcctgttgacgtggctggtctgcgccctaggttgggcgatgtgggagctcctccaaagccgacgtcgagtctgtcttccgtggccgaggtcgagtccgagcccctggttcgggcgaggcggagaccgtcggctgaggccagggtggagtccgagccctggggtcgggcggagcggagttcgtcgtcttctggggctgagcccaagtccgagccctgggtcgggcggagcggagttcgtcgtcttctggggctgagcccaagtccgagccctgggtcgggcggagcggaggctgagcccaagtccgagccctgggtcgggcggagcggagttcgtcgtcttctggggctgagcccaagtccgagccctgggtcgggcggagcggagttcgccgtcttccggggcttagcccgagtccgagccctgggtcgggcggagcggagttcgccgtcttccggggcttag

SEQ ID NO: 12472 - DNA, 264 bp, Zea mays
  Peptide Sequence Number=SeqID_55847
atggagcaatcaggacttgggtacctccacaagtcgagtaattggtatctaaagttatattcatatggttctggcactttaaattggtatcttaatgagacaaccgatcaagccaaggatggaggcaagaagagcttcgaggtaccgagtgcacgggagaaggtcaaggaggctaggaacccaaagccaggggtgaagaagaagacttgcaaagtcaaggttgatcgagttaagagttatggtgcatcaaggatcactacataa

SEQ ID NO: 12473 - DNA, 1161 bp, Zea mays
  Peptide Sequence Number=SeqID_55848
atgcagaaacagatggcgcgaggtcgggctttggtccttgggcacggcgtccgctcggcttcggtcgggccaggggtgcttggccggggcgggtcgcacggcgtcggctgtcgggctgggcgctcggcttggcggcagcacgcggtgtcgggctcggggtcgcgcgcggtcgcggcttctggcatgcagggcgcggtcggtcggctggctcggacgcacgggctcctggcgtcggggcgctggggtgttacacaaccaaacccccagagccaaacagttgcatgtctagaggtgacttctcacatatcctcggacgaagggaatgcactgtcccacactgacgggcttgcacgagagggttttccccatattttgtgggaggtacttcagggagctggttacacgatgcctccccagtacgcggtgcagcagtttgagaagcaccgagtgccccgctgtagggtgaggatgaccctggagcctcatcccctacagccaggctggcgttcgctggactctgagtcctttggataccaggctgaggatacgatcgaggcgattgtccttcacggactaaccaccttctgcggattccaccccttggagctgtccactcaccccattggcttgttccccactgagaaggaggacgacccaatgtggaaggaccgagtggagcatgccaaggacatctgggctatctacccaagtcagactgctcacttgacagtgcggtgcatgaatgccctgtaccgtctgcaagtgatgcgtggtgaggcaatgtcccatctgatggcattgttggaagcaactaagatcaccttggataacagagaagagcttgtggttgacttgtccactgagatggtggaaaaagacttacaggtggagcaactgtcaaatgagatccaagagcttgaggaactggtgggaacaagggagaacaccatcgaggttctcgaggatcagttaattaacacccagcagcagcttgccgaggctaacgagcacctggatatgcatcaccaggagatccaggacatggaggccaatgaggatgtcgacatcgagggaggagaggagcctgcctccagcttggacactgctggctcagggagacccccttcccccgagtcgagtgttgcctcgtttgctcactag

SEQ ID NO: 12474 - DNA, 1822 bp, Zea mays
  Peptide Sequence Number=SeqID_55849
atgatgaggatcctcgtcgccccttcaggcaggtcaagggcaagacagtttacttggagcagcaggaaggccgcaagaagcggcgtacggacagagcagcccgtgcagcagcagcagcagcagccgctgcgtaggccgagcttggagatcagccacagactccgtcagatcagattgcataccgtgttcgttgtctcgcctcccggcctcgctcctccactcacaccactgcttccactccaccacccactctgcctgctcccgtcacccctgttgcgccatccaccaccacagccatacccgctacctccactacgccagcttccactgcccctcctcccgctcccgcttcagctcctcctgtccctccacctcgattccgggagcgcgatgagactgaggttcaaccccttgctgcggatcccagactttttgaccttcagcgtgctacagcggcacgggtacgtaggttcagatacgtacccgtggagtcttggttaccagctcagagggaccctgcagcagttgacctattcagcacacctattcaggagtcttttttcagagctcagatccggtgctgactctgaggcgcacctcacatatctgcctggccttctaacccttttgactaccagcggcaggtatgttgaggagtgggtccgagtcttctacgcctctgtatggatagacccggatcatcactggatgaggtttcgttttgagcgagaggatgtcaccattactgccactcagattcaccagctctttggatttcccgagtcgacgactcgacttcacagcctctgctacggcacctctgaccctcctcgtcgccctcacggcggtgtggctccgggtacagctcacgtcgcggctctgttccgcccgcccttctctgatgggtcgcgacgttcaccggcagattttactacagcagccaacctcctcggtttcagggcacacttgaggcctcacgcctcgtttttggatcctaccgtcctgcgcctgaggctcctgtgccagcttctgctcctgtttttgactctcaggccgaggacactgctcttcgtcagttcgacactcaggatacaacagctgttgatgatgatgatgatgatgatgattttgggtcctcctccgcctccgcctcctatgcctccacgctcccatgatcatgaggctgggagttctagtgctgcccctgctgcccctccggctatggaccctgctcttgcttcgattctccagtctatcactcagcagcaggctcacctggcagccgagcagacccggttatccgagaggatgctctcgatgtttcagaacatacaggacaggcaggattcgcttcagcagcagctactccaggatcgggctgagagcagggcattcatggctcttatgctacagcagtctggtgtcttagttcctccggttcagtctgctccacctcctctgcttcacgctccagttgtgccagcgattcagtcaggaccccctattcccactgttggtccttctccgctccggccggtcactctggcgttcacgtcaccggttctcagctctgtctgccctcagccgccagtgccaccagcatctgctgttaccactactgttgtggcagtatctgtgacctcttctgttccggcagctcctgcagcgcggcctcagtccgagtcagtaccagctccagcttctacagcagatcctggatctgagactgactctgacccccccaccggcgttcgctctgctgcctcgaccgcgaccggatgcgcccccgccgcctcctcccgcttcagatgtttaggttcgg

SEQ ID NO: 12475 - DNA, 438 bp, Zea mays
  Peptide Sequence Number=SeqID_55850
atgggagagtgttggacccctagatatacagtccggacctccaaggttggtccaggacctcgacgtgtgcaagccgaacccctggaatgggatccggaccccccgtatggggtccgggccacccacaatggggtcccaaagttccaggatagaacatactcggaccttgaacaggacccaggcgggggtccaatgccgacacgtgtccggaccaagtgtgctggtgcgtacagtccacgatacgcgggccgcgctgttattcaccattacttgtacgtttcagccatcaaagctgcatggactgcggtcatcaagactcccgatgattactcaggcgttactggcattaattactcaaataatgtactccttccattatgctcctgggcccgcatgtcggggctcagcatccttgtatgtgcctcccttaaactataa

SEQ ID NO: 12476 - DNA, 414 bp, Zea mays
  Peptide Sequence Number=SeqID_55851
atggcttcgctagctcattctgaccgcttccagtctgaggtggcgctcaacctggcgaggccggattcggtcgtaccctacatctccaccttcagcggcgcaaggtgggaaaactggcgtggtgactgggtgatcgctagcgctgaggacaacgaccgcctcgtcctaccgagcaacgggccatccctcgatcgcaagcattggatgaccaagccatcgctatcgccagagctcctgcccgtactggacaggatcaagaccttggcaactggtggtctgacatccatgcatgtgatgttgcgcactttacccacaagccgtgatttccctttctgcccggagatcatgactctcattgatcactacaaaggtccttatggagaggcactcgagaaaccgctcgagtccccttaa

SEQ ID NO: 12477 - DNA, 714 bp, Zea mays
  Peptide Sequence Number=SeqID_55852
ccatttggagaggctgcaccatcacctgcacgaggagcaggagcgtcaacgacaggagcaggagcaggagatagagtctgtgaggagctgctcccccgtgcttcccctggaggcgcccctgcaccaccactgagtgccctagcccctggagtagctgttggaggagacccagacgacggaggtggcgacagcagcttgagccacgacaccgacctttccgccgaccaggagatggaaggatgggttgctcgacccatcactcgcgatgctgctcgcgggtgtcacttccacgacacgctcgacaccctgctatgtcgggcactcgaccggcagcactactctatctctgagcgggactcagctgaggcggccatgcaagatgccgcacggcgtgcgctttcgcactactgctcagtgctcggtggggtagctgatggtctcaacctaaagtactacccctgccgtccatctggcagcacaggaggtgtgattgtctcacctgttggtgaggacaatcctaggttgagcagcatagtcaacctagtcgtcgtgctaaacatggagctagaccatgcattagacgagcggagtagggctcgtgctgagatcgcccagctgcgggctgagcgcgcagagcgtcgtcacctggatgatggctcccccgctcccgtcgggactcagcacccgtaccgctcacctcggcgtggacactag

SEQ ID NO: 12478 - DNA, 762 bp, Zea mays
  Peptide Sequence Number=SeqID_55853
atggcgaaagggacctggggtctagtgcgctgtcatgctgggtttggtggctggttcggcctcaactcagtcatacaaacaggacagattctgggcggcttctggccgccagaagctgaagctgcgacgaaacgcgcctccgccgccgccaacgaacccgccgccgctgcgcacccaacggaccgccgccaggtcgatctcctacccgctacagccgagccggagagtcgtcgagaaggaaccttcttcccccgtcgtccgagcgttggctcactcacaccggcgacgtcgctccgtcttcctctgcttcccccgtcgcgtcggcatcttccgagatatccgtaccaattccgtgtctgcctattcgcttccaagatcaacagcagccaagcagactccatagccgacaaggcaattggaaggatgcaagagattgcggacaagatattttccgtagctcgggaaacaatccgtcccggacgcgggttgacctcttttgaggctaccaaacttcgtgtagcattggaggacattgcttgcatgcttgagcaagactctctggtgttgcaagagaacctggacatcgtgaacaacgtaaacaacccgggtgacagcaactacgaaccgtcagccttgtcctcaccacccccagctgacgagtacctaagtccagattgggactttgctgatcactttgcaaacttctggggtcttgaatatgactcggaccaaatgccatcgtttagtgataatgaagtttaa

SEQ ID NO: 12479 - DNA, 819 bp, Zea mays
  Peptide Sequence Number=SeqID_55854
atggacaagtctggcaaggtcattgctaagtgggatagtagagcaacaaaaatttacacagaaatatgtgtagaagaggtgaatgcacggaacaggccacaacaattcctaaacgccaaagggtatgctaacctgataagaaagtttaaggaacgcactggtcgcacgtacacaagggatcaaatgaagaataggtgggactcgttgaagagaatgttcacccagtggaaaactctaaatgaaagggctacaggaactaccatgttggtgcaggcaatgccaggttgtattatgttcaaaacagcccccctagagaatgaggacgagctaaaggttatgtttggacccattgtctacacaaatgaaagaaccctggttcctggagttgaggatgctaattcatcatctgatgatcatttggaagccactttaggtgggggtgaaaacagcacacctgacccctgcacaaatgctactgggaagcgtaagatgcgacatgattctccgaaaccaaagaagaaaaaagattcgagggaagagtacatgaaaagactagtggaggcttttgagtcgcgttcaatgaccactaacaagtccattacctctactgacaatgaccctgttcgacttgagattaaaaaccagctgcaacaagttatggatgatggatcaccagaaggaagccaactacatttgtttgccactcatctattgactgagaaaaagtatagagatatttttgcaaacttgcagacaaaagaaggaaggatcgcttggctttgcaatgcttacgagatagatcttaaaaagtgcacttag

SEQ ID NO: 12480 - DNA, 387 bp, Zea mays
  Peptide Sequence Number=SeqID_55855
atgtcgcaggcctggtcatcaactgcgcgctctcagcggcgaagcacagctagggatgtcgtagaacccagaccccttgctgttgttgctgcaggaactgtgcccattggcatcgatctggaggcgccgatcgatgatgtgaccgggttgccgttgataatgtgcccagattgcaaggatgggacatgtgataggttttggttcgaggaagaatatttggtgttccttcaggataatggatatctaccgtcagcatccttcaccattgcagcaggttcgacaaccaaggttcctgagctcgtgggaaaaattgacagcttagagcaaaatctgaacaaggtgacggaaatggaaatatgggccttcgtgctctggacgaatctctag

SEQ ID NO: 12481 - DNA, 264 bp, Zea mays
  Peptide Sequence Number=SeqID_55856
atggtatgcatgggcgacctaatttcattatgtggcttcaggaccgtgatgtcgccaaaatcaaagaagttagtgaaggggctgttcaagggcctaggcctttttcagggcagttctttgagcagcagcagacgtcgagagctgttgagcgcggtacatggagatgaggatgagcagcacactgaggagcagcacattgaggaggaggagcacaatgaggctgagcagcacaatgaggaggaattgggaggacctgtcctttga

SEQ ID NO: 12482 - DNA, 513 bp, Zea mays
  Peptide Sequence Number=SeqID_55857
atgacaacagtggctctcaacaccctacggaagcaaggagacgtcagcaggatcccagcagcaccgacagctgtgcttctacagggcttaggcacttctccgacggccacgttatcgcctacgcagggctcaagcacttctccgacagccacgttggcatgtacacagggctcaggcactttcctaccagacacgttagcgcctagctacaccccccattgtacatctggaccctctccttgcatctataaaagggaggtccagggccttcatgcggaaggtcgcgcgggagaacgagctaacgaacaggctcactctctctctctcgcgagcgcttgtaacccctactacgagcacacgcccctggtgcgagataacacgagccgcgtttcccccttgtgttccatcttgcgccaacccatccgggctgggacacgcagcgacaaatttactcgtcggtccagagacctcccggggtcgaaatgccgacagctgtattcactgttctattag

SEQ ID NO: 12483 - DNA, 1032 bp, Zea mays
  Peptide Sequence Number=SeqID_55858
atggaaaaaaccaagtatgaggtggcaagggacgagactgtaaagcatgttcaacaagtttttaattctttgggcattcatgtcttagcacagactgttagagatgttatttcaccaaaaaagaaagagggaagagggaaggctatatattctgacaatgattacgatccatgctctgacattgaaaaccaatctgacactgatgatgactatgatgatgacctcaataatgaggtcaatactgaggcgacacagatggttctaggaactcgccctcaccaaaagaagcaaaaggcaggaacaatgccggctgccaaccaccagccaccacgcacaccagtcagattgacaaggcaaagtgcagccatgccttcgcctggaggacgcccgccacctaagccaagacatcccttgcctcctaagaccacttcgaaagccacccctaaaagaaatgccatttccagtagtacccaacaacaggtccaggtccaaaggactggagctaggtcctatatagcccatcgttacagcctgaggactaagtacaacaacatggagccggatgctgttgatttctttggggaatgtatgaatagtccccaaaatggtcgtactccgcttgcaaatgagatatatgagcaaatggttgcagagaaggaaagagagctagaagaaggagaagcacaaaagtcaccctccaagattgttgctgatagtctcagccagatcagccgctcatccaccttccttccaaacattggtgtccctacaatgtccaagactggtcggtccacatcgctagctgcacaagcacacatgcaagctcagtttgaggaaaaactccaagctgaaagagaggaagctgctaggaagcaggaagagttgcaagcacaactacaagctcaacaggctgcacttgaagaaaaccaaagtttgctgcgccagacccaagaggaagtgaaggggatgcataccaagtttgaagagaccaatgcacttgtacgagctatcctgaaacttcagaaagattaa

SEQ ID NO: 12484 - DNA, 876 bp, Zea mays
  Peptide Sequence Number=SeqID_55859
atggtgcggttgcacgcctcctgcatggcggtccgccctttcgcctgctggtttcagcaagaatgggggaacgcttataaccgcggggtgcccgactgcattccctcaccaatggtcatccaggatgatgaccaccagttcggtggtggggagaagcaagccgggttgtggcctctaccccgccctcaacttcaaggatggggaagggcataccccagctctgcggaggaggcgtcctccagccatgcgggggaaggcgaactgctgcttcctggacagggacagtcccgttctcgttcttgtggcgagagcgggagtgaggacctgccggtgtgctttggggcggccgccgctcgctggtgcggtgttggtgggcaggtggccgttgtcgtcggtgctgaggtggtggtcgccataggtgaggctgcttctgctgaagcggttgcccctgctgacgagaccgtcagtgccacctgcgctccgggcctccgactctttggctttaatggctggttctcgtcccccgtgaggggacgtgaacgagggccttccagcagtagcgtttgccctggggccatcgctgttgttgtcttgccatccgagacggaggtcgttgccgcgctgttggtgcagcggtcaccggcgagcctcccggagtttgttgtcccgcaggccctctggtgtagaggttgttcatacccgcaggagtggaaccggagtcccaaccttcggccgctctgcgatgagccgaagccggaggcagcagtgtcggcatggacagaggcggagtcggctcgaaaagaggcttcatcggcccgggagcacgtggcttccctggctgaggaggtgcagcagcggtggctggagcttggctag

SEQ ID NO: 12485 - DNA, 543 bp, Zea mays
  Peptide Sequence Number=SeqID_55860
atgactgaagggcgccaacccccgcgagatcgtgctcctccaacagcagcaagacgaaggcaacatgggtgctccccatccgggggctcggaaggtggaagggcgcgatgcatgaggggagtgcgaagacatggctaccgcccaggggatcgacccctttttaaaggcggctctccccactcacatcctcaagcgtcacgggcaaagtcttcaccgacgtgctccgaggtcctcccctacgacacgggggctgggtcccacacgtcatgcaagctgaccagaaacggaagaagccaaaccactgcgcgcgaagcagggaccgggaaaggggatatttcgaaagggatccttctccacgaaggaagcgggccccaagccctcctactgatcaggggttcgaaggctagcccctcggaagggttcaacagccgcctcagagcactcgggctccaagccctcttactgatcaggggttcgaaggctggcccctcagaagggttcgacagtcgccctagagcactcgggctccgcgcccactactga

SEQ ID NO: 12486 - DNA, 221 bp, Zea mays
  Peptide Sequence Number=SeqID_55861
aggacctgggtgtagttcgcttagccgtggtgccgtcaatggggctcggtgtatgcggctcgctctgccaagcttgggttcgcccccttggggaggagtgcgagacactttggtttacaggtggcaatgagattgatggttctggttatgactatggtgctggcgaagatgaagctgtggaaggagacttccaggagttccaagactacgacgagttctag

SEQ ID NO: 12487 - DNA, 165 bp, Zea mays
  Peptide Sequence Number=SeqID_55862
atgaagcatttgagaacaagtccccaacaaatgggttccactgcattagagacagagctccttctgggacagcagcaccacacgacctcagctggcagacattccatcaaccaaagcctgtggttgaagacagataagcataagaaagataatttaccaatatga

SEQ ID NO: 12488 - DNA, 1995 bp, Zea mays
  Peptide Sequence Number=SeqID_55863
atgcagacgaagggggcccttcggtgcgccgctggtcagagcagtggtcgtgattttagtttgaagagttcgtggcgtacggggtctggcccttggcgccacggctgggtgctgggcgaagtatgccctcgccagatgccttttcacggaggcagggtggtgcgaagtcctgccttcgcactgaatttgcgaaaccgtgacccggccgcctttgtgcgtgatgcggaggacttggcggtgcggctcgtggggtgttatgtgccgaggacggaaggccagcgcagctttgacatccgcgggtcaaatgagcgtttgaacagggtcttcgaattaaatcaactgccgtacgacggctaccctgggcaagacgaggcggaccgccgtgggaagaagccggcggtggagactggaggcgaccctgtgctggcggccgccccctcctcaaaaaagagaaaattaggtactgcgatgggaggacttggggtgtctgatagttttgctagagagttaatgaggacgtgcgcggccccgggggaaaggatgtcttcgcccgagcttcgggagtcttcggctcggatgctgagggttaccgggggttgttggcctagaaatgttcctatcccctgcgcggctgaggaggactgttttacatctcgtatggttcatcggtggagagtttttccttatgggcgaaatatcggtcatgttgtgtgggcagtgatggacaaggatcgcgaaggggcggcgcgaaaacgccaggcgactgtgagggttcacgaagctcggccgaaaaggcagcggggaacggcgaaggctgaggcttccggcggaggcaagccgccgctgccggcgaaggtgggcgcctcagcgcctggcaaggcgccggaggtgacggtgggcgccggaggccccaagctgacgaaggtggtgccgtctgtcagcggagtggcggaggctgcgaaggcggcccgaacattaccgccgcccggcaaacgcgttgccgacttcggcaccgagattaatgtggaggattatcttggggggtcggacgagggcccacttgctctagttgtgcctggcgcggcgatcgcgacggctgcgccagcgccgaaggcagggggagagacccttggcgccggaggcgagatgtccgccctcgcgctggtcagggacgaggcgggcgtggcgacccgctggctggagggagcgacggaggcgttgaggcgggcgacggaggcgctgagtcaggtgactgacttcaccagccgcactgcgtcgggggcccttacggcagctttgtctgccgaggtcgagagactttggacgcagcatgctgacgctgtccgtgagaagtcggcctccgacagcaagtgccgcaaactggcggacaaggtggccgccctggagaaggagaaggctgacctccggcgccagctggcgggggagaggtgggaggccaacgaagccatcgccaaagagcaggctgcgcaggcggaggccaggctggcgcgggcggaaggcaatatcgccaaggagctcgctggagagctgcagcggcggcttactgccctggagagccgcgcggagggagccgaggccgcgatgcgagcggaggccgaacggacgcgcacgcagctcatgactgcatatcgcgagctgggtgtgcggacgggcgacttcgaggtgccagagcgagaggccgggcttcgctgtctggaatgggtgcaggaggaactgcaggagctccccactgtcttggcggggttaatgtcgttcacctccctggtcacctgcgaggcagcgatgaacgcactctctcgcgaagggtgtcggcacttcgaggccctcgaccaggcagatgaggattttgggcgagatatctttgaggtcgaagaccccgtggttaaggaatccgccggggccctctatgaccggatgtggggttcgcacggtcgagaggtggtcagggcgcgggccgaggctgcgagggctcag

SEQ ID NO: 12489 - DNA, 495 bp, Zea mays
  Peptide Sequence Number=SeqID_55864
atgggcaagagcaagaagggtggtagttcttcgcatcactccagtgataagcggaagcgtgagccgactcctccctcgaaggacttcggcgactcggagtactcggacgaggagttctcctccgagtccgagggttcaccggcccctgcctctcccccggcgtcgtctgatgactcagacgactcccaggggatcgccgcagagggctcggatgagtcggagtactcctcggacgaggagaactcctcggactcgtccaaggaggacgacggcggcgatggcggtgacggcgacgatgacggaggcgatggtgatggcggcggaggcgacagcaagagcggtgacggcggcggcaaaggtggcagcgggcgacggcggtggtggcagcggcaacggcagtggcggcagcaagggcagcagcaggggcagcaacaagggcagcagcaagggcagcaacagggccagtggctagatgccactggttttaaatattag

SEQ ID NO: 12490 - DNA, 402 bp, Zea mays
  Peptide Sequence Number=SeqID_55865
atgtcggtgtttgggtccgaccgcgcacctagggttgcccctcaaggtgctttttggtataggacggtgttatcgattgtagctcgatggccgtctgggcttgcgttgatccggtttattggacgtttccccccaggcccacgaagggatgactttgtggattattgggcccacgggcccctcgcgaggcatcttgtccttctggtggacccaggggatatctgtcccccacaagcccccgatgtttgggtcgattttgaaataaccggcccaaagatccaagatgtcagccttgcattagttttgccatatgctttagaggtcaacattttgtctttcggggacgattattcattgggtgcaacgcaggtgcacccaatgggtgtagcccccgagctttga

SEQ ID NO: 12491 - DNA, 285 bp, Zea mays
  Peptide Sequence Number=SeqID_55866
atggccatgatggattcaacatcggaaaagatgtacctctgccagacaatcgcgcactgggagtggagagatagcgagagtggcacataccctcctggcaaaggaccacctaaaaggggtggtgtgctctcgggtggcgtggacatgttcatgtggtggaggatccgtgggaatggttttaactttgtgctgctgttgatggtgttaagtgtcggtgggctcggccttcttataagtctaaggaactcttctatacttcttattgaggatgttcacttgagctag

SEQ ID NO: 12492 - DNA, 639 bp, Zea mays
  Peptide Sequence Number=SeqID_55867
atggcagtcggggtcagtgaggcattgtacgccaaggcggtgagccctgatctgctgacggggaatcgatggggacggttgatgtgtgtggggacggagttcctcgccacgtcgtacttcagggagctggttacacgacgccctcccccagtacacggtgcaactgttcgaagaagcaccgagtgccccgctgtagggactgaagacactatggaggcaattgctcttcatggactgatcaccttctgcggattccaccccttagagctgtccactcaccccattggcttgttccccgcagagaaggaggacgacccaatgtggaaggatcgagtggagcatgccaaggatatatgggatatctatctagggcagactgctcacttgacggtgcggtgcatgaatgccctgtatcgtctgcaagtgatgtgtggagaggcaatgtcccatctaatggcattgttggaggcaaccaagatcactttggataacagagaggaacttgtggagatcgaggacatggaggccaacgaggatgtcgacatcgagggaggagaggagcctgcctccagcttggacactgctggctcagggagaccaccttcccccgagtcgagtgttgcctcgtttgcccactag

SEQ ID NO: 12493 - DNA, 117 bp, Zea mays
  Peptide Sequence Number=SeqID_55868
atggctccaaggacggtggctggtgaatttcgaggagatgcgcggcggtcggaggtgacgaaggttatcggcttcgcgactacgtgtctaccgccgtggcgggctcaccggccttga

SEQ ID NO: 12494 - DNA, 393 bp, Zea mays
  Peptide Sequence Number=SeqID_55869
atggacggaagaaatatcgtcgaagaagacttgtcctgcaatgataggggccttgggacgttttggagattactcactgaatccttgaccagcttcttttgtcatgttggagatgttttgggcagtcgtgtagacgctccccaaaaacctaattgccgatcccccgtgcaaggtctcgaacggcaccggcttcggaggcacctgccctctcgcttctctgtgcgcgcagaatcacgagatggaaataccctcactcggcggctggactgtgattctgaaagtgttctcgcgcgcgtgtaccgagtgacaggggtgctcctctatttaacctctcgcagagggaagctgaaggagaaaggtcgccgagtcacgccaagagtcggccagctctag

SEQ ID NO: 12495 - DNA, 119 bp, Zea mays
  Peptide Sequence Number=SeqID_55870
atggatctatcaaaggccatgatgggttcaacatcggaaaagatgtacctctgccaggaccgtctcgatgtaggcttgatgatcgaggaccctttaactggtcacatgcctcgtcatgg

SEQ ID NO: 12496 - DNA, 252 bp, Zea mays
  Peptide Sequence Number=SeqID_55871
atgaagctgtggaaggagacttccaggagttccaagattacgacgagttctaggtgtgggttagcggcaacccccagtcggctgcctgtgaaggccgcgttatctacgtttcttttccgcactttgatttattgtatggtttctcaaaggtctgctgaagctctggattctacaagttgtgctggtcctgtagaatttgacggacctttgttaaatatcgagtctatttttagtgggcctcgtgtaccttag

SEQ ID NO: 12497 - DNA, 1212 bp, Zea mays
  Peptide Sequence Number=SeqID_55872
atgacgtgtgggacccagcccccgcgccgtaggaggaggaccttggagcgtgttggagaagactcagcctacgacggctggggacgcaagaacgcaactccgtgggagttggtacctttcagccatcattcggcttcaaggattttcatcgtgcagcccggttgcacccctccgccggcggtcacccaagatggtgacctccagttcgatggcgggggaaagcgaaccgggctgcggcctctgcccctccctcagcctcaaggattttcatcaccagggctggggaggggagtgtgccgagttggggtcggcccctgcgtgggcggtggcccgctccttccctcagtgattgggggaagggcggttgtcgtccgtggcgccggcagctgccgcgtgcctggctctcggacccgagtggcttcggagccgctctcggcgccggcttctgccacggcagctggaagaggttcttccactgacgagacagccagggccgcccatggaccgacctccaactctacggccttctgcccgtccttgcctcacgagtttgggcatgggcgggggcctcctggcagcggcatccgccctgaggtcatcgctgccgctgttcggccccccggagcagaagtcgtcgtcgtcgccgctgccgaagcgggcgacggcacgccgttcgtcggtcttccgttgctacgcaggcccccccgtcgagtggggttgttcgtacctgtggaggagtccctcggctcggtcagcattattgcccgaggcttctcttgctcagttaaaggaacccctcggtcgctcttcaatgagccgaggccaggggtagcggtgtcagcgcgaacagaggcggagttggctcgaaaagaagacctggtcggccggagcctagtcgggtcgtccgttagcgggatcgacgccggaattgacctgccgaggcctcgggccgggctgatgtccttggaggacagctggccgaggccccggggtgatgggccgaggcgcctgctcgggccggattctcggagaagaccctggcagcgatggcccgggcttggtgatgacgttgtccttcagagcagagacccttggaccgcgtcgccgtccgaggctaggtcgggcctcgccaaaggtgttgtcgacgccgggggccctgctgctccctttagccgtcaggatccgagcctgcaggatcggattatcttgtag

SEQ ID NO: 12498 - DNA, 1521 bp, Zea mays
  Peptide Sequence Number=SeqID_55873
atgccacagaataatgatgattcatgccttgcctatgtattaggagccatttctaatctattatcaaagataggcatctcaaacacagttggaataatcagttctccatattcacttgggaccaatattggactaggcacaccattatccattcagcaacagttacttgttcttttaaagcgatcactcaagagagctgatgcattgaaacttccaagtttactatcctttgatcacctttcgcttgcaaaatttgatctgaagcatgtccaaaggccactagtctctttcggccctaatgcatctacaaagcttagaacatgtcctgcagatgtctgtaagaatctaaggttaggttcccgtgtgttgactgactttggagcagatgttctatctacttcaaatgataatggtagttttagcacttcttggcttaggaatctatccgccacttctgattcatggcgtagcagttcaaagaacaccaaaaaaatacatattaatgacttcgacaatttccattatcatgcacaaccaagtccagtacctgcatcaatattgcaattagctggctcagcatatttgctgagagctaccgcttgggagcactatgggagttcatcagagttatcactagcatatgttaagctaattcaacaactggcggtgttcaaaggatattcagctgcattctgtgctctaaagcttgctgaaaagaagttcccatcctcaacaagtttacacatccagcttctaggaatgcagattctacatgagcgcgcacttcatcgagggcatctaaaagtcgcgcaacaaatctgtgatgagtttggggtgttatcatcttctgtttctggagtagacattgagctaaagacagaatttagtgtacggcgtgctcgcactctccttgccgcaaaacagtttagccaggccgcagctgtggccaattctcttttctctacgtgctacaagtacaacatgcaggttgagaatgcaagtgttcttttattacttgctgaaatacataaaaaatctgacaatgcggtacttgggcttccttatgcgttggccagccaatcattctgcaaatcattcaacttggatctgcttgaagcctcagctacacttactctcgctgagttgtggctggatcttggatcaagccatgcaaagaaggcactgagtcttgtctaccagagccttcccatgattcttggtcatggtgggcttgagctgcgtgctcgagctcacgttgttttagcaaagtgccatttatccgatctgaaattctcagttctcgaagatcctgaagctgttttggatcctctgaaccaagccactgaagacctgcaagcattggagtaccacgagatggcagcagaggcgtactatctgaaggcaatggcatacaaccatctcggcaagcttgatgagagggaggaagccgcggctcgtttcaaggatcacgtcactgcccttgagaccccgcataacgaagaggactcgcttaagtactga

SEQ ID NO: 12499 - DNA, 2412 bp, Zea mays
  Peptide Sequence Number=SeqID_55874
atgggcacccccatcctgaccctccccgcaccggatggcaacggcaccggtggcggcgacgccaaccagcagctgctgcaggcgccgccaaagcctccccctcccggcgcgaagacggaccccccggcgacggtggccacccacacgcgcaccatcggcatcatccaccctccgcccgacatccgcgtcattatcgagaagacggctaccttcgtcgccaagaacggacccgagttcgagcgccgcatcatctccctcaaccagggcaacgccaaattcaacttcctccagccctcggatccctaccacgcctactaccagcaccgcgtttccgagatagccgctacgccgcccagcgcggacggcctctcgggcgcggagactgacacggctcccgccgaagcgccagcgtcgaccccggccgacggcgccgccgccgtacccgcagatggcgccgctgtggacacaaaggccgaccactccgcgcccttccgcgtggtgccgccgcccaaggtgctggtgccacccaaggcggagctgtacacggtgcggctgcccgagggtatcacaggggaggagctagacatcatcaagctgaccgcccaatttgtggcgcggaacgggaagaacttcctgacgagcctggcacagcgcgagagcaacaacatgcagttccacttcatccggcccacgcacagcatgttccccttctttacggagctcacagatgcgtactccagggtgctgaggccggcagagggggtgcctgcactgctaaaagagctgagggaggggtcaaaggacctgactacagtgttggagagatgcttgaaccggttggagtgggatcggtcgcaggagcaggcaaggcagcaggcagaggatgaggttgagcaggaacggatgcaaatgtcaatgattgattggcatgattttgttgttgtggagaccattgaatttgcagatgatgagtatgaagggcttcctgtgccacttacattggaggaattgaagcgtcagaagaggatggagaacttgggagaggaggaagccatggatttgactgaacctgctaaggaggttgagatggagatggatgaagaggagatgcaacttgttgaagaaggaatgcgggcagcacagcttgaggagaatgatggaggatcacaagttaatgttgctggtgatgacgagacacctatgaggattgtcaagaactacaagaggcctgaggagaggattcctgccgagagagacccaactaagtttgttgtctcaccgataactggagagctcattcccatcagcgagatggaggaacacatgcgcatctcactcattgatcccaagtacaaggagcagaaagagaggatgttggctaagatcaaggaaactacccttgcacctgatgatgaaatttcacggaacattgttggtcttgctcgcactcgccctgatatttttgggactactgaggaggaggtgtctaacgccgtcaaggcagaaattgagaagaaaaaagatgagcagccaaagcaggttatttgggatggtcattctggtagcattggtcgcactgctactcatgcattatctcagattcagggtggtgaggaacagtttgatgcttccaatgttgatgggagacctgttcctggtccagctccacttgtccgacctggcatgccgctgccccgacctcctcagccacttcctcttgttaatgttcctcgttttattgctccaccagcaccatactctgttccacccccaggttctcatatgcctggagttccacagatgatgcctcacatgcatctgcacccacagcagatacctgggcaaccgccgatggttaggatgccaggtcaaatggttcatatgccaaccagcattcctccgcctcctggccaaactcagtttatgcctggtccaccaccacacacatttgctatgcccccatcatcgcacatgccacacatgatcaatcccattggaatccctcagcctccagcacccccactgcctccgcaacctcctgctgaagagcaaccgcctccacccgatgaacccgaacctaagaggcagagaacagacgatggttctcttatcccagctgagcagttccttgctcagcatcagggtcctgctagcatctctgtatctgtacccaacctcgatgaagggaacttgcgaggccaagttttgcagattcctgttcaatcactgtcagacacagttggtagtctgaaggagcagattgctggagagttacagctccctgctaataagcagaagctgagtgtgaggactagtttcctcaaagacaaccttactcttgcttactacaatgtgggtcctggagtggtgatcaatctaacactaagggagcgtggtgggagaaagaaatga

SEQ ID NO: 12500 - DNA, 543 bp, Zea mays
  Peptide Sequence Number=SeqID_55875
atggcgacagtagctcgagccatagcaccgacctttcagaggagcaggagctggaaggatgggttgcccgacccatcactcgtgacgctgctcgtgggtgtcacttccacgacgcgctcgacaccttgctgcgccaggcacttgaccggcgcacttggtctatcgagtatcgttgtgttgtcttctagcacagtcgtggggtttacccggaccactgggaggcgacctgcttggtgcgtcgtctggagaacagtcttcggggtgcggaggtctactcagagcactattccatctctgagcgggactcagctgaggcggccatgcaagatgtcgcacggcatgtcagacaacaagcgcagagggggaaggtgtgctcagcaggagcaggcagccccacaggatgaggcaccccagcaacagcagctaccacccccgcccccgatgaccatcgagcagatgttcttgatgcagactcaggcagttcaagccattagtcagactctggccgccattcagcagcagcagccaccacctcagccttag

SEQ ID NO: 12501 - DNA, 162 bp, Zea mays
  Peptide Sequence Number=SeqID_55876
atggggctcgatgtatgcgactcgctctgccaaggtggtgatgaggatgatggttttggttatgactatggtactagttgtccgcgttgcaaccactgctcaggtgaagatgaagtcgtggaggaggacttccaggagttccaagagtacgatgagttctag

SEQ ID NO: 12502 - DNA, 147 bp, Zea mays
  Peptide Sequence Number=SeqID_55877
atggccatgatgggttcaacatcggaaaagatgtacctctgccaggtgtggaagcaaccaacttttgttgcttctgttcaaaggtggtacccaaagaagagaactgttggaacttgctctctgcagcaagaaggccaacaagagtga

SEQ ID NO: 12503 - DNA, 2754 bp, Zea mays
  Peptide Sequence Number=SeqID_55878
atgccctttcacggaggaagggtggtgcgaagccctgccttcgcactgaatttgcgaaaccgtgacccggccgcctttgtgcgtgatgcggagggcttggcggtgcggctcgtggggcgttacgtgccgaggacggaaggccagcgcagctttgacatccgcgggtcaaatgaacgcttgaacagggtattcgaattaaatcaaccgccgtacgacggttaccctggacaagacgaagcggaccgccgtgggaagaagccggcggtggagactggaggcgaccctgcgctggtggccgccgcctcctcgaaaaagagaaaattaggtactgcgatgggaagacttggggtgtctgatagtttcgctagagatttaatgaggacgtgtgcggccccgggggagaggatgtcttcgcccgagctccgggagtcttcggctcggatgctgagggttaccgggggttgttggcctaaaaacattcctatcccctgcgcggctgaggaggactgttttacatctcgtatggttcatcggtggaaagtttttccttatgggcgaaatatcggtcatgttgtgtgggcagtgatggacaaggatcgccaaggcgcggcgcgaaaacgccaggcgactgtgagggttcacgaagcccggccgaaaaggcatcggggaacggcgaaggctgaggcctctggcggaggcaagccgccgctgccgacgaaggtgggcgcctccgcgcctggcaaggcgccggagacgacggtgggcgccggaggccccaagctgtcgaaggtggtgccgtctgccagcggggtggcggaggctgcgaaggcggcccgatcgctaccgctgcctggcaagcgcgttgccgacttcggcaccgagattgatgtggacgactatcttggggggtcggacgagggcccgcttgctctagttgtgcctggcgcggcgatcgcgacggctgcgccagcgccgaaagcggggggagagacccttggcgccagaggcgaggtgtctgccctcgcgctggtcagagacgaggcgggcgtggcgacccgtcggctgaagggagcgacggaggcgctgagtcgagcgacggaggcgctgagtcaggtggctgacttcaccagccgcactgcgtcgggggcccttacggcagcgttgtctgccgaggtcgagagacttcggacgcaacatgcggacgctgtccgtgagaagtcggcctccgacagcaagtgccgcaaactggcggagaaggtggccgtccttgagaaggagaaggctgacctccggcgccagctggcgggggagaggagggaggccaatgaagccatcgccaaagagcaggctgcgcaggcggaggccaggttggcgcgggcggaaggcaatatcgccaaggagcttgccggagagctgcagcggcggcttactgcccaggagagccgcgcggagggggccgaggccgcgatgcgagcggaggccgaacggacgcgcacgcagctcatgacttcatatcgcgagctgggtgtgcggacgggtgacttcgaggtgccggagcgagaggccgggcttcgctgtctggaatgggtgcaggaggaactgcaggagctccccactgtcttggcggggttgatggcgttcacctccctggtcacctgcgaggcagcgatgaacgcgctctctcgcgaaggctgccggcactttgaggccctcgaccaggtggatgaggattttgggcgtgatatctttgaggtcgaagaccccgtggtgaaagaatccgccggggccctctatgaccggatgtggggttcatacggtcgtgaggtggtccgggcgcgggccgaggctgcgagggctcaggcggagcgcggcgagcgggtggacgatttcggggcgctgaacagcgagctgcctgagtcggagacgacccctgcggaggccgcgactggagtcgccccgggacctaccccggagactgcggaagatgcaccgggcgctcctgcatctgccgcggccggcgaagaccttcccccaaaggtggccgaaggcgcgccagatgcccccgcagctactgtgccgagcgctgaggatccagcagaggcagcggcggaggctcccgcagcggccgggccttcgcaggttcaagattttgggcctgcgcacgcaaccgctaccactgagtttttggcggcttcgaccgcggaagatggaaatgaatgtggtgggtctgtttctgagttttttgatgttactgactctgggagctcggttgagtggactgaggagtcgtcggaggaggacttggattattttgcggccttggacgtggctgcggcggaggctgcaccacatgctgcggacgcgccaggcgtgcccggtcctagcaccgggcaccgacgacgaagggcggttgcaaagcgtaggattagtgcggaggaaggggctcggcttcgcgttagtagggctggccggcaggagctgctgtctttgccggccgcctcgggtgtaggggaaggcggttcctgcgatagacttcggatttttgcgcgtttgtgcttggtccggctgcaccttttaggcgacttctgcgcggatagtcttcgcgatagacttcgtttttgcgcacttgttgtgctaagtccggctgcacccttaggcgacttctgcgcggatagtcttcgcgatagacttcgttttttgcgcacttgttgtgctaagtccggctgcacccttaggcgacttctgcgcggatag

SEQ ID NO: 12504 - DNA, 126 bp, Zea mays
  Peptide Sequence Number=SeqID_55879
atggccatgatgggttcaacatcagaaaaagatgtacctctgccagagtcattgattattgataagccttaccttgactcccttaaagccagcatatccttgagagtcttttactttgtcgggtga

SEQ ID NO: 12505 - DNA, 989 bp, Zea mays
  Peptide Sequence Number=SeqID_55880
atgaacttgttcgcgggggtcggcggcggggcggcggacggtggcggcacaggcacggcgctcctggagctgacgccgcacaagatggcggtgtgccacctcgtgcaggtctttgcgccggcggcgcaggccgggggcgacgtcgtgccgcccttccccttcgagtccctcactcaccacaaccgcctcggactcttcctgtttacgctcacccggtcatgcgatgattttctggagcctccactggaagaatttttgaagcagctgagggcagtggatgatttgactaatggttggttctgcgagcagctgacaagtgccctgtcagcactcaactcacctgatgacttgttcaacttctttgataagctacgaggtgtgttcactgcaccagagggtgcgagtgcagaagatgtattcttggatccaaatagccaacttggagtatttcttcgttgctgcatacttgccttcaactcaatgacctttgagggtgtatgccatctgttggcagatcttgtcatgtactgtaactctgctgatgcttcatatgacctggcagaacatgaggacttcaatagtgaaatgggcaacttgatggatgcagacataggttcgcacgctggtatatttgacaaatttcatcagggttatgcctctgagcatcatatgggggagagttcttcaactttaactcgtgcatcaatgtcaccctatgactttgacaacgctaatacttttaaagcagatgacaacccaacctgtctgagatcaaggtggcaattagaggcatatcttaaccaacaagctgatattcttgagaaggatcctggatcagtgcctttgaatttatttaatgccactatgacacagcttcaaacattagctccggagcttcatcgtgttcaattcttgcagtacttgaatgctctttaccatgatgactatgttgcttcactggataatcttcaccgctactttgattacag

SEQ ID NO: 12506 - DNA, 489 bp, Zea mays
  Peptide Sequence Number=SeqID_55881
atggccatcatcttcaagagcaagatcaatctcaacccgggagctatgttctgcttcgaaaccatatcgtgcatagcggacatagagggaactctacaccgcatagcagatccacccaagaagagaccctcctcggaattccgtgagaagctaaagcaacctggagaactctgttgtccaccttgcccactaaggagtgggcatggatcactcagagaaaggaagggagattggagtcatcgcccatctccgacgatgaacctaccatgcagggggaggaacctccccagcgtgatgcccgacgatagagaaacagacgccggaatgtgcggcgacatcacgatgccggagaacgggacccagcacaacccgtatctcaggatgaaccctcagaaatgggagaaacacctgatgaacgagcacatcgagaaagacgcaactcccgccgccgcgatcgccgacagcctcaagaacgagagcgggaactag

SEQ ID NO: 12507 - DNA, 1242 bp, Zea mays
  Peptide Sequence Number=SeqID_55882
atgactgctcatcatcgcttagttatcctcgcgtcgttcgtgatctgcatcctccttcccgcccttccggctgatgccgaaagcctcccaggctttcgcggcaccatgatccgccgcactggtacaaccgccattaacttcacgcaggccgctcgagactcttaccgtcggctgtcatcccttgcctcccggtcctcgacgagccacttgaatagtagtgacaataacactcagagaatacccttaaggatggacgacagcggcggcgcctacgacatggagttctccatgggcacaccgccacagaagctgacagccctcgccgacaccggcagcgacctgatctgggccaagtgcggcggcgcgtgcactacgtcctgcgagccacagggctcgccttcgtacctccccaacgcgtcgtctacgttcgccaagctcccgtgctccgaccgtctgtgcagcctcctgcggtccgattctgtcgcatggtgtgccgccgccggcgccgagtgcgactacaggtactcttacggcctcggtgatgacgatcaccattacacacagggattcctcgcgagagagaccttcactctcggcgccgacgccgtgccgagcgtcaggttcggctgcaccacagcgtcggagggcggttacggctcgggctccggcctcgtcgggctcggccgcgggcccctgtccctggtctcccagctcaacgccagcaccttcatgtactgcctcaccagtgacgcctccaaggccagccctctcctgtttggctcactcgccagcttgacgggcgcccaggtccagtccaccggcctcctcgcatccaccaccttctatgccgtgaacctgcgtagcatatcgatcggctcggcgacgacgcccggtgttggcgaacccgaaggcgtggtgttcgactccggcacgacgctgacgtatcttgctgaaccggcgtactcggaggcgaaggcggcgttcctgtcgcagacgagtcttgaccaggtagaggatacggacggattcgaggcatgcttccagaaacctgccaatggtaggctctccaacgctgctgtcccaaccatggtgctgcacttcgacggtgctgacatggccttgccggtggccaactacgtcgtcgaagtggaagacggcgttgtgtgctggatcgtccagaggtctcccagcctgtctattatcggaaacatcatgcagtccatcacagtagtcggcttctaa

SEQ ID NO: 12508 - DNA, 84 bp, Zea mays
  Peptide Sequence Number=SeqID_55883
atgaagtgtgacccaggagagttctggtgccatgtttcagagttcctattttttgacttttcagttgttggtcttttaagatag

SEQ ID NO: 12509 - DNA, 297 bp, Zea mays
  Peptide Sequence Number=SeqID_55884
atggcctctcccgagttcagcctcgggcgcaacagggagctccgcctcgcccgatcccaggcctcggccttagcctcgacctcgggagaaggtctccgcctcgcccgatcccaggccttggcctcagcctcagcctcgggagaaggtctccgccttgcccgaccccaggcctcagcctcggaaggagtcacaacctcgcccgacctcagcctcggcctcaggagaagtcaccacctcgcccgacctcggcctcggaccgactacactacaggggatacatcattaccctacctctag

SEQ ID NO: 12510 - DNA, 534 bp, Zea mays
  Peptide Sequence Number=SeqID_55885
atgaggttgcgaagacaaaagcagaagacaagcacaaatggcagggtaaagaaccactgtcggcccctcttccgggcggtcgagcgccgttttgcctccgtcatgatgactgcctcaaaaaagggatcgggaaaaggaacatttcaaaggagcccttcacagcaaaagaaacgggccccgagccctcctactgatcaggggttcgaaggttgcgccctgtggggttcggcgaccgcccagagcactcgggctccgagccctttactgatcaggggtttgaaggctggcccctcgaagggattcgacagccgccccataacatgcagagttagggatgaccctgggtacgtccgttacatggccaaggctcgggctacgctcccgaggtaccctaagacatttccgagaccagcgggaacggtttgtaatgaaatcccaccaaagggtggtaccgagccctcggaccctatcgaatgggtctgggtccagcaaatcacctgcaggtacttttggagcacgcctctgggacactag

SEQ ID NO: 12511 - DNA, 107 bp, Zea mays
  Peptide Sequence Number=SeqID_55886
atgcagaagggagacatcccgtggcatgcaaaattggatgggggtagagatgtcaatggggacccgatacccgctaacccgtggggaattcccctattagggtacgg

SEQ ID NO: 12512 - DNA, 597 bp, Zea mays
  Peptide Sequence Number=SeqID_55887
atggagtgcgggttgatttctgagtttcccgagggctctttagcaaagagtacccgcaaatgggtatcgcagcatcccgccaaaacgggatcggatggtgacgcatcaacgccatacggtcgactgaccacccggcggcgcggtggcgccatcgccggtgcccgccaattctcagtttcctgctctcgaacttcaatcggaacactactatacgaagacagtactattgcgaatgcattgacgaggttcataccggaatccgagcggtgcccaggcttgcccgcggcgcgcagcggacgcacgacgacggtgagaaattctggagtcaccagtgcactccaggctccaagaccgcacacatcaacccccaaggaccccgccgagtaccgacgttcacacctcgagccaccggacaccggcaacacgaggagtagcaccggcggaggactacctaaatctgcgcgtgagcactggcggcgcttcggtttatgttgggatggcctcaggagttcgatgtggcttaacaggtgggtcttccgtctccaatttatccccgagccctcggtcaacttcctccagcgcggacttgccgattag

SEQ ID NO: 12513 - DNA, 267 bp, Zea mays
  Peptide Sequence Number=SeqID_55888
atgtgcgcccccctctccctctctctcatttggtttctcgcgcagcaactccctctccctctcttccacctctcccacctccttgccctaggtgatccggtggacggttatcgccagattttggatcccaagtaccttcggacttgtatcaaagagggagaagctcaaaagatacgaaggttgacacagcgccgaagctgtgaagcaggaaagcttcggcatgttcgcagaaaggggaaccgacttaaagatgaaaaggccatttag

SEQ ID NO: 12514 - DNA, 408 bp, Zea mays
  Peptide Sequence Number=SeqID_55889
atggagatcccccgcctgaagatcgacgacgagacgtcgcatctcctgcgcatcctgctggcgctgtggcgctggagcagagcaacctggcggaggcgggcagccatggtcgccgccgtctgcgtcctcttattcatgtccgccacgcttgcgcaccgcgtcgtcgacgtctctgcctttaccaccggccggctccaacttcaccgccctcgttcgtacacgacggtctacgacctgcagcggttcgccacctcccccgacagtccgagcctccaagatcgacgcggcggtggccgacggcgacggcgacgtggagtcagtagcccttgccttcacagattcgtagcagcaacgccgccgccggaagatctggactcagatacgacacttatgggatgtttgggttga

SEQ ID NO: 12515 - DNA, 666 bp, Zea mays
  Peptide Sequence Number=SeqID_55890
atggcaggggatcgggaaaagggacatttcaaaggagcccttcacagcaaaagaaacgggccccgagccctcctactgatcaggggttcaaaggttgcgccctgtggggttcggcgaccgccccagagcactcgggctccgagccctttactgatcaggggtttgaaggctggcccctcgaagggattcgacagccgccccagaacatgcagagtcagggatgaccctgggtacgtccgttacatggccaaggctcgggctacgctcccgaggtaccctaagacatttccgagaccagcgggaacggtttgtaatgaaatcccaccaaagggaggtaccgagccctcggaccctatcaaatgggtctgggtccagcaaatcacctgcagcctcgggcgcaacagggagctctgcctcgcccgatcccaggcctcggccttagcctcggcctcgggagaaggtctccgcctcgcccgatcccaggccttggcctcagcctcagcctcgggagaaggtctccgccttgcccgaccccaggcctcagcctcgggaggagtcacaacctcgcccgacctcagcctcggcctcaggagaagtcaccacctcgcccgacctcggcctcggaccgactacactacaggggatacatcattaccctacctctag

SEQ ID NO: 12516 - DNA, 378 bp, Zea mays
  Peptide Sequence Number=SeqID_55891
atggatgcagatggatgggactttgaagctacatcgaaatccgacagcgacctcaccgagcgggaggacgacctccagttcctcgttgacgaggaactagactccgacaccagcattggctggtcttggatgtccgacggagaatcatcggatgtggagtccttagacaacgacgacgacccgatgtctgggcattggatgggcatcagctcctgtgacgaaaaggatgacgatgacgagaacgacgacggtagcagtgacgacgacagcgatgggagtgacgacgatgacaatgatgatgatggcggggcaagccaaatatgcgatgagatgcctcccagcaagcgtcgtcggcttcatggtagcttattctggtaa

SEQ ID NO: 12517 - DNA, 543 bp, Zea mays
  Peptide Sequence Number=SeqID_55892
atggagatgcagagtggattgagaagtcaaacaggaatcgacaatagccaccgccatcaacaggacagggaaaatgatgaggtcgtagtcaaccatacctatggggctgatggacacattcggttggcgaagcgaatggaggctcaaactggagttgtcctaagaccaatcgatgcttataggcaagggcatagagcgaaaacagtgaaatctctgatgagctatgcagtcaagcggccgctgagcgtctggagacttacaggtaggagatggttagtaagtatggagaagactatgattggcaaggagtgcctaccatcgacgctgaagttgtgcattctattggaggaaaggcccatggacgtatattctatgtttattggtgtgatcgattcaacggagttgcggtctcgtggcggctctttgtcgcaggcgggttgtggtagtatccgtagtcggcgctcgagcatggaggaggctatgagggagcaacaagaaaggttttgtgaagagatgcaggagcagcaaatgacattcatctaa

SEQ ID NO: 12518 - DNA, 750 bp, Zea mays
  Peptide Sequence Number=SeqID_55893
gaaggtttagcaccaataaatttgatagttgaagacaagttccatcgtgctactcctggtggtactgggggtgtgaagaccataggaaattatgcttcgagcgagcaagtaaatgcaggcataaaagctgaatccttgttttgtgatagtattgtctgtacgacccttgcaattgagtattttctgcatgcttgtagccttgtaattgatgttgaaccggatgtggaatctgagaaagaagttgataataaactggaggatgagatgcacgaggatgaagatgataaacgatattcacctgagcctatacctcaacagacagataaccaatttgaagaggaagatggatccttttctccacagctaatgcatggcaacgaagatgaagatgcaattgatcatgaagaagacaaagctgagctgttcgacggtacccacgttcttaaagttaagaacgtgggagccgtcgaaacttacttctctaagttcgtccaaaaattgtcgtcggctatattcgtcggtacacccacgttcttacggttgtcgcctcctagtcggctcaggtgttgtctccgtcgagctctccgtgaagattgtggaggagctgcggtgttgattgtgagggttcacgcctacttcaccggagcggcaaagatcaagttgggtcttgatacaggagcaagtgagagcttgaagtccacctcaacgtggattaggggtgatcggcaaatcaccgataccacgggataa

SEQ ID NO: 12519 - DNA, 477 bp, Zea mays
  Peptide Sequence Number=SeqID_55894
atgaggcgaaaagacggcgggtatcccccatccgggggcttggaaggtggaaagacacgatgcataagggagcgcgaagacatggtcgccttccaagggggtcgccctccttttaaaggtgactatccctacttgcgtccccagccgtcacgggctgagtcttctccaacacgctccaaggccctcccctgcggcgcgggggccgagtcccacatgtcatgcaagccagctcagagcagaagaagccaaaccgccgggcgcgggaccgggaaagggggataccccgaaaaggatccttccccaggaaggaaccaggctccgagcctccctactgatcagagaggttcgaaggccggccccccgaagggttccacggccgcctcaggctactcgggctccgcgcccattactgatcaggggttcgaaggctggcccccgaagggttcacagccgcctcagacgccgagcgagggatga

SEQ ID NO: 12520 - DNA, 828 bp, Zea mays
  Peptide Sequence Number=SeqID_55895
atggctgaggacgcaaccatcgttcggcttcaaggattttcatcaggcagcccgaccgcatcccctcgccggtggtcacccaagacggtgaccaccagctcctgggtggggagaagcaagccgggctgcgatctcggtcccgccctcagcttcaaggatcttcatcatccttgctggggcggagagcgaggtgagccggggctctacctcccgcacgggtcggctggccacctcctcttccagcttctggtggtggaaaccatcctccagctctgcgaaggaggcatcctccagccatgccggggaaggcgaactgttactgcccagctaggatgcaacattccgtcctcctcctcgctttcgtggcaaggacgggagcgaggacctagcgctgggggaagcttccccaccgtcaaggccgtcagtgccgcctatggaccgacctccggctctttggctttaatgtctgaggtcgctggcgagccgcccggagcttgtcgccccgcaggctccccggaatccctcggctcggtcggccttgctgcccgaggcttctcttgcttagttaaaggaaatcctcggccgctcttcgatgagccaaagccggaggcagcggtgtcagcatggacagaggcagagttggctcagaaagaagactttgtcggccggagcctggccgggtcgtccgctggcgggaccgacgtcggagttgagttgccgaggccacgagccaggctgatgtcctcgggggacagctggctgaggcttcggggtggccggccgagccgtctgctcgagccggattcctggagaagaccctggcggtga

SEQ ID NO: 12521 - DNA, 153 bp, Zea mays
  Peptide Sequence Number=SeqID_55896
atgggcaagaacaacaagcgcaagcgtgagccaactcctccatcggaggagtttggtgactcggagtactcagaggaggacgtcagtgttttagagaggcaacgccgagtgatcggaaagcgatatcagcgttttagaggcaacgccgagtga

SEQ ID NO: 12522 - DNA, 717 bp, Zea mays
  Peptide Sequence Number=SeqID_55897
atgtcttcttcctccctcatgcatcgtgtctttccatcttccaagccctcggatggggggtacccaccgtctttccgcctcctcgttggaggaacgcaactccgtgggagttggtacctttcagccatcgttcggcttcaaggattttcatcagccggcccggctgcacccccacgccggcggtcacccaggatgatgaccaccagttcctgggtggggaagagcaagccgggctgcgatcttggtcccaccctcagcttcaaggatgttcatcatccttgctggggtgggggccaggctgagccggcgctcaacctcccgttcgggtctgcggcgtgtcgaagtcgtcggctgggctcccggcggcccctcctgccggagggcggctgccgcgccgtgtgcacgggaggaccacccacgatgccgcgcgctgctagggcggcgttcgtgttctggggtggccctgcttttgcactgggatggcaccctcacgcagaggccggggccccactcgtctgggaggatttgagtggggatctgccgggggggctggtggcccccgccatcagcgccgaggcagaggcggctcgagaagtcctcgtcgccgacgggatcaccgccaccatccgcgccccgggcctccggttcttcgtacttgtcctcgcccctcgagcgtcggcgtgggcgagggcaagattgcagcagcgcccaccctga

SEQ ID NO: 12523 - DNA, 489 bp, Zea mays
  Peptide Sequence Number=SeqID_55898
atgcaggaggcatgcaaccacgccaagtggacacgtttctccgactcccaacgcgccagcatggaggccccggcccacgcgtcacgcaaccggcgcgtcggatgctgcatgcaggcaattgcaccgccacttgcaccaccgtcgcgcctcttcggttgcggaaccaatgccgcgactcgaggcgacccagcgcacgaccccagcggcgccagcttggcacgacggtcaacgcggccaaaacgggacaggcggtgcttctggcaggagaagcgggcgacgcttcgccttcgccgtaataaccacgccaaaaaagggaccgggaaagggggataccccgaaaagatcgttccctatgaaggaaccgggctccgagccccccctactgttcagaggttcgaaggctggccctccgaggggttcaacagtcgcctcagatcgcgtgggccctacacccactactggtcagaggttcgaaggccggccccctga

SEQ ID NO: 12524 - DNA, 1326 bp, Zea mays
  Peptide Sequence Number=SeqID_55899
atgtcctttcgcagcatagtccgtgatgttagggaaagctttggtagcttatcaagacggagccttgaggtcaggatttctggtttgcctggtctgtctggtggtcatcatagagggaaatctgttggatctgtgagtgacctgcgcgacagacctgtagtagttgatcaaagcaggtgggttggtcttcctcctgaattgcttcgagatgtaatgagaaggcttgaggaagccgtctgtggaacatggagagagatatgcaaggatatagtgctgagcccggagttctgcgggaagctcacttttccagtatcacttaaacagccgggaccaagaaatggaataatccagtgtttcataaaaagggacaaatcgacatcaacttattatctttacctatgtcttagccctgttgtcctcagcgaggatgggaagtttctgctagcagctaagaggaatcgccgtacaacatatactgagtacatcatttctgtggatcctaaaagtatatcacgatcaagtgatggctgtgttggaaaaatgaggtcaaattttcttggcactaaattcatcgtgcatgacactcgagcaccacacaatgctgggagccttgtctcctgtgagcgcggcagccgcagaatctcctctaggagggtttcccccaaggtacccactgccagctaccccattgcccgggtgaactatgagctaaacctgcttggcacaagggggcccaggcgtatgaattgcacgatgcattccatcccagcctcaacgctggaccctcaaggcatggtgcctgagcctggccaacccaagcagatcttcgtccctggctcgtcgtccttcgaagattcctttcgcagtgcaaacaacaccccttccagctcaaggttctcggtcgcagaccgctccttggattggagctcctctcgattctcagagacgagcggattggctcagcaggacgacgatgacagtgaccaggctaaggagaggcctttggttctctgcaacaaggagccaaggtggcacgagcagctgcagtgttggtgcctcaacttccatggtcgggtgaccgtggcttctgtgaagaacttccagttgatagctgcaccacaactagattctgaaccgtcacagcaagctcagcagcaaacccagccttcgaattcgtcttcagcatcggatcatgacaaagtgatcctgcagtttggtaaggtcgccaatgacatgttcactatggactaccgatacccactctcggcattccaggccttcgccatctgtttgaccagcttcgacagcaagctggcttgtgaataa

SEQ ID NO: 12525 - DNA, 726 bp, Zea mays
  Peptide Sequence Number=SeqID_55900
atgcagaaactcaatgttagatgcaaccctcaggatattattataaccattaagatattgaatgagaggcaacgacaagccgttgctagaaaaggtttttccaatattcttgacatgacccttgatgcactgggtagccgatcttatcttctttggttgatggataagttggaccacaaggatatgacacttcgccccggtcaaggcaaggaactaaagattacgaaagaaattgtccaccttatccttggcctaccgaatgctggcggtggtaagccactaggcatcgatgaagcagtggcgggcaataacttgagggctgaacttggcttgcctaaggatgagttcgttgttgcatctcttcaggaccgtctgagaaaaggagacgacgatgacatctctatcatatgcttctttttgatattattcaatagattgttgttccccacttccagctggggcatatctaaccatgaggttttacttacggaagaaatggatcgtttccatgagacagactggtgccacttaatttttaacgacatctgcgaagctgctcaaaagtggcatacaagaagcactactaacgtgtccacgacgatatatggatgctcaattgtcatactattgtattatttggaccacttgcatgatgctgcagcccccacaacaaacgtggcacacctcgcatacaattttttgataaaaacattatccaagctctga

SEQ ID NO: 12526 - DNA, 766 bp, Zea mays
  Peptide Sequence Number=SeqID_55901
ctcctcctcgctctcgcgtttggctcactgccgttgggacccacttaccagtgctccactcgccggcctaaccaactgtgcggatcgcgcggcgattacctcggtggcagccggccaccccatgttccctcgcctcggccgttatatggagggatatgctcgatcaacctctaccattgccctcgctcgcctccagctatgcaattcgttgcacctcgccaccgccggttgcctgattggtgtgccgggatcggccatcgtcgccaagagtcgtgccaccgccctgaggtcgggaaggagtgacagggtgttcaccaaaccgtggggaacccttgcgcatactcagaccgaggagaccatcaccgaatcggtggggattgctcgccgtagttcgagctccgccgcgggcgcggacgagggtgtgcactcgagcgggcgagggcaaggcgcagatgaggtcgacgggctcgggcgaggcctagacgaggtcggcgggctcaggcgaggcgtagacgaggtcagcgggctcgggcaaggcacagacagggtcggcgggctcgggcgatggctcggcgcggattcaggttgcgcgagtgctgagacagggaatagaaaattaggggcctggggaggtgggtttcctcgagagaaggccctggagcgtttgagcgatgacgagaacaaattggagcctcaggcggagcacaccggggcaacagacacggcggaggatcaacggtggccgcggaacaaacccgagatcgcg

SEQ ID NO: 12527 - DNA, 129 bp, Zea mays
  Peptide Sequence Number=SeqID_55902
atgaccgttggtgaaggctgtttgtcgtatggtgcaccggacagtccggtgtacaccggacatgtccgaaaaacaattgagggaatagtaatagaagcagtagcaaagggccatgagcaacttgggtag

SEQ ID NO: 12528 - DNA, 408 bp, Zea mays
  Peptide Sequence Number=SeqID_55903
atggcgcttcctgttgacgtggctggcctgtgccctaggttgggcgacgtggaggctcctccgaagccgaggtcgagtctgtcttccatggccgaggccgagtccgagcccctgggtcggctttatgctgatgggggttaccagctgagaattaggagtcttgagggtacccctaattatggtccccgacaaggactaacttacccgaaaggggcaagggcggtagaggagctgcggtatagggaggttctcaggtcgatcatgctgcaatgtcttttcgaacgagggattcctatattgcccttctcagaaaccatagcgggctttctgaagctagtggaactttgtaaaggcctcgtagtgctaccctgcctcgtctccaaggcagagatgaataggaagtcatga

SEQ ID NO: 12529 - DNA, 255 bp, Zea mays
  Peptide Sequence Number=SeqID_55904
atggcccatgaaataatgaagaagagcgaaaaagatatccacgactctcgagaagcagcaaagaaagctgagaaagctgcagaacttgagagacggatagctaagctacctcctccaccggagccgttcgaccccctagccgatccggagacaaataaagtgatagaaatcattaatatggccgaagctattatcgacgaagttgttaccgaactgcttaacgaagctgcagaaaaagttctgaaggaagagtag

SEQ ID NO: 12530 - DNA, 1227 bp, Zea mays
  Peptide Sequence Number=SeqID_55905
atgcaggcggcatgcaaccgcgccaagtggacgcgcttctccgactcccgacgcgccagcatggaggcccaggcccacgcgtcacggaccgggaaaggggataccccgaaaaggatccttccccgtgaaggaaccaggctccgagcctccttactgatcagaggttcgaaggctggccccccgaagggtttcaacagccgcctcagatcgcgtgggccctacactcactactggtcagaggttcgaaggccggccccccgaagggttccacggccgcctcaggctacccgggctccgcgcccattactgatcaggggttcgaaggctggcccccgaagggttcacagccgcctcagacgccgagcgagggatgacaagggaatcccatcagagggaggcatcgagccctcggaccccgtcgccaggggaccgggtccggcagatcacccgcagctcaccggagacaccatgttcggcgcccatcgagggctcgggggctgctctcgcaaatccggctccggccgaaccgttgacagcgtcgacataccagcccgagaacttgggccccgaccatacacccgggctacgaccagttcgcatgagggaacaaccagaccagccgaagcattacgcaaggcattaagacctcggaggaatgaaaccactcctccgaggcctcgggggctacacccggcgggtgcgctcacgcgcacccaccggaacaaaatgcaaccgagaaaggctggtccccttgcaaaaaagtgcgacgaaagcctccaagcgagtgctaacactcccttcgaggctcgggggctactgtcggggaccataattaggggtaccctcaagactcctaattctcagctgggctcggactcgggctcagccccagaagacgacgaactccgctccgcccgacctagggctcggactcgggctcaaccccagaagacgacgaactccgcttcgcccgaccccagggttcggactccgcccaggcctctgccgaacgacctccgcctcgcccgacccaggggctcggactcggcctcggccatggaagacatactcgacctcggcttcggaggagcctccacgtcgcccaacctagggcgcaggccaaccacgtcaacaggaagcgccatcatcaccctaccccgagctgactcgggccgcagagaacaagaccgatgtcccatctggctagctccgccagataggcaatga

SEQ ID NO: 12531 - DNA, 564 bp, Zea mays
  Peptide Sequence Number=SeqID_55906
atggggctgtgtcttcacccagttctgcctgtggcctgggctattttatcttcaactgcgctttatgatattcggctcactctcgagcttgtatcccccgcattggtagcttcaattgtggacacttcctctctatgccccctgccggattggtcgacctttacgactgagtattccggtaatcttgctggagttgttcatgctaaccagattgagggagacttaatcggtcttgcactggtggggttaacctgtcaaacacagatagatgtttgttatgcccccaggcgaggagtagtggcatgctgtaagagcatggcggtatgccccgcattttatttgggatatatgtcagatgtgcgaggtcatttttggtggctcgtcgcgggggatgaggccaaccgatgctggtccagatcgtccggtctcaagccaagactgtctggtcgtgcgcaggagcacgatttgttcccaaataggtggtcgaggatgtggatggccattataggagttcataggcatcccataaaggggctgggactgggcatgctcatttacaactaa

SEQ ID NO: 12532 - DNA, 834 bp, Zea mays
  Peptide Sequence Number=SeqID_55907
atgtcttctcgctcccttatgcatcgcgtctttccaccttccaagcccccggatgggggatacccgccgtcttttcgcctcatcattggaggaacgcaactccgtgggagttggtacctttcagccatcgttcggcttcaaggattttcatcatgcagcccggctgcacccctccaccggcggtcacccaagatggtgacctccaacttgatggtgggggaaagcgagccgggctgcggcctctgcccctccctcagcctcaaggattttcatcaccagggctggggaggggactgcaccgtgcctggctctcggacgcgagtggcttcggagccgctcgcggcgccggcgtctgccacggcagctggaagaggttcttccaccggtgagttagccaaggccggccacggaccgacctccaactctacggccttctgcccgtccttgcctcacgagtttgggcatgggcgggggcctcctggcagcagcatccgccctgaggccagtgctgccgctgttcggccccccggagcagaagtcgtcgtcgtcgtcgtcgccgctgccggagcgggtgacggcgcgccattcgtcggtcttctattgctccgcaggcccacccctatcgagtggggttactcgcctgttgattatctgaaccgcttcaccaagcatgagtcgccccgtgtcaaggtgacgagtgagagtgaggatccctggaccgcgtcgccgtccgaggctaggtcggacctcgttgaaggtgtcgtcgatgccgagggtgctactgcccctttccagcgtcaagacccgagcctgcaggatcagagtgtcttgtag

SEQ ID NO: 12533 - DNA, 396 bp, Zea mays
  Peptide Sequence Number=SeqID_55908
atggcgcggggcccacacgccagggagagggggtggctgacggagttaatggcacgaagaagggagggggggctcgaccgcggtccggccggcggcgagtcccgcggcggttctccgccatgggtccggttctttggcggggaggcggtggcaaagcacgagcgggtgaagggggtcacgggggtggggcgaattttgcctgtgggggcctatggcggccggtccgcggcacggtggcgggtgcccgcggcggtgatgccgccggtgaggttgtcgtccacattagagtgggagaagtggcgccctgtgatcgtgagagtgtggcggagcttcgagcatagcttaattggacagaggatcgctagagagggggaagggagctcaccggagcgatga

SEQ ID NO: 12534 - DNA, 495 bp, Zea mays
  Peptide Sequence Number=SeqID_55909
atgacggtggcaggcgggcgggagcagcggtcacgtcgtcagccaagctcacgtcccatccgggggcagcaagagaaccccctctcacggcgtgaagacaacgcgctcgtgatccgttcctcgaacggctcgcgcacgcgcaacggccgccccgtcgcattaactccgcggtgggacaggcggcgcctctggcaggagaagcgggcgatgcttcgccttcgccataatgaccgcgtcagtaaagcagggaccgggaaagggggataccccgaaaaggatccttccccaggaaggaaccaggctccgagcccccctactgatcagaggttcgaaggctgcccccccgaagggttcgacagccgcctcagatcgcgcgggccctatacccgctactggtcagagctcaccgaagacatcatgttcggcgcccatcgagggcaacatggcgctttcccccctcctccttgcggaaaggcgacgcaggggcgtatgtaa

SEQ ID NO: 12535 - DNA, 810 bp, Zea mays
  Peptide Sequence Number=SeqID_55910
atggaaggaattgatgccaaggtcacggtatctcgcccgcgcccccaccaacctcgagcccgcccgccaccaatctcgctgccgggtgcccttccttcctcggctcccccaaatgctgtcaagtcccccaccaacgccgcccttccttccccggtagcccacccccgccagattcacgctccgcgcgcccaccagccgcgcgagccgccgccgggatacccgccaccaatctccgccaccagtttcgcgctccgcgcgtcaagagcagccgtcacagtgatgccgcacgagggtttgatccctctgcttgatgtcctagcaaacaaagtgaaggctatcaggaggcttagggaactcttgacagccaaacttcatatctgtcacgtttccagtcaaggaacatcttgtgaggacgagatgtggttctatgactgttgccgtgtacggagacggggacaagccagcgcttataacgtacccggatgtagctctgaactggggctcaggctgtttcctgagtacctctccgttgtccgcattgtaaccactgctcaggggaaggtgaagccgtggaaggagacttccaggagttccaagactacgatgaattctaggcacgaggtcagtgatgctggttcaatccctgtgataagagtcctacagatgggagcagctccaatgtcgtcagatgtgccggtgccatgtgttgctgatctcgctgatcaagtcgcagatgtgcttcatttcttcaggttgagggaagaagttttgttgaagtcccctcttagtgtggtggagattagcaaatga

SEQ ID NO: 12536 - DNA, 429 bp, Zea mays
  Peptide Sequence Number=SeqID_55911
atgggcaagaacaacaagcgcaagcgtgagccgactcctccatcagaggactttggcgactcagaatacttagagaaggagttctcctctgagtctgaggggtctccggctcccgtctctcccccagtgtcgtccgatgactcggacgactctcaggggattgccgcggaggtctggacttacatccgggccgtcgagcgctccgggctcgagggctcgaatgagtcagagtactcctcggacgaggaggactcatccaaggagggcggcgaaggtgacgacgacgacgacgacggaggcgacggcagcgacgacggtgacggcggcggcaggggcggtagcggcggcggcaggagcggcgacgaccgcagcagcaggggcagcggcggtggcggcaacagcaagggcagcaacaaggccagtggctaa

SEQ ID NO: 12537 - DNA, 555 bp, Zea mays
  Peptide Sequence Number=SeqID_55912
atgaacgcgctctcccgcgaagggtgccggcactttgaggtcttcgaccaagctgatgaagattttgagcgagatatctacaaggttgaggaccccatagtgaaggaatccgccggagccatctacgaccggatgtggggtccgcacggtcgcgaggtggtcagggagcgggccgagacggcgagggctcaggcggcgcgtggcgacagggtggatgacttcggggcgttgaacagcgcgctgcctgacccggagccgatcccggcggaggccgtgtccgggtccgccctggagccgcccccggagactacggaaggcgctccggatgcccccgcagccgctgaggccggcggagacccgcccccagagaccgccggaggcgctcctgatgctcccgcagccgctgcggccgacggagacccgcccccagagaccgccgaaggcgctcctgatgctcccgcagccgctgcgccgagggctgaggatcctgcgacggtggcggcggaggcaacagcggaggctcccgcgatggctgggtcctcacaggtggcgtag

SEQ ID NO: 12538 - DNA, 312 bp, Zea mays
  Peptide Sequence Number=SeqID_55913
atgcggagttcgccatcttccggggctgagcccgagtccgagccctgggtcgggcgaggtggagttcgtcgtcttccggggctgagcccgagtccgagccctgggtcggacgaggcggatcgactgaaaggcgcgcgtcaggataaggtgtcaggccacctttgcattaaatgctcctgtgatacggttggtcgttgtggcgatttggccaaggttgctccttggcgaagactgggcctcgggcgagccgaaggaggagatgctggcaacatggaggactttgaggagttcaaggactacgacgagttctag

SEQ ID NO: 12539 - DNA, 2091 bp, Zea mays
  Peptide Sequence Number=SeqID_55914
atgccgacctcctcttcttctgctgccactacgccgccggccgacgcctcttcggtggatttcggcgtgtcgcggatgtcgtcggtccgcgtgcaagatatgcagcggctgggttactttggcggcggagtcgcttgtgtcccggggacggaggaagtccccgagccggaaggcgagttggttctgactccgaatgtcgtggtggctctgtcaaagtatgtctgggcaacgacttcgtacggcggacagccatcagtcgaagtctttgcgaagtactattgcctgcactggcagaagaggatgattggagatgaagttgcccagtttgggtctttcgcggagggtaccgttgaagaccatgaggggctccccgtgtccgagatgtgttcgcatttttactcagcatacccgccctttgaggtggcggaggaggatgcggacgaaggggcccttcggtgcgccgccggcctgagcagtgggcgcgatttggttgaagaatttgtggcgtacggggtatggcccttggtgcatggctgggcgttgggcgaagtgtgccctcgccagatgccttcccatggtgggaagatggtgcgaagtcctgccttcgcgctgaatctgcaaagccgcgatccggccgcctttgtgcgtgaggcggaggatggggcggtgcggctcgttggtcggtacgtgccgaggacagagggccagcgtagctgggatatccgcgggtcgaatgaccgtttgaacagggtttttgaattgaatcaaatgctgtatgacggctatcccggccaagacgatgtggaccgccgtgggaagaagccggtggtggagactggagacgaccctgcgccggcggccgccccatcctctaagaagaggaaattaggtactgttatgggaggacttggggtttccgatggttttgctagagaattgatgaggacatgcgcggccccggggggaaggatgtcttcgcccgagctccgggagtcttcggcgcggatgctgagggttaccgggggttggtggcctaggaatgttcctatcccccgcgcggccggtgaagacttttttacatctcgcatggttcgtgaatggaaagtgtttccttacgggcggaatattgctgctgttgtgttggcagtgatggacaaggatcgccagggagctgcacaaaagcgccaggcggttgtcaggcttcatgaagccaggccgaagaggcagcggggggctgcgaaggctgcggcccccggtggaggcaagccgccgctggcggcgaagtcgggcgtccctgcatctagcaaggcgccggaggcagcggcaggcgccggtggttccaaatcgacgaaggctgtgccgccgttcagcagggtgccggaggtcgcaaaggcggcccgagtgttgtcgtcgtcaggcaagcgcgtcgccgactttgccaccgatattagtgtggacgactatcttggtgggtcggacgaaggccaacttgctattgttgcgcctgccgcggcgaccacggcggctgccgtagtgccgaaggcgaagggcggtgctcttagtgccggaggcgagatgtcggcactcgcggctgttagggatgaggcgagcgttgtgtcccgccggctgaaggaggtgaaggaggcactaagtcaggcggctgacttcgccgaccgcacagcgtcgggggccctcacagcagttgtgtctgccgaagtcgagagacttcggacgcaacatgctgacgccgtccgtgaaaaatcggccgccgacagtaagtgtcgcaagctggcggacaaggtggtcgcactggagggggagaagactgacctccagcgccaactggcaggggagaggagggagaccaacgaggccctcgccaaggcgcaggctgcgcaggcggaggccaatctggcgcgggcggagggcaatcttgccagggagcgcgtcgagcagctgcaggagcggctcagcgccctggagagccgtgaggagagggccgaggccgcgacgcgcgctgaggctgagcggacgcgcaaacagcttatggattcataccatgagctgggcgcgcggaccggtgacttctaa

SEQ ID NO: 12540 - DNA, 165 bp, Zea mays
  Peptide Sequence Number=SeqID_55915
atgccccgtgccgtgcccccgccgcgcccccgtcgtgcccccgccgtgccctcgcccgcccgccacctcgcccgcgacccgccgtctcgcccgcgacccgtcgtctcgcccgcgaccaaacctccaaggtttaatattgagttaattatatacgtgtatgattag

SEQ ID NO: 12541 - DNA, 3321 bp, Zea mays
  Peptide Sequence Number=SeqID_55916
atgccgacctcctcttcttccgctgccgctacgccgccggccgacgcctcgtctgaggagacgctgagtagtttgatggcagaggagttgcgcgccggcgattctgtggattttggcgtgtcgcggatgtcgtcggtccgcgtgcaagatatgcagcggttgggttacttcggcggcggagttgctcgtgtcccggggacggaggaagtccccgagccggagggcgagttggttgtgttcgaggcgttcttcgcctgcctgcacaccgatttgttggcgaagtcctgcgcagtctttgcgaagtattattgcttgcactggcagaagaggatgattggagatgaagttgctcagtttgggtcctgcacgtttacgccgaagaccggcaagaccacgatgcaggtagtcgagttggttccttgcgcccgcaacaagtggggcaactggaatgagttttggttttacgttgctgagggtaccgtcgaagaccatgagggactccccgtgtccgagatgtgttctcatttttactcagcgtacccgccctttgaggtggtggaggaggatgcggacgaaggggcccttcggtgcgccgccggcctgagcagtgggcgcgatttggttgaagaatttgtggcgtacggggtatggcccttggcgcatggctgggcgttgcgcgaagtgtgccctcgccagatgcctttccacggtgggagggtggtgcgaagtcccgtcttcgcgctgaatctgcaaagccgcgatccggccgcctttgtgcgtgaggcggaggatggggcggtgcggctcgttggtcattacgtgccgaggacagagggccagcgcagctgggaaatccgtgggtcaaatgaccgtctgaacggggtttttgaattgaatcaactgccgtatgacggctatcccggtcaagacgatgtggaccaccgtgggaagaagccggtggtggagactagagacgaccctgcgccggcggccgccccatcctctaagaagaggaaactaggtactgccatgggaggacttggggtttccgatggttttgctagagagttgatgaggacatgcgcggccccggggggaaggatgtcttcgcccgagctccgagagtcttcggctcggatgctgagggttaccggggattgttggcctaggaatgttcctatcccccgcgcggctggtgaggacttttttacatctcgcatggttcgtgaatggagagtttttccttacgggcggaatattgctgttgttgtgtcggcagtgatggacaaggatcgccagggagctgcacaaaagcgccaggcggttgtcaggctcgttgaagccaggccgaagaggcagcggggggctgcgaaggctgcggcccccggcggaggcaagccgccgctggcggcgaagtcgggcgtccctgcatctagcaaggcgccggaggcaacggcaggcgccggaggctccaaatcgacgaaggctgtgccgccgtccagcaaagtgccggaggtcgcgaaggcggcccgagcgttgtcgtcgtcaggcaagcgtgtcgccgacttcgccaccgatattagtgtggacgactatcttggtgggtcggacgaaggccaacttgctatagttgcgcctgccgcggcgaccacgacggctgccgtagtgccgaaggcgaagggcggggctcttagcgtcggaggcgaggtgttggccctcgcggctgttagggatgaggcgggcgctgtgtcccgccggctgaaggaggtgaaggaggcactaagtcaggcggctgacttcgtcgaccgcacagcgtcgagggcgctcacggcagttgtgtctgccaaagtcgagagacttcggacgcaacatgctgacgccgtccgtgaaaaatcagccgccaacagtaagtgccgcaagctggcggacaaggtggccgcactggagagggagaagactgacctccggtgccaactggcgtgggagaggagggagaccaacgaggccctcgccaaggagcaagctgcgcaggcggaggccaaattggcgcgggcggagggcaatattgccagggagcgcgccgagcagctgcaggagcggctcaccgccctggagagccgcatggagagggctgaggccgcgtcgcgcgcggaggcagagcggacgcgcaaacagcttatggatacataccatgagctgggcgcgcggaccggtgacttcgaagtgccggaccgagagcccggacttcgctgcctggagtgggttcaggaggagttgcaggcactccccactgtcgtggaggggtttatgtcgtatgcctccctggtcacctgcgagggggcgatgaacgcgctctcccgcgaagggtgccggcacttcgaggtcttcgaccaagccgatgaagattttgagcgagatatctacaaggttgaggaccccatagtgaaggactccgccggagccatctacgaccggatgtggggtccgcacggtcgcgaggtggtcagggagcgggccgagacggcgagggctcaggcggcgcgtggcgagagggtggatgacttcggggcgttaaataacgcgctgcctgatccagagccaatcccggcggaggccgtgtccggggccgccctggagccgcccccggagaccgtggaaggcgctccggatgcccccgcagctgctgcggccgtcggagaccttcccccagagaccgccgaaggcgcgccagatgcccccgcagccgctgcgccgagtgctgaggatcctgcgacggtggcggcggaggcgacagcggaggcgacggtggaggcaacggcggaggctcccgcaacggctgggtcttcgcaggttcaagattttgggcctgcgcacgcaaccgccactactaaatttttggaggcttcgaccgtggatggtggtaataaatgtgatggttctgcatctgagttttctgattttgctgactctgggagctcggttgagtggactgaggagtcgtcggaggaggacttggactactttgcggccttggatgtggctgcggcggaggcttcaccgcacgttgcggacgcggaagatgtgcctggtcctagtaccgggcgccggcgacgaagggcgattgcgaagcgcagagtgagtgaagcggagggaggtcggcttcgtgtgagtagggctggccggcaggaactgttgtctttgccagtcgccgtaagtactggtgaaggggaattgcgaagtctttttgcgggtgaggagcttaggataatgttatttaattatagggagatgggaatcattcctaaggttgagccgatgtag

SEQ ID NO: 12542 - DNA, 219 bp, Zea mays
  Peptide Sequence Number=SeqID_55917
atggtggtggccccctgggtgaagtaccttagccaagaatacgaccccatgttctgtgggctgccagcacctaccgctccccctcttgcccatctttcaggtacaaacagaatatgcagagggagaatccacttgccttgctcaagcgagtcctgcggatcgtcttcgaacgagttcggatcgtctaccgcacaatccgcttctaatagggtcgcatag

SEQ ID NO: 12543 - DNA, 804 bp, Zea mays
  Peptide Sequence Number=SeqID_55918
atggctatttttgacaaaaatgggggttgtgtggcaattgatattcgaccagaggctcgtaaatctcactacacatacgtttccttgccatatatcacattcttggatttatggtggagaccatttcttggtcaaaaatccatcacattcttggatttctggtggagaccatttcatggtcaaaaatccgtaggtgttagccttcgcattattgaaaatggttgttcatggctattttcatcaataatgggggttgtgtggccatttatcatcgaccagaggctcgtacacctcaccccacatatgtttccttgccatagatcacattcttggatttctggtggagtccatttcttggtcaaaaatccgtacatgttagccttcggtattattgaaaatggtcattcatggctattttcgacaaaaatgggggtagtgtggccatttatcattgacaagaagctcgtacacctcaccccaagtatgtttccttgccatagatcacattcttggatttctggtggagaccatttcttggtcaaaaattcgtatgtgttagccttcggtattattgaaaatggtcgttcatggctatttttgacaaaatgggggttgtggccattgatcatcgaccagaggctcgtacacctcaccccacatatgtttccttgccatagatcacattcttggatttctggtggagaccatttcttgggcaaaaattcgaatgtgttagccttcggtattattgaaaatggtcattcatggctattttcgaaaaaatgggggttgcgtggccattga

SEQ ID NO: 12544 - DNA, 255 bp, Zea mays
  Peptide Sequence Number=SeqID_55919
atggcagaggagcagtcccaaaaccggttgaaccggtttcgggaccggttgaaccggtttccagggctgaaaccaaattttgagtattttgaagagaacaaaaatggagtttttgtgggaacaaaaacaaataaaaaggggtatactggtcactttgtcgagtgtaacactcggcaaagagactttgagacagctcccacttctgttgctacacctgaagatggatctggtcaaggcgacgcctcagcttcttag

SEQ ID NO: 12545 - DNA, 453 bp, Zea mays
  Peptide Sequence Number=SeqID_55920
atggtgctagaaattcagcaaagattacagttatccggcatcgcgaagtcctgcccgatgcacgaccgcgggcccaggaagaaggacagcagcgcgttcaggtgcatcgcggccctgcctatgccgtcccggaactggagcgggttgaacgcgccggcgtccgcgccccacacctcctcgtcgcggtggagcatcgcgatcgggatcagcaggagggtgcccttgggcaccttcacgccgcagtggtccgcgcccgtcgtcgcccgcctcacgatcaacggcaccgcgctgtacagccggagcgtctcgtacaacaccatggtctcgtggatccggtgcgggcatggcggagggcgttgccatagggccctttaccatcggagggagcacgcttgcggcttgtgcgaggccgccagcgtgggcacaggcttccatgcgacgccctgctcctag

SEQ ID NO: 12546 - DNA, 141 bp, Zea mays
  Peptide Sequence Number=SeqID_55921
atggccgccgcgccgctgccatcgcagaacctggagctggagctggacttgtttcacctccatcccgatccaccctctccttccgtcttcctcgacctcccgcccacgccttcgcccactacctggacgacgacgacgatg

SEQ ID NO: 12547 - DNA, 213 bp, Zea mays
  Peptide Sequence Number=SeqID_55922
atggcggtgctctctggtcaggcgcggacggtccgcggcctggggccggacggtccgcgacctggcgcaggggctagggtcctctgcctgacggccagacggtctgtgccctggggccggacggtccgcgcatacgcagaggcggcggaagtcaccggcggcagcctggatctcgctcctggaagggaccccgtcggggaggagagatcctag

SEQ ID NO: 12548 - DNA, 270 bp, Zea mays
  Peptide Sequence Number=SeqID_55923
atggcagtttgggccttagagtgcgaccctctgctgaagaagttagtgctttggttgcttcgattggagaaattctcgatgatgaacggcaagtccactttgagaaaaagaaaaagagacgtcttcgacaagtatctagtttggatcggggcgctggtccttcggttcctgctgctgaggaggttcccgtgcctgaatttactgacgctgaccccaatgggtgtggcattggtggacaggatggctagtcagctgaggtcgcaagcttga

SEQ ID NO: 12549 - DNA, 213 bp, Zea mays
  Peptide Sequence Number=SeqID_55924
atggaggacgctatgagggagcagcaagaaaagtttcgtgaagagctacgacaacaacaaatggcattcctcaaagagcaatcagagtacatggctgcttacaacgcacaggcgcaacaagcaatgaacaatccaaacccgttacacgacttcgtcaacgagtttttcgcttctggaggtagtggacacaactccaacgaccccgatatgtga

SEQ ID NO: 12550 - DNA, 744 bp, Zea mays
  Peptide Sequence Number=SeqID_55925
atggagcttggcggagggacagctgtcggagcggttgagtccttgctgacatcctcttgcttccgtaagggggctgagagtcgccgtcatcacagagcatgcagggcgccatcattgcctatctggtggagcgagccagatgggacgccggtcttgttccctgcggcccgagtcagctcgggctcctccgaagccgaggttgagtccgagcccccgggtcgggcgaggcggagattgccggctggtgccggggcggagtccgagccctggggtcgggcgaagcggagttcgtcgtcttctggggccgagcccaactccgagccctgggtcgggcgaggcggagatcatcgtcttctggggccgagcccaagtccgagccctgggttgggcgaggcggagatcgtcgtcttctggggccgagcccaagtccgagccctgggtcgggcggagttcgccgtcttccgggacttagcccgagtccgagccctgggtagggcggagttcaccgtcttccgggacttagcccgagtccgagccctgggtcgggcagagttcgccgtcttccaggacttagcccgagtccgagccctgggtcgggcagagttcgccatcttccgggacttagcccgagtccgagccctgggtcaggcggagcggagttcgtcgtcttctggggccgagcccaagtccgagccctgggtcgggcgaagcggagcttcctatggtgcctccgggagggcctga

SEQ ID NO: 12551 - DNA, 516 bp, Zea mays
  Peptide Sequence Number=SeqID_55926
atgggggagatccgccgtctttccgcctcgtcgctggggggaacgcaactccgcgggagttggtacctttcagccatcgttcggcttcaaggattttcatcatgtagcccggctgcacccctccgccggcggtcacccaagacggtgaccaccagcttgatggtgggggaaagcgagccgggctgcgatcttggtcccaccctcagcttcaaggatgttcatcatccttgctggggtggaggccgggctgagccggagctctacctcccgcgcgggctcgtgggtcaccctctcccgcggcgttcgagggagagggcgctcgctggccctgcgggcgggtcggacttcgacaacgcggggccggtcgacagcaggcgtcgtcagccccagcgcgtcgggctcgtcgggtttgcccccggtgccccctcccgccggaaggtggctactgcgccgtgtgcacgggaggaccgcccaagatgtcgcgcgctgctagggcggcgacgaatctctagatcg

SEQ ID NO: 12552 - DNA, 231 bp, Zea mays
  Peptide Sequence Number=SeqID_55927
atggacttcggcctcgcttccgctgtcaccacgctctggacctgcaccgatgtcacgcacctcatgcacgtgctcctgcagttccgcctcgcctggtgcgacaagctaatctgttatgcccgcgccgtcgccgcgcactacgtctgctccgtcaagggcctctgctttgacctcttcatcattaggggtggaaacagagctttcaatgcatgctggaggtgcacgatgtga

SEQ ID NO: 12553 - DNA, 159 bp, Zea mays
  Peptide Sequence Number=SeqID_55928
atgaccctcgcaattgactacgatgagcaaacccaaggcgccaatgacgagtgccctagtggccagggtgtcacgctccacaagatcgtgacagccataggaggtggtgtatcggttgctaaggcgcagcgtctttggaaggctgtagtcgggccgtga

SEQ ID NO: 12554 - DNA, 123 bp, Zea mays
  Peptide Sequence Number=SeqID_55929
atggcccgccgccggggtgggtctggcgtagtggccctgcgccgccgggggggcatgggtggtgtctggggtcgctttgatccaaaagcaagggccacgattagaggatggggggatcggtga

SEQ ID NO: 12555 - DNA, 249 bp, Zea mays
  Peptide Sequence Number=SeqID_55930
atgaacacgctctctcgcgaagggtgccgacactatgaggtcttcgaccaagctgatgaggacttcgagcgcgatatctacaaggttgaggaccctgtggtgaaggaatccgcgggagccctctacgaccggatgtggggcccccacggtcgggaggtggtcagggagcgggccgagacggcgaggggtcaggcggcgcgtggcgagagtgatgtgcacccgttgggtgattgcccgatctttcgatga

SEQ ID NO: 12556 - DNA, 276 bp, Zea mays
  Peptide Sequence Number=SeqID_55931
atgtggagtaattacttttctgggaattcagtgccccatggatgtgtacgggtatacagacatgagaatactgagaaatgtaatgtacttgtaacgacgcacctacgctcaggaaaactgggctgtaatggaattttcttcaggtacactaacctcgaaaacgacgagtgccctagtggccagggtgtcacgctccacaagatcgtgacagccataggaggtggtgtatcggttgctaaggcgcagcgtctttggaaggctgtagtcgggccgtga

SEQ ID NO: 12557 - DNA, 1788 bp, Zea mays
  Peptide Sequence Number=SeqID_55932
atggccttactacactcggcgcggtaccagcagtccctgcgatgctaccacgcccgaggggctcggatcttgacagttgaagggagcagcaacaccctcggcgtcaactacaccttcggcgaggtccgacctagcctcggacggcgacgcggtcggaggatctccactccgaaggacgacatcagcaccacgcccgagccattgctgccagggccttctccaggaatccggctcgagcagacggctcgggccggtcaccccgaagcctcagccagctgtcccccgaggacatcggctcggcttgcggcctcggcaactcaactccggcgtcggtcctgccagtggacgacccggccaggctctggccgaccaagtcttcttttcgagccaactctgcctctgttcgtgctgacaccgctacctccggcttcggctcatcgaagagcggccgaaggccccgacagccacaatgaacaaaacaccggcattcaaggtgccattacaaatggaactccggtttcacctccgcgggtacgaacaaccccccacattggggggcctgcggagcaacagaaggccgacggatggctcgtcttcgcccgctccagcagcggcgatgacgacgacttctgctccggggggccgaacagcagcagcgatgacctcagggcggatgctgctgccataaggccctcgcccatgccctcactcgagaggcaaggacgagcagaaggccgtagagttggaggtcagtccgtgggcggcaccggctatctcgtcggcggagaaacctcttctggctgccgtggcggaaggtggtgccggaagcggctccgaagccactcaggtcagagagccgggcacgcagcagctgccagcgccacgaacggcgaacgcccttccccccgatcactgagggaaggagcgggccgccgcccgcgcaaggacccaccccaactcggcgcactcccctccccagcactgatgatgaacatccttgaagctgagggaggggcggaggctgcaacccggcttgcctctccccacccagggccgggccgcctgatgaaaatccttgaagccgaacgatggctgaaaggtaccaacttccacgaggttgcgttctccaacgacaaggcgaaaggattgcggccatcgcgggctgagtcttctccaacacgctccaaggtcctccccctacggcacgggggctgggtcccacgcgtcatgcaagctggcccagggcagaagaagccaaaccgccgtgcgcggtgcatgcaaccgcccagcggttacaagcattcctccactttcgcccagaccagcgggcccacacgtcatgcaaccggcgtgccagttgctacgtgcgagcaacttcaccaccactcgcgccactaccgcgcctcctcgactgcggaaccagtaccacgactcgaggcaaccctgcgtatgatccaacagcgccagccaggcgcatcggtcacgggccagtcagccgcgggagaaggcacgatggtcgatgcggccaaaaatgggctggcagtaatggcggtggcaggtgggcagaagcagcggtcacgtcgccagtcgagctcatgtcccctcgtgggacagcgagagaaccctctcccacggcgtgaagacgacgcgcccgtgttccgttcctcgaacggcccgcgctcgcgcaatggctgccccgcgaaccactcgccccgttgcattaactccgcggcgggacaggcggcgcccttggcacgagaagcgggcgacgcttcgccttcgccataa

SEQ ID NO: 12558 - DNA, 1647 bp, Zea mays
  Peptide Sequence Number=SeqID_55933
atgaagtacgtgctggtgaccggcggcgtggtgagcgggctcgggaagggcgtgacggccagcagcgtcggggtcgtcctcaagtcctgcggcctccgcgtcacctccatcaagatcgatccatacctcaacatcgatgccggaaccatgtctccgctcgagcatggcgaagtgtttgttttggacgacggcggtgaggtggacttggaccttggaaactacgaacgatttctggacatcaagctgactcgtgacaacaacataaccacggggaagatctaccagtctgttattgacaaggaacgtagaggggattacctaggaaaaactgttcaggtgaggaacgcttatcagaacagagatttcctatgcttttctgtagccacggaaaagatgcccactgttaccttggctttacaaattagagttcattctctttatcaggttgtgccgcacatcacagatgaaatacaagagtggattgaacgtgtggcaatgaatccagttgatggcacagaagagccagctgatgtttgtgtcatagaacttggtggcactataggggacattgaatcaatgcctttcattgaagcattaggtcaattttcataccgtgtagggcctggaaacttctgcttggtgcatgtcagtcttgtaccagttttaaatgtggttggtgagcagaaaacaaagcccacccaacatagtgttcgcggacttagaggacttggactcatgcctgatattttggcatgccgtagtacacagccacttgaagaacatgtgaaagtgaagctcgcacaattttgtcatgttccggaccagaaggcccatgaagctattttgaaagtgttagacattcagtgtgtgggtaaagttgctcgagaaccccagttgtctgaatggactgaaagagccagcagatgtgacagattgaaatctccggttaggattgctatggttggaaagtatactggcctgtcagattcctacctatctgttatcaaggctcttttgcatgcgtcggttgctttggacaggaaacttgtggtagactgggttccttcctgtgatcttgaagattctgcagcagaagagaatcttgatgcctacgaaaaagcatgggaattgttaaagggtgcagatggtgtgttggtgccagggggttttggagacagaggagttcaagggaaaattctggctgcaaaatatgcgcgagaaaacaacattccatatcttggcatttgcttgggcatgcaaattgcagtgattgagtttgcacgttctatcatgaagttgcacggtgcaaacagcacagagttcgatccaaccacaaaaaccccatgtgttattttcatgccagagattatcgaactgccaactcataggtttttcgtcggtgcacaatttcatcctgaattcaagtcaaggcccggcaagccatctccgcttttcttaggattggtagcagcgtcatcaggtcagcttgatcacctgctccaacctggtcttatcagttcgactggcagacacacctgcagcaaaggaggagcgcaaaaattaaaggctgggcacgtcatgaagccactgaatggcctggtgaacgcacactattcagcaaccggcaatggcgccattcccatctag

SEQ ID NO: 12559 - DNA, 618 bp, Zea mays
  Peptide Sequence Number=SeqID_55934
atgcggagttcgtcgtcttccgaggctgagcccgagtccgagccctggggtcgggcgaagcggagttcgtcgtcttccggggctaagcccgagtccgagccctggggtcgggcgaagcggagttcgtcgtcttccagggctgagcccgggtccaagccttggggtcgggcgaagcggagtttcctatggcgcctgaggccggacttggctgctgtcagcctcactctgccgagtggcacaacagtcggagcggcgcaggcggtgctgtcttcttgtcaggccgtttgccatggcactggactggccgtcaaattaataaaagaccagggggctcgggacaagaaacccgagacacaacgcatagtgacaatggacggcgggttgattttaatgaaaccgaggggctattttgcagttttggctcagcgaaggggtaagctctattctgggccgtttgatcaacaatgcgcggcacagatcagatctaacttaaccgaaatgttaagcgctgctagccgctggatccaagatccacggccacggtttaatgaatctagagcttgcctgagccgaaggatggcgaatctacggtgcccgtttgattgcgcgaatgggtaa

SEQ ID NO: 12560 - DNA, 144 bp, Zea mays
  Peptide Sequence Number=SeqID_55935
atggagtccgcggacagctttgacggggctcacccggagatccagcgggattctgttgacatcgcccccgcgaaggtcggcttggtggttgaagacgggcccgacatcttggccccacgcaataaaatcgagcatgatacataa

SEQ ID NO: 12561 - DNA, 207 bp, Zea mays
  Peptide Sequence Number=SeqID_55936
atggagaagcggcctcaggaactcttcagcttcgggaaaagccaacggctcgtcagctataattcaccggacatgtccggtgtgcaccggactgtccggtgtgactccagcgcaacggctatcccgcgccaacggctacctgcagaggcattaaatgcgccgcagcgcgcgcagacgtcagtttcgccctattcaccccccctctag

SEQ ID NO: 12562 - DNA, 543 bp, Zea mays
  Peptide Sequence Number=SeqID_55937
atgcggtcgcagcggctcaggctcttcctcaccaagaggaacacaaacaaagctcagatgctacttcatgtggagttggtatgtaggatgattatcacgagtacttcaagcgctcatttgaggaagacatcgctgcgcaagtgcctcaaggagtggaatgtctattgtgtagttgcaaaggaatccgcttcaaagaatgtctcagtgacatttcttgagaggttaaaagatgacttcatgaagagatactatagtgtgatgtttgttgttccgtatctatgttttataccaacttttttacttctgttgcaacgcatgggaacatacctagtcaacatatacgaaccatacattctcgtgctagcaaacacaaagacggagagcagcgtgctgggcccatggcattggcctcaagagagcccaattaactatctagtggaccaagcaaaggccgagcacaacaaaaaagaaattatatacaacctcggagtcgtcttggagctggaggcccagttcgaggatgtttttgttgagaaaccctaa

SEQ ID NO: 12563 - DNA, 1632 bp, Zea mays
  Peptide Sequence Number=SeqID_55938
atggtgggtacaagtgcggccactgcacgacggccagtcggggtcagtggggcattgtacgccaaggcgatccgagggattgacgggttattcccatttaagtgtggtctagcctctgaggcgggacttggacacttaagttggaataattcgggcagttccgccacagcagctgtgtctgccgaagtcgagagacttcggacacaacatgctgacgctgtccatgagaaatcggcctccgacagcaagtgccgtaagctgacggacagggtggccgccctggagagggagaaggctgaccttcggcgccaactggcggcggagaggagggaggcaaacgaggccatcgccaaggagcaggctgcacaggcggaggccaacctggcgcgggcggagggcaatcttgccaaggagctcgccgaacatctgcaagagcggcttaccgccctggagagccgcgcgaagggggccgaggccgcgatgcgtgcggaggctgaacggacgcgcgctcagcttatcgatacatatcgcgagctgggcgcgcggaccggcgacttcgaggtgccggaccgagagcccaggcttcgttgtctgcaatgggtgcaggaggagctgcaggaactccccactgttctggggggttttatgtcgtacgcctccctggtcacctgcgagggggcgatgaacgcactctcccgcgaagggtgccggcacttcgaggtcttcgaccaggcagacgaagattttgagcgagatgtctataaggtcgaagagcccgttgtgaaggaatctgtcggggccctctacgacccggatgtggggcggcgcgcggcgagcggggtggacgacttcggggctctgaacagcgcgctgccggacccagagccgacccttgcggagggctgtgactggggttgccctggagccaacctcggagaccgcaggcgatcgcgacggctgcccccacatcccgctgcggccggcgaagacctgcccccgaaggcggccgaaggcgcccctgatgcccccgcagctgctgtgccgagtgctgaagatccccgcggcggtggcggcggaaacaacggtggaggcagcggcggagccaatggcggagccaacggcggaggctcccgcagcgtcagggccttcgcaggtggcgtagttcaagattttgggcctgcgcacgcaaccgctactactgagtttttggcggcttcgaccgcggaaggtgggaatgaatatggtgggtctgtatctgagttttttgattttactgactctgggagctcggttgagtggactgaggagtcgtcggaggaggacttggattattttgcggccttggacgtggctgcggcggaggcttcgccacacgccgcggacgcgccagacgtgccaggtcctagcaccgggcgccgacgacgaagggcggttgccaagcgtagggttagtgccgaggaaggggctcggcttcgcgtgagtagggctggtcggcaggagctgttgtctttgccggccgccgcgggtagaggggaaagggaactgcgaagtctttttgcgggtgaggagcttaggataatgttatttaattatagggagatgggaattattcctaaggttgagccgatgtag

SEQ ID NO: 12564 - DNA, 387 bp, Zea mays
  Peptide Sequence Number=SeqID_55939
atggcacccaagagagctagctcgaaggcagccccatccgttgacgaagcagcgaaggcagcgctgttggccgagaaaaagggcaaggcccttgtcgacgtcacccaccacgaagcctgcgaagacgacgcactcagcaagagctccagaggacaaccgcaacctcccccaggcttcgctccaccggagggcgcggacgccactgaggatggcgaagtcatcggcgtttcagcagaagaacaactacagctgcgggccttgcgcatcaagaaccgcaacctccagaagcaaaaggagatcctcgaggccaagcgccaacatgtctctgtgcaggccaaaggtgcgccagatgatacacgacgaggagcagaaggctcaggagcttga

SEQ ID NO: 12565 - DNA, 822 bp, Zea mays
  Peptide Sequence Number=SeqID_55940
atggagggcaatccggttctaccctcggatgctggtgaaggcccctcggccatgcccatgccccctatggccggcgaagaccctgtgttggcccctgcgccggcggtcgaaggtgccttggaggtggtggctgagccagcagtcgaagaccccacggctgccggtcgtgccttcgcagggtttgagctgcacagcaacccgctactaacaatgctaattttgtggcggcttcgaccgtggtttttgaaaatgattcggatgattctgtgtctaagttttttgagtatgatgattccgggagttcggttatgtggacggaagagtcttcggatgaggacttggattattttgcggccttggatgtgggctgcggcggaggcttctccgcgtgtgatggatgctgaaattcttcctggtccgagtgctgggcgtaggcggcgaagggcggtggcgaagtggagagtgagtgaagtggagggtggtcgtcttcgtgtggacgaggctagcaagcgggaattgttgtcctcgctggttggggcgagtctaggtgagggggagttgcgaaatctttttgagggtgaggagttgaggataatgttgttcaactacagggagatgggtatcataccgaaggttgagccaatgtcttcgccagattgtgttgttaatctgtacgcgctgggagacaacttcgtcttgacgataaatggtccttcccactttggttccagcttgccccgtgactctgtccgggttggcgaagacacggtctacgtcaatgaggtctttggaagttggttcatcgatgtcgggtactactga

SEQ ID NO: 12566 - DNA, 1713 bp, Zea mays
  Peptide Sequence Number=SeqID_55941
atggctagcccatcttcagtaaacaatgtcaactatgatccaaagacagacaaagcaaggaaggctagctcaaatgatccaggttggaagtatggttattgggcaaatttggcaaatagagatcaagtgacatgcaccctttgtgacatcatagtttccggagggataaaaaggctaaagcaacatctagcaggtggctatggagatacaaagatatgttcaaagaccactactgcaattagaaaggagatgagggattacttggaatccaaaagaaggaaaagagctattttcctagatgataatgagcaacaagaggaggaagaggatgtaatggtggtggatgtagcagctgaatctgttcaagttcaacaagatgcacctatagaatccgaaggctctaaggtacaaccaagttcagggactgcagccaaacataagcatgcaacctatctgtacaaggatacaacatcaatcaagaccaaggcaaatcaagcaagcaagaaaaagtcaattgtggagatgcttcggaaatcacctgaagatgtatttgatgaaaggcgtaaaggtgtgccatttaatgcagcagcagcaagacaatttcaggttgcagttgaggcaactgcccagtttggttcaggctataagcctccatctccatatcaacttgggcagccattgcttaaggatgctgtgaaattgacaactgatttattagggaagaaaattgaagagattgggaaagaaaaagtggttcaggttatcactgataatggggctaactacaaggcagcaggtaaggaggcttgtgatattgtgctctctatggagttttggaataaagttgaagattgtcttagagcttctgcccctctcctcattgtacttagagtggttgatggtgatgagaaacctgcaatgccagaggtcgcagcactaatgaaacatgcaaaagagaagatcaagctaagctttgctattgatagcaagaaaagcttacttaagagaatcatagacatcactgagaaacggtggatgaaacaaatggaccatcctttttatggggctgctctttatttgaatccaggaaaattgcatcctctcattcgagatgatgatgatgcaactgttgtccaactaagaggttgtttccttgatgtgcttgcaagaatggtggatgatgaagaaacaagagacaagattgatgctcaattcttagactatgaagctcttagaggagaggccttctcaaacaaaatggccaagaacaatctggagacaatgaacccacattcaaagatccatacaaagaaacgtaataggttgctgcataagagactgaatgatattgtctatgtttcctacaaccgaaggatgaagactaggtttcaaataaggcgtgagaagaaagggaaaggttttgaccctttggtcattgaagagttcgattgggataatgagtgggctgattcctcctatgtgcagcctcaaggtgctcgtgggtgtaattgtggtgaggatgagaatggccttacatgggaacttgttgatcaagctgtgggtgcatcaagctcgctgcgaggccgaaatcttccaaggaatgccaacaagcgtgcaagagtttcacactcaaggtttgacttcgaagaagattttggttcagccaatgaagaagaggagtgtggcggaactgcccgaattattccgacttaa

SEQ ID NO: 12567 - DNA, 723 bp, Zea mays
  Peptide Sequence Number=SeqID_55942
atgacggtgatgccatcgagtacaccatcggcagcggcagaggagaccccagctgtgtccgccgctgccatcgaggtcgacacagggggcgcgtccagctccaacccgccgcccactccggtggagatagaggtgatttttgggcggtggctctggtccgatgctgagccagaagcagcaccagttcccctcccccgggtgctgtcccgcgcccaccaggccctccaagagaccgaggcggcgatcctgctggagtgggaggcgcttgaggctgaacaccagcgcctcagcgactggcgtgcccagctggaggagcgcaccaaggcagcgtcctgccagttcgcctccgagcggtccgagcttgagcgggactgcaaggactacaggaaggacctcaagaaggtgttcgctcgggagctggaggtgacccggaaggagaagaggctggccaagaaggagttgcacttggaccaaagggaggagcgagagctcgatggcaaggcccgcgatgctgcccttgccgaggagaagctcaaggtgaaaggtgaatccttggacaggcgggaggcggacctcgccagtcgggcagcggacctcaccaggcgggagaaggatatcgccttcaagaaggaaatgcttgaaaggcgggagaagtcgctggccgagcatgagcttgaggtggaagaaaaggagtggacgctggaggagcgggtccaccagtaa

SEQ ID NO: 12568 - DNA, 825 bp, Zea mays
  Peptide Sequence Number=SeqID_55943
atgggcagtgggccacatggcaacatcggatctccgcctgagtggggagcagaagtgtacacgacatggtctggacacgtgtcggctctggacccccgcctagtcttgattaaggtccaggtattctttgtcccagaatcccgagaccctgccgtgagtggcccggaccccacacagaggggtccgggacccaccccaggggttcggtttgtacccgtggaggtcctggaccttgcccggaggtctggtctgtatatgcaggggtccgacactttcccatgggggtccggacccactgtttataccttggaggatttcgtcttctctagccacgtggcggccccggagccgtccacgtggtggggtcgggtgctgttcgcctcgcgactagagatagccgcgtgggcaccacgtcttcatactgtacctcgaggagacgcagtactggcacgtgcggcagttcgtcttcttcgcactaggagaccgacgcccaaggagtatgactcatgggcccgggcccccgtgtcagagactaggtcgtttgtttcttgcgacggagatgaagaggcacactaccgcgggcggcggtttgcttttcgggcgcgcgcggtggttcgccttcttcgcacccaggaactgacacccaaggagcatgactcgtgggcccgggcgcccgtgtcagcgactgggccattgtttttggcggagatgaaggggaacactatcgcgggcggcggttcgctcctcgtggcggttcgccttctcagcactcagaggcccgcattccatttgtatgacttgtgggcccgggcccccgtgtcatag

SEQ ID NO: 12569 - DNA, 372 bp, Zea mays
  Peptide Sequence Number=SeqID_55944
atggtgacgcgatgggcggcgtcgcggcggacggcgggtggagcgatggtagcaggtagcggcgcggcggctagggttcagcagcaatgtagcggccagccgagcagggatgaagtcggattggagcgctgccgcacgctgactcgcgggtttgggctcggcatcgggcatcggatgtcttcctcctcaaggttgtcagtaagaatttggcccacagccagggttacctcagtttcatttcaaaaaattgaccccaacctcggcgccatcataattggtgccgaagtaacgtatagtggcgccgatataattggcgccagctatgtgtacgagggaggcgatgtggcaagtcttaggatggtacaagcatag

SEQ ID NO: 12570 - DNA, 255 bp, Zea mays
  Peptide Sequence Number=SeqID_55945
atgaccatggaggaggagcccttcaccaacacgaaggtggtcgtgcagtgcgtgtttgtcgacacatacgaagacgacgacgtgacagcgggcatcgagtgcctcgtcgtcgacgttgtaaattcaccggctaaggccgccgttatcgtcgttgtcgaagacaccgataccgtcccaaagcagaggactagtatgaggctagtggccctatcaggcgaagctgatcctgagtggttggactgctcagttccttag

SEQ ID NO: 12571 - DNA, 540 bp, Zea mays
  Peptide Sequence Number=SeqID_55946
atggccatcatcttcaagagcaagatcaccttcagcccgagagctattttttgctgcgggaccatctcatgcgtagctgaaagtgcattcatcccttttgtgagttttggtgatttggataacaacacatttaaagttatatctagaagacattcaagcaaggttcataatattgaagaaatgattctcccaatggatgctcaatatgatgtgactcaagaatggcttgatagggtgaagatagcaaggaaagggcttcgaggaactaagcgaaggggagactggagtcatcgcccatatctgatgatgaacccaccgtgctgggggaggaacctccccagcatgatgctcggcgacggagaaacatgcgtcataatgtgcagtgacatcacgaagtcggagaacaggacccgcaacagcccgtctcttgggacaaagcctcagagatgggggagaccctcgacgaaagagcatatcgagaactgcacaattgccgtcaccgcgaccaccgtcaagctcaggaacgcaagcgggaactag

SEQ ID NO: 12572 - DNA, 219 bp, Zea mays
  Peptide Sequence Number=SeqID_55947
atgaatgcactttcagctacgcatgagatggtcccgcagcaaaaaatagctctcgggctgaaggtgatcttgctcttgaagatgatggccatggagttagcgttgatcgacgacacacccctacctggccgctttgaggagcgtaataccctacttcctgggatggctttgtatgtgagtggtgctacaggtggtgtctaccgagctgtgagatgctaa

SEQ ID NO: 12573 - DNA, 297 bp, Zea mays
  Peptide Sequence Number=SeqID_55948
atggcgctgtccgcgcacgcactccttgtggcgctggtcgagcactgcctggacgcacaccacctcgggcagaagcgccgccggcggaaccgcggtgccgctgtccaggtccggcttcatccagaacatgcacgggggttgtcgcaggtgcatcctggtgccgggccgctggccaacggtggcgggcaattcctcctaaacgcactagcctccgaagaacccgtgactgaggatcctggtgaccagcagatagaagtagctgagcaggagctcattgaaggcaagttgtgcccttga

SEQ ID NO: 12574 - DNA, 297 bp, Zea mays
  Peptide Sequence Number=SeqID_55949
atggcgctgtccgcgcacgcactccttgtggcgctggtcgagcactgcctggacgcacaccacctcgggcagaagcgccgccggcggaaccgcggtgccgctgtccaggtccggcttcatccagaacatgcgcgagggttgtcgcaggtgcatcctggtgccgggccgctggccaacggtggcgggcaattcctcctaaacgcactagcctccgaagaacccgtgactaaggatcctggtgaccagcagatagaagtagctgagcaggagctcattgaaggcaagttgtgcccttga

SEQ ID NO: 12575 - DNA, 171 bp, Zea mays
  Peptide Sequence Number=SeqID_55950
atgggaaccaatgggcatctcgatctcgacatgggaggtaaatccatagatcaaaagggtgcacgagaaacagtagacaatggtgtacaggttcgggccgctttgagatgcgtaacaccctacgtcctggtgagaatgctttatatggtggattacaagggagctctctaa

SEQ ID NO: 12576 - DNA, 2718 bp, Zea mays
  Peptide Sequence Number=SeqID_55951
atgtccacggcaacggccaaggaggaggaggcggccgcggccgcggcgcccgcaatggtcggcgaggaggccgccgcgcgcgccgcgctgaagcgctacgaggccctcctcactgtgcgggccaaggcggtcaagggcaagggcgcctggtactgggcgcacctcgagcccgttctcgtcccgcccgccgaaaccggcatgccgcccaaggccgtcaagttgcgctgcgccctctgctccgccgtcttctctgcctccaacccgtcaaggaccgcctccgagcacctcaagcgtggtacctgccccaacttcgcttccccgccgccgggacccgccggcgcctcggccttgcagccggcgcccacgcccacgcagcagctcgcgctgccgtccaactccaccgcctcatcccctgtccccatctcctccatcgcgccctcctcgtcgcaccaccactccaatccgcaccaccaccaccaccaacaacaacaatccggcagtcgcaagcgccattccatgccacccgcgtacacgccggcggaacccgtgtctcaccatcatcacctcgtcgttgttgacccgtccttggtctacccttcggcgttgcccgcgctgccggcgccccctccgccacaccagtcggagctcgtgctctccggcggtaaaggcgacttcagcgctctcgccatgctcgaggacagcgtcaagcgccttaagtcacccaaggcatcgccggtcaccatgatgcccaagccgcaggctgacgcggcgctcgccttgctgtccgactggttcctggagtcatcgcctggcgtgtcgctctctgccgctagccaccccaagctccgggccttcctacgccatgtcgggctaccggacctgcagcgcgccgacctcgctggtccacgcctcgacgcccgcttcgccgaggcgcgcgccgacgccaccgcgcgtgttcgggacgcgctcttcttccagcttgccgccgacggctggcgggagcaggtggtcactctctgtgtcaacctcccgaatggcacgtccgtgttccatcgcgctgtgccggtacccgccatggcgccctcagactacgccgaggagctcatgctggaggccgtggcttcagtctcagcctcaggttcctctagcgacctccaccgctgcgcaggcataatttctgaccgcttcaaatcgaaggcgctgcgtgatcttgagaagaagaactactggatggtgaacctatcttgtcaaatccatagcttcacccgtttggtgtgggatttcgcgagggaactctcgctgttccgctccgccacagccaagtctgccaagcttgctgccttcttcaacgccgaacagacggcgcggtctttgctgcacaaacatcaaattcaacagctcggccatgcctctctccttcgagtcgcacatgtgccgtttaacggcaatggcagaaactaccgtgcggcctttgagatgctggaggacattttgaactctgcacaccctctccatcgtgctgtgcaagaggactcctacaagctcgtgtgcatcgatgactcggctgccagggagattgcagagatggtgcacagtgaggctttctggatagaggtggatgctgtgcattcgctcgtgaagctgatatttgatatggtgagggagatggaagctgatcgacctcttgtagggcaatgcctgccgctatgggaagaattgcgcagcaaggttagagattggtgtgagaaatttaacactgatgaaggcgctgccctgaatgtgcttgagaaaaggtttagaaaaagctatcacccggcctggtccgcagccttcatcttggatcctctctaccttgtgaaggatgccagtgggcgttacctccctccattcaagtgcttgacgcctgatcaggagaaagacgtcgacaggctgatcactagaatggtgtcccgggaagaggcacacctagttctgatggagctgatgaaatggcggtcggatgggctggacccgttgtatgcacaagccgtgcaggtgaggcagcctgacccgtccacagggaggatgaaggtcgccaataagcagagcagcaggctcgtatgggagacatgcctgagtgagctcaagtcgctcggcaaggtagctgtgcggctcatcttcctccatgcaacctcccggggtttcaggtgtacaccgtcaatggtgcgctggctctgtgcacctgggaccatggcaagcggcaatgatcgagcgcaccggttggtctttgtcgcggcaaattcgaagctagagaggagagacttctccagcgatgaagacaaggatgcagagttactcgctgaaggggatgatgatgatggtaggctgaggctgaggctgagcggcgcgggtactggactgctggcaaggacggcatcatcatgtgggttgatgatgatcgccgtcgtcctcgccgtcacctcttctgcgtctatctgcccgcccccccggcgtcgctgcaccgcccatgattgcaccggacggaggctggaagagagaaaagccgtggtcggaggaggcatgccaatctctgccattgtaggcttcctttcttcccccatccccatgccgcccgtcaccatcaggacaatcattcgctttttcttttcttctctctcgcgtgtatcgtgccactgctatcggctactgccttgtcacaaagcagtagctcatggtaag

SEQ ID NO: 12577 - DNA, 264 bp, Zea mays
  Peptide Sequence Number=SeqID_55952
atgatcagcttgattcgttgccgtcgagcgctccgggctcgagggtcggatgagtcggagtactcctcggacgaggaggactcttcggactcgtccgaggagggcagcgacggtgatggcagagacgacgacggaggcgacggtgacgacggcgacgacagcggcagtggcgatgacggcggcagcaagggcggcaacgacgacagcagcaggagcagcaacggcggcggcagcagcaagggcagcaacaaggccagtggctag

SEQ ID NO: 12578 - DNA, 1266 bp, Zea mays
  Peptide Sequence Number=SeqID_55953
cgccaccgaccgcgccctccgggcatcatccgcatcgaggtgcccatcacgcagcgggtggacgccgtggagtggctgcacgcgcagaccacgctgccccgctgcttcttctcggcccgggcgccgttgcccgacgcgcccgccctcgccggcaacggcaacggcaacggcagtgtccatcggcagcagccggtgagtgtcgcgggcgtgggttcggcggtcttcttccgagggacggagcccttttctctagctgattggcgcgcaatcaagagatttcttccaagggactgtccactggtccgcgcatatggcgccatccgtttcgacgccacgagtgacgcttccgttgaatgggaggactacggctcattctacttcgttgttcctcaagtcgagttcaatgagctcgaggagagctcagtcctcgcgacgaccatcgcgtgggacgactcgctctcatggacatggcacaacgccgtggaggagctccaatcgactctgcgaaagatatcgccttgctcttctgttcaagcgaacaaggccagcctacagacagccatcgtaagtctcaatcatgtcccgaccaaggcgtcttgggatcttgcagttactaaagctctccatatgatcaagggcaggcaaagagaattggtaaaggttgtactggcaaggtgtagcagatacattactgacacttgcattgaccctgtggaactgctggcttgcttgaaggctgagggccaaaatgcttatcaattctgcatacagccaccgggtgctcctgcgtttgtcggaaatagcatgatctgtgatgaggtggttgtccatcccagcaaggctctgcggaaacttccaagagtccagcatctgtcagcgcagttagctgcgcgaataaggaacgaagatgatgagtttgagattctaaacaccctccatccgagtccagctgtttgtggcttgcccactgaagaggcacgccaattcatacgggattgtgaaatttttgaccgtggaatgtatgctggtcctgttggctggcttggaggagctgagtgcgagttcgctgtcgggattagatcagcgttacttggaaaaggtcacagcactctggtgtacgccggtgcggggatcgttgaaggtacaaacccatcttttgaatgggatgagcttgatctcaaagcatctcagtttgcaaagctgttgcggtaccaagaacgacctattcgctaccaagaggctgaaaatctgggaacggtgatctga

SEQ ID NO: 12579 - DNA, 345 bp, Zea mays
  Peptide Sequence Number=SeqID_55954
atggcgagcactctacggtgcctgggctccttcgccgtacgctggagtccctgcgcgccggccgtcgaactctctggccatgggagcgggcgccggttcggcctcgacaaccggtccagtggaaaagggagctctaagcaagggattcccagccagcgtccatccaccgcccgggggattgcagggctgcgagcgtcgcaggcatcggctccagctccggctctgccgccgtggttgattcggacgcagggcgaggtcgggattctgggcgccgccgcgtggaacatcgccggtgactaccacggcgatcgcggcctaggtcgtgcgctggtgggcattaggtga

SEQ ID NO: 12580 - DNA, 1077 bp, Zea mays
  Peptide Sequence Number=SeqID_55955
atggcatactggcgaagcccacaaatcataatggcaaaattaccaatgtctcaacgagggcgtccaccgcggcttcaccacacccccgcctcccctcgcgacgcccgcgcccgcgattccagggccgcctcgcgctccgcatgtcaccccttccatccacgcgcctgcccctgcccctgcacccgccgtgcacaccccttagcccacgatccatatgcccctgccaaccctcgtgtgccccgccagccatcatgcgcctcctccctgcgcccgctcacggatgttgctgcacgcctcaactatgcccgccatggatctcacccacaacccatcgtccgtcccccatccccatcctcccacagtgcctccacaccgcgcgcccgctgctaccgccatcaaggctcctactcgcgcgacccacccccgctcgtggggaccccccaaaacctagccgtcacccgcaccaccacaaaccactacacatggcgagccgccatactcccacctcgctttgtggtgcaccagatctgcaccgtcgccctcctccactgggcgttgccccaccgggcggactaccgcaaacatctagggagttcgagttggacgtcggtacaggggtttgtgctagaggattctacaggtctatcgccgaatggggacctcaatgtgcatcctgtgattgcggggtctttgcccctacacaaccaatctgtggatgtcaaggagcaccctgttgtcatctatacgaagggttatcctgatgctcctaggtgtaggtttagtgcattagcagtgaagactggaaccggaaaggcaaataccatagagggagagatgagacagaagtgtcggtaccctgaaacagggtgcacccacccgtaccctagatcctccaccagaaagcttcaatttgaggtttcccccaaagcactcaagaactccgcacggtttgccctcgctgtggccagcttgctccgggttagttcaagcgctttgatcgtttgttctagcatccctaagtcctcctcaagcttcacggcccctctgattgaactagaccgccctgggttgccatga

SEQ ID NO: 12581 - DNA, 336 bp, Zea mays
  Peptide Sequence Number=SeqID_55956
atgaagatagtagcagtggtagtaacgatccaatcggggatctggaagcacaagttgatcagcttcgatcagaactccgacacaggaacgatctatgggtcgcggatgctgacaacactcgtttcctgcgggaaatggcagggcgacagatgcagcaacaagaagatcctctggaagcggatgaatggatccgcgttattgaatagaagttcgggcttctccggtccgaccggtcatcaaattacttgggatgagtttaaattggctttcccggagcattatatacctgaaggggtcctccatatgaagcaggaggagtttatgaagctcaagtaa

SEQ ID NO: 12582 - DNA, 786 bp, Zea mays
  Peptide Sequence Number=SeqID_55957
atgactaccagccttgtggtggagagaagcgagccgggctgcagcctccccctgccctcagcttcaaggatgttcatcatcctcgctagggaggagggcgagccgagtgggagcttcgccttccgcgtgggctggcggtccgcttcttcctccagcattcgggggagaagggcgttcgccggctttgcgaaggaggcgaactccgggtatgcagggccggccgtctgtggcgccgtcagctaccgcgtgtctggctcctggcctgggtggctctggtgccgcctccggcgctacctcctgccactggggcagagcgtggctgcccgtccaccacacgggcgacggtcgcgccgtgcgcgggttggccacatccacggcttctcccgcgccaccggtcgcaccgggaggtcgtacaagacgtcgtacgccatgggggcggcggtggtgttcttggatggtcttgtcctcactcccgtaacgtggtcgctgccactggtggggctgatatggttgcctccgctggtgaggctgcccactgcagaggtggttgcctccgctggcgagaccgtcagtgccacctgccgccggacctctggctctttggctttaatggcctcgttgtcaccccccataggaggacgggggcgaggacctattcgcagtagcgctcaccctgaggtgatcgctgctgctggcgagccgctcggagccgaggtcgttgtcgctgctggtgcagaggtggtcgccatcgttggtgggactgtccagaaccagcttccagcgtga

SEQ ID NO: 12583 - DNA, 330 bp, Zea mays
  Peptide Sequence Number=SeqID_55958
ctcccagagcgaggaatcgagctctgcctcgccgaagacaccagatcaaggtcaccagacttcacccgaccgccggcgagcgccggagcacccgccgccgatgagctcgcccgcctgcgcacgtggaccagccgattccggccatcaccgtcgtcgagccgtacctcgtcccgcaaggacttcccggagccaaccctgtcctttgccggacctccctcgccgcctgagcaaagagttgttcaggaggtagcccaggatccagcactagagcctgccatcgaggacctgcctgccccaactttggaaggcaagccccggttttatgcataa

SEQ ID NO: 12584 - DNA, 75 bp, Zea mays
  Peptide Sequence Number=SeqID_55959
atgaccgggatgacgggcgggacccagcccacagcgacacacgcgcaacgccgagtccgacagatcctcagctga

SEQ ID NO: 12585 - DNA, 528 bp, Zea mays
  Peptide Sequence Number=SeqID_55960
atgccgcgcgagggagacgaaggaaggccgcacgagtcaccgccgggaaagccgccaggcatcattgtaaggcgagatccggttgcgcgcgagggagaggaaggaaggccgcgcgagtcgctgtcgggaaagccgccagtgtgtgcgcaaatggctcgtcggcgcttcctgattgggagatggaggccagcatcatggagttctacggcacacaataatgaacctctacagattgtttgtggttatcatgctcttcctcaaccacctcgtggtggtgaacttgtattccacacccttgaacatgctttgtacagtctttttttgtttgctgacaccttcctaggaaaggggatcttccgcgacgacagggatgaagacgaagacagtgtccaggagagggaggtgaacaaggagatggttgtctaccttgtcgatgcctcacccaaaatgttcacccctgccaccacccaggtatcaatgttttatgtctctattgagaaattaagaactgtgaagttgcatcattaa

SEQ ID NO: 12586 - DNA, 216 bp, Zea mays
  Peptide Sequence Number=SeqID_55961
atggacaggcttgctacacaggttcattgcaacgtgctaagcttccaagacgcatggcgcatgatcgttaagcggctaacggcggtgaggatcaccccggccagccgcagttcaagtgggtacggcggacacaacgcggatgagtccaaatttctgctctataacccgtacccattcgtcggcttccagagggtcttcggctttaacgaagagtag

SEQ ID NO: 12587 - DNA, 201 bp, Zea mays
  Peptide Sequence Number=SeqID_55962
atgacgtcaaccggaaaccgtcgtcgtgcttgcgactatcgcgtcgaattagtcagggtgatgcttcagtgggtgggaatgttttcaaaaataaaacttgatggtggatctgtcaacggcctttatgggttcaacatcggaaaagatgtacctctgccagccagcatacccttgagagtcttttctttagtcgggttatag

SEQ ID NO: 12588 - DNA, 228 bp, Zea mays
  Peptide Sequence Number=SeqID_55963
atggcgagagtagcgtgtaccctacgtggcaagaggctggacggtggttatagttttgtgctgctgatgatggtgttaagtgttggtgggctcgaccttcttgctgcgatgtggagtatttacttttctgggattcagtaccccatggatttgtatgggtatacaaacatgggaatactgagaagtgtaatgtacttgcaacaacacacctacgctcaggtacactaa

SEQ ID NO: 12589 - DNA, 252 bp, Zea mays
  Peptide Sequence Number=SeqID_55964
atggcgtatcaaataccaccgctggggattcatatttatacgcctagtgctctgcaacttggcgggtcccgtctgtcattgactgtcgctattctagcgaagggaagggacctttggcattgggatgaagctgtacacaatatgaaaagcgtgattcgggagaaggatgaaccagctccgaagctatgcgaagataagcttcggctcagcgacggaaaatggaaccgacttaaagaggaaaagactatctag

SEQ ID NO: 12590 - DNA, 141 bp, Zea mays
  Peptide Sequence Number=SeqID_55965
atgggaaccaatgggcatctcgacctcgacacgggagactgttcggtgtgccaccggatagtgtccgatgcaccagggccgtacaggatcaaactagccactctcgggtttctccaggcgcgctccgctataattcactag

SEQ ID NO: 12591 - DNA, 1206 bp, Zea mays
  Peptide Sequence Number=SeqID_55966
atgaagctgaccacataccctagcggtggagtcgggtcagcctcgctcgcgggggccatccactccggctgcggcccatcagtgagggggcggagcagaccatcggcaacgagggcctccagatcctccacaacgacagtggagaaaggccacgggtcacacggcggaataacgaaaccaaagcagaaggcaagcgcaaatggcagggtaaagaaccaccaccggctcctcttccgggtatataaaggcccaggcgagatccaccaaaggcttcgcctgaacccgccgcgggattcaaactcaaaggacaagcgacacctctggcaggcgaagcgggcgccgtttcgtctccgtcatgatgaccgcgtcataaaagggaccgagaaaggggatattgcgaaaaggatcattcccagcaaaggaaacgggcctcgagccctcctactgatcaggggttcgaaggttgtgccctccggggttccgcaaccgccccagagcactcgggctccgagccctttactgatcagaggttcgaaggctggcccctcggaagggttcgagagccgccccagagcacgcagagttagggatgaccctaggtacgtccgttacatggccgaggctcgggctacgctcccgaggtaccctaggacattttcgagaccagcgggaacgatttgtaatggaatcccaccggagggaggcatcgagccctcggatcctatcgaatgggtcaaggtccagcaaatcacctacagggatcgcctgacaccttatcctgacacgcgtgcctcagtcggcaaggtcgaacctcggcctcgggagaaggactccgcctcgcccgaccccaggccttggcctcgggagaaggactctgcctcgcccgaccttagcctcggcctcggaggagtcaccgcctcgcccgaccacagcctcggcctcggaggagtcgccgcctcgcccgacctcggcctcggctcaaggcacttctccgatggccacgttgtcacctctacagggctcaaggcactcctccgacggccacgttggcacacctacagggctcaaggcgcttccccgacgaccacattattatctgtacagggctcagggcacttccctgccagccacgataatataagcctcatcccatcgcttgtgttccatcttgcatcaacccatctggacaggggcacacggcactaa

SEQ ID NO: 12592 - DNA, 636 bp, Zea mays
  Peptide Sequence Number=SeqID_55967
atgatgatcctcgcctcagttgccaccacctcgttcgccattctacttcttttctctctcccctcgtgcctccacctccacgccaccccattctcgacagagggcgtaggagcaggcgcctcctccccgtattcgtccatgaggacgtttcacatcatgcgcgcaccatcgttttcgccgtcgtcggacgtcccattcatcttccctgccttcgccctgttcttccaccccaacctgctgcccccgcccacggtcgcagccgtgagccgaccgacgctcgtcgatgcgggtacggggcgagtcagtcatgctcctggcctttctccccccaaccaccaaaagtggtcgttgggaagctgtatgtcgcatggcgcaccggacagttcggcgaccgtcggcgcggaggtagccgttgctctgctggcacaccggacatgtccggtgcttcaccggacactgtccggtgcttcaccggacagtccggtgaattatagcggagcggcctctagaatttccgaaggtgagcagttcggagttggagaccctggtgcaccggacactgtccggtggcacaccgaacagtccggtgcgccagaacagagcacacttcggctgactttagctctcaatatttga

SEQ ID NO: 12593 - DNA, 969 bp, Zea mays
  Peptide Sequence Number=SeqID_55968
atggatcctggcacacatatgatggttcgtactctccaaactacccgcaccaacaccagctacgcccctcagccccggcagatcccggtctacccagcggtagtcgaggaagttccggcggatctccctcccatccgagtggagaatgtagtcaatctggaggacaactcggagaaacagctgccgacgcccaccccattggcagagtccctggccttcgcagctaggtcatcgacgtcagcaccgcctgcaccagccttccaagcacctgcacccggaggcgacgaccccgacgactccggagacgacgatgacgaggacgaagaaggtggagacgaacacgtccacgaggaagctgactacgcccagcatgactacttcatggggtttggtcctgttgtcgaacattatacatcaatgttcgagacggggcacttccccaacctgctgcaagaagtgctgcacgcgctaggcacctacgtccaccccctggtgatggatgcaagggacaggggattcaagactctgtctgctcacgagtccctgacaccactgtccacctacgctgcctcggtcagcgatgctgcccatcggaccctatggtcgctcagccacacctaccggcagcagctgcagaacacgaggttcaggcatcttcctcagcgtctgcgtggaggaagtcagaccagcatcgtcccaggagaagctggtgaggatcgcctcaacactctagctggtgtagtggccggtctcaacaccgacctggacagtgccaccctggatctctatagggtgcacttggagctggaaaatgcccatgccaggattgcaccctggaagcccaactgcaaggactggatccgcccgaagctcaggtccctgccatggcgttgtctcctccccgcaagaggttgcgctatggggagcccggatccgtcactaggctgctttaggtgttttgagacatga

SEQ ID NO: 12594 - DNA, 507 bp, Zea mays
  Peptide Sequence Number=SeqID_55969
atggccagttctaaagatcacaccgatatttccccagacaatatcctgaagcctgctgttgaaagtctgatggccgatgagcaacaacaatacgaggactacatgcgtcaagcgaaggagaaattcttgtcacaatacacgccccagccattatatggtattgccgatgaactcatatccagggcaagtaccaccactaccatccctacttggcagatcggcgcccctggacacggtcggactgtccgagcttttgcccggacagtccggcccttacgcagaccgtccggctttccctgccggacagtccgggaccgtaccagggccaccgcgtggcgctccaataatagcgaacacaaccggccagttcggatgtaccaccgtacagaccggataagcatacgcagaacctactgtcgcacactacgcaccaaattattacacatcacagcagcagtacgttctgccccctacatatttaaaccacagcatgtcatacgatcatag

SEQ ID NO: 12595 - DNA, 1506 bp, Zea mays
  Peptide Sequence Number=SeqID_55970
atggacatctacgtggatgactaccgcgtgggtggtgtcatgatgttcgatgcccacacgggctggggacttgttgggtcgtatgctgggcaacttgctattgtgccggctccggtggcggccgcgccagctgcggcggcgggtgggacgaaggatgcttcgcaggacacatggtccaagttcagcgccagcggcgagattgcgtcggctgccgccgttaaagacgtggcgggttctgtttcccagcagctgaagcatgcaatgcagcagctgaagcatcatacggaagctgtgcgggacaagtcagctgcgaagaataagagccataggctgacggagaagttggcggctgaagtggccgagaaggaggacctcatccgtcagttggcgacggagaggaaggacgcaaacagagcctgcgctgaggtgcaggctgcacaaaccgaggccaaacttgcacgtgcgaaggccagtctcgctcgccaacacgccgaggagttggaaacgagcctcagcagccagcgcgaccgcctggacaaagcagaggcctctactcgtgcagaggtcgaccggacgcatgcacagctcgtggacacgtaccgggagcttggtgcgcggaccgctccctttgaagcgtctggtaaggaggtgggcctccacttcctcgaatggctgcaggaggagctggaggtgctcccaacgattgtgacgggcctcatgtccttcgcctcactcatcacctgcgaaggggccgtgaatgccctgtcctacgagggatgtgggcacttcgaagtcttcgaccaatcggacgaggacttcgagcgcggaatcttccagattgagaacccggtgttgaagcggtcggccggggcactttacgataggatgtggggccctcacggccgtgagaccgtccgggagaggtccgaccgggcgatggagcagatggcgcatgatgaggaggtcaaagacctcggggacttggatagcacactgcccgaggcgtcggcaaccgctgctgacgatactaattttgtggcggccgcaaccgtagtgcctgccaatgacaatttatctggttctagatctgggtgtttcttgtatgatgctgagtctgggagtacgttttcctggaccgaagagtcttcggatgaagacttggattattttgctgcgttagatgtggacacggcggaatcctcgccacaggtggaggttggcgaggtggctggtcttcctagtgcgaggaccaagtgccgacgacaaagggtggtgtcgaagcatagtgtgggcgaggtttcacggagtggtaggcgccgtcggatggggatggagcgggacagtcttcgagtagaccggtttggtaaacgagagctattgtctttgtcgattgggacgagcattggtgaggtggatctgtggaatctttttgagggtgaggaattgaaaataatgttgttcaattatagggaagcgggcatcatcccgaaggttgagccgatgtag

SEQ ID NO: 12596 - DNA, 363 bp, Zea mays
  Peptide Sequence Number=SeqID_55971
atggggcagaagccgtcgtacctcctgctgctcgtcggcctcctcgccatcgccatgctctgcgctggcccgggtcacgcgctgcgccaactgaacgacgccaacggcggtggcctggagttatccttgggctctaaggcagccacggcgggggccaagaccgagccgctggacccgtccctgagcgacgactacgaggtttgtgcggttatgggttatggggatggctgtttcgtggctggtgggggcaggatggctatggcgttgcggtggggctgcgcgctgctgtctggggcaggttgtggttcgtgcaggcgggcacgcgggtgggtggcgggggcactgtggacgcttatgttttag

SEQ ID NO: 12597 - DNA, 486 bp, Zea mays
  Peptide Sequence Number=SeqID_55972
atggagcgaagggtagcgtcttcgccttcgccccaacatttgccctccgagggaccagttcgactgagtcatctggtgccgaagacgtcgctagatggtggagacgctgccctcgctcgaagtggtcccgcgggggtttttgagaccgcgcaccgccgccggcggtacgtagcaatgtcttcctcctcatctgctgcgagtgcatcgttggctggtccgtcgaccgaggataccctgagcgatttggcggcgatggagttacaatcgggccacacggtggagttcggcacctcgaggatttcctcggttcgcgtgcaggagatgcagcagctggggtactttggtgacggtgttgggcgcgtcctggacgctgaggagatcccagagcctgagggcgaattagttgtgttcgaggagttcttcatcgccggccttcgccttccggcgcatctgaaagggaaatgtgcccttgggccatttttataa

SEQ ID NO: 12598 - DNA, 105 bp, Zea mays
  Peptide Sequence Number=SeqID_55973
atggggaagcctgtcccatcactcctcatgctcctcctcagccgaggtacgtctttcatgaccttcgtcctaaattcattatatccgaagggaaataatgattaa

SEQ ID NO: 12599 - DNA, 621 bp, Zea mays
  Peptide Sequence Number=SeqID_55974
atggctgcccctcctccatctcctccctccccaccaggttacccagattccatggccgccgccgccccagccatctccctggtggccgacctcgcccctgccccagccacagctcccccttcggccctgctgctgcaagcactcagcctctcccatggcacacgccccatctgcaacaccgtcgacccccgacgagttattgagttgaagagattgttcgctgtatgtgtcgatgatgctattttgattagcaggggttgtgacttgtatattgtcaaggatcacttggatgtggtaaatgctatactggacactgatgatagctgcataaggattgtgcggaaaaacgggaagacatccctacatactgctgcaaggattggataccatcgtattgtcaaggcactcatagagagggatccaggaattgttccgatcaaggataggaagggacaaactgcacttcacatggctgtgaaaggcaagaacacagatgtagtggaagagttactgatggctgatgtttccattctcaatgtgcgagacaagaagggaaatactgctttgcacatagctacacggaaatggaggccccagggatctggaataacaggagcctga

SEQ ID NO: 12600 - DNA, 465 bp, Zea mays
  Peptide Sequence Number=SeqID_55975
atgctggtagactacacaacgatactcgatagaccaggtgtgtcggtcgaaggcccaacgcaacaggatatcgagagcgtcgtggaagtgacacccgcgagcagcgtcacgagtgatgggtctagcgatccacccctccggctccggctcctccgagcgctccgtgccgtggctcgaactgccaccggcgtcgtcgttgtctccgtctccgtcaggggggaatctctggctgaggtgcaggggaaggcggcctctcagactccacctcccgttgaggcgagggggaagagtcctactactcctactcctgctcctgctcctagcatcggcgctcctgctcctcgtgtaggcgacgatgcagtctctccaggtggctggactgacctgacatcgtgcgacgcagtggacgctccgccagacgagaaggcaaaaaggggatcacagacttatgtgcagtgcacctga

SEQ ID NO: 12601 - DNA, 273 bp, Zea mays
  Peptide Sequence Number=SeqID_55976
atggcgcctcctgttgacgtggctggactgcgccctaggttggacgatgcggaggctcctccgaagccgaggtcgaatctgtcttcctgggctgaggccgagtccgagcccctgggtcgggcgaggcggaggtcgtcggctgaggccagggcggagtccgagccctggggtcgggcgaagcggagcggcactgtccttctgtcagggcggtcagtggagcggcgaagtgacggcggtcacttcggctctgccggggggcgcgcgtcaggataa

SEQ ID NO: 12602 - DNA, 276 bp, Zea mays
  Peptide Sequence Number=SeqID_55977
atgaacaaaaacactggcattcaaggtgccattacaaacggaactctggttccgtccccgcgggacgtctccgccgcagggctagagggcgatttccaccaccagaagctggaagaagaggtggcccgccgacccgcgcaggaggtagagccccggctcgcctcgccccccgccccagcaaggatgacggacaccctcgatgctgagggcgggatcgagatcacagcccggcttgcctctccccgtccaggagctggaggtcaccgtcttgggtga

SEQ ID NO: 12603 - DNA, 429 bp, Zea mays
  Peptide Sequence Number=SeqID_55978
atggcgggcgtgcctccctgcgcagtacagctcacagcgcggtctcctggcgaggccgcggcggcccagggtgcgggtaccggccggcggtgcgaggttgcggcgacccggacgcgggcactggccggtggtgacccggacgcgggcactggccggcggtgcgagaactcggcggccatgcggatgcacggctccctgcgtgggtcgcgtgctcgacgtgggcaacgccggcctaggcgcgcggtgctgctccccggcgtggagcagaaggcgtgcttcggccacgaccgcgcaccaccgcggctcaggcaaggcgcgcgggtgcacggaggactccagccaggcacacacgctggctccctggcagtcaacggcggatggcttcctggcggcggctcgggagtgttccctggtggcgacggcggctag

SEQ ID NO: 12604 - DNA, 843 bp, Zea mays
  Peptide Sequence Number=SeqID_55979
atgtcagatttgacaggttttgtgctgtcgacttcactgacaatagcagagttacagtctgtaatagtacgcacaggcatgctccctactgactttgatgcctttatatgcaatagtgggagtgacatatattatccatcacagtctagtgatgtgccaagcaattcccgtgttacatttgcatcggaccataactaccgatcacatattgagtatcgttggggtggagaaggtttaaggaagtacttagttaagtgggcctcttcagtagtagaaagaagggggagaaccgaaaagcaagtcatctttgaagattcggaacactcttcaacatattgtcttgcatttaaagtgattaatccaagtcatttgcctcctttgaaggagctgcaaaaattgatgagaatccagtcactgcgttgtcatgcactgtataaccatggcgccaccagggggtctgtacttctgattatggtctttgagaaacattttatgtatttatttccatatgcaccttgccgcaaacaagtgtgccaacctactaagaaaattttctattataggtatttgtctatttgctggggcatagagttgccagatgctgtggtcattgttggtgaaactggtgattctgattacgaggaactgtttggaggtcttcacaagacagtcatccttaagggtggattcaacactcctgccaataggatccatacggttagaaggtaccctttacaggatgttgttgctcttgatagctcaaatatcattgcaattgagggatttagcactggtgacatcaggtctgctatgcaacaaaagcttggtatacccacacgatga

SEQ ID NO: 12605 - DNA, 375 bp, Zea mays
  Peptide Sequence Number=SeqID_55980
atggatgtgaagtcggctttcttaaatggtgaactggaagaggaggtttatgttcaccagccacctggttttgctgttaagggaggtagtgacaagcagcagccaaaaggcatgaaggcgagcggcatgaagctccgccggacgttcctcctcaccctactgctggtgctgtccaccgccgtgacgcccatcctctcgctgcctgcagacaacgtggtagcctgcgactgcgacaagcccaaagcgcccaagccgtcccagccgcgcccgcccaagaccaagccctcccacccgtcgccgaaacccgagaacccgaagccacccaagggcccggcgtgttggaactcactagcgctcaaacactcaagaacttga

SEQ ID NO: 12606 - DNA, 1407 bp, Zea mays
  Peptide Sequence Number=SeqID_55981
atgccggagctgccggaggtggaggcggcgcgtcgggcgctgcaggcgcactgcgtggggaggcgcatcgcgcgctgcgccgtggcggacgacgccaaggtggtcgttgccgccgccggccgcgcggccttcgagcgggccatggtcggccggaccatcgtcgccgcgcgccggaggggcaagaacctctggctccagctcgacgcgccgcccttcccgtccttccagttcgggatggcaggcgcgatatatatcaaaggcattcctgtgacgaattataagaggcagcttgatgatggtttggagttctctttcactgataaacggcgctttgcaagagttcgtttgtttgaagatcctgaaaccttacccccaatttctgagttaggcccagatgctctgtttgaaccaatgtccgtcgatagtttcttggactccctgggtagaaagaagatagggataaaagctcttctacttgatcagagcttcatatcaggcattggcaattggattgcagacgaggtgctttaccagtcaaggatccatccattacagattgcttcgaatctacctagggagagttgtgaagcactgcaccagagtatcgaagaggttgtcaaatatgctgtcgaagttgatgctgacatggaccgctttccgaaggaatggttatttcatcaccgttggggcaagaagcctggcaaagtcgatggaaagaaaatcgagttcataacagctggtggcaggaccactgcctacgtgccgcaactgcaaaaactggttggaacccagtccagcaaaacgatatccgtggccgagaacggtgatgccaaggattcagggaccgagggagaagatgcagatgcagatgttttgaagccaagaaagcgagccgcgacctccaggggacagcgaaacaaagataccgccggctcgagaaaagcaagaggaaatggcgccgatgctgaggcggctgaaccagcaacaggtgtcgtcggaagcaacagtgagcaagcttttggccaagccaacagtgacgctgtcgataaatcagatcgggctacaagacgatcgtcgaggaaagtgaaagcccgcaagcagcagcaactgcagtacaggcagcaaagtagggtggcatggcagcaatcagctggtgcacacggccgcctccagctccaccagcccctccagcaccgggcagcactggttcaccacgcggtcgccgaggccgacgtgcaccagcccgcccagcaggtcaccggccggtggtacgacgaccggcgggcgcgtgaccggtgggcctacgaccggcgggtaggaggggctcttaggcggtgggtgtcccggcgccggagttcggttgtggctaagcacgaactgaacaggttggccgcgtcgtgcgcgtag

SEQ ID NO: 12607 - DNA, 1392 bp, Zea mays
  Peptide Sequence Number=SeqID_55982
atgccgtcttcctcctcgtctgctgcgaccacgtcgacggccgagatgccttccgaggatctctcgggcggtgtggcagcggcggaattgcgactgggtgatacggtggaatttggtgtttcgcggatgtcgtcgggccgcgtgcaagatatgcaacggttggggtattttggcggcggggtcgggcgtgtgccgggggcagaggagattcccaagcccgagggtgaattggttgtgtttgaggcatttttcattgccggccttcgtctgcctgcgcatcgtttcgtgtcagaggttctgcagaagtttgaggtccagaagcgccgggcggtcgtcaggctccctgaggctaggctgaagagagcgtgggggagtgcgaaggctgccgtccctggcggtagccagccttcgctggctacgaagccggtcgcgcctggatctggcaagctgccggagagcacgaaggcggccggcgctggcggaaccaagtccgccccagaaggagctgcgaaggtccgggagcagccttcgccggggaaacgcgttgtcgactttggcacaaatattagcatggacgactatctcgttgggtcgggcgaagggcagcttgttgctgtctcgcctgcggtggcaaccacggcgtctaccacggtttttggggtgaagggtggcgctttcagcgctggcggcgaggtctcggcggccactgccgtcaaggacgaagcgggcactgtgtcccaccggctgcggaaggcgtcgctgcagctgacgcagcagctgaatcaagcggccgacttcgccgatcgcgtggcgtcgggcgccctttcggcagacatggctgccgaagtcaagagacttcgggcgcagcacgcggacgccgtccaggaaaaatcggctgcggagagcaaaagccgcaggctggctgagaaggtggccgccctagagggcgagaggacggacctccggcgccagctggtggaggaaaggagggaggccaaccaggccatcaccaaggcacagacggcgctggcggaggccaagttggcgagggcggaggagagtctcgccagccagcgtgccgaggaatgggaggcgcggttcaacgctctacaggcccgcatggagagggtcgaggcctctactcgcgcggaagttgagcggacgtgcaaacagctcgtggactcataccacgagctgggtgcgcagactgctgacttcaaggtgcctgaccgagaggcgggccttcgcttcctcgagtggctgcaagtggaattgttagcgctcccgaccatcgtggagggcttcatgtcctttgcctccctcgtcacctgcgagggggccatgaatgcgctgtcccgcgaggggtgcagtcactatgagggcttcgactga

SEQ ID NO: 12608 - DNA, 168 bp, Zea mays
  Peptide Sequence Number=SeqID_55983
atgcctttaaatatagatattgcactatttaagctagacattgatgagctaatagctgattatgccaagctgaagatcatacttgctgtggagcctttgatcccttcagagggaccaaggattggagagaacattttcggttacacggaatcgaatgttgctggttag

SEQ ID NO: 12609 - DNA, 351 bp, Zea mays
  Peptide Sequence Number=SeqID_55984
atgcaggcggcatgcaactgcaccacggggacgcaccctttcaacttcgacgcatccagcatggaggcccaggcccacgcgtcatgtaaccggcgcgccggttactacgtgcgaaaatttgcatcgccacttacgccaatgccgcaccttttcgactgcggaaccggtgccgcgactcgaggcaacactgcgcatggcccaacggtggccaccaagcacatcggtcacagggaccgggaaaggggatactccgaaagggacccttctccgcaaaggaagcaggccccgagccctcctactgatcaggggttcgaaggctggcccctcggaagggttcgacagccgccctag

SEQ ID NO: 12610 - DNA, 444 bp, Zea mays
  Peptide Sequence Number=SeqID_55985
atgttggtctgggatatcaggttgcagcaccagtccatcgaccaaatcccagataagcagatattctgtaatgaccgcccatacggaatgtcctgcaaagagaatatcatcaaggaatgtgaggaggaagctggaatcacaagatccatatcaacaaatgctacttctgttggagcggtttcttatatggatattgaaggctttagatacaaaagggatgttctcttctgctatgacctccaacttcctgctgattttgttcctaataatgaagatggtgaggttgatagcttcagactagtccctgttatacatgctgcaaacattataaggaggacagattttttcaagccgaactgcaaccttgtgatcatcgacttcctcttccgtcatgggtactatatgcatatagcattgagagtacatcaagttttgtcaaaataa

SEQ ID NO: 12611 - DNA, 507 bp, Zea mays
  Peptide Sequence Number=SeqID_55986
atggccaagaaaagagaaaaaggattgaagatgttgtccgccgatgacggggacgacttttccttcatcgtagccatctcggccttcagggtggacatctccgtggtgatcgattgcagcgcccccatgacatccttgatggtgggttcctccatcggtagaggctgcgtggaggaggcagtggaggttggcggcgatggtggttctttatttggttggccatcaacaagtgttggacttctgatcgcttggcaaaccggggcttaccccaccagccagcctgccctttctgcgacgtgcgaccaggtggaggaatccatcaaccacattctttctgcatgtgtgctctccagggaggaatgggtgtgtttattgagggaactcgagctgaatgttttgccgccccgctcctcgagccggttttgttcttggtggagaaaggcaactgtttccatcgagaaaggtctgcggaaaggttttgattccttggtcatcctagtcacctag

SEQ ID NO: 12612 - DNA, 405 bp, Zea mays
  Peptide Sequence Number=SeqID_55987
atgggtaattcggataaaaaagggcagttcgtgaagttctctgtggaggatcaggtcgtggggtacatccacaagggatttatcgaacacatcagagactttcatgatgtttttaccattgtcatggatgacaatggcagcaacactgtggagcatgtgtctctccagtcatcactaaggactccagaagaccgaacacatgctattggaagtgtcattaaaagccttggagaattgattccaggtattcgaaatgaggcttatggagttcatatgaatgggtatgttgagaaggatggtcagaaatttctttggattggtaaacggagtgatgtgaagcaaacatatccaggaatgcttgatcatcttgttgcgggtggcctggtgtgcattttcattctttaa

SEQ ID NO: 12613 - DNA, 387 bp, Zea mays
  Peptide Sequence Number=SeqID_55988
atggccttgctagaccctcccgagtgcttccaacctgaggtggcactcgacttggtgcgcaacctgctcggatggggtgtgccggcgttcgccgaaaagatccatgtcggtgcctctcttcacggcgatctcaccgccggagagtttgtgctcttcgtctccaacctccccagcgggttggcattgccgatctcgtctttcttcgtgtcgctgctggaggagctcggcctccaacctcagcacttcatgccctgcttcatccttcaggtggccatcatcgcctacctctgcaaggtgttcgtgggggcgacgcttcttcctgcttcttcctccagcattcagagagaaggatgttcaccagccttgtcaaggtggacagcgggctga

SEQ ID NO: 12614 - DNA, 378 bp, Zea mays
  Peptide Sequence Number=SeqID_55989
atggtggtggtagtgggagctgaggccaggaagcttgtgaatggcttgccgaagcaacagaaactgcaggttgatttcccacatattctgcccggatgtactcatccattttctgaagcagcttctccagagtctggggagcttcctggcgaagtattgggccgtaggctctggccgaagacccttgatcatggcctcaatgacgatttcattgagcactatgggcgcttgtgctctcagacgcaagaaccttcggacatacgcctgaaggtattcgtcatggtcttgtgtgcactggaacaaggcctgagctatgactggcttcgtctgaaagccttgaaaaccggtaaccagcatgtccttgagcttctgccatga

SEQ ID NO: 12615 - DNA, 54 bp, Zea mays
  Peptide Sequence Number=SeqID_55990
atggcggagcgctccgccaagcgcggagattcaagaatttcttttaggatttaa

SEQ ID NO: 12616 - DNA, 127 bp, Zea mays
  Peptide Sequence Number=SeqID_55991
atggcgcaccgccatgggggagtttgctccgccgtgcgtggatgccctgttggggcagagaacgtgcgccgtcggatccttaagggacggactagattagatcgcgcgtacccgttcgccacttcgg

SEQ ID NO: 12617 - DNA, 291 bp, Zea mays
  Peptide Sequence Number=SeqID_55992
atgaccaaaccgctgatagctccggccgacagaaccaacgatgcaggcccgccgtcacaagaaccagccttcatttacccatccggcgagctggaagacgaaagcgacatacctcccgtagggcactacacgacggaccgcgccgagcctaaggctgcggaggccagggtcggcgtagctgatatgatgacgcctgggaccatcggcgccctcacgtcatccgccaagataggaggaggaggagcaacgacgaggacaaggaggctagagccccgccaagccaagacatag

SEQ ID NO: 12618 - DNA, 942 bp, Zea mays
  Peptide Sequence Number=SeqID_55993
atgtcgttttctgctcgtgttcctcgcagccgctcagtggaaattttctcaatggtcagagagggtcaagttggtggacttgcaccccacggaggcatggatgttgagcctgtactcgaggagtgcctgcatccgggattatcacacacaggtctacctatatggtatataaaaattgggtctttagttaatcctggatccgccactgtagacaaggacaatgatgatgaggagaggggacgccatacatcaaagatgactaaagaagaggaagatgaagaataccacgaagaggaagaagatgcccttgctggtgcaggggggaacacatttagtttcacaaccttcatgctcttaacccctctgatcctggtgcgtggcagattagactccgatggggaagtcactagcgaggtggatcaagttcgtgctcttcaggaagaagtcgtcatccaggtccagctccaccaaggccaagaatttatcgataagaatgctgttacgatttcaagtgtgagtaacaaaggggaaactgctgccaggaaggagcccacgttctctgagagctctccagtgatctcagagcttgtgcttgttagcgcccataacaacgagatcatgcgggaggtggcaaagggtgaaaattctagcgtgcaagaagtgctagtgactgatgtcagtcaagacttggagaagcagctgaaagaagaggctatgctgaataaagtactaaaggagacagtcttgtcaaaggtagttgccattgataaattgcaatctggtctggcatcttcacttcgcatccaagatgttatgagaaatgagatccaaagagtccaggatgaactttcttgcataacccacaaagctaagcagttggagcttcagcccaagttcgatgcaggagttcggcatggggtgaagatggctgctattttgtaa

SEQ ID NO: 12619 - DNA, 294 bp, Zea mays
  Peptide Sequence Number=SeqID_55994
atgcccttcgccggacctatctcgccgccggtgagccgcgccacccttttcttcccgtgggtactgtttacattgggggaagcactgcgggtgagaggaagagaagactgtaatcttgctgacagagagtacgtcctcgtgccggagcaaggagctgctcaggaggtagccctagatacaacaccagagcctgcaccagaggacctgcctgccactgctttggaaggcaagccccgttggttggtggacatggatccatggggatgcatggtctacgaggtgaaagtggaataa

SEQ ID NO: 12620 - DNA, 410 bp, Zea mays
  Peptide Sequence Number=SeqID_55995
accctgtggtgaaggactccgcgggggccctcttcgaccggatgtgggacccccacggttgggaggcggttagggagcggtctgaccgggcgagggatcagatggcgcgtgctgaggacgtggaggacttcggacatctgaacagcgcgcagcccgaagcggaggtcaacccggtggtggccgaggctgaggctgagaccgagaggcgggccctcagaaactggctcgtcgccagccactgtaccaatggcggaggatcccccgaaggcagcgacggagctggcagcggaggatcctatggcggcgactgggtcttcacagcggaggcttctccgcgtgttacggatgctgaagttttgcctggtttgagtgctgggcgtaggcggcaaagggcggtggcgaagcgtaga

SEQ ID NO: 12621 - DNA, 481 bp, Zea mays
  Peptide Sequence Number=SeqID_55996
atgtaccactcatgcattctaatctccggagtcgacaacttagaaagttgcaccgtcgtcaagaacggcctcccattcacaaattttggaggaacatcctccttcttgtataggagtacaaggattgtcgtcactagaactatcctccccgctcccttcaccggagctgctcgttgtctgccattcaagtttggtcgcgtcttcatcaactttgttagacgcaccgaaagcccaaacccgcctccggggcaggatcgggccgggaagcacgaagcagatagaagtgcacttcccaatgcagttagacagagaaggcatggctgtgatgttataatgctgaaggaccccaagaagagattatgccctgtcatccaccactgcccgttatttgtgggctccaccgagggcgggaaacatttggtgacatcaaacgaccttcgggctggggacgtctgcgagcttgttaaggggccagacgatg

SEQ ID NO: 12622 - DNA, 288 bp, Zea mays
  Peptide Sequence Number=SeqID_55997
atggctatgaacaagtcaaagatgggagataagaacaagtcttataacatagggttgggaagcaaagatagctcagggaagaagaaatggaacctgaactttgaccttatcgagaggaagaagacagagctcgtggacggcggcgcttcgggctcggggaccgtgacggcggcgcttgggctcggggacgcggcgctcgggctcggggacggcgagcgctcgggctcggtgaaggggacggcggcgctcgggctcggtgaaggggacggcggcgctcgggctcggtga

SEQ ID NO: 12623 - DNA, 342 bp, Zea mays
  Peptide Sequence Number=SeqID_55998
atggcccgcgcccgcgcctataaagcccccagggacttcgaccgtacccctccgcacgcgctcgacctcaccggagcccaaacccaccggcgtttgcccgtgcacggcgtgttcgcggccgcccgatccccctgccaccgtagaccggccaacaaaacccttcccaaccccgtccgaccctcggagaagactgagcacacctcggtgaagctccccgagcggggaatcggagtttgcttcgccggagaggccagtccacggtcgccggactccacccgaccaccggcgagcgtagaccggcctctacgtcaccccgtgaagctcactgtgccattggattga

SEQ ID NO: 12624 - DNA, 861 bp, Zea mays
  Peptide Sequence Number=SeqID_55999
atgatgaggtcgcccagtcgcttctcgccgagtcgcttctcgccgcagtcctccttgccgttgctccgcctcaaccttcgtggcaaccggttgtcgggccccaccgtgcctcctcccttttctcatgaggccgagcaaggcagggccgcccagatcgagacgccgtcgaggccgagcggagctctgcacctccacctaggccacccgcctgccagagtggaggacgagctcctcccgtgcctttgccagctatgtgctccgagcttcgccgcctgtctccctaggccacagggaggttgtgtgggggttgcatctgacaaggccaaggcaccgtcgacaggtgcctcacctagctcaccttgcagggcttcgacaggtgcaccatcagcttcggaaggttgtcaatggtctcctgcaaagggaggactaggaaacagcaataaaagtgccacttgggatcatttcagcagacttttcacacaatacaatgtgcaacagggaaaggcgaggttctttagtgtcctgatgcttacatggggtctggtggctgatgttgatattgaatctgagaagtataggtggatgggaagtgcccgccttgattttattgcaactattcaagatgctgatcgaaccaatctacaaaagaatggatctcctgtttctggtaggaaaaacagagttaagctagcaatggatcgtgctccactgaaggaacgtttgcaaaaggggaatatgcaagtgaaggactctgatggaaaccacgaaatttctcctgctgaaaagcataagggaaatctcataaaacggatccaggttgtaatggagattatttttgttttatgtttataccatggttag

SEQ ID NO: 12625 - DNA, 729 bp, Zea mays
  Peptide Sequence Number=SeqID_56000
atgttgtgggttggtgagcgcactcgtcaactcgatggagcgcatgttgaattcctttgtggtgttgccaaccctcttggcataaaggtgagcgacaaaatgaaccccagtgacttggtgaagctgattgagattctgaacccttcaaacaaacctggaaggatcaccataattacatggatggaggcagagaacatgagatacagtgatctcagcaataacaatctcaacggcgatcttccatatcagcttccaccaaacgtggttgaattaaatttgggcaagaaccacctaagcgggcagttgacggatatgttttcacagcttccaaagctctcaacattgaatgtggagagcaaccaatttagtggtcatatagatgttctagcgaaacttcctctcgaggatctacgtccacaaccagtggtgcacggttctgccaccatcctccccaccgccgccgctcgacagcggtttcctcgcatcccgcccgcccgcggcgctcctttccatcctcgaatcaagcagtcgcggcttccttctatggcgctcctttccatcctcgaccgcggtttcctcgccactgcgctccgtctctctcgccctttccggatcactgccccccgccctctctctcgcttcctcttctcccaagatcccatccccgatgtctctcgctccgccgcggtggatcccttccccaaagccttctattccccggatccatga

SEQ ID NO: 12626 - DNA, 297 bp, Zea mays
  Peptide Sequence Number=SeqID_56001
atggacttcgaccgtacccctccgcacgcgctcgacctcaccggagcccaaacccgcctgcgtttgcccgtgcacggcatgtccgcggccgcccgatccccctgccaccgtagaccggccaacggaacccttcccaaccccgtccgaccctcggagaagactgagcacacctcggtgaagctccccaagcgaggaatcggagtttgcttcgccggagaggccagtccacggtcgccggactccacccgaccgccgcctctatgtcaccccgtgaagctcactgtgccattggattga

SEQ ID NO: 12627 - DNA, 1649 bp, Zea mays
  Peptide Sequence Number=SeqID_56002
atggccgcgtcgcccggcgacagcgtgcctgtcgcctcgctctcacctacattggagagcgtgctcgggcgagaggagggcgggagcggggcgacgcactggcgcgggtatggggtgtggcccttggcacatggatgggcgctaggcgaagtatgccctcgcgagatgccctccctgggtggacggaaggtgcgaagtccgctttttgctttggatgtgcgagggcgggatcctgccgcggttgtgcgtgaggcggaggatggggcggtgagaattgttgggcgctatgtgccgaagacggaggcccagcggagttgggatatacatggatctaacgaccgcctgaatagggtcttcgagttgaattgtttgccgtatggcggttatcccggggaggacgtcgtcgaccgccgcgggaaaaaaccagcggctgtgactgaggacgaccccgcgccggaggccgccccagccactaaaaagaggaagctagttgatggggacatgagcgacccccgggggaaggatgtcttcgcccgagctccgggagtcttcggcgcggatgctggaggttaccggggtcgatggcccaagaacgttcctatcccccacgcggctggcgaagacttctttacgtctcgcattgctcgtgacttgagagtgtttccttacggacggaatattgctgctgttgtgtcggcagtgatgaacaaggaccgccaggatgctgcgcagaatcgtcgggcggtcatcaggctccccgatgctaggccaaagagggcgcgggggactgcgaaggctaccgtccccggcggtagccagccgacgctggtggcgaagccggccgcccctgggtccagcaaggtgccggagagcgcgaaggcggtcggcgccggtggaaccaagtctgccccggatggagctgcgaaggtccgggaactgccttcgccggggaaacgcgttgccgacttcggcacaaatattagcgtggacgactatctcgttggtaagcatttttttgacagcgctggcggcgagatttcggcggccactgccgtcaaggacaaagcgggcactgtgtcccgccggctgagggaggcgtcgcagcagctggcgcagcaactgagtcaagcggccgacttcgccgaccacgtggcgttgggtgcccttactgcagacgtggctgccgaagtcgagagacttcgggcgcagcacgcggacgccgtccgggagaagtcggccgcggagagcaaaagccacgggctggcggagaaggtggtcgccttggagggcgagaggacggacctccggcgccagctggtggaggaaaggagggaggccaaccaggccatcgccaaggcgcaggcggcgcaggcggaggccaaattggcgcgggcggaggggagtctcgccagccagcgcgccgaggaatgggaggtgcggttcaacgctctgcaggcccgcatggagagggctgaggcctctacgcgctcggaagttgagcggacgcgcaaacagctcgtggactcatactgcgagctaggtgcgcagactgctgacttcaaggtgcccgaccgagaggcgggccttcgcttcctcgagtggctgcaagaggaattgctggcactcccgaccattgtggagggcttcat

SEQ ID NO: 12628 - DNA, 432 bp, Zea mays
  Peptide Sequence Number=SeqID_56003
atgggcaagagcaagaaaggtggcagctcttcacatcactcaggcgacaagcgcaagcgcgagccgactcctccctcggaggacttcggcgactcggaatactcggaggaggagttctcctccgagtccgagggctctccggctcctgcctctcccccggtgtcgtctgatgattcagacgactcccaggggatcgccgcggaggtatggacctacatccgggccatcgagcgtgccgggctcgagggctcgtatgagtcggagtactcctcggacgaggaggattcctccgactcgtccgaggagggcagcagcggtgacagcgacgacgacggaggcgatggtgacggtggcagcggcagcggcaagggcggtgacggcagcggcaagggcggcagcgacagcaagggcagcaacaagaccagtggctag

SEQ ID NO: 12629 - DNA, 411 bp, Zea mays
  Peptide Sequence Number=SeqID_56004
atgccttgcctccttctcggcctgttcttgagcccgtcgacgatcacgccgtcgggaattccttcgttccctgaagacacgttcctccagagtttctcctacctccgagaccttgtctcgcgatacgggttgcgctgggtcccgctccccggcctcgtgatgtcgccggatatttcggcgtcggttccttcgtttgtgggattcccgctgaggaggttcctctccgggcgcagtcggctcgtcgtcggagatgggggcgactccactctcccaatgaagaggacgtcaggcggagttctccgggctgagggacccttagcccctatcttgctggagaggcttctgaggaaggctttctcttcggcgggtccgcgaggcgatgcagagtccctcctcatctgctacagatga

SEQ ID NO: 12630 - DNA, 162 bp, Zea mays
  Peptide Sequence Number=SeqID_56005
atggggacggttgatgtatgtggggacggagtgcccctgcctgtcgtgtgtttaggttctctggaggagatggttgctgggataacttggccgtccaccttgccaccgggttggactgttgagtgggaccctgcctcggctgaggaggagcatgaggagtga

SEQ ID NO: 12631 - DNA, 366 bp, Zea mays
  Peptide Sequence Number=SeqID_56006
atggccggagtcagtggcaatcggttggccgatgaagatgaagaggagcccgccgagcgtccgctgcgtcctgatctcctcctgctgccgcaggcacaggtccttaggggagcgggcatcacgaggaggagggatgcgctagaatcggtccagccggccatgcaatcgaatcggaaatcgttaaagaaaaacctagggaagagtaaaacaagattcgttagagctgagctgagggtgtggcacgtgagggaggaaggcgtcgatgtcgggagggcgggcggggactgcggcattcgcggcggggactgcggcggcattcgcggcggggactgtggcgcgcgggtgggcggatcgcagtgggcgtag

SEQ ID NO: 12632 - DNA, 621 bp, Zea mays
  Peptide Sequence Number=SeqID_56007
atggccggctggaccgattccagcgcatccctcctcctcgtgatgcccgctccccaaggacctccggagccagagctcgaccgccgcctttgggacgatatttccatgctcaccgaccagatccagtgcctcacgcaggagctcgccgctcagcgaaacgattggcatgtcgatacgctgtttccaaaacaattgggccctgtgtacctctccgccattctcgagtatctcaccgccgagagggaggaagagatggcaaagggggaggtgccggcgatcgggattgacctgggaacaatgtactcgtgtgtcggcgtgtggcagcacaaccgcgtcaagatcatcaccaacgaccaggggaaccacaccacgccgtcctacgtcgccttcaccgacaccgagcggctcatcggcgatgccgccaagaaccaggtcgccatgaaccccaccaacaccgtatttggatcggatggattaacgattaggtggatgcgagctgatttgtggaattcgtcgaactatgtctctggtgccttcatacgcaaagcgattgattttatagcaaacaactacaaaatcgtggtagaagttgaattgcttctgtttctgtgggaacagtaa

SEQ ID NO: 12633 - DNA, 402 bp, Zea mays
  Peptide Sequence Number=SeqID_56008
atggccggcgctgcccagttccaccattctcgcccccattccccaattcgatcaccactacgcgatacagggatgaaaacgaacatgatcgagcaatcataccagaggaaattcgtcgcgcaggcacgagcgacgctgacggcacaaagtgaccacggcgggcccgaccctggtggcggcggtggttctggggagctaaacacgcacaaggaggtagaaggaggggaggaggtcgcgaagatggtccaagggcggcgtgggtgcgatcctgcggttgcgcgcacttgtgaggctccaggcgaggtcgagtcaggggtggagacacctgagcgatcggacccaccagtcatcgtgagagcgcagggagcatgcggccgactgcccgggcccacaagccagtga

SEQ ID NO: 12634 - DNA, 250 bp, Zea mays
  Peptide Sequence Number=SeqID_56009
atggccggcgctgcccagttccaccattctcgcccccattccccaattcgatcaccactacgcgatacagggatgaaaacgaacatgatcgagcaatcataccagaggaaattcgtcgcgcaggcacgagcgacgctgacggcacaaagtgaccacggcgggcccgaccctagtggcggcggtggttctggggagctaaacacgcacgaggaggtagaaggaggggaggaggtcgcgaagatggtccaag

SEQ ID NO: 12635 - DNA, 387 bp, Zea mays
  Peptide Sequence Number=SeqID_56010
atggcggtcggacgggggattcttgcaaatggacatcttagcatgtaccaccataagatggtcaataccaggcggggtggtggaattgatttacctcccaatcgacacactcggaggatatttagacaaccccagacacaaccagtagagatggatcctccaccaccgcctccaccggcaggagttgacctactggttgcagctcagatgaggatgatgcaacagatggcggacactatgacagatatgcgtgctcagatgcagcaggaacgccaggagatgcgccaagagcgggaggatatacgtcgagagctgcgccaagaacgagaagagatacgtcaggaaaggagggcgcaacaacagcagctgcaacaacaaatgcaatag

SEQ ID NO: 12636 - DNA, 459 bp, Zea mays
  Peptide Sequence Number=SeqID_56011
atgactcggttgtcttgcatcaaaacacaacccagtcctgatgaggacatccctcccaacgatacacccatacctactacgcagcaaggaccaatgacaagagctcgtgcacgagagctaaattatcagaccacccgaattgctcgattcagaaccccaatttcctgtgtattagatttctcctttgggcaaggttcaaggctgttcttggcacagcaagaacaacacaaatttgaggcgccacctatagctccacaaattatctactacatcacggggttgtgcttgtgtaaccatttgtgttgttcttgctggctaccgacacctcctgcattgcttggtacagggagtgaggatgaggatggtggaggtctgcttacacctcgcaccaaaggcatcgtacaacattttcaaaggcaagtgagggagtacacctttggaattgataatgatttgtag

SEQ ID NO: 12637 - DNA, 291 bp, Zea mays
  Peptide Sequence Number=SeqID_56012
atggaggccaccacccatttcttctctcaatggcgttcttactgtgcggttcctagagttgatctcgtcggcgcggcccaccacgtggatggggggtcattggttgcggctggttttatacccgggccaaagtccgatcacagaaacaacgacaaaccccaatcccaacggctcgacgagcttcagacaaagttcattgggaaggggataagcctgacaggtggggaccacctattaatgactctggtggcaccgtcacacaggcgcaagaccacatggatgcaacaataa

SEQ ID NO: 12638 - DNA, 372 bp, Zea mays
  Peptide Sequence Number=SeqID_56013
atggtgcaccggacagtccggtgcacaccggacagtccggtgcccctgccacgtcatcactgccgttggattctagccgttggagcttctgacttgtgggcccgcctgggtgtccggtgcacaccggacagatcttggttccgggacagatcctatgtgggtacccaagtgtcattggatgctgaaaaagttatcaacgttactcctcgttatgcaaagcttcgggcagaaccaaatggggctgccatggggcgcatcattggctggcagaacattgaactcatcagtgataggcctctggagaccatgctgaatgagttcaagcagttgaatacttatcggttcaattatggaggagtacaacaaagctaa

SEQ ID NO: 12639 - DNA, 381 bp, Zea mays
  Peptide Sequence Number=SeqID_56014
atggtggtggtggcggtggaagctgaggcaaggaagcttgtgaatggcttgccgaagcaacagaagctgcaggttgattgcccacatattctgcccggatgtactcatccattttctgaagcagcttctccagagtctgggggggtttctggtgaagtattgagccgtaggccctggcctaagacctttgatcatggcctcaatgacgatttcattgggcaccatgggtgcttgtgctctcagacgcaagaaccttcggacatacgcctgaaggtactcctcatggtcttgagtgcactggaacaatgcctgagcagtgactggcttcttctgaaacccttgaaaaattgtgaccaacatgtccttaagcttctaccatga

SEQ ID NO: 12640 - DNA, 348 bp, Zea mays
  Peptide Sequence Number=SeqID_56015
atggcagacaatataggatattcgaaacatgagctcggcctgtctgtaatgtcgaaggatcaacttggagacaaccttgcttataacagtctaaagggcggtcgtgagatagccgatgaagcaataaagaaaaatgaaaaggaatcccatgatgctcaagttacggcaaaggaaactgatgaagcagctaaacccagcctttcaccaccaccggagccattcaatcctgaggctgaccccgtcatgaaagaagctttggatatgatggaggtcgctaatacattcgttgacgaagttgttaacaggctactgaatgaagctgccgaaagaatacttaaagaagactag

SEQ ID NO: 12641 - DNA, 453 bp, Zea mays
  Peptide Sequence Number=SeqID_56016
atgcatgtaccagtgctaggcctcggcgtgtcttcccctcacaaggacaatgagattgtacaagaaaaatctatgtttgattggaattctatggttctctgtggtttttgggaggaggaagggagacgtgatgttccatgtgagatgcaaatgtattctcaacttggacttaatgaagatgacaaggatgagggaaatagaagagatgaagaattaagaggtggtacacgtggtgattgcccttggaggatttatgcatgggaggaaaagaaaggattaccgaccatcgtgcttctggacgacttctggccgccagaagctgaagctgtaaccaaacggccagcttctcgggcggcttttcctcgcagcgcttcgaatagaagcgagccgtctacggtgctcgagaagcggccatcagttggcttcttgcgaacgcttcggttccgtcgctag

SEQ ID NO: 12642 - DNA, 795 bp, Zea mays
  Peptide Sequence Number=SeqID_56017
atggcggacggcaagggaagggagaattcggccgtggcattgaagacctcgccgtcagtgccgatggctcggggattgcgcggcggtagtaaccctctggaggagtggagcggccgcgtaaaagcgattgaggccgggttccgtgcgtggatggcgaagcagcccatccacatcgaggccgcggtgtccacggccgttggggcggtgcagggcggggctctgggtgggctcatgggctcgctcacagccgacggagggtcgccgttccccatcccgcagccgccgtccaacgccaactcggatgccatggcgtcgttcaagcaggcccagctgcctgttccactgtttgaaggtgatagcatgaatgtgattactgattacagtgacttgtatagggtgaacatgacagctgcttttggttctggtgctcttttctccatagtgagcggaatgggaactcctaatccagttttaaatgcaattacaactggtgttgcttttgcagtatttcaaggtggctttttcatggatccccaggtcctcatcatcatcagaagaagaatctgctatgccaccctaggtctcgaactgtctgatagcctcatcctcagccctgatgtctgtgactggatctggcgctggaactgggtcctcaggagctggatgatagaatccgaactagaggcgagaggcctcgagggtggcctggaactgaggaggcctgatcagctgcacaaaggtgtgacagaggtagtgagcatatggcagctgacgacgagcacagagaccatctaa

SEQ ID NO: 12643 - DNA, 873 bp, Zea mays
  Peptide Sequence Number=SeqID_56018
atggacaagagggggcagcagtggtttggtggcagctcattggtagtcgagaaaattcttgtggatctccctcgcattcgggtggagcacggagtcattctggaggacagctcagaggagtttttgcctacgcccaccccattggcagaatcactagccttcgcagctggatcgtcagcttcagcaccgccagcaccagcagtccaagcccctgctttcggaggcgacgacccagacgactctagtgacgatgatgaagacgacgacgaagaagaagaggatgaggaaaacatcaacaaagaacgacaggactactatgtggggttatggcctatcactgaacattacacctcaatgttcgagacagagcacttccctaacctgctgcaggatgttctgcacgcgttgggaacctacgcccaacccctgtatgagacaaggcgagtgtacgagcctcctcgggcttgctactacatcactcgcattcatgttagggtgatggatgcaggtgatagagggttcaggactctatcagcacatgagtctctgacaccgctatccacctacgctgcttcggtcagcagcgctgctaagcgaacgctgtggtctctcagccacacctaccggcagcagctgcacaacacgaagtacatgcatcttcctctatgtcataacaccgacctggatagtgctaccctagacctctctagggtacacttggagctggaggatgcacatgcaaggatcgcagccctagaagctcagcttgatggaaggaatcccccggaagttcaagtccccgctatgacgttatcccctccccgcaagaggatccgctatggagaaccagaatacatcactaggctgctttag

SEQ ID NO: 12644 - DNA, 1398 bp, Zea mays
  Peptide Sequence Number=SeqID_56019
atgggcagtaggccatgtggcagcatcgggactccgcctgagcgaggagcagaagcgtacatggaccctgctgagggtggcccggaccccacacagagaggtctaggacccgtcccgggggtccgatctgtacccatggaggtcctggaccctgcccggagccccggagccgtccgcatggtggggttgggtgttgttcgccatgcgactagagacagccgcgtggacaccgcaccttcatgttgtggtaaggggtacccctgttttagggtaccgatagtggcccccgggcccgcctcaggggaggatacgagcctgcaggtggggccaaagcttgactggcgattggtgcgccgcttccgtgtgtttgctgatgtaatcattgccagaccaccttcagtcacgccaactgccatggagtatgactcgtgggctcggaccctcgtgccagagactggtccgtttgtttcttgcggcggagatgacgaggcacatgtcgtgggcggcggttcgcttttcgggcacgtgcggcgagatgaaggggcatactaccgcgagcggcggttcgctcctcgtggcggttcgccttctcggcactcggaggcccgtacaccatctcgctcgccggaaggatccgcgcctggcgcttctctcctcggcggtctcgccgccggggagtccgcactcttcgtctcttgcctctcctatgggttggtgctgccgatctcgcctttctttttgcggctgttggagaagctcgacctccaacatcagagcctcatggcccaccccatcctccaggcggccatatttgcccatctgtgcgagatgtccatgggggtggcgcttcttccgctagcattcggacgaaagggtgctgcgcagcgaccttccagaggtggaaagcgagctgagctgcggcgccatctttcacttcttccggtaattctcagactaaagggtgttgcgcagcgacctttcggaggcagaaagcgagctgagctgtggctccatctttcgcttcttccggagttgagctgcgccttccgcagcagtctcgtcagttcctccctgaacttcactagcacctggtggtacgcctccatgaactggtcgagctccgactccgtctcagcggccaggccgccgagcgtcgtgtgccgccgcgcccccatctctttggctttaatggcctcgacgtcgcatccaacaaggagggctccttcgccttcatgcacacgccgagggggccgccgccgtgttcagggtgagcggcaggtctgcgcctggcatctgcaactgaagacgccgctcgggaggtcgtacaagatgccatggagacggcgcccgcgcgcttccagcgtgaccctgctgatgtcgagcagctcatacctgtag

SEQ ID NO: 12645 - DNA, 447 bp, Zea mays
  Peptide Sequence Number=SeqID_56020
atggatttggataggtttgccggagatggcctcttcgcggccttgcgccacgtgccttggcacattaacctcaccgccgtgactcaccttagctcgtccggtggtcgccagggagcttgccacggtaataggccacgaatcaccgcgccagtaaccttcttctcccgccgccgcgcgtctctctcaaattcaccggccaccgctgtgggagcctataaattgccgaccccgcctgctccgctaagtagttgtgcaaccagtgaagcaacccgtgcctcgaatcatccactagaactcccccaattttgggatttcccccaaatcactcaagaacaccgaacggtgttggctcaccatggtcagcgtactccaggttcgttcgtgctccctgccctcttttttcagtacccatacctgcccctgatactcatcgaccaactcgattga

SEQ ID NO: 12646 - DNA, 267 bp, Zea mays
  Peptide Sequence Number=SeqID_56021
atgaagctgtggaaggagacttccaggagtcccaagactacgacgagttctaggtgtgggttagcggcaacccccagtcggctgcctgtgaaggccgcgttatctacgtttcttttccgcactttgatttattggattgggaagaggcactccttcagttgtggtgaggcggacacctataggtcggcatgcttccgtcaccttgaagggtccttcccaaccgggggagagtttgcggagcccttctcagttcagtacttgtcgtag

SEQ ID NO: 12647 - DNA, 222 bp, Zea mays
  Peptide Sequence Number=SeqID_56022
atggcctcagccaaggttgggggtactggtggtgggttaggagtagcttccctcccacgggaggtggcggatgtcagttctcaactcgtttatttgctgaccatcctcgacccatactttgttcctatgacggagctctgttcgaagatgctcgacctgagcttccagatctcctataggatcattgctaccactactactgtcttcatgccttggagctag

SEQ ID NO: 12648 - DNA, 360 bp, Zea mays
  Peptide Sequence Number=SeqID_56023
atggagcggtggcacgtgatgccgacctgcacacgcaacccaattgttaaatgtaaaggaccttcgtccttcgaagcatcatatgcattcggtcatgatggttctcggacgaagcttcaacatgcatggttgttgcaccttcggcactcagtcccattgattatatacgatttcttcgtcctgaggaccttcggcagagaaggagaccccaacacctgtgtcgacatgtggctcactaggacgcccgcctaccctggctcgtttggcaaagctccagctccagcttctttagctccagatcctgatcctcgtgaggagttgatcctcctgcttctcctagagaatcagaatcatttttaa

SEQ ID NO: 12649 - DNA, 147 bp, Zea mays
  Peptide Sequence Number=SeqID_56024
atggaggaagatgaaccagcagcacatggaggagactttgattatgatgagatggagaaagaagcacctgttgcagctgggccatctactgtagcagcagctggagatggaaaagaaggcttccattggatgatgatatgcatttaa

SEQ ID NO: 12650 - DNA, 222 bp, Zea mays
  Peptide Sequence Number=SeqID_56025
atggccaaccaaatgttgccgctgtgggttcctatttatacgcctagtgcattgcaacttggcgggccccatttgtcattgactttctctattctagcgaagggaaggaaccttcagcttcgagatgaaggtgcgcacggtatgaaaggcgcgatctgggagaaggatgaaccagttccgaagctacggatggagaagcttcggcttagcggtggaaaatga

SEQ ID NO: 12651 - DNA, 486 bp, Zea mays
  Peptide Sequence Number=SeqID_56026
atggtctctaggtctaggtggtgcacgggctggagagaggaggcgctcggagtcacggagcgtgaaggaatttttgttgttagtcatgctgatgggaatctgtacgtgtatgacaaatgcaaggatggaaatactgattggacatttccaactgtaaaggatcaaagtcaggtgctgatttcacatgcaaagtcgagtaagagcaatccaattgcaaggtggcacatctgtcaaggtgcaatcaatgacatttccttttcaccggatggtgcttacttggcaactgttgggcgtgatggtaaatttctctacccaagaatgagaatcgacagctttacgcagaaaatgctggctccctctctcctgtgccagctgctgctggaggagcctctggagccgctgcggcgccgatgctggaggagccacaacgccactgttggaggagccgctgctggagccaccactggcctctcccactcgccttag

SEQ ID NO: 12652 - DNA, 384 bp, Zea mays
  Peptide Sequence Number=SeqID_56027
atggcgagagtagcgtgtaccctccgtggcaagaggctggacagtggtgtatctatgctcttggtaagaaaagcagataccgaactgtcaagtgattcaggggcacctacagggttgtctgagatggctcgtcttagatgcactgcacttaattcgatgatccctttattgctctctcgccttgcggagcatccactgcgcctcacggtgataggacagtccagccaccttgagagactacatcgccatctgcacgaggagcaggagcaccgacatcaggagcaggagcagcaggactcttccccctcgcctgagcaggaggtggagtctaagaggcagccctcccctgtgcctcaactagaggtgccccctacaccaccatag

SEQ ID NO: 12653 - DNA, 132 bp, Zea mays
  Peptide Sequence Number=SeqID_56028
atggcgacgcggtggaaaggcttggacacgcggcataaggccgggaagcggcggtcaccggcgagtgaatgcactccagatgtgtcaaacatatgcaatgtcaatgctcatgatgccatgctcaagttttag

SEQ ID NO: 12654 - DNA, 285 bp, Zea mays
  Peptide Sequence Number=SeqID_56029
atgtcagatcgattcataacactcagagtgatgacaggggaagccagcagcagaggccgcaatattcctcccaggcttcgaggtagcagcagagctatcctcggcctccagctccaaggggcagaggtgccaggggcttcggaggaagatttggggatcagcccaggaagatttattgcctattctttgaaaagtggaaataatatcaaattacaaatgtaccttcggcttgaaaggaggcgaaagtacaagcgtgacgcaaaagcaaatgtcaagtcagcgtga

SEQ ID NO: 12655 - DNA, 345 bp, Zea mays
  Peptide Sequence Number=SeqID_56030
atggtgaccgccggtttctgggtggggaagagcaagccgggctgcgatcttggtcccaccctcagcttcaaggatgttcatcatccccgctggggtgggagccacgctgagccggcgctctaccttccgcgcgggtccgcgggtcgccctttcccgcggcgtttgggggtggaggcgctcgctggccctgcggacggcgcggacttagacaacgtggggctgatcgacggcgggcgtcgtcacctccagcgtgtcggagtcgtcggccgggcttccggcggcccctcctgccggggggtgaccgccgcattgtgtgcacgggaggatgtaacacccggattttag

SEQ ID NO: 12656 - DNA, 519 bp, Zea mays
  Peptide Sequence Number=SeqID_56031
atggtgaccgccggtttctgggtggggaagagcaagccgggctgcgatcttggtcccaccctcagcttcaaggatgttcatcatccccgctggggcgggagccacgctgagccggtgctctaccttccgcgcgggtccgcgggtcgccccttcccgcggcgtttgggggtggaggcgctcgctggccctgcggacggcgcggacttagacaacgtggggctgaacgacggcgggcgtcgttacctccagcgtgtcggagttgtcggccgggcttccggcggcccctcctgccggagggtgaccgccgcatcaggccggcgccccactcgtctgggaggatttgagtggggatctgccggggggctggtgtcccctgccatcggcgccgatgcggaggcggctcgagaagtcctcgtcaccgacgggatcacggccaccacccacgccccgggccaccgtggcagcgtgcttgtcctcgcccctcgagcgtcggcgggggcgagggcaagatcgcagtag

SEQ ID NO: 12657 - DNA, 273 bp, Zea mays
  Peptide Sequence Number=SeqID_56032
atgagaaatgagtccatcattagtgagatccaagcccagctaaagcacaagaatgtcacagtggatgtcaaagcaaattcagaccctcatttggctatgatttttcttgttgcacttaagtcggagctggcggcggaggtgtacgctaagcagaaggtggatgaccagtgggcactgcgcgtgtcgcaccacacatcggacatcctccactgctggatggagcagagctggctgcccacctccacggtggtgcaggctggcaccacgccgtag

SEQ ID NO: 12658 - DNA, 570 bp, Zea mays
  Peptide Sequence Number=SeqID_56033
atgcctggaggaagaactgcccattcacgcttcaagatacctcttactattgatgatggcgctgacgaggcttctatgactaagagacaatgtgtggaggcactagacaatagcatgcgcgatataatgggtcggcctggattgccattcggtggtaaaaccattgtcttcggtggggatttcagacaagtcttgcctattgttcgtaaagagtttttgctacgcataggtggtggaactgaggtcacgaatagagatggtgacatccgtcttcctggcgagttcaaaaggaagccgtttcctatacgtattagttttgcaatgactgttaacaaagcacagggtcagactattcccaatgttggtgtgtacttgcccgaatcagtgttctgtcatggccaattatatgttgctctatctagagcgacagcccgatcgaacataaagatccttgtcaccccagccgtcgatggaaataagaggtcgaggaagggtgtacgaaagaaccccacagtagattgtgggacatacaccaagaacatcgtctacaaggaggtcctaacaaattag

SEQ ID NO: 12659 - DNA, 1182 bp, Zea mays
  Peptide Sequence Number=SeqID_56034
atgcaccaggatagcacccttgtggcaggaacttacttttgtttgcttttctgctgcctgtcaaatcctgatatttgttttctttctgaaaagggactgttaacactttccataaggcttcttttcatttaccagggcactgttcttgttatggatcagatgggatacaatgctgatcgcacaccattcacgaacatctcaaacaccatcattacaggtacggacactaatccacaaagttacattgtaggtaatcaaaatgaatcgaactcgcttggaccaattgttgatgctagggaacatagctttccagatgactgtagcaccattgatttcaaaattttgtcaacacaaggcattgcaggtggagacgaacaagtaaacgtggatctagatgatgatagcgattggttgcatagaaatgagacattccaggtaaacaacattgtcgcaagtaatgaccttctgacaataggttgtgtgcatgaaagtgttgataacacacctaatcatactatgaaaagggccgcctactttagtgagcggtacaaaaacttaactcccatcgagagggagtctaggcgtgaacaccttaggttgtataataagacaccaaaacggaaagatgcaaagacagagtacggcagaaaacgtagagcactgcaatctgacactttgcatcaggagtccatcgccatggaggacccaacatatacccctgaggttggacgtcatagaacagatgcaacacaaccgtatggatcctcagttaccacttgcgactgggttatccctgaattcgtcgggatacctttcctgtcaacttcaatacaaatcgaggatgttggttcactcactatttctactgagccactaagtcgtaaacatcatgtgctatctggggcaagaccagctatcttaggtagtcgaaaccaacaatttgaagccgccatttcaaggaacgtggctacggtgactgaggatacaatcagtgacgccgtggaaggggacgattggacacaaccccatacgactacagagatccacaacaatggtgacgatgatgagggtgtcatattcgaagaggatgatgatgataatgatggatacctattcgctgggcaatatgatgagactgacgaggacatcaagattgatggtactcaagaaagaatctattga

SEQ ID NO: 12660 - DNA, 474 bp, Zea mays
  Peptide Sequence Number=SeqID_56035
atgctggttggttggcctccgcgcaaggcgcccttcggcggggggcccaggaggtacgggctgtcatggggcaagcctcctaggtcgacccccccccccgttggagcgaccatcgtgctaggggaggccgttgacgcggccgcggcctcgagcccgcctgcctcgtcgcaggcgccaacgtcgattcctgccggggccgccgctggtgcgcccacggagccgcccgctgccgccgatgtcgagatggctaaggtgcctccgcccccggctccttcggtcctggtcatccctgattcccccgttttcgaccatgaggagggggcgtccgttgttgccggggttggtgagcggaggcctgtcgccttgaccgaggaggggcccgatgcgtcggctgcaaagggacccgatgactcagtcgcggggcgcgcagatccttggctcgtcgtggggagcagcggccttatccacacgtag

SEQ ID NO: 12661 - DNA, 459 bp, Zea mays
  Peptide Sequence Number=SeqID_56036
atggccgaggctcgggctccactcccgaggtaccctaggacatttccgagaccagtgggatcgattggtaacggaatcccaccggagggaggccccgagccctcagaccctatcaatggtccgggtccagcgaatcacctgcagatacttttggagcgcgcctctgggtcactagccgacccttatcgaacggggcttgggcgtccactcggattacccgttagcaactcactgaaaacactgagttcggagccctccgaggaccacttgccaaccaccggggtaagactgacaacactgctgaaccagaagactgctaggtaccttgtagcgcacaagcagaactactccggtgagggtgaagagcttatctaccactccaaggggcatgctttgaatccgggacaaagggactggacgaggtatcagccctgggagccaaagaaagagcaagcctag

SEQ ID NO: 12662 - DNA, 573 bp, Zea mays
  Peptide Sequence Number=SeqID_56037
atgggggccgtcacgtggccagagaagacaatatcctccaaggtatcaatggtgggtccggactcccatgggaaagtgccggaccccaccatatctggaccggacctccgggcaggggtccggaccaccctcagcagggtcccgggattctgggacaaagaatacccaggccttactcaaggcgaggcgggggtccggagccgacacgtgtccggaccataccatgtacacttctgctccccgctcaggcggagacctgatgctgccacgtggcctactacccatgacccgggcctagaggtcgccgtagaactggtactggccgacattgcctcctcccaaaacgactcgcggttcctcgctgcactctcccttgagaaaaaaacctttgaaggaggtttcgatcgtgaaaccgcccaggtcccgctccgcaagtgcatggcagtgagctttctggccaatgaggtgtcggacctgtgcatcggcaagccggccgtgaggtcgctccagtggcggaggagactgtggcagtggggcatggagaccaggtcgaagggcgggggcacgccgtag

SEQ ID NO: 12663 - DNA, 273 bp, Zea mays
  Peptide Sequence Number=SeqID_56038
atgacgtcgactgtcctcagctctctacgaaggcaaagaaacgtcagcaggacctggggctgcaccgccagccacgcttttatagggctcaagcacttctccaccggccacctgctgaaccagaagactgctaggtaccttgtagcgcacaagcagaactactccggtgagggtgaagagcttatctaccactccaaggggcatgctttgaatccgggacaaagggactggacgaggtatcagccctgggagccaaagaaagagcaagcctag

SEQ ID NO: 12664 - DNA, 324 bp, Zea mays
  Peptide Sequence Number=SeqID_56039
atggatgaacaaagtgcaaatcacaagttaagaaacagaaagaagaagagaagagaagacttggctgtgtacagccaaggggctgtttcggtctcgggcaccggactgtccggtggtgcaccggacagtgtccggtgcgcctggccgcctcggccgaagaggccgctctcgggtttttctccggcgacttcggctaaaattcaccggactgtcccgggcgagagactccaagttgtggagattcctcgcaaacgggaaaagatcaaaggaaagaaaaacaccgtggtattcaagttgatcattggatcacttgagaggagttga

SEQ ID NO: 12665 - DNA, 288 bp, Zea mays
  Peptide Sequence Number=SeqID_56040
atgggcaagagcaagaaaggtggaagttcctcacaccattctggcgataagcggaagcgtgagcccgactcctccctcgaaggacttcggcgatttcgagtactcggaggaggactttctcctttcgagtccaagggttcgccggtccatgcctctcccccagcgttgtctgacgactcagacgactcccagggatcgctgcagaggtctggacctacatccgggctgtcgagcgtgccgggctcgagggctcggatgagtcggagggggaaaaagaccaactcataa

SEQ ID NO: 12666 - DNA, 288 bp, Zea mays
  Peptide Sequence Number=SeqID_56041
atgggagtcgactgggaacatacctactatcatgccgggagtctcctgaactgcttcagcctccaagtggttcagtcttccatgattgtaacgtggctgagagcggttgcctgctccaggctgaggcacattctgctttgccggggcattggggaagacgaggtgtctgctgattctgcctctgaaactgacctcctgactgattgctctgacggttctgatattggtgctgaggatactgcctttggaactgctgatgctgctgaggtggacgctggttctgcctga

SEQ ID NO: 12667 - DNA, 837 bp, Zea mays
  Peptide Sequence Number=SeqID_56042
atggcccctcatcgccctcattcctcggcagtcaagagaaggaagagccagacgaagaaggtggtgtgcatccccgcgccggtggcggcgccaccgggggtgggcgggaggccgagcacgagcggcgaggtggtgccgtcggacctgtgggcgtggaggaagtacgggcagaagccgatcaaggggtcgccgtacccgagggggtactaccgctgcagcagctccaaggcctgctccgcgcgcaagcaggtggagcgcagccgcactgacccttccatgctcgtcgtcacctacacctccgaccacaaccacccctggcctacgcagcgcaacgcgctcgccggctcgaccaggccggcctcctcgtcctcctcgtcggccaggggccatcatggtcacaaccatcgacatcatccctccgcggctgccgttccagatacggcaccggccgcccaccgtcacgccagcaacgtcgccgtcgccgacaatgcaacgacgccaggttccatcattagcgccagtgtccatcgccagctgctcaagcaggaggtggtcgacatggataattccaagcccgcggaggacgctgctgctgaccatgacttgggcttcggcatgtttgcggacatggacggcgccctcgacgttctgtgcgcccccgatttccatccaaaaaagcagcaacagcaggccactgctcagcagttggagaagctgccggaggaagaaggcacgcagttgctgctgggtcccgatcccttcagcttcggcttcttggactgggttggcgcttcatttggagtcggagagagagcagcagatgacggtggtcaataa

SEQ ID NO: 12668 - DNA, 186 bp, Zea mays
  Peptide Sequence Number=SeqID_56043
atggcccagaccaaagctgccttctccacagatgatatgaaggatccttcagctgaagcaaccttgatggtcggaaaattctataatgatgtctgggtgaatgggagagtggcacgaagcagtgtgcaagacctgcttcggctgattctgccaagcttcgtcttctgcaatctccttttgctttag

SEQ ID NO: 12669 - DNA, 201 bp, Zea mays
  Peptide Sequence Number=SeqID_56044
atggggaaaggggctcgggagggagctgaggtgaaggcgaacatgatcggggcttaccgaggggtcgaggtagaggagagggtcggcgacgagcggtggcagcgcgatgaactccagcgaggacggggtgacgcggttaggctcgataaaaggatggaagagctcagagaagaccggagaagcaacaacgagctcaagtga

SEQ ID NO: 12670 - DNA, 993 bp, Zea mays
  Peptide Sequence Number=SeqID_56045
atggcgccgctcagcgccgtgacgctcgcggccgcagccgctgccggggaccaggctcccgcgccgcccgagcgcccctccatcgtgctgcacaccttcctcttcctgctcgcctacctcgccctcggcgtgaccttctacgccgccgcgcccgccaatttcagctcctccgcgggacccacgcaccccgtcgccgacgcgctctacttctgcatcgtcacgctctgtaccatcggatacggtgacatcacgcccgccacccccgccgccaagctcttctccatctccttcgtcctcatcggcttcggcttcgttgacatcctcctctccgggatggtctcctatgtgctcgacctacaggagcatctcctcatcaccgcgctcaagaacccaacctctgcgcgcaagcaccgccacaactacatctttgacgtcaagaagggcaggatgcgcatccgtatgaaggtggcgctcgcgctgggcgtcgtggctgtttgcgtgggtgtcggggctgcagttctcaggagggtggagagcctggggtggctcgacgccgtctatcttgccgtgatgtcggtgaccacagttggttatggggaccaggcgttccggacactggctgggcgcctttttgcatccgcttggctgctcgtgtccaccctggctgtggcaagggcattcctctacttggcagagatgaggattgacaagaggcaccgagccatggccaactgggtgctgtccagagacatgaccgtgtctgaatttcttgctgcagacattgacaacaatggatatgtcacgaaatcagaatttgttgtttacaagctcaaggagatggggaagattactgaaaaagatatcatgatgatatgtgatcaattccagaggctggacacagggagctgcgggaagatcacactttcagatcttctggagagccatcacttggtttcagaacccagggataagaaaaaggggaagaaatcttaa

SEQ ID NO: 12671 - DNA, 486 bp, Zea mays
  Peptide Sequence Number=SeqID_56046
atggaacggctgacctcgaccagatcgagggcggaccaggcgaagacatccttgttatgggagagaggaaaggagtttttcctcgtctcacgatgtcaggtattcgctgattattactgtttgcctcggcgtcgccgggtcgaggggtactgccttcgtcctatcgtttctttggagctgggccttgacttttccgtcttcgactgggcgaatgctctcaaagccttcgcgctctaccgtgaggcagtgtacgtttcgttgccctgggacaaagtctctttcgatgttgcgcgatgtctgctagtcgccgtagacagtgatcacaccctgtgggcctgggattttcatacagaggtagagcccatgaatggttgcctcaaatttgttgatcgagccacgccccattatgtcattgtatgggtagaccatatcgacgatgtcgaatgtgacctgctcactctacgcgttgggtgctacaccaaatga

SEQ ID NO: 12672 - DNA, 390 bp, Zea mays
  Peptide Sequence Number=SeqID_56047
atgtcatcccttagtgctagtttggaaaccccaatttcccacgggattctcattttcccaaggaaaattagttcattttcccttggaaaaatgagaatcctgtgggaaattggggtttccaaactagcccttaaggatgtcactcaatctgaactcgtacggtccaaccccagggttatgaaggctggggagcaccgggaggataaggagggggaatgttttgtccggtttggacatggcggtggcctgactccttccggtataaccgttaagaaaaaggagatcgggcctcctgagactagtaattgtatcacatttgagtcccagaggattggggacgctttaggtggtatcagagctgttaggttggccgcaggacgtaacccttag

SEQ ID NO: 12673 - DNA, 567 bp, Zea mays
  Peptide Sequence Number=SeqID_56048
atgaggtcctcgacgacaaccaactcagtggtagaagttgcggccttcgaattgggcggcatcagtgcacctctaggaagccactcacgcttggtcggcagttatggcattggagaggttgtaggactaggaggaggcaggccagtaccagttctacggcgacgtctaggcacaaccagaggcatagtgggaggaggagatgtcggccagtaccagctctacgatgaccgccaggcgcgactgaagccagacaccgccgggatggcctttccggctcttcagacagagaaggcaccggcagcattaggccctaattctgaggccatcaaagcaaataatcttgtgcttgtttctagagttcttggcttaaatcctgagacaaggaagtttacctatggtgtaagcacacttctacgttctaattacttgctagcatataaagatgtcacaacaaaggttgtctatgataaaaattatccaaggattcagaccgtggtgaatatagtggggacgataacaaatgaatttagatttccaaagtttgagatcttaacagggaaatggtag

SEQ ID NO: 12674 - DNA, 339 bp, Zea mays
  Peptide Sequence Number=SeqID_56049
atggcgaggtgtatgggagtcgcgatcccttggcagatgggtatcatgacttgtgggtacatggtacaacctctgcagagtgtaaaactgtgcctgttaatggaaattcgtctggttctgaaactgagtcttggtcattattttgttgcgttgaatgtggccgcggcggagtccttgccgcagcctgaagtgcgcgaagtgtctgctcccttggctggggcgatggccgaagagcgctgctggcggaaggtggagtcgaagcacaatgttggcgtgatatcgcgaagtgggaggcgtcgacggatggggatggaacgatcccgtcttcggctagattga

SEQ ID NO: 12675 - DNA, 1476 bp, Zea mays
  Peptide Sequence Number=SeqID_56050
atgccggtcatcctcctaaggccggcggccacccaacctgctaccccggcgtcgccctcctctcctctctctgcccagtttgtggcggctcttcctggtggccgttcaaaggcacagcgatggtgtgaacaggattttccttctgttgcttccctgtgtcggagtgatttacatcgctcttataaggaggcactggtggatggaaggtccactacccgcggcgctgacgttggtgacagtggttgggtgaaggtagtgggacatcggtctcaccgtcggagtccctttccccctcttccctcgcatctccccagacccgtttccgctaatttacgtgggaagtgcttcaactgtttctcactgtcccaccgtgcggccgaatgtggcagtttggtgcggtgctttcactgtcgcctgcctaggcatcgggtgcacgcgtgtccacgtcagaagaagactctgcaccacccagcgagggtgttggtgtggcatccagttcccaggaaggtcgtcctagagaaggttcctctctatgatatggaaggtggttcgcgggtcggcggtaaagtgcactcgctgtggacagaggcgctgaaagatgcaccaggaggttttgggcccacctggtcagggctcatctttggcatcatcatccttgccttcggtggcattcaaggttgctcgaccaatgttcatcgtgcattgatcgtcaatgttcttggccaggagggttctgactgcgccgctgtgattctggaggcgctcgcctcaaagtatggccttgaggctgatgcgctccaaatccgacatgatgcgtccatctcgtggtggtcacgtcaggcgtcggcctctggtggaggtgccctgcttgtgcttatggatgttgaacttggcgggattccagcacacctctgggggacttatacggtagagcatctactcggtggacactgcattgttcagggattgcatccggattctgttgatgggacgaacatgtcggttctgaaactgaaggcttggggtttctctatggattgcctgccttctcgctgtgatctccatgttgaagagccgacgtctattggagaagatggatcctgctttcgtcgcacattgatttactctgtttcggtgaaggtggctatttcggttgcattgttggttgaggagcagcctctattttcctccccagaagatgatgaagatcgggataacaaacatcagcgtcagaggcagcaccttccgaatcatcagttctcttcggtccggacctccgtacatgcacggttgggaccgcgtatcgctccttcttgtgggggaggtagaccagttgatgccgctcctctcccgaattcctcggttgatgagttgcaggcgcctgttccctccctcccatgcaatccttcgtctcctgccatgggggcgccaattaatgccaatattggaccccttcctgcttcagttggggattaa

SEQ ID NO: 12676 - DNA, 459 bp, Zea mays
  Peptide Sequence Number=SeqID_56051
atggctggagcaggcgcggcgctgggcgttggagaccagagaggagagctgaggggcgcggctagagaagctaggaaggagctgggcgagcggcgagccagggagaagctgggagccacaacgctgtggagaagaaggagcagagcgcgctggagagatgaagaccagggcgcggcagggatgaaggaagaaggatcgcgcgtgaagttaaaggaaccagggcgctctgctccttcttctccacagcgagagttcgggtgtgccagagtgatggcgaggagaagagacgatcgtggatcgtttggcctcggttgtggaccgttcgcgctgccgcagagagaaccaccgctggatagttctgacatttctcccaacaacataatcgagccgactatggagactctttcggctgaagatcaaaaggaattcgaggagcacaaggagcagctgatcaagtaa

SEQ ID NO: 12677 - DNA, 405 bp, Zea mays
  Peptide Sequence Number=SeqID_56052
atgcagggcctgttacgatgggccggattcgagactggcgaaggcatcgagcgaagggtagcgtcttcgccttcgccccaacagacctctttaactgccaaagcaaaacaagctgctcccaccgtgcagagcgctgaagactcgattgtagtgccgaaggtgcctacagtcgggccagccgaagccaaagatgatgcggccgaagagccaaaattggaaaaaatagtgataatgccagaaattcttagcccaccagcaaaggcagaattgccgaaagtgcaaaaggctcctgccgcaactcccaagagaaggaggatggccagcgtgctagacgctgtcatggagaccacaaaggccttgagccctgctcctactaagaaagttgtcgaagttgtcaaagtctag

SEQ ID NO: 12678 - DNA, 672 bp, Zea mays
  Peptide Sequence Number=SeqID_56053
atgcgtgcggaggctgaacggacgcgcgctcagcttatggatacatatcgtgagctgggcgcgcggaccggtgacttcgaggaggagctgcagaaactccccactgtcgtgggggggtttatgtcgtacgcctccctggtcacctgcgagggggcgatgaacgcactctcccgcgaagggtgccgacacttcgaggtcttcgaccaggcagatgaagattttgagcgagatgtctataaggtcgaagaccccgttgtgaaggaatccgccggggccctctacgaccggatgtggggtccgcacggtcgtgaggtggtcagggagcgggccgagactgcgagggctcaggcggcgcgtggcttgcgggtggacgacttcggggcgctgaacagtgcgctgcctgacccggagccgacccctgcggaggccgtgtctggggtcgccctggagccaaccccggagaccgcggcgatcgcgacggttgcccccacatccgctgcggccggcgaagacctgcccccaaaggtggccgaaggcgcccctgatgcccccgcggctgctgtgctgagtgctgaagatcccgcggcggaggcggcggaaacaacggcggaagcggcggcggaggcaacggcggaggctcccgcagcgtcagggccttcgcaggtggcgtag

SEQ ID NO: 12679 - DNA, 480 bp, Zea mays
  Peptide Sequence Number=SeqID_56054
atggagggagtgatgaacgtcgacgagagggagtggttcgacgggcagattcctgagcgcggacgtcgggctggggctgttcggcttcgggtccggccgggtcgcggggtctcgtcgggctcggtcgctgcgcagggcatccacgtcggggtcgtgcggcatcggggcagggcgctggcgcgcgttgcacggtgcgtgcggtccgggcttcgcgcgggtgcgcgacgctgcttctgggcgcggctggacagaatcctcgacgcgggtcgctggcttgctcggcttgaggcgcacaggcggactcgatgggcgcaggggctcacgcggccaggtcgagatgggtgctcggccggctggagttgcgcgcgcggctggctggtgcggccggggagagggaagcgaggggaggggagagagtggggagataggaagaagaagcctggcggcggctggcacaggaagaggaagggcgcgcgctag

SEQ ID NO: 12680 - DNA, 1062 bp, Zea mays
  Peptide Sequence Number=SeqID_56055
atggagaaggatcgccaaggcgcgccacggaaacgacgggcgttcgccagggtggggaactcgaggcgtgaggcaaaaatggtgcgggcgagcacgaagcccaccgcccccggcgccagagcggggtccgggcaactggctgttgtcccggtgccagtggtggctagtccggtggtcgtgccgactgtggcaaatgggttctcgcaggacccgtggtccaagttctgcaccggcggtgaaattgccttggtcgccgccgcaaaggacatggccgcctcagttgtgcagcagctgaaacacgctgagaaagaggacctcggccgtcggcttgcgggggaaagggaggacgcgaaaaaagcccgcgtcgaggcccaggctgcccgtgttgaggccagcctcgccctcaagcgcgccaccgacgcggagtcggggcagaggagtctgtgcggttatgtggacaaaacggtggcctccacccgtactggggtcgagcgagcacacgcgttgctcgtggatgcgtaccgtcagcttggggtgggcctccgcttccttgggtggctacaagaggaattggagttcctctcgtccatcgtgacgggtctcatgtcctttgactcgctcattacctacgagggggctgcgaatgctttgtcccgtgagggatgcaggcattttgaagtctttgatcgggcaaccgaggacttcgaccgtggaatcttccaggtcgaagacgaggtgctaaagcggtccgctgggacgctttatgacaggatgtggggccctcacgaccgtgacactgtccgagagaggttcgaccgggcgctggagcagatgatgaacgatgaagaagttgaagacttcggtggcctggaaagctcgatgacccgagcagaagatgcgaggacggggactgaagagcaatcggcgccacaagccgacccttgcggagaccctgcagcggcggttgtgccggctggcggagaccctgcagcggcggctgcgccggctggcaaagaccctacagcggtggctgctcctttcaaggtggcagcgtcgtgttag

SEQ ID NO: 12681 - DNA, 879 bp, Zea mays
  Peptide Sequence Number=SeqID_56056
atggagttgcagcctggccataccgtggagtttggtacttcgaggatttcctcggtccgtgtgctggagatgcagcggcttggttactttggtaacaatgtcgggcaggccccggaggtgctgcgaaggtttgaagtggaggtccaccagttgacgccgaacgccgtggtggcactggcgaagtatgtctgggcagttactttcgatggcgggcaaccgtctgtgcaggtcttcaccaaaaattattgtctgcattggcagaagaggaaaataggaaataagatagcacaattcggatcgtgcaccttcacgctgaggactgggaagacttcggctgaggttgtggagatagtcccatatgctaggaacaaatggggcaactggtgggacttttggttctatgtggctcctggtgacatcgaagacctaccaagcctgcattcggccattctgtgctcacactgctacatggtgtttcctcgattcgaggtggtggaggaagatgaagatgaaggggaccttcgtcatgctgcccgcctgagtagcgggcgtgatttggttgaggaatttattgtgttgaaccgtgtttttgagttgaaccgtccgccgtatgccggctacccgggggacgactatggcgatgttgctatttgccaggggaaaaaggcgatgaccacggccgacgagggcccttcaagtggaacagcgccgggcacggccgccaagaggaaactaggtacagcagctgaggggtcgagggcttccgatcattttgcggtggatttgctggagacctacgcagttctcggggagacgatgtcttcacccaagctccgggaatcttccgcacgaatgctgaaggttaccaggggtcgctga

SEQ ID NO: 12682 - DNA, 780 bp, Zea mays
  Peptide Sequence Number=SeqID_56057
atgccccttgcaccacctcagggcatcccggctgctggaggagacccagacggagacggagacgacgacgacgctggtggtagtttgagccacggcacggagctttcagaggagctggagccagagggatggatcgctagacccatcactcgtgacgccgctcgtgggtgtcacttccacgacgctctcgataccctattgtgtcgggctttcgaccgacacacctggtctatcgagtactgttgtgtagtctaccagcatcgtcgcgggctatacccgaaccagtgggaggctacttgcttggtgcgccgtccggacgatgatctccgaggtgcagaggccttctcagagcactattctattactgagagggatactgccgaggcagccatgcaagatgcagcacgacaggcactttctcagtattgctcgttgtttagtggtgtagctgatggcctcgacctgaaatactaccctcgtcgttcgaccggcagtgctggaagtgtgattgcctcgccagttggtgagggcaatcccaggctgaacaacatggtcaacttggtcgcggtgctcaacacagagttggaccacgcccttgatgagttgggcaaggttcgggcggaggttgcggaattgcgtgctgagtgcgcagcacgccactatctggatggtggttctcccgcccctgtcaggattcagcacccttaccgttcaccgccctgtggtcgcttcgactatggtaccccagactgcaggacccggatagatttggatccctag

SEQ ID NO: 12683 - DNA, 306 bp, Zea mays
  Peptide Sequence Number=SeqID_56058
atgacgcccgcccacgtgcccagctcccttcttagagccctgctagtgccccgcgcacaccccttgcctcattttacacaccctcgccctctctcgtgctctgccctcgtcgccagacaccgtcggagacccgcgcccacgttcccgaccatccagctcgctggagaccgcgccaagccttctcgagctccgccccgagacaacgagcagtccgaggttcctgagtgtgttgttggagacctccctgagcaacaacctggtgaaggcaagtgtcctctaacctattatgtcctacatactttatga

SEQ ID NO: 12684 - DNA, 558 bp, Zea mays
  Peptide Sequence Number=SeqID_56059
atggactccgtggtgtttgaggttgctgaattggatggagcaacaatgatttgtcacactaacagtaaaaatgaaagcaaggagaagcgcgcgcagagaagagaggagcaggggcacggcaaggaaactctacggcgaggaaggagcagaggtcgggggcgagctcagaggaagacagccaccacaggaaagggagctcggcggccaggagagatgcgcgcgtgggaacgaagaacaggggcgcgcgccagggaactcagccgggcgccggagctggaggccgagcgagaatacgcggctgcgtgccatgggcgagagagcaccgagcagagggagctgggcgcgccatgggaggaaagttggagcgccggcagagggcagaaggagggagatgaagccgagggggctgcgcagcggccaggcgagctgggcgagacctcggctgggcggaccatggcggacagaaacaaccaggcagctcgacgtgctcagctgccgtgggagataagaccggcggcaagccggcaaggcaggaaatatcccaagcggaggagataa

SEQ ID NO: 12685 - DNA, 372 bp, Zea mays
  Peptide Sequence Number=SeqID_56060
atgagggagcttgcggccccggtggtgttcgtcgcaaatggacacgctgagcagagctggtgggcgtgtgtggatgaggatgaggaggatgatcctcctttggttcgtaggaatcgtcgtagcaaagccagcaatgatgtcccaattcaggctctatcagggttggttaacctcgaggggatgacaatgtccgctattgatcatgcactggaggagatcattccagaaggtctcttattggaacttcctgaagctgggggtgctggcatccatgtagaggtcccggatgatgttcattcagctagccttcttgttgggccagaaataacccgggcagttcccatgcatcttcgacctttgagggtggtctaa

SEQ ID NO: 12686 - DNA, 243 bp, Zea mays
  Peptide Sequence Number=SeqID_56061
atgtacccaagcacctaccgcacccacctgcatcccaaatccctcactagcaagcacgaatttcggattctccccaatccggttctaaaacaccgtgaactcaaccccgccgtggtcagcccaactcagaacgtgaagaagaagtggaagtcactgaagaaaggacaccaccaccctcggattctcaagcaggcaactgcttctactttgatatttgtggatccgagccagactcacctgtga

SEQ ID NO: 12687 - DNA, 234 bp, Zea mays
  Peptide Sequence Number=SeqID_56062
atgtacccaagcacctaccgcacccacctgcatcccaaatccctcactagcaagcacgaatttcggattctccccaatccggttctaaaacaccgtgaactcaaccccgccgtggtcagcccaactcaggcgctcgccggagctcggctgggcgtgagcgccgtcggggacctccctctgcgaagaattagaactacagggacttctttgcaatctgtcagcgacacagtgtaa

SEQ ID NO: 12688 - DNA, 96 bp, Zea mays
  Peptide Sequence Number=SeqID_56063
atggcgcccaaaagaaaaactgcgaactcgtctgctgcagtgatccccgcaatcgaccccaacagccagttacccttcgcagccgctgaaagatag

SEQ ID NO: 12689 - DNA, 11001 bp, Zea mays
  Peptide Sequence Number=SeqID_56064
atggccgcacatagagccagcttcccgctgcgcctgcagcagatccttgctggcagccgcgccgtctcacctgcgatcaagatcgagtctgagccgcctgcaaacatcaaagcatttattgatcgagtagtcaatattccactacatgacattgccataccgctatcaggcttctgttgggagttcaataaggatcttcttttatctgatgatatgaccgaggctgaccctatgccaaagaatgccatcttgaaaatcttaagagttatgcagattattttggagaactgccagaatagaagttcttttactggtcttgcgcatcttaagcttctcctggcatcgtcagaccctgagatagttgtagcagctttggaaactcttgttgccttggtcaaaataaatccttcaaagttgcatatgaatggaaagctaattagctgcggacctataaacacccatcttctatcattggcccaaggatggggcagcaaggaggaaggtcttggcatatattcttgtgttgtggcaaatgaaggaaaccatcaggggggtttgtccttgttccctgtagacttggagaacaaatatggtggcacacaacatcgtcttggttcaactcttcattttgagtataatttgggtcctgcacagtatcctggccaaactagtgacaagggcaagtcatctaatttgtgtgtgatacatattccagacatgcatcttcagaaagaggatgacttgagcatactgaagcaatgtgtagacaagttcaatgtgcccccagagcacaggtttgcattgcttacaaggataagatatgcccgtgctttcaactctgcacggacttgtaggatctatagccgcataagtcttctttcgttcattgttcttgtgcaatcgagtgatgctcatgatgaactcacatatttctttacaaatgaaccagagtacataaacgagttaatcaggcttgttcggtcagaggattctgttcctgggtccattcgtgctctggctatgctagcactgggagcacagctggcagcatatgcatcatctcatgagcgtgctaggatattgagtggctcaagtattatctctgctggtggcaatcgtatggtcttgctcagtgtcctgcagaaagcaatatcctcactcaatagcctgaatgatacctcatctcctctaattgttgatgcccttcttcagttttttctgctccatgtactgtcttcatcaagttcagggactacggttagaggctcagggatggttcctcctctcttgcccttgctgcgagataatgatccttctcatatgcatcttgtctgcttggcagtgaagactctccaaaagcttatggagtacagcagccctgctgtttctctgtttaaagacttgggtggtgtagagcttttgtctcagaggttacatgtagaagttcagcgtgttattggtactgctgatggacataattcaatggttactgatgcagtgaaatcagatgataaccacatgtactctcagaagcgattgattaaagctttgctcaaggctttggggtctgctacttattcccctgggaatcctgctcgttctcaaagctcccaagataactcattgcctgtctcactttcccttatatttcagaatgtagataagtttgggggtgacatttatttttcagcagttactgttatgagcgaaataatccataaagatcctacatgctttattactttgaaggaactcggtgttccagatgcttttatctcatcagtgactgctggggtaataccatcttgtaaagcccttatctgtgttcctaatggcctgggtgcaatatgcctcaataatcaaggacttgaggctgtcagggaaacttcagcactgcgatttcttgtagataccttcactagcaggaaatacttgataccaatgaatgagggtgtggtccttctagctaatgcagtggaagagcttcttcgtcatgtgcaatccctgagaagtattggtgttgacatcattattgaaataatcaataaactaagttcgtctcaggaatataaaaacaatgaaacagccaccttgcaagaaaaaacagatatggaaactgatgttgaagggcgtgatttggtaagtgctatggactcaagcgtggatggaagtaatgatgaacagttttctcatctgagcattttccatgtgatggtattggtgcaccggacaatggaaaactcggaaacctgccggttatttgtagaaaagggagggctacatgctcttttgacactcttgttgaggcctagcatcacacagtcatctggagggatgcctattgctttgcatagcacgatggtgttcaagggttttactcagcatcactctactccacttgcacgtgcattttgctcatctttaaaggagcatttgaagagtgcattgaaggaacttgataaagtttccaactcatttgatatgaccaagattgaaaaaggagcgatcccatctttgtttgttgttgaatttttgctattcctagctgcctcaaaagataatcgttggatgaatgctttgctctcagaatttggcgatgccagcagggaggtcctggaagatgttgggcaagttcaccgggaagtgctttggaaaatttcgctttttgaaaaaaacaagattgtcgctgaaaccagttcatcttcttccacatctgaagctcagcagcctgacatgtctgccagcgacattggtgatagcagatacacttctttcaggcaatatcttgatccaattttaaggcgaaggggttctgggtggaacatagagtctcaagtgtctgacctcattaatatgtatcgagacattggccgtgcagctagtgactcgcagagggttggttctgatagatattctagtctaggtttgccctcaagttcccaggaccagttttccagttcatctgatgcaaatgccagcacaaggtcagaagaggacaagaaaaaatctgagcattcctcctgctttgacatgatgagatctctctcctaccatatcaaccatctttttttggagcttggtaaagcaatgctttttgcatctcgtcgggagaatagtcctgtaaacctatccccagccgttatatctgttgctaacaatattgcttctattgtgttggagcacctcaactttgaaggtcattcggtaagttttgagagggacatgactgttaccacaaaatgcagatatcttggaaaggtggttgaatttgttgatgggatgttattagaccggccagaatcatgtaattcgattatggtgaattcattttattgccgtggtgtcattcaggccatcctgaccacatttcaggccaccagtgagttgctcttcacaatgagcaggccaccgtcttcacctatggagacggatagtaaaaccggaaaggatggaaaggagatggattcttcatggatctatggtcccctcaccagttatggggcaattatggatcatcttgtgacctcatcttttattctctcttcatcaactagacaattacttgagcaacctatttttaatggatctgtaaggttccctcaagatgctgagacgttcatgaagttacttcagtcaaaggtgttgaagacagttcttcccatctgggcccatccccagttcccagaatgcaacatcgagctgattagttcagtcatgtccatcatgaggcatgtttgctctggggtggaagtgaaagacactgttggcaatggtggtgctcgtttggctggtccacctcctgatgagagtgcaatttcacttattgtagagatgggtttttctcgtgccagggctgaagaagcattaagacaagttggaacaaacagtgttgaaatagcaactgattggttattcgcacacccagaggaaccacaagaggaggatgatgaacttgctcgggcgcttgcaatgtctcttgggaattctgttacccctgcacaagagggagatagtaggtccaatgatcttgagctggaagaagcaacagttcagccgcctcctatagatgaaatgttacgttcatgtcttcagctacttcagagaaaggaagcattagctttctctgtcagggatatgcttgttactatcagctcacagaatgatggccaaaaccgagtaaaggtgcttacatatttgattgataatctgaaacaatgtgtggtggcatctgagccttcaaatgatactgcattgtctgctcttttacatgttcttgctttgattcttcatggagatactgctgcccgtgaagttgcctcaaaggcaggacttgtgaaggttgctttggatctgctgtgcagctgggaggtgcaaattagggaaagtagcatgattgaggttcctaattgggtaatttcctgtttcctttctgttgatcagatgctccagttggaaccaaagttgccagatgttacagagctacatgtcctgaaaagggataactcaaatataaaaacatcacttgtgattgatgacagcaagagaaaagattcagaatccttgccaaatgttgggttactagacatggaggaccagtttcaacttttgaagatctgttgtaagtgcataggaaaacagttaccttcggcttccatgcatgctattctccagctctctgcaacactgacaaaagtccatgcagctgctatttgtttccttgaatctggtggtttgaatgcattactatcactgccgacaagtagtttgttttctgggttcaacaatatggcttctacaataattcgtcacattttggaggaccctcacacccttcagcaagcaatggaattagagatacgtcacagtcttgttacagctgctaatcgacatgcaaatcccagggttacaccacgcaattttatccagaatttggcttttgtcgtgtatagggacccagtgatatttatgaaagctgcccagtctgtgtgccagattgagatggttggagataggccatatgttgttctgttaaaggatcgtgagaaggaaaggatcaaggagaaagataaggacaagtcagttgataaggataaagcaacagtcgcagtcactaaggtagtttctggggacacagctgcaggatctcctgcaaattctcatggaaaacagtctgatttgaattcaagaaacgtgaaatctcaccgcaagccaccacaaagttttgtcactgttatagagcatctcttagatctgctgatgtcctttgttccgccaccccgtccagaggatcaagttgatgtctctggtactgccttatcttcagacatggatattgactgcagttctgcaaaagggaaagggaaagctgtgtctgtcccacctgaagagagcaagcatgctatccaagagtctactgcatcccttgccaaaactgcatttttccttaagttgctgacagatgtattgttaacttacgcatcatccattcatgttgttcttcgtcatgatgctgagctgagtaacatgcacggtccaaatcgaacaagtgccagactaactagtggtggaatctttaaccatatcctgcagcatttccttcctcatgctacaaggcaaaagaaagagagaaaaaatgatggagattggatgtataaattggcaacaagggctaatcagttcttggtggcttcatctattcgttctgcagaggcccgaaaaaggattttctctgaaatctgcagtatatttcttgatttcactgactcgtctgcagggtacaatgccccagtaccaaggatgaatgtgtatgtcgatttactgaatgatattctgtcagcccgatcaccaactggctcctcgctgtcagcagaatctgcagttatatttgttgaagctggtcttgttcattcattatcgacaatgcttcaagttcttgatttggatcaccctgattctgcaaagattgttactgctgttgttaaggccttggaactcgtcagtaaggaacatattcattcagcagataatgcgaaaggagtgaactcgtcaaagattgcttctgacagcaacaacgtgaattcatcatctaatagattccaggctcttgacatgacttctcagcccacagagatggttactgatcacagggaaacgtttaatgctgtccgaacttcacaaatatcagattcagtggcagatgagatggatcatgatcgtgatatggatggcggctttgctcgtgatggtgaagatgattttatgcatgagatggctgaagatggaactggtgatggatctacaatggaaattagaattgaaattccacgcaatagagaggatgatatggcccctgctgctgatgacactgatgaagatatatctgccgaggatggtgaagatgatgaagacgaagatgaggagaacaacaatctggaggaagatgatgcccatcggatgtctcatcctgacacagatcaggaagaccgtgaaatggatgaagaggaatttgatgaggatctgctagaagaagacgatgaagatgaggatgaggaaggagtcatccttcgcctggaggaggggattaatggcattaatgtgttggaccatgttgaagtatttggtgggagcaacaatttgtctggggatacgctgcgtgtgatgcctctagacatttttggtacaagaaggcaaggccgaagtacctccatatacaatcttcttggtagggctagtgatcatggtgttcttgatcatccacttctcgaagagccttcttcaacaacgaatttttcagaccaagggcatccagagaatcttgttgagatggctttctctgatcgaaaccatgaaagtagctcctctcgtttggatgctatattccgcagcttgcgaagtggacgtaatggacaccgctttaatatgtggctagatgacggtccacaacgtaatggatctgctgcccctgcagtacctgaaggcattgaagaattgctgatctctcatctgagacggcccactcctcaacctgatggccagagaacacctgttggtggtgctcaagaaaatgaccagcccaaccatggatcagatgctgaggcaagggaagtagcaccagctcagcaaaatgagaacagtgaaagtacactgaatcctctagatctgtcagaatgtgctggccctgcacctcctgatagtgatgcacttcaaagagatgtgtccaatgcaagtgagcttgctacagagatgcagtatgaacgtagtgatgctataacacgtgacgttgaagcagtgagccaagcaagcagtggcagtggtgctactttaggggagagcctcagaagtttagaggttgaaataggaagtgttgaagggcatgatgatggtgaccggcatggaacttcaggcacctcagaacgtttacctttgggtgatattcaagcagctgctcgatcacggaggccatctggaaatgctgtgccagtaagcagtagagatatgtctctggagagtgttagtgaggttcctcaaaatccagaccaagaacctgatcagaatgctagtgaggggaatcaggagcctaccagagcggcaggtgctgactcaattgatcctacatttttggaggctcttcctgaggacttgcgagctgaagttctttcttcacgtcaaaatcaagtaactcagacttctaatgaccaacctcaggatgatggtgatattgatcctgaattccttgctgcacttccccctgatataagagaggaggtgctagctcagcaacgtactcaaaggatgcaacaacaatcacaagaattagaaggacaacctgttgaaatggatgctgtttcaattattgcaacattcccttcagaaatccgggaagaggtgcttttgacatctcctgacacactactagccacactcacgcctgcactagttgctgaggccaacatgttaagggagagatttgctcatcggtatcacagtagctccctttttggtatgaactccaggaacaggagaggtgagtcctcccgacgtgacataatggcagcaggacttgatagaaacacaggtgatccctccagatcaactagcaagccaattgagactgaaggtgctcctcttgtcgatgaagatggccttaaagctcttattcggttacttcgagttgttcagcctctatacaagggtcagctgcagaagctacttgtgaatctttgtactcatcggggtagcagacaggccttggttcaaattctagtggacatgcttatgcttgatctgcaggggttttcaaagaaatcaatagatgcacctgagccaccatttaggttgcatggcaaggctgttctcctagatgatggtgaagaacagaaaacctttgcacttgttcttctgttaaatctgttggatcagccactttatatgagaagtgtagctcatcttgaacagttactaaaccttcttgacgttgtcatgcacaatgctgagaatgaaattaagcaagctaagctagaagcatcatctgagaagccatctgcacctgataatgcagtgcaagatggtaaaaataactccgacatttctgtatcatatggatcagagttgaatcctgaggatggcagcaaagcccctgctgttgacaacagaagtaacttgcaagctgttttgcgaagtcttcctcaaccagagcttagattgctatgttcattgcttgcgcatgatggattgtcggacagcgcttatctccttgtaggtgaagtgttgaaaaagattgtggctcttgcccctttcttctgttgccatttcataaatgagcttgcacgttcaatgcaaaacttgacacttcgtgcaatgaaggagcttcatttgtacgagaattctgaaaaggctcttcttagctcttcatcagccaatggtactgcagttcttagagtagtgcaggctttgagctctcttgtcaatactcttcaagagagaaaggatccagaacagcctgctgaaaaggaccattcggacgcagtttcccagatttctgaaattaacacagcattggattctctgtggttggaattgagcaactgcataagcaagatagaaagctcttcagagtatgcatcaaatctaagtcctgcttctgcaagtgcagctatgttaacaacaggagtagcacctccattgcctgcaggaactcaaaacttattaccatatatagaatcattttttgtgacatgtgagaagttgcgtcctgggcaacctgatgctgtacaagatgcttcaacttctgatatggaagatgcttcgacatctagtggtgggcagagatcatctgcttgtcaagctagtcttgatgaaaagcaaaatgcttttgtgaaattctcagagaagcacagaagattgctgaatgcattcatccgtcaaaactctggattgctggaaaagtcattctcgctgatgttgaaaattcctcgcctgattgattttgacaataaacgtgcatattttcggtctaaaatcaagcatcagtatgatcatcatcatcatagccctgttagaatttctgtgcgtcgtccatatattcttgaggactcctacaatcagcttaggatgcgatctcctcaggatttgaagggtaggctcactgtccaatttcaaggagaagaaggaattgatgctggtgggctgacaagggaatggtaccagtcgatatcacgagtcattgttgacaagagtgcccttctgtttacgacagtcgggaatgatttgacgtttcaaccgaatcctaattctgtgtatcaaactgagcacctctcatacttcaaatttgttggacgagtgcttttagatgcccacttcactagatctttctacaaacacatacttggtgtcaaggttacataccatgacattgaagccatcgatccttcgtactacaaaaacttgaaatggatgcttgagaatgacataagtgatgttttggatctcacctttagcatggatgcagacgaagagaaactgatattgtacgagaaggcagaggtcactgattgtgagttgattcctggagggcgtaacatcagggttactgaggagaataagcatgaatatgtcgaccgggtagcagagcatagattgaccactgccatcaggcctcagattaatgccttcctggaagggtttaatgaactcattccacgggagctgatatctatcttcaacgacaaagagcttgagcttctgattagtggtcttccagatattgacttggacgatttgaaaacaaatacagaatattctggctacagcatagcctctccagtcgtccagtggttctgggaaatcgttcaggggttcagcaaggaagacaaagctcggttcctccagttcgtcactggcacttcaaaggtaccgttggaaggttttagtgaacttcaagggatctctgggccacaaaggtttcagatacacaaggcatacggcagcacgaaccatctgccttcagctcatacttgctttaaccaactagacttgcctgagtacacgtccaaagagcagctccaggagaggcgaaggctgaattcacagaacccgcaggcgctaatcggacggaggcctgttcgacctccttcgctcacacgagacaagacgaaggccccgccgaagtcccgctccctcaccaccgagaggcccatgttccaacatttggcgcccaccgttcgtgcgacgagaaacaacctgcgatggccccccaagagagcaacgtccaaggccgctgcatccatcgacgacgcggcaaaggcagcactactggcggagaagaaaggaaaggccctcgcagacaccacccccaagaggccttcgaagacgacgctgtcaacaacaagagacagcgccaggatcaccccacccccgacgacactgtacgcacctgtagttccgagggcgcaccacaagcaccaccaccaggcttcgctccgccaaagggcgaagacaccatag

SEQ ID NO: 12690 - DNA, 69 bp, Zea mays
  Peptide Sequence Number=SeqID_56065
atggctcgtagaagatcccaaaagaacaagaaaacccaggagaacaaggagagtgataaatgcctttag

SEQ ID NO: 12691 - DNA, 270 bp, Zea mays
  Peptide Sequence Number=SeqID_56066
atggctccccgaaggagcatttggaccacttcaattgaggtcgtggatgcacaatgcgtcaaggatgtggtgtatgagttgcgctcgtcaaccaataggatcgagaacatgtctttagacggcaacgtcatacagaggcccttgaagtccaaagtatggccccagagtccggaggaagtcaacgccgaggacgagatcgaagccatggcaacagacggagaagtcctcaaggctggtgcacagacaacattgtgggtcatgccttcatag

SEQ ID NO: 12692 - DNA, 915 bp, Zea mays
  Peptide Sequence Number=SeqID_56067
atgggccagagcaaggcggagttcttgaagcagttcggtggggactacggttacccggacgcgcctaggggcatcgacgagctgcgggccgccgagttcaagcgcctggaagggatggtttacctggaccatgctggtgcgacactgtactcagaggcacagatgacggatgttgctagagaccttatgtctaatgtctatgggaatcctcgtatccttaaatttgggagatatgctctgagcaaaggagctactgtatcagcagttgatgttgaagaggttgttgatccatcaaagaatcatgagagtgatagtttatttaaggtttcaaaacgctcaaaccaaagaagaggtgacaatgtgcttttgcacaattatcagaatggaagcctgtcagctatttcaggaaacaatttaaatctatttgcattcccttcagagtgcaatttctcagggcataagttcaacctcagcttggtcaagctcatcaaggaaggaaaatttatggatttctcatcacaacagcagggccagtggatggttctgatagatgctgcaaaaggatgtgcaactgaaccaccaaacttgaccctgtatcccgctgattttgttgtctgttcattttacaagatatttggctatccaactggtcttggtgccttaattgtaaaaaatgaggctgctagtttactgaacaagacatacttcagtggagtaaccttgtggaatacttatgacataggaacggtagctgcttcaattgctgacatcgactttgttcagaaaagaaaaggcattgagcaaactcttgaggatggaacaatctcattcttgagcatatcttctcttcgatatggctttaagataattgatatcctaactatctcagctattgcacggtactatcagagatag

SEQ ID NO: 12693 - DNA, 321 bp, Zea mays
  Peptide Sequence Number=SeqID_56068
atggccggttcaagggatagctctgatatttctccaagcaacatcatagagccgacttgggaaaccttgccggccgacgagcagctccagttcgaggagcacaaggagcggatgatccaggaggtgaaagcaaagttcttggccaacttcaaagtggacaggaacaacaaggtcgtccgacatcgggcgacggatccggcttcgctccaacccacgccagatatccccaataacatcatagggggtatgcaaagcgatcttaagagactagtgttggcacttgctctcagttgcaaggaggccaacaagggtgaacagtga

SEQ ID NO: 12694 - DNA, 249 bp, Zea mays
  Peptide Sequence Number=SeqID_56069
atggagtcttcagcggagacaaggcttccactccactctatcggtgctaaaggttcagcacaaaccaataaaaagatcaagttagggttcaaaaataaaggagcaaaagaaaccgaagagaaccctggtctggcgcaccagacagtgtctggtgcaccagggccgtacgacttcaaacttgccaccttcgggtttcagaagagccgctccgctataattcatctggtgcaccagcggagcaacggctag

SEQ ID NO: 12695 - DNA, 954 bp, Zea mays
  Peptide Sequence Number=SeqID_56070
atggtgaccaccggttcgatggtggggagaagcaagccgggctgcggcctctgccccgccctcagcttcaaggatcttcatcatccttactgcggcggggggcgagctgagccggagctctacctcccacacaggggagagggcgctcattggcttggcggaggggcggactttgacaacacggggccggtcggccgcaagcgtcgtcagctccagcatgcctggctcgctggctcaactggctctagcgctgcttccggtgccacctcccaccactggggcggggcgcggcagcccgcccaccgtatgggcggctgttgcgccgtgcgcaccgggggaccgtccaagacgtcgcacgccgctagggcagcgttcgtgttcttggattgtcttgtccttgctccggcacgacgcctccgtgcggaggtgacgagtgaggtatccgtatcccggaggcgtaggagtccctcggcttggtcggccttgccactcaaggcttctcttgctcagttacggaaccttcggctgctctgcgatgagccagagccggaggcagcggtgtcaacatggacagaggcggagtcggctcgaaaaggggcttcgtcggcccaggagcaggtgacttcccaggccgagaaggtgcagcagcggcggctggagcctggccgggtcatccgtgagcgggaccaacttcagagtcacgcttccgaggccgtgagccgggctgatgtcctcgggggacagctggctgaggctacggagcggccagccgagccgtctgctcgggccgggatcctggaggagaccctggctgcggatggcccaggcgcggtgctgacatcttccttcgaggtggagatccttccgcccatgtcgccgtccgaggccgggccagatcccgtcgaaggtgggaacaacaccgagggtgccgctgttccctctgtcgatgtctga

SEQ ID NO: 12696 - DNA, 357 bp, Zea mays
  Peptide Sequence Number=SeqID_56071
atggccgataaaggcaaaggcaagggcatcgtcatcagcaatcctcgcatgtcagatatatcacaaaaggagattgctcgaaaggcttcggacgagaaggctaaaagaaaacctccagaaagtgaaagatgggatgatatccctgaagatgcagtcatttcactgtttccaaatggtccaatccaccaccgcaacaatttctataaagatattcttctcgtcttcaaacatgctgaagaagtcaagattggagttccactggacgcccgcgtgattcttcgaattaattctatctctgaaaacaagccagagaaagattttgatctttttgcagactttgaactgccaaatccataa

SEQ ID NO: 12697 - DNA, 684 bp, Zea mays
  Peptide Sequence Number=SeqID_56072
atgatggaagataatgatgcggttggaagagacatcaagacattggtatcccttatggtcaaaagagtatccgaggaagacacgccaagcgaaacgaggtgcaagtttgtggggagcaaccgtggaaaggttgggatagcaagcgcaaccaaaaacacgaaggtgttcataggagggggagtaccaaacagggcaacatgggggcatgaggccctgatggtgtttgtggggagacaattcagcaaggtcaaacaagatgtggttgacaaaggcgtatcacttgagagcaagcaacacctaatcaagccaaccggcataattgtcaaaggaggacacggggacaaccatcaccaacactcgaacgttggaaacagtagctgcctagacgtagaggttggcaatgacggcagccccggcggcggccttctcctgttcgaggagatgagtggctacctggacacgaatgtgtgcattggcagcttccttgtccgcatcctgagccgcagcgaacatgtcgtcgatcttcttgcgaaaggccacaacctcatcctcagcgtggtgcgctcctcgtcagtcaatgaggtcctgtcatgggtgcgggagaaagagggagaagatgtgtgtacgttgctacgaccacacgacacaacggtgacaacagccctagaggggccactgccctag

SEQ ID NO: 12698 - DNA, 411 bp, Zea mays
  Peptide Sequence Number=SeqID_56073
atgttgagtggatcggaactccgaaaacactatggaggggaggcccttcgtgaaaatataagtgaattgtgtcgtcatcgggaagtgaaggacgcggactacaccaatggtgtccttttcacgaatgaaatggaggttgatctccaaatgctttgtgcgttgatgctgaacgggtttggtggagagatgggactcccgaggatcatgcatgtggaggcagacctattgaataccataagcaatgtcaagcctgtgaacatactgaagggcaccggtgggacttcgaaactgtgtggcatccgccacaagaggggcggagtcagaggcaagcttggcctgaagatccacaagcatggtgcatatcatcccaatgcgctcaagaatgtcctatgtgtagaggcgccgatgtag

SEQ ID NO: 12699 - DNA, 1038 bp, Zea mays
  Peptide Sequence Number=SeqID_56074
atgaaggacctggtgtcgtgcttcagcgagcacgccgtgcggatctccgacgtggcctgctccggctccggtcccgccaatgcggcggcgggcgccccggaggccggaggaggagggcgggcgccagcggtgagcgcggtgaccaccgcgtaccggtcgcggctgtcggcgtccgggaaggagctgctcatcgacgtgacttggtcatggtctcgggcgcccgacgggcccgcgctctccgtcgccgtccacgaggcggacgccgtctcgcgccaccgcgccgccagcggcgccgcggcgccgcggcacctgcacaagaagaaggggagcgggacgttcacggcgggcagctgcgtggtgggcgtgttctgggactacgccgcggcgcggtacggcgctggctcggggcccgagccgacgtccgggttctacgtcgccgtggtcgccgacgccgagttcgttctcctgctgggcgacctcagccgcgggtacgtggaccgcctgcacgggggcatcccgatcgccgggtcccggatggcgcggcgccgggagcggtttgtcgggtgcgggcgctggtccacgagagcccggttcttggagtccggcgaggagcacgagatcggcgtcgcgctgctggacggcgacgcggaggcgtgggtcaccgtggacggccgcaaggtcgtgcagctccggcggctgcggtggaacttccgcggctgccacaccatcttcctcgacggcggagcgccagtcgacgtgacgtgggacctgcacggctggctcttccacgcgggcgccgagtcgccccaaccgtcctccacttccccctgtgccgtgttcacgttccaggcgcgcggcgcgtcggagacaaagctgtggacggacgacgattgcttcgacgacggagaggaggcggacaagctgccggtgacgccgagcggtcggcaacagaaggcgggaggcggtggggcgtcggggtcggggcaggggttctgcctgctgatccaaggctccaggagcttttccatgagcacttaa

SEQ ID NO: 12700 - DNA, 873 bp, Zea mays
  Peptide Sequence Number=SeqID_56075
atgtcgtgtgcgttcgacgactactatatcgaggattgtggcgtcatcttggcgccggaggtgacacagaggaggatcgacaacagtgaccagttcgtcatcctcgccaccgtcaggggtctggccggcaagcagactattattgtaagtggccaccacgggaagctccacatcgacggcctccgatttataatcgacgaaggtggtggttatgaagacaaacctattgctgcgatagtttttccttcaaagacattgatcagaagtaccgaggaagcgggaaccacatcagagagcgacgaacatacttccggctcgcctgagaccctgtcttcgccaagaagcaaccctgaccaaatcgccacgccaaccgaccagatcgcaggagcatttaatgcaaagggctcggactcgggctcagccccggaagacggcgaactccgctccgcccgacccagggctcggactcgggctcagccccggaagacggcgaactccgctccgcccgacccagggctcggacttgggctcagccctggaagacggcgaactccgcttcgcccgacccagggctcggactcgggctcagccccggaagacgacgaactccgcttcgcccaaccccagggctcggactcagccctggcctcagccgacggtctccgcctcgcccgacccaggggcccggactcgaccacggccgcggaagacagactcgacctcgacctcggaggagcctccacatcgcccaacctagggcgcggaccgaccacgtcgaaaggaggcgccatcattaccctaccccaagctgactcaggccacggggaacaagaccggcgtcccatctggctcgctccgccagataggcaatga

SEQ ID NO: 12701 - DNA, 183 bp, Zea mays
  Peptide Sequence Number=SeqID_56076
atggcgctcgcgcccggcgagagcgggcggtatcgcctcgctctcgcccacgctggagcgcccgcccgggcgagaggcggcctgtgcactggagcagcaggggcgagagtggaggcgagagctgacgtggcaggggcgaaagggaggctgtgcactggactcagccttacaagtttgagttaa

SEQ ID NO: 12702 - DNA, 879 bp, Zea mays
  Peptide Sequence Number=SeqID_56077
atggcaactcctattgacgtggctggtctgcgccctaggttgggcgatgtggaagctcctccgaagccgaggtcgagtctgtcttccgtggccgaggtcgagtccgagcccctgggtcgggcgaggcggaggccgccggctgaggccagggcggagtccgagccctggggtcgggcggagcggagttcgccgtcttctggggctgagcccaagtccgagccctgggtcgggcggagcggagttcgccgtcttccgggacttagcccgagtccgagccctgggtcgggcggagcggagttcgccgtcttccgggacttagcccgagtccgagccctaggtcgggcggagcggagcggcgctgttcttctgtcaggccggtcagtggagcggcgaagtgacggtggtcacttcggctctgccagctggggggcgcgcgtcaggataaagctttacgctgatgggggttaccagctgagaattaggagccttgaggttccttctgacatcaacggttctcgaccttctcccacccccgacggcgctgggacgctggagcacaagctccatcggtggcgcccgccggcggaacacctcccagataagcaagccctgccgccgtccccggaagccgttgctgcatcgccctcggcaaaggatgtgccgctcctacccgacgcgggaatgcggcactgggccgcgtgcgggcggtttgcgcagtgcagcgggtccttccgcggtgaagtcgaccgggccaccgccgaggccttcctcctcacgaggctcccagtgatcctcctccgctacctcggggttgcagaaactattaatgacgcagttgaatttgttcatcagaatttcatagaaatgaataaactctag

SEQ ID NO: 12703 - DNA, 873 bp, Zea mays
  Peptide Sequence Number=SeqID_56078
atgaggcggaaagacggcgggtatcccccatccgggggcttggaaggtggaaagacacgatgcataagggagcgcgaagacatggtcgccttccaaagggggcccacgcgtcatgcaaccggcgcgccgaatgcttcgtgcatgcaactgcaccgccacttgcgccactaccgcgcctcctcgactgcggaaccaatatcgcgactcgaagcgacccagcgcgcgacccagcagcgtcagcctggcgcgacgggaccgggaaagggggataccccgaaaaggatccttccccgtgaaggaaccaggctccgagcctccctactgatcagaggttcgaaggctggcccctcggaagggttcgacagccgcctcagatcacgtgggccctacacccactactggtcagaggttcgaaggtcggcccctcggaagggttcaacgaccgcctcagtctactcgggctccgcgcccactactgatcaggggttcgaaggctggcccccgaaggaatcccatcagagggaggcatcgagccctcggaccccgtcgccaggggaccgggtccggcagatcacccgcagctcaccggagacaccatgttcggcgcccatcaagggcaacatggcgcttctccccctcctccttgcggaaaggcgacgcaggggcgtatgtaaaaaagccgagtctgtccctgatcgccctctcgccctgtgcagaggctcgggggctgctctcgcaaacccggctccggccgaaccgttgaaagcgtcaacataccagcccgagaacttgggacccgaccgtacacccgggctacggccagctcgcatgagggaacgaccagaccagccgaagcattacgcgaggcattaa

SEQ ID NO: 12704 - DNA, 459 bp, Zea mays
  Peptide Sequence Number=SeqID_56079
atgcctgctgaagttggtacatcagagatgcaccagatcaatagttctgaaaatgctacccaggagacacaaattgaaaatgtagctgaaaaatcagcagaggatggctataattggcgtaaatatggacaaaagcatgtcaagggaagtgaaaatcctagaagttattacaagtgcacgcatcctaattgtgaagttaaaaagctattagagcgttcgcttgatggccaagttactgaagttgtttataaagggcgtcataatcattctaagccccaaccaaatagaaggttagctgctggtgcagttccttcaagccagggtgaagaaagatacgatggtgtggcaactattgaagctagcgatgatgatgttgatgctagaggtggaagatcctaccctggggatgatgctaatgatgatgatttggactcgaaacgcagatgttgccatggctag

SEQ ID NO: 12705 - DNA, 312 bp, Zea mays
  Peptide Sequence Number=SeqID_56080
atgtccggtgagccaacggtcggccgcgcaatcttcgcgcaacacatggactgctccaacggtcagctggtgcaccggattgtgtccggtgggccaatcagcccagaggagcaacggtcggatatgccaaatttggaaggagatcgcgcaccggaccgtttacaggacctgtctggatcacctattcacccccctctaggtactctcaagcgatccccgaagcggaatgtggtctctgaggacgaactcgtatggagttgcccaccagatcatcagtgtgatgtagcccccgagcccccgagtgatctgtga

SEQ ID NO: 12706 - DNA, 2142 bp, Zea mays
  Peptide Sequence Number=SeqID_56081
atggacgaccggccaccgtcttggccacggccaccctgtaccccgtccaggccctcaggctcacccctgctgcactgtccgtcgggctcccattcgagctcggccctgcgcgcgctggccaaggccgcgccgaccgccacgttgggcgagatcgcactaggtgagagcgcgctgggcgatgtaatgctggacaggggcgcctcgtccatcataagcccagcccagggacacgccggccatggaagttgtatcatcgtcctggtgtttcatgagtattacgtgaacattaagagttgtttgcatcctgcaagttacaaataccagcttcctggttcctgcgcaaacaagctgcaaattgcaaatactagcttcctggtgttgcaattggcttcctgttggccagctgttgatcctgttgagcgcgagagcgcagacgagtatttttgtcaaattatgatctctccttgggcttgtgaagtaacaattgtagaagtatggttatatgcagaggacggtcaggatgaatttgagaaggatgacttcatagtggacgacgaggaagaagaagtggaaggagaggaagaggaacagaagagtgatgacgagaggcgaagaaagaaaaagaaaaagaagagggaatcagacgacttcatgctcgatgaggatgactatatgttgctccaggataataacatcactggcatcagtcgcccaaagcctggaaacaagtttaagcgcttgaaaaaggctggaagggaatctgaaatggatgagcactctggtttttcagatggtgatggaacaggcaaaaaacgcagtggcaaggagagggtcgagtacagtttatttggtgatcatcaagatgctgcaccctttgaggaggacttcgaggacgatcagcaggcaggggagggtgaggaggaagttggtgatgatgaagatgaaatggcagatttcattgtggaggaagatgaaattgatgggaatggacaagttgtaaggaggaagaaatttaaaaagaaggtaccacgacaagcagcaggtgtatcatcgtctgctctgcaagaggcccaagacatatttggcgatgttgatgagctgttggcactaagaaaacaagagcttgagagggaggcccttaactctggtgagttaaggggggcgaggcttgaagatgagtttgaaccatttattcttgcagagaagtatatgacatcaaaagatgagcaaataaaagaaaatgatgttcctgagaggatgcagttgtctgaagagttgactgggtatcctccaacggataaaacaacgattgaggaagagagttcatggatacacagccacttaaccggtgatggatttctgtccttttttggcaatgagcacataaacaaggatattgaccagaaggacattgtcaatgtcgtgaccatgttgcatgccaacaaatttgaaattccgttcatcgcaatgtacagaaaagagagctgtccaaccctattaagttttgattctgatgaggataacgaggatattgaatctgatgcacgcaaattgaggtggcataagctgctctgggcggttcaggccttagacagaaagtggctacttcttcagaagcgcaaggttgctttacagttgtattatgagaaaagatttgatgatgagaaacggaggatagatgatgtcacaaggcaagaacttaatagccaactttataattccatcattgaagcactgaaggatgctaaatctgagaaagaggtggaggatgttgatgcaaaattcaatttacattttcctcctggtgaagtagaagaagaaggtcaatttaaacgtcctaaaaggaagtccttgtacagtatctgtcacaaggcagggctatgggaggttgccaaccaatttgggcgcagtgctgagcaattaggccaccatctgactttaactaagatacctgaagcaggcgagcttgagagcggtagacattcacctgaagaggtcgctgcaaatttcacatgtgcaatgtttgaaacatcacaagatgttcttcgtggcgcgagacacatggtatttaatagacccacaattctgaccctcttttgtactccttccattccaaattataagacattttggtttttctag

SEQ ID NO: 12707 - DNA, 1056 bp, Zea mays
  Peptide Sequence Number=SeqID_56082
atggaccagaggaaggccatcttccgcgcgaagctccgcgagacgaaggagaagcaacagcggcgcatcgaccccgcgctcgtcaggtataacgaatttgaccagcccatatgcagagtatgcaatattacactgaagtctgaagcactttggcctgcacaccaagtgtcacggaagcatcatgaagcaaaagccgccgctgctgataaggctacaacacttacagggtctagaggcagcaatgcaaagctagagcaaccattggagcctcaggaacgaaaatcatccacactacctaccaagttttttgataatcagggagctaaaaggaaaagtgatgatactatatctgagggaaggtctgtgcgccatgaagttgctgttattcaaccgaagaccataggagcaagcactgataaatcatctgttcggatggatcaaatgtcaaagaaagggagtcaaagcaacaccaatgtccaaggaatccttccagggaatttttttgactatggagaagatgaagcttcagctccagctccaaaagagcttagtacatctcaaattcacactaaggtgaaaggtgtccctgatggcttctttgatcacaataaatctagcagtggcatgcaacccaatgaaccaagttcagaagctgctcaagtaataggatcgttgcctgaaggtttctttgataacaaagatgcagatctccgtgcacgcggtatccaacctcaaaaggttgacatgaatgatgcgtacaaagaatttgagaaggaaattcaggaggatttgcaggaagttgatgaccgccttgaagaagaggagattgatgctgctgctgagagggaggagtacttgactctagagcaacaggagtacaggcagcaggttgatatgttgaagaaacagctagtagagtcgaaagccgcccgtactgctagagtaaatagaaaacctatcggtatggactcggactccagcagtgactcatcgagcgatgaagaggatgacaacacagattttgctgttgattggagagcacagcatttgaaatga

SEQ ID NO: 12708 - DNA, 69 bp, Zea mays
  Peptide Sequence Number=SeqID_56083
atggccttcggggcaaataggtgccaggccgccacggcttcagctgtgtgctattcaatttactcgtaa

SEQ ID NO: 12709 - DNA, 419 bp, Zea mays
  Peptide Sequence Number=SeqID_56084
gcacaaggatggggacagtggccaggacaagctccagcgtcgcagccacagtggactggtgttgggtggacgcaggcacctccaggcacttggacacctccaccaccccaaggatcgcagccagtcccgggatgggtgccaccggtcttccagccaccggcgggctctcaaccatttcaagcgtggatggcaccgccaccgacggggtgggtgccaccacctcaggggtggccagcacaacagtacccgtggatgcatgcacagcctcctcatcaccatggatcacagcgtcacatgctcagggatcggagggtgctgtcaacgtccaagacttcctcgtccatggttctggagggagtggccaccttcctggtggcggaggagggagtggccaaaactcacatagcccgccggagtga

SEQ ID NO: 12710 - DNA, 321 bp, Zea mays
  Peptide Sequence Number=SeqID_56085
atggcgtgttttccgtccttctttgagggcgaaggtgccggaaagataactcggcgaggctccatcccttttgtcgggacgcttgcctctttctttcttgtaatccgcgtccactcctttgtgggcgaggtgggcagaggagttcttcgggcaagaggctacgctattcgttgtcttgctccggctttcctggggatctccgaggaaaacttcttcttcggtggatctgctatgcggtgcagagttccttcctcatctgctatggacgagatggttccgaagcagaacacggatccagggcgaagagtgatcttgcactag

SEQ ID NO: 12711 - DNA, 462 bp, Zea mays
  Peptide Sequence Number=SeqID_56086
atgaaggagcacgctctgcatttgcttgtactctcccacgtcttctcggtgccgtctctgaagacggtctgcgtcgaccaactcgagaggggcttcctcgctcctgacaacgtggtagacatgctgcagcttgccaggctgtgtgacgcgccccgccttgcgctcgcctgtgtccggatggtcatcggggatttcaagaccatctctctgacggatgggtggaaagtgatgagacgggccaatccaagtatggaacaggagctgctcgagtctcttgtcgaagctgatacgagaaggcaggaaagagctaaaaagatggaagaaaagaaagtgtatcagcaactgtacgaagcaatggaggcgctggttacgcctaatctttacggcaatttggtggctaacacgactgcatgtattgttggagggatgggcatcatgcctggaggtagggattgcagctaa

SEQ ID NO: 12712 - DNA, 396 bp, Zea mays
  Peptide Sequence Number=SeqID_56087
atgggtagaggcacgaggggtcgtggcaggcctcgccgtgctaatggcaagcgcaagcgtgcctcgagtcccccctcgaaggactttggggactcagagtactcaaaggaggcatcctccgagttggactgttcgcttgctccggcttctcccccggcgtcatccgaggactcagatgactccatggggctttccaccgcgcctcgggcgtactggcgctccatcgagcacgccgggctcggtgggtcggatgagtcgggagtctcatcggatgaggcagactcctccgactcttccgaggagtggagtggtggtgatggcgacgacaagggcgatgacagcggcgagggtgacggcgatgacagcgatggcgacggcagcgagggcagcggctag

SEQ ID NO: 12713 - DNA, 570 bp, Zea mays
  Peptide Sequence Number=SeqID_56088
atggctttgcttggtcatcctggccactttcagtctgaggaagcgcttaacctggctagcgctgctgatttctcccttcttcctactactgctggaggagttcgggcttcagcttcaacacctcacaccccactccatcctgcagacagcaatcttcatccacctctgcgagatacgaggccagatccggccgtagtctacatccccacctttggtggtgcgaggtgggaaaactggcgcagcgagtgggtgattgccaacaccgaggccaacgaccgcctcatcctgccgagcgatgggccagcgctcgaccgcaagcaatggaggactaagccatccctttcgctagagttcttgcccgtattggacaggatcaaggtcttggccacgggtggcctgacatcaatgcatgtggacatcccgacactctgtgatgacccaggactgaggacggcgatcttggccacgttgccgaccctcgacgacagcggcgtggcggttcgccagaccggcggccgggaccccctccacgggatccggatctccgatgcatcggctggaggtccctag

SEQ ID NO: 12714 - DNA, 468 bp, Zea mays
  Peptide Sequence Number=SeqID_56089
atgggcaagagcaaaaaaggcggaagctccttgcaccattccggcgacaagcggaagcacgagccgactcctccttcgaaggacttcggcgattccgagtactcggaggaggagttctcctccgagtacgagggatcgccggtccatgcctctccctcggcatcgtctgatgattcagacgattcccaggggattgctgcagaagtgtggacctacatccgagccgtcgagcgcgctgggctcgagggctcggatgagtcggaggtctcctcgaacgagggggactcctctcactcatcggaggaggggagcgacggtggcgacggcgacggtggcgacggcgacggtgacgatgggggtgacggcgatgacggtggcggcggcagcaagggcgacgacaagggcgacggtggcaacggcagcggcaacggcaagggcgacggcggcagcggcaaggccagtggctaa

SEQ ID NO: 12715 - DNA, 315 bp, Zea mays
  Peptide Sequence Number=SeqID_56090
atggcggccgggttttatagggtctatgccacggattccaagcagagggggccacggatgttgcgtgaagttcgcccgtctgctccggcgcgcgtggtttccgcggacttcgttgcccagcagcgagtccacgttgaggaggaagacgacctgggaaagtcggtcaacgggaccccacgcgtaagaggctgcgggagtgttatggctacctgggccgcgcgggtgagcgtgaatttgggccggccaacggggaattcggcccagatgaacacttcaataatggaatatacacatggtatttatttatttacttag

SEQ ID NO: 12716 - DNA, 222 bp, Zea mays
  Peptide Sequence Number=SeqID_56091
atggccagacccctccaagccatccccactcaatcccgtgccttggtcagcttcccccagagccccgtagagctcctcgaagcaagaaatcgggcgctatttcaccggagaagatgttccaccctcgctggagttgtaatccccgccggcacacgtggccacggcaaaccggtaagccagtttccaattcctcgtgcctacgtcttccctagcatccagtga

SEQ ID NO: 12717 - DNA, 126 bp, Zea mays
  Peptide Sequence Number=SeqID_56092
atggcccgtaccccttcactttgccagattgcagaagagaccctagaaaacctaggattcaacccgctgtccactgtgcggaagagcccgttgctgaggatcctggtgagcagcagattgaagtag

SEQ ID NO: 12718 - DNA, 183 bp, Zea mays
  Peptide Sequence Number=SeqID_56093
atgggaaagattgaacatggctggaatcggactgcagaaagaacaaccaactttgtgacggtcaacacggacgagtgccctagtggccagggtgtcacgctccacaagatcgtgacagccataggaggtggtgtatcggttgctaaggcgcagcgtctttggaaggctgtagtcgggccgtga

SEQ ID NO: 12719 - DNA, 315 bp, Zea mays
  Peptide Sequence Number=SeqID_56094
atggagacccgtgcactcttgttttgcttaggaatcagggagaagaccgaaagggaaaaggatttgaacatgctggattcggactgcagaagaacaccaacttgtgacggtcaccacggtcagatgcgggctcggattggaatgttcaagcacaacatggaaagcttatcaagtctactttcatatggatccggaattatagacgagtgccctagtggccagggtgtcacgctccacaagatcgttacagccataggaggtggtgtatcggttgctaaggcgcagcgtctttggaaggctgtagtcgggccgtga

SEQ ID NO: 12720 - DNA, 96 bp, Zea mays
  Peptide Sequence Number=SeqID_56095
atggccaagtgggctgaattagttgtgttagagatgaaggttgcttttgatccctcgcaaacttttgacaattctcacattttttgcaccaggtga

SEQ ID NO: 12721 - DNA, 1029 bp, Zea mays
  Peptide Sequence Number=SeqID_56096
atgaacgtcgacttccagcacctgctcgacgaaatgtccaagcgcttcgacggctacgatgcgaagctgacgcagcgcctctccgactacggcgtcaagctgcagcagcgaatgctagatcgcaatctggaactggagcgtcgtatggcggatctcgacacacggatggacgacaagttggcttcgctctccacggccaacgagacgcgcttgtcgcagctcgagtcggtggccatctccttcgacggttggcatccctgcatggagggttccgtcgacgacatccgtcttcacgtctccaagttgaccaatctctacgaacggtcggcagtggagcaccctaccgtcatgactggtgtgcttgttccggctccctctccggccgtgcgcccatctgctgctgcctccacggacgctcaacctgacaggcaccgcctgaatccatcaatccgggatgatggttgcggagttgtcacaattcttgatcatcacccggcaaagggtgcgtcatccccttctcaccccatgtgtttgcttctcctattttccactgttcgagatccgagtttaaggaacccgtgggtggaagtttggctggtttatctgatcattttcctaaaatgttgtttcctacgtccgatggggatcaacccaagttatggatctgtagatgaggaggtctcggagtacggcaagaggccaccgacccggcaacctgatccattctcgagaactcagtcaacaccaccagcttctcttccacttccaccacccccgtggaaaggagagaaacagacaactctgggcgaggaccgtcggggcgctaactcaaataatatggaggacaagtggtctacccttcgggcttatcggcgtgcaaggggctgtgtattaagtgtgcagagaaatggtctaaggatcaccgttgtgctgattcgattcaactcaatgctgtgcaggagatatttgagctgttttagtgggattcggatgctcaatcagaagggaatgacccaatccaacctttag

SEQ ID NO: 12722 - DNA, 201 bp, Zea mays
  Peptide Sequence Number=SeqID_56097
atgcagttgtatgaagaagaggtcggcaagccttccacaaagtccaccgaaataatctgccaagctgatgagggcattggtaacggctgtagcagacctgttgttgctgcgtcaatttcaactgaaaatggatgtccaaagttgggcaacttcaacacatgcgccaagcacaaggactgtttcagcacgttaaaagcatga

SEQ ID NO: 12723 - DNA, 552 bp, Zea mays
  Peptide Sequence Number=SeqID_56098
atgaagaaggtggtctactatgagaccgattcttcctcaccctcaacctccggcgtcgagtcgacattgaaagggaaatgtgcccttgggccaattctaagtattttgatgctggaaacaggaaaaatcaagttggaattaaaagatggctttgttcagccaaagtcagctcagtctgggtgcaccggacagtgtccggtgcgccaggctgactcaggcgaacttgctgctctcgagaaatcgtcggcaacgtacggctataattcaccggactgtccggtgtgcaccggactgttcggtgagccaacggtcggccgcgtaatccgtgcgcgacgcgtggccgagccaacggctagaagggggcaccagactgtccggtgtgcaccggacagtgtctggtgcgccaacggctccaaagcgtcaatggtcggcttcgccaaagaaggaaagaaatccgcaccggacagtgtccggtggtgcaccagactatccggtgcgccaggcgacagaaggcaagaattgccttcctggaatgcactcaacggctcctag

SEQ ID NO: 12724 - DNA, 534 bp, Zea mays
  Peptide Sequence Number=SeqID_56099
atggcgctaggcaacaagcgcaccacactgctggtcgccatggccgcccttatcctgcaaccatcagcggcgagcagagtgggaggaggccttgccagggccatcgcagatccaggtaacggtgacggtgacggcggcattccacagctgccgccgcagccaagggagtgccggccatggctggcgcggatgatgccgtgcgcgggcttcctcaccaataactccaccgtgtacgcgcccgacgccacctgctgcgacggcttcggctccatgttcacgttggacacggtcacctgcctgtgccacgtcgtggacggcgacatcggcaagcttctgccggcgccgatgagtcgcatgcgcatggtggagctcttctcggtgtgtggccacgctggacgtgtcgatctacttgccgcggcctgcagcctaagtaagtcacaaagtggatggagtgccgccgatagaccttccgagtccctcaccgttgatgccatcgccatcagctcgatttgcatgtgcgtcatcatcagctga

SEQ ID NO: 12725 - DNA, 249 bp, Zea mays
  Peptide Sequence Number=SeqID_56100
atggcgaatggtcgcgggcctgggcgcggtcagtcttcggccgcgggatgggcgtcggtcacgcggtgcgcaggggcgtgtgctcggctcctgtttctgggcgtgcggcttcggtcggacttcctggcgcggtctgctcggcgacatcggggtcggctcggggtagagtggttccaggcgcgggtagggcggctacgcgtcgggcggtgctggggctcggcgggtcacctggcgcgaggtggtcggtag

SEQ ID NO: 12726 - DNA, 603 bp, Zea mays
  Peptide Sequence Number=SeqID_56101
atgacggcgaacgggctcgagcgcacgacaggatcggtgaggcttggagggggttcgggcacgtctccggcgaggcacgacggtgagctccggcttcggtccacaacagcgacgacagtgagctccggcggcgagggagagaccgaggagggagtgagagagggagctcgggcaggaagagggagagggctcggtgtccaatttatagtgaagggagagggagagccacaaagagggagaaacggtcggttcaaggcgccattgatgagagggagtgatgggagagagagtaacggctccattaaagcaatggcgaacggtcgcgggcgtgggcgcgacggctgcatgctcctggcgcggttggtcttcggctgcgggatgggcgtcggtaacgcgatgcgtggggcgtgtgctcggctcctgcttctgggcgcgcggcttcggtcggactttcgggcgcggtctgctcgacggcatcggggtcggctcggggtagtgtggctccaggcgcgggcagggtggctgcgcgtcgagcggtgcaggggcttggcgggtcgcttagagcgaggtggccagtcgggacaggggtgtcagggcggctag

SEQ ID NO: 12727 - DNA, 450 bp, Zea mays
  Peptide Sequence Number=SeqID_56102
atgcccagacgggtggcgactggcgaggcggctctggctaagcgatgtcgaggcctaggcgaggaccccggcgtggctgctcttgcaggtacgtcgagggcaagggaagctcgggcgtggcgtctctcggtctcggcacggcgctgctcgcgcggtggcctgggtgaggcggacgaccgacaggcgcgcacgtcatgggagggcagccgacgcgacgggcgtctaggccgaggtggagaggacggagtgcggatgcggggaggctccaggggctgctccggcgaggtgagcagagtgctgtcgcggcgtgcgacggcgagacgcgccgcgcgcgacagaggctttatgaggggaagagatgaggaggtgggcgagtctggcgtccgagggagaggaaatggggaagttgccgaactgcttgcgtggcgtgggcgcagtttgcgcgaatag

SEQ ID NO: 12728 - DNA, 480 bp, Zea mays
  Peptide Sequence Number=SeqID_56103
atggctaagttctgtcaaagtcagagcagtctgggtgcaccggacagtgtccggtgcgccaggctagctcgagcgaactggtcgctctcgggaattcatcggcgacgtacggctataattcaccagactgtccggtgtgcaccggactgtccggtgagccaacggtcggccgggccaacggtcgattgcgcgatctgcgcaagacacgtggccgagccaacgatcgggagggggcaccggactgtccggtgtacaccagacagtgtctggtgcgccaacggctcccaggcgccaacggtcggcttcgatagagaaggaaagaaatccgcaccggactgtccagtgcgccaggcgacagaaggcaagatttgccttcctggaatgctctcaacggctcctagctgccttggggctataaaagggacccctaggcgcatggaggagtacaccaagcattctctaagcattcctaagcactaa

SEQ ID NO: 12729 - DNA, 198 bp, Zea mays
  Peptide Sequence Number=SeqID_56104
atggttaaaaattttggcagcaaaacagtgcaaatagcaatgaatgctgtggtaacttcacacctactcgtctgtttatatagtactgcaggtaccattcaggaaatggttgatggtgtgacttggcctaccaccctgccaccgggttggacggtcgagtgggatgttgctccggcaggagaggagcacgaggagtag

SEQ ID NO: 12730 - DNA, 219 bp, Zea mays
  Peptide Sequence Number=SeqID_56105
atggatgacaccaaagacccttcgactaaagcttctacgctgggcgggagattttactccgatgtgtggatgaagggcagtcctgaactttcacctccactggagccatataaccctgaagctgacccgaccatgaaggaagcgttatatataataagaatctctaatgaagctgttgacgaagccgtcgacacactactaaatgaagttgctgaataa

SEQ ID NO: 12731 - DNA, 345 bp, Zea mays
  Peptide Sequence Number=SeqID_56106
atggagcagggaggggcactgtttgggtgctcggatgggggagccgaggggagaaagtctcctgctgctgggcagccatggtcggcaacagcagggagctggccacccttgacgcgagcaggggggcgtgtccatggcagcttctgccactgcgcaagggaagccagggagagggcgccatggaagaggagtcaagctcctagctgcagccgtgggaagaacatctccctgctgccaaacgccgtggagaaggggacgaagaaaggcactcggctagagcaggcctgcgcgagggagaaagagcagggagagcgctcagccgtggagggaagcttggctgcttga

SEQ ID NO: 12732 - DNA, 540 bp, Zea mays
  Peptide Sequence Number=SeqID_56107
atgaattctcatgtacccactggcggagggaacccacaatcccacacagacggtctcgcacgagagggctttccccgcattttgtgggaggtactgcagggagcaggttacactacacctccccagtacgcggtgcagctgttcgaggagcaccgagtgccttgttgtagggtgagaatgaccttggagcctcatcccctgcagctaggctggcgttctttggactcggagtccttcggtttcagggctgatgacactatagagtccacaactctgcatgtgctgacaaccttctgtggatttcaccccttggagatgtcgacccaccccattggcttgttcctcgctgagaaggaggacgacccaatgtggaaggatagggccttacgaggagaggtgatgtcccagcttatgggcctagtggagtccaccaagatcaccctggataaccgggaggaccttgtagtggatcttgtgacaccccaggtgtcaatttcgcattatgtcgggagaaatatcctaatctcagatgctcagtaa

SEQ ID NO: 12733 - DNA, 288 bp, Zea mays
  Peptide Sequence Number=SeqID_56108
atggcccgcgcccgcgcctataaagccccccaggcgtcgaccacactcttccgcgcacgctcaaacctcaccggagctcagctcaccgtcgtttgcccagcaaggaatcgaagcctgcttcgccggagaggccagtccacggtcgtcggagttcacaaccccgccggagtacgtggaccgggttctctggaggatatggttgctggagtgacttggtcgtccatcttgccaccgggttggactgtcgagtgggaccccgcctcggctaaggaggagcatgaggagtga

SEQ ID NO: 12734 - DNA, 936 bp, Zea mays
  Peptide Sequence Number=SeqID_56109
atgacttcccacggatcctcagaggacggaaatgcactatcccacactgaggggcttgcacgagagggctttccccgcattttgtgggaggtacttcagggggccggatacacgacacctcctcagtacgcggtgcagcagttcgagaagcaccgagtgccccgctgtagggtgaggatgaccttggagcctcatcccctgcagccaggctggcgctcgctggactctgagtcttttggataccgagctgaggacacgatcgagacgatcgctctgcacgggttgaccactttctgcggattccatcctttggagctggctacccaccccattggcttgttccccgtcgaaagggaggacgacccaatgtggaaggatcaggtggagcatgccaaggatatctgggccatctacccaggacagactgcgcacttgaccgtacggtgtatgaatgctctgtaccgtctgcaagtgatgcgcggtgaggcgatgccccatctaatggcactgttggaggccacaaagatcactctggacaacagagaggaactcgtggttgatttgtccactgaaatggtggaaaaggacttgcaggtggagcagctatccactgatatccaagtgttggaggaattggtgggcaccagggagaacaccatcgaggttctcgaggttcagctcattaacacccagcagcaacttgtcgaggctaatgagcacttggatatgcatcaccaggagatccaggacatggaggctaacaaggacgtcgacatcgaggcaggagaggagcctgcctctagtgtggacactgctggctcagggagaccaccttcccccgagtcgagtgttgcctcatggccgggaggcagcgtcgtggccagaatgagcgcgttcctccaccaccgccaccgccccccactctacaggagctaa

SEQ ID NO: 12735 - DNA, 216 bp, Zea mays
  Peptide Sequence Number=SeqID_56110
atggcagtcggggtcagtgaggcattgtacgccaaggcgatgagccctgatctgctgacggggaatcgatggggacggttgatccttgcttgtggcataatttttacaggttctctggaggatatggttgctggagtgacttggccgtccatcttgccaccgggttggactgtcgagtgggaccccgcctcggctgaggaggagcatgaggagtga

SEQ ID NO: 12736 - DNA, 537 bp, Zea mays
  Peptide Sequence Number=SeqID_56111
atgccggagaagacctatgtcctcgacgcgcgccaggtgtttgatgggagttattatgcaactcgtaggaagtgggacagggcagtaattccgcaactggccatatatcattttttatttattaagcttcaaaaccaaagcgcaacaatcttcatgttcttcgctcagggtgcagatggttctcgggggcgtggtttacacggctgtgccgttctacaagagggtgttgatggtcgaaggatcaacaattcaaatagcgggattcagaaacctagtgactggaatggcattgtaaccaataacttaaatgatggaattatttcttcagatgaaaacaatcttgtgaggggagctgagcatgctgcgataacaagaatcacatacgagactgctgtttctgggagtatcctaactcttgtttatggtgataatgggagcaacctggccaagcttagagagggtgttctggacaaagaaagcatgcgccttaaaacaggaggatacaagaagctggagtggttgtatgaaggcttttga

SEQ ID NO: 12737 - DNA, 300 bp, Zea mays
  Peptide Sequence Number=SeqID_56112
atggctggttctaaagatcacactgacgtctctaccaccaaaatcatcaagacgaccatggaggcactcccgactgatgaccagcagcccttcgatgacctcataaggcgtgagaaggaggaggtgctgcgacaactcaccaaacggcatgacaaagaggaggaggaagtactgcgacaactcaaggaacgatacgaaaaggcgacagaaaagtacctatcatacttcacactggattgccaccagaagatcatccgtcaaggggagatcgatatgacatctctcctacctccgtcttag

SEQ ID NO: 12738 - DNA, 312 bp, Zea mays
  Peptide Sequence Number=SeqID_56113
atgggcgaaggtgccggaagagtagcttggcgggcctttatctcgtttgtttcctttttcctcgtgatccgtgtccactctcttgtggatgaggtggacgacggggttcttcagaattccttcttcgtctgccacggacgagagggtcccaaagcagaacatggatccaggaaggagagcaatcttgcactgaaagtgacggccattgagctagcttggatcaacgacacactccctacctggcgtgccagctgtcagtgttttgaggccgactacacacccggggttaccactcgtggtgctgttgaatag

SEQ ID NO: 12739 - DNA, 483 bp, Zea mays
  Peptide Sequence Number=SeqID_56114
atgcaagatgcagcacgacgtgcacttttgcagtattgctcgttgttcagcggggtagctgatcgccttgacctgaagtactacccttgttgttcgaccggtagtgctggaggtgtgattgtctcacctattggtgaagacaatctcaggctaaacagcatggtcaacctggccgccatgctcaacaccgagctggaccacgcccttgacgagtttggcaaggttcaggtggaggttgtggaactgcgtgttgactgcacgacacgccactatctggatgtggttctcccgcccctgtcgggattcagcacccttaccattcaccaccctgtggtcactttgagtatgatgtctaaggacaggtggcgaggtgcaaggcgtgctcagcaggagcagcaggcaccccaggaagatgcagctcagcagcagttgccaccgtcacccctgatgactattgagcagatgttcctgatgcagacttag

SEQ ID NO: 12740 - DNA, 273 bp, Zea mays
  Peptide Sequence Number=SeqID_56115
atgatgctggtagactacacaacagtactcgatagaccaagtgtgtcggtcgaaggctcaacgcaacaaggtgtcgagagcgtcgtagaagtgacaccctcgagcggcgtcgcgagtgatgggtgtagcgatccatccctcccgctcctgctcctccaagagctccgtgccgtcgctcgaactgccactggcgtcgtcgtcatctccatctccgttagggtctccttcagcagccggaatgccttgtggtgctgtgggggcatccctgcctga

SEQ ID NO: 12741 - DNA, 141 bp, Zea mays
  Peptide Sequence Number=SeqID_56116
atggggaggttagaaccccaggcagaatgggaatcacgacttatgggtaaaagagttgtccccattgtactcagtgctcagggagcagatactggcaacatggaggactttaaggagtttcaggactacgacgagttctag

SEQ ID NO: 12742 - DNA, 324 bp, Zea mays
  Peptide Sequence Number=SeqID_56117
atgggcaaggacaagaaaggtcgaggttcaccgtgtcgctccggtgacaagtggaagcgcgagccaagtcctccctcggaggactttgatgagtcggaggtctcctcggacgaggagaactcttccaactcgtccgaggaagggagcggcggcaatggcgacgacgacgaaggcgacagcagtggcagcgacgggggcggaggtggcggcgacaacggcggcagcgacggcgacaagcgcagtggcgacggcaagggcagcgacgacggaggcaggggcggcagcagcagcagcaaggccagtggcaaagcgccactggcttaa

SEQ ID NO: 12743 - DNA, 1038 bp, Zea mays
  Peptide Sequence Number=SeqID_56118
atgcagcggaaattaactaacggtaaagaaagggaggatgggaaagcctggcccatcactcctcatgctgagcagcatggatcaagcagtctcattagctgcgagaagcagacgattcgaatcgagtttttaaccttgcaagtgaccgcacttgtacccaccataaccggaatgggagactacgtctcaggtcgtgtgaggagggcaatctgcgggcagaacagtagccgtagggagaaaaagcagtggcgcagcttaccggcggtgggagaggcacagtggagggtcgggtgcggtccaggggctcctggcggtcacgtcgaggggcggatcaccggcgatggtggtcggagtagggttggtcgtgtgcttcggcctgctaacagcagtagagctcaatcaaagtgctcggggagcttcacgggaggtcaatggtgttgtgcacgcaaggaatcgaagggtggctcactgtgcagctcggtctacgtgcgacgacgatcggatgaagtccgacgatgtcaatccggcacgtccggcgaagtggtgttcgatctaagggctcagggagcttcatggagctccggagaggctagccgaggggttggattggatggaggtgggccagagtggccggtccacggtggtcggggctcgggcggccgctggcacgccgtgcgcagagggaactccggcgatcttgcgcttggtgggggagtacgatcaaggcctcggtcagttttattggcgtgggccaagtgtgggcgcggggtcgggcgtcgcgcagtgcgggcgagcggggccgagcgtcgggtcatgctctggcatgccagggcagaacctcccaagtcattaggcccatctatagttgtccttgtccatcggacctcggacaaccctgcaggtgcacctgatcacttgacaagttcggtatctgaattccttaccttgcccaagagcgtttcacccgtcacgcagatattacaacacatcggaggtacgagtatgcggaagcagttacaacaatttattttatattaa

SEQ ID NO: 12744 - DNA, 531 bp, Zea mays
  Peptide Sequence Number=SeqID_56119
atgaaagagaccttgccgtggccagccattcttaggtctactcccgctctctttgatcatgttttagaacccgtacttgctcatgatactcatcagctcgaccctttatgcttaaccacactcaatcaaccggaacgcttggaattatgtttggtgttcaccgtcgctgtggtcgggtgtaggcagggccagattaacccaattaaagcatgttctaggttcacctcagaaaacaaagaagaagtagaagctaaagaagcaagagctacaccaccaccacctgaagaaccacaggccaagaattgcttttattttgacatctgtggagcagagctcacctcacctataacacaagtgggatgggatgttttcaaaataaaacttgatggtggatccatcattgccatgatgggttcaacatcagaaaagatgtacctctgtgaggtaccaaactttgggttaaatgataaagctgagaccgggcagttgacttgcacgagaaaggagtctcggtgtagtgtctcagtctga

SEQ ID NO: 12745 - DNA, 324 bp, Zea mays
  Peptide Sequence Number=SeqID_56120
atggcggtcctgcaagggattcctgcattggagcttcctctagcgggttttctgaagctagtggaactttgtaaaggcctcgtagtgttaccctgcctcgcctccttggtagaggtgtatgggaagtcgcgatcccttggcagatgggtgatgttgttacttttgttctgctacttaattgggtttggtatttacttatacttagtaactgctaataaaattttgaccaactttaaaagcaatgctcagcttcaaccatcctctttggtcaagaacaggtaccacaggatgaggcgcatggaggatgctgtgatgagttcgtga

SEQ ID NO: 12746 - DNA, 318 bp, Zea mays
  Peptide Sequence Number=SeqID_56121
atgcaggggcacttcgtccccacacacatcaaccgtccccatcgattccccgtcagcagaacagggctcaccaccttggcgtacaatgcctcactgaccccgactggccgtcgtgcagtgaccgcacttgtacccaccataaccagaatgggagacctcgtctcaggtcgcgtgaggggcaaagtctactgccaggttcaatcagaccacgcgtccccatggaccccgtgtccacagaccatcaccattctgttatcaaagtggatacaaccaatccctgacctcgcgcgagtgctagaaaaatcactcgacttctaa

SEQ ID NO: 12747 - DNA, 336 bp, Zea mays
  Peptide Sequence Number=SeqID_56122
atggtggcggcgctaggatttgaatggtggaagaacacaatgcaaccagcaacaaggaaacgcgaaagcacacaaattcaacaatgcagattattgaaagaaagtgcgaggctcaaaagggaaaaagaaacgctcgataaactcaccgatcaacctggaaatctgataccaattgatgtagctgaggtgcccgatctttcggcgagtagagataattccgatttggcggaagatgacccttgcgatccgactacgacgagcaagcccgaggcgccaatgcaatcgctgaaccaactccctgtggttaccgaccttgctgatgcgagatcggcctga

SEQ ID NO: 12748 - DNA, 1034 bp, Zea mays
  Peptide Sequence Number=SeqID_56123
gcgtcgaccgtactcctccgcgcacgctcgacctcaccggagctcgaaaccaccggcatttgccccgcacatggtgtgcccgcgaccacccgaactcctgccaccgtagactggccaacagaacccttccgagccgcgcccgacccttggaagagatcgtgcatgcctcggtgaagctccccgagcaaggaatcggattttgcttcgccggagaagccagtccacggtcgccagacttcgcccgaccgccggtgaacgtagaccagaagcatgttattactgtttattgcaacctcgctgacagagagtacgtcatcgtgccggagcaaggagctgctcaggagggagctggttacacgacgcctcctcagtacgcggtgcagcagttcgagaagcaccgagtgccccgctgtagggatacgatcgaggtgattgctcttcacggactgaccactttctgcggattccaccccttggagctgtccactcaccccattggcttgttccccgctgagaaggaggacgacccaatgtggaaggaccgagtggagcatgccaaggacatctgggctatctacccaggtcagactgctcacttgacggtgcggtgcatgaatgccatgtatcgtctgcaagtgatgcgtggagaggcaatgtcccatctgatggcattgttggaggcgacaaagatcactttggataacagagaggagcttgtggttgacttgtccactgagatggtggaaaaggacttacaggtggagcaactgttaaatgagatacaagagcttgaggaactagtgggaacgagggagaacaccatcgaggttctcgaggatcagttgatcaacacccagcagcagcttgcagaggctaaccaacacctggatatgcatcaccaggagatccaggacacagaggccaacgaggatgtcgacatcgagggaggagaggagcctgcctccagcttggacactgctggctcagggagaccaccttcccccgagtcgagtgttgcctcgtttgctcactag

SEQ ID NO: 12749 - DNA, 444 bp, Zea mays
  Peptide Sequence Number=SeqID_56124
atgggcaagaacaacaagcgcaagcgtgagccaactcctccatcggaggagtttggtgactcggagtactcagaggaggagttctcctctgagtctgaggggtctccggctcccatccccctacgtgagtcgtctgacgactcccaggggctcgcggcggaggtctggacgtacatccgggccgtcgagcgctccgggctcgggggctcggatgagtcggagtactcctcggatgaggaggactcggacggcggcggcgaggacgaggacgatgacgacgacgaaggcggtggcgacggtgacggtgacggcagcggcaagggcggcggcggcagcagcaaggacggtgacggcggcggcagcaagggcagcaactggggcggcagcagcatgggcagcaccagaggcggcagcggcggcggcagcaacagggccagtggctag

SEQ ID NO: 12750 - DNA, 120 bp, Zea mays
  Peptide Sequence Number=SeqID_56125
atgggggtcgccgacggcgagactcgcagccggggccagacccatgttgttgtaggtgatgaaactgttgagttctgctatttctgttccaaggtggttccaaaggacgaagagaactaa

SEQ ID NO: 12751 - DNA, 1533 bp, Zea mays
  Peptide Sequence Number=SeqID_56126
atgaatggcggcaatcactcccgcagcggtgagccctcctttccgcaacaccttcagggccttcagaaggggctggagattcttatgtctgtcgtgcggggtcccgtagcgccaagcatcggcggcgacggtcaccacacgctgagaaaacgacgggggcctcccgtcgtcatttcggagatagaaccaccggcgctaccaccctttgttcgaggacgcaaggatggcaggataatactgcggcgcccgcgcctgcctcagctggaggatgcagccaccggcccgcactgtcgcgcggacccttctctcccccgtcggcgaagcaaaaagctccgcggagaagaaatgagtccacaggtcccagtgagggtcaatccccaagtatccttcacaaaccgctgcgaagatggcggcttgcgagatggagttagggctgaggttgtgcagctccaccccgtagacatgcagaatcgcccgcataaagcggcttgccggcactccgaacccccgctcgtggaaggagacgaagctcacgacataccccggcggcggggacggggcggctccgctcgggggggcatccactccggctgcctctcatcggagagagggcaaagtaaaccctcagcgacgagggcctccaggtcatccgtcatgactgtggagaaaggccatgggtcgcgcgacggaacaatggtcacccggtcggccatcaccaagcagaggaggtggcggcggaaaggacggagtgggcgggaccgggaaagggggataccccgaaagggatccttctccgtgaaggaaacgggccccgagccccctactgatcagaggttcgaaggctggcccccggaggggttcaacagccgcctcagagcgctcgggctccgcgcccactactggctggccctcgaagggttcacagccgcctcagacgcagagcgagggatgaccctggccccgaaagacgacgaactccacatcgcccgacccgagggctcggactcaggctcagccccggaagatgacgaactccgcttcgcccgaccccagggctcggactcgggctcagccccggaagatgacgaactccgcttcgcccgaccccagggctcggactcgggctcagccccagaagacgacaaactccgcttcgcccgaccccagggctcagactcagccctggcctcagccgacggtctccgcctcgcccgacccaggggctcggactcgacctcggccttggaagacagactcgacctcgacctcgacctcggaggagcctccacctcgcccaacccagggctcgaaccgaccacgtcacaggaggcgccatcattaccctaccccaagctaactcaggctacggggaacaagaccagtgtcccatctggctcgccccggctccagcgctcctccgacggccacgacaccacacgaaccgggtgccaaaacctctccggctgccacgatggcatggccctcttacagagggttggccgcgcggggaaggacgggacggcgctcgcataa

SEQ ID NO: 12752 - DNA, 138 bp, Zea mays
  Peptide Sequence Number=SeqID_56127
atggcggtcaggcaaggtcaagaacagaacttgtcggcgtttcgagaccggggggtccctaagccgacgagtgcatgtcgccgcgtgccccagaccagatgggtcgagcgcgtgggcgagcgcgaaggggggaagtga

SEQ ID NO: 12753 - DNA, 972 bp, Zea mays
  Peptide Sequence Number=SeqID_56128
atggaggggagcataaccgcggggcagttgcatgctccttgtgtggtggttcgccttctttgtgtctcggatggggtgcgccggtattctctggagggatccgtgtcagggctgcctcctccggcgatctcaccgccggagagctcacgctcatgcccggctgcaatctcccgccagtggtcatctagagggatggccaccagccttgtggtggagagaagcgagccgggctacggcctccccctgccctcaaggatcccaccggtgcggaggtggccgctgtcgtcggtgctgaggtggtcgccgccgctggtgaggctgcccgttgcagaggtggttgcctccgctggcgagaccatcagcgccacctgccgccgagcccccaactccttggctttaatggcctcattgtcgccccccgtaggaagacgagggcgaggaccttttcgcaatggcgcacgtgctgaggtgatcgccattgctggcgagtcgtcggtgcagaggtggcccccgtcgtcggtgctgaggtggtcgcctccgctggcgagccgcttggagctagctatcccgtggccctactgggtggtggagcgtgcaggcccacggtacaggatcaggctgagcggctacacgggctccggaccaccccaggagactaatgtccattctctagttctggctaagcggccacacaggctccggaccaccccatggaacggggtcccgttctctggagccggctcccagactgtcgaacctcccaactttcgtatcgggggcgctaaactgcaagcctggctgctcaattcagatgtcatcatatcagtacaaatgggaaccgtacgggccgggtttatggggacggaccccaccgggttggcgtacacccattcctgcatgtacctgtcagaagcctggacccgtggggaatccagaagggtttccggaggaaggcaagcttcagctccatag

SEQ ID NO: 12754 - DNA, 522 bp, Zea mays
  Peptide Sequence Number=SeqID_56129
atggaaaggagcctgcacaagcgctgctttgcagttccttttccttcccacccgacgccgtcgccgccgccgtcctgctcctgcttgtgccctccgtcaagaagaagcgagctcggagcctcggacccggcgcacctgctccccgccgccgctgcaccgctacatcgatctcccaacttggaggggaacgggagggtcagcggtgtgatggcactacggcagtatgtgcctcaccgacaacagcttcaactaccagctgcagggggaagtcgtggaccgcctcatcgcggattggcgggcgactccgtgggccggcgccacggacgcgcaggggcgcagggctacttcgaggccgactggacgagctcgtccatggcgagtacaaggtcaacgccagccacctggcgctcaacagctccatcagccacccggcggccggcgctcaacagctccatctcccggagcgtcaaggtggagctaggctcagggactgacaacaacttcattgacatgcaggtctag

SEQ ID NO: 12755 - DNA, 1353 bp, Zea mays
  Peptide Sequence Number=SeqID_56130
atgcattgcgcccttcctccttccgagcccccggatggggagcacccgcattgcttttgtcttgctgctgttggaggagcgcaacttcgcggaggttggcacccttcagccgtcgctcggcttcaaggattttcatcaggcagcccggctgcattccctcaccaatggtcacccaggacggtgaccaccagttcgatggtggggagaagcaagccgggttgcgacctctgccccgccctcggcttcaaggatcttcatcatccttgctgggaaggagggcgaggcgagccggggcctgccttcgcgtgggctggcgtcccgcttcttcctctagcatctgggggtggaaaccatcctctagctctacagaggaggcatcctccagccatgcgggggaaggcgaactgctgctgcctggccagggtgcagcattccgtcctctgtccgggcgactgtgtccggccgcaccggagggtctcacaacacgtcgtacgccgcgagggcggtactcgtgttctgggatggtcccgttctcgttttcgtggcgaggacgggagtgaggacctgccggtgtgctttggggcggccgacactcgttggtgcggtgttggtgggcaggtggacgccgccgtcggtgctgaggtggtggcagccggagaaggtttctccgccgacgagatcgtcggcgtcacctgcgctccgggcctccggctctttggttttaatggctggttctcgtcccccgcgaggggacacgaacgagagccttctagcgatagcgttcgccctggggccatcgctgctgctgcagaggtcgccggcgagccacccggattaaggaaccctcggctgctcttcgatgagccagagccggaggcagcggtgtcagcatggacagaggcagagtcagctcgaaaaggggcttcgtcggcccaggagcaggtggcttcccaggccgaggaggtgcagcagcggcggccggagcctggccgggtcatctgtgaccgagaccgcgcggtgctgacatcttccttcgaggtggagatccttccgcccgtgtcgccgtccgaggccgggccagatcccgccgaaggtggaaacaacgccaagggtgctgctgctccctctgtcgatgtcagagcctgcaggaacagtttgtttgtagtgcgcgacttgttcgttagtagcagaatcacttatccgagtgagagttacttatcgtgcaaggtgatgagtgagaaggtgatgagtgaggatcccgctatcgaagcagttgaaaagcgcgaaagatgttctggcagaaagactttttccgaggaaaatttttttgcagagggggttccccctttctag

SEQ ID NO: 12756 - DNA, 1173 bp, Zea mays
  Peptide Sequence Number=SeqID_56131
atggcgatgccggtggagacggcggtgtgcatcgcgcgcaacgtgctcttgctgctggacgcttgggtctggacgtgcgtgctcgccgccgacggcgccgcgcgcctcctccgctaccaggctcgacaaggtggatgttcaaagacccaacgctggagtgacgtctcctcgtctggtggttcgtctcgtgagctttgctcctttaaagatgccctcgtatctggctccaggcgcctccctaccccaatccaggctccttctcatgccacgacaagctcaagagccccagaggctgtgaaggaaagggagaaggagaaggttggtgaatccttggtggtgcagaatcagtcggtgggatcacaacgggacgagtttggctggcaggtggttgagcgaaggaagaagacccaacgtgagctcttgccctacaagacctatggcgcgtacgaagcagtttggcggattgaagcacgaaacgaagctgctccacctctacctctggcgcccttccgggaatcggaggatgatcaggatcacaatgagcaggatccacatcttcgtcgtcgtggtaatgctggcgcggctggggattcacggcgacctctccaattccgtctgggaccacgactccccttgggtcgtgcgcatgacatgcataggtctcgggaggaggaccccctgccgcttcgcgttctgggaattgattgtaataacgacacgactgggaggcacgaggcgctgcagcttcgtgtccctggaaaaggtggagatgacgagacgactagggggcatgagatgtttgaagtgctaacgcttcgggctgcgagaaaagctagacacgaggagatggttgggagccaagagatgcaatcaacaagttgcatgggaaatgaggaagatatggcggcggatgagcgggagatccctatccccgaagctgtcggccaaagggcggtggaaaacttaaacagattctcctcttttcgctctagtgggccgctgggctggattgctccatggacgccccagctagatgtatctgctgggttgttgaattcccttggatccagcttgccccaccaggcttctagagacatgaattatccccctgtcgagtcgctgggctctatttggccaccattgccccagcaaatttctttatttgggttgtag

SEQ ID NO: 12757 - DNA, 153 bp, Zea mays
  Peptide Sequence Number=SeqID_56132
atggtgatgagtttggtgacgaatgggaatttagaggacctagtggtggtggagcatgtgaagttggacctagtggtgatggatcaagggatggtgctatgcatgagcaagcagctccaaatcctccacttcgtccaagatcaacaaggctaa

SEQ ID NO: 12758 - DNA, 288 bp, Zea mays
  Peptide Sequence Number=SeqID_56133
atggagaggtgttacaaggaaacacccatgtctcgcattctagtatggaggttaaataaagataaaaccaaacatatccttaagcatgtcaagagcttgttcatggcttctcataggcagcggaatggcgaggatgcgatgcgagtaaaaatatgtggcaagcgttggactgctgaactggggcagtttaatacagcagacaaatactctacagatcacttgaatgctgccaaactcctccagacaacaaaaatatctatcgccgatggcacaggtgtaacgatctaa

SEQ ID NO: 12759 - DNA, 162 bp, Zea mays
  Peptide Sequence Number=SeqID_56134
atggaggggagcataaccgcggggcagttgcatgctccttgtgtggtggttcgccttctttgtgtctcgggcctccagatggggtgcgccggtattctctggagggatccgtgtcaggctgcctcctccggcgatctcaccgccggagagctcacgctcatg

SEQ ID NO: 12760 - DNA, 405 bp, Zea mays
  Peptide Sequence Number=SeqID_56135
atgtcagaccttggaatgtcaactacaagtgatgtcactaaatgcaaagaatgcggtgtgttgacaagtcaaaacaacactataaatgaaacaactgatgaacagaaattcaagacccaaaaggatgcccaaccaaaccaacaaacaagtgaccttggaacatgttgttgtttattccaaaaaggaaacgtcacaaggatgcccagccccaagaagaaacacatgagtgttacattgatggatggactattacttgcacacagtttcagccttgtggtcacatcagttcctgtaaacgaaaagggaaacatggaaaaagtcaagaaataccttccagaaaagcttgctatctctgtggacatgaagatcattacttctgtatctgtcctgagaagagttcactag

SEQ ID NO: 12761 - DNA, 633 bp, Zea mays
  Peptide Sequence Number=SeqID_56136
atggcgcctcctgttgacgtggtcggtccgtgccctaggttgggcgatgtggaggctcctccgaggtcaaggtcgagtctgtcttccgtggccgaggtcgagtccgagcccctgggtcgggcgaggcggagaccgtcggctgaagccagggctgagtccgagccttggggtcgggcgaagcggagttcgtcgtcttccggggctgagcccgagtccgagccctgggtcgggcggagcggagttcgccgtcttccggggcttagcccgagtcggagccctgggtcgggcggagcggagttcgccgtcttccggggcttagcccgagtccgagccctgggtcgggcggagcggagcggcgctgtccttctgtcaggccggtcagtggagtggcgaagtgactgcggtcacttcggctctgtcgactggaggacgcgcgtcaggataaaggtgtcaggccacctctgcattaaatgcccctgcgatttggtcggttggcgtggcgatttggccagggttgcttcttggcgaagactgggcctcgggcgagccggaagtatgttcgtcgctggagggggcctcgggagagatggagatcctccggggtcggctgcccttgcccgaggctgggctcgg

SEQ ID NO: 12762 - DNA, 747 bp, Zea mays
  Peptide Sequence Number=SeqID_56137
atggccctcttagagagggttggccgcgcggggaagaggacgggactggcgctcgctgcccagtttgcgacaaagtatggtatctttaagtgtcccttaagatcaagaaagaacttcagtacacccgaaaggaaaatgttagtgaattacatatgtccgaaagtaagtgttaaaatcaacgggatagattttccagctgatctcctagtgatagaatcaatgggaaaagatgtgattcttggaaagaattggttacaaagaactaagatgatgaaccccaatggaaatgaagtaaatgatgccaacgacaatattcctaccttaacaactatgaacgagagaaatgagtcaccgagatattcgatgaatggaatgaagaacaacaaaaggaatagaaaaatgtttggatacatgattagtccacctcaagcgaaagccacgaaacacatggatacccaaacagaagaatcaagtcaggctcagctacatgagatacatacacccaatgaaccctcaccccctgttggtcaagcaaagttgactcgcaaagaactcaaagcaagaggtgcttgctactactgcaaaaatgaaggacacattattcgtgaatgccccaagaagcgtctggaccgactagagaagaaagctgccaagcatgacctaagcaatagttcagaagacccaccattttataagtatgatgatgaaggacgcttgattagtatacattttggagcaaagaagtaa

SEQ ID NO: 12763 - DNA, 228 bp, Zea mays
  Peptide Sequence Number=SeqID_56138
atgtcgggggtttccttcttccccactcgctcgacgctgaaccggtctcagctgaacggcgcaatttccgccgctagtgactgctcagatttcgctggtcgttggggttgcatccgccgccccagtgccttgcccagatgcatgcactggcaatttctcgacggtgacaagcttccgccatggatccgctcatcggcgcgggcaggagcttctacggcttcagggtcg

SEQ ID NO: 12764 - DNA, 429 bp, Zea mays
  Peptide Sequence Number=SeqID_56139
atgaagagagcgtctctatgtgaaggtgccaaaggttcaacaaaaaccaataaaaagaacatgttagggttcaaaagaaaggagcaaaaaggaaaccgaagtgttccctggccgttcaagaataaaattggttttcttaccaggcctctcacaccgtttcctgatgatgaaggagctcagggagatacttttgatgctcagcctgaagcgcatcccgctcagcaaatgccaccacctccacctccaccacaacaaggacagtactggcaacctgcatctagatattttgatccttattttcaacaaatgcatcaagggctccagactcatatagatggtcagtttcagggcatgatgtcacatgtcgatgaccggtttgatcacatgcaatccacatttgatggtccattctctgatttgcatgattga

SEQ ID NO: 12765 - DNA, 691 bp, Zea mays
  Peptide Sequence Number=SeqID_56140
atgccgtctggcagtggcatgcgccgtcccatcggtgcctggccctggcttgcgctcgcctcggcgtcggtgccgtgggtttccactgcgaccctcctccatcacgcgaccgacccgtgctccgcttcaccatatcagcaacttcccctcgtctgcctcggcctcgggctcgcatccgccctcgacctcggccgttcttcctcctgttcccgccgccgtccgccgccgccgctgcttggcggccgcctctctcacacccaccgcagtgcgggcgacgaggaccccatgactatgatgacgccgccccctctcgagcagcagcagggggacgagatgctggtgccgcaccaggagctccctgtcgctggcccagaacctgccccacagccgatggaagaacccgccaacacagcggagacccagccacccgaggacccgcagacgtcgcgcttcacctggacaattgaaagcttcagtcgtcttaacactaagaagcactactctgatgcgttcgtcgttggaggatacaaatggcgtgtgctaattttccccaaggggaacaatgtggatcacttatcgttgtatttggatgttgcggattctgggagcctcccatatgggtggagccggtatgctcagttcagcttggctgttgtgaatcaggtccacccaaagtatacaattcggaaag

SEQ ID NO: 12766 - DNA, 474 bp, Zea mays
  Peptide Sequence Number=SeqID_56141
atgccgctcctgccgtcgctcaagctggacctgttccaccgcgtggcggccgcgggaacgggcacgggcgccgccgtcgtacgcttcccttttggcagcatccccgttacgcacctgtactattttttcgggcagaccgcagccaccgcggaagcagggtgtcgtgtgctcaagctggcgtcgacgaattattttttaaagggaaacatatctcaattttctgggtttgttgggacagacaatcaagtacaactaaaacttttcctttttagtgccatgtcaattccaaagcaaccatttacctttagcacatttatctgtgtttttgaagccatgagtgtggactcaagtgatgctgaaaaccctgggcttgatgatgtagatgttgctaacatgcacatggaggcaactgattcccagctgattgatgcactctatttctcgctgactgtggaccgaagagaatgcatataa

SEQ ID NO: 12767 - DNA, 876 bp, Zea mays
  Peptide Sequence Number=SeqID_56142
atggaagacattgtggatgcaggcgccttctggaaagtgtcgaagataagcgatggcgccaatgcgctcggtgacctagaacgaatcggtgaaccaagggcacgcgtctgcgccggtcagggtggtgacacccgcggcagaacagaagggcaacgtggatccgaccgggaaggccacggcagcaatggaaccaacgatggtggtgatgaagggggagggcgacggggcgggcacccgctcgtcggagtggcgtggctgcacgctcgcgcgtgcacaggtcgacggggcgaggaagggccaccggtgcttgacctggtgaggagggcgggcgagcagcgccgaccgcggcggtgcggatcccggtcagtggcggcgcccaacggccgcagcactgtccgtgcgggggaggtccgggtcacggcgacctgccctagaggcggcgacctgccctggacgcgatggcagcgtggatctaggcggacagccccgcccccaacctcctctgctattcgtgccggcgtagggggtcgacgaaggagagggacgaggcggggtcggccggggaagggggtcacggtggcacacgtgtgcctacgtggcggcgacgttcatgcccgcgcgcccacggtcgtgtggcggcggctcgcgctcgcacgcctgctcgtggcggtggcggcccgcgcccgcgtgctcgcccgcggtggcgtgcaggctcgtgtccttcggaggggaggggggagggaggggggtcacgcgaccggtgtagggagatccggcggcggcgaggagggggaggtaccggtggccgggatgggggtgtcacccttgggggatatggagcagcctcccgggaacggcgggggcggccggacctag

SEQ ID NO: 12768 - DNA, 1353 bp, Zea mays
  Peptide Sequence Number=SeqID_56143
atgttcgtctccttcaccggcctaaccgggccctgcgcgcacagctccgccctccgcagtagggtctggcatgttctggtccagtgggaacatctgcttactggagagcctctcaacaaccttcgtgcacgttttccttcctttcagctcgcagacgagttgttcatcgagggagggagagatgttatgcttgaagacggagacattatctgtttccaaaaggctcctgttccagatggtgatgcacaagtgcgctatccagatgttccttcattcttggagtatgttcacaataggcaggttgtgcactttcggtgtctggacaaaccaaaggatgatgatttttctttggaattgtcgaagcttcatacatatgatgatgttgttgagagagttgcacatcaacttgggttggatgatccatcaaagatacggcttacgtctcacaattgttattctcagcaacctaaaccacagcctattagatataggggggtagcacatctactggatatgcttgttcattataatcagacttctgatatcttgtattatgaggttctggacattccactgccagatttgcagcgtttgaaaacgcttaaagttgcattccaccatgcaacaaaagacgaggttgtcgttcatagcataagacttccaagaaatagcaccatcagtgatgtgattactgatttgaaaaccaaggttgaactatctaatcctgacgctgagctccgcttgcttgaagtattttaccacaagatttataagatctttccacctcatgagaagatagagaacataaatgatcagtactggacattacgagctgaggagatcccagaggaagagaagaatcttggcccacatgatcgattgattcatgtttaccatttcatgaaagaccctaaccagaatcaacaaattcaaaattttggagatccttttttgatggttattcgggaaggtgagactgctgcagaggtaatggagcgcatccagagaaaacttagagttcctgatgatgagttctccaagcggagagatgtatatggtgcttgggaacaataccttggcttggagcacactgatacaacatcgaaacggtcttacacatccaatcagaatcggcacacctatgagaagcccctgtgggaacaatggcagagattgtataatgggtttggtataattcttcgtgctgttgagaaactcttaaatgcgaatacagttcactctaagtttggtcaaaagaccttcgtggtttgcacgatctcggcgaccgtgactcctcatcacggacctccacacttgggcgttggccccaggcggccgcacttggagacctag

SEQ ID NO: 12769 - DNA, 288 bp, Zea mays
  Peptide Sequence Number=SeqID_56144
atggcccaagggcacatttccctttcaaagagcaagagatatttgaagatgaagcacaaaaaccgcaactctcaaactcactcaaagatttctctccaaagatttgaaatgggagaggcaagagatgtgagagagagagagtgggaggtgttcttcaagttagaaatggagtttgggtcgtgctcactgctatggggagagaggtcaagcagactatctaccaatctgactatcagactgactggcagactgacctacaggctaaccagggttgacccgaccggttga

SEQ ID NO: 12770 - DNA, 118 bp, Zea mays
  Peptide Sequence Number=SeqID_56145
agacattgtggtacaggtggctatgagaatcgatggttttggttatgactatggtgctggagaagatgaagctgtggaaggagacttccaggagttccaagactacgacgagttctag

SEQ ID NO: 12771 - DNA, 405 bp, Zea mays
  Peptide Sequence Number=SeqID_56146
atgggcaagagcaagaagggaagaagttcgtcgcaccattcaggtgacaagcggaagcgcgagccgactcctccctcgaaggacttcggcgattctgagtactcggaagaggagttctcctccgagtccgagggctcgccagtcgacacctctcccccagcgtcgtctgatgactcagatgattcccagggcctcatcgctgaggtgtggacatacatccgggccgttgagcgtgctaggctcgagggctcggatgagtcggaggtctcctcggacgaggaggggggcggcggtgatggcgatgacgagggcgacgacgacggcggaggcaacggcggtggtgatggcgacggcggcagaggcgacggcaagggcggcagtggcagcagcaaggccagtggctag

SEQ ID NO: 12772 - DNA, 126 bp, Zea mays
  Peptide Sequence Number=SeqID_56147
atggcggcggctgctaggagccaggggcggcggcttagggttagggaaggggcagggggcggccggctcatgggcctaatgggccaaggtggggataaggctgagagtagcttgagcggtgggtaa

SEQ ID NO: 12773 - DNA, 300 bp, Zea mays
  Peptide Sequence Number=SeqID_56148
atggcgtaccggtgggtggatccagagccgttcctgcctccgggcttcagcgccatggtcgtgcaacatcgtgagaccattgttggaacttgctctccggtgcaagttgatccaacggggggctgtggtaacgtatctgagtgcccagcgtcccgtgttaaggacgcatgtgccctcagacacctaggttatccccggaatattcccataaagcgggcgagtacgacgaaggcctcgagcgaagggtggcgtcttcgccttcgccccaacatttgccctccgagggaccagttcgactaa

SEQ ID NO: 12774 - DNA, 828 bp, Zea mays
  Peptide Sequence Number=SeqID_56149
atggtcgtcatcgcctacaatggccgcagtggtggtcgacctcgccctgtcgtcactccatctcgcagtggagcagttctatcgtcggagaaggcaaagatccagccaccaagttctcttcgcgtgattcaaatgatgcgtccagatgctgtggagcggtctgaggggtggcgtttcacggaccgtcatgacactgcactccagctccacgacgccgaccagccttccttcatggcgttcgcggaccctcgccacgtcgggccgccgccagaccacgtgtgcctgggctgccacctcaggccggcctccgtggtgctcctcccctgcaggcacctgtccctttgcggcgagtgcttcgccgccggcgacgccgtcatgtcgtgccccatgtgcctctcactaatcgacctcatcaacattgtgcttgattcacattgcaacagctcctgcgtgatggagcgtaccttcatcgccattaggcccgacggtgtccaaagaggccggaacttcggtgttgtgtctgtggatgagggtcaaaaagttgctaaccttatcaaacatgggccactggcgattggcatcaatgctgcctacatgcagacatacatcgaaggcatgccatgtccatacatatgtggaagacacctagaccatgttgttctccttgttggctatggcgcagctggttttgcccccatccgcctcaaggacaagccttactggatcatcaagaactcgtggggcatgaactggagggagaacggatactacaagatatgcagggttccaacatttgcaacaagtgtggtaacaccattcatgttttag

SEQ ID NO: 12775 - DNA, 1814 bp, Zea mays
  Peptide Sequence Number=SeqID_56150
atgattgttggggcgaaggcgaagacgccacccttcgctcgaggccttcgccgtactcgctgcaccaacgatacctataaatacccccgcatagtgcccttgagaggcttgattaacagagctattgccatctcgtacgaaaaccctgtttacgttaccacacccccccgttggatcaacttgcaccggagagcaagttccaacatttggcgcggcggaaccaagcctgccccggccggagctgcgaaggcccgagaattgcctccgccgggcaagcgcgttgccgacttcgccaccgagattagcgtggacgattatctcgttggtaagtccgccggtggtgagattccggcgctcactgccgtcaaggacgaggcgggcgctgtgtcccgccggctgaaggagccattgagtcaggcggctgacttcactgaccgcgtggcatcgggggcccttacggcggttgtgtctgccgaagtcgagagacttcgggcgcaacatgctgacgccgtccgggaaaagtcggccgccgacagcaagtgtcgtaagctggcgaagaaggtggccgcactggagggcgagaggactgacctccggcgccaactggcggaggagagaagggaggctaatgaggccttcgccaaggcgcagtctgcacaggcggaggccaatttggcgcggagggccgaggcttcaacgcgctcggaggctgagcggacgcgcaaacagcttatggactcataccacgagctgggcgcgcggaccgctgacttcgaagtgctagaccaagagcccgaacttcgctgcctcgagtggctgcaggaggagttgctggcgctccccgccattgtggaggggtttatgtcctatgcctccctggtcacgtgcgaaggggcgatgaacgcgctgtcccgcgaagggtgccggcactatgaggtcttcgaccaatctgatgaggatttcgagcgcgagatttacaaggttgaggaccttgtggtgaaggaattcgtgggagccctctttgaccagatgtggggtccccacggtcgggaggtggtcagggagcggtccgacacggcgaggggtcaggcggcgcgtaacgagaaagtggaggacttcggggctttgaacagcgcgcagcctgattcggagtcgaaccctgcggcggctgtgtcggaggccgccccggcgccgcccccagaaactgtcgaaggcgcccctgatgcccctgcagccactgcggccggcggtggctcgtcgccaactgctgcgccgagggctgaggatcctgtgaagatggtggcggagccggcagcggaggatcccgcgacggctgggtcttcgcaagttcaagattttgggcctgcgcacgcaaacgctactgctaattttttggcggcttcgaccgtggatgatgggaatgaatcggatgaatctgtgtctaagttttctgattttggtgactctgggagttcggttgagtggactgaagagtcgtcggatgaggacttggattactttgcagccttggatgtggcagcggcggagtcttcgccgcgtgctgtggatgctgaagttgtgcctggtccaagtgcggggcgtaggcggcgaagggcggttgcgaagcgtagagtgagtgaggcggacggcggtcggcttcgtgtgggcagggctggcaggcaggaactgttgtccttgccggctgctgcgagtgtaggtgagggggagctacgaggtctttttgcgggtgaggagctgaggataatgctatttaactatagggagatgggaattattccgaaggttgagccgat

SEQ ID NO: 12776 - DNA, 135 bp, Zea mays
  Peptide Sequence Number=SeqID_56151
atgacagtcggggtcagtgaggcattgtacgccaagacgactcagctagtgcttttggcaaaccaaacccctcagccaaacagctgcatgtctagaggtagaggagtagactcctcacaccgggtacctccttag

SEQ ID NO: 12777 - DNA, 534 bp, Zea mays
  Peptide Sequence Number=SeqID_56152
atggaggatgtcccactcccagatgctaaccagccggattcttttaaatggtccaagtctttcctttcttctgagaaatcgcctactttgctggaaccagaattggaggccctttcatttgccatccccaagagctgcccaaatgacaagtttctggacaatgttatgtcggaagacactcagagcatgacctctgacctagaggatgtggactcgtccccctctcgtccaattatggtggattctgatctaaggaggagcaagagattgagagaatccaaggctggatttcgccagggatcctgccagaagaggaattgtttgatgtgtcaccacaaatttgatggcccaccctccttgtctgccaaggtcatcaggaatcttggagctaaattttgcaatatgtcagaagaagatttgtctgacaaaaagttgaagaagaagaagaattccttaggatgtgtcggccccaaaaagccaaacaagaaagacaataatgataagaaagaagacaatgcagatgaagacaagtag

SEQ ID NO: 12778 - DNA, 1305 bp, Zea mays
  Peptide Sequence Number=SeqID_56153
atgaccttcgtacttaatgtcactgttgggccatgcacggggtgcctcgagtcgctgcactggttctcagaacttatcttttcagtcttccgcgacggccccgagaagacgtgcgaagctgagggggcgcacaaccgcggggcggttttcatctccctgaccgctggttgctccggaaatgaaggggcgcataaccacggggcagttgcacgctcctttgtgcggtggtttgccttcttcgtgcttcagcccggcctcaacctcccgccggtggtcatccacaaggatgactaccagccttgtggtggagagaacattcgggggagaagggcgttcaccagccttgcggaggaggcgaacttcggctacgcggggtcggctgactctaggtgccgtcagctgccgtgtgtttggctccttggcctggatggctttggtggcgcctccggcgctgcctcctggtgcttggtcggggcgtggctgtacgtccaccgcatgggccacggtcgcgccgtgcgcaggaggacgggagcgaggacctcttcgtgcgtgctgaggcagccgccgcccaccggtgcagaggtggccgctgtcgttggtgctaaggtggtcgccgtcgctggcgaggctgcccgttgcagaggaagacgggggcgaggaccttttcgcaatggcgcacgtgctgaggtgatcgccactgctggcgagtcatcggtgcagaggtggtcgcctttgctggcgagccgctcggagctagctaccacgcggccctactggcttgatgtgtcaaggttggataccagcgtatctgaaaagattgtcaacaactctcgagaggcaacccgccgagatctggatctgtacacagcttcagctagggagcacccacggtacgggaccaggctgagcggctacacgggctccgaaccaccccaggagactaatgtccattctctagctccgaacctgaggctgtcggacctcccaactttcgtatcgggggccctaaactgcaagcctggctgctcaattcggatgtcgtcatgtcagacagatgggaactgtacgggtgggttagataaaaagtattatctgaaaaactgcaagaccaacaggccgggtttatggggacggaccccaccgggttggcgtacacgactaggtcccgaccctgggttcccatctgtgtttgacgagggagccctcatctttggctgtggccattcctgcatgaacctgtcgaatgtctggacccgtggggagtctagaattgctttcggaggaaggcaggcttcagctccgtag

SEQ ID NO: 12779 - DNA, 360 bp, Zea mays
  Peptide Sequence Number=SeqID_56154
atgaagaagggtttacaggctcgaatgcagcaagcagagtttagtgatggcccatcagctattgggccaccggcccaccgcctaccagcattcaggctccggcgtggtgtccacgcgactatttctagtcgcgtggcaaacaacacccaaccccaccacgcggacggctctggggccgccacatggccagagaagacaatatgctccaaggcatcagcagtgggtccggacccccatgggaaagtgccagacccctgtatatacggactgaacctccgggccactcacaacagggtcccgggattatgggacaaagagtacccggaccttaatcaagaccagacgggggttcgaagctga

SEQ ID NO: 12780 - DNA, 2298 bp, Zea mays
  Peptide Sequence Number=SeqID_56155
atggcaacaatcatatctggagcaaggagccttcactcactcgctctgcgatcgcggatgttgggcgaaatgactcagctcggtccttttaaccgcaacgtgcagcggaggtggagaaagcctgtagattcggcaagaacacgtctcgagggaagaactatggatcataggctggacaagctaatggttcagctgaggaacttgaggctggccttggctttgcatgaggtgatatctcagcagaggaacggatatgcgtctctccagctcctctcaaggtggaggcatgaggtcgggctgaacattgaggtcggtgctttcctcaagaaatacccccacgtgtttcagacctacgtgcaccctgtcaagaggaaccactgctgcaagatcacgcagaagatgtccgacttgatcgcagaggaagacgctgtggtcagggagaatgaggtcggcgtagttcagcggctgaagaaacttctcatgctctctgtggatggaactctgaacatgcacgcgttatggctcataagaagggaacttgggcttccggatgattacaggtcctctatactgccgaaccatcgacatgatttaattctcgaatccccagctactctatcacttttctctatggatgaaacattggctgtagctaaggtcgacgagtggaggaaaagggagtacacagaaaaatggctagctgaatcagagacaaaatatgctttcccgatcaacttcccaactggatttaaggttcagaaaggtttcagggagaaactcaagaactggcagaggcttccctacaccaaaccttatgagaagaatgattcgcattcgatccgcaacgtggagcggcttgagaaacgcattgttggtgttcttcatgagcttttgagcctgacgatcgaaagaatgatgccacttgagagactgtcacacttcagaagattgtacaccatggaggtaaacctgctagaattttttctcaagtatccaggcattttctacatctcgacgaaaggaagcacacagacagttatcctaagggagagttacagtaaaggatatctgattgagcctaaccctgtgtacattgtgcggaggaagatgctggacttggtattatctggatctcgtaacgttggtgaatgccaacaggatagtgcaacttggtcagctgaggagcatggtctgggaagcagtcatgggtgccaggataacatatgccaggtggattctgcaattccatactggaacatggagttagaagctatccagcttgctgccttgctcacctgctttcctgagtatctgtgttcatcaattgcgaattatccttccttcgattccgacctcctcgggtggctcctgccgtcctgcgtgcattcccattttcaaaccagcatgttcagcactgcttggcgtggggtccttgaagagaaagtgcctctgatatattctctgctcaaaggattagccttgcagttgccagacgatgtacctgataaaaatgagataattagattgagaaaggttgcaagcagtgttggtgttggcgacaaacatgatgctgagtgggtacactctattctggcagacgctggtgcagctaatgataattcttggatcctacttccatacctttgtgctgcattcatggtgtccaacatttggaacggtgctgtttatgatgtcaatataggtggactcagtaacaatttgcactgcctagcaaggtgtgtaagtgctgtgattgggggaagcgaatacactcgggtcgaaagggagcagcgaataaattctctttcaaatgtgcatacagatgaactgcaagaggccgagttaccgagccgtgtctcagcagaagcaaatatcaaatcttgtatgcagatctacgtcaaactgtctgcagggatcgtcctggattcatggaacgacacaagcaggcagcacatcgtcccgaagctgacattccaggaccagctctgcgagctgtccccgtacgtgccaaggagcaccttagaagctcacatcccatacaccatcctgcgctcgatataccaccagctgtacggaggctctctgctggcctcggaaccggcggagcagtccccaaggcagtcgcctctcatctctctggcacacgcgtccccgtccgcaaggcagatgcagaaccgaccagagacaacacccaggtcccacaccttcgacccaggctactacagctcgtcggggtcccagcacgacgatggctacgacgcggataggagggccggacggctgctgcgcggagcatga

SEQ ID NO: 12781 - DNA, 3705 bp, Zea mays
  Peptide Sequence Number=SeqID_56156
atggcctatgggatgatgaagacaggatgtgttgcacttgtattatgtttaaacataagtgtggatccacctgatgtaattaaaatttccccttgtgcaagaatggagtgctggatagatcctttttctatggcacctcctaaagcccttgagagtattggaaaaacgttgcattcacagtatgagcgctggcaacctaaggctcgatacaagcttcagctggacccaacagtggaggaagttaagaagctttgcaatacttgccgcaaatatgccagatcagagagagttcttttccattataatggccatggcgtaccaaagcctacatctaatggtgagatttgggtgtttaacaagagttacacacagtatattccacttccaattactgatcttgattcatggctgaagacaccttcaatttacgtttttgattgctcagcgtctggaattattgtgaaagcttttctagagatgaaggtcatcatgatttatgggcttgtttttgtttttgttcctggattgtctaatattcataacgacttttgtttacttcagcgcctagattggagttctagctcctctgcatcttcacggaaggactgcattcttcttgctgcctgtgaggcacatcaaactcttcctcagagtgcagaatttcctgccgatgtgtttacagcttgcctcacaacacccatcaaaatggctttgcactggttttgtaagcgatcattactccgtggttctctggatctttctcttattgaccaaattcctggaaggcaaaatgaccgtaaaactcttcttggggagctcaattggatttttactgctataacagatacaattgcatggaatgttcttcctcatggtatggcgtctgcgatggatgcatgggacatggctgctgagatttgcctttccaagcttcctcagttaattgctgatccaaatgcagagtttcagccaagtccgttttttacggaacaactgacggctttcgaagtgtggcttgatcatggctccgaggacaagaaacctcctgaacagttacccatagttcttcaggtcctgcttagtcaatcacacagatttagagcacttgttctgctcggaagatttcttgacatggggccgtgggcagttgatttggccctgtctgtcggaatatttccttatgtactcaaactgcttcaaacaagtgcaatggagttgcgtcaaattcttgtgtttatatggacaaaaattctctctcttgataagtcgtgccaggttgatttggttaaagatggaggacacacatattttgttaggtttcttgacagtttggatgcttacccagaacagcgtgcaatggctgcttttgttttagcagtcattgtggatgggcataggacaggccaagaggcttgtatgaatgcagggcttatagatgtttgcttgagacacctgcaacctgagaatcctcatgattcacagacagaacctttacttctacagtggctttgtttatgccttgggaaactctgggaagatttccctgatgttcagctgcttactttacaaacaaatacgccagaaattgtactatgcttattgtcggagcctcaacctgaggtcagagctgctgctgtttttgcacttgggactctcctggatactacatcatcaaatggcgctgatgatgattctgactatgatgaaaaggtgaaagctgaaataaatgtagttcgaagccttctgcagatatcttcagatgccagtccccttgttcgatctgaggttgctatagcgcttactcgctttgcattgggtcataacaaacatctcaaatctgttgcggctgagtattggaaacctcaatccaattcattgctgaagtcactgccatcattggcaaatataaataacccaaacaatgtttacagtcccaacaatattctacaaggcagcattggtcctgtgctgagggttggcagtgatagcagtgctgctggtcgtgatggaagaatgtctacaagtagcccaattgcaacaagtagcatcatgcatggctctccccagtcagacgattcttcccaactctctgattctggcttattactgagagagaatgctagtaatggtggtcccggctacactaggtccaggcctgttgataatgtcatttattctcaatttatatcaactatgtgttcttttgctaaagatccttacccaagaattgcaactattggtcggagagcactgtcccttataggtgttgaacaagtagtcatgaaaaatactagatttaatagtggaggtgcacatcggggagagacatctgcttcaaactttggaatggcacgctcttcatcctggcttgatatgaattctggaaacaacttgataaaatttaggacccctcctgttagccctcctcagcatgattttcttccaggattacgccgagtgtgttctatggagtttggacaacatcctataagttcacctgatggcttagctgttccccttttaagctccgctgcagctaccagtaatgctgaactaagtatactccctcaatcaacaatttataactggagttgtggtcacttctctaggcctcttttaattggctctgatgataacgaagaggcaaatgctagaagggaagagagagaacgacttgcactagattatatcgctaagtgccagcgctcctcttgcaagatgacaaaccaaattgctagttgggatacgaggtttgagttgggaacaaaaacagctttattgttgccattttctccgatcgttgttgcagctgatgaaaatgagcaaataagagtgtggaactacgacgatgcgctgccagtgaactcttatcaaaaccataatttgtcagacagagggctatccaaacttttgctgattaatgagcttgatgagagcttgcttttagctgcctcaagtgatggaaatgtacgtgtatggaaaaattttactcaaaagggaggacaaaaacttgtaacggctttctcatccgttcagggacatcgaactgctggtcgcagtattgtgattgactggcagcagcaatctggttatctttatgcatctggtgacatgtcttccatcttgctatgggatcttgacaaggaacaacaactcagcactattcagtcatctggtgatagtgccatttcttcactgtctgcatctcaggtctgctctggacattttgctgctggttttgctgctggttctgtcaggatatatgacatacgctctcctgatagggttgtctatacggccaggccacacgcaccaagaacagaaaaggttgtaggcatagggtttcaacctgggtttgatccttacaagattgtaagcgcatctcaagctggagacattcagtttcttgatgttagaaggtcagcagaaccctacctgactattgaggcacacaggggttcacttacagcattggcggttcaccggcatgccccagttgttgctagtggctcagccaagcagatgattaaagtgtttagtcttgaaggagagcagttgacaataattcgctaccagccatcttttatgggccaaagaataggcactgtgaactgcctttcttttcacccatacaaatcactcctatctgctggtgctggtgataatgctcttgtctctatctacgccgaggaaaattacaagtaa

SEQ ID NO: 12782 - DNA, 966 bp, Zea mays
  Peptide Sequence Number=SeqID_56157
atgtctgcaacgtgtgatcttcttaaatctaaggttggattgctcgagttccttcaaaagctcaatggtattcagaagtcagtaggtcagaatggtgcagttgaacctgacacatcatgggatataataacgtcagtggatttgtgggaaaatggtggctcagatgatggatatgtacttgttaagcatgaggatgttgttgatgggatgacttcctttatggctgcatgcttggtgtcaattaaaaagaccaaggatctgccccctgatcaacttcagaaagcgcttaggaagacgttttcagctgaaaagaagaaaggtaaaatccggaaggcatgggatggaactaaagtcatttataatgttcatggggcgccactactgttggttcgaacatctaaaaatgccttcttagagagtctcaaaggagaaatgggcattgccacagctattggggagcagtgggtgatattccgtggaaaagacgaaaggcctgggtgtgttcagaacacatgtgctcatagggcttgctcgctgcatcttggttcaatgaacgagggtaggatccagtgcccttaccatggttgggagtactctactgatgggaaatgtgaaaaaatgccatcaacaaagatgctcaacgtgcctccttcaggatttatagttcatgcagagatagtgatggaactgccagttgaacatgtactactcctggataacctcttggaccttgctcatgctccttttacacacacatccacctttgccaaagggctggagtgttccaagaacgaggacctccggctttttcttggtcagcaagaacggatgatcaatggcgccaacgtctggaactggccggtatcatatgacaagctcggggtacggtaccggttgtggagagacactgttgagaggggctctaaacggttgccattcagtaaccaagctgagagtggatcatag

SEQ ID NO: 12783 - DNA, 1266 bp, Zea mays
  Peptide Sequence Number=SeqID_56158
atggaaggttgccgcgccagcaacgcccgcggatggaaggttgccgctcccgcaagctcggcccgcatcgcccccgcacttctcgccaccaacgaccgcggatggaaggttgcggcaccaaatcgccgctcccgcaaatcagcatcagccgcgaaggttctggcagaaagaagacccacgacatcttcaacacagataaataacctgaataaatcccatgcttggatagacgccgagaatgctggtttgttttttacttgtagtaatcctgataacgtaccgaaagaagtcccaagtgatcttgaagaactataccttcaacggcaaaatccaagctatctgtatgggatctcaaggctatatatccttgctctccctccttttgtattggggtataaagtttatatgcattcttccggctacaaggttttgatggaaccggtcgtattgaaccgtgaaagagccgcagctgaccgcctaaaacggatgcctatattgttcgacgactaccgtgatgaagatttttatgggcttccgcggaaatacagtattgtcgctcgggtcgaagttaaattcccgattgaaccacgttttcgtgatagacaacatttcgttttgtctgacatcaatggagccaagatcgaggccataacatatatgtatgagacagtcaaacatttcgacaatttgctccatgaaaagcatgtttacaagatgcataatgtgaagttcagtcttcatccgggtgaatttaattttcgtcatctaaatggtcccatggaattgtgtcttgaccaacaaactatcgtggagccatacactgttccaattcagatggcgccattcccaaaacaaatactattgaaccttgctgatattgccgagttgctaaacaggactttagtcgacattatggctgttgtagtccacttggatacaatacatcgcacaatgtggggccctttcagaaagattgttataatggatgctaggggatatttacatatcattaaagtttggggtgacctactaaacaaaaatgcactccgctggggcttggctaaggaggattatggcataataattgggactatgtttagacggttcagaagacaagagtgcctcgagtcttcggatcataccgcaatacacttcaatccgttccatcacaacacccatcattttcgaccaatccaaaaagctttggtggcgctgaacaaccgtcagtttgctgttacatttcttgaagaagaaaggcgtagatag

SEQ ID NO: 12784 - DNA, 513 bp, Zea mays
  Peptide Sequence Number=SeqID_56159
atgccgagagggcacatcgttcgttggcttggtagcaggcggcacgtcctttctgcaataaatgcagtggctgcgcggctccagtggcccgacgtcagactcctcccgttggctcacgtcatgggccacaagccatgcggcagtagcgggtcactgccttggtggggagcgtggtgcaagcctcggacacgtgccagcaccggaccccttccagggcagggtccgggtatttcctgccccagggtctgggacccggtggtgaaccgtccggacctcactcggaagggtccgggatctgtcccggaggtccgctcgtcatgcacggggtccggtgctttccacgtagcaggtccagacctgctgcgtacatccggagcacatcctttcccttggtcacatggcgaccccaaggcggctgatgttgcgcgacgggggtacccctgtttcaaggtaccgacagtggcccccgggctcacctcaggggagggcgcgagcctgcaggtggggccataa

SEQ ID NO: 12785 - DNA, 717 bp, Zea mays
  Peptide Sequence Number=SeqID_56160
atggggaaccccgtggtgcgcagtcgggtcataaacaccgacagctggcgtgccaggtgtcctgcatcacatcgtggatccatccgagaagtgatcttctccgatggcactaattgtggaggaaagcttgccctacctaacctcagcaagaactactcctacaaactccaaggcgcgaagacctcaaccaacctctgccccacgcaggattgtgcccacatgaaattgccacaagctttggatttaaaggggaaattggaaattgaatttggggagaaagaaaagaaaatagaaaacaaaaaggaaaggaaagaaaagaaaaagaaaaaggtccgtgggctgtgcccggaagcttccttaagctgtcgtgggggtgctcgtttatctgcttgggcgcgagagacgatcagcgggcagcaatttctcgtcggagtggcgtgccgccgtagatcgcgtcgcgccgtggaccggggtctgtgcggcccaaaacctcagtatgtctccggcttcgagttccctacctactggctattgtgtaccatcgtcgaatttagtgaatgggtcgttcgggggggtcgattagccgtcgccagtgtgttctccgtcgcggggatcggcggtgttgtcgtgctttgcgaccgggtgaagaagacgggggcgcatccatccgattttgcactagcggctgagattagttgggcgaacccgttaggttag

SEQ ID NO: 12786 - DNA, 996 bp, Zea mays
  Peptide Sequence Number=SeqID_56161
atggacggcctccacaccgagctcgcgctggggctgctggagtgcggcgttgttggcagcggaggcgagacagcgccgttcgtggccaagacctaccagatggtgtgcgattcgcggacggacgcgctcgtccgatggggcagggggaacaacagcttcgtcgtcgccgaccccgccggcttctcgcggctgctcctcccctgcttcttcaagcacagcaacttctccagcttcgtgcgccagctcaacacatacgggttccggaaggtgcacccggaccggtgggagttcgcgcacgagtcgttcctgcgcggccagacgcacctgctgccgcgcatcgtgcgccgcaagaagcgcggcggtggaggaggagcctgctcgtccggcggcgatgcgccgcaggccggctgctgtatcagcaccatgggcgaggatcatcgtccggaggcggatccggacgagaagcaggaggcggatgccgaggcggctctgctggaggaggtgcagcggctgcggcaggagcagactgccatcggggaggagctggcccagatgagccggcgcctgcaggccacggagcggcggcctgaccagctcatgtccttcctagacaggctcgcggaggaccccgacggcgtcacgcgcaaccttgtcgagcaggccgccgagaagaagcgccgccgcatgcagctcgcgtcccagtcgcagcccgcccgcccgccgctcccgccggcgccgccgccaccggtgctccacccgctgctggcgctcggaggcgccgccgccaagggcctggacggctggcagtgggcggagctgcagaagccgtccgttgtgctccccgccttcgatttcgatcccgccgccagctgctgcggggcgcagcatgcgccgaatctcggcggcgccggcatcatcggcatgggcctgactgctgatgagaccacggtagagacccccttcccgttctgcctgctcggccagggtttcttttga

SEQ ID NO: 12787 - DNA, 1392 bp, Zea mays
  Peptide Sequence Number=SeqID_56162
atggggagtgagggaagggaatccggtggattggcgctgggagacaagggcagcggtgggcgatggggcggcggcagcgtgggaggtcgtgggcacaagggcaggggtgcggagggggagacgtgggccggcgatgaaggatcaatcacagacgaggccgacgcgagctggacctcgatcacccccaaccgggcggtcagcgccgacaggtggttgaggatcaatgtctgggagtcctacatctgccgccggaatgctatgaaggagttctgcgacacgggcgacgtgctggtggctgctgctgccccggaggttgtcgggatggtggtcgtcaccggggaaaccgaaggctggggagggtcgtccgacatcctaggatcggtgaggtcttctgatactagattgttaggaacagggttacggagtgatccttcatacgtgaagaagttgaaacttgagatgttgactgctatagcaaatgaaagcaacacatatgagattgtcaccgaactgtgtgaatacgctgggaatgttgatgtaccgattgcaagggagtctatccgcgcagttggaaaaatagcactgcagcagtatgatgttaatgctattgtggacaggcttctacaatttcttgaaatggataaggattatgtgactgctgaaactctagtcttggtaaaagatcttctcagaaaatatcctcaatggagccatgattgtatagctgttgttggaaatatcagcagcaaaaacatccaggagcccaaaggaaaagcagctctcatatggatgttgggagaatattcacaagacatgcatgatgctccatacatccttgaaaatcttgttgaaaactgggatgaagagcactctcctgagccatcttacatgtttacagatagggagcatcgtgagccatttgaatactcagaggatcttacaagcttgactgttggggcagaggatccagaaaatgtaatttctgcccaaagatatcaagaaaacgataatgatcttttgctaagtacttcagataaagaggacaatggtacaagagccagcaatggttcttctacctctgcatacaatgctccttctgatttgattagcccttcattgataagctcccaaacaccagctgaaacttcactagtaaatactggtgggccgacacattcctcacaatcaaacttcagtctcgatgaccttcttggcattggcgttactgaagctcctgctccaacaccaccagcactgacccttaactcgaagcctgtgctagatcctggtacgttccagaggaaatggggccagctagcattggcgctgtctcaggtgaccaataaagatgtttcttccattttgattcacattaagggcctgcttgtttga

SEQ ID NO: 12788 - DNA, 396 bp, Zea mays
  Peptide Sequence Number=SeqID_56163
atgtggtggggtcaggtgctgttgctggcccagagtagtcgctcgaggctagggcgagtcatggcctggtcccacatacaactcttttaccacgcgactaaaaatagtcacatgggtactgcgtctttatacagtagtaaggggtaccctagttttaggaagtttaaagaggaatctttagtggctgtggtgaaggttactggtggtgtgttctctgaaacacaagtgattttagagttgccgaggttggtttctattcttgatccgaacctcattcctcaattcgtggatgaggtgatcagggaccatttatatgagctgcaattttgggtagaggaaaatatgaacaaggataaccctaaaccgatggatatggacgacatggattttggataa

SEQ ID NO: 12789 - DNA, 285 bp, Zea mays
  Peptide Sequence Number=SeqID_56164
atgggaaccgctgccgctgcgcagcccttggggagtcgtcgctgcgcgtgcctcgtggagcaacagtcgtcgtcgtgctttgggaacaacagccgctgtcgcgtgccccttaggatctgccgtcgcgcgcgtgcctcggggagcagccgccacgctccccctcggggagccaccgtcgtgcgcacccctcggggaaccgtcatcgcgcgcgcctcaggcagcagcctccgtgcgccgctcgggaaccacctccgctcgtacgtcggggtgaggcatcaaaactaa

SEQ ID NO: 12790 - DNA, 801 bp, Zea mays
  Peptide Sequence Number=SeqID_56165
atggaaccacccatcccctgtcgtcgacgcccacacagcgcatcagcaaacctcttcgccacgaagcatgggacgtggccagcgccgcactcgcgctcgaactcggcgacaaagtcagtcgcctcggcagctgacggtggcagctctagcatgcggttggcgctgtcagcctgccctgcgaggtcgaggagggagagggagcgggacatcatgcccctggcaacccaggcaccaaggcggaaggtgccggcgaggagagaccttcccttatggagtctgatagttgcagatctcgaatctcagacaggcattgcccaacgcaggtgtaccaactcctctacttcactgaacctgttcatctgttgtactttttatgaagatccaaaatttgtcggaccaaagcttcagcttgcaatagctgtgagggagaaggacctcctcgtcggcaccttccgccttggtgcctgggttgccaggggcatgatgtcccgctccctctccctcctcgacctcgcagggcaggctgacagcgccaaccgcatgctagagctgccaccgtcagctgtcgaggcgattgacttcgtcgccgagttcgagtgcgagtgcggcgctggccacgtcccgtgcttcgtggccaagaggtttgctgatgcgctgtgtgggcgtggacgacaggggatgggtggttccatgcgcacgggggggggggaggggagcacgagcaggggtaggcggtggcatggcctggttccatgcgcgcgtgagcggggggcctggcggggccgtgggggcatggcctag

SEQ ID NO: 12791 - DNA, 1200 bp, Zea mays
  Peptide Sequence Number=SeqID_56166
atgaacactctcctgggcaagctgggcaaccttctcgcccaggagtatgctatgctcaggggcgtccgcggtgacatccagtacatcaacgacgagctcgccagcatgaaggctttccttctcgaccttgctcgggacaaccaagacaaccggaggaaggactggatgaagcagatccgtgagatggcctacgactgcgaggactgcatagatgacttcgcccaccgcctccccaaggattcatccaacttgctgaacaccaaatgctggcccaggtggatggctacactgatctatgacctcacgacgtgctggcctcgccgtgagatcgcttgcaacattgctgagctcaaggtccgggcgcaactgattgccgaacgacgcgtaagatatggagtgaaggaaccggacagcagcggaagcatgcctgctgacgcccccccggagaacattgctgaggaccagctcgcaaggcgagatctcaccattaaggaacccgtagggatggggcacgtcatggcggatcttgagaggtgggtgaagcacgacgagcagggcgcaggcggccagcgagctgtcgcgtccattgtaggatttgggggcgtggggaagaccaccgttgccatggcactgtacaagaaagtcatgaaggattttgactgccgggcgtgggtcactgtgtcccagaactacgacatagaagccgtcctccgtgagatcctcaagcaaatcaacccagattacatgcatcaagacggcggcactgctgcaaccatctctgagaagaccaagaccaacaggacagcatcagcatccattgcttgcaaattattgaaccgagctttgaaccaccgcacaggccacacgcatggaggaggcactgctggaagctctaagaaaaatgacaccagcaaagctgtaatggagcacctcaaagggaagaggtacctcatcttagttgatgacatatggtctgcagaaacgtggaagaggatatcaaagtctttgcctgacaatgataagggcagtagaattatagttacttcgaggcttcgtgctgttggtgcgacatgctgccagaatggaaaggatcacctctgtgcagttgattttctccgtgacgaagatgctgggcattcagtcgaagtttttctgaatcgtctaagagccacaacgatcacatggtcccggaaattatag

SEQ ID NO: 12792 - DNA, 2838 bp, Zea mays
  Peptide Sequence Number=SeqID_56167
atggaggtagttgagttggttccttgcgcccgcaataaatggggcaattggcatgagttttggttctacgttgcggagggcacagtcgaagaccatccggggctccccgtggccgagatgtgctcgcattattactcagcatacccgcagtttgaagtggcggaggaggatgcagacgaaggggcccttcggtgcgcggccggcctgagcagcgggcgcgatttggttgaggagtttgtggcgtatggggtgtggcctttggcacatggctgggcgctgggcgaagtatgccctcgccagatgccttcccgtggtgagatgctggtgcgaagtcctgccttcgcactggatctgcatagccgcgatccggccgcctttgtgcgtgaggcggaggatggggtggtgcggatcgttggtcggtacgtgccgaagacagagggccagcatagctgggatatacgcgggtctaatgaccgcttgaacagggtcttcgagttgaaccgtctgccgtaccgcggttatcccgggcaagacgatgtggatcgtcgcgggaaaaaaccggcgacggagactgaagacgaccccgcgccggcggccgccccatcctctaagaagaggaagctaggtatttctacgggaggactgggggtttccgatggttttgctagggaattgatgaggacatgcgcggccccagggggaaggatgtcttcgcccgagcttcgggagtcttcggcgcggatgctgagggttaccaggggttggtggcctaagaatgttcctatccctcgcgcggctggcgaagacttttttacatctcgcatggttcatgattggagagtgtttccttatgggcggaatattgctgctgttgtgtcggcagtgatggacaaggatcgtcagggagctgcgcagaagcgccaggcgatcgtcaggctgcatgaggccaggccaaagaggtcgcgggggaccgcgaaggctgctgcccccggcggaagccagccgacgctggcggtgaagtcggccgcccctgggtccagcagggtgtcggaggctgtgaaggcggccgccgccggcggtaccaagtctgtcccggccggcgccgcgaaggcccgagagctgcctccatcgggtaagcgcgttgctgacttcgccaccgacattagcgtggacgattatcttgttgggtcgggcgaaggccaacttgttgttgttccgcctgccgtggctaccgcggcggctgccgtggtgcccagggcgaagggtagtgctcttggtgccggtggtgagattccggcactcactaccgtcagggacgaggcgggcgctgtgtcccgccggctgaaggaggcattaagtcaggcggctgacttcgcagaccgcgcggcgtcgggggcccttacgacggttgtttttgtcgaagtcgagagacttcgggcgcaacatgctgacgccgtccgggaaaagtcggccgccgacagcaagtgctgcaagttggcggataaggtggccgcgctggagggtgagaggactgacctccggcgccaactggcggaggagaggaaggaggctaatgaggccatcgccaaggcgcagtctgcgcaggcggaggccaatttggcgcgggcggagggcagtcttgccagacagcgcgccgaggaattggaggagcggctcaacgctctgcagacccgtgtggagagggtcgaggcttcgacgcgctcggaggctgagcggacacacaaacagcttatggactcataccatgagctgggcgcgcggaccgctgacttcgaagtgccagatcgagagcccggacttcgctgcctcgagtggctgcagggggagttgctggcgctccccaccatcgtggaggggtttatgtcctatgcctccctggtcacctgcgaaggggcgatgaacgcgctgtcccgcgaagggtgccggcactatgaggtcttcgaccaagctgatgaggatttcgagcgtgagatttacaaggtcgaggaccctgtggtgaaggaatccgcgggagccctcttcgaccggatgtggggccctcacggtcgggaggtggtcagggagcggtccgagacggcgaggggtcaggcggcgcgtaacgagaaggtggaggacttcggggctttgaacagcgcgcaacctgattcggagtcgaacccggtggcggctgtgaccgaggccgccccgacaccgcccccagaaaccgtcgaaggcacccctgaagcccccgcatccactgcggccggcagtggctcgtcgccaactgctgcgccgagggctgaggatcatgtgaagatggtggcagagccggcagcggaggatcccgcgacggctgggtcttcgcaggttcaagattttgggcctgcgcacgcaaccgctactgctaattttttggcggcttcgaccgtggatgatgggaacgaattggatgaatctgcgtctaagttttctgattttggtgactctgggacttcggttgagtggactgaagagtcgtcggatgaggacttggattactttgcggccttggatgtggcagcggcggaggcttcgccgcgtgctgtggatgctgaagttgtgcctggtccaagtgttgggcgcaggcggcgaagggcggttgcgaagcgtagagtgagtgaggcggacgacggtccgcttcgtgtgggcagggttggcaggcaggagctattgtccttgccggccgctgcgagtgcaggtgaggaagagctgcaaagtctttttgcaggtgaggaggtgaggataatgctatttaactatagggagatgggaattattccgaaggttgagctgatgtaa

SEQ ID NO: 12793 - DNA, 375 bp, Zea mays
  Peptide Sequence Number=SeqID_56168
atgggccagatcgcacgcgggcctccattctggacgaggtcgcaggatgagacgaccttgtcgcgggtcttcgtccggcggcgtatgagacgaagggaggcactcgtattggcgtcgctcatcgatgacgtgaagaagcttggcgactgcaatttcgacctctggaagcagtctcacgtgaccgcatgcgccgctgtgtacaacaagctccggcgcagccgccggttggacgcggtccagagcggctgcaccgcgctgtccatcatcaagcagggggacctcatggtcgtcgccaacatcggcgactctcgggatgttctgagcgccgcattcgacgacagcgccatcacgccgtccagctcatcgtctacctga

SEQ ID NO: 12794 - DNA, 612 bp, Zea mays
  Peptide Sequence Number=SeqID_56169
atggcgcaatcggtgaaaatattgtgtaaggatggcttcaacttgtacgtcaccattcgtggcaataaggccgttcttgcccctgaagatcccgacgacgaaatgcagtatgatcacacactctatgtacatatcttttgtttggctatgtatgctttaaatctcgaggaatggttcaaggactactccagggtaagcagtgtgacggatgacaacggtcaaagggtgttcgcgctggtaaacaaggagacgcaacaagccatggtaaacagaagggacgagcaggaggtgcaacttgttccatattacaaagatgacgaccgtgtggatatctccatgctttggacagagctcccagaggaccacggcgacggctttcaccaaattgcagcgctcaagaacacatatgaggccctggacgggctaggcggcaattgcaaagaggggacgatcgttgggatagatcctacgcattattcatatctcggaactgttaataagaatcagctgtggaagatcgttgataaagggaccgctaggcgcttgaccaaagagctaggactaggaggagcgcgtctaaaaaagttggctcccatttctttacgtaactaa

SEQ ID NO: 12795 - DNA, 843 bp, Zea mays
  Peptide Sequence Number=SeqID_56170
atggtggacagcctgctgtcgtccagagtcagaacggggacggaccgggtggatgggatggaggacgccgcgaaggtgttcgacgaaatgctgactaagggcgaggaggcaccatctgtggtgatgtacaatgctctgatcaatagctactgcacaggtgcaaatatggaaggcctttgtgcagacaagactcaacaattggttgacatcacggactggatcgtggacacagagattatcttgctcagggacaacaacaggccaaaacctggtggcaatgttacctttggcgagttgctcaagagcagtgtgctgacagaaggtgtccgcgtgcttatgctggtctggaatgctaggacttctgtcggtttgtttaagaaggatggcttgctagctgcccatgatgaggagcctgcaaattacttccaggggcatgactgtgttgtggattttgagttgaagcttgaagagtgtcaactgaagcagtaccaatgggagcaggaacagatggcttcaatgatggagtacattgctcgctttggtcctgattctgcaaagcttgtgaggggaattaagcaaccatggccgccaccaagggcagtcccgccgcagcttgattacagcgatgatgaggcatatgttggtagtgcttggactagattgtaccccttgacaaagaagcgtgccaagcctgcagtgccattgggtgccaactatagactgattgatattactgtcagcagttgtctcaacagcaacataattgggctaatgttccttggcatgttccctgtggtgggtcgtgatcctgtagatgaattcccgtacatgaacttgccttaa

SEQ ID NO: 12796 - DNA, 786 bp, Zea mays
  Peptide Sequence Number=SeqID_56171
atgccgaggaaggcgaactgttgctgcccagctaggatgcaacattctgtcctctgtcctcgctttcgtggcgaggacgggagtgaggacctgctagtgcgctttggagcggcctgcgctcgctggtgcggcgttggtggacaggcggacgctgtcgtcggtgctgacgtggtggaagctggagaaagcttctccgccgtcgaggccgtcagcgccgcctacggaccgacctccggctctttggctttaatgtctggttcgcgtcccttgagtggggacgcgaacgagagcctttcggtggctgcgtccgtcctgggaccatggctgctgctgcagaggtcgctggcgagtcgcccggagcttgtcgccccgcaggctctccgctggctgaggcttcagggcggccggtcgagccgtctactcgggccggattcctggaggagacactggcggcgatggcccggtcgtggtgctgacgtcatccttcggagcttaggtcctccgaccgtgttgccgtctgaggctcggtcagacttcgccgaaggtggagttgacgccgagggtgctgctgctccccctccatcgacgtccgagactacaggatcgtatctggacttatttgtcggtaacagaattgtttgtccgagtgagagttacttttcacggaaggtgacgagtgaggattctgctatcgatatagtcgagaaggcacgaaaaatcgtttcagcagaaaggttcccgacattaagacttgttcggtcagcggaatcgcttatccgagcgtga

SEQ ID NO: 12797 - DNA, 696 bp, Zea mays
  Peptide Sequence Number=SeqID_56172
atggcgtcgaccaaggctcccggccccggcgagaagcaccactccatcgacgcgcagctccatcagctggtcccaggcaaggtctccgaggacgacaagctcatcgagtacgatgcgctgctggtcgaccgcttcctcaacatcctccaggaccttcacgggcccagccttcgcgaatttgtccaggagtgctacgaggtctcggccgactacgagggcaaaggagacacgacgaagctgggcgagctcggcgccaagctcacggggctggcccccgccgacgccatcctcgtggcgagctccatcctgcacatgctcaacctcgccaacgtcgccgaggagaaaattgagtgggggcctgtgcccccactcagctcaacgtcggtccgcccctggcaccgcagccgcaacagcaagctcaagaaaggtggcttcgctgacgagggctcagccaccaccgagtccgacatcgaggagacgctcaagcgcctcgtgtccgaggtcggcaagtcccccgaggaggtgttcgaggcgctcaagaaccagaccgtcgacctcgtcttcaccgcgcatcccacgcagtccgcccgccgcttgctccagcaaaaaaacgccaggatccggaattgtctgacccagctgaatgccaaggacatcactgacgacgacaagcaggagctcgatgaggctctgtag

SEQ ID NO: 12798 - DNA, 474 bp, Zea mays
  Peptide Sequence Number=SeqID_56173
atggaagaggaacaagaagaggcgctgctggaatgtctgcgccatggaagaacgaagcttggtcgtgtacgcgacagggagccatggaggaagagcagaggccgcagtggcaccctgcgccaaggacagagaaaggtgctggacacccatgggagcaggaaagccgagcagagagctcgtagggagggccagcggccatggaaggaacttgctgctgccgtgagggagagggaggacggcgtgggaaggaagggagcagggcaggtgggctgccatttaaagaggcgctcgctgcagccattggtggacatgggtggcatgctgcagagctctgcatatgtcagtctgcttgcaggtgatggcaggacgactttggacgcccagttttggcattttctgtttggattcggacccggatcactgcagaagatttgttccttgatgtatactctacaaatcgtgtatagagattga

SEQ ID NO: 12799 - DNA, 1122 bp, Zea mays
  Peptide Sequence Number=SeqID_56174
atggccaaggaacgttctgatcccccgcgcgaccggcgaagacatatttacgtctcgtatggctcgtctgaaataagatcatggtacagggtcggatgtggggcaactggctgttgtcccgactgcggtggcggcacttcgccaacggcggcgggtggggcgaagggtgcttcgcaggacccgtggtccgccttctgcgcgagcggcgagatttcgtcgatcgccgtcgctaaagatgtggtggactctgtgtcccatcagctgaggcatgcgtcgcagcagctaaagcatgcggccgacttcgccgaccatgttgcgtcgggtgctctgactttggagtttgctgccgaaatcgagcgtctctgggcgcagcatacggatgctgttcggcagaagtcggatgcggaaaacaaaagccgcaggctgacggagaggttggctgctgcgaaggccgagaaggggggtctccggcgccagctggtggaggagaggagggacgcgaacaaggccattgccgatgcgcaggccgctcaagccgaagccaaacttgtgcgggaggaggccagtctcgcccgccaacgcgccgaggagctggaggcgaggctcaatagcctgcgcaattgcatggacaaaaccgaggcctcgacgcgcggcggacgcatgtgcagctcgtggacgcgtaccgggagctggggggagctgggggtgctaccgacaatcgtgacgggcctcatgtcctttgcctccctcgtcacctgcgagggggccgtgaatgctttgtctcgtgaggggtgcgggcatttcgaggtcttcgaccaatcaaacgacggcttcaaacacgaaatcttccaggttgagatagaatgtggatcaggtaagaatgtggggtcggcgggggctctcttcgatagaatgtggggtcctcacggccgagagatggtctgggagaggtccgaccgggcaatggatcagatggcacatgacgaggaggtggaggaccttggcaatctagacggcacgctgccggaggcctcggggtggagctggcgccgtcgcccgatgcggccaagggcccctcggcgacctccgcgccgactggagctggcgaagaccccgcgctag

SEQ ID NO: 12800 - DNA, 586 bp, Zea mays
  Peptide Sequence Number=SeqID_56175
atggctcctgtagcaataggagaatggatggcatcagcctgcatcgccaagatggttagcaaagtgtgctcttacctagaagaccagtatgaataccaaagggatgatgcaaaggataaactaaccaagctcaagaataatctctggaagataccattcgtgctggacaaagcttcaagcttgcaaaccaaagatcccagtatgaaaagttggcaagggagtataaaagatgctgcttaccaggctgtggatgttcttgatttatttgactatcgcttttttgaagcaaaagctgaagacatagaaaaggtgctggccgagtcatctgattatgctactgttaactcttcatcctccgcaacaaccaacaccactgcctctaccagcagcagctcaacagtaaaacggtcagttcgtgttctgaagcgtgtccttttttctgatgaagaccttaataagttaattgcaattttggaaaagtttgataagatttctagtgagatgcaaacattcttagagcttgttaacccaaggaataagaagccaggaaaggcacttcagtggcgcagaacaacctctatgctag

SEQ ID NO: 12801 - DNA, 321 bp, Zea mays
  Peptide Sequence Number=SeqID_56176
atggcggtgtggtcggggcgagtagcggctagggagtggggcgccatggagaggagggtcgagctgctgcatctatggacagggagccgactgcgctgcatggaagaggaacaggaagggcgctgctggaatgtctggcgccatggaagaacgaagcttggtcgtgtacgcgacagggagccatggaggaagagcagaggccgcagtggcaccctgcgccaaggacagagaaaggtgctggacaccatgggagcaggaaagccgagcagagagctcgtagggagggccagcggccatggaaggaacttgctgctgccgtga

SEQ ID NO: 12802 - DNA, 897 bp, Zea mays
  Peptide Sequence Number=SeqID_56177
atgaattcacccacccccgccagcggaggagacactcgtttcagctctgacttcctttctcatgatggctttccttccatcttgtgggaagtgcttaactccgtcggttaccctacgccccctttgtacacggtgcagttgtatgaggagcatcgggtacctcattgccgagtctggctgactttggaggctcatccccttcaaccgggttggcattctcttgactctgatacgattggattcagggcagacgacaccactgaagcagtagccatgaagactctaacgactttctgtggctaccatcccctagagatggtgatgcaccccttgggacgtttccctgctgagaagaaggatgaccccatgtggtgtaaccgtgtgagccatgtgaaggatgtgtgggcaatgtatcctgacttggttgggagggaaaatgtgactctccgtaacaaacctcgccagaatccgcacgatgatatcgccgtgagctgcgcgatgcctgctggcacttgctgcgcggaatccacgcggatggaacgaactcgtccaggaagggtgcggttcgcccgccagcccttgcggaacccgcgacactataaatccgtcgtgcccctgcttccgccctctgcccgacagtgcaccatgaatcaggccggtgaagctctccatgccacagggaaaattattgtagcttcgcctgttcggaattgtgctctacgctaccggaatcatgtgccgcatccgtctaatcaaagttcaggcatcggggtcgtccctcggcgtgctcctgccatggtgccgctgctctgcgttctggatctaatccgggcccttgatccttcatcgggcggctccggttggctcgtacccccttcacaccaccgattttgctaa

SEQ ID NO: 12803 - DNA, 129 bp, Zea mays
  Peptide Sequence Number=SeqID_56178
atggccggacctgtgcccctcccgtgctaccgcacccggggctggggtctctaccagctcctacgcccgtccaggaatttttggtcgcaccgccatgccccttggaaaagtttttctgtaaaaatttga

SEQ ID NO: 12804 - DNA, 516 bp, Zea mays
  Peptide Sequence Number=SeqID_56179
atgtcagggaaggttacttaccaagagacgatgctcggggcagcttggcacgacatgaggggactctggttggctggacggcgagaaaccgtggcagaggcaaactccgacttgcgcagaggaggggttaagcgcggacctttctcgtggcggagccgcttgccgcaatcaatccttgatatatttgttacaaatgatttgagaaaaggtataaccattaaggtaaggacgtgcgaggaaagaaaaagattgcgcattcgggtctcacgacgaaaaggagattggcctcctgggactagtaattgtatcacatttgagtcccagaggatctggggcgcttcatcgggtgacatgggtgggtcgtggggacgtgggcgtggtttgaccgcgcgcggggcgcacaccatgagtgcggcggttgcggggaaggggttgggcctgacgggcaaggcccgcgagccagcaagggcgggtgtgcacgagcacgcaatggcgctgacggggcggtcccactag

SEQ ID NO: 12805 - DNA, 789 bp, Zea mays
  Peptide Sequence Number=SeqID_56180
atgtcttttgtagatggctcgtatcaggagcaggagcagcaggactcttcccctcgcctcagcgggaggtggagtctaggaggccgccttcccctctacctcagccaaagatgccccctgcaccaccatagggcattccggatgctggaggagaccctgatggagacggagatgacgacgacgctggtggcagttcgggccacggcacggagctctcggaggagcaagagccggagggatggatcgctagacccatcactcgtgacgccgctcatgggtgtcacttccatgacgctctcgataccctgttgcgtcgggccttcgaccgacacacttggtccatcgaaggccttctcagagcactattctattactgagagggatactgctgaggcagccatgcaagatgcagcacgacggtcactttctcagtattgctcgttgttcagcggggtagttgatggcctcgacctgaagtactaccctcgccgttcgaccggcagtgctggaggtgtgattgcttcgctagttggtgagggcaatcccaggctgaacaacatggtcaacttggctgccgtgctcaacacagtgttggaccacgccctcgacgagttgggcaaggttcgggcggaggttgcggaattgcgtgctgagtgcgcagcacgccactatctggatggtggttctcccacccctgtcgggattcagcacccttaccgttcgccgccccgtggtcgcttcgactatggtaccccagactacaggacccagatagatttggatccctag

SEQ ID NO: 12806 - DNA, 201 bp, Zea mays
  Peptide Sequence Number=SeqID_56181
atggagacccgtgcactcttgttttgcttaggaatcagggagaagaccgaaagggaaaaggatttgaacatgctggattcggactgcagaagaacaccaacttgtgacggtcaccacgggacgagtgccctagtggcccagggtgtcacgctcccacaagatcgtgaccagcccatagggaggtggtgtatcggttgctaa

SEQ ID NO: 12807 - DNA, 252 bp, Zea mays
  Peptide Sequence Number=SeqID_56182
atgtccatcatattagaccatggagacccgttgcactctgttttgcttaggattcagggagaagaccgaaagggaaaaggatttgaacatgctggatttcggactgcagaagaacaccaacttgtgacggtcaccacggacgagtgccctagtggccagggtgtcacgctccacaagatcgtgacagccataggaggtggtgtatcggttgctaaggcgcagcgtctttggaaggctgtagtcgggccgtga

SEQ ID NO: 12808 - DNA, 375 bp, Zea mays
  Peptide Sequence Number=SeqID_56183
atggatgaatgtatgtgtgcttgcaatcgcatagagaacgatccggttgaagagcccgaggaactcgcaggagaagcccctgagcagcagtcggttggtggagatggttacgagatcgatggttttggttatgactatggtactggtaagtggtattctttccgtttggaaagggttgtcagcattgcaaccactgctcaggagaagatgaagccgtggaaggagacttccaggagttccaagactacgacgagttctaggcgtgggttagcggcaacccccagtcggctgcttgtgaaggccgcgtttatctacgtttcttttccacactttgatttttattgtaaggactatgtggacgtctcagacgtatga

SEQ ID NO: 12809 - DNA, 1236 bp, Zea mays
  Peptide Sequence Number=SeqID_56184
atggacgccttgaattttgactaccatgattatgaaaaacttgacaaaggggtcgaaggggtaaaaagaaaaagggttgtcagcattctgagcaggcaagctgccagaatggttaaggaagatgagaaattttctaagaagacaaaatccactcctgagtcaaaggcgacagtttcaaaaaagaggaaggctgaagctctggagccgaaggtaactgaggtaacagaagagactccttcaacacctcctactactgaaatagcagaaattctaaagctcaagcagcactactcgaggttcagaggaggccaggatcttggccagagcagttccgaggaactgatgcttgatgaccccttcccgctctcggcgtataccatggtgacgatgggtttgctgaagctgaaagaggaggacaacgccgaggagagggatttcgctgtgcgtgacgtgcagattggagggactagctcagttcagatggctctagagcgttcggttgggtattcgggtagagtggaagcggcaagggctacgcttgatcaggtcagagtggaagacatagacactaatgtagttggcctaaaggaactactatttcctctgattgaaataggcaaaaggttgctcgctttggctgggtgggaagagccctgcaagtcttatgtcttcttgttatgtttcctctacatggcttacaggtattgttttctgaatttcatattcagcactagggaagagcattctcctatgaagataattgattttggtctctcagattttataagaccagtatttcttgctgctgatcagtgccctataggctatagcttgaagatggttgaactggaactattacgtttcctttgtgagaggattgttaagagagaaaaagtgaagaaattcctattcagcactagggaagggcattctcctatgaagataattgattttggtctctcagattttataagaccagatgaaaggcttaatgacattgttggaagtgcatactatgttgctccagaagtcttgcataggtcatatagcacagaagcagacatgtggagcattggtgttatcacttatatattgttgtgtgtgctgagagctgaccctaattttgacaactcaccatggcaatcagtatcgcctcaagctaaagattttgtcaaaagacttcttaacaaagattacagaaaaagaatgactgctgcacaggcactctattcgtga

SEQ ID NO: 12810 - DNA, 661 bp, Zea mays
  Peptide Sequence Number=SeqID_56185
ctccagtgcgatcatattgacggtcgccgatcggatccaaggtggcttctgtgggcggacgacaggtgagcggggggaaagagcccctagcaggggtcgagggaattggggcgcgttccgggttgcggacgtcggggcggagctcaccggggctaagggcgcggcggagctccaacggcgacgagaaaccgagctcgggacggcggggttatggcggcggcgctctgcgtgcgcgcagcgagggggaaagagggtctactgggcgcaaatggggggagagggtgagggcaagtggggctcggggcacaagtggccgagggcgaggtggggcgagtcccacgcgcgacgtgggcgcggggaaggcgggcgcgagcagctcggcggcggttacgcggggacgacggggctgacaagccgggcccgcaacgcagagagagagaagaaagcgggtgcgggcgcgagagaagcggggctgacgggttgggcccacgggcagagagagagcgagggagcgggcgcgcgggggaaagcggcagcgccgacaggtggggccgggcgagcagtgagagagggaggcggaaaagtcctacaatttgtagcggcttttcacctgactggtgcatgttcggccaacatcaaggagatggtggagatgctctag

SEQ ID NO: 12811 - DNA, 390 bp, Zea mays
  Peptide Sequence Number=SeqID_56186
atgaccggggataaacaaaggcaaaagctcaagcaaaagccatcaagcaaaatctccaacacctacatcaaaaaggtgaacaaaaaggatgctacaccatatttgatcaagaagaaaaagaatggaaaggtgatagcaatcaaggccaacaagcaagcaaacaaaggaaagggggccaaacgcatctgggtgccaaaggagataatttcaaccatgaaaagcaccaagaaggtttggatcccgaaagggaagcacgtggagccgctcggcatcagcgcccgcttccgcaaggaggtgctcgaccgcatctccgccgagaagcgagcaaatactgttgagctgatgaacaagatgcccaatcgactacaagttccatctgaaagccactaa

SEQ ID NO: 12812 - DNA, 87 bp, Zea mays
  Peptide Sequence Number=SeqID_56187
atggggcccctgctccagcggaagttgcggatgcaggaggatagcgaaggatatgcttatgaactgcaacatggcggcttagtataa

SEQ ID NO: 12813 - DNA, 1051 bp, Zea mays
  Peptide Sequence Number=SeqID_56188
atggccggactgactgggggatcgagagaggatacagattactccactcacccaccgctcattgtgaccccccgatcacgcgcaagcgcaaccgacccctgccgcgattcccctccgcggcgaatcacctgcatccgcaacttccgctggagcaggggccccatctccggcctgctcaagggctacgtcggcctcagcaccgccatcttcatcgacacctgcttcgcgctcttcgccgacgacccggcctcgttcctcgtcatgctcgtcgtcgtgccggccgccgtctgcgcgctcgccatggtgttcctccgcgagggcaccgccgctgcggacgaggaggacgacgggcgctgcttcgctcgcaccgctccttcaaggcgggacaggcagcggacggtggagggctcggacgcgcggctaaagtgggcggcggggccgcgccgcgggagatctggagccgaacgccgccagggagacgccaggatcgcgcccgagcaggcgccacgaccctgccctgcgcgccccgcgcccagcagccacggcctcgcgaccacgcagccgcccatggaacctgcgcagctgtgcgcgacccagaccccgcgcgactccgaccggccgagacgcgcgcagctccccacgcctggagccgaccgcaccagcgcccctgtccagagacacgcccgcgccgaccgacgtgccaggcaaccaagccgcgacaccgcgcctaactgcacgccatccgaccaacgtccgaagccaagccgtcgacgccgtccgccccgcgtccgtttcccttcgttaatggagttcaatgcgtccgttactccctcccacttcgccggagttcaccgctgttcgtcgccggagttcgaccacgccatcgcagtcctccccgccgtctgtggagactcaccggagctcgtgttcaccgtccgcgtttccccgccggagttccatccgcgcagcacgacgatcgcgcccgttcccatgcccgttgaaccctccctgctcgtcgacattcatccctgcgcaggaacgaaaacacaag

SEQ ID NO: 12814 - DNA, 459 bp, Zea mays
  Peptide Sequence Number=SeqID_56189
atgggcaagaacaacaagcgcaagcgtgagccaactcctccatcggaggagtttggtgactctgagtactcagaggaggagttctcctctgagtctgaggggtctctggctcccatccccctgcgtgagtcgtctgatgactcagacgactcccaggggctcgcggcggaggtctggacgtacatccgggccgtcgagcgctccgggctcgagggctcggatgagtcggagtactcctcggatgagaaggactcggacggcggcggcgaggacgaggacgacgacgacgacgacggcggcggcggtggcgacggtgacggtgacggcagcggcaagagcggcaagagcggcggcaaggacggtgacggcggcggcagcaggggcagcaaccggggcggcagcagcaggggcagcaccaggggcggcagcggcggcagcagcaacagggccagtggctag

SEQ ID NO: 12815 - DNA, 3050 bp, Zea mays
  Peptide Sequence Number=SeqID_56190
tgttttttataatggatcaagatcagaatgtatcaggccagcaaggcgctcatgctgtccgtcgctctccccgtgttgaaaacaagagaaagcaattagataaaaatgaattaaaggaaaggaagaagagattaaggttgaaagtccctcctatacaagacgccgaaagtgatgatgaaaaagacacagagtttgttcctggtggtgatgggtctggtgatgacaatgttggtattgttggtggagatgaaaataaggatgctcgtgccttgcgggacgagctgggggagcaaatttgtgggaaatcttatagacgcatatctggcatcaatatatctgttatcactgatagattgcagaagaggactctcaatggggagctgggcctgagagcctttttcatggcagcatttcagtgtcttctattctccaatactgacactcgcatcaggattgatgatgtgaagtacactcaggacatccagaacatgggcaacaagaactggtgcagagctgtagaagacaagctgagcatagctgctcgtctatatagaaaggattttgcggagaaaggcattaacgcacccatcagtggatgcgggatctttgtagctatgctttatgtcgacaacctgcaacatggattagacacaagtcctttttcaatccctcgatgtgctttcttggactccaagatgattgatgctatagcaaatatggatctcaggggagatgttcctcctgggaccactgagtttggacacctcaggttgagaagtatcactgacacgtgctacggcgtccccattggtgctctagcaatattacatgctccagtaccagcacctgccccagtagcagtccctaatccaacagcagcacctaacccagtagcagcagcatctgtcccagtagcaacagcagcacctactgggacatctgctgataaggctgtgaagtattcaacaatatcccgcgaccttatggcaaaagctcaccacgagtgctacactggcattcagaagcttatcgctgacgctatcgttgagaagcgagctgccaaagagcgcaggaggaaggtgaagaacgaccctagagcaggagcaggagcaggaactagttcaattgcaccggaggaccaatctagaggaggtgatggtgaagaaattatacggagtcccgttgcaattgaccctagagctggagcaggatcaggaactacttcaaatgtaccggaagaccaacctggaggaggtgatagtgaagaaatacagttagattgcagtggtggagatcttgatgacagcttagattttacgagaactccatcgtgtggtgatgacattgatctggaagagggaaatttgaatagaacacctcctgatttacgtgggtcaatccgaagtattgatgatatattgcaaatgatgtattccccagagcactttgcaagcattgatggcgagtcccctcccaatagccagccgactcgtgcaccacgaattgctgttcgcaagaggaaggcttcctcaaacccccctggcaatgatcaacggcctgtgggaccacctgagacagaagaggagcctctgagcagggacactgggatgcagcatcctactgcccaggatcatataacttactcaaggaggagcgataggtccattcaagttgccaacacacagaaggcagaggctgagaagaagaaggctgagattgagatgaagaatgctaaagctgaggaggctgagaagagaaaggctgaagccgaacaagctgataagaagaaggcagaagaagctgagaataagagaaaggctgaggccgaagtagctgagatcaagagaaaggctgcagctgaagaagctgagaagaagaaggaagtagaagctgagaataagagaaaggctgaggccgaagtagctgagatcaagagaaaggctgcagctgaagaagctgagaagaagaaggaagaagaagctgaggataagagaaaggctgaggccgaagaagctgagattaagagaaaggctgaggccgaagaagctgagattaagagaaaggctgaggctgaagaagctgagattaagagaatggctgcagctgaagaagttgtgaagaagaaggctgatgccgagaagaaggttgatgcggacgagaaaaggatacaggttgcaatccagaaacagctaaaggacaacatcaaagctttgaaaaagccggtgcccgctgccaagttaaagaagatgttccagttacaaatgtcaaaagaatatgctgagcagcgccaacagtacgaggataggttgaacatgcttcgtcaggaggccaaagctgagattgatagtttggagaagagcattgatggccaggcaggacccagctcatcatttgatgatatccagttcccggcggagtctgatgatgatatcaacaatttgacccaaccaatccgactttctcaagacgaagtctcagtaggccaggctgatttcagtgagtttcaaaggatgatattcaagcgcctaggtgatagagtgctgaagaagcctagggagtacatatccccgttcaagatccctcgtaatcgacctgagatacccctggccaaggctgttgcacttaggcggaagatcgcatctgatcctgagctgaaaaggagaattttgttggagtttggccttcttgttggactaactggcgaggaaattttaacatatttttctaatgacacccttgccttccagaaagtttccaacctcaagttacccagagttagcaagtggaggcggtcttttattgatgtgccaaagcaagcaggtcaaagcgattgtcttttttttgtatggaagtacatggaatattatgatggggacaaaatgaccaaggaaatcaatccgttcaagggcctgatatacagatgtgagctgttgcattacgagatcttccaccctttgaaccaagctgaaattcctggttcgcttgataagtttagaattggtggtcgtccgttgccaattgaatgggatagtagtcagtcgaacaattag

SEQ ID NO: 12816 - DNA, 321 bp, Zea mays
  Peptide Sequence Number=SeqID_56191
atgacgctgctgacactatcacttgggcggaattcaccacacagttcagaaattaccacatccctactgggactgatgaagattaaaaagaaggaatttctgtcaataaaacagggcgacatctatcacggtatgctcctgatgaggtggctgatgttgagagaaagcaagagcacttcattgaaggacccaatgggccactacaatatgcactggttgctcataccttcccatcattttcagaggcttcttgataaagctctaggtattgaacacaagcgtgttcaactgggagacatgaagaggaaggccattacctag

SEQ ID NO: 12817 - DNA, 636 bp, Zea mays
  Peptide Sequence Number=SeqID_56192
atgagcttcacgacggcgaggaggcacagcgcgagcagggcacgatgcgagtacgtggcgttgttgcgggtgtcggggtgctgcgcggacgagctctggcacggtgggcacgagttctggcgaggcactgtgggcgagctccggcggcgaggtttcggcaaggaaagagggcgcgagaagagagcgagcttgagcagggagaaggaagggctcggctgggattttatagagaaagagagagggagagcagaggtcgtggccatgaatggccaggggaagaacaaacggatggcggtaaactccattactcgtgaagaaacggatggggccttcggggcttcactcgggcgcagggtcgcggcttcggatcctagcagcgaggtcgcgtggggtggctcagttgctgctcggcctgggcggcgtcgggctaggcgctcggtcgatcctggtcgcgggcgggcgagcggcgtcgggtccgcgcgggatcggctggagccgctgcaggcgcgaggcagggaagagagcaggggaggcgagagaaacggaagaggagagggagagagaagcaaaggcggcggcataggagcggcggcggcggccaggaaagcctggggcacgcggcggctggctcctagg

SEQ ID NO: 12818 - DNA, 282 bp, Zea mays
  Peptide Sequence Number=SeqID_56193
atgacccacatgtcggcgccatctccagagttgggctgcgctgagggatggatggtcaataccaggaagggaggcggtatcgatctacctgctaataaccgtcacaggaggattgttagccaaccacaaccagagatgaatcctctgccaaaccctccaccggctggaacggatcccgttgctgccgctcagatgaaactgctgcagcaaatggcaaacaccatgacggaaatgcatgcgcaaatgcgacaagaacgtcaggagatgcgccaggagcggtag

SEQ ID NO: 12819 - DNA, 474 bp, Zea mays
  Peptide Sequence Number=SeqID_56194
atgacaggaccggttgaaccaccccctagggcggtcgaaccgccccctgacaaccctggtgacctgactgccagtctgactagcaaactgcagatggctcgtcttagacacaacgcacagaagtcagcaattcctttcttgctttctcgtctcgcggagcatccgctttgccgtccggtgactggtcagtctagccatttggagaggctgcactaccgcctgcacgaggagcaggagcgtcggcgacaggagttggagcagcagggctcttcttcctcgcttcagcaggaggtagagtctgtgaggagctgctctcctatgcccccgctggaggcgccccctgcaccaccactgggcgtcccggccactggagtagcagttggaggagaccccgacgaaggaggtgatgacaacagctcgagccacagcactgacctctcagaggagcaggagccggagggatgggttgcttga

SEQ ID NO: 12820 - DNA, 504 bp, Zea mays
  Peptide Sequence Number=SeqID_56195
atggcgaggtgtatgagattcatgaccccttggcagaagggtaacatgacttgtgggtacagggtacaacctctgcagagtgtaaaactgtcacttgctaggacaatggtagataaatcccacttccttctcgatcaaagggaggcgttggagcattccgctggtgatcatctgacaacaaagagtgaggccaccaaagcccacgctcgtgtcgcgtcgttccaagacgcccacaacaccctagttgatgcgtcagctatacaagggaaattcgatgctgccgaagggagcttcgtcgaggcgcaaagtcgcctggtgcaactagaaaaggaaaggcacctcctgtcgaaaatgggatactgtcaggtgtttgccattgccacttctcactttgaagacgggatcgagctagaagctctaagtgagggctattgtgatgccttaaatgattcggatctcatcagtatggtgagggccgcagagtcttttgcccggaagctgtaa

SEQ ID NO: 12821 - DNA, 177 bp, Zea mays
  Peptide Sequence Number=SeqID_56196
atggcgagagtagcgtgtaccctccgtggcaagaggccggacggtggtgtatctgtgctctcgagctatgataggagtacaactttgcttaagtcactaagcattgatgctatacaaaaattggagataaatggacttgaagtctggctgtcagtcaacccaggaactgaattttga

SEQ ID NO: 12822 - DNA, 1389 bp, Zea mays
  Peptide Sequence Number=SeqID_56197
atggtggtcgtggacgtgtcggagttcgggacggaggactttgacccgaagcggtggatcaatgcggcgctggacgcgcgacacccatcggagcctctcgatcgcttcctcaccagcaccggaattagtagtaggattgtgggctttcgaccatctattttcctgacctatgatgacgactcaaggaggttgactggtgagatatggaccttgaaattccattgcattggagcacaatctggaaaagaaattgtcacagtaaatattgataaagcttatgttgccttttacaacatggtgtacataaaatcgaaacttggatattctaggagggacttcttgttttacaagaaacgatgtggcattgatcgatccaggctattggcacttgattacatccaccaagaagaggccatgctgtctgataacatggatgagagaaaaataagttttgtgctcacaaaagatccacccagtgatctagaggtaagcataactcccatcaagcgtccaaggcagcggacaaatgttgatgaagaaactatagaagtgtcgattgatgcatataaggagtggcttgcaatactacaacatgataatccagaaacggatgaagaaattcatggcagcagcaaacctactgctaattggccatctcatgctagacgtcataggaaaagagatcctgatgttattggtatatatgtagataacgatggagtattcaaaaaggaggggcgtggtacccttaagggtatagcagcagccaccaagcgaatgaagaacggtgatcacaaacttaagattgaattttcatctaagcttggaggtcctacaattaaccttctctttatatcaaaactgaaacaacgaaggtgggagtttccaaccaatgaggacgcgcatgaaaagatctggtctattgccaaggagagatacaaaggatggcgatcaatgttaagctcaacatacaaggcatacaatagttatgcagaaaggatgaaaaacaagcctgaagatgtagacatcgtcgagtggcattacatgatattgtattttggatctgagaaattccagaaaataagcagccggaactcggaaaaccgtcagaaacaaagaacgaagcatataatgggttctagaactttttcccaaataagctttcaacagagagatccagaaactggtatagaaccaaccgatctttccctttggatgattactcattgtaaaaatgatgaatggtcggaagaggcttcacgtggcatttatgagaaggcaactgagaaaattgttgagaaaatgtatcaaacagaaagatttgatctaacaagagaagaggaaaatgctatttttcaaacaacattcaaggaaacaacagtcatgtaa

SEQ ID NO: 12823 - DNA, 441 bp, Zea mays
  Peptide Sequence Number=SeqID_56198
atgggcaagagcaagaaaggtggtggctcttcgcatcactcgggcgacaagcacgagctgactcctccctcggaggatttcagcgactcggagtactcggaggaggagttctcctccgagtccgagggctctccagctcctgcctctcccccggcgtcgtctgatgattcagacgactcccaggggatcgccgcggaggtatggacttatatccgggccatcgagcgcgccgggctcgagggctcggatgagtcggagtactcctcggacgaggagaattcctccgactcgtccgaggagggtggcggcggcgacgacaatgacgacggaggcgacggtgacggtggcggcgacagcggcaagggcggtgacggcagcggcaagggtggcagcggcgacggcagcggcggtagcaagggcagcagcaaggccagtggctag

SEQ ID NO: 12824 - DNA, 456 bp, Zea mays
  Peptide Sequence Number=SeqID_56199
atggacatggagcgctccctgaccttcaccagcgacaacgccgtgccacaatccatcagcgacaatgcagttaatgcgctacagtgcgcgcagaagtcagagcagagccagaaggcgcaccggatagtgaacactgactgtccggtgcaccaccggactgtccggtggtccagatgtcagaagctccaacggtcagaatccaacggctgggtgacgtggctggcgcaccggacagtgtccggtggcgcaccagactgtccgatgcgccatgcgacagaagccctcaccaacgattcttttggtggttggggctataaatacccctcaaccaccacacttcaatgcatccaagttttcagccttcaaacaccttacaagagctacaacattcaatacaagacacaatcaaagagatcaaatcctctcccaagtccaaagatcattccaatcaaatag

SEQ ID NO: 12825 - DNA, 159 bp, Zea mays
  Peptide Sequence Number=SeqID_56200
atggcgagagtagcatgtaccctccatggcaagatgctggacggtggtgtatctatgctctcggtgaagaagcgacaaactattgttgcttctgttcaaaggtggtacccaaagaagagaaccaagactagagctgcgggagagaaggccctccgttaa

SEQ ID NO: 12826 - DNA, 363 bp, Zea mays
  Peptide Sequence Number=SeqID_56201
atggggaagcctgtcccatcactcctcatgctcctcctcagccgaggcggggtcccactcgacagtccaccccggtggcaagatggacggccaagtcactccagcaaccatgtcctccaaggaacctgtaaaaattgttccacaagcaaggctgagtatactaatactcagctagacttacccgtgaccgcacttgtacccaccataacccggaatgggagaccacgtcttaggtcgcgtgaggggcaaagtctactgccaggttcaatcagggtttctagtgtaggtttgaactacaatagtggtctaatattttccaaaaattctgtaaaaatttcagtgggttgccaagggtcattataa

SEQ ID NO: 12827 - DNA, 168 bp, Zea mays
  Peptide Sequence Number=SeqID_56202
atggggaagcctgtcccatcactcctcatgctcctcctcagccgagtgaccgcacttgtacccaccataaccggaatgggagaccacgtctcaggtcgcgtgaggggatatgtctgcgggcaggttcactcaggatttaataatattatgctaaggaagaaaaactaa

SEQ ID NO: 12828 - DNA, 606 bp, Zea mays
  Peptide Sequence Number=SeqID_56203
atggcgctttccccccttcctccttgtggaaaggcgacgaaggggcatacaataaaaagtcgagacagtcctcgatcgttctctcgcactgtgcagaggctcggaggctgctctcgcaccaggctacggccaaattatcgaccacgtcgacaaaccagcttaaaaactcggagcccgaccgtgcaccggggctgcggccaggccgcacgagggaacaacaaggccgaccgaggcatcacaaaaagaattaagacctcagaggagtcaaaccactcctccgaggcctcggggcctacacccgacgggaaaacagcactattcacctgttccgactactgtgccaaccaccagggtaaaactaatgacaggactggcatttccgtttgttggcaaaggactcatgaccccatcctcacggaggttcgggtggaatctccttctccctcagcacagtccagagtggctaccacaggagtcgggaatgctggggagtgctcgtcgttgatagttctggtgctctcacaaaagcattctgatgttggtcatgagttgcctttgtcgaatggaaatgtcaatggggaagtaaccctcatgcttcctctgtag

SEQ ID NO: 12829 - DNA, 111 bp, Zea mays
  Peptide Sequence Number=SeqID_56204
atggagaactatggtcaagggatcataccgggaccaagtcttctctgctttgtgttggacgttctgctcgaggctccccaactggatgacatacctggtgagaagggctag

SEQ ID NO: 12830 - DNA, 387 bp, Zea mays
  Peptide Sequence Number=SeqID_56205
atggcgtcctattatggcttaagcggcgaggagctcggtccctcctaccctgcaaacaatggtgtcagggtaaaactaacgacagtaagtcacgacctcccccgagttcagcctcgggcacaacagggagctccatctcgcccgaccccaggcctcgggagaaggtctccgcctcgcccgacctcgggcctcggcctcagcctcggcctcgggaggagtcacatcctcgctcgacctcagcctcggcctcaggagaagtctccgcctcgcccgacgtcggcctcgaaccgactacgccactggcgatacatcattaccctacccctagctagctgcctcaggctacgaaggaacaagaccggtgtcccatctagattactccggtaa

SEQ ID NO: 12831 - DNA, 582 bp, Zea mays
  Peptide Sequence Number=SeqID_56206
atgaggttgcgaaaaccaaagcagaaggcaagcgcaaatggcagggtaaagaaccaccaccggcccctcttccgggcatataaaggctcgggcgagatccacccaaaacttcgcccgaacccgtcgcgaaattcaaactcgaagggcacgcgacacctctggcagacgaagcgggcgccgttccgtctccgtcatgatgaccgcctcaaaaagggatcgagaaaagggggatattttgaaaggatccttctcaacgaaggaagcgggtcccgagccctcctactgatcaggggttcgaaggttgtgccctgcggggttcggcaaccgccccagagcactcgggctccgagccctttactgatcaggggttcgaaggctggcccctcggaagggttcgacagccgccctagagcacgcagagtcagggatgaccctatgtacgtctgttacatggccaaggctcgggctacgctcccgaggtaccttaggacattttcgagaccagcgggaacgatttgtaatggaatcccaccggagggaggcgccgagcccttggaccctatcaaatgggttcgggtctag

SEQ ID NO: 12832 - DNA, 825 bp, Zea mays
  Peptide Sequence Number=SeqID_56207
atgacttcccacggatcctcggacgaagggaatgcactgtcccacactgacggacttgcacgagagggctttccccgtattttgtgggaggtacttcagggggccggttacacgacgcctccccagtacgtggtgcagcagttcgagaagcaccgagtgccccgctgtagggtgaggatgaccctggagcctcatcccctacagccaggctggcgttcgctagactctgagtcctttggataccgggctgaggatatgatcgaggcgattgctcttcatggattgaccactttctgcggattccactccttggagctgtccaaccaccccattggcttgttccccgctgagaaggaggacgacccaatgtggaaggaccgagtggagcatgccaaggacatctgggctatctacccaggtcagactgctcacttgatagtgcggtgcatgaatgccctgtaccgtctgcaagtgatgcgtggtgaggcaatgtcccatctgatggcattgttggaggccactaagatcaccctggataacagagaggagcttgtggttgacttgtccactgagatgagcttgaggaaagtggtgggaacaagggagaacaccatcgaggttctcgaggatcagcttatcaacacccagcagcagcttgccgaggctaacgagcacctggatatgcatcaccaggagatccaggacatggaggccaatgaggatgtcgacattgagggaggagaggagcctgcctccagcttggacactgctggctcagggagaccaccttcccccgagtcgagtgttgcctcgttcgctcactag

SEQ ID NO: 12833 - DNA, 207 bp, Zea mays
  Peptide Sequence Number=SeqID_56208
atggaaaaccgtgcatcacatacaacaactcgagacccagctagaaaaagagaggagggaacgtcaagaaatggaggcgaggatgatggcggagcgggaggcccgcctggtagatcagtagaggatggcggagatgttccaatacatgcaaagccttggcgccgcacagggtttcgctccgccaccaccattgttccctacagttga

SEQ ID NO: 12834 - DNA, 516 bp, Zea mays
  Peptide Sequence Number=SeqID_56209
atgggcgagtttgagaaaatttcagaatttgaatttttgggatgctacacgctgtcagccggccgtttacccctatttctccgcgctgcgtctgctgaccgatgtgtgggtcccgcctgcgttctcaccagtgccaaaggttcagcacaaaccaataaaaagattaaagttagggttcaaaagaaaggagcaaaagaaactgaagtgaaccctggtctgacgcactggactgtccggtgcaccagggtggatcgacttcaaactcttcaccttcgggtttctgaggccgcgctccgctataattcaccggactgtccggtgtgccagcggagcaacggctcccaagcgcaacggtcgactccaacggtcgcctgcaacgtgaacagtgtacagacagttcgcgcagagtcagagcagcgtcagaaggctcaccggacagtgaacagtgactgtccggtggcccaggctgtcagagctccaacggtcgaaaccgtcagaaccctaacggttgggtga

SEQ ID NO: 12835 - DNA, 1743 bp, Zea mays
  Peptide Sequence Number=SeqID_56210
atggacagaagagctggggcgatcctagtgttcctgctcgtcgtcctggtctgggatgtggcggcggtcgccgagaccgagcctggcagcgtgcggctagtacaggaggcgccacataggaaggtggtggaggatggggccaaggcggggagggtgccggtgtcgaccgtcgcgtggtccacgcttgccatggccgcggcgacggggttgggagcggtgcccttctttttcatggagctcgaagcgcagtgggctggcctttgcaatgggctggcggccggggtgatgctggccgccagctttgaccttgtgcaggaagggcaggtgtatggcagtgggagctgggttgtgttcggaattctgagtggagcagggtgcatgatatggattgttatagcggaggttcttcctgacgcttttaaggaagcaactccatctcaagtagcttctgctggaacactcgctgttgctttcatggaaacattaagtacggtgcttctgggatttacagatggcaacaacatgccgcaccctcttctcaccggtgtcgcatccggcatagctttccgtctcgcggcatggagacctgtgcagctcctaatgacctcaaaaatgggtctcttcaccaccctcttcctcctcatcggaggttccctggcctaccacgccgccacatcaagcatcctccggttgttcaatcgcaaaaggtcttccgtgaacgtgatcgcgtcatcctccggcctctctctcagtgccctcacagtgcagtcccttcttgcctgtggcgccgtattccttcacgcatatgctgaagggcttgcgctcggtgtcgcggctcgcaaggcctatggcctcggccgctacatggttctcccagcctccctccacggtcttccacgtggcgctgccgcggcgagctgcgtgtatggtgccacagatagctggcgtggagcccttgccgctgccgctttgacagggctcgcagcgccgagcgccgccatcagtgcaatccttgcgaagatcgactatgatgggcttgactactggatggtcatagcgtgcggggctctgatccccagctttggccgcgtcttcaggcgctcactgcggttggacgtgcggaagagcgtcgttggcctgctgcggcattttctcccgtcaaggctcttctatgtggacctaagtccttacaagtgggacccgtcctcacttcactcccctgcttctcccccaaatcgaaatcgcatgctcccaggctccaccgcgcggctcccctccaccgcgccatccgtcgagcagtcgagcggctgccgtccaccgaacctccaccgcgcctccctcgagcggcgagcgctcctctgggccgccgcgggtctcggacgccgtgggccgcacaggcaggcggatctcggccgccgcggctccaccgcgccttccctccactgctccaccgcgcggctccccaccaccgcgccatccatcgagcagtcgagcggctgtcgtccaccgaacctccaccgcgcctccctcgagcggcgagcgctcctctccggcgagcgctcctctcggccgccgtgggtctcggacgccgcgggccgcacaggcaggcggatctcggccgccgcgggccgcacggcaggcggatctcggccgccgcgggccgcacagcaggcggatcttggcctccgcgggccgcatgataggcggatctcggccgtcgcggtgctgtcacacccggattga

SEQ ID NO: 12836 - DNA, 1227 bp, Zea mays
  Peptide Sequence Number=SeqID_56211
atggatggcggcaaccacccctgcggcggtgagccccccatctctcaccactcattgagaaaacgatgggagccttccattgtcattccggagccgccggcccgcaccgccatacgaaccttcttctcccccgtcgtcaaggcaaaaagctccgcagagaagagatgggtccacagatcccagtgggggtcaatccccaaaaagccttcacaaaccgcgcgcgaagatggtcgcttgcgcaatggagttggggttgaagttgtgcagctccaccccgtagtaatacaggagcgcccgcataaaacagcttgctggcactccgaaccttcgttcatggaaggagacgaagctcagcacataccccggcggcggggtcgggtctgccccgctcggagggaccatccacttcggctatgggtcaccggagaggggacggagcaaaccatcggcgacaagggcctccagatcgtccactgtgacgatggaaaaaggccatgggtcacgcggcggaacaacggtcacccggtcggccatcgccaaacgaagggggtggtggcggagcggacaagggaccgggaaaggggatgttgtggaaaagatccttcttggcgaaggaagcgggccccgagccctcctactgatcaggggttcgaaggctggcccctcgggagggtttcgacagccgccccagaggactcggacctcaagcccattactgatcaggggttcgaaggctggcccctcggaagggaaaacagcgtcgctcgctccgcttcgactgccgtgtcagccaccccggcgacgactgacaacaagtcacgatcaaccaccgagttcagcctcgggcgtaacaggaagctccgcctcacccgacctcatgctccagcctcgggaggaggaggaatcgcgtcctcgcccgaccccggcctcggcctcaagagaagtctccgcctcgcccgaccttgggctcggaccgaccgcgccaacaggggatacatcattaccctatccctagcctgctcaggctacaaggaacaagaccggcgtcccatctggcttaccccagcgacgggatcctcgctgcgctgccagctgtgctcctacagggctcaggcgcccctccgacagcccgccatcacatgtacagggcccaagctctcccccaacggccacattggcatgtacacagggcttaggcactccactgccagacacgttagcgcatag

SEQ ID NO: 12837 - DNA, 312 bp, Zea mays
  Peptide Sequence Number=SeqID_56212
atggccgccgccgtgcccctcctccagctgctaatactgccgctcctggtcgcgtcagcggcgggcggcggcggcggcggcgagaagagcacgcacatgaagctgtactggcacgacgtggtgagcgggccgagcccgacggcggtgcaggtggcgcgggcggcggtgaccaacacctccaagaccgccttcggcgccgtggtggtgatcgacgacccgctgacggagggcccggatctcaagtcctctaagcccctcggccgcgctcagggcacctacatcggcgccggcataacaaactgtcccccctga

SEQ ID NO: 12838 - DNA, 2631 bp, Zea mays
  Peptide Sequence Number=SeqID_56213
atgagcggtggtggcgacggcggcgacaaggaggccttcttccactgcctggaccgcgtgccttccggcctgcacctcgacgccgatttcccttccgatgacgaagaagacgacgaggatgacgtccgcgtctccttcacctctgccgccggcgaccagcatttcaagagcttccggtaccaggcggccgtgccggtggaggatgacgaggatgacgacgacgatgacgacgacgacgaggacacgtccaagtacgacatgtggatgtccgacgagcccatgtccatccaggagcgccgccgccgcctgcaccaggggctcgggatggccagcagccgggacctcgcgctgcgccggcacagcatgaagaaacgccccgccgatgtcccgcgggccatgtcccggagcgtgtcgaggtcaaagccaccgccgtcgccgatcccagccaatgcggcctcggccgccaacgtgccgagcactacctctgtggcgcaggcggcggctgccgcgccgcggccggcgaaggaggtcatcacgaggcggcgctcggacagcaaccttgtcgtgcgcgacggtgcgtcggtctcggggaagccaccgtcgcagcagcccttgcgacgcgttctgtccttgccggctcggcctgacgcccgcgacagcacgcccgtcgtcgggaaacctcaagccggggctccgcgtgggttgcctgtcgtgccgccgcaggcagcgccagggattaaaggcggcaaaggcgatggcgacgaggggagcaagaacaatcgggacggcgagaaggaggtcgccgtcgtggccgccagcacgcccaaggacgcttcgtcgagcacccagcagcagacgggcgtgctggggcttgaggagttcgagaagttcatcggcaacacccccatcatgaagctcatgcggcgtggcacgagccagaaccagcccgcgccgctgcccgccggcgtgccgcccaaggccgacaagtcgggcggcaagaagaagggcggctggctcaagaacatcaagtcggtggccatagggttcatgcaggacaaggacgccaacgccaagtcgggcgtcgtgtccgcggcggcggccgtgcccaagtccgtcccaaccaatgcctccgccgggtctgctgcgccgccggccgcgggttccgagcggcccaaggtgcaccagtatggcaagtcgagcaaggagctcaccgggactctacatgtgtcaggtactaccgggcaccggccagcctgctggcctggcctagagcacgcgcgcggctctcgctggctggctgcacaggagatccaggcgcacgaggggtccatctggagcatcaagttcagcgcggacgggcggcggctggccagcgccggcgaggacagcgtggtgcgcgtgtggcaggtggtggagaccagcgccccgccgtgctcgctggcgatggatggcaagtcaggcccgctggccccgctgccgtcccccggcgcggccgacggggcgtcttcaacgacgacgccggcgctggcctccatgcccaagaagccggccaaggggaagagcggcggcagggacgcgctccccgagcacctcgtcgtcccggacaaggtgttcgcgctggctgagcagccggcgtgcgtcctcgagggccaccaggacgacgtgctcgacctcacctggtccaagtccgaccagcagctgctgtcgtcgtcgatggacaagacggtgcggctgtgggacacggagagccaggcgtgcctcaagacgttcgcgcacagcgactacgtgacttgcatccagttcaacccggtggacgaccggtacttcatcagcgggtcgctggacgccaaggtgcggctgtggagcatccccgaccggcaggtcgtcgattggacggacctcaacgagatggtcaccgcggcctcctacacccctgacggccagatcgatatccaacccaagaagcgcaaggcgcaagcgaagaagatcaccggatttcagtttgctccggggaaccctgccgaagtgctggtcacatctgccgactcgcagatccgtgtcttcgacggcgtcaccatggtccaaaagttcagaggtttcaagaacacgagcagccagatcacggcggcctacacctcggacgggcggtacgccgtgtgcgcgagcgaggactcgcacgtctacctgtggcggaccacccgggtgccgccggccgcggccatcggcatcggcatgaagcccaaggcgtggtgcaccatccgctcctacgagaacttctactgcaaggacgtgtccgccgcggtcccctggacgcagtcgccgtccccgccgggcgccggcgacggcagccccactggcggcagcccagcgtcggcggacaagccgccgcagggcgcgtcatgcaacgacgagtcctgcagcgtcgccgccaagccggagggcggcgacccgagcagctgcagcgccgccgctgccgagcccagcagctccgcgcggcagggtggcgccaagggcgacggcggcaacgcgtggggcctggtggtggtcacggcgagcttgggcggggagatcagggtgtaccagaactttgggatgccgttcaggatcaaaggccaggccaattttttctag

SEQ ID NO: 12839 - DNA, 741 bp, Zea mays
  Peptide Sequence Number=SeqID_56214
atgatgtgggacttcaccgtcaccgaggaccacaccaacatcccggaccagcagatcgtgttcaaggttactgaagaaaacctggcagcactatttataaattgtggacaggttgtggactgtcacatgtgtggagacccaaactcagtccttcggttcaccttcatagagttcactgatgaggagggtgcaagggctgctctaaatctgtcaggaactatgctcggatattatcctgtcagggttctgccatcaaaaactgccattgcaccagtcaatccaacattcctacccaggtctgatgatgaacgggaaatgtgtgcgaggactatttactgcacaaacattgacaagaaggtcactcaggcagatctaaaattgttctttgagtctatatgtggagaggtctttcggctgaggttgcttggtgactaccatcattctactcgcatcgcttttgtggaatttgtgatgcgttatgttttcagcggtttaaaaatgataagaatacgttgcttgagattcgagtggatcaagtttggttggtcagtgcctccaagtgaagaaacaaaccccgatggtaagagacatttgcttcttaatatttcaggcagaaagtgctaccgctgccctgaactgcagtggcgtgatactgggatccttgccaataagggcgagcccctcgaagactcccgtgcgtccccgtgcgcctcgctagctgatgcactagaggtgtcctag

SEQ ID NO: 12840 - DNA, 369 bp, Zea mays
  Peptide Sequence Number=SeqID_56215
atggcgatggtcaataccaggaagggtggtggaattgatttacctcccaatcgacacactcagaggatattcagacaaccccagccacaacaacctgagatggatcctccaccaccgcctccacctgcaggagttaacccactggttgcagctcagatgaggatcatgcaacaaatggctgacactatggcggatatgcgtgctcagatgcagcaagaacgccaggagatgcgccaggaacgagaagagatacgtcgagagctgcgccaagagcgagaagagatacgccaggaaaggagggcgcaacaacaacagcagcaacatcaacaagtaccattgcctcctccaccaccaccagttccaccctga

SEQ ID NO: 12841 - DNA, 1044 bp, Zea mays
  Peptide Sequence Number=SeqID_56216
atggccccgctcgtgccgatgtcgcagccatgggtggagaaataccggccgaggcaggtcaaggatgtggctcaccaggaggaggtgattcgggtgctcaacaacaccctccagaccgccgacctgccgcacatgctgttctacggcccgccggggacgggaaagaccaccaccgcactagccatcgcctaccagctctacggtccagagctgtataagtcaagggttttggagctcaatgctagtgatgatcgtggaattaatgtggtgaggacgaaaatcaagaactttgctgctgttgctgttggtactgcacggaaagcttttcttgtcgtgatggacttcagtggttatccctgcccaccttacaagattattatacttgacgaagcagattcaatgacagaagatgcccagaatgctttgaggcgtaccacagagacttactccaaagtgaccagattcttttttatatgcaactatatcagcaggataatagaaccacttgcatcaagatgtgcaaagtttaggttcaagcctctttcagaagaagtgatgagtagtcgcattatgcatatatgcaatgaagaaggcctcaatcttaatgctcaggcgatgtccacactgagtgtcatttctcaaggtgatcttcgtcgtgctataacctaccttcagagtgcagctcgcttatttggatcttctatctcttccagtgacctgatcagtgtttctggggttatccctgaagatgttgtcaagtcactgcttgcagcctgcagatctggtgaatttgacgtggcaaacaaggaagttagcagcattatagcagatgggtatccggtctcacagctgatggcacagtttctagatgttattgttagcgcggatgatattccagatgatcaaaaggcaaggatatgtaaaaagcttggggaaaccgataagtgcttggttgatggggcagatgagtatctacagctgctggatgtcgccagcgagactatccgctctcttttcaacatgccgcggacgctggtcttctaa

SEQ ID NO: 12842 - DNA, 837 bp, Zea mays
  Peptide Sequence Number=SeqID_56217
atgcaggaggcatgcgaccgcaccaagggggcgcaccctttcgacttcaacgcgtccagcatggtggcccaggcccacacgtcatggaccgggaaaggggataccccgaaagggatccttctccgcgaaggaaacaggccccgagcccccctactgatcagaggttcgaaggctggcccctcggaggggttcaacagcagcctcagagcgctcgggctccacgcccactactggtcagaggttcgaaggccggccccttggaagggttcaacggccgcctcaggccactcgggctccgcgcccactactgatcaggggttcgtaggctggccctcgaaagggttcgacaaccgccttagacgcagagcgagggatgaccctggttacgttcgatacataaccaaggctcgggctacgctcccgagcgccgcctgtgctgctccgactgctgtgccactcgacagagtgaggctgacagcagccaagtccggcctcgggcgccataggaggctccgcctcgcccgaccccagggcttgaactgggcctcgaccccgaaagacgacgaactccgcctcgcccgaccccagggctcggactcggcctcggccccagaagacgacaaagtccgcctcgcccgacccctgggctcggactcggcctcggccccagaagacgatgaactccacctcgcccgaccccaaggctcggactcggcctcggccccggaagacgacgaactccgcctcgcccgaccccagggcttggactcagccttggcctcagtcgacggtctccgcctcgcccgacctaggggctcggactcgacctcgacctag

SEQ ID NO: 12843 - DNA, 312 bp, Zea mays
  Peptide Sequence Number=SeqID_56218
atggagagtcatgatctccgggcagaaagggaatcatggcttgtgggtggcaatgagaatgatggttttggtattgactctggtaatggtaagtggtactctttccgtttggaaagggttgtcagcattgcaaccactcctcaggagaagatgaagctgtggaaggagaccaccaggagttccaagatgatgagtcctaagcatgggttagcggcaacccccagtcggctgcctgtgaaggccgcgtgtatctatgtttcttttctgcactttgattattgtaaagactatgtggatgtctcagacatatga

SEQ ID NO: 12844 - DNA, 552 bp, Zea mays
  Peptide Sequence Number=SeqID_56219
atggtagttgagagctcaggtacatccctgatagctgtttgcatgcagcggcagaccagcactcggatggagcctggacaaagctctcaatcggccagccttcctccgttagccgccgccgctgtccccgtccggccgtccgccgatgtccccgtccgccgacggctcgacgccgagccgctgtccgcctgtccggctggggcctctctctgtccctccgcggctccgcccctgtgcctccgtccgccgaggcgccgagctgctgtccgcctgcgggccgcgggcctgtccctccgtgctccgtccgccgaggccgagccgctgtgccttccggcttcgccgtccgccgagcaggtccgtccgactattcctattcgaatgaaagcggcccccaatttctactcgatgtcgccacggcctccgcgtgtgctgcgcctcctccacctcttcggctcttcctcatctccgccgccgacaactcccgaggagcccgacgactacgaggtacctgcacttcttattcttcgtgacttcctttcttctacaagctaa

SEQ ID NO: 12845 - DNA, 153 bp, Zea mays
  Peptide Sequence Number=SeqID_56220
atgttggacgaggccgcaggatgggacgacctcgtcataggtcttcgtccaacgacgcgtgggacgaaggcgaggctggcgaaggcatcgagcgaagggtggcgtcttcgccttcgccccaacatttgccctccgagggaccagttcgactaa

SEQ ID NO: 12846 - DNA, 282 bp, Zea mays
  Peptide Sequence Number=SeqID_56221
atgtctttcgtgctttttgactacttcgaaagtgggatcctgaaaacgacggagtacacgctcggacctcgacggagggggagcaacagcaccctcggcgtcaactacaccttcggcgaagttcgacctagcctcggacggcaacgcggtcggaggatctccactccgaaggacgacatcagcaccgcgctcgggccatcgccgctagggtcttctccaggaatccggcccgagcagacggctcggccggccaccccaaagcctaagccacctgtcctctga

SEQ ID NO: 12847 - DNA, 483 bp, Zea mays
  Peptide Sequence Number=SeqID_56222
atgagcaagacaccggcactcaaggtgccattacaaatggaactccggttccgcctccgcgggtacgaacaaccccccacgattggagggcctgcggagcaacagaaggccgacggatggctcgccgccgcccgctccagtagcggcgacaacgacttctgctctgagcggccgaacagcagcagcgatgacctcagggcggatgctgctgccataaagccctcgcccacgtccccactcgaggggcgaggacgagcagaaggccgtagagttggaggcaactctccccacttgcgtcctcagccatcgcgggctaagtcttctccaacacgctccaaggtcctccccctacgacacaggggctgggtcccacgcatcaagcaagctggcccagggcagaagaagccaaaccgccgcgcgcggtgcgcgcaactgcccagcggttacaagcattcctccactttcgcccagaccaacgggtga

SEQ ID NO: 12848 - DNA, 582 bp, Zea mays
  Peptide Sequence Number=SeqID_56223
atgggtcggcgcgaggccgagcgcgaaggggggagaaaggtggccggagacaggcgtgagagaggtggaaatcccgcggccttcgtgttcgtcccgcgcccaggtcggcctgagccagcttggggtagggtaatgatggcgcctcctgtcgacgtggtcggtccgcgccctaggttgggcgatgtggaggctcctccgaggtcgaggtcgagtctgtcttccgtggccgtggtcgagtccgagcccctgggtcgggcgaggcggagaccgtcggctgaggccagggctgagtccgagccctggggtcgggcgaagcggagttcgtcgtcttctagggctgagcccaagtccgagccctgggtcaggcgaagcggagttcgtcgtcttctggggctgagcctaagtccgagccctgggtcgggcggagcgaagttcgccatcttccggggcttagcccaagtccgagccctgggtcgggcggagcggagttcgtcgtcttctggggctgtgcccaaatccgagccctgggtcgggcagagaatgctctgtcaggataaaggtgtcaggccacctttgcattaa

SEQ ID NO: 12849 - DNA, 648 bp, Zea mays
  Peptide Sequence Number=SeqID_56224
atggtcacctttcaagggggtcaccctccttttaaaggcgactctccctacttgcgtccccagccgacgtgggctgagtcttctccaacacgctccaagaccaacgggcgaaagggtgggcagccatgcaggcggcatgcaaaccgcgccaagtgggcgcacttctccgacttccaatacgcccagcatggaggcccaggcccacgcgtcatgcaaccggcgcgccggatgctgcgtgcgagcaactgcaccgccgcccgcgccactaccgcgcctcctcgactgcggaaccaataccgtgactcgaggggaagcgagcgacgcttcgccttcgccataatgaccacgtcaaaaaagggaccgggaaagggggataccccgaaaaggatccttccccgtgaagaaaccaggctccgagcctccctactgattagaggttcgaaggctggcccctcggaggggttcaacagccgcctcagagcgcgtgggctccacacccactactggtcagaggttcgaaggccggcccctcggaagggttcaacgaccgcctcaggctactcgggctccgcgcccactactgatcaggggttcgaaggctggccctcgaagggttcacagccgcctcagacgcagagcgagggatga

SEQ ID NO: 12850 - DNA, 969 bp, Zea mays
  Peptide Sequence Number=SeqID_56225
atggggggatgcctgcagtccttccgccttgtcgttgggggaacgcaattccgtgggagttggtacctttcagccatcgttcggcttcaaggattttcatcatgcagcccggctgcacccctccgccgggggttacccaagacggtgacctccagcccctggatggggagaggcaagccgggctgtgatcttggtcccgccctcagcctcaaggatgttcatcatccttgctggggcggagagcgaggcgagccggggctctacctcccgcgcgggccggctggccacctcttcttccagcttctggtggtggcaaccatcctccagctctgcggaggaggcgtcctccagccatgccagggaaggcgaactgttgctgcccagctaggatgcaacattcccccctcttcctcgctttcgtggcgaggacgggaacgaggacctgccggtgcgcttcggagcggcccgctctttagctttgatggctggttcgcgtcccttgagcgggaacacgaacgagagccttccgacggtcgcgtccgtcctgggaccatggctgctgctgcagaggtcgctggcgagtcacccggaactcgtcgccctgcaggctccccggagtccctcggctcggtcagccttgttgtccgaggcttctcttgcttagttaaaggaacccctcggccgctcttcgatgagctgaggccaggggtagcggtgtcagcacggacagaggcagagttggcccgaaaagaggacttggtcggccggagcctggccgggtcgtccgttagcgggaccgacgccggagttgatctgccgaggcctcgggccaggctgatgtcttcgggggacagctggccaaggcctcgggacatcagacaccctgtagatgttcctaagtcacttgacaagttcggtatctttccttaccttaccaggaacgtcccacccgtcttgcagacattatag

SEQ ID NO: 12851 - DNA, 197 bp, Zea mays
  Peptide Sequence Number=SeqID_56226
aaagcgaggaagagagtgaagtgactgaagagaagacaccaccacctttggactctcaggcagagacttggctctacttcgacatctgcgagtccgagcctgactcacctaataacgaaggcaagccccggattaatgcgtatgtaggcgtgctgaccgaggaccctttaactggtcacatgcctcgtcatgggtaa

SEQ ID NO: 12852 - DNA, 615 bp, Zea mays
  Peptide Sequence Number=SeqID_56227
atgaacacctccccgtggccagcccaactcaggcgtgctgaccgaggaccctttaactggtcacatgcctcgtcatggcatacccttgagagtcttttccttagtcgggtgaggaagcgacaaatttttgttgcttttgctccaaggtggtacccaatgaagaaaaacaagactgaagtgcgggaggacttggtcctccatatagaacttttacttaaaacttatcgggaggagtttgtgcctcccttgggtcttctccgagaatccggcccgagcaggcggctcggctggtcaccccgaggccttggccagctgtcccccgaagacatcagcctggcccgaggcctcggcagatcaactccggcgtcggtcccgctaacggacgacccggccaggctccggccgaccaagtcctcttttcgggccaactctgcctctgtccgtgctgacaccgctacccctggcctcagctcatcgaagagcggccgaggggttcctttaactaagcaagagaagcctcggacaacaaggctgaccgagccgagggactcctacgcctccgagatacggatatctcactcgtcacctttacacggggcgactcacgcttggtga

SEQ ID NO: 12853 - DNA, 324 bp, Zea mays
  Peptide Sequence Number=SeqID_56228
atggcattgttcactgtctgcccggtgcgttctgactttgcagttttgacttctgacttctgcattgttcactgttcctttgttggcgaagtcgaccgttgcttcgttggctcaccggacagtccggtgaattttagtgtagtggctctgagaaaacccaagagcggccagttcgcgagggctgcagcctggggcaccggacagtgtccggtgcgccactggctgcgcccattcttctatgctccaaactttatagagttccccaagtcactttctttgttggtttatgttgaactttatgcacctgagataaatgacaactag

SEQ ID NO: 12854 - DNA, 645 bp, Zea mays
  Peptide Sequence Number=SeqID_56229
atggcgcgggcagctgcgctacctcatcgtgaaaccagagcccccactcccaccctcaatcgtcctccagagctcaccaatttccaacttcccccaatttcggtctccgccgtcgtgaaacacacctcgctgcggctagctcagctcagtttatgtaatcacttccgcatttcgatatctccgatgttctgtaatgtctgcaagacgggtgaaacgttcctggaaaggtctattgcaatactttacatgaggaagtccatgtactgtatttgcaattacaccctagtgcacctgcgcaccctgttgagtcggaagccggaccctcgcatgttgcaggacacgcgcttggtgatgccttccaagactcgagcacaggacggagctggtacctcccgtgggagggagtctaccccaaatccacctcctgttcctcccacactggccgaggcgattgccgccttagtgaatgcgactgcggacaatacccgctttctgagagaaatggcaggccaacagttccagcagcaaggtgggcggggctatcaacagggcccccgtgaaacttcttatctggatttctcggagacacgtccgcccttgtttgttaaagctgaagatccgttggaagccgatgaatggctttga

SEQ ID NO: 12855 - DNA, 204 bp, Zea mays
  Peptide Sequence Number=SeqID_56230
atggcagaggagcagtcccaaaaccggttgaaccggtttcaggaccggtcgaaccgaatttctgtgtacatgctaggagcaaacttgttagaatctctgtttgttttgtcatttaatcaccaaaaccctcaattagggttgattgcacttacagtgttggccatgcaggaagagctcaacaacttcaagaggaatgaagtttag

SEQ ID NO: 12856 - DNA, 444 bp, Zea mays
  Peptide Sequence Number=SeqID_56231
atgtggccacaacaacgaggtcgcggcctcgcgggggcttgggctgtcctggggcaggtcggatggcgtgacggcagcaggtcgtgggggcaggtcaggcggcgtggaaacggcggcaaggtcggcgggctcgacagccggtggcaagagcgccgccctaggcggccggtggctggaggcacggatgtggacgagggaggaagctactgcatcaagtacatggccagcaacatgttctcctggttagggcttgtcaacggcactacacgggaagacgaagcacaggacaagacgccggagatggacgacgaggaagaagtacaacagcaaccacgtgctgcgacggaacatgctaggcgcggaaggcatcctaacgtgagcaagtcaacgtcgctgctcaggattaacaagggtaaaatagaagttttggatcaaggattttga

SEQ ID NO: 12857 - DNA, 2916 bp, Zea mays
  Peptide Sequence Number=SeqID_56232
atggccgcggccccgccggtagccggagaagatattaaagacggcgttgaggtgtgcctgttcgatgaatcagcagatgggttctcgagaactgtgcgcgccatctcggagctcgtcgacatagagcccgaaacagacttccctgaggcggaagttgagcggctctcctcctcaataacgttcctcagagaatggaggcacttctcgtatgagccaaaaagtgtaacattcactaatggcaccgagtccacttcatatagagatgacatgcacagtgtaactttaccacagttttcatctgcttctgttccccagtatcttgctgtttctgcgcatcctcctggttcttcttaccataaacttggcatgcccttaaccgggagaggtatcattcaagtttggtgtctgttagcaccatttgaagattcacattctcaccagccagtgaatgcattcaataatggtaagcaaagaggaaggcctagaaaaataccttgtagtgataagctggtacctgttccaaaaggaccaagggggaggccaaaaaagagatcttacgatgatcagttagaacctgttccgaaaagaccaaggggcagaccaagaaagtatccattaccagttgcaaaatttgaaggttcatctcaaaacggtgaaagtcaggatattattctttttgatcccctttctacttcaagttttattccagatgacctttcattggcttctgtcatgccaactgaaaagtctgtgcaatcaacacctaaaagaggtagagggcgacctaggaaaaacccaagtgacaaactgacagactcatctggtattgtatcagaagatgtgtgtacagccctacctccaacaactgcaatctctacaaaacctaaaagaccacgggggaggcctcgaaaatatccaattccaatgaatgatggatctgtttcaggcgctgatgttgaattagggaaagagacaacttgtcagactgcttcatttggctgcagtttggaccacactgcttgcacagagtttaatgccaagttatgtattgttgcagttgatgcagcattgccacctattgacaaactgacctgttcacctggtactgtatcaggagatgtgtgtacagccccaactctaacaactgcaatctgtacaaaacctaagagaccacgggggagacctcgaaagtatccagttcaaatcaatggtagatctgtttcaggcactgttgctgaattaggacaagagtcaacttgtcagccagtttcatttggccacactgtttgcacagagtttaatgctaatttaagtattgttccagttgatgcagcattgccaattgtcgacaaactgtgcagttcatctggtactgtagtaaaagaaagtgtgtgtaccgaaccatctccagcaactgcaactcgtaagcaaccaaagagaacacgggggatgcctcgaaagtattcagacactatgattgacctggggaaagatacaactggtcatcctgttttatttggacgcagtatggatcacactgcttgcacagagtctaactctagttttagcattgttgcagttgatgcatcatcactgtttgcatcttcatctactgcaacttgtgatgataagtcaaaaggtcagagcattagagggaaagataagaagaaaacaatttctaatgctctatattgccctgtggtttctggtgttgaatcacagagcatttgttccacagaaattcttccaaatgatcctgcagtctctgttgagaatgctttgccatctgcacagaacacggtatcaatgaatgagctttgttcggctagcttgttaaaccgtgagggtaatgcgtgtaaaagtgctctttcagatgattctgaactgcctatccacatttcacctaaatcaagtaataaaagagagtcaagtggcaggaggggaagaggaaggcctaaaacgataccactttctgctggaactggtcattttgtggcttctgttgccagtctcccaaagacaacctgtgtactgactagttcaagcaatctcacgtcgttgaacaagagtggtggcaaatttatagtaagtagcgttagttcatgtggctgtgatgttgagaaatgcagtgttcattcaggtgttttgttgtctgatgatgcaccaccagcacatggcttacaaaatacaaattgtaaggaagaatcgaataccaaaataggaaaagcgggatctagaaataagcctgttgcagttgagcacaatcattttactgatcttaatgtaaaagaacaaaaagtgcagacaactccaatgtcaggtgatcctgtgatcttggttgaaaattgtatggaaggacaaggccccagaaaggctggggggcaacttcaaaggatacctgcttcaaacaagagtagtggcgcatctgttggtggtggaacatataaaatagagacattatccacaccaatgactaaaggatcatctaaaaataatgacatggcttatggggctggtttgaatcagtctcagaatgcaattgttggttgtgaaggcatggaagttattgaaagcaacactgccaattatacttctcattgtaatgaaaatgcacgagcaaatcaagttgcacccagtttcaagaacagtgatagggtcattgatgaaacggaagctgcggaacttgggccactcaaggaaccaagggaagatgacaatttgtttacttgtgtaaactcaaactcagcttcaattacaagtgacattgctcaaccaagagttgtcttgtgtttagctcacaacggcaaagtcgcttgggacatcaaatggaagcctcctttactaagtcaacctgaacagaaatcacgacttggttttcttgcagtattgttggggaatggcgctcttgaagtgtaa

SEQ ID NO: 12858 - DNA, 765 bp, Zea mays
  Peptide Sequence Number=SeqID_56233
atggcgcacattttttgtaagcacttgacgctcgatttccgcataacgcatcgatcacattaccgtgactatggggatgttcgtcaccgtcagggaggaggcagctacggcggtgctgttggtcatgggcgaagcggaggaggcaagaggacggaggtgaagtggtcgaggaagaaggcgctcctggcgacgaggatgcacgagttcatagatgccggacccccgccgaatcactgcattccttggcttcccctaccacgtgccagcgctagttcgccctcgggctcacacgtcgatgggagaccgccgcactgggagccggcactacgcctccgcctggactctctctgtcggtgctccttcatcctccccgtcccgtcgatgtggaggcaaggtgcgcgatgttgtcggggagccgaccggagaaggcgttgtaggagaggtcgtggcagtgggcaggggaaggcgaggcgcgctatgtcgttggagagcgggcgggggaaggtgaggcgcgctaagtcgtcgggggattcgcggcgccggttggcggatcagatggcggaggcggctgctggcggtcgtgcggccggtttgggcggggggggggggggggttgccgctggtgggaggggaatcgcggcgggggtggtcgtgcgcgtgattgccgcgggcgggaggggaatcgcggtgggggcggtcgtgcgcgagattcgcggcgtgcgtgctggactggtgaggcgggggcagtctacactgtccccttaa

SEQ ID NO: 12859 - DNA, 441 bp, Zea mays
  Peptide Sequence Number=SeqID_56234
atgccgggtcgcctcctccgcgctcgggggattaaaagccggagctcttgggcctcacgacttctctctttactctcgcctccttctcccatcgcgagttacccaaacgccgtggctctgcgctatcgccatacacgccggagcaggagctcgcgccgctgccttggtttcctccctcctgctcttcccggtgtccgcacagaagagattgaggttcgccagcgggtggtggttgcgtgcgctcgcactccaacacttgggggtcaccggagtttggtgaatttctcaccggaattcagtggcgccgtgaagccacctatcggcgtgaaccggattccccacggcaccatcgacgatcattatgttaatgggaacatggagaaccacccgagaaaacagtgctaccacaagggtataatggggacgcccttggctgattaa

SEQ ID NO: 12860 - DNA, 846 bp, Zea mays
  Peptide Sequence Number=SeqID_56235
atggagaagaaacacggctttacgcccaaatacacaaatgttcaggccccgacagccacaatgaacatacgccagcactcaaggtggctcgccgacgcccgctccgataacagcggcaatgaccttcgctccgggcggccaaacagcagcaactatgacctcagggcagacgctgctgcgacaaggtcctcgcccacgtctccactcgaggggcgaggacaagatattaatgccaaagagccggaggtcggtccgcaggtggcgctgacggtctcgatggcggagaagctttctccagctgccaccacctcagcaccgacggcggcgtccacctgtccactaacaccgcaccagcaagcgccggcagccccaaagcgcaccggcaggtcctcactcccgtcctcgccacaaaagcgaggacagaggacggaatgttgcaccatggctgggcagcgacagttcgccttccccggcttggctgaagggcgcctcctccgcagagctggaggatggtttccacccccagatgttgaaggagaagagtcagctcggggtagggtaatgatggcgcttcctgttgacgtggtccgtccgtaccctaggttgggcgaggtggaggctcctccgaggtcgaggtcgagtctgtcttccaaggtcgaggtcgagtccgagcccccgggtcggacgaggcggagaccgtcggctgaggccagggctgagtccgagccctggggtcgggcgaggcggacttcgtcgtccttcggggctgagcccgagtccgagccctggggtcgggcgaagcggagttcgtcgtcttccggggctgagcccgagtccgagccctag

SEQ ID NO: 12861 - DNA, 915 bp, Zea mays
  Peptide Sequence Number=SeqID_56236
atggcttccgtcgtcggcgccgaggtggtggcggctgaagaagtcctcgtcgccgacggggtcaccgccaccatccgcgctccgggcctttggctctttggctttgatagcttgtcctcgcccctcgagtgggggcgtgggcgaggacattgttatagcggcgtctgccctgaggtcatcgtcgctgcagtttggccacctagagcggaggtcgttgtcgctgcagccggagcgggcggcgttaaaggaaaccctcggccgctcttcgatgagctggagccggaggcagcggtgtcagcgtggacagaggcagacctggctcgaaaagaagacttcgtcggccggagcctgaccgggccatccactggcgggaccggcgccgaagtcgagttgccgaggccatgggccaggctgatgtcctcgggggacagctggctgaggcttcggggcgacctgccgagccgtctgctcgagccgggctcctggaagagaccctggcagcgatggctcgggcgtggtgctgacgtcgtccttcggagcggagatcctccgactgtgttgccgttcgaggctcggtcggacttcaccgaaggtggtgttgacgccgagggtgctgctgctccccctccatcgagaattgtttgtctgagcgagagttacttttcacgaaaggtgatgagtgaggattctgctaacgatgtagtcgagaaggcccgaaaaatcgtttcggcagaaaggtctccgagcattaagacttgtttggtcagcggaagcgcttatccgagcgtgagttacttatcgcagaaggtgatgagtgaggtatccgtatcccggaggcgtaggagtccctcggctcggtcggccttggctgcttacgtgtactccgtcgttttcaggatcccacttttgaagtag

SEQ ID NO: 12862 - DNA, 756 bp, Zea mays
  Peptide Sequence Number=SeqID_56237
atgggcatgggccgcatggccggtgctgccacccacggattttcgtcaagtcggtcggaggtagtacgtgtcggtgtcgcggtcaggccgcgccggatgctcatggccgcagccacgcactacttgggcggatcagcccactcctcctccaccacctcctcctccatctcgccatcgccgccgccctggcacccggtcctagtcgtacccagcaaccagcgccaggccgtcgtctacgacctaacggaggacctcgccacgccgccgtccccgtccccgtccccgtcaacgaccccgcagcacctccgccccgcgtcccggcggcgcgcgggcaagccgcgccggccgcggccgtcgcggaagctgcccaccacctacatcagcgccgacgccgccagcttccggcgcatggtgcaccaggtgacgggcgccggcgtcggcgccgacgtcgacgcggtgcaccagggcacggagcagctgctctgccgcccggcaccgccctcccgcgctgtgctttcgacggcgacgacgacgctggtgccgacgctggacacgtcggcgttcctgctcgacgccgggggtggcgggcggcctggcgcggcctgcttccacggctccgcggcggcggcggaggcggaggcctgtggttgtggtggcggcggcggcataggaggaggaggggagtacagttgcagcaacggcggcggcggcgggttcccgagcttggagtcgtgggatgaccacgacctattctag

SEQ ID NO: 12863 - DNA, 939 bp, Zea mays
  Peptide Sequence Number=SeqID_56238
atggaggactcggcgccatcgtccgccgcacctgaccctcccctttcccctccaccttccacgcccccgcacccgcacccgcacccgcccgaggaggaggggggctgctgggtgctcgttccggccagcgaggtcgagggggcccacgcgcccaaggtcatccactgggacgacctgcagcaggagctcgcgcgcctctggagcctctccgccgcgctccagcccgccgaggaccgcaaggcgcacctcaccgcgcgcctcgagtccgctctacaggttaggcaggcgtttctcgagcaggacaatgagttggctgaaatgaggcagagactgcaagagcgtactgaccgtctgggggatctgaagacgcgcgccaagaagctgtcagaggatgttgtggttcggagggaacagctttgtgtcaagatcagaacgttgtcaggggcaagcaaggctctcgaggctgcacgcagcaatctgaaggaagctaatgaattgctgtcaggggaaaatggttgtgggcgccttaaagatctggaacagcagttacggatgagacagcaatatatggtagcgcaagttgctcagatatatcctgtgaggcctttggatgaacaatcttcagatcacaaacctggatttacttccaacataacgaaaacaagtaatgttgaatcagtgttgccaaatagcccccaaaacagacctttggtcatattgggtctacagttatcaaagctttctgtgaaaaagactggctacttcagtgacaagacagaggttcagaaatcttcgactgttcttggatatgctgctcatgatatcgagcaacttctgaattacattggcgctgaaagcctcgggccaagacatgtcctagcaaacctgaagcagctgacaacgatcatccagtcacaaggatacatttctgatggttag

SEQ ID NO: 12864 - DNA, 1065 bp, Zea mays
  Peptide Sequence Number=SeqID_56239
atggcgcctccctcgtggcggcaacggcaccacactctgctgcaggctctgctctcccgcggcccccttgccgagcctgacttccgcgcgctgttcactgctgtctccgacagggaccctgccactcaccaacaactgttcaatgatacacttctcaagatcaacaaggaccttgcctacttgcagttcgagttgcgggcatgcattaaccaatatgatggaatggtttactacggggtggttaataacattgctgacgaagagtctaagcttggaacaaagtactccgtgccccagatcgcattctacaagggactgctagaagcaatagttcaggaagctggaaatgatgggagcataaccagtatcgacgccctcaatgtccggcttgataaccaggtcgcagtattagacggttcacaggacagccagtctcgccttcctagctccataaagaacttctcaatgagccagaaggagaaaactctcgatgagctgatacgggaccgctggttgtcgtacaccgccacaggcaagatcggtctgggcaccaggtcatttcttgacctccggagctggttccgtggtaacgatatcccgtcttgtgttgtctgcaacgaagcttgtataaaggcatcgagttgtccgaacgagggatgcgatgttagaattcacgagtactgcttgaagaagaaattctcacagagaaaggcctcgagagcgtgtcctagttgcggtactggatggccgtgtcaagatggcgagggcgaggccgatgaagtgaacgaacctggggaggaggatctagcctcgccggctaaccatccctcgaggaagaagcgcagtagagtcaaagctgagctggtggaggaaaacgacatcgcaggcccgtcgacggaggtgcctaggactaggaggaccctgagaagcgctaaagccgaagcagtcgaggccgatcaagaggcgtcttctaccgcagcttcacagccaggcaggggttctaaaagaaggaagaaggcaaaagagccttctagttctgctctttgctacagtagggactcgtag

SEQ ID NO: 12865 - DNA, 315 bp, Zea mays
  Peptide Sequence Number=SeqID_56240
atgcaggcggcatgcaactgcaccaagggggcgcaccctttcaacttcgacgcatccagcatggaggcccaggcccacacgtcatgtaaccggcgcgccggttactacgtgcaaaaaactgcagcgccacttgcgccagcgccgcgccttctcgactacgaaaccgggaccgggaaaggggatactccgaaagggatccttctccgcgaaggaagcgggccccgagcccccctactgatcagaggtttgaaggctggcccctcggaagggttcgacagccgcctcaggccactcgggctccgcgcccactactga

SEQ ID NO: 12866 - DNA, 423 bp, Zea mays
  Peptide Sequence Number=SeqID_56241
atgaagacagcagcagtggtagcaacgatccaatcggggatctggaagcccaagttgatcagctttgatcagaactccatcgcaggaacgacatatgggtcgcggatggatggagcagggacctccagtgggagggaagcaactccgaacccacccccagtacctccaacattagctgaggccattgctaccttggttaacgctacggccgacaacacccactttctgcaggaaatggcggaagatcctctagaagcggatgaatggatccgcgttatcgagcataagttcgggcttctccaacccgttcaaccggctggtcatcaaataacttgggatgagttcaagttggctttccgggagcactatatacctgaaggggtgctccacatgaagcaggaggagtttatgaagctgaaatag

SEQ ID NO: 12867 - DNA, 1422 bp, Zea mays
  Peptide Sequence Number=SeqID_56242
atgccgtcccagcctcagccgagctccatcggcggaacctcccagaccccggcgccgttccagaccgcgcccgtcttcaccggcggaagcccccggaccctggcgacgctctccgctcagtccgtcccccgcgtcacgcggagaagcattgcgctcgtcgattggtgtttggagagggtggagggcgaggagggcaagatccgcgtcgctggaaccacctacaccccgcaaacgagcccgcaaacgaggcatctcctccgcgcctactatgcaaacaggagagaagcatcgtcctcaaagggaagcaggaaagtggcaggccgagtgttcagatcatctgctattgttaggcgccatgatcacttcagaattatgtccgaggatggttacctcatacggataggctgtctcttgaatattcccaaaacacgtaacaatggattttctgaagaggtgtgtgaatgctttgagtttggctttccaattcaatggcacaggcttgttaatccaaagatggtgcccgataataaacatgcactgtcaccatcagaaacaactgctagtgcaccaagtcattcagttggatattacatggagaagttcttaagtgacagtttttccaattctaacagatattctttcacagagaatgattcttacacatctgtagtgtgtactggcagcagaaatggacttactacccaaaccctttcaaacttaccagatgataatgcaggaaacataactgtatcttggggattatatggcctcgggatggacatgtctgagaaaccttggacaccacctgcagaagcgtgtaataatagacaagaaagtgatcaacatgaaagtatgcaaatagatgcatgtaaacaagagttagttaatcgctccatgagttctgtttcagttaagcaaagtataagttccatcagccccaactcaaaagtagacggcaacagaattgtaccatccaaaattatgtcagttgtgaatgaaagttacaggagcacagtaggttgtggtcaggctgaggaagacgttggtattcagcaagagaaaaagcacagctgttcaagtgagcatggaatggttactctttctattaactgtacatcctctcaactaggtgcaccaggaattccaaaatttgggaaagattcagtgaacctttggactacagatgcattagaactatcaactgaagggatgactccaaagattggagctgacagtactgacaggagattacgaagtggcaaaattcttggaatgccaagtggtggactaatgaatagaggccacaagctgaaaaagatcaagcaggaagcatccagtaaacagatggttaatcaaggggctacatgcactgtggatctgacttctcatgaaaatgtaggtttaattttacaccttgaataa

SEQ ID NO: 12868 - DNA, 126 bp, Zea mays
  Peptide Sequence Number=SeqID_56243
atgaccgtcaatgaaggtaaggtggctcagtgtcaaggagcatttcagtttcctgagcactcgatgcctaatgatgatggtggaaaggctgctaacaatatgatcaaaaagagagtgagggaatga

SEQ ID NO: 12869 - DNA, 1620 bp, Zea mays
  Peptide Sequence Number=SeqID_56244
atgcaggtggcatgcaaccgcaccaagggggcgcactctttcgacttcgacgcgtccagcatggaggcccaggcccacacgtcatgtaaccggcgcgctagttgctacgtgcaagaaactgcaccgccacttgcgccggtaccgcgcctcctcggctgcggaaccaatgccgcgactcgaggcgaccctgcgcgtgacccaacagtgccgaccgagcacatcggtcacgggtcagtcagccgcgggagaaggcgcgacggtcgatacggccagaaatgggccggcagtaatggcggtggcaggcgggcggaagcagcggacaggcggcacctttggcaggcgaagcaggcgacgcttcgcttccgccataatgaccgcgtcaaaaaagggaccaggaaaggggataccccgaaagggatccttcttcgcgaagggaaacgggccccgagccccctactgatcagaggttcgaaggctggcccctcggaagggttcaacagccgcctcagagcactcgggctctgcgcccactactggctggcccccgaagggttcgacagccgcctcaaacgcagagcgagggatgaccctaggtacgttcgatacataaccaaggctcgggctgcgctcccgaggtaccctaggacatttctgagaccaacgtgttggcgtttcgaccccggaggtacctggaccgacgagtcgggtgcgcttgcagtagggggttacaagcgtccgcgtgggagggagcgagaggcttgcacgtgccgtcccatcctctccgcgcggccaaccttctcgtacgagtgccctgggccttccttttataggcgtaaggagagggctcaggtcgaggtcgagtccgagccccgggtcgggcgaggcggagaccatcgtctgaggacaaggctgagtctgagccccgggggtcgggcgaggcagagttcgtcgtcttctagagccgaggctgagtccgagccctggggtcgagcgaggcggagtttgtcgtcttccggaaccgaggccgagtccgagccctgggtcgggcgaggccgagttcgtcgtcttccgaagctgaggccgagtccgagccctgggtcgggcgaggcggagttcgtcgtcttccggagccgaggccgagtccaagccctggggtcgggcgaggcggagttcgtcgtccgaggccgagacgggggccgagccctggggtcgggtgaggcggagcttcctatggtgcccgaagccggacttggctgctgtcagcctcactctgtcgagtggcacagcagtcggagtggcgcaggcggcgctgtcctcttgtcaggccggtcagtggagcggcgaagtgactgcggtcacttcggctctgtcgattggagggcgcgcgtcaggataaggtgtcaggccatccttgcattaaatgcttttgcgatacggtcggtcggtgtggcgatctggccaaggttgcttcttggcgaagactgggcctcgggcgagccgaagctttgtgctgataggggttaccagctgagattaggagtcttggggggcgccgaacatggtgtctccagtgagttgctaacgggtaatccgagtggacgctcgtgccccattcgttag

SEQ ID NO: 12870 - DNA, 621 bp, Zea mays
  Peptide Sequence Number=SeqID_56245
atgccgcccccctatgacgtggtcggtccgagccctgggtcgggcgaggcggtggctcctccgaggtcgaggtcgaagccgaggctgagtccgagccctagggtcaagcgaggcggagtttgtcgtcttccggaaccgaggccgagtccgagccctgggtcaggcgaggcggagttcgtcgtcttccggagccgaggccgagtccgagccctgggtcgggcgaggcggagttcgtcgtcttccggagccgaggccgagtccgagcccctggggtcgggcgaggcggagttcgttgtctgtggccgagacgggggccgagtcctggggtcgggtgaggcggagcttcctatggcgcccgaagtcggacttggctgctgtcagcctcactctgtcgagtggcacaacagtcggagcggcgcaggcggcgctgtcctcttgtcaggccggtcagtggagcggcgaagtgactgcggtcacttcagctctgtcgactggagggcgcgcgtcaggataaggtgtcagaccatccttgcattaaatgcttctgcgatacggtcggtcggtgtggcgatctggccaaggttgcttcttggcgaagactgggcctcgggcgagccgaag

SEQ ID NO: 12871 - DNA, 156 bp, Zea mays
  Peptide Sequence Number=SeqID_56246
atggcgagagtagcatgtacccttcatggcaagaggctggacggtggttatagttttatgctgcttatgatggtgttaagtgccggtgggctcgaccttcttataagtctaagtaacccttctatacttcttattgaggatggtcccttaagctag

SEQ ID NO: 12872 - DNA, 435 bp, Zea mays
  Peptide Sequence Number=SeqID_56247
atggcgtggcacgacaaactgaaacagggacgcggcaacacggggcttgacctgacgaatagtgacgcggagagcaaagcgaggttgcggccaggcgggctcggatacaagcacaagcagtgtttcaccgtgtccagcgcgcgtgttacggactcgatatcgactgcgagcagtttcgcgcgcacgacaacgcgacagaggagaactgaacatggagctttgtggcagcacgcacaggaacaacgaaattctacacgcgcgacgcaaaggcgagcgggacgcggactgggcagagtcgagccagggagcttcgacgaacacaaaggggctcaggcgggatcgacggtgcggttgggaaacaggagatgcgccaggaaaaacaccagaggcgcgactgtgagggagatggaggtgcagccgagcgcggcgagatag

SEQ ID NO: 12873 - DNA, 405 bp, Zea mays
  Peptide Sequence Number=SeqID_56248
atggagccgagaaggattgcgtgcaacagggagttgagtaccgcccaacagggagatgcagagaggagagagggagctgggcagggtcgagatccgagcagagagaagggatccgagcaagacgcgaccatggacgagctcgaggaggtgctgagcagggggaactcgcggctggggaagcagtggccaaggaagagcgccatgggatggaactgggggtcgcggctggagatggagctcggtcggatggctgccatgggcagggaacacggcagggcgcgtcccgagcagagggatgagagcacaggagcttcggctgccagcaggggagggcgcggcggccagggaagagcagccggcgcgcgcaggggaggaactcaaggagagagaagcagggtgcggtag

SEQ ID NO: 12874 - DNA, 243 bp, Zea mays
  Peptide Sequence Number=SeqID_56249
atgtggagtaattacttttctgggaactcagtaccccatggatgtgtatgggtatacaaacatgggaatactaagaagtgtgatgtacttgtaatgacacacctacgctcatgtacattaacctcgaaaatgtatgttgttggagactcgttctcaaatgctatgaatttaagaacaaggcaacataaaatgttaaatgttaatgcccttcgtccaatgaagcattattcctttaaggattaa

SEQ ID NO: 12875 - DNA, 162 bp, Zea mays
  Peptide Sequence Number=SeqID_56250
atggtgggtacaagtgcggtcactgcacggcggcagccgaggtcagtggagcattgtaagcttcaggatatggttgatggtgtgacttggcctacaaccctgccactgggttggacagtcgagtgggatgctgctccggcaggagaggagcaggaggagtag

SEQ ID NO: 12876 - DNA, 357 bp, Zea mays
  Peptide Sequence Number=SeqID_56251
atggggaatagggagagatggacgtgcgattcgtcacgaagatctcgattttggctacgcaacgaacggggttccgcggagggttttatgctcggggacgaggagtccgagccgggttgtttcaaccgtctagctattccggcgggcacgacattgactgcgacaacaggggaagagggcggatctgaccgcgaggccccacctaaatctacagaggccctggctgatgtaattgtggacattactccacaactcatcacactcaatcaaagatccaaatcagacaagtatcagagaaaaggtaagattaatcagagtaaagcggaaatagatgagaaaagattaagaaaagattag

SEQ ID NO: 12877 - DNA, 420 bp, Zea mays
  Peptide Sequence Number=SeqID_56252
atggccggcaacgacgcataccgcaagtccttcctcgtgtcggccgtcgtgcactacacccgcggcgcggtgtttgccacggttgctgcgcagatcggggtcacggcggtggcggggcacctaggcacgcattccgcgctcctgttcctcaccggtgtcgggatgtccgcggcgccatcttccgcctcggtgcccgtattcacctccacgccgacccctgtgcggtttcttcgcaacgcgtgggtgatgttcatggcttcgcacggcggggatttgtggccgatgcgctcggtatccctcaccatcgtcgttcaatgccacggatccgcgcctcttcgagaacatcgccgccttaggccgtcgcgttttaacgggctgggtgcagatgccgttgaaccctcagccaacgaacgagattag

SEQ ID NO: 12878 - DNA, 348 bp, Zea mays
  Peptide Sequence Number=SeqID_56253
atgtccggtgcaccagaggactccaacttgaactcaccaccttcgggaatttctagaggcactcgtgctataattcaccggactgtccggtgtacaccggacagtgtccggtgctcctcggaagagctgcctcaggaactcgccagcctcgggaaatcagaacgcctgctccgctataattcaccggacatgtccggcgcattcaatgcgcgccagaagcgcgcagaagtcaggcacgcccatactggcgcaccagacattgaacagtacatgtccagcgtgcaccggacatccaggcaggcccacaagtcagaagctccaacggtcggaatccaacggaactggtga

SEQ ID NO: 12879 - DNA, 786 bp, Zea mays
  Peptide Sequence Number=SeqID_56254
atgcgcctaggggtcccttttatagccccaaggcagctaggagccgttgagagcaatctaggaaggctgatcttgccttctgtcgactggcgcaccggacagtccgtccggtgcccccttctagctgttggctcggccacgtgtcccgcgcagatcgcgtggccgaccgttggcccggccgaccgttggctcaccggacagtccagtgcacaccggacagtccgccgccgccgccaatcgccgtccacagccgcgcgccctagccggccggccacaaccgccgtcctagccgcgcgcctaagcaggccggcccccaacgccatcccagccgcgcgaccaagcaggccggccgccaatccgtcgtccccagccgcgctcccaagccggccgacccccaacgccgtcctcagccacgcgcccaagcaggccggccgccaaaccgccgtccccaggtgcgtgtgttgcctccaagctgtgcctctctacctctctgtccttgattggtgttcttttggcgagaccacgatgaggaccaacgccgagggcggcgggccatgggcggattgggggttctccgacgccgagacgacagcgccatcgccatcgccgcattcatggcgcttcttcattggattaggtccgcagctagtgcaagggagagcagccttcgctttctctccattctggcatttttggtcttgtgaccacgaacacgatgggaaatcctttcttgccagggagacacggttacggaacattggagctgctgcgtaccagcaccactag

SEQ ID NO: 12880 - DNA, 1386 bp, Zea mays
  Peptide Sequence Number=SeqID_56255
atgaggcaaggcaagggtgatccggcgatcgccgctctcgccattgccatcgccgtcgttctgctctgcgtggcatcgtcggcggtgctcgcgatcgacggggccaaggcagaagaagagcttccgacgcagctgctgaacggcttcgccgcgacgcacgcggccggctccgcggcgacgttcgagccggtgctgtacgcgaccagcgccgtcttcgcgctgggcttcctccgcgtcggcccggcgtcgctggacctcgccgtggtccacctgccgtcctccttccccgtctggcgcgccacgccggcgcgcctcggggactggtcgcgcccggccacgctcgccttcgacgacggcaccctggtcctcgcgggccccgacggcgccgtgctgtggcggacgctcaacaccgtcggcgacaccgtcgcgctgctcaactcctccaacctcgtagtgcagcgctcggcaggacgccgcgacggcgccccgtgtactggaagcacacggcgctcgaggcgcacctggagaacgccacggcgccgcctgtctacggccgcctcgacgcccctcgggttcttcggcctctacctcgacggcggcggcggccagagggtggacgtgctgtcgttcgacacgttcgccctgaacctcaccggcgtcttccggcggatgacgctggacgacgacggcaacctccgcgcgtactactggaccaccggcgactcaagtgcgtggacgtcggattacaaggccatcgcggagcggtgcgagctgccgacgtcgtgcggcgcgtacggcgtgtgcgtccccgggaacgcccagtgccagtgcctcgacagtaacggcacgagcaccgccccgccgtgccacggcgaggacaccgccgacctctgcagcaccgccagcagcaacggggcgcggcagctgggtttcgacgtggtgcggcggacgcgggtgtccgtggcgtacaaggaggagctgccgttccggacgaacacgacggcggacgggtgcgagctggcgtgtgcgggcaactgcacctgccggggcgcgctgtacaacggcgcgagcggctactgctacctcatcgacttccctgtggagacgctggtgtaccaggccgacgaccggatgctgggctacttcaagatcaggaaggcggcgacagcgaactcggcgcggcgaggcatgtcgccgggcgttaccgccgcgacggtggcgctgtcgctggtcctggcaggcctggctgcggccggagcgtactggggctacaggacgtgggagaggaggaagaggaaacgagcggggatggagcaggagctggttccggggccgtacagggacctcaagtccatggccagctctaacaattcgttcaaagcatga

SEQ ID NO: 12881 - DNA, 1298 bp, Zea mays
  Peptide Sequence Number=SeqID_56256
tgcggagtattataccgccgtccgttgcagacttggaggcagccaaggcccagcccaagagaggtccaaagacccagcgccgagtgcgcaacggcacattctgttgtctctctctcctctccaacacggggtccacagtacacaggcacacagccgcccgcccgcccggcgcccgcacaggcacagcaactgagggagccccgacagcccgcactcggcactcggcaccagtccaccgcgccacaggctccaccctcccctctcggcccggctcgatggggtccggcgtgtcgtcgagcatggcgctggcgctggcgggcttctgcttcagcgtcctcttcatcgtcttcgtctgcacgcgcctcgcctgcgcgctcgtccgccggcgccggcgccaggcccgcgcccgcctcgcggccgccccgccgctcccgcactacgcccacggctacgccgaccccgaccctttcccgtcgttccgcgccgcccgccaccaccaccacgcccccgggcctcgatcccgccgccttccccacccgcgcctacgccgccgcacaagcctccgactccgacgacggctcccaggaaggaggggccgggtccaccgccggggatctattgcggggggtgcacggaaccagattggaaatggggtgctctgcttcatcccggggtcgctcgcgctgttcactgggaataattgggctcttccggatatcgctgtcatgctcgtttggtgctctctcagagagtacaggtatagagggtgcgtcatctgtctggcggaatacgaagagggagacgagctccgcgtgctgcctccctgcagccacaccttccacacgggctgtatcagcctgtggctggcgcagaactcgacgtgcccggtctgtagagtctcgctgctcgtgcctgatactagtactacccctgaaagcgaacactctgcaccccatcctcctcctcctcctcatcatcatcatcatctgtccagcatagtgataataagcccaccaagctcccccgaaccgtcgagatcggacccgtgccgatgcctgttcgccagcggtggtgggcactcgtcaagggcggcagaggctcctcctcctcctcctcctcccagacacgagcccgaccaggtcgtatctggtccaccaccggcagcagatggggctagcggctacagctcgccgttgcctgaagttattcaccccgctcctgctcctgaaaccaacgggcagacagtacggaagcaggcgggcagcagatctactaccccgctaggcccctgcaaatag

SEQ ID NO: 12882 - DNA, 2229 bp, Zea mays
  Peptide Sequence Number=SeqID_56257
atggacaacccctactccctggtggagatcgacgggccgggcatgccgccctccgacaaggcccggggcaagaacgcgaagcagttcacgtgggtgctgctgctgcgcgctcaccgcgccgtggggtgcgtggcctggctcgcgggcggcttctggggtgtcctgggcgccgtgaaccgccgcgtgcgccgcagccgcgacgccgacgacgagcccgacgccgaggcctcgggccgtggccgggtcatgctgcggttcctgcgcgcgttcctgctgctctccctggccatgctggccttcgagaccgtggcgcacctcaagggctggcagttcccgcagcacctgatgccggggaacctgcaggagctggaggagcagctgcagcacctgccggagcacctgcgccacctccccgagaacctccgccagctgccggaccacctccgcgtgcccgagcggcaggagatccagggctggctgcaccgcgcgtacgtggcctggctggagttccgcgtcgactacatcgcctgggccatccagaagctgtccaccttctgcatcctgctcttcatggtgcagtccgtggaccgcatcgtgcaatgcctcgcgtgcttctggatcaagatccgcggcatcaagcctcgtatccccgcgtccgccggcggcaagccccgtggaggaactactggaaggaagagagtggacgacgttgagaacggtgacgccgacgacgaccgctacttccccatggtgctcgtccagatgcccatgtgcaacgagaaagaggtctacgagacgtcgatctcgcacgtgtgccagatggactggccgcgggaccggctgctgatccaggtgctggacgactcggacgacgaggtgtgccagatgctgatcaaggcggaggtgaccaagtggagccagcgcggcgtcaacgtcatctaccgccaccgcctgtcgcgcaccggctacaaggccggcaacctcaaatccgccatggcctgcgactacgtcaaggactacgagttcgtcgccatcttcgacgccgacttccagcccaacccggacttcctcaagctcaccgtgccacacttcaaggagaacccggagctcggcctggtccaggctcgctggagcttcgtgaacaaggacgagaaccttctgacgcggctgcagaacataaacctgtgcttccacttcgaggtcgagcagcaggtcaatggcgtctacctcaacttcttcggcttcaacggcacggccggcgtgtggcgcatcaaggcgctggaggactcgggcggctggatggagcgcaccaccgtcgaggacatggacatcgccgtccgcgctcacctcaacggctggaagttcatattcctcaacgacgtcaaggtcctctgcgagctgccggagtcttacgaggcttacaggaagcagcagcacaggtggcactccggccccatgcagctcttccgcctctgcatcccgaccgtctttaggtccaagatcccgttctggaagaaggcgaacctggtgatgctcttcttcctgctgcggaagctggtgctgcccttctactccttcacgctcttctgcgtgatcctgccgctcaccatgttcgtgccggaagcggagctgcccatctgggtcatctgctacatccccgtgctcatgtccatcctcaacatcctgccggcgcccaagtccttcccgttcatcatcccctacctgctcttcgagaacaccatgtccgtcaccaagttcaacgccatggtgtccgggctgttccagctgggcagctcctacgagtggatcgtcaccaagaaggcgggccgcacctcgtcggcctccgacatcctcgcgctcgccgaggccgacgcccacgcccacgcgccggcgccggcggccaagctcgtgcgcggcgtctccgagggcggcctccaggagtggggcaggctgagggagcaggaggccgccgagtgggccaacaaggaggacgccgccgcggctctggctgccgccgcggccccggccacgcccaagaagagcagcaacaaggccaagaagccgccaaaccggatcttcaagaaggagctcgcgcttgcgtgcctcctcctcacggccgccacgcggagcctgctctccaagcaggggctgcacttctacttcctgctcttccagggcgtcacgttcctcgccgtcggcctcgacctcatcggcgagcaggtcagctag

SEQ ID NO: 12883 - DNA, 1017 bp, Zea mays
  Peptide Sequence Number=SeqID_56258
atggcgcctcctgttgacgtggtcggtccgtgccctaggttgggcgatgtggaggctcctccgaggtcgaggtcgagtctgtcttccgaggccgaggtcgagtccgagcccctgggtcgggcgaggcggagaccgtcggctgaggccagggctgagtccgagccctggggtcgggcgaagcggagttcgtcgtcttccggggctgagctcgagtctgagccctggggtcgggcgaagcggagttcgtcatcttccggggctgagcctgagtctgagccctggggtcgggcgaagcggagttcgtcgtcttctggggctgagcccgagtccgagccctggggtcgggcgaagcggagttcgtcgtcttccagggctgagcccgagtccgagccctggggtcgggcgaagcggagttcgtcgtcttccggggctgagcccgagtccgagccctggggtcgggcgaagcggagttcgtcgtcttctggggctgagcccgagtccgagccctggggtcaagcgaagcggagttcgtcgtcttccggggctgagcccgagtccgagccctgggggtcgggcgaagcggacagtcggtgcggcgcaggcgacgctgtcctcttgtcagactggtcagtggagcggcgatgtgactgcggtcacttcggctctgtcgactggagggcgcgcgtcaggataaagctttatgctgatgggggttaccagctgagaattcggagtcttgagggtcccaagttctcgggctggtatgttgacgttgtcaacagtttggccggagccgggtttgcgagagcagcccccgagcctctgcacagggcgagaggacgggcgccgatcatggtgtcttcggtgagctactggcgggtaatccgagtggacgcccgtgccccatttgttaggggtcggctagaggcccggaggcgcgctcaaaagtacctgcgggtgatctgccggacccggtcccctttcgacggggtccgagggctcgatgcctccctctga

SEQ ID NO: 12884 - DNA, 1296 bp, Zea mays
  Peptide Sequence Number=SeqID_56259
atgaacagaagaccggcattcaaggtgccattacaaacggaactccggttccacctccgcaggcacgaacaaccccacacgattggggggcctgcggagcaacagaaggccgacgaacggctcgccgtcgcccgctccagcagcggcgacgacgacgacttctgctccggggggctgaacagcagcagcgatgacctcagggcggatgctgctgccatgaggccctcgcccatgccctcactcgagaggcaaggatgggcagaaggccgtagagttggaggtcagtccgtgggcggcaccagctatctcgtcggcggaagaacctcttccagctgccgtggcggaaggcggcgctgggagcggctccgaagccactcggatcagagagccaggcacgcggcaactgccagcgccacgaacggcgaacgcccttccccccgatcactgagggaaggagcgggccgccgcctgcgcagaggccgaccccaactcggcacactcccctccccagcaccaatgatgaaaatccttgaagctgagggaggggcagaggccgcagcccggcttgattttccccgccatcgagctggaggtcaccgtcttggccgtcgtgggctgagtcttctccaacacgctccaaggtcctccccctatggcgcgggggctgggtcccacgcgtcatgcaagctggcccagagcagaagaagccaaaccgccgcgcgcggtgcatgcaaccgcccagcggttacaagtgtccctccactttcgcccagaccagcgggtgaaagggtggacagccgtgcaggcggcatgcaaccgcgccaagtgggcgcacccctccgacttccaacgcacccagcatggaagcccaggcccacgcgtcatgcaaccggcgcgccggttgctacgtgcgagcaactgcaccgccgctcgcaccactaccacgcctcctcgattgaggaaccagtaccacgactcgaggcaaccctgcgtacgacccaacagtgccagctaggcgcgacggtcaatacggccaaaaatgggccggcagtaatggcggtggcaggcgggcaggagcagcggtcacgtcgtcagccaagcttatgtcccatccaggggcagcgagagatccctctctcacggcgtgaagacggcgcgcctgtgttccgttcctcgaacggctcgcgcacgcgtaacggccgcctcgcgaaccactcgccctgtcgcattaactccgcggcaggacaggcggcgcctctggcaggggaagcaagtgacgcttcgccttcaccataa

SEQ ID NO: 12885 - DNA, 849 bp, Zea mays
  Peptide Sequence Number=SeqID_56260
atggcgcttcctgttgacgtggcgggtctgtgccctaggctgggtgacgtgggggctcctccgaagccgaggttgagtctgtcctctgttgccgaggccgagcccgagccatggggtcggcccgagtccgagccctggggtcgggcgaggcggagtttcgtcgtcttccgggtcttagcccgagtccgagccctggggtcgggcggagcggagttcgccgtcttccgggtcttagcccgagtccgagccctggggtcgggcagagcggagttcgccgtcttccgggtcttagcccgagtccgagccctggggtcgggcggagcggagttcgccgtcttccgggtcttagcccgagtccgagccctggggtcgggcggagcggagttcgccgtcttccgggtcttagcccgagtccgagccctggggtcgggcggagcggagttcgccgtcttccgggtcttagcccgagtccgagccctagggtcgggcggagcggagttcgccgtggcgcttttggcaaggcctgactgcctgtcagactcactctgtcgagtggcaccgcagtcggagtggcgcaggcggcgctgtccttctgttagactgctttatgctgatgggggttaccagctgagaattaggcgtcttgaggaacggccccgctggccagttgcttcgtcatccttccgccgtctcttcaccgaagtcacctccggccgtcgcctccgtcctcccctctgccacctcgccgcacagggaagtttggcaccgctccgtcctccccccttgaccagcgtcctcgccggtaccgccccgtcgtggtgtcccctcggcggcgctgtgcagcattaa

SEQ ID NO: 12886 - DNA, 1566 bp, Zea mays
  Peptide Sequence Number=SeqID_56261
atggatatagtggtggaggaaggaaatgtcgatgttggcaatactgctgaaccatcgtatgaggttgtggctagaagtggttgttcagcacaattgtcaactaaggacactgatgaacatgaactggctatagagagcgaggatagtaaggtcagtgttggtaatgctgcaaaacaatcacacgatgttgtgggagtaggcattgactgtattttcaatcatgctaaagtgtcaactgaagccaatcttggaccacaaccggatgtgatacacttgacatctttggatgttccaaatgaatcaagtcaaataagttctgatgcggatatggtagagcagaacaaacaagatgctttggacacacttatcagaatatcacaacataaaaaaccaaagaaattgaatgtagctcgagttgtctctgaagattataagtgcactccagaagatgttcagcttattgaatacattaaaacattaccggggaaacaagttgtggtggacatcgacagcgcatggttaaatagaaatgatatggaatgtctttttcatggtgacatccaattgtctggcgaagccctcagtgcatatatacactgtattagggatgaagagcatttacttcatagagaaggtggaaaggtcttcttggagaacacattcatttccagtctgcttaagcgtgatggcgaccctaaggtgctcttaaattgtgttcattccaatgaatatagaaaattttcactagtacctcgcagttctgaatgcaaaaaaagtgagttaaaaggtctagaaagacagattaaacttgcagcagaacataaagagctttaccaaggcaagtggtcgaaccttgatgttgcatcatggccagttatagagaagatcacaacacaaatgcaaaccgatggggtatcttgcgggctatggatgataaactatatggaatactggacaggatcctccctatctgataacgtaactcaggatgatacaacaatgtttaggtttaagttacctgcaatattatgggactcgagattaaacacaaagaaaggacatcaaaatcttgaccacaatgtggatgaagatggagagagttcaagtgatgttcaaataatcgatactccattaacatcaacaaacacgcaagaactgatgtttgtattatgcacatatatcatggggatagacaacgccaaatatttaaaaaaacattggattcagagcactaaaccttatccaatttctttaagtcttcaaaaacttaaagatatattggatgtaaataagccgatggatacagattgttttaacatggctgttcggatgatcgcatgcaatgatgccttgtttttgttggaagacaaataccactacatggatctacagttctgtggatttatctggctttcttgttatcaactttatgcacgattggaatggtataagaatgggaatgacctgaggaccaaattcttagtagaattattgaagtacaaggacaatgaatccaaagacaatattccagaagaaatacaagaaattattaggcacatcagatag

SEQ ID NO: 12887 - DNA, 2061 bp, Zea mays
  Peptide Sequence Number=SeqID_56262
atggcggagtatatgctggtggtgcagagcaatcttaaccaatgtaataatgaagatatcccgctttctggaacaaaaattgagatggagtcttacgaacaagaatcatctgacagcagtgatgaagagtggtccacacttagcacaccacgaaaaacaaaattacaaggcaacgaaaaagtatcacttactgaatcagtacgttttgcaaagcggtgttctagaagagcgccagctagggagcagaataatgaacatactcagagtgagcagcttcatggttctgcaagtgagctagagagcaacttcatggttctcagtggcgatgcctcaaaatgtcattttggccctatagttactcagaagctgaaggaacattttgaaaaagatccatatccttgccatgcaacaaaagagggtctggcacaagagctaggactggcatttaatcagatcagtaagtggttctctgccacccgtcattattcaagagttattgttgccaagaaccaaaaatacccaggagaaaatactactgagaataacagtagcgcaatctttgatggtatacaagtaatagaacccaattttggtttgatagataaaccagatgcagatacaaatgacatgatttctgaaaagttgatggtacaaattaatcttaacgaaggcattgaagaggatatcccaccaagccaatatactaccaggtgtgaagagaaattaactatgactcaagctgccatctcaagggaagctggacctccaggttatgatcctggagaaaactgtcttcaggtcagttcaatgattactagctgtgagcagagtgtgataatggctcctagcgctatcgcaagaggagttggtccaccaggatatacgcctggagaacaccagggcaatggggctccatggaatacaagctatgagcgaagaccgtttacgagtcctgtgactagctcaagagaagtcagacctccaggatatgggcctgaagaaaaccaaggcagtggcatttcctgtaatacaagcagagagcaaatattgtttatgagccctacaaccatctcgagagaacttggtccaccaggatatttgcccagagaaaaccagcgcagtgacacttcatggaatacaagctgtgagtcgggactatttatgagtcttgcgaccacctcaatagaacatgaaatagcgcagtcattttcacaacaaaggaaaaaaagagagggcggtggtcctacatatcatgaaacttttgcttatgctcaagggccgtttgctcgtgtacctgaagcttacgttctaagcctgggcatttatctgcttcccaacagagagtgtacaaggactttgttcacgtgtggcatccccacaatcaaaatgtgggagcaacaggttctggaaataagtgctatggtgccccctccatcaacatctgctaatcgtctgggatctattttacctgaacctttgaatactggggatgctttggagagatacaaacaggttgctcagaaggtactgatattttggctcgttcttagagatgtcaatggggacccaatacccgctaacccatggggatttcccctattagggtactggtatgggacaaaaattgtccccatgggtacagatatgggacaaaatcttcacccattgggtaaatgggtttgggaagcaataatccgaacccgattacccatgggtatttcatacgtgtacacctgtcatgtttgtatgaatgagttgaggtcaagccggccaccaagcccagcacgacaacgcaccaggccccagggcaatgttgattgccctgtcactcgactggttggcacatcgcgctggaagttttttacttccaaaatcatgaagagtatatgtgatcttgacaagacccctggacctggccgtcagttacttttgtattcagtgaactgtttggtaatgcggttccttttgtatttagtgaactgtgtggtattgcgtacacactgtaggtccttttgtattaagtgtagtagtgatgaggaactattgttgagtttgtcttga

SEQ ID NO: 12888 - DNA, 1215 bp, Zea mays
  Peptide Sequence Number=SeqID_56263
atggcccgcgttcgtcccctgccccggcaacccagcttaaccctagctcgctccctccgtagccgcctcttcctgcttcgctcctctcgtgtagcaaccactccctccactcccgagatcgtggcccgacgccgtgccgctcccgagaccgcgccacaaagccgcggaacgtcctcaccgatgcaccgacgcgcccccgagcccgcttcccgacgcatgctcaaggcgtggtgtggcagaggctctgcgtttgctgatggcaatgggcctgacttgccattgtcccctgctcatgtggtaggtcttagattattcaacattgatatgattagggagcacccccccttgtcaagcaactcacaccatttcaagatctacacgacatggcatctgcatcgccaaggcctcgctcaactcagcgcggtgttgactgccgatacctggagatgtgacaccgccagatgtgtcgctcaggccaatcacactgctctgctgtttttcaaagaacaacctcttgctacgtcatcaaggggtagaccagtctctaatgattcgtgtacgaatccttgggagaaagcaagtggtcctggaaatgttaccaggacatctctggccccacaagggctgcaagcacaagtaggttcttctacatgccaccattcaatggcagatgttcagggggcacgttcatggacattagagttaactgatgtctggtctggtatcaaggaagagatgtttttaactgtgtttacgctaatcaagttaatgaatttgagcgcggtgtccgggttgaaccgtggcctggcagcgagccaggaggacctgaaccacacggacgcggcggcggggtgccccgttgacacgagcacagtcaacatgctcattaggggctacaggcagtctctgcatctcaacgacgcgctacgcctgttccaccagatgcgaccactgtactggttcgagccggatgcattcacgtacagctacctcgtgcacgggctgagcgcgcagggccgcaccaggaacgcatgggagctgttcgatgaaatgtgcgggagtggtctcctgggaagccataccaggtacttgcagatcctgtcagatcccactaaatcatatctaaagagaggtgctggatgtggtgtaggtcctgtcagataccgtggtgcagttcaagatgatctaatccccatatccctatcctctgtgtga

SEQ ID NO: 12889 - DNA, 447 bp, Zea mays
  Peptide Sequence Number=SeqID_56264
atggcgaacgaggtggtggcaactgaggcgaggaccatcgttatcgtgcggaggtatagatggccaattgggtcgtcagccggagtactgtcaactctgttcgacgtgcgtggcattattggtggcatcctcgccggccgcatctccgaccacctggatgcccacacactaacagccgcgagcttcaccttctcagcgataccggcactcttcttctacaaaatctacaggaacgtctcgctggcgtggagcatcgccctcatgttcagcatcgggaggctggtgaacggtccctacgtgcagatcacgacagttgcgttcactgtgctgcgacactggcgttccaggctttccagctgcagccgccggccgccggacatgaaccctagccaccatgctgtactactgtgcctgcgcggggcatcaaaagatcagggccgttcctga

SEQ ID NO: 12890 - DNA, 420 bp, Zea mays
  Peptide Sequence Number=SeqID_56265
atgggcaaaggccacaaacgtaagcgcgagccgactcctccgtcggaggatttcggcgactcggaatactcggaggaggagttctcctccgagtctgagaggtccccggcccccgtctctcccccggtgtcgtccgacgactcggacgactcccaggggttagccgcggaggtctggtcctacatccgggccgtcgagcgttccgggctcgagggctcggatgagtcggagtactcctcggatgaggaggactcggacggcggcggcgaggatgaggacgacgacgacgacgacgacgacggcggcgacagcggcggtggcaagggcggtggcgacggcggcaggggcagcaccgagggcggcagcagcaaggggagcaccaagggcggcggcggcagtaggggcaaggccagtggctag

SEQ ID NO: 12891 - DNA, 423 bp, Zea mays
  Peptide Sequence Number=SeqID_56266
atgcggcagcacgccaagataagcttcgcaaaggtgaacgaaaatagagatttggaggatggaattagggttcaagtgagtcaggttgatatgataaaaatcaaggatgccacggaaaaaagaagatatgggaaggccgaggccgcgaagaaggaaaggagtgtaaaccaccgattcatgggtatcttcggttgggacagtagtcccgtggcaagcccgccaagaacagagttcccgtggagggagaaccccgatggagacaaggcggagaagctcaacttcagaaattacagacatatggttacctgcgaaagtgttacctctaaaacactgatgtcaatcttcacgttgctcggcgttgtcaaaagaatcagttcaacattcagcaaaagcaaggacaagtcatcaaaacgaaaaggataa

SEQ ID NO: 12892 - DNA, 942 bp, Zea mays
  Peptide Sequence Number=SeqID_56267
atgggaaacaattgtttaagatatggtatatactgcaacgtcaaatcgtcgtccttcactcgagatgacaaggcccgggacggcggctcggctctctgcttaaaccctaaccctatcggctatccagcattccagctatccccgacctcgagtccccaaccctggcccgacgccctctctgctctcggtctctggcggcggtgccgccgttttctctctcgcctctcgtgccttggccgttggcgattcggtcgtgctcggctggcggctgctcgccctgctcgtcggtcgtcgattggggatctcgtcgtgctcgccgatggggatctcgtgctcgccggtcgtgctcggttgctcgccctgctcatcgatcgtcgattggggatctcgtcgtgctcgccgattggggatctcgcgctcgtcggtcgtgctcggctgctcgccctgctcgtcggtcgtcgattggggatctcgtcgtgctcgccgattggggatctcgtgctcgtcggtcgtgctcggctgctcgcctctgcgccctgcggtcgattggggatctcgtgctcggctgctcgcccagtcgcccttctctgcttggccacagctcgtgctcgcccttctcggtctctggttgcccaggcgttctcttgtccatcgtgcggcacaccacagtccacacgtcgacgacgtcgtctctggtgctccggctttgaaagctcctcgggctcgtggtcgaagtcggggtcatgcatggaccttgacgcggctgcagaggaggaggagcgccggcttgaggaccacaatgaggcgcaggatgctaggtacttcctggggtttggtgacacccatggagatcctattgaggttgatactgttgtcggctctcaaattggcactggaatcggatccactagcccgtcagcagcagtccctaatcctgattag

SEQ ID NO: 12893 - DNA, 645 bp, Zea mays
  Peptide Sequence Number=SeqID_56268
atgactcgccccagcctctgtcgactactctgggccagcaacagcgcccgaccccaccacatgcgcgggtccggggccgccacgtgtccagagaaagtgatatactccaaggcatcaacaatgagtccggacccccatgggagagtgccggacccgtgccggacccctgtatatacagtccagacctccaagtttggcccaaggcctccacgtgtgcgaaccggacccctagaatgggatccagacctcccgtatggggtccgggccgcccacagtggggtcccaaggttccaggacaaaacatacccgggccttaatcaggacccaggcgggggtccggagccgacacgtgtccagacctggtctggtgggatccggacctatccacatacactcctgctccccactcaggcggagacccgatgttgccacgtggcatactgcgcgcagtataagccaacgggcggaacctggcatgaggcctctgggctacgcgcgccttcgcattcattacggataagatatttaaaccggctcaatcctacccaatacatgtggattatcaccaaaacgaacaagccctcaggtagagcatatgggatgcatatgggcatttctaaagtgacattcactaagaacccatag

SEQ ID NO: 12894 - DNA, 273 bp, Zea mays
  Peptide Sequence Number=SeqID_56269
atggacaaggatgtagaagaggaggtgagattaagagatgagaagggtaaaggcaataagaaacaaaagcacaacaaggatgaggttacaaactcgcgagatactacaggtcagcggtcctacagtcagcacgactttgataccacttatgtcacacccggttttggaaggggtgagtacacatcaacgtactcagcaaatgtccccgtttgggctgaaggtggactagctttatgtggggttaagctcaagcagttgcttttagttggtcag

SEQ ID NO: 12895 - DNA, 1485 bp, Zea mays
  Peptide Sequence Number=SeqID_56270
atgaatggcggcaaccacccctgcggcggtgagccctccttctcgcagctcctccaaggccttcaaaaggggctggagattcttctatctgtcgcgcggggccccgtagcgccagttctcgctagcggcggtcaccactcgttgagaaaacgacgggagcctcccgtcgtcatttcggagataaaaccactggcgctgccaccctttgttcgaagacgcgaggatggcggggatgtactgcagcgcccgcacctgcctcaactggaggatgcagccgccggcccgcaccaccatacgaactcttctttcccccgtcggcgaggcaaaaagctccacggagaagagatgggtccacaggtcccagtggggggcaacccccaaatatccttcgcaaaccgccgcgaagatggctgcttgcgagatggagttgggactgaggttgtgcagctccaccctgtagacgtgcagaatcgcccgcataaaacggcttgccagcactctgaacccccgctcgtgaaaggagacgaagctcaccacataccccggcggtggggacggggcggctccgctcggaggggccatccactctggctgcgagtcaccggacagagggcgaagcaaaccatcagcaacaagggcctccaggtcgtccgccgtgacggtggagaaaggccacgggtcgcgcggcgaaacaatggtcacccggtcggccatcaccaagctgaagaggacaggcgacacctttggcaggcgaagcaggcgacgcttcacctccgccataatgaccgcgtcaaaaaagggaccgggaaaggggatactctgaaagggatcctcctccgcgaaggaagcgggccccgagcccccctactgatcagaggttcgaaggctggcccctcggaagggttcaacagccgcctcagagcactcgggctccgcgcccactactggtcagaggttcgaaggctggcccctcggaagggttcaacgaccgcctcaggccactcgggctccgcacccactactgatcaggggttcgtaggctggcccccgaagggttctgacagccgcctcagagcacgcagagcgagggatgaccctgggtacgttcgatacataaccaaggctcgggctacgctcccgaggtaccctaggacatttccgagaccgacgggaacgatttttaacggaatcccaccagagggaggcatcgagccctcggaccccgtcaaaaggggaccgggtccggcaaatcacctgcaggtcaaggctcaatccactcaagggacacgatctcgcctcgcccgagcccagcctcgggcaagggcagccgaccccggaggattcacgtctcgcccgagggccccctcaagcaacagacacaccttcggctcgcccaaggcccagtctttgcagagaagcaaccttggccaggtcgccacgccaaccgaccatatcgcaggagcatttaatgcaaggatggcctga

SEQ ID NO: 12896 - DNA, 537 bp, Zea mays
  Peptide Sequence Number=SeqID_56271
atggcccgcgcccgcgcctataaagccctcccaggcttcgactgcactcttccgcgcaccctcaaacctcaccggagtttagctcgccgccgtttgcccgtgcgcagagtgtccgtggccgcccaatccctctgccaccgtagaccggccaacagagccattcccaaccccgtccagccctcggagaagactgtgcacacctccgtgaagctccctgagcgaggaatcggagtttgcttcgccggagaggccagtccacgctcgccggagctctcaaccccgccggagtgcgtggaccgggataacttagaaaaaccctacaaaaataaccccaaggatacaagagcaatacaaattccctatgtttatcctcaacaaaaacctaagcctaaagactgtaaccttgctgacggagagtacatcctcgtgccggagcaaggagctgctcaggaggtagccccggatccagcacccgagcctgcaccagaggacctgcctgccactgttttggaaggcaagccccagttttatgcataa

SEQ ID NO: 12897 - DNA, 447 bp, Zea mays
  Peptide Sequence Number=SeqID_56272
atgggcaagaacaacaagcgtaagcgtgagccgactcctccatcagaggagtttggcgactcggagtactcggaggaggagttctcctccgagcccgaggggtctccggctcccgtctctcccccggcgtcgtccgatgactcggacgactcccaggggatagccgcggaggtctggacatacatccgggccgtcgagcgcgccgggctcgaaggctcggatgagtcggagtactcctcggatgaggaggactcggacggcggcgaggagggtgaagacgacgacgacgacgacgatgacgacgacggcggcatcaatggcgggggcgacggcgacggcagaggcggcaccaagggcggcagcggcggcagcggagacagcaccaggggcagcagcaggggcagcacccggggcggcggcggcggcaggggccgggccagtggctag

SEQ ID NO: 12898 - DNA, 429 bp, Zea mays
  Peptide Sequence Number=SeqID_56273
atgggcaagaacaacaagcgcaagcgcgagccgactcctccatcggaggatttcggtgactcggaatactcggaggaggagttctcctccgagtccgaggggtctccggcccccgtctctcccccggcgtcgtccgatgactcggacgactcccaggggatagccgcggaggtctggacgtacatccgggccgtcgagcgctccgggctcgacggctcggatgagtcggagtactcctcggatgaggaggactcggacggcggcgacgaggatgaggacgacgacgacgacgacgacgacgacggcgacggtgacggcagcggcagtggcaggggcggcggcgacggcagcaggggcagcaccaaaggcgacagcagcaaaggcagcaccaagggcgacggcggcggcaggggcagggccagtggctag

SEQ ID NO: 12899 - DNA, 339 bp, Zea mays
  Peptide Sequence Number=SeqID_56274
atggctaggccagaacactcaccgccaacgagctcccccgcctgcgcacgaagaccgaccgactccgaccaccgccagcgtcgagctgaccatcgacgtgaccgccgtgacctccccgacctccttggacaccttaccggagctagatcgccgccggaaaataaaaaaggggatagaaaatggaaaccagaggattgcaacctcgctgacggagagtacgtgctcatccccgagcaaggagttgcccaagaggaagtccaggagccagctccagaccctgccaccgagaatctccccgcagccttagcttttgaaggcaagccccggttttatgcataa

SEQ ID NO: 12900 - DNA, 192 bp, Zea mays
  Peptide Sequence Number=SeqID_56275
atgaaaaagaaacccatgatgctcgagaagaagctaactgaactttcacggctacctgagccgtacgacccccaggccgatcccgttatgaaagaggctctggatgtgatgattgttgccaataccatcatcgacgaagtcgtcgatagactgctgaatgaggccaccgagaaaattcagaaagaagactag

SEQ ID NO: 12901 - DNA, 612 bp, Zea mays
  Peptide Sequence Number=SeqID_56276
atgagggtcaggcataaagaaagcaaatcaagcatcagttatgttgggatgaaagtgaagctcaggtataaagaaagcaaatcaatcacctgtcaaggattgcaagtatatccaaagcagcctgaatctcgactgattgcagcaagaacacaagaaccagatagtgatgtgctgctgccttctccaatccaccaagtcaacgggctcaggtcatcaaaaacttcgatacaggagttcagcgttgctttggagggcagccagcagctgacggagaaaagcgacgcctacagcatcggcgtgctgatgctggaggagtggaggtggtcacggcgaggaagccgctggcgcgcggccaccggccggtacatcgtccgggacgaaggcggcgctggaccggaccaaggatctgtacggcctgcacgagctgctggaccaggcggtggcgggctggagcagtacatggacctggtgctgcgctgcgtcgaggaggccggcgccgaccggccgtcgatgggcgaggtggacggagagatcgagcaggtactgaagatggccggcggcacaggactccatccctacgctgagtcggcggcgtccattccaactccatga

SEQ ID NO: 12902 - DNA, 1026 bp, Zea mays
  Peptide Sequence Number=SeqID_56277
atggctaatcacttgttatcagcatattgccaagtattacaggagcttcaggaccaggatagctttgacgtgaaacggtggaagggtaacggtggaagggtaacgaagttagcctcgtcacaacaacatgtaaagacgatacaagaagaagatgtggtgcaagctacctttgaaccatggaacctaccagagttcaatgattttaacggtcctgagtggagatcgagtccctcaccaaagaccatggaattgaaaaataaggttcacatgtccacctatttcaatgcttgcagaatgacatcggattggaatcatcttatgccccactatggccacttgttgagccaggccgaagtcgatagttttgacccacaacaaattggtaaccctaagtgtcagaactatgctgagggatctagaccaccacctgtagcaaataatgcaactcaaagagctaacctagcaaacttctttgctgatgagatgttaggctttgtcgtgcttggcttgcagtttactgctcttgagaagaacccattccacttcttacattgtcggtcaatcttgaaggatgaaccaaaatggacggaccatcacattgggcagcaaaaaccaaatctagccctcattgcaaatgactccaacaccattgacttagatccaaaggaatcattgccaagtagctttgcatcgaagctcccacttgaccgtgatttgagcaaggaaaaggcaaagaagacacaatctatggacacttcatccactgattcggagtacttgaccagacttggtgatctatctttggaacgattgtctgtttacaagttagttgcttcggtggaagaaagaaagttggaggcatatgacaaaattcacagacaaaagctcatcatagaggagaagttgaatctggagcatgtgaggacggacatgcagaaagaaaatgaggacaaggaggaaaaggatatgatccttagcatggatctgaacaaatgcaacatgttgcttcgagagtacaccaagtga

SEQ ID NO: 12903 - DNA, 183 bp, Zea mays
  Peptide Sequence Number=SeqID_56278
atgggcgcagtcctcttcgccctcgtgactggtgagtaccctgtgccaagttcaatagcttccggtgatcgtgtagcaccccatagagttgagcgagtagaagagctagtggttgaggatcccggtgttcagcagatagaagttgctgagcaggagctcattgaaggcaagttgtgcccttga

SEQ ID NO: 12904 - DNA, 219 bp, Zea mays
  Peptide Sequence Number=SeqID_56279
atgaagctgtggaaggagactttcaggagttccaagactacgacgagttctaggcgtgggttagcggcaacccccagttggctgcctgtgaaggccgcgtttatctacgtttcttttccgcactttgatttattaaggtgcatccagggagatgggcttgaggctcacttgatatcactccatggtggtaacttgttctatatgatcgaagatccatga

SEQ ID NO: 12905 - DNA, 2037 bp, Zea mays
  Peptide Sequence Number=SeqID_56280
atgtgcggccccggggggaaggatgtcttcgcccgagctccgggagtcttcggcgcggatgctgagggttaccggggacttcatgaagccaggccaaagaggcagcgaggggctgcgaaggctgctgcccccggcggaggcaagccgccgctggcggcgaagtcggtcgtccctgcgtctagcaaggcggcggaggctgcggctggcgccggtggttccaagtctgcgaagactgtgccgccgtctagcagggcgccggaggtcgcgaaggcggcccgagggttgccgtcgccgggcaagcgcatcgccgacttcgccaccgatattagtgtggacgactatcttggtgggtcggacgaaggccaacttgttattgttgcgcctgccgcggcgaccacggcggctgccgtagtgccgaaggcgaagggcggtgctcttagtgccggaggcgagatgccgacactcgctgctgtcagggacgaggcgggcgctgtgtcccgccggctgaaggagatgaaggaggcgctaagtcaggcggctgacttcgcagaccgcgcggcgtcgggggccctcacggcagttgtgtctgccgaagtcgagagacttcggacgcaacatgctgatgtcgtccgggaaaaatcgaccgccgacagtaagtgccgcaagctggtggacaaggtggccgcgctggagggggaaaagactgacctccggcgccaattggtggaggagaggagggaggccaatgaggccctcgccaaggcgcaggctgcgctggcggaggccaatttggcgcgggcggagggcagtctcgccagggagcgcgccgcgcagttggaggagcggctcaacgccctgcagagccgtgtggagaggaccgaggccgcgacgcgcgcggaggctgagcggatgcgcaaacagcttatggattcataccatgagctgggcgcacggaccggtgacttcgaagtgccggaccgagagcccggacttcgctgcctggagtgggtacaggaggagttgcaggcactccccactatcgtggaggggtttatgtcgtatgcctccctggtcacctgcgagggggcgatgaacgcgctctctcgcgaagggtgccggcacttcgaggtcttcgaccaagctgatgaggattttgagcgagatatctacaaggttgaggaccctatagtgaaggagtccgccggagccatctacgaccggatgtggggcccgcacggtcgagaggtggtcagggagcgggccgagacggcgagggctcaggcggcgcgtggcgagagggtggatgatttcggggcgttgaacagcgcgctgcctgacccggagtcgaacccggcggaggccgtgtccgaggccgccctggagccgcccctggagactgccgaaggcgctcctgatgccccggcagccgctgcgccgagggctgaagatcctgcgacggtggcggcggaggcgatagcggaggcgacagcggaggctcccgcgacggctgggtcttcgcaggttcaagattttgggcctgcgcacgcaaccgccactactaattttttggcggcttcgaccgtggatggtggtaataaatatgatgggtctgtatctgagttttctgattttgctgactctgggagctcggttgagtggactgaggagtcgtcggaggaggacttggactattttgcggccttggatgtggcagtggcggaggcttcaccgcacgctgcggacacagaagatgtgcctggtccgagtattgggcgcaggcggcgaagggcggttgcgaagcgtagagtgagcggggcggagggcggtcggcttcgtgcttgtatgatgaagttgtgtgccctcgcacatttggctatgctcgcgaaggcgttacgtgcttggtcaggtgtatttgttatgctggactggtgcgtatatagtcggtcttggcgcggacagtttggtgtggtcgtttttgcttttgttacgcttcgtccggctgtgccctcgggcaacttctgcgcggatggtctttga

SEQ ID NO: 12906 - DNA, 414 bp, Zea mays
  Peptide Sequence Number=SeqID_56281
atgtcattgactcatgtggacccacattgcctaaataggctgttgacaaaatattactactccatcgtcctccctctcgcccataaggtatttgatatattactttgtccagtcgatgcagcttacaaggctgttgacaaaataatccaggctctcaagccatattttggacctcacaagtccagggagtgcctgcctctgatcctcatcatcaggaacatgctcaagtatgcactggcctatcgtgaggtcatttctatcctgatgcaacgccatgtacttgttgatggcaaggtctggactgataagacctaccctgctgggttcatggttcaagctctgcaaggtgaggaaaacatagattggaattcaaatttagtggccgcaaaagtgtggagacttgaattcatataa

SEQ ID NO: 12907 - DNA, 447 bp, Zea mays
  Peptide Sequence Number=SeqID_56282
atgtcgatctgctttgctggttgtctcttcccaggcccacgaaagaatgaccttacgatttattgggcccttgggcctttcgtgaggtcttttactcttttagtggacccgggggatatctatcccccacaagcccccgatctttgggttaatttagaggtaatcagcccaaagatcccaggtccagcttgcagaaattggcatgaagctattcgccttatgctttggaggtcagcattatgtcatcaatattttgcttcagaggtagtgcaatttatttgctctgcgactgattggacgtttgatggacgttctctgtctagtcttcacgccgcttctgtcggccatattttgtacttcactggctatatttggctttcctctgatcccttactggcatctcatttttgtcttgaggtattcactgcgtgccctgcacagatgtga

SEQ ID NO: 12908 - DNA, 225 bp, Zea mays
  Peptide Sequence Number=SeqID_56283
atggggaagcctatcccatcactcctcacgctcctcctctgccgagtgaccgcacttgtacccaccataaccggaatgggagaccacgtctcaggtcgcgtgaggagggcaatctgctgccaggttcactcaggtatccgcacgttaatccttattccaatttcatcacgtagaccacgcatccccatggatccgtgtccacagaccatcattattttgatataa

SEQ ID NO: 12909 - DNA, 216 bp, Zea mays
  Peptide Sequence Number=SeqID_56284
atggtgacctccggcttgatggtgggggaaagcgagccgggctgcggccccttcccctccctcagcctcaaggattttcatcaccagggctggggaggggagtgcgtcgagttgaggggcctcctggcagcagcacccgccctgaggtcagtgctgccgctgttcgaccccccggagcagaagtcgtcgtcgtcgccgctgctggagcaggcctga

SEQ ID NO: 12910 - DNA, 114 bp, Zea mays
  Peptide Sequence Number=SeqID_56285
atgaaggttcctaaatctaagatcaatgctgaatggttagaaagagatatggtttccaccggcgtggctaaggttgcggtgcaccacaagcggttcctggaaccgcctgtgtag

SEQ ID NO: 12911 - DNA, 573 bp, Zea mays
  Peptide Sequence Number=SeqID_56286
atgacgccatggctggagctctcaagcgacagggacacaattagatccaccccgaccatttcccctccatcaatttcaccaacggcgcactacaatgtcctggccacggtgacagagcggatggacaagaggatgaacatgttccgatcggatagcgatggggatggccaaattgaggctggtaacaccaggggtgttacataccgcttctccgcctaccacgccgcctttgcactcctctttgcctaccacgtcgtcgtcgtgctcgtcttcgtcggcctcctagtcgctgcagagcatggctccgccctcatgggcctactcgccttcctcgtctgcgcccgtgaggcccaccacggcaccatcggcaacaccaccatcccccacacccaactccacctgcgccacggagcatggcggcacggagagatggagcttgggcgcaaccacgacaacaaggtgaagcttgggtgtgcccgtgatggcgaggcgaagcgggaccacggccgcagggctctgtgtgtgcatgaccattgggctcttccgtacatgttctgttccatccgtgtctga

SEQ ID NO: 12912 - DNA, 1098 bp, Zea mays
  Peptide Sequence Number=SeqID_56287
atgacttctcacggatcctcggaaggagggaacgcacattcccacacggacggacttgcacgagagggttttccacgtatcttgtgggaggtacttcagggagcaggttacacgacgcctccccagtacatggtgcaactgttcgagaagcaccgggtgccccgctgtagggtgaggatgaccctggagcctcatcccttacagccaggctggcgttcgttggactccgagtctttcggataccgggctgaggatactatcgaggccattgctctccacgggctgactaccttctgtggttttcaccccttggagctgtccactcaccccattggtttgttccccgtggagaaggaggacgacccaatgtggaaggatcgagtggaacatgccaaggatgtgtgggctctatacccagggcagactgctcacctcacggtgcgatgcatgaatgccctgtatcgtctgcaagtgctgcgaggagaggcaatgtctcagctaatggcattgttggaggctaccaagatcactctagacaacagagaggaacttgtggtagacctatccactaatatggtggaaaaggacctacaggtggaacagatggccaaccagatccaggagcttgaggagctaatgggagcaagggagaacaccattgaggttctcgaggatcagctgatcaacacccaacaacaactcgaggaggctaaccagcatttggatatgcaccatcaggagattcaggagatggaggccaacgaggatgtcgacatcgagggaggagtggagctggagcccgcatctagcctggacactgctggctcagggagaccccccttcccccgagtcaagcgttgcctcgtttgtccattgagttgcagggataggatggcaggaagagcgtgtcgtggacagaatgaacgcattcctccaccaccgccaccgcctcctaccatgcaagagttgatggctcagcagaacgagattctgcgacagttggctcagcgtcagccgccacctcagcactatggtggtggtgaccaccatcagcgtcccccagcagcagccacttatcaggagttcctcagcatctag

SEQ ID NO: 12913 - DNA, 345 bp, Zea mays
  Peptide Sequence Number=SeqID_56288
atggcgcagtggcttacccggtctacgctcgccggtggtcggagggagtccgacgaccgtggactggcctctccggcgaagcagacttcgattcctcgctcggggagcttcaccgaggtgtgctcagtcatctccgagggtcggacggggctgggaaaggcttggttggccggtctacggcggcaggggctcgggtggccgcggacacgccgtgcacgggcaaccgacggtgagtttgagctccggttctctggaggatatggttgctgcagtgacttggccgtctaccttgccactaggttggacagtcgagtgggaccctacctcagcaggagaggagcatga

SEQ ID NO: 12914 - DNA, 691 bp, Zea mays
  Peptide Sequence Number=SeqID_56289
atggagtcgagaagtgctctatggcattctacctgggagaaaactgaagctacccaaaccaccctcctttctaggccaccactactggccacgcttcccagacactgccagaatgctgcccaaaaagccctccgccaattattgcataactacagcaaagaagtcgctgagacacccctccgctactttccacccagcaacaaaaataaccctacgtggaggaaaagactccaagctttgtcagggagagaacataatgaagatgatcctaccgtaatctacatggccggatatctccacacccttgacacccactttgatgaccttttctcccattgcacccacctaaactcccgggtggaaagcctagagcagcggatcaaagaattgaaggaacaaaatgcaactcttcaaaacagtctcgagatggtagaaggcgaggaagccaacactcgtgaggcatactggaccctgaagatggactatgccaggagaatgaagaggttcgccctagtcaagaagattcggaagcgtttcaaaagccaaggatgccagactgacccgaaggaagaatccctgcccgcactaccttccctagggatagaaaacctttctaacgtcgaggaagtgtccctggctagccttgatgatcttctcagggagtttggggacactttagtaggaaacgctt

SEQ ID NO: 12915 - DNA, 114 bp, Zea mays
  Peptide Sequence Number=SeqID_56290
atggccattcacctcggtagtgaagatcggtatttcctcttggaggagtgctcaggaggagatgctggcaacatggaggactttgaggagttccaggactacgacgagttctag

SEQ ID NO: 12916 - DNA, 522 bp, Zea mays
  Peptide Sequence Number=SeqID_56291
atggcccgatggtggcggagctccatccgtggcggcgccatcgccagcgagcagcgcgcccagggccccgttccaccaaccaccgcatctcggtgctacgcgatgcaacggattccacgaatccaacagaggacttaccagagcgggagatgtcccagacgagtgtccacggcggacagcggcccgcggcggaggcacgatctcggcgacgaatttcagcgcaccacagtcgatctccgcccgcggcgccccaacggcaaccaacccgaggggaagagcaaggcggcccggttaatttatagtgccatggagtcgaatcaggcgatggaatcgctatggccgagaggggaaggagctgactacctgggcccgcttggaaatgagaagtgcgcggctaacacaggggatgtggggctgacgagcgaggtcccattgtcggtggagcgcggggaaggctggccgatgggccccacaggtcagacgcatgttcaacaggtggagagcgcgcgaggtggcgactga

SEQ ID NO: 12917 - DNA, 396 bp, Zea mays
  Peptide Sequence Number=SeqID_56292
atgggcaaggacaagaagggtcagggctcgccgcgtcgctccggtgacaaacggaagcgtgaaccgagtccttcgtcggaggacttcggtgactccgagtactcggaggaggagttctcctccgagtccgagggatctccggggatagccgccgaggtgtggacgtacatccggtccgttgagcgcgccgggctcgagggttcggatgaatcggaggtctcctcagacgaggagaactcttccgactcgtacgaggaagggagcggcggagacggcgatggcggtgatggcagtgacggtggcaagggtggcggaggcgacgacagcggcaagggtggcgacgacagcaagggcagcagcagcagcaaggccagtggcaaagcgtcactggcttaa

SEQ ID NO: 12918 - DNA, 390 bp, Zea mays
  Peptide Sequence Number=SeqID_56293
atggacgctcatggatcaccaagaaataagggtggtcaaaagcatgttaaccggaatgtcttaaacaagcattgggatataaaggaagagtggaatcatctcccatctccaacgacgagccaactgtgccttaggaagagcctcctcagcgagaagctcaccgacggaggaaccgacgccggaatgttcagtgacatcacgaagctggggagcgggacctggcacagcctgtatcccgagatgaaatctcgaaggtgggagaaactcctgacgaacgagtcttcagagaaaggaggaacactcgccgacgtgatcgccggcaggctcaagggcaagctgaacaggatgcgaggctacaccgagagaacccactcttcacgcaaaacctga

SEQ ID NO: 12919 - DNA, 171 bp, Zea mays
  Peptide Sequence Number=SeqID_56294
atggagagtcatgatctccgggcagaaagggaatcacggcttgtgggtgatgagaatgatggttttggtattgactctggtgatggttgtcagcattgcaaccactgctcaggacaagatgaagccgtggaaggagacttccaggagttccaagattacgacgagttctag

SEQ ID NO: 12920 - DNA, 219 bp, Zea mays
  Peptide Sequence Number=SeqID_56295
atgggaccaccgcaagcaccggtccaggcctcggtcgcagccgagcaggacgacacggccgaagaaccggaggatggtcttccgagtggcgacgcgcatgcggcggaagaagagaagcgagtggatcctgaatcagtgcaagctgctgtcgctgctgatgccccaaaaagttctgaggaaagcgaggctgctaatgacgacgatgacgcctctgcctga

SEQ ID NO: 12921 - DNA, 756 bp, Zea mays
  Peptide Sequence Number=SeqID_56296
atgacttcccacggatcctcagatgacgggaatgcactgtcccacactgacgggcttgcacgagagggctttccccgtattttgtgggagccaggctggtgttcgctggactctgagtcctttggataccgggctgaggatacgatcgaggcgattgatctgcacggattgaccactttctgcggattccatcccttggagctgtccacccatcccattggcttgttccccatggagaaggaggacgacccaatgtggaaggatcgggtggagcatgccaaggacatctgggctatctacccgggcctgacggctcacttgacagtgcggtgcatgaatgccctgtaccgtctgcaagtgatgcgtggtgaggcaatgtcccatctgatggcattgctggaggcaacaaagatcaccctggacaacagagaggagcttgtggttgatttgtccactgagatggtggaaaaggacttgcaggtggagcagctgtcaaatgagatccaagagctggaggaattagtgggaaccagagagaacaccattgaggttctcgaggatcagcttatcaacacccagcagcagctggccgaggctaatgagcacctggatatgcatcaccaggagatccaggacatggaggccaacgaggacgtcgacattgagggaggagaggagcctgcctccagcttggacactgctggctcagggagaccaccttcccccgagtcgagtgttgcctcgttcgctcactag

SEQ ID NO: 12922 - DNA, 306 bp, Zea mays
  Peptide Sequence Number=SeqID_56297
atgaggtgcatgagcataaggagccctcaattggtgacaacaggtgctctcactccacactacctaaaaagaatgaatctcatggcattcagtaatagatattcatatggttctggtgctttaaattggtatcttaatgagacaactgatcaaaccaaggatgtaggcaagaagagcttcgaggtaccgagtgcacgggagaaggtcaaggagaccaggaacccaaagccaggggtgaagaagaagacttgcaaagtcaaggttgatcgagttaagagttatggtggatcaaggatcactacataa

SEQ ID NO: 12923 - DNA, 324 bp, Zea mays
  Peptide Sequence Number=SeqID_56298
atggctcaccagatagctcggttcacgcgcggtggcgggcgaccgaagtccggcgaggacgattctgtttctccggtgaggcaatgcctcgactcaagcttggagaagcttcacaggatcttggggaagctatccaagggcttggttgaggctgaaggtctctggaaatggctggccacggtgaccggcgctcgggtggctcgggcgggtggcgcagagcttgccggagctaaggggtgtgtgtctggccagcgagggcttatgggtttcgctgactggatcaagagatatggaggggtgaagttgggtttgtctcactgctga

SEQ ID NO: 12924 - DNA, 705 bp, Zea mays
  Peptide Sequence Number=SeqID_56299
atggcggtgacacactccgggatcccgccctcagcctgcagctgggccgcctacacgacctcccggttggacatggtgtactcaccagtctcgctggcctttcccccaacggcttgcgtgaacacgaggccgacccggcgcatcccaagcccctcggcgatggtatcgacgcgggcctcctcgtcggggtccctcaagaggtgggaccatgtcctcggatacctgctacggcggctcatagataaagtcgacgaagacatccttggtctctgcgtcgacgcggccgtagaggaaaacccgccccgcttgacgctgatgccgaggaactcggcgacggagagctggaacgcgttggcgacatcacggtcaaaagaggcggcggcgcagagcgcgttcttctggcgtgtgacatggatctggcgcgtgataaggttctccctgctgcggcggagggagaagcggattgcgtggcgtgcgggcggttcaaaatgggagggattcgcgggcgctggcgtgtgggcggtgcgtcccccgctcgtcccgcacatcctctctgtcgtgctccgccgcgtcccagaccaggactcctccgtccgcgtcgcgctcgtggacaccgggcgcatcgtggcggcggcctcgcctccaccgcgcttcagcctctcacggacgcgctcctccaccagcaggactagtgcgcgcagctag

SEQ ID NO: 12925 - DNA, 474 bp, Zea mays
  Peptide Sequence Number=SeqID_56300
atggagggggataatgactttttcctcatgctgtcaagatctcggaccccagcaagcagccaagcacttttattccaaaaagggttaggtagtgaaaatgttgttattacccagttctacacaaaattagaggagaaacataaagctttggaagcagagaaggacgaggctgaggccaggaaaaagcgaaacccatgccaagcttctatcaagaagggccccccaccaaaggctgaactgaagaaggtgcctcctacccgtgccaaatcgccaaagtttacaagttcaaggagaaggagctgcagtgatacactattgacacctgacggggaaaataccaatgcaacatctacccaaccacatcgtcatagtatcaggagtcctaaagacgctaacagagtacaacaatgctcgccaaagagcggtgtggcaaccaaaacaagatctgtcaaggctgagctgaaggccctctaa

SEQ ID NO: 12926 - DNA, 275 bp, Zea mays
  Peptide Sequence Number=SeqID_56301
actgtaacctcgctgacggagagtacgtcctcgtgccggagcaagaagctgctcaggaggtagccccggatccagcaccagagcctgcactagaggatctgcctgacactgctttggaaggcaagccccggactcctgttgagatgaatactagtatgctaggtcgaggttctctgaaggacatggttgctggagtgacttggccgtccatcttgccaccgggttggactgtcgagtgggaccctacctcggctgaggaggagcatgaggagtga

SEQ ID NO: 12927 - DNA, 1941 bp, Zea mays
  Peptide Sequence Number=SeqID_56302
atgcgtggccctcgagggaaggatgtcttcgcccgagctccgggagtcttcggcgcagatgctggaggttaccgtggtcgatggcccaagaacgttcctatcccccgcgcggctggtgaagacttctttacgtctcgcatggctcgtgacttgagagtgtttcattacgggcggaatattgctgctgttgtgtcggcagtgatgaccaaggaccgtcaagatgctgcgcagaagtgccgggcggtcgtcaggatggtcgatcccgtgcgcgaggcaaagagggcgcgaggaagcgcgaaggctgtagcctccggcagtggcaagctggtgccagctgcgaaaacggctgcgcccaggggcagcaaagcgtcgacaggcgagaaggatacggccgttggcggaaccaagcctctctcgagcggaccgtcgcctgcgaagctgcctccgccggggaagcgtgttgctgacttcggcacaaatatcagtgtcgacgattatctgggtgggtcgggcgagggacagttggttgttgtcccgccttcggtggcagccacgttgccatcggcggtggtaaaggcgaagggtgccacgcaggacccatgggccgccttttgcgcgagcggcgagattttgacggctgctgccgctagggacgtggcgggcaccatgtcccagcggttgagggaagtgtctcagcagttgtcgcagcaggtgacgcagcagctgaagcaagcggccgacttcgccgaccgtgtcgcgtcgggcgtcctgactacggacgtcgccgccgaagtcgagaatcttcgggcgcagcacgcggatgctgtccgggataagtcagccgcagagagcaagaaccgtaggctgacggagaaggtggccgccctggaggccgagaagattgacctccgacgccggctggcggaggagaggagggaggctaaccaggccgtcgctgaagtgcaggctacgcaagcggaggctaaggtggcactggcgaagggtagcctcgccagccaacgcgccgaggagtgggaggcgaggttcaacgccctgcgcagttgcgtagacaaggccgagacctcggtgcactcagaagtcgtgcggacgcacgcgcagctcgtggaggcataccgcgatctgggtgcgcgtactgcagttttcgaagtgcccgactgcgaggccagcctccgcttccttgaatggttgcaggaggagctgctggtgctcccgacgattgtgcatggcttcatgtcctacgcctccctcgtcacatgcgagggggccatgaacgcgttgtcgcacgaggggtgcaaacactatgaggtcttcgaccagtcagatgacaactttgagcgggagatttttaaggttgaagaccctgtggtaaaggattccgcgggggcactcttcgatcggatgtggggccctcatggtcgagaggcggttagggagcggtctgaccgggcgagggagcagatggcacgtgccgaggatgtggaagacttcggacatctgaatgccacgcagcccgaggcggaggtcaacccggtgctgcccgaggctgaggtcgacccagcaccgccctcggaaaccggtgaaggctccctcgctgcccctgcgtctactgtgtctggtggaggctcatcgccagcccctgcgccgatggcggaggatcccctcaaggcggcggtggagctggcagcagaggatcccatggcggcggctgggtcttcgcaggttcaggattttgggcctgctcatgcaaccgctactgctaattttgtggcggcttcgaccgtggttgctggaaatgaatcagatgagtctgtgtctaagtttcctgagtttgatgattctgggagtttggttgtgtggttggaggagtcttcggatgaggacttggattactttgcggccttggatgtggctgcagcgtag

SEQ ID NO: 12928 - DNA, 642 bp, Zea mays
  Peptide Sequence Number=SeqID_56303
atgggcagaaaaggcaggaaatgtctcgtagttgggagaggtgatctttgcatgagtccagtagaatttgaaccttctgtaagtgatgatttagtactggagcagaaatctggaaatgggcagcatgatgtcagaggcacacatcatcacagaactaggatgaaacctgaaaaaccaattgacttgcttaggaaagttgatggcaataatatgtgtgctgactgtggtgcttcagaacctgattgggcatcattaaaccttggcgcacttctatgcatagagtgttctggggtgcacagaaatcttggagtgcatatatcaatggttagatctctgacacatgatgtcagagtttgggagccatctgtaatcaatctctttcagtcattaggcaacatgtttgtcaacagtatttgggaagagacgctgccagatgataattcaagtgctgatggatcagacacatcacagtacctctctattagcaagcctaaacacaaagatgtattctctgccaaggagaagtttattcatgccaaggattctggctctcatcaagtgactcctccccctcacgctaactttgcggacagatgtctcaattctagtggtggagctacgaacaacaatccaatgttctga

SEQ ID NO: 12929 - DNA, 315 bp, Zea mays
  Peptide Sequence Number=SeqID_56304
atggagacccgtgcactcttgttttgcttaggaatcagggagaagaccgaaagggaaaaggatttgaacatgctggattcggactgcagaagaacaccaacttgtgacggtcaccacggtcagatgcgggctcggattggaatgttcaagcacaacatggaaagcttatcaagtctactttcatatggatccggaattatagacgagtgccctagtggccagggtgtcacgctccacaagatcgttacagccatagaaggtggtgtatcggttgctaaggcgcagcgtctttggaaggctgtagtcgggccgtga

SEQ ID NO: 12930 - DNA, 378 bp, Zea mays
  Peptide Sequence Number=SeqID_56305
atggagagtcatgatctccgggcagaaagggaatcacggcttgtggatggttacgagatcgatggttttggttatgactatggtactgctagtccactacagccaaacaggatacttgctgagtatgttgatgtgtactcacccttgctctacacaccaacccctcccatccccagggttgtcagcattgcaaccactgctcaggagaagatgaagccgtggaaggagacttccaggagttccaagactacgacgagttctaggcgtgggttagcggcaacccccagtcggctgcttgtgaaggccgcgtttatctacgtttcttttccacactttgatttttattgtaaggactatgtggacgtctcagacgtatga

SEQ ID NO: 12931 - DNA, 222 bp, Zea mays
  Peptide Sequence Number=SeqID_56306
atgggatcatccttcttctcagcaggggaagagtcccaagggagtcaagagaacgccaacccggctaaaggggatgagcctccaaagtcagccagacccgacaacgaggacgagtgccctagtggccagggtgtcacgctccacaagatcgtgacagccataggaggtggtgtatcggttgctaaggcgcagcgtctttggaaggctgtagtcgggccgtga

SEQ ID NO: 12932 - DNA, 58 bp, Zea mays
  Peptide Sequence Number=SeqID_56307
agacattatggtgcaagtggctatgagatcgatggttctagttatgactatggtgctg

SEQ ID NO: 12933 - DNA, 159 bp, Zea mays
  Peptide Sequence Number=SeqID_56308
atggcgagagtagcgtgtaccctccgtggcaagaggctggacggtggtgtatctgtgctctcggtgaagaagcaacaaacttttgttgcttctgttccaaggtggtgcccaaagaagaaaatcaagactgaagccgcgggaggaagtgtcctcctttaa

SEQ ID NO: 12934 - DNA, 165 bp, Zea mays
  Peptide Sequence Number=SeqID_56309
atggccatgatgggttcaacatcagaaaagatgtacctctgccagaataagataacacacaatgagagtggagagatggcgagagtagcgtgtaccctccgtggcaagaggctggacggtggtgtatctgtgctctcggatggcatgaacctgatctggtcttaa

SEQ ID NO: 12935 - DNA, 255 bp, Zea mays
  Peptide Sequence Number=SeqID_56310
atgaaggggtgttcgtcctcgccgcagtccggggtcaaggatctagttttaaaagacaaagaacttggaagggagaacgaggaggaaatagaagttgaagaagcaaggactacaccaccaccaccaccaccaccaccacgcctgaagaacctcaggcaggaaactgcttttactttgatatctgtggagcagagccggactctcctatcactcaaggcaagccccggtgcattttacacccccttgttattttga

SEQ ID NO: 12936 - DNA, 183 bp, Zea mays
  Peptide Sequence Number=SeqID_56311
atgggggataagcttcatcgtcgagagggaaacagcccagatcaccagctaacgcccctaaatgaccgctcagtgataaaggaggtgggggtgcaaagacagccaggagaaccctttgaaaagacgttcaaggggttctcaaaaattcgagatagatctaattctgaaaaagatggaacatga

SEQ ID NO: 12937 - DNA, 369 bp, Zea mays
  Peptide Sequence Number=SeqID_56312
atgacggcaagcatcacgcgtagtggagaagaaacagagaactcgacgttgtggaatgcgtggctctacagcggcttctgcacggtggcgttcggtgtcgacgacggacagagcagggcggcttcaggtgctgcacgtcgggcacctgggcgcggcatggcggcgcggcgcggtagagagagacacgagggggaaggagagccagggaacggcaggcgcacgcaggggcggttgcgcaggatcggtcgtctggcttcctggcggcggcgtgggaggaaggagagggacacctgcgggtggggcccgcaaggcggtgagtggaggaagcggcggccgcctgtgcagggaagaggcgcgcgcgcggcttag

SEQ ID NO: 12938 - DNA, 153 bp, Zea mays
  Peptide Sequence Number=SeqID_56313
atggaacgggggcacctgacaagcgcttatagtaccggctcaggcagattggatacaggcatagttcccaaagctttaccctgtggactggactataagttggttacgaagtttgcagatgaagattatgatgctgaactccatggatgctag

SEQ ID NO: 12939 - DNA, 483 bp, Zea mays
  Peptide Sequence Number=SeqID_56314
atggcgagagtagcgtgtaccctctgtggcaagaggctggacggtgggttgtccaaggtcagttggacaaggacaactgtaggtgggcctaatgacttgggaggttccgtcacagctggtatcggagcgaagcccatctcttcagatatcatgaagcatttcaaaaagaattttcaaatacttacccaagaaatattctttcatccttaccttgccactttctggaagttctcatcttgcaagaccagggtgtgggcagaggacggtcagcgtattaatgaactggcagctgacgtcagacgcttgcaagacgagctttctgaacgggatctggcggttgattgggccgtcaactcacgttcgattgcttgggaccgtgaaacaaaagctcgtgatcgtgtgaccgagcttagtacgacccttgacaatctgcaagtatactgcaatactttacatgaggaagtacatgtattgtatgcgtga

SEQ ID NO: 12940 - DNA, 267 bp, Zea mays
  Peptide Sequence Number=SeqID_56315
atgaagaaaatgatcaagcctcaacatcatcctccgaggacgaagaaatattccgacgcgtcagaaaggtcaaggatcttctctttaacattgacaggaaaatgcaaagaaagagaggatgcttcgcatgtggggagaagagccatttatgggataattgcccaaattcggttgaacccaaaaagaggagaagcaaaggcaaggcgcttacaagtgtcaagacttgggatgattcttcaagcgaagatgaacctccaaaactcgtag

SEQ ID NO: 12941 - DNA, 531 bp, Zea mays
  Peptide Sequence Number=SeqID_56316
atgggtaggggtaagagggccaaggattggccccaccatgccaacggcaagcgcaagcgtgctccaagtcctccctcggaggattttggtgactcggagtactcggaggaagcttcctccgagtatgatcgatcgcccgctcccgcctcccccatggcatcgttcgaggattcggatgactccatggggctgtccactacggcccgagcatactggcgctccatcgagcgtgccgggctcggtgggtcagatgacttagaggaggtctcctcggaagaggtggactcctccgactcttctaaggagtggagcagcagcgaaggtgatggtggctacgacgacgatggcaagggcggtggcggcggcgacggtggcgacgacaatggtgatggcgagggagatgccaaaggcaaagacggtgacggcgaaggcgatggtagtgacggcaagggcgacggtgacggtgatggtggcaaggcgacggtgacggcggcaagggcgacgacggcgacgacaaggccagtagcataa

SEQ ID NO: 12942 - DNA, 306 bp, Zea mays
  Peptide Sequence Number=SeqID_56317
atggctatgactgctgcgatgatcggctacttcatcttcgttgacgcgtgcctgcgttggatcgctattctagctcttcttccactactctacgcttctaatggatgcgatgtgaatggcactttcaagcatgatagtgacggcaatcaccacaagaaaagagacatggtgatggagatcatgagggtaccatggtgttggggcgaaggtgtaacaccccctcgttcgattgtttcacagcagaagcggaacatgtcagagggaaagcaagagcaggcgaagactggaagagcgaaagccccatga

SEQ ID NO: 12943 - DNA, 1551 bp, Zea mays
  Peptide Sequence Number=SeqID_56318
atgttgaatgcaaatgctatgcggcagaattcagtgtttggagctctacagatgggatatgtgccgcagtacaatggatttggctaccagccacaaggaacctacgggcttatgcaatacccacctctatctcctgtgcaaaatcaagctgccttccagaatatggtccagcctattaatcaagcaagctcgacccgtggagctaattctgaacttccccctgatttagttcctagatcatttaattccacacagttgggaagcccctattcgcctctgcctggcttgcagtatcctggagtgtatcctggtggccctattaatcatcgccccttttcaaattctcacagttcaaccaaagttcaaaatttaaatgctaatttaccgtcttcaagtcccagcagcaatcctgccccccagatagagggccctcctggagccaatttgttcatatatcacattccacaagaatttggtgaccatgatcttgcaaatgcatttcatagttttggtagagtactgagtgctaaagtttttgtagacaaggcaactggtggcaagcttcttgtagaagggataacacagtgcgctgtttggcacaggcacactgttctccagcagacccagcaggcgcgccgcctgctagatgaccttgatgccgtctgccagcggatgggacgggacacattaaatgctgagagggcacatcacccgtcaacgcagtggcaggcggcgcgtcctctcctcaataaatgcaggggctacacgactttacgtcaggctcgacccgatggcttatgtcatgggccacaagcggcgggccttcgcctgcgcggggagcggagaacaaggcctgcacacgtgtcagcaccggacccctgcataccccaaggtccttctcgttccggacccctgccggggttcggacctcccccggggctccggacctgcatgaccagtgtatttatagggctagctggggttggtggacctaaataccgttatgccttcggctaccaactatattctcgacatgcactatacaacgagaatgccgtcgcctgcgaccacatggtgcgatgtcacacccgggtttcgagggcacaaagacccgtgcgcgagataatcaccagggtggatgcgattgaagtagggggttacaagcgtccgcgagggagagagagagagagcctgttcgtcagcccgtcctcccgcgcgaccacctcctcgtacgagggccttggaccttccttttatagatgtcgagccctggggtcgggcgaggcggagaccgtcttccaaggtcgaggcgggggccgagccccggggtcgggcgaggcggaggccgtcttccgaggtcgaggcggaggccgagccccggggtcgggcaaggcggagcttcctatggcgcctgaggctggactcggctgctgtcagcctcaccttggcgggtggcacaacagtcggagcagggcaggcgacactgttttcctgtcaggccaatcagtggaggggcgaagtgactgcggtcgcttcggccctgccgactga

SEQ ID NO: 12944 - DNA, 600 bp, Zea mays
  Peptide Sequence Number=SeqID_56319
atgcaggtggcatgcaactgtaccacggagacgcgccctttcgacttcgacacatccagcatggaggcccaggcccacacgtcatggaccgggaaaggggatactccgaaagggatccttctccgcaaaggaagcaagcctcgagccctcctactgatcagagccgcttcagagcactcgggctccgcgcccactactgatcaggggttcgaaggctggccccccgaagggttcgacagtcgccccagaacacgcagagcgagggatgactctgggtcgtccgatacatggccgaggctcaggctacgctcccgaggtaccctaggacatttacgagaccagcaggagcgattctgtaacggaatcccatcagagggaggcatcgagccctcggaccctatgaaacgggaccgggtccggcaaatcacctgcagaggcttgggggctgctctcgcaaacctggctccggccaaaccgttgacagcgtcaacataccagcctgagaactcggaacctaaccatgcacccgggtcaaggcttcgtccactcaagggacacgatctcgcctcgcccgagcccagcctcgggcaggaacagtag

SEQ ID NO: 12945 - DNA, 753 bp, Zea mays
  Peptide Sequence Number=SeqID_56320
atggtggggagaagcaagccgggctgcggcctctgccccgccctcagcttcaaggatcttcatcatccttgctggggaggagggcagggcgagccggggcatgcctttgcgtgggctggcgtcccgcttcttcctccggcatctgggggtggaaaccatcctccagttctgcggaggaggcgtcctccagcgatgcgggggaaggcgaactgctgctgcccggccagggtgcagcgttccgtcctctatccgggcgactttggtcggccgcaccggagggtctcacaacacgtcgtacgccgcgagggcggtactcgtgttctgggacggtcccgttctcgttttcatggcgacgacgggggtgaggacctgccggtgcgctttggggcgaccgacgcttgctggtgcggtgttggtgggcaggtggacgccgccatcggcgctgaggtggtggcagccagagaaggtttctccgccgacgagatcgtcgacgccatctgcgctccgggcctccggctctttggctttgatagcttgtcctcgcccctcgagtggggatgcgggcgagggccttgtcgcagcagcgtctgccctgaggtcatcgctgctgctgtttggccgcctggagcggaggtcgttgtcgctgctgatggagcggtcggcggcgagccaactggagttcgttgtcccgcaggccctccggtgtggaggttgttcatacccacgggagtggaaccagagttccgtttgtaa

SEQ ID NO: 12946 - DNA, 378 bp, Zea mays
  Peptide Sequence Number=SeqID_56321
atggagcaagagtaccagagagaaggtcacacgtctcacaagcctcacctcgcgcctgcgcgcgaccatgaggatcgcctcgccgcggcccaacaattcctggacccgaccgccgtggccctcatcggagcgatggcagcatggaagctctggcgatggtggcatcgagtggcggcggcagaggatctagaggggggaggaggaggagacgaaggacgagagatcaagggggacagcaggcagcggctccgcgagagttctacatgggatggagcaaaatggacggcccgcgacgcagatggaacccacccggacgaccacgattttctgtccggcgtggaccagcccacaggcaaaggattccacctagttttataa

SEQ ID NO: 12947 - DNA, 177 bp, Zea mays
  Peptide Sequence Number=SeqID_56322
atggcggtcaggcgagggatccctacactggagcttcctagaaactgtagcgagttttctgaagctaatggaactttgttaaggactcgtagtggaaccctgcctcgcttccttggtagaggtgaagagcaggtggtcgaagaggagccgcacaacgaggagttcgacttgatctag

SEQ ID NO: 12948 - DNA, 450 bp, Zea mays
  Peptide Sequence Number=SeqID_56323
atgtcgctatgtcaaagctccctggatggtggcttcggcgtgtaccttcgcgcttgtatttgcttatgtgctgatcttccgaaggtgtttcttcttaaaggaccttcgacgacgaagcagtcccccaacaattgcattgtatgtaaccgaagcctttgcaaatatgatgtccgctacactgcccgtgtcaaccaggacgttgtggaccagaaataccttgataacacaagagataaccatggcatcattgtgaggatagtctttaagctgaagatcttcctaggagaagctggttctgagcttgaaccgcctgtgattggtagcaccagcttcgtaaccgaaggtgctacaacttggttgttgtatgaagccatcgtcacaacagtggaagtgagttcactggaggtgggcgccaatgttggtcacttgttctcaaaagctatgaattaa

SEQ ID NO: 12949 - DNA, 1043 bp, Zea mays
  Peptide Sequence Number=SeqID_56324
cctccgcagccgccgtgatcgccgccaccgcccgagcgacttaccgccaccgcccgagcgccccgcccctctgctgcgccgcccgagcgcccctcgccggcggctcccaggcacggccgctccctcgccgccgcgcccaagccgctccctcgccgcccctctgccgccacacccgagccgccggagcgccgccacgcccgagccgctctctcgccgcgccgctcgagtgccgccacgcccaagccgcccggcccgccgtcctctgctgctggctgcgccgcctccccgcgtcgcccgccctgccgccctctgctcaagaagagtttgcaagctgggttgccttggaccacgagaacaggcaaccgtcagacctctcccctgaggagtcatgccctccagaggaggccttcttccttgcaaatgatcttcttgatattgtgcccgctgttgagtcctttgctggctcaagatttgcacccagcatagtttctgctctgaagcaatggctgcctgtgctcttgttgggtcttgtatgccggtggctaattggatcacataatgaaatggcacccaacgtattccactttgctgactctgtcttaccactgtgggtcactaccgtggcaaagaatgagcttgttgattccaaagagcctggccaggacgagcaaagcaatctgactgcagagggcgaggactcactgttatccagaaagctagcagaaatgatggcgatcctcttgaagaaaggaagccccagaatcctcgattgcgcgagtggagtccttctgtccactttccagttgacgctgcgaagatcagactatgacattgtcctgggcatgactcgtttcatttgtgacaagttgcttgggaacaactccctagcattggaaaagttgcagcttacccgcgactttcttcatgagaatttcctcgagattgataggtatgtccgcgatgagcttgtccatgatgacgattcgaggcagcaactggagaaagcaaaagcgttgataagatcagttctcaccgatgtctga

SEQ ID NO: 12950 - DNA, 237 bp, Zea mays
  Peptide Sequence Number=SeqID_56325
atggggtgctgttggttctcgctcgtccttgtcctcgtgctgttgctgccaagctgccaggcttcgagttggagaggcgtgcaggtgcagccgttgaaggcccggccgccgctgcagggaggcgcatcctccaacagcttcctcgggttcctgccgaggcaggcggcgccgccgtccggcccgtcccggcagcacgactccgtcggcctcgagagccagcggcagaggcagccgtga

SEQ ID NO: 12951 - DNA, 297 bp, Zea mays
  Peptide Sequence Number=SeqID_56326
atggaggctgctaaccggttgatcggcgagggacgaggagctgctgcaggagttctggaggggacaacgagcggggtggtgtacatggagaagacggtggaggacgcggagggcacggcgtccgtggtgcgcgccatgagcgagaagttcgacctgctcatcgtgggtcgttgtccctgtgccttggagtcggatcctcggaggagggagagggcgaagagtagggggaaccaaatcttgaagggtaacagagagttctttcgtggaggaggaaggggggcagcaggaggagggtag

SEQ ID NO: 12952 - DNA, 1122 bp, Zea mays
  Peptide Sequence Number=SeqID_56327
atgacgacggcggctctcagccctcttacggaagcaaggagacgtcagcaaggactcgacagccccgacagctgtccttccgccaggctccagcgctcctccgacggccacgacatcacacgaacagggtgccaaaacctctccggctgccacgacggcatggccctcttacagagggttggccgcgcgggggaaggacgggacgacgcgcataagcctctcgctctctcccacgcggacgcttacgctcagatggcactgtctgacctggtcttcactctagctattggaagaccagagctcataatactggagaagtggagaggacagagaaggcaggacgcgcaggccgtgagcaagcgcgatgcggcgctggagcctggagccctggagaggaggtgcggcgactggagcctagagaggagtcgacagagccgaagtgaccgcagtcacttcgccgctccactgaccggcctgacaaaaggacagcgtcacctgcgccgctccgactgctgtgccgctcgacagagtgaggctgacaggcagtcaggcccgacctcaggcaccataggaagctccgctccgcccgacccagggctcggactcgggctcagccccggaagacggcgaacttcgctccgcccgacccagggctcggactcgggctcagccccggaagacggcgaactccgctccgcccgacccagggctcggacttgggctcagccccagaagacgacgaactccgctccgcccgacccagggctcggacttgggctcagccccggaagacggcgaactccgctccgcgccgacccagggctcgggcttgggctcagccccagaagacgacgaactccgcttcgcccgacccagggctcggactcagccctggcctcagccgacggtctccgcctcgcccgacccaggggctcggactcgaccacggccacggaagacagactcgaccccgacctcggaggagcctccacatcgcccaacctagggcacggaccgaccacgtcgacaggaggcgccatcattaccctaccccaagctgactcaggctacggggaacaagaccggcgtcccatctggctcactccgccagataggcaatga

SEQ ID NO: 12953 - DNA, 630 bp, Zea mays
  Peptide Sequence Number=SeqID_56328
atgtgccgccaccaacggactgggaagacttcagctgaggttgtggagatagtcccctgtgctaggaacaagtggggcaactggtgtgatttttggttctatgtggctcccggggatgtcgaaggcttgccaagtctgcctccggccatcctatgctcacattgttatgtggcatttcctcgattcgaggtggtggaagaaaacgaagaggaaggggccctccgatatgttgcccacctgagtagcgggcgcgacctggtggaggagtttattgcctatggggtgtgggcccttggcacatggttggacgttgggcaaagtgaccccccgccggatgcctacttgggcggccagatggtgcaaagtctagccttcgcagtggatctacgcggtcgcgacgcgaccgcgtttgtgtgtgaagtcgaggccgaggccgtgaaaattgtagggaagtatgtgccaaagacagagactttaaggagtcgggacattcgcggttcaaacgttaggctgaaccgtgtttttgagttaaaccatttgtcgtatggtggttacccgcgggggactatgccgacgttgctggccgctgggggaaacaagcgatgtcaacggccgacgagggccccttga

SEQ ID NO: 12954 - DNA, 297 bp, Zea mays
  Peptide Sequence Number=SeqID_56329
atgaagggtatgcccaacgttattcagagtctgatgaccttctttgcccatgttatatacaagggcaattttgaggcattggtcgcaaagggtgcagccacaaaacatgttgaacaaacctctgggcttctccccttcatcttcattggcttattattgcacacccagaccatagaaccgaagcttcctggctctgcttctgtggctctctctttcactaatgatgtcctaacgatgggattaatatttgctaatcacctcactatgcaactgggtcttacaagctctatggaatga

SEQ ID NO: 12955 - DNA, 399 bp, Zea mays
  Peptide Sequence Number=SeqID_56330
atggctggtcagaagcttgataacgtccttaagattgtcaccggcctggccaccaaatttgctgacctctccacttgcatcatcgatatggagtctcaccccaccgccacccaaaccaccttccccaccagccagccggagttcccatatggtagaaggccaattcggtccgccgacgaggcaccgacagatcgacctgctgcagccggtcgcccgggccccgctctcagcgtgcgcggcgggggacagcctgggcacagcgacgcgacgtcgacgtgcacactcccgcccttccgcatccgacggcgcttggtctctccatcggtcgcgccaacggccgagatcgcccgtactcctccccgccgttacgtgcagcagctccacagtgaccggcgctag

SEQ ID NO: 12956 - DNA, 543 bp, Zea mays
  Peptide Sequence Number=SeqID_56331
atggcgacaagcaatcctagcaggggcatggcgcagagattcaactgcctcagtcagcggagacggcaccaacccaccatgtgctctcaggtctgcgatccctgctttcagatccccttcttcgtccctttgctcctgaagcgcgtccccttcttcctccctttgcgctccctttgttcagcgaagacggcaaccagcagtaggaactgtgatgttcttgttgtggtggtcagatccatgagtcgtggttctgccctcaccggccacaaggtggaggagctggcggccataggaccctccctgggtgcagaccacgtcaacaccagtgcccgcgaagaggacgtggagaatgacctgtcaacccaatatcatccaacctgtcgcgtcgtcgtcctcgctagatatccgctcgctcgtccgtcactcaactttgattcatcttccttccatctgcttctcttcctctcaaaatctcctctgaatttagttttgtcggtgctcctaaataggtgcttgcgaagatggcgagacagggacatgtga

SEQ ID NO: 12957 - DNA, 93 bp, Zea mays
  Peptide Sequence Number=SeqID_56332
atggcgagcgaaggatggctggtgacgaagctcgaagtcaccttaagccggatgacgaaactgaagtatgacggcctgaagcttgatagttga

SEQ ID NO: 12958 - DNA, 390 bp, Zea mays
  Peptide Sequence Number=SeqID_56333
atggagttcccgacaaaggtggggttaaggttgtcagttctatcaaatactgcttcagttcttcgaaggctttttgctgagttggtccccattgaaagactttggctgatttcagcacttcgaaagaatggcaagttcctctctgctgatcttaaaataaacctattcattgatgccagccttcctgttaacatctgggcaccatttcttgactttggtggctccattcaaagtataacttctatcttccttggattagcttcgataccctttgttgataccaagcagccaagaaatttgcccttcttcactctgaagacaccattttctggatttattttaaggccagtgtggtggaactgcccgaattattccgacttaagtgcctaa

SEQ ID NO: 12959 - DNA, 177 bp, Zea mays
  Peptide Sequence Number=SeqID_56334
atgggcaacaatccatggggattggtggtccacgggataaaaattggaataaggattaaggtgtggtaccgttctctggaggacatggttgctggagtgacttggccgtccgccttgccaccgggttggactgtcgagtgggaccccgcctcggctgaggaggagcatgaggagtga

SEQ ID NO: 12960 - DNA, 192 bp, Zea mays
  Peptide Sequence Number=SeqID_56335
atgaagctcccagagcaaggaatcgaagtctgcttcgccggagaagccagtccacggtcgccggagtgcacaaccccgccggagtgcgtggaccgggacatggttgctggagtgacttggccgtccatcttgccaccgggttggactgtcgagtgggaccctacctcggctgaggaggagcatgaggagtga

SEQ ID NO: 12961 - DNA, 870 bp, Zea mays
  Peptide Sequence Number=SeqID_56336
atgcatgacctcctacttgtgttagggctgcttggctattctggttggttgccggggcaggaagacgagctgcctggttgttctgaagctggtactggtttcctcccggctgagtgttttgacggtattgctgctgctactactgctgaggaaactgcctctggtactggtgctggtgctgactttgatgctggtgctgactttgatgctggtgctggtgctgactttgatgctggtgctggtgctgactttgatgctactgatgatgttgatgctggtgcaagttgcctgagtagcgggaacggctgctactcccggcctgaggtccaccaatcttgcgttttctgtcctccattcccgacgcttccttccagtcatgattgctctgtctatcaaatgctggaaggtggggaaagtgtggttcatgagctggggaccttgcttcatggcgagaaactccttcctcactatcatcagtccctcgggcacatggtagcgatggaagttgtccctgaactcctcccaagtaatggcttctgggttggcatgggtggcgaggcacctatgtcatctggacttgcacttgaggctaaggctggggtggctgctgctgtgcctgctgcatcgctgctaaggtttgaccaattgcctggactacttgggtctgcatcaagaacatttgctcaatggtcattgggggtggcgggggcaaatgctgctgcggagctgcctcctcctggggtgcctgttgctctggctgagcacgcctcgcacctctgcgcctgttctcagacatctgtagaaaccatacacgtatcaaatctgactctgcagtctttcagcataagaaagatatacggaaatctttaa

SEQ ID NO: 12962 - DNA, 397 bp, Zea mays
  Peptide Sequence Number=SeqID_56337
ttctggctttcctcagcccaactgcatggtgtcgctgacacctgggagcggccgtcaacctcttgtccagtgcgccgtggaatctagcggtcctcttttggctgatgtgcgggtcccgctgatcggctacacaggacttgtgcgcggccttcggtcacctacagatgggccccaactggcgggtttggcaccaacctcgcgtgatgaccgcaatagcttcgcacgcatctcctccatgccgagatctttggacaccaaaccacccatgcgagttttggggcgcgatggtggattcgccggtcatggcaccgtcgttagggctggcggcgtcgccgttaggatggttcaaggagagaagaagggtgcggggccattggatccttgtcggatggcctag

SEQ ID NO: 12963 - DNA, 606 bp, Zea mays
  Peptide Sequence Number=SeqID_56338
atgccctctgcaccacctcagggcatcccggctgctgaaggagaccctgacggagacggagacgatgatgacaccggtggcagttcgagccatggcatagagcgctcggaggagccggagccggagggatggatcgctagacccatcactcgtgacgctactcgtgggtgtcacttccacgacgctctcgataccctgttgcgtcgggcctttgaccgacacacttggtccatcgagtaccgttgtgtagtctaccagcatcgtcgcggggtagttgatggccttgacctgaagtactaccctcaccattctaccggcagtgctggaggtgtgattgtctcgccagttggtgagggcaatcccaggctgagcagcatggtcaacctggctgccgtactcaacgcagagttggaccacacctttgacgagttaggcaaggttcgggcggaggttgtggaattgcatgctgagtgcgtggcacgccactatcttgatggtggttctcccgcccctatagggattcagcacccttaccgttcactgccccgtggtcgctttgactatggtaccctagactgcaggacccgcatagatttagatccatag

SEQ ID NO: 12964 - DNA, 375 bp, Zea mays
  Peptide Sequence Number=SeqID_56339
atgaacgtatgtgagctcactcttgctgtctcacaccccccacaggtcaagaacaggtaccacaggatgaggcgcatggaggatgtttgtgctatgttcgtgagaggtgtgagacttgatcccagcacacctggtgagtatttcgtgtccgggttttggacccctaaaactggatgtgacactccttcaagactagaagcatcttccagccacagggatatctataatactcctgattacctgcaacaacatgggttcggaaaccctgagtatgaagtgtactttcgcacgtcttactcgactaaggaaaaagactttcaaggatatgttggatttgggaatcaaggaaaggcttttagcaagaatcagctttaa

SEQ ID NO: 12965 - DNA, 207 bp, Zea mays
  Peptide Sequence Number=SeqID_56340
atggcaatcgatcgggcttgcgtctctggccgtggaagggagactaggagcatcgccaggacacgggaaaattgtacctatctccgaatcaacgactgggcgattggtgttcaacgaatttctccccagagattaactccgtcacagatcaaggccatcccgtggccagtagtctttatcgcaccaattccgatggatattgtttaa

SEQ ID NO: 12966 - DNA, 741 bp, Zea mays
  Peptide Sequence Number=SeqID_56341
atggaccagccactccggcccatccccgctcaagccagctactcaaccaacttcccagagtccgcccctacatcacctagtgaagctcctcgaacaatccaatcaaactctaccaccgtgtacaggccaagcccctcgccgccgacgacctcgtccgcccccgcacgtggccagcacgactccgaccacctccggccaaaccaaagctaccgacgtgtttgccacatcctcccgcttctccccgacctcacccctggaacactaccgacgacgttaagcggcgccgccgtgatttcttcacggaacactgtttcggccgagagaggaccgcaggttgagagagggaatagcggcgtttcgccgaggagctgcgcagcgaggggaaaggagaagcttgctgcaagggggctgctcggccatggagatgtggtcggggcgagcagcacggcgagggcattagctccctgttctagcgcccaggatagggggttcatcggggcgccatggaagggagaggtggacgagctgctgctcgccgtggagcaggggagaggcgcttctgctgtttgtgagagctggagcttgggagagggagagcagaggcgctgcgcggggaagaagggcaccatggctggggcgtcgggcttcatccctgagcagggcgtcggccccaggggaactactccctgcgcttgctgctcgctggaggaagaagaagagggcctgctggggaggggatga

SEQ ID NO: 12967 - DNA, 759 bp, Zea mays
  Peptide Sequence Number=SeqID_56342
atgaccgaggaccctttaactggtcacatgcctcgtcatgggatccactttagtaagcatttctgcaaaacagagtctttgattattgaaaagcctcaccttgactcccttaaccagcatacccttgagagtcttttctttagtcggttatgtaatcgcttccgcatttctatatctctgatgttctgtaatgtctgcaagacaggtgaaacgttcctggaaagtcaccagctggccccaaggcaggataatagcagtagcggaagcaatgatcctataggggatcttgaagctgaagtaagtcggctccaagcggaactccgccgcaggacgactatctgggtcgtagatggcgaccgcataaatgagttgagaagagatgtccgccatctgcgagatcagctcgtggaccgggatttggcacttgactgggttgttcaatcccattcgcttgcatgggacaaggagcaaaaagctcaagctcgagtagccgagctcaacttgaccgttgaagaactgcagacatattgcaataccttacatgaagaggttcatgtattatattcgcaactgcatcccagtgagcctacgaatcctgatgagtcggaagccggacccttgcatgttgcgggacacgcgcttggtggtgagttagaccttttttcagccccctccttctatgaggctggtcgacgaatggtctcccacacccgacgacgaggccgccaaaagcaatgggaagcaggaataatggtgtag

SEQ ID NO: 12968 - DNA, 618 bp, Zea mays
  Peptide Sequence Number=SeqID_56343
atgacctggaatctacgtggcacatacctcggcgccatagatcttggcaccgaggtaggcgcccggtcaatgatgcctacctcggtgccaagatctatggcaccgagagatatcagcctgatttataggatgtctaggcgtggtaaatctgctaaacaaaggaagggtcctttgaccggaactgccttcgacccgctgcctttgccaagtggtgttccagtgcctatgtgttattgtggtgatccttgtaaggttgataagtctgaggatcatgacacctatcgacagaggtattggatgtgtgctaactttgcatttgagccaactattgttcaacgtcggatgaatttaatgattgacacagaaatatcagggaaagacaagaagtggttggagaatcttaaaaagtgggatgcagaggacaaagagaggatggagaaaagacgagaggagcttgctgctgagcaacaacgtgaagacgaacaggaaatgaggagtgttgctgaatgcagggaagagaaggagaagaagcttgagcgtctacgtcgtgcaaagaaagcaatggaggagaaccctgatgcatttcgcaagggcaaatggccccgttgcactcagtag

SEQ ID NO: 12969 - DNA, 858 bp, Zea mays
  Peptide Sequence Number=SeqID_56344
atgagttgcacaacaacagtgactacaggcggtaccaagcttggtactagggtgcaactcgttgacattgatcgccaacttttgactgtgggcgacaccagcatgcacagcttcttgcagcgtttatctaggcgcctacgtggagctgctgctcgctgtggctgcaggactaatgttgcacatgacatccatgtaccatcgtgtaccgacacaacaacgccctccacaggaatgggtgctggcttcgactacgatcacgacgagataggaccttcacagcttcagggggctccttcgacacaaccattacaaccacaagatcgtaggcgacaccgctctccacaacgttacactccaggcaccgacgctttaggcaaggggtcttctaggggcaagggtgcgggaaatgagagacgaaaggatggagggaagttaactccaatgtgtttcgatggccctcttggtccagatttttttgaagaggcggtttttaactttccagttcaaagtaaaaaagatttcaacaaagagcattcattggtcaaggagaattgtgggttcactcgttgggtagatcctcgtccgatttttcctcatgcggaatacatatcctacctacagaataggatatttgatctagagagggaagtaagcaacaaaaatgacgaggaagaaagagacaacaacaatggtggtgcttcacaggtgcaagtatgcccagatccatattgttgctgcccttgtcacaacaagaatgttggtcctccgtcgtctccaccgcacccacagcagacaacaacaatgggaggatactatggagaaggatccacacaatttggaatgtgggagcactactag

SEQ ID NO: 12970 - DNA, 237 bp, Zea mays
  Peptide Sequence Number=SeqID_56345
atggctagagcacaccttggcactacacactatgatcacatgtggaagaacttaaggagtaaagactgtaaccttgctgacggagagtacgtcctcgtgccggagcaaggagctgctcaggaggtagccccggacccagcaccagagcctgcaccagaggacctgcctgccactgctttggaaggcaagccccggtttatgcataacatgttatttatgctatcttacttcacttaa

SEQ ID NO: 12971 - DNA, 135 bp, Zea mays
  Peptide Sequence Number=SeqID_56346
atggcagtcggggtcagtgaggcattgtacgccaaggcgcacttgagtggatttgatcttggaatcgcgagatacgaggggcgaagttggtttagcttgaggggtctttttgagaattttgcaaagctccactga

SEQ ID NO: 12972 - DNA, 357 bp, Zea mays
  Peptide Sequence Number=SeqID_56347
atgaacaatacccccgtactgttcacactgacttggactcgcttgtgcatcacgcttgtatttttgtcttctgtcaagctgaagcatttgagaacaagtccccaacagctgcaatatgtccagggcttcaacgacctctgccaatacgcgggttaccatgcagactcttatgagaagaagagggaccgcttccggaggggacttagtaccaaactccgtgagcgccttaacactgttcgagccaacaactacaatgaactggtcaacctggccatctcccaggaagactgcatcttagcccatcgagaagataagaagaggaaggcaccgatggcaggatcctcggcccaaccctag

SEQ ID NO: 12973 - DNA, 174 bp, Zea mays
  Peptide Sequence Number=SeqID_56348
atggagagtcatgatctccgggcagaaagggaatcacgacttgtgggtggcaatgagactgatggttttcgttatgactatggtgatggttgtcagcattgcaaccactgctcaggagaagatgaagccgtggaaggagacttcaaggagttccaagactacgacgagttctag

SEQ ID NO: 12974 - DNA, 444 bp, Zea mays
  Peptide Sequence Number=SeqID_56349
atgggggagaagaaagggcgccgtgggaagcttctgcaggggggcccgaccatggacagcgaggggcgagctgcagagggcgtccatgggagaggtttggggtttcctgcgcttgaggagtccctgcacgtgagcagagtgggagggcatgcgcgccgtggggaaggagaagcaggggctcgcgtccatggagctgaggaacagggagccatggagggagcgtacgcaggggcgtcgagtcctaagcgtcccttggccacgggcagggaagagcagggggcggctggagatacgccggcgccatggacgccagggaggagcttcagcgccgaggaagaagggcgccctactgcaggggcgtcgagcgccatgggagaaggagctgcgctccctgctgcagccgtgaggaagaaggagacagggaaaaaagaaggtagcggctag

SEQ ID NO: 12975 - DNA, 697 bp, Zea mays
  Peptide Sequence Number=SeqID_56350
atgaagctgtggaaggagacttccaggagttccaagattacgacgagttctaggtgtgggttagcggcaacccccagtcggctgcctgtgaaggccgcgttatctacgtttcttttccgcactttgatttattgtaagaactatatggacgtctcagacatggctcgacttagacacactgcacgaaagtcagtcatccccttcttaccctcccgccttgctgagcgtccgcttcgccgtcccgtggccggacagtccagccacttggagagactacaccaccgcctgcgtgaggagcaggagcgtcgacgacaggagcagcagagctcttccttctcgctccaccaggagatagagtctgtgaggagctgctcccctgtgcttcctctggagccgccccctgcaccaccactgggcgccccagcttctggagtagctgctggaggagacccagacgacggagatggcgacgacagctcgagccacgacaccgacttctctgctaaccctgagccggaaggatgggttgctcgacccatcactcgcgacgccgctcgcgggtgtcacttccacgatgcgctcgacaccctgctacgtcgggcatttgaccggcatacttggtccgtcgagtatcgctgtgtggtctaccagcacagtcgcggggtctacccggatcgctggggaggcaacttgcttg

SEQ ID NO: 12976 - DNA, 207 bp, Zea mays
  Peptide Sequence Number=SeqID_56351
atggcgtgcgggcggctcactgtgcttccccagcggtcgcgcgcgtcgatgttggccttccaagtcaagattgtggattttgtgcagggtgaacgctgcgctaattggacgaatgaaagtcaaccgagagcttaccccggaccaggagcaactggcctccgccgccggtgccggagcgttgccgtccccggtggccagatgtgctga

SEQ ID NO: 12977 - DNA, 728 bp, Zea mays
  Peptide Sequence Number=SeqID_56352
atgggcgtcgccctccccatgctcctgagcgcgctgggcagagaaatttcattctccctggatccatggcgcccagcgcaggtgctccatggccagcgcccccctcctactcctcgcacacgctacatcgcccagctcggccttgccatcgcgcagggaagagtaggcgcctctttcttccacctatggccgagctccctgttcccctgctccatggtgccccctgcaatgtccccatgctcctctccatgtttcaacgcccagaactcgcgccctctctctggtttgggtggaacagcgccctccctgttcatcttcctcccagtcggcctccctcccctgctgctgcttgcccccttcctcctttcccccctagtgcggcagccatggcgtccaagttttctgcgcagcgatgtcggtccaaaacagcagcctcggatcccttctgcaccgtgtgcttcgctcgatctatgcagtcccgacccacgccatcgcattggtgtttgggacagcccatgccgtgtcgtcgatctgcgcagttcgaccgtctacgcgtctcactttgcccgatttgtgcagccccatccgcgacatcgttcacccccggagaggaatcccgtgttttgcgtggaggagaaggcaagccgcccaacgctcgtcgatgttcggagcgatgcacaaatcggaatcgccatcgttcttacaaacaccgattgggtttgtttatg

SEQ ID NO: 12978 - DNA, 225 bp, Zea mays
  Peptide Sequence Number=SeqID_56353
atggcgcagtcggtccgaggccgaggtcgggcgaggcggagacttctcttgaggccgaggctgaggtcgggcgaggttgtgactcctcctgaggccgaggctgaggctgaggccgaggcccaaggtcaggcgaggcgaagatcttctccagaggccgaggctgaggccgaggcctggggtcgggcgaggcggagaccttctcccgaggccgaggctgaggcctaa

SEQ ID NO: 12979 - DNA, 228 bp, Zea mays
  Peptide Sequence Number=SeqID_56354
atgttcagattgcaggtgacaatgagactgatggttcttggttttgactctggtaatggtggaatcattggttctatggggatgttatgtgattctacgcaagatgtagaaacaaaagaatgtgtggcaccagttgggtgctctgatggtactgctgttgctgctgctgaggaaactgcctctggtactggtgctaatgtagacgctggtgctggtgaccttgcttga

SEQ ID NO: 12980 - DNA, 882 bp, Zea mays
  Peptide Sequence Number=SeqID_56355
atggtcgccctaaggactatagacccctactcttaccttgaccttagtgtccttttaaaattctactctcactcttgtgcttacgatgtcttttatagatggctcgtattagatgcacgacacggcatcccgactactggaggagaccctgatggagatggagacgacgacgacgccggtggcggtttgagccacgacacggagctctcggaggagccggagccgaaggggtggatcgctagacccatcacttgtgacggtgctcgcgggtgtcacttccacgatgctctcgacaccttgttgcgtcgggccttcgaccgacgcacttggtccatcgagtaccgttgtgtagtctaccagcatcatcgcgggttatacccggaccagtcggaggctacttgcttggtgcgtcgtctggacgatgatctccggggtgcagaggccttcttagagcacaaatctattactgagagggacactatcgaggcatccatgcaagatgcaacacgacgagcactttttcagtattgcttgttgttcagtggggtagctgacagccttgaccagaagtactaccctcgccgttcgaccggcagtgctggaggtgtgattgtctcgctagttagtgagggcaatcctaggctgaacatcatggtcaacctggccgccgtgctcaacacagagctggaccacgcccttgacgagttgggcaaggttcgggcgaaggttgcagaattgcgtgctgagtgcgcaacacatcactatctggatggtggttctcccgcccctgtcaggattcagcacccttatcgctcatcgccccgtggtcgcttcgactatggtaccccagactgcaggacccggatagatttggatccatag

SEQ ID NO: 12981 - DNA, 297 bp, Zea mays
  Peptide Sequence Number=SeqID_56356
atgccggcggcatgcaaccgcgccaagtgggcgcacctctccgacttccagcgcgcccagcatggaagcccaggcccacacgtcatgcaaccggtgcgccggatgctgcgtgcgagcaactgcaccgccactcgcgccactgccacgcctcctcgactgtggaaccagtaccgcgactcgaggcaaccctacgcacgacccagcagcgccagcctggcgcgatgggaccgggaaagggggataccccgaaaaggatccttctccgtgaaggaaccaggctccgagcctccctactga

SEQ ID NO: 12982 - DNA, 448 bp, Zea mays
  Peptide Sequence Number=SeqID_56357
gcgatgcgtccggccgcggagtggggaggcacaggagcaggcggtgagggcggaggcggacgaggtgcagagggaggtggcgaaggcgcacgaggaggaggaggcggtgcctgaggagaaagacgtggcggttgtaggggaagaggcggaggcggaggcggagacggagactgaaggcgaggaggaggcagaggtcgaggtcgaggccgaggtcgaggtggaggcggaggccggtgcatcgtctgcgaagaagaaccgtatccaggtgtccaccaacaagaagccgctctatttctacgtcaatctcgcctcggcgatgtgctctccaaacatgtggttcatgctagggctgggcattcggtctattagggtaattcagttcggtctattcgggtctattcgggttttaaaggttaggaaccgaacccgaacccgaaaacccgaatag

SEQ ID NO: 12983 - DNA, 321 bp, Zea mays
  Peptide Sequence Number=SeqID_56358
atggcgaacgtcgaatgcgcagggtcaggcacgaccgtaatagcggggcgaggagcaacttcgccgatgatggcgtactggccgcgcgctgggatccggtggcaggaggaaagcggcatgggcgagctgggcacgcgacagcagggccggtgcggtggggagaggctcgaccgtcggctcctgttctctcagctgttgcgcgcgttgggcgaggtggggaaggggcgcttgagaccaattgatataattcttgaggatctcctagacctatgggttaggacccacacactttcgttgcgccacttcaatcttgttggttga

SEQ ID NO: 12984 - DNA, 633 bp, Zea mays
  Peptide Sequence Number=SeqID_56359
atgacggcggtcacttcggctctgccgggggggggggggcgcgtcaggataaagggcctcgggcgagccggtaatacgttcgccgctggaggggggcctcgggcgaggcggaaatcctccgggctttatgctgatgggggttaccagctgagaattaggagccttgaggtgcgcacgggtggttcggtcgccgtcgtcgctgcccactggagcccgcgtgccagagccacgcccgaggcacatcttcttttccaaccgtccgagttccctgcacccatgtcgcaaaagccgcccacgccggttcctgcgcccactcaccccttccccacctcgcccaacgcgcgcaacagctgggagaacaggagccaacggtcgagcctctccccaccgcaccggccctgctgtcgcgtgcccagctcgcccatgccgctttcctcctgccaccggatcccagcgcgcggccagtacgccatcatcggcgaagctgctcctcgccccgctgttacggtcgtgcctgaccctgcgcattcgacgttcgccatggccgcgcatcgcttgccttgccccgtcgtcgcccgctggcctcgccggagccgtctcgccggagcccgccgctgccgtctcggctggtaa

SEQ ID NO: 12985 - DNA, 924 bp, Zea mays
  Peptide Sequence Number=SeqID_56360
atgcacaggcactacgatcctatccctcccgatttctttttctctctccctgtatgtacgacggtggtgttcctacgcacaggagttgggtatgactacgatcacaagcgaccagagatttatagaggagggaggccaggggcacaagccgagtccgcgtgtatgagaaacacagacgggatcagatcttgccgcgcgcagagttcggcggatttctgtttccgcccgacgaattttcaggcggcgggcacagctagcaacgtcccaggcgagccaagagcagcggattacgcgcgcgacctttccccggaaatcccggcgcgagctctgccctattggtctcggcggccgtgtgattcgcaccgctgttgtatacaagagaagatgatcctgccggagcttgacggggagggacttgggtggcgagtgggccaggggcatggccagccaccggggcgccatggctgggcgctgaggcgccattggggaagcggagggagtaggaatgagggcgagctgagcagactcggcggaaaccccgcagcctacagcgcagatcgaggaaatttggcttgggtttgttgcgaacccagcgggttggtacgaacagccgagactgttgcagcgtggagaggaagactctggaaagtgggccccactaggcagtcaacaacgcgaggtgatttcctagcctacgggtttcgtccaagcacgacgcgcgtgcaaaggctgagaagctgccttcgtcaagcggtatcagcgaaggggacggaggtgactccatggtcccacgtttcactgagacaaggcaacgtttggctggtggactatataaaaaaacaaacaaggagacgtgggctacatgaagggttaaaggtgattggccgattggaagatggatctgagcgcatgtggtttttttaa

SEQ ID NO: 12986 - DNA, 462 bp, Zea mays
  Peptide Sequence Number=SeqID_56361
atggcggctctcagcccccttacggaagcaagaggacgtcagcaaggactcaacagccttgacagctgtcccttcgccaggctccagcgctcctccgacggccacgacatcacaccagctgggtgccaaaatctctctggctgccacaacggcatgaaggaccagggcccttttagagagggttggccgcgcggggacgaggacgagacaggcgctcgcgtgaggccgctcgctccctctctcgtgtggacgcttgtaaccccctactgcaagcgcacccgacctgggcgcgggacgaacacgaaggccgcgggatttccacctctctcacgcccatctccggccacctcacttccccccttcgcgctcggcctcgcgccgacccatctgggctggggctcgcggcgacatttcactcgtcggcttagggacccccggtctcgaaacaccgacactacttga

SEQ ID NO: 12987 - DNA, 342 bp, Zea mays
  Peptide Sequence Number=SeqID_56362
atggccggtgctctgggtctgacgaaccgacgattaataccaaccgaaaacctcggctatgctacgtggaccacaaggcgagtacgaggaaggggttcataccagtactggcgcagagccgagcacagactgcggagggacatggcccgcggtgggctattaccgacagtgagaaattctgaggtgcgggtaaggattcccgagcggcgcgtccacatataccctcccaccagccaagggaagcgccaaggcacaatactagggcccgatcgatggcacgacaaagatctcacgcggcggcatgtttctctcagatgctcgacaatggcggcctggggatag

SEQ ID NO: 12988 - DNA, 351 bp, Zea mays
  Peptide Sequence Number=SeqID_56363
atggaggcatctgttatggctcctatattcttgcttaaggatctaggtacgggcattgtcccacaactctttcctgagggcagaggtataggttttggtacgtcagatggtctctatgcagtggtcgcatctgttatggctcctatattctcgctcagggatctagatacgggcatcgtcacacaactttttcctgagggcggaggtataggttttgggatgtcagatggactctatgcagtgctcatttccaacatccgcatagtgaggaccctagggataagccacatagtgatacctctgccctctgcagagtgtgcaacctctgcagagtgttatgacggctcatag

SEQ ID NO: 12989 - DNA, 531 bp, Zea mays
  Peptide Sequence Number=SeqID_56364
atgggcgtgagtgaggtgaaaatcccgcggccttcgtgttcgtcccgcgcccaggtcaggcgtaaggagaggatccagatgtacaatgggagctggtgtgatgtcgtggccgtcggaggagcgctggagcctggcggagggacagctgtcggagctgttgagtccttgttgacgtcctcttgcttccgtaagggggctgagagccgccgtcgtcacaaagtatgcggggcaccatcattgcctatctggcggagcgagccagatgggacgccggtcttgttccccgtggcccgagtcagcttgggggcggagtccgagccctggggtcgggcgaagtggagttcgtcgtcttctggggctgagcccaagtccgagccctgggtcgggcggagcggagttcgtcgtcttctggggctgagcccaagtctgagccctgggtcaggcggagcggagttcgccgtcttccgggacttagcccgagtccgagcccctggtggggcagagtggagttcgccgtcttccgggacttag

SEQ ID NO: 12990 - DNA, 249 bp, Zea mays
  Peptide Sequence Number=SeqID_56365
atggcccagctgtacaatgggggtgtagctatgtgctacgtggccagcggggaagtgcctggtcgctatgcacgtgttaacgtgtccgttggagaagtgcatgagccctgtagaagcacagctgttggcgttgcatggatcctgctgacgtctccttgcttccgcaggggcttgagaaccaccgacgtcatggacgcatgcggggaaccatcattgcctgttaccggggtgtttatcagccgtgtttag

SEQ ID NO: 12991 - DNA, 1548 bp, Zea mays
  Peptide Sequence Number=SeqID_56366
gagatcatactactcctatagaggatgttgataagttctacaatttctggtacaacttgaagagttggagggaattttcagatgatgatgagtatgacttggagcaagctgaatctcctgaacataagagatggatggagagacagaatgcaatgccacaggagaaggccaaaaaggtagaatatgcgcgggtacgcactcttgtggacaatgtttataagaaagacccaaaaatccagatgaggaaagaggagcagaaagctgagaaacagaggagaaaggaggcaaagtatctgacaaagaaattgcaagaagaggaagcaaccagagctgctgaagaagaaagggtaaggaaagaagaagagtccaagaaagttgcagaagccgctctacatcagaagaaggtaaaggagaaagagaagaagctgctccgcaaagagaaaactcgtttgtgcactcttgcagcacctgtggttgcagatagccactttggtatgtcaaaagaagatgttgaatcaacatgtgcttcacttgatatggaacagctgaagaagctatgtgatggaatggatggcaaggatgcagctgaaaatgccaggatgatgagcaatgcacttcgcaatgaaagttcatcaaaggaagagaagaaaattgaagcaaatagtgtggaatgtcctggtggcgccgtggtggtccttcgggctgtgccgggcttcttccgtggcgatggtggtgatgcccttgtggcgtcgctctacctgctggggcaccattgggaggcatcatgttccctactgcatggggctctggagggtgtgaaccctgtccatccgtggacgtgcgacggcggcgccattggcgtcgtgccctccttggaggctccacatctgaggctcgtcttagtcagaggagccatgggtgatggaggtcttgagctgatgcgcttggtgcggtggtgcccacagtgccggtgggcggcttgcagaagcctgcggcttttggcgtggcacagcgttgacgacggcagcgcagttcgcggcggcttctttcgattcctctcccagtttgtggtgaagccagactcatcgaaagctttcgactccttccttgagaagtgcaaacaggcccaatctattgcttcacctctttggacccgagatgaaattagttcctcaactgagggagctaggactgcatcgtcaaaggccccacaacctgcgagtagccagacagccaatgggaaagctgtcgttgatcctgtcccagatgaagcaccatctgtggctgatccagatgcctggacagaggcgcaggttctggctctactccaagctttgaaggcttttcccaaggatgcaagccaaagatgggaacgcgtggctgctgctgtcccaggccaccagagttgttgtactgtggctagccgtaggatgatgcctgttgacgctttttcggagcgccaaacactcaacaagaaccgtggcggtggaggggcggcggaagatcgtcggcggcgcctggatctcgctcccgggagggaccccgtcg

SEQ ID NO: 12992 - DNA, 483 bp, Zea mays
  Peptide Sequence Number=SeqID_56367
atgcgcagcgagtccgcggccgcccaacccctctgccaccatagaccggccagtggagccattcccaaccccgtccagccctcggagaagactgtgcacacctccgtgaagctcaccgagcgaggaatcggagtttacttcgccggagaggccagtccacgctcgccggagctatcaaccccgccggagtacgtggaccgggtaaaccacttcaccgtccttcgattccttgtgcacacagtcgctacgtcaccccgtgaagctcaccgtgccctcggattgaaccagctcgccgtggtttggccggtatactcgccgccgacgaggacacccgcctgcacgcgtggaccggactgtaatcttgctgacggagagtacatcctcgtgccggagcaaggagctgctcaggaggtagcccccgagcctgcaccagaggacctgtctgccactgctttggaaggcaagccccggttttatgcataa

SEQ ID NO: 12993 - DNA, 840 bp, Zea mays
  Peptide Sequence Number=SeqID_56368
atggccgtcgcgatctccatcaagctggccgcgctcgctgcgctcgtcgtctccgtgttcgccacgcacggcgctcgcgcgcagccgagctactacaatgcctctgccgctcgcagagaactgtactactccagcaccaccggcggcagctggctcccggccagggccacctggtacggtcggcccaacggcgccggccccgacaacaacggtggcgggtgtgggtacagcggcaccaacacgtaccctttcaactccatgacatcctgtggcaaccagcccttgttcagggacggcaaaggctgcggcgcgtgctaccagataaaatgcgtgagcaagaacaacgctgcctgctccggcgagcccaagacggtcatcatcaccgacgtgaactacgacaccaaggtcgccccctaccacttcgacctcagcggcacggcgttcggcgccatggctaagcctgggctcaacggcaagctccgcgacgccggcatcctcgacatccagttcaggagggtgccctgcgactacaagggcctcaacgtgaagttccacgtgatgggaggctgcaacccgttctacttcgcggtgatcgtgtactacgccggcagcgatggcgccgtcgtgcaggtggacctcaaggaggccaactcgccggcatggatgccgctctacgagtcgtggggcgccgtctggaggatcgaccccggccacccgctcaaggcgcccctctcgctgcgcgtccgcagcgactccggcaagactctggtggcctacgacgtcatcccgatcaactggaggggcaatgccgattaccgtaccatcgctcagttccactga

SEQ ID NO: 12994 - DNA, 648 bp, Zea mays
  Peptide Sequence Number=SeqID_56369
atggcgacacatgaggcgcgatgttcgagcgagtggcgccacggaaggcccgagatacgtgcagcgatgatcgcgcgtgacatcctccgatccggcgcagttttcttttcgattattgtgttttatgcctaccacatacgtgggcgcgggtggtgcaaccgacagtctggtccagtcgaggttgagccgttcgtggagaaagaggggcgtgggcgggaaagtgaaaaggttctgtcgggagcgtgcgggagcgacgaagacgtgcgggagggacgaagacggtctgggtgggacggttggctcggacctggcgcttcgcattcggtttgccttccaaaaccgggtgtgacacctactggcagcacagagagtgtggttgtctcacctgttggtgaggctaaccctaggttgagcagcacagtcaacctagtcgcagtgcttaacacggagctggatcactctctggacgagctaagcagggctcgaacggagattgcggagttgcgtgctgagttggcagagcgccatcaccaggagggtggttctcccgctcctgtcgggactcagcacccataccgctcaccgccacgtggtcaccacacttatggttcccctgtctgtaagaccaggatagatctggatccttag

SEQ ID NO: 12995 - DNA, 96 bp, Zea mays
  Peptide Sequence Number=SeqID_56370
atggccatcatcttcaacaccttgctcaacttcaatgctggagagatcttccacttcggatccatctcctgcattgcagatcaggaagggaattag

SEQ ID NO: 12996 - DNA, 1455 bp, Zea mays
  Peptide Sequence Number=SeqID_56371
atggcggtgacgtacacctgcaggaactccgatgggtttgacgttccgtcgtattttttctggcaggtgcggccagaacttaggcggccacgacgccacgcggagatgatccgcaagagcggcacaacccacgctggccaaggggacacccacttgggaccggacgtcgacgcctcatgttggcgccaggatgaccgaggcctcgatctggtcgaggtagaatgtgccatgccgagcagtcagtcgatgtcgtcccgccattgcttcatggccactggtgaggccgtggagcttggagggtgtcgcaacaactccctagctgctgacaacgctcctggagtcgccctcgacggagtccgggatgtctgtgcagttgtatgttgctgtgcggcgtgcacagcagcagtgcccgacacagggcagttgggaaccagtggggaagcttctcgtataagggatggtgagcacaatgcgccgataagggatggtgagcacaatgcgccgcacgacacgggcgcactgtttgacaatagattggacatgcgcgccgtctacagggcggcgcgtcctttccgcaataaatgcagaaaccgcacggctttagaggccttacgtcaggctccgctcgtcggcttatgtcacgggccacaagccacgcggcagcagcgggtctccgcctcaacggggagcgcaggggaaggcctggacacgtgccagcaccggacccctactcatgccagggttccccctgtcccaggaccttgctgcggtccggacctttctcggagggacctggggccatccgagggacccgacatgccttcttgggagtccgggtctgtaatcgaggatccgggttgtgcgtacaggggtccggtgttcctccgtggaggtccggagccaatgatgcaccctggggacgcttcatgggcctgggcccccgtgccagagactgggctgtcggtttggacggaggtgaagaggcgcactaccgcaggcggtggcgtgctcctcatgcggcagttcgccttctccgcacacggaggccgacacccaaggagtatgactcgtgggcccgggccccacgtcagaggctgggccgctgctttcggcggagatgaagaggtgcactaccgcaggcggtggcgtgctcctcccgcggcggttcgccttctccgcacacggaggccgacgcccaaggagtatgactcgtgggcctgggctcccgtgtcagaggctaggccgctgctttcggtggagatgaagaggcgcactaccgcaggtggtggcgtgctcctcacgcggcggttcgccttctctgcacacggaggccaacacccaaggagcatgactcgtgggcccgggcccccgcgccagaggctgggtctccctggcgcgcgtcgggcgagatcttctgcgacatctcggggcgtcagtgggggaatctttctttaa

SEQ ID NO: 12997 - DNA, 792 bp, Zea mays
  Peptide Sequence Number=SeqID_56372
atggcttctctagttcatccggagcgttacctgaccgagaggaggctcgacacggtgtgccgcctgctcggatggagagctcggtctccagctccagcacctcacccccactccatcctccaggcggccatctttgctcacctgtgcgagatgttcatgggggtggctccatgcacctctctcttccgccactttttcgtgctggtgaagtccgggaaggctaaggaccatctcgagcttctggtgaaggggatcactggtgagtccttcgttgccgagtccttgattcctcccgagggcatttctccgctttgcgacgaccaagggttgaggtcagtgatcctggattggctgccgactcttgacgagagcggcatagcggttcgccagaccggcggtcgagacccccaccgtgggattcagatccccggtgtaccggcggaggttcccggcccaccgatgccggctctagagctcccccgcgactctcagcccctcggggaagggcacgggagctgcgagcagttcttccgcctcgggtggttccgggaggtattaacccgtcctttgttcatcagggcctcttctccctctgtctccaaagtcactcctactggtgagtccggctcccagcagcaggtgtctaccggtcttgatgccggtgacctgcctccacctgctactgctaaggcggtgccaccggtcccccaggtttcggctgataccatggcagcgccgttgggcccccaggttccggctggcactaccgaggcagtgccgccagacctctag

SEQ ID NO: 12998 - DNA, 516 bp, Zea mays
  Peptide Sequence Number=SeqID_56373
atggctgctataggggtgaaaagcagagaaatgcgagtgcaacagaggcgcagaggactcagaggagaaaggatgcaacagttgaagaaagtgcgaatgcgcaactgctggccgcggaatgagtcccctttcctcaaagaaggctctcctgctcgcatcccaaccccatccaacgcgcacctggtgctcacagtgacccggtccccaacgtgggggcccaggtggccagagaagttagcggataccgtgatatcatcagtggatccggactcccatgggaaagtgccggaccccagcacttgtggctcggacctttgcattcccctgaatgggacccggacccctctaagtgaggtccggaccgtccaagacaaggtctcgggacggagaataccctggcccaagtcaagggcgtacatgggtccgacacaggcacttgtcagggtcttgttaggcgtgcctccgctccccgcactggcggggacccggagctgccgcgtggcctatggcccatga

SEQ ID NO: 12999 - DNA, 474 bp, Zea mays
  Peptide Sequence Number=SeqID_56374
atggggaagcctgtcccatcactcctcatgctccccctcagccgaggcagggtcccactcgacagtccaacccggtggcaagatggacggccaagtcactccagcaaccatttcctacagagaacctgtaaaaattatgccacaagcaaggctgagtatactaatactcagctagacttacccggttacaatggatcaagcagtctcattagctgcgagaagcagacgattcgaatcgagtttttatccttgcaagggctcaccgccttggcgtacaatgccccactgaccccgactggccgtcgtgcagtgaccgcacttgtacccaccataaccggaatgggagaccacgtctcaggtcgcgtgaggggtaaagtctacgggcaagttcactcaggtatccgcacgttaatccttattccattttcccatctcgtagtcaacaaatccccatggattgttgtctaccactaa

SEQ ID NO: 13000 - DNA, 702 bp, Zea mays
  Peptide Sequence Number=SeqID_56375
atgacggtggcaggcgggcgggagcagcggtcacgtcgtcagccaagctcacgtcccatccggaggcagcaagagaaccccctctcacggcgtgaagacgacgcgcccgtgatccgttcctcgaacggctcgcgcacgcgcaacggccgccctgccaacaactcgccccgtcgcattaactccgcggagggacagacggcgcttctggcaggagaagcaggcgacgcttcgccttcgccgctccgagcctccttactgatcagaggttcgaaggctggcccccggaagggtttcaacagtcgcctcagatcgcgtgggccctacacccactactgccgcctcagacgccgagcgagggatgaccaggggtacgttcgatacataaccaaggctcgggctgtgctcccgagctcaccggagacaccatgttcggcgcccatcgagggcaacatggcgctttcccccctcctccttgcggaaaggcgacgcaggggcgtatgtaaaaaagctgagtctgtccctgatcgccctctcgccctgtgcagaggctcgggggctgctctcgcaaacccggctccggccgaaccgttgacagcgtcaacataccagcccgagaacttgggccccgaccgtacacccgggctacggccagttcgcatgagggaacaaccagaccagccgaagcattacgcaagacattaa

SEQ ID NO: 13001 - DNA, 180 bp, Zea mays
  Peptide Sequence Number=SeqID_56376
atggcgagagtagcgtgtaccctccgtgtcaagaggttggacggtgagtcattgattcttgataagccttaccttgactcccttaaagccagcatatccttgagagtcttttactttatcgggtggtacccaaagaagaaaaccaagactaaagctgtgggagggaaggccctccgttaa

SEQ ID NO: 13002 - DNA, 387 bp, Zea mays
  Peptide Sequence Number=SeqID_56377
atgggccgaactgacacagttaggaggccggtgtgccgtgcctggattggagttgaggtcgcgggcgtcagacctagtgggcctgtgccggtcgcggatggggcgggcgaggcgctcgcgttggcatcactcatcgacgacgagaagaagcttggcgactgccagttcgacctcttgaagcagtcctacatggtcgcatgcgccactgtgttcggcaagctccggcgcagccgccgcttggacgcggtccatagcggctgcaccgcgctgtccatcgttaaacagggggacctcatggtcgtcgccgacgccaacgactctcgggtcattttgggcaccgcacccgacgacggcgccatcacgtcgtctagctcatcatccacctga

SEQ ID NO: 13003 - DNA, 240 bp, Zea mays
  Peptide Sequence Number=SeqID_56378
atgtcggtcggcttgtggtgtgcaggtgtggagcatagagacgatgatcaatggctgaggtggttatgcgggctcgtgctaatggaccgacgtggtggagtggaccatgttgtcggtgtggtcgaggactcgtggaacatgcgtctggtcgtggacgacgcgcacgcggtgcggtactcacgcgggtttgatggtatgggcctaaaaccacccagtactatagatgacaggttttgctga

SEQ ID NO: 13004 - DNA, 309 bp, Zea mays
  Peptide Sequence Number=SeqID_56379
atgggggagaatcccgagataggcctcacacagatgaataaaaatggaaacttgcaagatagaattagggttcaagtgggtcaagttcagatcgtagaaatcaaggagtccacggaagaagggagaaacggggagagcaaggccgcggataaggaaagaaacatagacaatggactcatgggtgtcctccgtcggaacagtgaccccgcggcaaatccgccaagagcagagttctttcggaggatgactaccacaacggagctctacctcttccgtttcaacgccatcgcaatctcgccggcggaatga

SEQ ID NO: 13005 - DNA, 438 bp, Zea mays
  Peptide Sequence Number=SeqID_56380
atgggcaaggaaaagaaaggtcaaggttcgccgtgtcgctccggcgacaaacggaagcgtgagccaagtccttcgtcggaggacttcggtgactccgagtacttggaggaggagttttcctccgagtctgagggatcgccggggatagtcgctgaggtgtggacgtacatccggtctgtcgagcgcgccgggctcgagggctcggatgagtcggaggtctcctcggacgaggagaactcttctggctcgtccgaggaagggagcggcggcgacgacgacgacaaaggcgacagcagcggtggaagtggtggcggcgatgatggcaacgacgacggcaagggcggtggtggaggcagcggcgacaggaggggcgacgacgacggcaagggcggcatcagcaggagcaacaaggccagtggcaaagcgccactggcttaa

SEQ ID NO: 13006 - DNA, 381 bp, Zea mays
  Peptide Sequence Number=SeqID_56381
atgcgcccaaacctcatgaagctcgacaatctctctcgattgccccacccagagcccagcgacgacgacatccacgagcaccccggctgcaagggccccctctccaccatgcacggctcctacgcggcggccacgacaatgatttataacccgggttggagtccgaccaagggcatagatcccaagcggttacaatggcccgcgaatttggccaaccgtgcacatttttctcccaatgaactccgcggatccagcgatttgttgctacctgcgagtgcccaggtgtggggtggaagacggctgacaaggatggtctgctggaagtggcagacactgatacccagggcgggattttttatgctgactccaaattatgcgtga

SEQ ID NO: 13007 - DNA, 192 bp, Zea mays
  Peptide Sequence Number=SeqID_56382
atggagccgccatgtcacatgggcggcattgcggtcaccccgatacgtggtatgatgccttctctgagtcatgattacctcaccaatgcggctctcaaagttttctggtggtcctccgccgcatgctggggcggcgccgccgtcgtgtttgtggtcgggatgagagagagaatgttgaccgttggatcataa

SEQ ID NO: 13008 - DNA, 246 bp, Zea mays
  Peptide Sequence Number=SeqID_56383
atggatcttgtcttagggctcttgcatctgtctgaaggccttagcaaatatgatatcagctgcactgcctgtatcaaccaaaacattatggaccagaaatcctttgatcacacaagagataaccatagcatcattgtgtgggtaatccttgagctgaagatcctcttgagaaaagctctgagcatgaaccgcctgttatcgggagaaccagcttcggagccgaagcagttccagcttgattcttga

SEQ ID NO: 13009 - DNA, 432 bp, Zea mays
  Peptide Sequence Number=SeqID_56384
atggccgaggctcgggctacgctcacgggaatcccaccagagggaggcatcgagccctcggacccaatcgaacggggccaggaaaacagcgtcgcctgccccgctccgactgctgcgccacccgccagggcaaggctgacaacagctaagtccagcctcaggcgcaataggaagctccacctcgcccgaccttgggcctcagcctcagaaggaggtctccgcctcgcccgacctcagggctcggcccccgcctcggcctcggaaggtggtctccgcctcgcacgaccccaaggctcggcctcaaccttggcctcggaggatggtctccgcctcgccctaccccagggctcgacctcggccccgacctcagaaggaatcgcgtcctcacccaaccccggcctcggcctcaggaggagtctccgcctcgcctga

SEQ ID NO: 13010 - DNA, 804 bp, Zea mays
  Peptide Sequence Number=SeqID_56385
atgacggatgcagagaaggaggtagcaacagaaagacggatggactcaccgcctcgatgtgattgtggagaccgtgctgtcatcgacgaagaccatgagaagcagttctgttgtccgaacattaatcatccatacgggtggcgtaagtgtcgtttcaaagaatggttgtatggtcctttgtcccattggctagagccagaggagacgaggaaatgcagttgggagagttacgacgacaaaggagaggtgatgcgcacaatagagtccaagagactaatgggacagaagatgcgttgtggatctcagctcgtcgattcgtacattaacgatcacatacgcgacatgcgtagggacacaaaatttgtcttttatgatagcccgaagcgtgcagagtataggaggttgaaggcggcagatgagaagagagcacatgatgcaagggaatgggaagcggctcaagcagagaaacagatgttggataatcttgctgatcgcctcaagggaaagattggatgtggcgtaaactatttggccgatgaggcgcatgcaagatatgttgaggataaaatggcgacggccgccgaagaggtagaggcggcttattacaagaagaagtctgatgaggctgaggctgaggatgagctattctcccaagctgcagatgaagcagaagccaattattacaagagaactgttgacaagtgtgatgcaggacaatgcagcaagtggaatgaggttgtcgttgaggattgcgcgacggatgactccgaagatgagttacttatagattgtgattcagattga

SEQ ID NO: 13011 - DNA, 108 bp, Zea mays
  Peptide Sequence Number=SeqID_56386
atgtcctcctcgacgccactgcacgagtcggtgtcggagctggtgccggatgaatacggggaggaggcgcatgttcctacgccctctgccaagaatggggtggcgtag

SEQ ID NO: 13012 - DNA, 1101 bp, Zea mays
  Peptide Sequence Number=SeqID_56387
atgaccacgtcaaaaaagggaccgggaaaggggatactccgaaagggatccttctccgcgaaggaagcgggccccgagccccctactgatcagaggttcgaaggctggcccctcggaagggttcgacagccgcctcagagcactcgggccccgagcccccctactgatcagaggttcgaaggctggcccctcgaaagggttcgacagccgcctcagagcactcgggctccgcgcccacccactggtcggaggttcgaagggctggcccctcggatgggttcgacagctgcctcaggccactcaggctccgcgcccactactgatcaggggttcgtaggctggcccccgaagggttcgacagccgcctcagagcacgcggagcgagagatgactctgggtacgttcgatacacaaccaaggctcgggctacgctcccgagctggtaacccccatcagcacaaaagctgcaaaggcctgatgggcgcgattaaggtcaaggctcagtccactcaagggacacgatctcgtctcgcccgagcccagcctcgggcaaaggcggccgaccccggaggattcacgtctcgcccgagggccccctcaagcgacgaacacaccttcgactcgcccgaggcccagtcttcgcggagaagcaaccttggccagatcgccacgccaaccgaccctaagtccagcctcgggcgccataggaagcttcgcctcgcccgaccccagggctcgggctcaacctcgacgccggaagacggactccgcctcgcccgaccccagggctcggactcagcctcggcctcagaagacggtctccgcctcgcccgacccagggctcggactcagcctcgaccccggaagatggactccacctcgcccgaccccagggctcggacacagcctcggcctcggaagacggtctccgcctcgcctgacccagggctcggactcagcctcgaccccggaagacgaattccgcctcgaccgaccctagggcccagactcgacctcgacctcggaggagcctccgcctcgcccgacctcgggctcagacccgccacgtcacagggaaggtcatcattaccctacccctag

SEQ ID NO: 13013 - DNA, 111 bp, Zea mays
  Peptide Sequence Number=SeqID_56388
atggtggactttccaaagtccaaaatgactaggtttgcttggcatcccacagttgtactcatcttcggaaccagcttcttcaacatcagcttgcgtttgcttcggcagcag

SEQ ID NO: 13014 - DNA, 648 bp, Zea mays
  Peptide Sequence Number=SeqID_56389
atgcgcagcttcttgcagcgtttatctaggcgcctacgtggagctgctgctcgctgtggctgcaggactactgttgcacatgacgtccatgtaccatcgtgtaccgacacagcaacgccctccacaggtcttggtgctggcttcgactacgatcacgacgagataggaccttcacagcttgagggggctccttcgacacagccattacaaccacaggatcgtaggcgacaccgctctccacaacgttacactccaggcaccgacgctttaggcaaggacttttatgagcttgcttggaattgtttacaattgtatgcacttcattcattggtcaaggagaattgtgggttcactcgttgggtagatcctcgtccaatttttcctcatgcggaatacatatcctacctacagaataggatatttgatctagagagagaagtaagcaacaaaaatgatgaggaagaaagagacacaaacaatggtggtgcttcacaggtgcaagtatgcccagatccatattgttgctgcccttgtcacaacaagaatgttggtcctccgtcgtctccaccgcacccacagcagacaccaacaatgggaggatactatggggaaggctcaactcaatttggaatgtgggagcactactag

SEQ ID NO: 13015 - DNA, 387 bp, Zea mays
  Peptide Sequence Number=SeqID_56390
atggaggactttcaggagtttcaggacttcgatgagttctacaatagtttagtggcaaacccccaatggcccgtcttagatacaccgcatggcacctcggatgctagaggagaccccgatagagatgataatggtggcagttcgagccatagcacggagcctcctaaggagcaaaagctagaaggatgggtcgcccgacccatcactcgtgacgccgctagcggttgtcatttcgacgacgctctcgacaccttgctgcgtcgggccttcgaccgacacaattggtcgatcaagtaccattgtgtagtctaccagcacagtcgtgggttatacctggaccaatgggaggctaccttcttggtgcgccatctggacaatgatctctag

SEQ ID NO: 13016 - DNA, 305 bp, Zea mays
  Peptide Sequence Number=SeqID_56391
atggacggcgggttgatttttaagaaagccaggggttctttagaaagaaagccagggcgaaggggtatcgttgattcagagccgcccgattcattccggatggtccagattaaatatgtgaaggggggggttggggatgatcctgacgagcgggtcccatggatgggcgagacgagcaagcgccagcaggcatcgcgcagcacacggcgagatcatcgcgcggattccggtgaggagcgcgcgtggtggggtgttgggcagtggggcattgttgccagcgtcagggagaatggcgggctggcgag

SEQ ID NO: 13017 - DNA, 369 bp, Zea mays
  Peptide Sequence Number=SeqID_56392
atgggcgggtccagagctgccacgtgtccagagaaggtgatatactccaaggcatcaatagtaagtccggacccccatgggagagcaccggacccctggatatacagttcgaaactccaaggttggtccaggaccttcacgtgtgcaagtcgtacccctagaatgggatctggaccccccgtatggggtccgggccacccaaaatggggtcacaaggtcctaggacagaacatactcgggcctggaacaagacctaggcaggggtccggtgccgacacatgtccagacctagacctgtctgcatacactcctgctccccgctcagacggagacccgatgcggccacgtggactactgcacgtgacttaa

SEQ ID NO: 13018 - DNA, 246 bp, Zea mays
  Peptide Sequence Number=SeqID_56393
atggtccagatcgttgagcaccatggcttgactcctgaggacttcctaatggaggaagaggctgcgtcttccatgccactgtcacacccgggtttcggggcaccaagacctaggtgtgaacataatcaccagtttataggaagctccaatgcagggacccctcgcatgaccgccatcgcagcaaaatcatcccaaggacctccctacactgaccactcccctactgcccttgcccctttcgggtaa

SEQ ID NO: 13019 - DNA, 1104 bp, Zea mays
  Peptide Sequence Number=SeqID_56394
atggcgcacgacggttttggcctggccgaagtgctccggcgagcaattgccggcagacacgcgatgcacacaccctaccgcggggtcctattgattccagggggtcgctcagccgcccgggaatgtcttctgctatgcgccccgggtgccgcggtgaagtccagcgagtcccgcccagctcaattcgacggggagggcgagtccgcgcagaggacgattagttggaggggaagggaggaccctaggatctccggcgacgaccatggcggcaaccgagccgagttgttgcgggatttcagcttggagaaggagaagagtcttgcaacccgggccccacatggtggaggtagtaatcgtcacagaataacatttaaaaatgaggattcttatattaagataccttttaaccctaaaccttataaagaaatatttataaatcttagaataggattttgggtgttacagccacggggctccaaccgccctacgcctggtgctgctgttgtacatgctgcgcggcagcacactcccacgcagtcatctcgggctccgtcaagggctgctcctggtgcgctgtctgcagccatggagttgttgggccaccctccgagctccaaggcctcgccgggggccatgaagcagtggcgtgacgatgtcgatagtctcctcagcatggcgcattctggctcggccagacccaggcctcggtcattccggcgtcaacgtgaggcatcggtgtcggtgcgctcaccctcagtaaaggccgcaccgactgaggacctgtgggcggagctcaaccgccgacgtgcgggcgaggatgccccaatttctctggagagacctaatgacctgcgaacagaactcaaccgcaggcgtgcgggtgaggacgcacgagtctctctagagagggcgcgtgagcgccggctaaacttcgagggtcgcaacctcgaccaggacttccctccgcccgcgccacaaactccaaggggtgcccgaacccacatgggtgtcccattggtttatgtcaccaccattacggcagctggtggagacattgctgcgatggcgagctatttccatgtagccttgaccgggccgacctag

SEQ ID NO: 13020 - DNA, 2367 bp, Zea mays
  Peptide Sequence Number=SeqID_56395
atgccgtcgccaccgacattggctcctccctccccgcgtccggcgtggaacacgaactgcaaccttgtggtgacccaccctctgctatccgtcctcgagtcatgcgcctccttccgccgcctccttcagctccaggcactgctcaccgtctccggcctcgcctccaaccgcttcccagcctcccgccttcttgccttctgcgcgctttccgacccgccgcgcctcgcccacgctgccgccgtcctcgctcaatgcacagaggggcccaatgcatacatgctcgccaccatgatgcgcggcttcctccgcgccggaaagccaacccacgcactcaccctcttccgccgagtgctccgcgatcgcctcgccgtcgacgcgcgcaccatcgtcttcgcagttaaagccgccgccacttcctcctcccctacggaggccatccattgcgttgccttcaagcgaggatttattgggcagagcgtgctcgcggggaacgcgctggtgcacatgtacactagcagcatgttattacccgacgcgcggaagctgttcgacgaaatggctgacagggacgtggtctcgtggacaacgctgattgacggatacgcgcgaggtggcttgcccgatgaggcctggcgagtattctgccggatggtggttgctgagagtgtgtggccgaacgaggttactctggtcgcagcagcctcggcagctgggcaaatggggctacttgggttggggaggacagtgcatcagtgtatcgtggagagtggtggacgcatgagcgttaacttggagaatgcgctcgtcgatatgtttggaaagtgtgggtgtgtggccgcagcgaaggaagtttttgatgggatgcccatcaaggatgtatactcttggacgagcatggtcagtgcttatgccaagtgtggtgatttggagaatgcagcgaagcttttcaaggaaattcctaataggaatgtggtttcttggagttgcatggtcgcagcttattcacatgcaaatatgccagatgaagccattaggatattcaatgacatgattgcagcaggtgtggagccgattgatgctacacttgtgagtgttctgtcagcatgcgctcagctgtgttctttggatgttggtacatggttatatgacacttacattgtcagtcataaggttgagcttacaccgaatctaagcaatgcattcattgatatgtttgcaaaatgtggagatgtcggtgcagcatcaaggttatttagcaatatggaggacaagaatgtagtaagttggaacacaatgatcatggcacatggtttgcatggtcagcctgaagaagcccttcatctctttcaagaattcaaaggaaacggtattttgcctgatgaggccacatatattggggtactttctgcgtgcagtcatggtggtttagtatcagaaggacggtgccatttcaaagagatgaagatagtttatgggattgaacccagggccgaacattatgcatgcatgattgaccttttgggtaaagttgggcttcttcaagaggcgtttgaagttgcaaggagtatgccagtaggagctgacgaggctggttggggtgctcttttaaatgcttgcagaatgcatggtaatgtagagattggcaaatgtgcagcggataagctagcagggctggatccttcagacagtggaatctatgtacttatgagtcaaatatatgcaagtaaaagtaaatggggccaggtaaagatgctgagaacagtgatgagagatagaagagtaaagaagaatcctggatgtagttctatcgaagttgatgggaaatgtcatgagtttttggtggcagatgtttcgcatgttcactcagaagatatatatgctgcactggggaatatttaccttcattcaaaggcagaaggatctggagtcagcttctactgtggtccctgcactcaatttcttccacagaatcttgaatttttctccattggtgaaaatgaagtactacaatgcgtgtctgttccacaaggtggagaaggatttcttggcacaaatccaactggaactggcaccgatggtgattccgtatacaaatttctctatggtgatcaagctcgattttttgatgatgagatccgaccagagttgaggcattctaaaactggaactgttgctatggccagtgctggtgaaaactgcaatgcctcgcagttctacattaccttgcgggatgacatggattaccttgataaacacactgtgtttgggatggttgccaaaggttttgatatgctgacaaaaataaatgaagcttatgttgatgataaaggaagaccattcaaggacataaggtggagtgttgattaa

SEQ ID NO: 13021 - DNA, 393 bp, Zea mays
  Peptide Sequence Number=SeqID_56396
atgcagcgtggtggggatgctgagaacacgaacgtcaccggcagcgacacgctcgcggacgaagtgtatgtcgatctccacgtgcttcgtgcgctgatgctgcacgagattggtggagaggtagactgtgctgatgttatcgtagtagacgagggtggcacgctaaagggggacatggagctcgtggaggagctagcgcagctagcaggcctctgccacgccgttggccacagcgcggtactcggtctctacgctggagcaggagacgatgagctgccgcttagggccccaggagacgaggttggcgtccaggaacacgacataaccagatgtggatcggtgcgtgtcggggcagccagcccagtcagcgtcggtgtaaacgatgaactctga

SEQ ID NO: 13022 - DNA, 990 bp, Zea mays
  Peptide Sequence Number=SeqID_56397
atgctgacgccgtccaggagaaaatcggccgctgacagtaagtgccgcaagctggcggacaaggtggccgcgctggagggagagaaggctgacctccagcgccaattggcgggggagaggagggagaccaatgaggccctcgccaaggcgcaggctgcgcaggcggagaccaatctggcacgggcggagggcaatcttgccagggagcgcgccgagcagctgcaggagcggctcatcgccctggagagccgcgtggagcgggccgaggccgcggcgcgtgcggaggccgaacggacgcgcacacaacttatggatacatatcgtgagctgggtgcgcggaccagtgacttcgaagtgccggaccgagagcccggactttgctgtctggaatgggtgcaggaggagctgcaggcactccccactgtcgtggaggggtttatgttgtacgcctccgtggtcacctgcgagggggaaatgaacgcgctctcccacgaagggtgccggcacttcgaggtcttcgaccaggccgatgaagattttgagcgagatatctataaggttgaagaccccgtagtgaaggaatccgccggggccatctacgaccggatgtggggtccgcacggtcgcgaggtggtcagggagcgggccgagacggcgagggctcaggcggcgcgtggcgagcgggtggacgacttcggggcgttgaacagcgcgctgcctgacccggagccgaccccggcggaggccgtgtctggggtcgccctggtgccaaccccggagactgcggaagacgcacccgatgcccccgcatccgctacggccggcgaagacctgcccccaaaggtggtcgaaggcgcgccagatgtccccgcagctgctgcgccgagtgctgaaggtcccgcggcggtggcggcggaaacaacgacggaagcaacggcggagcgaacggcggaggctcccgcaacgtcagggccttcgcaggtggcgtag

SEQ ID NO: 13023 - DNA, 441 bp, Zea mays
  Peptide Sequence Number=SeqID_56398
atgacgacagaggaagtcagcaacagaggccacaatattcctcgcaagcttcggggcaccaacaaagctatcttcagccgccagctccaaggggcacaggtgctaggggctacggaggaatgtttggggatcagcccagaaaaatttattgcttattctgtgacttacggagtccaaaaagtcgccgaggcacaaaaagtcattcctaagtcacaagtatctctgaagctacaaaaagtcattctacggaacacagctaagtttgccgaagtcgttctacggaacgcagcagccaaataccgccgaaatataaggcgaagcgcgaaaagtcaacgcgaataccgccgaaatagaaggcgaagaagttcaaaagacgttcctaagggaatgcagaacttacagcaaaaagtcagcgctgacacaccgaaaaataagcagtga

SEQ ID NO: 13024 - DNA, 408 bp, Zea mays
  Peptide Sequence Number=SeqID_56399
atggcgcgtagtgattttacagttatttttcttgaactaagtttagatgctccgcgtcttatatgtactgtttgtttctgctcttttatcgaagcacgtggagtgatacctctgcacctcagtggctttatcggcgaggcttggttgctgagactaatgtttgatgtcctgttcggcctaggatacttaccagctcgatgtgttctagcatattccgatgtgccacgcagtgcagaggtagggaacgaagaactccatttccagcgtccatgcaactgctactcgataatctctctccgtcctttccgtgtgggatcagcagaagacgagcaagctactgcggatcctgaggttcagcaaatagaagctgctgagcaggagctcgttgaaggcaagttgttcccttga

SEQ ID NO: 13025 - DNA, 309 bp, Zea mays
  Peptide Sequence Number=SeqID_56400
atggcaggtgatgatgatgaagcaaggatccctacagacttcgatgaatgtgttagccgccaagatcttgaggcaaacaacaagctcctgaaggagcaaatggaggagacgtacaatggatcaagcagtcttattagctgcgagaagcagacgattcgaatcgagtttttatccttgcaagtgaccgcacttgtacccaccataaccggaatgggagaccacgtctcaggtcgcgtgaggggtaaagtctactgtcaggttcaatcaggatttaataatattaggctaagagaagaaaaactaagttaa

SEQ ID NO: 13026 - DNA, 342 bp, Zea mays
  Peptide Sequence Number=SeqID_56401
atggcacagtggcttacccggtctacgctcgccggcggtcggagggagtccgacgaccgtggactagcctctccagcgaagcagacttcgattcctcgctcgaggagcttcaccgaggtgtgctcagtcttctccgagggtcggacggggttgggaaaggctgggttggccggtctacggcggcaggggctcgggtggtcgcggacacgccgtgcacgggcaaccgacgctcgcccaagtcgcaaacgtgcgaatcttggcaaaaatccggcgcgagtcttttcctggctcctagggctgtctctcatccgtgagtcgccatggcagatatgccctaggtag

SEQ ID NO: 13027 - DNA, 910 bp, Zea mays
  Peptide Sequence Number=SeqID_56402
atggcctctatgaggctatccacgtcgccaaaaattcttcacaccgttggattctgcttcaccttctgccgctttgatcgtccattgccgccttcatcgtctgctctggtgtttgaagtccacaccttctcgcccacccaccagcctctccgtcacgcgatgcttctaggaggatctccacctttccaggctcccatccgtcacccatggccgcacatgttcaccgctatgcctccgccgccagcagctccgactctatgccccgtgccccatgccctgtgcctgccgccaccagcttcacgcccggtgctccgtggcttcgccttggcgtgggtcggtcgtgcccgcagcttcgccgcccctctagcatcggtgcacagccgcgcctgcagagcggcacaacgctccgcacatagcttatgtcgactgcctcggcgtgtgctgcgcgggtccgcgcccggcttcgctttggaacacaccgagctatgcctgcagcccgacaccccctctagcacaggctcacaggaatacaggattatctctgacctcgtctccctgttccgccgccaccaatcgccgtccacagccgcgcgccctagccggccagccgcaaccgccgtcctagccgcgcgcccaagcaggccaggccccaacgccatcccagccgcgcggccaagcaggccggccaccaatccgtcgtccccagccgcgctcccaagccggccggcccccaacgccgtcctcagccacgcgcccaaacaggtcggccgccaaaccgccgtccccagcgagaccatgacgaggaccaacgccgagggcggcgggccatgggcggattgggggttctccgacgccgagacgacagcgccatcgccatcgcagcattcatggcgcttcttcattggattag

SEQ ID NO: 13028 - DNA, 183 bp, Zea mays
  Peptide Sequence Number=SeqID_56403
atggcgcagtggcttacccggtctacgctcgccggcggtcggagggagtccgacgaccgtggactggcctctccggcgaagcagactttgattcctcgctcggggagcttcaccgagctcgcccaagtcgcaaacgtgcgaatcttggcaaaaatccggcgcgagtcttttcctggcacctag

SEQ ID NO: 13029 - DNA, 1077 bp, Zea mays
  Peptide Sequence Number=SeqID_56404
atgcggggctggtcggcggcgagcgtcgtcagcttcagcgcgttgggctcgctggctcagctggctctggctcggctcccggtgccccctcccgccgcgagagcggttgtcgcaccgcgcgcaccggaggaccgcccaagacgacgcgcgctgctagggcggcgttcgtgttcttgggttgtcctgcctttgctccggtacggcgcctctgcgcggaggtcggtgctcgcccgtccgggaggatccgagtggggatctgccggtgggcagattgcttccgtcgtcggtgctgaggcggtggcggctgaagaagtcctcgtcgccgacgggatcaccgccaccatccgcgctccgggcctccggctctttggctttgatagcttgtcctcgcccctcgagtggggtcatgggcaaggggctcgttgcagcagcgtccgccctgaggccatctctgctgctgtttggccatctggagcagaggtcgttgtcgctgctgccggagcgggcggcgtcaaagaaaccctcggccgctctgcggtgagccggggccgagggcagcggtgtcagcgtggacagaggcggagttggctcgaaaaaggaagcttcgtcggccgggggctggccgggtcgtccactggcgggaccaacgccggagtcgggttgccgaggccacgagccgggctagtgtcctcgggggatagctggctgaggtttcggggcggccggccgagccgtctgctcgggccgggttcctggaggagaccctggcggcgatggcccgggcgtggtgctgacgtcgtccttcggagcggagatccttcgcccgtgttgccgtccgaggctcggtcggacttcgccgaaggtggagttgacgccgagggtgctgctgctccccctccatcgacgtctgagcctgcaggatcggttcgcctgtacaggatcactcatccgaacgcgagttacttctcgcagaaggcgatgagtgagagggggttccccccttctagcccccgagggagggtcgggctttgccgaggcaaggctgccccttccttgatggttagacttcatatgtaa

SEQ ID NO: 13030 - DNA, 1020 bp, Zea mays
  Peptide Sequence Number=SeqID_56405
atgcaggcggcatgcaaccgcaccaaggggacgcaccctttcgactttgacgcgtccagcttggaggtccaggcccacacgtcatgtaaccggcgcatcggttactacatgcaagaaactgcactgccactcgcgccagtaccgcgccttctcgactgtggaaccggtgccgcgactcgaggcgaccctgcgcatgacccgacagtgccaactgagcacattggtcacgggtcagtcagccgcgagagaaggcgcgacggtcaatacggccagaaatgggccgacagtaatggcggtggcaggcgggcggaagcagcagtcaagtcggaccgggaaaggggatactctgaaagggatccttctccgcgaaggaagcaggccctgagcccccctactgatcagagggtggcccctcggaagggttcaacggccgcctcaggccactcgggctccgcgcccactactgatcaggggttcgtaggctggcccccgaagggttcgatagccgcctcagagcacgcagagcaagggatgaccctggcctcggcctcagaagacggtctctgcctcgcccgacccagggctcggactcaacctcgacctcggaagacggactccgcctcgcccgaccccagggctcgggctcaacctcaacgctggacgacggactccgcctcgcccgaccccagggctcggacacagcctcggcctcgaaagacggtctccgcctcgcccgacccagggctcggactcgacctcgacctcggaggaacctcggcctcgcccgacctagagctcggaccgaccacgtcacaggggggggccatcattaccctacccctagctagctcaggctacggggagcaagaccggcgtcccatctggctcgccccgggctccaactctcctccgacggccacgacatcacatgaacagggtgccaaaacctctccgactgccacgacggcatggctctcgtacgagagggctggccgcgtgggagaacgggccgacgcataa

SEQ ID NO: 13031 - DNA, 333 bp, Zea mays
  Peptide Sequence Number=SeqID_56406
atggagagtcatgatctctgggcagaatgggaatcacggcttgtgggttacatcgggctaataacttgggttaatgctaaaacctggctttctactaactatggacagcgggttcatttagcgaaagcagggggtctcttatgcaaaactgtatccgcgaaggggtattcttggatctcggtgtcgaatctaaaacgtgcgccccggattagacctgagtctcccctgaaccgatgcgcgatgacaaccacaagatctgagatcgatggctcgggtccgtcaatcaccaaatcagcggtccacacgcctccacacacctcggtctactcatag

SEQ ID NO: 13032 - DNA, 291 bp, Zea mays
  Peptide Sequence Number=SeqID_56407
atggcggaggagaagcaccaccaccaccacctgttccaccacaagaaggacgaggagcagctcgccgccggcgggtacggcgagtccgccgagtacacggaggccacggtgacggaggtggtgtccacgggcgagaacgagtacgacgagtacaagaaggaggagaaggagcacaagcacaagcagcacctcggcgaggccggcgccatcgccgccggcgccttcgcactcatgacgcagcctgacttacaggagaacgcacatttttacgggataatccatgattattga

SEQ ID NO: 13033 - DNA, 3972 bp, Zea mays
  Peptide Sequence Number=SeqID_56408
atggatcgagtggggctccaggcgttctgcaagcggcacggcctctctgccaggggctccaacgccgatctcattgcccgtcttgacgccgcgctcgggagggctgctggtgcggaggaggcggcggctggagtggcagcgaggaaggcttgtgtgaggcaaactggcggcgatgctgacgagacgaagaaggttacttttgtagaggtgggcggagatgtccctgtgaagctgtctaggaggaattcgctgggcgcacatgtccctgtgaggcggtccaggaggaattcgctgggcgcagatgtccttgtgaggcagtccagcagaaactcgctatgtgctgaggctcaagactgtgaactgaggtcccaggtcacctgttcgcctgttgttgccaagacaagggggaagtctgctcaagccggttctgtagaggtgggcgcagttgtccctttgaggcgttccaggagaaattcactgagagctgccgagtctgaagaagtagaagtggctgtttttgttgacaggaagcgcaagtgcaagaaccaggagaatgataagggtgttgttctcagcgctcaggttggagcttcgtccagagttacaagaagatcaagcttggcggtggctgctgctgtgttgcctcctcttgttgaaccgaagagagggaggggagaagcagctggcgttcagacttctactcaggtggaagtaccggctaggattacaagatctcgctcaatagcaccggttgtaatgtcacctactgtggttgagaacaagaggaggaagaatggagatgcacaaacaaatgtagagctgcctacggtttcagatgtgcctagaaatgatgctcctgtcaccaggtctttgagaaatagagttgtccaggttaacaacagtgtggtggacgcgaacaaaccggcaactaaagaacctgttaggggattgagacgaagatctgttgtctcagaattgcacgagaaagagaaagatgtggagaaacaattaattgtgaagcaacctgttaggcgctcatcacgtaaatctgttctacctgatatgcttgagaacaatatccaaagcggtaaatctcaagataatgagaaggaacagaaactaaaggaaccaattaggcgatcaaggagatctgttgccacagtgttgcttgaggaacaaaacagtggtcttcatgaggaaaaattgtcaaaacttactatgaggagatcaacacgtaaatctgttgcacttaatggtgttgaaaagacgagcatggatcacactgaaatagttgtgcagtccgaaactttaaagggaaggtcttcaaagaggagacggacaattgatccagtagaaatgatgcctgtcaaggaggcaaatgatgacatgattatcagggaagcaacaatagacacacacaaagctactcatgagtacaataagtctactagcagaattcaagaaagttgtcaggttaatgccacaagagaagagttctcttcaggtccattgcttgtaacagtaacaccgactaatgagatttacaccgtgcagagtatacatgaagtggtacctgggtcagaatctggtgacaatgcaaaggaaaatttagataagagtaaacagcctcaggaacatcatgacattcaagctgttgatagccatttatctgaaacaagaagtggggaattagatcaatcatcatgcattgcaggactagtaccacacaattgtgttgcctcagatgacaaagctttgatcagtggagatcgtgtagagcaaagccctgtatctggagaagggagagttggcttggaagcaaatgccattgagtctggagaaaagaacctaactggcatcatgtccactgctctctacaccaaaagtctgcaacatgatattgacatagtagctgaagagactgccaaaggtgacctcgaaaaaccttcactatgttcattagcacaaaagtgtaaacatcaatgtggtttgcttgaggaaatagtattgccctcaaggaacatgggatctttaccaaatgcagaagaatcaccatttggcctagagtctttgttctggcaggaaagcatacatgaatctgtggaatatggtgcacctgcttctgcaacaactcatactgaaaatggatttggtgaatcaaaaggttgccatgtcaagtctgcactcgaaaatactcatgtgtcagaacctttttcccaccatgatactgaagaaaatatttccaaaattggtggttgcatgcatacatcccagcaagataatggaatggaagatgctatcgagaatcctttaattagtttatcaactcctggttgcaagcatgaaggtgctttgtctgaggaagcagtgcacacaatgaaggattatgctggaacatgctcatcaaatcccagggtacccatgcagttgcatgacgaccttgcattcccaggtcctgaaaaatcaggagatgaatcagtcaatattgaggttaaagtacaccatggttctaatctgtctcagttaggatcaactgatctcttggatgatactgaattgcttcaccagggccataactataaagatcgatccaatgaggatatgctagagcaggctgcttctgaaccctgcacaaatggggatgatatcgtggaggctgcggctgctaccaaatgcttagaaagtggagcgatgctggttccatccgaagagagatcaaatttgaacgataggcagcttacccccaagctggaaagcccagacatcatggaatctggccttaactgtgataaagatgctcgcaatactttggacaatggatctgttgtggctgttgctggtaagagaactccatctggttctggtcactatgaacacaatgtctaccaagtttcaggcatttgtgctacgtctgaagctgcaccagtcggagtggtagaaactggaatagctgtggaaacgtcatccctggtagatgaccaacctaatcctgtgctggatggtgatgaagttgagaagcacagcttaaactgtgaggcagacactggtcggattcttggtactggatctgttacgagcaacacaacccttgtgcccaaggacggtcacaccatttgttgccaggaactggagctaccaaatggcttatcctcgtttctatttcccgaagaatctggaatttgtcagtatgcgagtgtctcaggatcagggccttgcctgcagcacgtaaatgaaagcaccagtacgcaagcgacttacaatattgaaacgctcaatcagcagcatcacgaggagtacgaccaaaccgctcgtggtatcctggctagcagttttcctgaagctgtagggattgaacagtcaggtctggcccctgctgcagaagcaccagtgttggcagtgccagatgggcagcctaacagcaagctggagggcaacgaagtggatgagcacagctgtagctatgatgccgagttcctgaacagagaagcgtctaaccttcacaaagatctgtttagtgaagatagtcatcgaagtcatctaccttctctgagatctcctcaacgatctgcctattttcacaacggaaatgattcgggttcagtaggagtctgtcaaagcagcaggcgaggaggtgtagacggactccgcgctaagcggcagagtttcaaagtttccagcagcataaaaggaagctacgtcgccaagactagcgtccctcgtccgaagccaggggacagcctgagccagtctgcgatagcgctgcgcggggtcaggaagaacacgaccgctgttgaagttggtggccatcctgtgagtttgaagccaaacgctgttcgctcggtcgccaaggacccatcatccagcagaggaccacccagggatagcctgagccagtctgcgatagcgctgcctaaacacagaaaggacgccactgctgttaagagcaagactaataataaaccttggctataa

SEQ ID NO: 13034 - DNA, 474 bp, Zea mays
  Peptide Sequence Number=SeqID_56409
atgggggaaaaggaggggaggggcgccgccgccagaggaggtgagggagagggaggccctacacagacggaaaaagggataaacgaagaaatcctagggtgttacacgagatctaggtctgctgcgaagaagattatcctctgcaccatcgcggaccgtccagcccaagcgtggaccgtcgaagccccaggcgtggaccgtccggacgcacgcagagaaggagacgctcttgcgcctaggtcgcggaccgtctgcgtctccgcagagagcaccactgttgtgttttgtgcccaccttagcctcctcttcctagagttgaaatcagtgggtcactgtaatccaagtgctgccttggctcatgttgtccctatccctgtccctgagcaaccatcttcgtgcaggttggatgcttcgctgttctggaacccagtaccagagaagctggaaaagtctttatcactacaaagattttga

SEQ ID NO: 13035 - DNA, 213 bp, Zea mays
  Peptide Sequence Number=SeqID_56410
atggcgcgacggtggcccggtggcgacggtggcggaccctcgcggctgcacggggaaacggcgggtgagcgcgagcagagagaaatagggaggggtagagggaattggggcgcgtcccgggttgctgacgccggggcgaagctcaccgaggcaacggacacggcggagctccaacggcggccgagaaacgagctcgagacggcggtgatttag

SEQ ID NO: 13036 - DNA, 144 bp, Zea mays
  Peptide Sequence Number=SeqID_56411
atggggctcggtgtatgcggctcgctctgccaagatgatgatgaggataatgctggtttctattatgattatggtaatggtaaagaaggaggtgtcgaggcggacctccaggagttccaggacttcgacgagttcgaggattag

SEQ ID NO: 13037 - DNA, 678 bp, Zea mays
  Peptide Sequence Number=SeqID_56412
atggccggttcacaccatgagctttcccgatggattcccccttcaaatcgagccgagcaacacattgctgagactaaagcgagtagtttagggccttcttacctgaggttggggcgacgaggcactccgcccacgcgttctgcggcacggcagtgggaggcgtgttccggcgacaaattcctcaatgcccgaccaccatccacctcgatgtccatagctccccactttggtgccctccagggaacaattctgcgcgcacaccgagggcccgacgccgctagtcgtaattataccgtagcggccgcttctctaagctctctctctctctctctgcttcagctatggcaccagggtgacatgcgcatggctctaagggacgagggggaagaccgcgactggttttatagtcacgagaaaagatgtttagcttttgtgggtacgggtgacccgatgggtgacccatacccacatgggtatgggtatggggcacgccctatcgcttcatcctgcaagcgacgcacgccaccaacacctcccctgtggcgatcagagccgcgcgctagatccaacaccctccccgaaatcgcggcggattccggcgccagcggccctgctccagatctgcattccgcgcaggggcttctcctgaccacctcgcgccctcgtctctccaagtaa

SEQ ID NO: 13038 - DNA, 408 bp, Zea mays
  Peptide Sequence Number=SeqID_56413
atggcacccaagaaagctagttcgaaggcagccccaacctttaacgaagcagcgaaggcggcactgctagccgagaaaaagtgcaaagcccttgcagacactacccatcaagaagcctacgaagacgacgctgtcagcaagagacagcgcaacgaccaacccactcccgagggcagccttcacacctgcagctccggagaacagccacaacaaccacccccaggcttcgctccgctagagggcgaggatgccacagaggacgacgaagtcatcggcattttagcagaagaacagctacagctgcgggccctccgcatcaagaaccgcaacctccagaagcagaaagaaatcctcgaggccaagcgccaacgtgtttccgcgcaggccaaagtgcgccagatgatatga

SEQ ID NO: 13039 - DNA, 204 bp, Zea mays
  Peptide Sequence Number=SeqID_56414
atgacgcccgagcagaagcaaaacgagctgaagaggctacagaacgcgaaaggcgttgcagtggtggtggcggtgggagctgaggccaagaagcttgttaatggcttgccgaagccacagaagctgcaggttgattgcccacatattctgaatagtgatttggcacgttcttgtagtgtggcccttgtcctcaccacagaataa

SEQ ID NO: 13040 - DNA, 1330 bp, Zea mays
  Peptide Sequence Number=SeqID_56415
gaaccggaagaacagaggcgggcttggccgcttggcccccccctcgcgttcactccaccaccttttccttcatcttttgatcgacgccgaccgtctcacacagcccaggaccccaccggagaaagcacaatgcccctcctcaggcatcccgtccggtgctggcctggcaaaagccgttgtcctcatgctcccgccgcacaacaaagcatcccagctctcactcagcttctcgcccgtaaaccaaattcgtttcatttggtcaacaaacaaggaagcccttagccctcccaccgtgtccatctccactcgccagtctcagcccgccggccaccccccacatctcgccatgtgcggtgggtgccgccgccgccaatgtggccccgacgggacgcccgacggcggccgccggggctgcggaaccgtgatcgccgtgctggccctggcggccgccgcggcggtcgcgttcctggagagcgcggccggcgggatctcctacgcgggggacgggtggctgcacgagtgcgccaagtgggacgccgagggcggcaggttcctggcgtccaccttcttcggcggcggcgtggcggaggtgcgcgccggcgagggcgaggccgaggagcgggtggtcgtggccgaccccgtcgcggccggccgggtcgcgctggggctcgcggtcgacgcgcccaggcggcgcctgctcctggtctacgccgaccggccgccgcgcctcggctacgccgcgctgggcgcctacgacctcggatcgtggcgccgtctcttcctcacgcgcctcgacgtgccaggcgagtctacatttcccgacgacgtcgccgccgacgaggaaggcaacgcctacgtgaccgacgccaagggaagcaagatctggaaggtcgggccggacggcgcgctgctcggcgtcatcaagaacgccacgttcgtgcagcggccgggcctgcgccacaacctcgtcggcctcaatggcattgtctaccaccctaacggctacctcctcgtcgtccacacctccggcggtgacttcttcaaggtcgacccgaagacagagaccgtgcgcgtcgtcaaggtgcgggggtcgctgaggcgaggggacggccttgagctgctctccccgacgaggctggttgtcgccggcctgccgaaccggctggtggagagctccgacgactgggagacggcgagtgtcaccgggcagtacgtcgggccggtccaccggatcgggtcgtcggctacggtgaaggacggggacgtgtacgtcaaccatattgtcgggttcgggctcggcaggaagaagacgcacgtccttgcaagggcg

SEQ ID NO: 13041 - DNA, 1075 bp, Zea mays
  Peptide Sequence Number=SeqID_56416
atggggaatgcttcaaaacggagaaggggagaaaatgagatggaaaaaaagaaggggcggagccctgcttctcccgcgttgcgctcctgttcatcgtcggcccgtagcgactcgcgcgcggatcttgggccgcccccttcgcatccttgctttgggcggtcttctgcggtgtcgtcttcgctcggcccagagcggcaggcagttgaagcggcgcacaatgggcgatttccttcaggtacgcgtctagggtttctgtccgactacgtgggttcgcattctttccctcatctcgtgtcgtgtctctctcgtctctggtctctcccgtgttcgtcgcgtgctagtttctgcggtggttgggttttctctccgtttcgtccgccgacaattgccgaggagtggcccctcccgggtctctcggcggctccgctccagatggatccgaagaatcgtaaccctaactgggaccgttgggggccgaaagaagccccgcagggttcccaatcttggggaaaaaaccggagcctcagctggcgtttgaagccggggtctggaaaacccgagagcaaggatgacatccctatctcttcttccggcgatggcggccattcaggtattcttaaaacccctccccctaccattctaaaagtagagaatgaaatggctaagcccaaatccaaactgcactcggtatggattgtggctgagaatgtgcctgaagaacttcagaattaccaggctatctgtgaattgggttctactattggggctgtggaagaagtggatattacctctttaaactctaaagagattgttagatttaaagttcatgttaagagtgtggctatgattccccctatcattgaagttggtgtcaaaccttttctgtatgacatcttctttaaaattgataatattactgatgaagggtggaatgatgagtctattaacctgggcaagagggcttctgtagatagacaaggttttggtgacctctcttttgaaaaatttgttaaaaaggccaaaagtggtgatgaagaatctggcagggatgttaagggaaacatctcccttaaag

SEQ ID NO: 13042 - DNA, 273 bp, Zea mays
  Peptide Sequence Number=SeqID_56417
atggattccggcatggaatctgtcgctgagctgtgtgcccagaagttctccgtggccgttgaagcaggccgcgacaccgtcaatgcttctgttgccacctgtgtggtagctggtgatctctgcgccacagcatcagtaggcaaccatgtggtttcgacgcttgatgttcttgaatccgttgtggaggcggaaaaatgtgttatgtgttcttatcaacaggccagtgcagccgtcgtttgtgctcaggaacaatggccaaatactctcagatga

SEQ ID NO: 13043 - DNA, 417 bp, Zea mays
  Peptide Sequence Number=SeqID_56418
atgggcaagaacaacaaacgcaagcgcgagccgactcctccatcagaggactttggcgactcggaatactcagaggaggagttctcctctgggtccgaggggtctccggctcccgtctctcccccagcgtcgtccgatgactcggacgactctcaggggattgccgtggaggtctggacttacatccgggccgtcgagcgctccgggctcaagggctcggatgagtcggagtactcctcggacgaggaggactcgcccgaggaggacgacgaaggtgacgacgacgacggaggcgacggcagcgacgacggtgacgacggcagcaggggcgacaacggtggcagcaggagcggcaacggcggcagcaggggcggcgacggcggcagcagcaaaggcagcaacagggccagtggctag

SEQ ID NO: 13044 - DNA, 633 bp, Zea mays
  Peptide Sequence Number=SeqID_56419
atggcgcaccggacagtccggtgcacaccggacagtccggtgcccctgccacgtcatcactgccgttggattctagccgttggagcttctgacttgtggacccgcctgggtgtccggtgcacaccggacatgtactgtttgatgtccggtgcaccgtggtcggctaggaagattagggaggataagtttttaatgaggttacctgatcccaaaatcatcaatgatctgggctattttcgtccccttggtatgagatctgctaatgcccaaatcaccattgacccgtggtccccatctattaatgctaaaggctgccttcagagaggtttgttcagaatccgtgggattccgatggaacaaaggtctatcaaaactattgcaaaaattggtggtttggtgggtaaagtggtggagattgatgaaaaatccggattgcgtaatgaatatgtcagagctcgaattgcttgtagagaggttagtgcagtccctgaggttgttgagagtgctttgggcatgtacatttatgatttcttcttcaagagagaagttcaagctgatgaagatgaggagaaattgaaaactgcagtcagcagtgagggaaacaagcatcatactgctaagcaccaagtttga

SEQ ID NO: 13045 - DNA, 1827 bp, Zea mays
  Peptide Sequence Number=SeqID_56420
atgaacaacaacggatccgtcttcccgtcatatcggggaaaatccagcttctggaacctgggcggtcgatcggtgtggtgctggccgtcgggacggctgtcggcttccgacgacgaggccgccttcgccttgaggcccaccacatcggcggacagggtctgcaacatcctgacaacgtcagcgaggcttggctcttcgttagccatggccggatgcacagagggggacgcgacggaggttggtggtgacggtggaggggctgttggtggggctgtgggtggggatacatcggcggtggatcggaaggatcgacgcgacgttgataccaggttgtcaagagcagtgttcgacagggatgccggacctctactccggagctcgtactctcgctccgtgataactccggcagggttatgcccccgtgccgctgacacgctcaccggccatcatagtgatttgctcccccctcctcgggaccctgtggtcgacgatgattctgccaggcagcggcggcgataccgttctcgttcaacgcccccagactttgacggtcgtggaacccctgatgtggaaaatactcaccggggaaggcggtctgtcctgcatcgtttgggtccgacgtccgagacggctcccaaagatgcgggtgtttctgcaggagatcttcctggtgatgcttgggtgacctcttctgtaatgacggttctgggatcagagcttccccagggcaattctgtccctgtcgaggagcttgttcctgtggagctgtatggatcggtttctgacaccacaaatgttgctctcaacagttcaagccttgatcttgatggtgtgcttgaggcggtcaccgtggccccagaagcagtgctcctccaggacgttgttgttcctgttgaggaggttggtcctgttgagccccttggaccggtgggagatgcacccttgtatgctattaattcagccagcagcagccctgttcttgttgtggacagcacaaatgttgccctcaacagctcaggccttgttcttgatggtgtgctagagacggtcaccgtgactccagaagcaatgctcatccaggacgttgttgtccctgttgaggaggttgttcctgttgagccccatggaccggtggatgatgcacccttgtttgctattgcttcggccagcagcagccctgttcttgttcttcctactcagaacttgtttgaccagagatggcgtcctgatcgctgttgtctcaatgtctattctcgaagaacgaaggttgggtcagatccatctattctgaaggagctggttgattctttgcccctggagaccttcaaacaaattatcaccaaaccgattaacgggctgctctcgccacctaggtgcaatttgagaaagaagaagaccctgccgaaggacttcatgcctaggaggagtagaagggtggctaagcttcctcctgtcctcggaaacgtctcagttgccaaggtgtgcagacatttggggtactacggtgaccatgaggaaatctccttggaaaatgccgctagttatgccaaattattcgagaatggcctttccaaatcacatgtggaggctatggcagctttgatcggctgggaagtgctggtagagatccaggaaactaagctgagttccatctctgcttttgatgtcctatctattctgggtgttggctatgtctccattcagcttcaggaggaatctggaatgcaatggtggtttactggagtttacggcccgcatcaggacaatcttacgcagttttttcttcaagaattgagagatgttaggggcctgtgcgcaggcccttag

SEQ ID NO: 13046 - DNA, 342 bp, Zea mays
  Peptide Sequence Number=SeqID_56421
atggaccgatcctgcaggctcagacgtcgacggagggggagcagcagcaccctcggcgtcaactccaccttcggcaaagtccaaccgagagtctccactccgaaggacgacgttagcgccacgcccgggctatcgccgccggggtctcctccaggaatccagcccgagcagacagctcggccggccgccccgaagcctcagccagctgtcctccgaggacaccagcccggctcgtggcttcggcaactcgactccggcgctggtcctaccagtggacggcccggccaggctccggccgacgaagtcttcttttcgagccaactctgcctctgtccatgctaa

SEQ ID NO: 13047 - DNA, 174 bp, Zea mays
  Peptide Sequence Number=SeqID_56422
atggcgggcggaattaagctcgccggagctaagggaaggggctggccggagaggagatatggagccaggaaatctggtctgtctccctgcccaaacccgaggcaaatcccaggttttgttgtgtctagggctcgcgtcccaatgccatcttctggcacacgacagaggggttag

SEQ ID NO: 13048 - DNA, 1083 bp, Zea mays
  Peptide Sequence Number=SeqID_56423
atgcatgaggggagtgcgaaggcatggctgccacccaagggggtcgccccctttttaaaggcgactctcctcactcgtgtcctcaggcgtcgcggactaagtcttcaccaacgcgctccaaggtcctccccctacgacacgggggcggggtcccacacgccatgcaagctggccgggacaaaagaagccaaaccaccacgcgcagagcgtgtaaccgcccagcggttacaagcactcctccatcttcgcctaaaccagtgggtgaaagggtggaccgccatgcaggtggcatgcaactgcaccatagagatgcaccctttcgacttcgacgcatccagcatggagcccaggcccacacgtcatgtaactggcgcgccggttgctacgtgcgaaaaactgcaccgccacttacgccaatgccgcgcctcctcgactacggaaccggtgccgcgactcgaggcaaccctgcacatggcccaacagtgccaaccaagcacatcggtcacaggtcagtcaaccgcgggaaaaggcgcgacggtcgatatggccaaaagtgggccggcagtaatggcggcggcaggcgggcggaagcagcagtcaaatcgtctgcaggctcacgtcccctcctgggacagcgagagagccctctcccacggcatgaagacgacgcacccgtgttccgttcctcgaacggctcgcacaacggctgccccgcgaaccactcgtcccgtcgctttaactccgcggcagggcagggaccgggaaaggggatactccgaaagggatccttctctgcgaaggaagcgggccccgagcccccctactgatcagaggttcgaaggctggcccctcggaagggatcgacagccacctcagagcactcgggctccgagccctcctactgatcagaggctgccccccgaagggttcgacagccgcctcagaacacgcagagcgagggatgactctgggtacatccgatacatggccgaggcttgggctacgctctcaaggtcaaagctccgcccactcaagggacacgatcttgcctcgcccgagcccagcctcgggcaagaacagtag

SEQ ID NO: 13049 - DNA, 420 bp, Zea mays
  Peptide Sequence Number=SeqID_56424
atggtgggagacacagcaggccagcgggggagtctgacgacgctgacggaggccagcacgctagagggcaggctagtgagtagagatggcaatgggtacccgttacccgaaacccggtgggtttttgctctattaaggtatgggtttgggtcaatttctctacccatgggtttattaatgggttcaaatggaaacccaacggtgggtatggaaaactcgttgggtacccgaaacccgcatgggtatgggtttgggcaaaattttatacccgtcatgggtatgggttttttagcgggcgtattttttcttcgcgggtatgggtttgggcaagtaatacccattgggtttttacccattgccatctctactagtgagggactgattacgggaggcacgcggggaattaacgtcggagggtag

SEQ ID NO: 13050 - DNA, 1149 bp, Zea mays
  Peptide Sequence Number=SeqID_56425
atgtcttcgcgctccccttatgcatcgcgtcttcccaccttccgagcccccggatgggggacactcgcagttcttccgccttgtcgttggaggaacgcaacttcgcggaagttggtacctttcagccatcgtttggcttcaaggattttcatcagccagcccggccgcatcccctcgccggtggtcacccaagacggtgaccaccagctcctgggtggggagaagcaagccgggctgcgatctctgccctgccctcagcttcaaggatcttcatcatccttgctggggcagagagcgaggaggcgtcctccagccatgccggggaaggcgaactgttgctgcccagctaggatacaacattccgtcctctatcctcgctttcgtggcgaggacgggagcgaggacctgccggtgcgctttggagcggcccgcgctcgctggtgcggcgttggtggacaggcggacgccgccgtcggtgctaacgtggtggcagctggagaaagcttccccatcatcgaggccatcagcgccgcctacagaccgacctccggctctttggctttaatggctggttcgcgtcccttgagtggggacgcgaacgagagccttctggtggctgcgtccgtcctgggaccatggctgctgctgcagaggtcgctggcgagtcgcccggagcttgtcgccccgcaggctccctgcatggacaggggcagagttggctcgaaaagaagacttcgtcggccggagcctggccgggccgtccactggcgggaccagcgtcggagtcgagttgccgaggccatgagtcgggctgatgtccttgggggacagctggctgaggcttcgggagatcctcagaccgcgttgctgtccgaggctcggtcggacttcgccgaaggtgtagtcgacgccgagggtgttgctgctccctctccgtcaaggtccgagcctgattctgctatcgatatagtcgagaaggtccgaaaaatcgtttcggcagaagagttttcgagcgtgaagacttgttcggtccgcggaatcacttatccgagcgggagttacttatcgcagaaggtgatgagtgagacttcgtacgtgaacgaggtgtatgaacaacttgaaagcatcttaagggtagaagcgacgtag

SEQ ID NO: 13051 - DNA, 993 bp, Zea mays
  Peptide Sequence Number=SeqID_56426
atgcaggcggcatgcaaccgcaccaagggggcgcaccctttcgacttcaacgcgtccagcatggaggcccaggcccacacgtcatgcaaccagctcgtcggttgctacgtgcaagaaactgcaccgccactcgcgccactaccgtgcctcctcgactgcggaaccagtaccatgactcgaggcaaccctgcgcatgacccaacagtgccaaccaggcacatcggtcacgggtcagtcagccgcaggagaaggcgcgacggtcgatacggccagaaatgggccggcagtaatggtggtggcaggcgggcggaagcagcggacaggcggcacctttggcaagcgaagcaggcgacgcttcgcttccgccataatgaccgcgtcaaaaaagggatcgggaaaggggataccctgaaagggatccttctccacgaaggaaacgggccccgagtccccctactgatcagaggttcaaaggctggcccctcggaggggttcaacagccgcctcagagcgctcgggctccgcgcccactactggctggccctcgaagggttcgacagcctcctcagacgcagagcgagggatgaccctgggtacgttcgatacataaccaaggctcgggctacgctcccgagagtgaggttgacagcagccaagtccggcctcgggcgccataggaaactccgcctcgctcgaccccagggctcggactcggccccggaagacgacgaactccgcctcgcccgaccccagggctcggactcggccttggccccggaagacgacgaactccgcctcgcccgaccccagggctcggactcggcctcggccccggaagacgacgaactccgcctcgcccgaccccagggctcgggctcgacctcgaccatggaagacagactcgacctcgacctcggaggagcctccgcctcgcccaacccagggctcggaccgaccacgccacagggggggccatcattaccctacccctag

SEQ ID NO: 13052 - DNA, 825 bp, Zea mays
  Peptide Sequence Number=SeqID_56427
atgaagcgaaacatatgctttggagtccaaaaatctaattttttctgggaaaagtgcgagcacattgtttgtttggagaaatccaattttctactcacggacgccgcccctgtgcctcgccatcgcctcaggtacgcaaggcggccgaacacgagcgcccgccttcgttcttgcctgcgctgcccctctcctcgccgtttattcgggctcctacctcttgttacaacttgcgcggtgggggcagtgaggcagcaagacgtgaggtccaggatgatgaacaacaacagtggcggcggtgccggaggccctggagggggcatgggtacgggagtgggtggagggggggacgggcggcacgacgacgaggctgcgctcaccgagttcctctcatccctcatggactacacccccacggtatgcggcttaaccctgatgcttggttcggtggcgcgtaagattcccgacgagctggtggagcactacctcggccgcagcgggttccactgccccgacctgcgcctgcgcatctggatagaaagggagaggagggagtatgctggatatgtgggggtgaccatgtatatgcgcactggagccattgatacaggaagggaaggagaggctaaagaaaggaagagcatgaagagaaccaggcaaggctgcacctgcacctgcacctgccctcgcccatctctgttggctccggcgcctgtggtcttgcagatcttcactggtcaactccaggcttgtcgttgctcaaagacggcattggaaaggactgatgtaaacaggcaaacagcatcaagtgaggaattggtggattag

SEQ ID NO: 13053 - DNA, 198 bp, Zea mays
  Peptide Sequence Number=SeqID_56428
atggccgaggctctggcggcaatggcgggcggaattgagctcgccggagctaaggggagggggctggccggtgagggattcgagttggggatcaaggtgaacatccctgatctttggctcaagaggacaatctctgcgccgcgcgtaaacaacgccagaagagtcgtcgtccttgaccgtcctgtaaaggcggactga

SEQ ID NO: 13054 - DNA, 393 bp, Zea mays
  Peptide Sequence Number=SeqID_56429
gttgacaagtccgaagatcatgacacataccgacagaggtattggatgtgtgctaactatgcatttgagccaacgattgctcagcaccggatgattttaatgtggaatgacacggaaatctcccagaaaaacaaggaatgcttggagaatcttaagaagtgggatgcagaggaggagaggatagagaaaagacgagaggagcttacagccgagcaacaaagggtacaagaagaggaaatgaggcatgttactgaatgcagggaggagaaggagaagaagcttgagcgtgcacgccgtgcgaaggaagcaatggaggagaaccccgatgcttttcgcaagggaaaacagtcacgttgcactcagtggtctaggtgcttatattatgttatgtag

SEQ ID NO: 13055 - DNA, 129 bp, Zea mays
  Peptide Sequence Number=SeqID_56430
atggccgaggctctggcggcaatggcgggcggaattgagctcgccggagctaaggggagggggctggccggtgagggattcgagttggggatcaaggtgaacatccctgatctttggctcaaggtctga

SEQ ID NO: 13056 - DNA, 516 bp, Zea mays
  Peptide Sequence Number=SeqID_56431
atgggcaccggactcttccaacatgtctttaaccaaacttgcaagcttcgaaaaagaatggggtggcgagctgatgtcaacgacagcaaccgaagtaacgtggaaacaacgaaaatcgatggaattcaggagggcgcaaaggtgctcggaactgatgctctagtgagtcctgctccccctctcccgccctcacagcaacctgcgccgctcctctgcacgcccctctgcatgccgcccctctgcaagccctcacagcaagctctggtgagtcctgctccccctctcccgccctcacagcaacatgagccgctcctctgcaagccctcacagcaagctctggtgagtcctgctccccctctcccgccctcacagcaacctgcgctgcccctctgcaacatgcctaatgatgatgaagaagtggatgactttggtgaatccccacatagcaatccaaatcaagctggtgctggtggtgaagaaaatgcaatggatgatcttgatttgggagatatttag

SEQ ID NO: 13057 - DNA, 618 bp, Zea mays
  Peptide Sequence Number=SeqID_56432
atggcgagagtagcgtgtaccctctgtggcaagaggctggacggtgatgtatctgttctctcagttggcgtgaacctgatctgttttcccccttatggagatatgctgccatgtacgaggaaaactgcgcgtaagtccactggacctattggtgtacctcggcatcagctggttccaagacatgaagagagcagcagcggcagtaacgaccccatcggagacctagaagcccaagtggagcagttgcggacggagctatgtcatagaaacagggtgtgggaagaagatgacgagcttgctgaatgggatttggcaatcgattgggctatcaactcacgttcaattgcttgggactgggaagccaaagctcgtgctcgtgtggcagagcttagcacggtcgttgacaacgtgcaggtgtattgcaatacattacatgaggaagttcatgaactgtattcacgactgcacctagacgtacctgccgaccatgttggaatgggagccggacctcaggaacagcagggatcttcgaacaaaggcccacggtgtgaagaagcacggaaacaacacgaaggatggagcagagccgaagctgtacgcaagggagcttcggcatga

SEQ ID NO: 13058 - DNA, 168 bp, Zea mays
  Peptide Sequence Number=SeqID_56433
atggagagtcatgatctccgggcagaaagcgaatcacggcttgtgggtaaaagacattatggtacaggtggctatgagatcgatggttctggttatgactatggtgctggagaagatgaagccgtggaaggagacttccaggagttccaagactacgacgagttctag

SEQ ID NO: 13059 - DNA, 492 bp, Zea mays
  Peptide Sequence Number=SeqID_56434
atgttgttacttcacgcatttcctggtttcatcgctgagcagtgcggcggcgggcccccgtcgtcgtcggcaacgacaaccaggtggcgtgagctgcagggcaacaactcgtggaacgacctcctggacccgctggacatggacgtccgcaggtccatcatctcctacgacgagctggtgcaagccacctacgataacttcaaccgagagcggcgacatcaacttggacaccgatgcaggaacctcacactggcggcgacgagaccgaaggtagaatactggatgacctattatactatctgtcggcgtttcgagaccggggggtccctaagccgacgagtgagtgtgccgcgtgccccagcccagatgggtcgagcgcgtgggcgagcgcgaaggggggaaagcgaggtggccggagacgggcgtgagagaggtggaaatcccgcggccttcgtgttcgtcccgcgcccaggtcgggtgcgcttgcagtag

SEQ ID NO: 13060 - DNA, 657 bp, Zea mays
  Peptide Sequence Number=SeqID_56435
atgaatcccgcgaatcgcccgccgctcctccagctccgcgaaccgcccgcccgacgagctcttccacaacggccagatccgaccgctcaccctacccccactcccggatctcgaccccggaagcgacgacaacgaggactgcgtgggcggtcgcgcgccgacgcgcggtccatgtccccgctccacagctcgtcatcgcggctcaagctaatcaatgcgctcgtcgtcccggcgccggatctcggccccggccccgatgcgacaggaacgcacggggaggcagccccgccggtaaccgcctcgtcccgctcatcctcctccacgtcctcctcgtcctcgtcgggcacgtctccatatggaccagaaattgtgcagctccgtcggaagttcggccactggaatagtttcgatgacgttgagtttttcgagtatgtcgaagcagtaaagttgactggtgatctgagtgtccctgctggccagataacatttcgtgcgaagattgggaagggcaagcgacttgagaatcggggcgcgtatccagaggaattcggtgtgattgccagttataaaggtcagggtagaatagctcagcctggattcaaaaatcctcgatgggtggatggtgagctgttggtgctcaatggcaaggtagactga

SEQ ID NO: 13061 - DNA, 906 bp, Zea mays
  Peptide Sequence Number=SeqID_56436
atgaatgcgctgtctcgcgagggctgcagacacttcgaggtcttcgaccaaacagacgagagctttgaacgcgagatctttaaggccgaagaccctgttgtgaagcagtcagcggtggcactttttgataggatgtggggggctcatggtcgggaggctgtcagggagcaatccgaccgggcgagagagcagatggagcgcgccgaggacgtcgaggacttcgagggtctagtcggcgcgccgcccgaggctgcggagggcaaaccggtgctgcccacggatgctggtgaaggcccatcggacgcgcctgtgcctgctgctgctggtgaagaccctgtgtcagcccctgtgctgacggtcgaaggcgcccaggaggcggcggcagagccggcagtcgaaggccctacgaccgcggacgcgccctcgcaggttcagggttttgggcctgcgcacgcaaccgctactgaaagtgctaattttgtggtggcttcgaccgtggttgcggaaaatgattcggatgattctgtgtctaagttttttgagtctgatgattctgggagttcggtggtgtggacggaagagtcttcggatgaggatttggattattttgcagcattggatgtggctgcggcggaggcttcgccgcgtgtgatgggtgctgaagttcttcccggtccaagtgctgggcgtaggcggcgaagggcggtggcgaagcgtagagtgagtgaggtggagggtggtcgtcttcgtgtggacagggctggcaagcgggaattgttgtcctcgccagttggggtgtgtgtagttgagggggagttgcgaagcctctttgagggtgaggaactgaggataatgttgtttaactacagggagatgggtattatcccgaaggttgaaccaatgtaa

SEQ ID NO: 13062 - DNA, 1656 bp, Zea mays
  Peptide Sequence Number=SeqID_56437
atgaaaattggacataagattgcacaatttggatcttgcacatttacgccgaagaccggcaagacttcgatggaagtcgtggagttggttccctgcgcctgcaataaatggggcaactggtgggaattttggttttacatttccgaaggcacagtcgaagaccatcaagggctccccgtggccgtcatgtgctcacattattacgcagcgtacccgcagtttgaggtagcggaggatgatgaaaacgaagaggcccttcggtgcgctgcctgcatgagtagcgggcgcgaccttgttgaggagtttgtcgggatgctggtgcggaatcctgccttcgcactggatttgcatggccgagatcccaccgcattcgtgcgtgaagcggaagacggtgcggtgaggatcgtggggcgctacgtgccgaagacagagggtctgcggagctgggatatccatgggtccaatgacaggctgaatcgggttttcgaattgaaccgtttgtcgtacggtggttatcccggggaagacgccgccgaccgccgcgggaagaaaccgatgggcgggaccgaggaagggccttcgcaggtggctgccccggccactaagaagagaaaattaggtactatagtggggggaaagggggtgtctgataattttgttgtggagttgatggggacatgtgcggcccctgggggaaggatgtcttcgcccgagctccgggagtcttcagcgattttcccttacggacggaatattgctgctgttgtgtcggcagtgatgaacaaggatcgccaggatgctgcgcagaagcgccgggcggtcatcaggctccccgatcctaggcgtgaagcgaagagagcgcgggggagcgcgaaggctgccgcccccggtggtagccagccgacgctggctgggaagccgaccgcacccggatccagcaaggtgtcgaagagcacgaaggccgtcgtcgccggcggaaccaagtctaccccgggcgaagctgcgaaggtccgggagctgccttcgctgaggaaacgcgttgccgacttcgccacgaatattagcgtggacgactatttcgtcggtaagggtggcgctttctgcgcaagcggcgagatttcgtcggccgctaccgtcaaggacgaggcgggcaccatgtcccgccggctgagggaggcatcgcagcatctgtcgcagcagctaagtcaagcggccgacttcaccgaccgcgtggtgtcgggtgcccttactgcagatgtgtctgccgaagtcgagagacttcgggcgcagcacacggacgccgtccgagagaagttggctgcggagagcaaaaaccgcaggctggcggagaaggtggccgccctggaggccgagaagacagacctccagtgccagctggtggaggaaaggagggaggccaaccaggccatcgccgaggcacatgctacacaggcggaggccaaattggcgcgggcggagggaagtctcaccagccaacacgccgaggaatgggaggtgcggttcaacgttctgcgtggccgcgtggagaaggccgaggcctctacgcactcggaagttgagcggacgcgcgcacagctcgtggattcgtaccgcgagctgggtgcgcggactgctgacttcgaggtgcctgactga

SEQ ID NO: 13063 - DNA, 720 bp, Zea mays
  Peptide Sequence Number=SeqID_56438
atgaattcacccacccccgccagtggaggagactctcgtttcagttctgacttcctctctcgcgatggctttccttccatcttgtgggaagtgcttaactccgccggttaccctatgccccctttgtacacggtgcagttgtatgaggagcatcgggtacctcgttgtcgggtctggctgactttggaggctcatccccttcagccgggttggcgttctcttgattctgagatgattggactcaggacggacgacaccgttgaagcagcagccatgaagactctgacgactttctgtggctaccatcccctggaaatggtgatgcaccccttaggactcttccctcctgagaagaaggatgatctcatgtggtgtaaccgcagcgatgctatggaactccttgctaacaccgctcaaactgccaagctcactctcgatagtcgagaagattttgtggtcgatctatccaccgagttggtagagaaggatctgcaggtggagaggctgagccagcgcatcaccaccttggagcagcagatggaactcgaagaagcaaatgaccacttggacatgcaccacctggagatggaggccaatgaagtaggaagcgagggagaagaggctcccaaggagcaaggaccagcccctggtgccaatgggactacctccgcgatgcctccttcacccgtatccagtgtcgcttctaccgctcagggttaa

SEQ ID NO: 13064 - DNA, 990 bp, Zea mays
  Peptide Sequence Number=SeqID_56439
atgcatatatcttactcattgcattcattagactgcaatatagctgacagagagtacatgctcatccccgagcaaggagttgtccacgaggaagaccaggagcaagctctcgagactgccactgaggatctccccgcagccccagcatttgaaggcaagtcccgctatggtgggtacaagtgcggtcactgcacggcggcagccggggtcagtggagcattgtatgccaaggcggtgcgcttcaggatatggttgatgttgtatgaggagcatcgagtaccacgttgccgagtctggctgacattggaggctcacccccttcagccgggttggcattctcttgactccgagacgattggatttaggacggacgacaccactgaagtggtagccatgaagactctaatgactttctatggctaccatcccatggagatggtgatgcaccccttgggactcttccctgttgagaagaaggatgaccccatgtggtgtaatcgtgtgagccatgtgaaagatgtgtgggcaatgtatcctgacttggttgggagggtcattgttcagtgcatgagtgcgttgtaccaccttcaagccctgcagagcgatgctatgacacatcttgctaacatcgctcaaaccaccaagctcaccctcgacagccgagaagattttgtggttgacttgtcctccgagttggtggagaaggatctacaggtggaaaggctgagccagcgcattaccaccttggagcatcaggtggagatccgagacaacactattgatgccttggagaaccagctccacgatgtgcagcgggaactcgaagaagctaatgaccacttggacatacaccacttagagatggaggccaatgaatccaaaagcgagggagaagaggctcccgaggagttaggaccagcccttggtgccaatgggactacctccacgatgcccccttcacccgcatctagtgtcacttccaccgcttag

SEQ ID NO: 13065 - DNA, 150 bp, Zea mays
  Peptide Sequence Number=SeqID_56440
atggcggatggcggcgatggcaatggtggacggcggcacgggtatggtgtatatgcagatgcaattgtggacattacaccacaatccatcacactcaatcaaagatccaaatcagataagtatcataagaacaaacactcaagcgtatag

SEQ ID NO: 13066 - DNA, 216 bp, Zea mays
  Peptide Sequence Number=SeqID_56441
atggggcagggtttcctcatggcggcgcgaggccaacccaatgaaagggcgcaacactccctcacccccgtgactactatgtcgtggctcctctcgtcagttaatggcaaggtggagaaagagaaagcactccgctttatgggcgaagtgcatggccgagttggccggcccaagggggtctacaacagcagccggatttttcgctcgttccgttga

SEQ ID NO: 13067 - DNA, 198 bp, Zea mays
  Peptide Sequence Number=SeqID_56442
atggtctctcattccggttatggtgggtacaagtgcggtcactgcacgacgacagtcggggtaagtggggcattgtacggcaaggcgataggttctctggaggacatggttgctggagtgacttggtcgtccatcttgccaccgggttggacagtcgagtgggacgctacctcggctgaggaggagcatgaggagtga

SEQ ID NO: 13068 - DNA, 546 bp, Zea mays
  Peptide Sequence Number=SeqID_56443
atggacagagggttacagtggttcatggcgatccggtggaggtgccagggcacgtggcgccaagccgtgcgacggctgtcaccagcgagcttatctgcccaagccgcaaagcaagggggatacggcggtgagtcaccggagtcatctccagcccgcaccgttgcgtcttcttccccgcgccgccgccactgcaacgcccatcgccgccttctgccccacgcgcgctgcccctacccgctcgcccgcgcgccgcgcgcgcccctgctcggccgccacacgcgctgccatgccgctctgctcgcccgcgcgcgctgcgctgccgccgcgcgccgaccaccgctgcaccgctgccacgccgctggttgcctgctcgccgcgccgctgctgcccctgcccaacagcgcgcgcgttgcccgcccgaccccgaccgccagcgccgtccgccaccaccgtcgacgtccgctgccgtcctccgctacggtcgaccgcccgcgtctacttcttctaccactccgccgtcgtcgccaaactcttcgccatccaaag

SEQ ID NO: 13069 - DNA, 666 bp, Zea mays
  Peptide Sequence Number=SeqID_56444
atggccgtgatgggttcaacatcggaaaagatgtacctctgccaggtaccaaactttgggtttgaaatgataaagctgagactgggtggtttacttgcacgagaagggagtcttggtgtagtgtcttcgtctgagtcgattaaggaccttgtcgatgtaggcttgctgatcgaggaccttttaactggtcacatgcctcatcatggaagcaacaaaagtttgtcgcttcctcacctaaaaacaacggggaataaaaccctgagtatggaattactcagcaagtcttacccgactaaagaaaagactctcaaggggacttcaaggaaggtaatcaaatccaaggaaggtaatgcaggaattgttttagcaatcaattcctatcacctaatgcatcaaaagaaacccgcgcactatttcggggagtcactgacagttttagaagagcccctgcgtttctattcttttacacgccgacaccctcgacggcggacggcgtcgcgcagagctccgaccagcacgcgcatcggccaacttgctcaaagactggcgccctcctttggccgaacccaaattcaagatctagtgagtgttttccctaagtcaatttcgcaaatgggtgcctggttggctctggccacggtgaccgtggatgttgcggatgaataa

SEQ ID NO: 13070 - DNA, 417 bp, Zea mays
  Peptide Sequence Number=SeqID_56445
atgccgccgcgcacgaggagaactgcgcgcaagcatactggcccaattggtgtgccatgtcatcagctggccccaagacacgaggatagcagtagtgggagtaatgatccgatcagggatcttgaagtgcaagtgaatcggcttcaaatagaactccgacgtaggactgacatatgggtcgcagatggcgacagaatcaatgaattaagaagtgacgtccgccgcctgcgagatcagctcatggaccgagatttagcgctcgactgggtggttcaatctcgttcgcttgcctgggctaaggaggcaaaggctcaagctcgagtagaagagctcagctcggccactgcgagatcagctcatggaccgagatttagcgctcgactgggtggttcaatctcgttcgcttgcctgggctaa

SEQ ID NO: 13071 - DNA, 603 bp, Zea mays
  Peptide Sequence Number=SeqID_56446
atgatgaccacgtcaaaaaagccgccccagagcactcgggcttcaagcccattactgatcaggggttcgaaggctggcccctcggaagggttcgacagccgccctagagcacgcagagcgagggatgactctgggtacgtccgttacatggccgaggctcaggctacgctcccaagtcgcttcgccctttcactgaccgaccagacagaaaaacagcgccgctcgccccgctccgactgctgtgccacccaccagggtgagactgacaatagccaagttcggcctcgggcgcaacaggaagctccgcctctcccgacgttaggcctcggcctcggaaggaggtctttgcctcagggctcggcctcaacctcgacctcggaaagaggtctccaccccgcccgaccccagggctcggcctcaacctcagcctcggaaggaggtatccgcctcgcccgaccccagggctcggcctcaacctcggcctcgggaggaatcgcgtcctcgcccaaccccggcctcggcctcaggagaaacctctgcctcgcccgactttgggctcggaccaaccgcgccacgggggatacatcattaccctacccctag

SEQ ID NO: 13072 - DNA, 60 bp, Zea mays
  Peptide Sequence Number=SeqID_56447
atggcgccgccgccagtgtggggcatcgccgccgtcgctgtgcggtgtttgggagggtga

SEQ ID NO: 13073 - DNA, 642 bp, Zea mays
  Peptide Sequence Number=SeqID_56448
atgcaggagctaatggctcagcagaatgatattctgcggcaactcgctcagcatcagccaccgcctcagcactatggtggtgctgatcaccaccatcatgccccggcagcggccacctaccaggagtttctcagtactcagccgccgttgttcaccagggcagaagatccactcgatgctaatgtttggctcagggtggtggaatcaaagttcccactacttaatggagagtgcttagaagcggccaaggtccgtttcgctgcccagagctttgtgggcccgctaggacatggaggattgcatcacagcccgccaggcatagaagaagagaaagacccattggcaggaccatcagcacagcctcagtgcttcaggattgtgtccgacactcagagcagaggacctcaacagcagcaggggcgatgggtgatccggccacagcaacaacaacaggcacccaaccgctctcaacccccacctcagaggaacaacaatcagcagcagccactacaacaacagtaccaccatggcaatgataataggtgtttcacttgtggcaacaccggacattatgccaagaattgtccaaggaaccagcagaggcaggggcagaatgcaaatcagaaccaatacaagaggtag

SEQ ID NO: 13074 - DNA, 891 bp, Zea mays
  Peptide Sequence Number=SeqID_56449
atggccggacaacacacgcccgacgaatcctacagctactctctaatccgccatatggtatgcgtagcgaagaacagtgcgaagcaatgggaggcatgctcaccgaggatggcgcacgcaagaacccagtccacggtgacttgcggcgcgacgcggtcgtcgtactccggtgagcgattcccaacggtgtcccccctccgaggtccacagatcacccacgctagttccgggtactccggttatgatccccggtccctcctacggctccaatcgacggcgaatgggtggaaaggcacggcggcggcgggtttcacccgtggtgttcgcggcgacgcggtgatggtggcaagaagttggagaaatcacagagaagatagaagggacgcggcgcggaggccttatacccaggtcggggcctggaaatcaggcggagtcggttcagcgcatgctgatccacttctctcggcgaagctccgcggattacgcgcgaggtgggcaatgacgtgtgggccccgcgtggaagtggcgcagggagaggagttgatcgctgggactgccgagtgggtccatgtacaggcagaagcgcgtgagtggctgaccagagggggccacatgtcggcgcgcgcgcgtgacaaagccctcaatccagtgatcgacgactcgcattcagttaccatcagttataatcctatccatctgttcgctgatcaacgactcacacacatcgtctacctcccgacggccaatcatgccaatgacccagggcccatggcggagagcgccgtcgcgtactgggtttacgactcggtggccgacactgctcctatctgcggcggcaaggtcaccggagacaaggcagacgcggccatcgggggggtctggggtcactag

SEQ ID NO: 13075 - DNA, 129 bp, Zea mays
  Peptide Sequence Number=SeqID_56450
atgcggcttcgtacccttagagatggtatggttttatactctaagaggtacttgattcatgttgggaatgagggaagtagcagcacgtccaccttcactgataataacgctgtccaggcacatccatga

SEQ ID NO: 13076 - DNA, 357 bp, Zea mays
  Peptide Sequence Number=SeqID_56451
atgggcggcttcccgtggcggtgggatctccggcgaggaatccgtgccgctacgtcgttcgatccctcccgaattcaaggtgaagctcccgagccggtcttggagccctcacagttagcgtctgcgcgtgtcaacacggtcgcccagggaacttcgcacgaacagataagggaaggggacgatgttctaccggcgggtggactcccagatcgcctcgcggccaaggggtatgacaaccgagggagcgggagatgggattaccaaggggaaggcgagaagaactcaagggctccagcttttaaccacaagcgcggaggaggaaccctcggatatgagacgaagctatacatggtatga

SEQ ID NO: 13077 - DNA, 174 bp, Zea mays
  Peptide Sequence Number=SeqID_56452
atggataatattgatgaggtgaccgataagaggttgatggctttgaaggatattgaaaaggacaagcttatagtcgtcagggcttgtaataagaaggatagaatccttatcccttgcgtgattatcttaacaatgcatggtaaactatttggattcgccgaggaatgggtctag

SEQ ID NO: 13078 - DNA, 171 bp, Zea mays
  Peptide Sequence Number=SeqID_56453
atggttaagaattttggcagcaaaacagtgcaaatagcagtaaatgatgtggtctttaagggagaagctcaaaagatacaaaggttgacacagcgccgaagctgtgaagcaggaaagcttcggcatgttcgcagaaagagaaaccgacttaaagatgaaaaggccatttag

SEQ ID NO: 13079 - DNA, 270 bp, Zea mays
  Peptide Sequence Number=SeqID_56454
atgggagaggacaggagcagagacggggaagcaggaaacgtcgccatggatagcaggggtggcggcgaacttgagggagatggggacagtcggggagcagggagaagacatcgagaggagggagatgagggagctccggccatggagatgaggagagagagaggaacgccgacctgggcaggggagagcacggtggctacagccgagcaggcaagctgcgcgctgtaccagggagcaggggtgtcgcggccatggggagagagaagctag

SEQ ID NO: 13080 - DNA, 426 bp, Zea mays
  Peptide Sequence Number=SeqID_56455
atggtgacgagttcatctaccctggatcggttgtggaccattcgattaagatccacgatcggtagctaccccaacccaagtgttatcagcgcgatgatcatgatcgtccatgtccagatcaatgattaccaccaatcgcgcgcgcgtaagaacaaaatcctaacccaagaggctaaattcgtgcccgattcgcacaccattggcaacgacgcgacattaactaaggaaaggaataaggcgagggtaaggaaccggggctcaccgaaagcggaggtagaattggcacaagatccccacggcggatctgtgtacccgccccgctccgacgaggaattacgtggtcaccggccaaccacacgtgtgaccgcccaccccaacacggtccttggctccaggggaactaccgcgaacccagctgaagcctga

SEQ ID NO: 13081 - DNA, 378 bp, Zea mays
  Peptide Sequence Number=SeqID_56456
atgagcagctatgcaccagggggtctttgtaaaggctacgtagtaaaaccttgccgactcaccttggtagtgtttgagggtttgatcgacccgaggcaaaaagggatcacgactcgtggttcgcatctggtttgccttctaaaactggatgtgacacctgcattcgaagtttctaccgaggagactgatattgaggctgtgcaaactgacaagccaaaggttgaaatgctgaaggttctgttgcttgcacctacgaagtttttaattttattgttggataaaaagaaggatgaagagggggtcgcagagatgccaatccaagacaaagtttccttggccagtttgcaatcagaggtgtcctcaaaggttgttccgtag

SEQ ID NO: 13082 - DNA, 201 bp, Zea mays
  Peptide Sequence Number=SeqID_56457
atgcccgagaagaagcaaagcgagctaaagaagctgcagaacgcgaaaggcgttgtagtgaaggtggcggtggaagctgaggccaagaagcctgtgaatagcttgccgaagcgacagaggctgcaggttgattgcccacgtattctgtatggtgatttggcacgttcttgtagtatggcccttattctcaccacaaaataa

SEQ ID NO: 13083 - DNA, 309 bp, Zea mays
  Peptide Sequence Number=SeqID_56458
atgatggtgacagcactgccgaagctgtcagctactacaacaggaactccgaggaagaggaggatggctagtgttttggacgctattttagaatctgtgaaaacgccgcctcctacatctgccgaagcttctggcggcaaaattgaagatgccagagagatggtcactaccagcacttcttctgctcatgctgaggcgggacctttggaaactacgctagaaaatcttgtggaagagagccttccagaaaaaccctcgacacctgctcccgaagcaccttccaggagtgatttgaattgttcgacatga

SEQ ID NO: 13084 - DNA, 255 bp, Zea mays
  Peptide Sequence Number=SeqID_56459
atgactaaggatcagcttgcagatagcgttgcctacaacagcctgaagcttcataagtttttcaacttcggcattgatagatgtttgtgtttcaatgcagctgagctttctccgccttctgagccatataaccttgaaactgacccttctgtcaaggagccgcttgatacaatcaaaattgctaatgatgctatggaccaagctgtcgacaatctgcttaacgaagttgctgacaaagtcctaaaggaggaatga

SEQ ID NO: 13085 - DNA, 138 bp, Zea mays
  Peptide Sequence Number=SeqID_56460
atgacgaatgtgattaaacgagctgttgtcgaaggtggtcgtttgagttcaccggaggtgggcgccaatgttggtaaagaagaaggcatcgaggcggatctccaggagttccaggacttcgaagagttcgaggattag

SEQ ID NO: 13086 - DNA, 519 bp, Zea mays
  Peptide Sequence Number=SeqID_56461
atggcgatagcgctcgaattgatgagttgggaagcttcagggggccacggtggttctgtgtgccaaaggaatttgatggtggtgggctatggaggtcggtccacgttcaccggcgcgcgattaattttggtggcggtggcgtgcggtttatgcgcagtatcgtgttgcggcgagtctgagggtggcaaagcgtgctccggtgggcagcaacctacagggagtctgtcttccgtggccgtggtcgagtccgagcctctgggtcgggcgaggcggagaccgtcggctgaggccagggctgagtccgagccatggggtcgggcgaagcggagttcgtcgtcttctggggctgagcccaagtccgagccctgggtcgggcggagcggagttcgccgtcttctggggcttagcccaagtccgagccctgggtcaggcggagcggagttcgtcgtcttccggggcttagcccaagtccgagccctgggtcgggcggagcggagttcgccgtcttccggggcttag

SEQ ID NO: 13087 - DNA, 468 bp, Zea mays
  Peptide Sequence Number=SeqID_56462
atggcagccggagaggttttggcacccggttcgtgtggtgtcgtggccgtcggaggagcgctggagcctggcagaaggacaactgtcggggctgtcgagtccttgctgacgtcatcttgcttccgtaagggggctgagagccgccgtcgtcatagagcgtgcggggcgccatcattacttgtctggcggttgggcgatgtggaggctcctccgaggtcgaggtcgagtctgtcttccgaggccgaggtcgagtccgagcccctgggtcgggtgaggcggagaccgtcggctaaggccagggctgagtccgagccctggggtcgggcgaaacggagttcttcgtcttccggggctgagcccgagtccgagccctgggtcgggcagaacggagttcgccgtcttccggggctgagcccgagtccgagccctaggtcgggcggagcgaagttcgccgtcttccggggctga

SEQ ID NO: 13088 - DNA, 516 bp, Zea mays
  Peptide Sequence Number=SeqID_56463
atggcccaacagtgccgattaagtacgacggtcatgggtcagtcagccgtgggaataggcatggcagttggcgtggtcataggcgggccgacagtaattgcggcaacaggcgcacggaagcaggggtccaaccgccaatcagactctggtcccacctgcaagctcgcatcctcccctgaggcaggaccgggggccactgttggtacccaaaatcaggggtaccctctcctacagggaaagacaccacaccccagcggcgtcaaggtcatccagcaggctgcacgcctgctgggtctgctgacaaacagtgtgcccgtgcccgacggcgcactatactcatcttctcttccgcaagaagcttcccctgcacgccaaggatacgcagacctcgagcgccagggcacaaggagattgccttggcaacagacattagaggatccaagctctatattctttatatccctgggcccacatgtcggggcccagtccttttgtgcatgcccccttcagctataa

SEQ ID NO: 13089 - DNA, 375 bp, Zea mays
  Peptide Sequence Number=SeqID_56464
atgaactacctccacaccagcaagggtcgcgggataacaatccccgagcggctcaccggcaaaggcaactgcatcagcaccgacggcgacgaccgcctctgcaccaacgactcgccagcagcggcaatcatcctagcatgtgcgccgctgcaggttggacctcgccctcgtctccctacgaggggcgacaagaggccattaaagccaaagagctggaagttggctccggacagccccaccaacggcggcgaccacctctgcaccgttgggcagcagctgcaccagcgcgcacgaagaggtcttcgctcccgtcctcactacgggagtgacgacaagaccatccaagaacgccgccccacccgcacggcgtactga

SEQ ID NO: 13090 - DNA, 627 bp, Zea mays
  Peptide Sequence Number=SeqID_56465
atgtcgaagatgtctgaaaaagatgcttcggacgtggagcctgggttggtcagactttgttacaagtataaatttgaagatgaatttagagaacctagtgacgggtggcgtcgattgaaccgtgtttttgatgctgttgacttcttctatcctgactatcccaatatggttctagattcaaagaataggaagagaaaagtgactactaagcggagcaaagtcctaaagatgcaagttgagtcgacacctcaagcttcagaggaaattctgacagatggctgcaatagtgacaccttcggcgatcatagtagccaaagagaaaggttcctccaacctgtctcgatagaggataaaggtaaagggcctgttaagattgaagaggctaagaaggctattgaagatgacacaacgtttggagaagggccttttgaccaagacttggttggtcgaaggtatagggttcatcatgctgcggggaacgttatgggcgcaaagcagctggccgaagctattgcttttgctaaaagttgggtgcaatcatgtgaagatggtgactacgcaatcattactgggttacttgaggcgtttgaggccgacggcaaacttaaccttggctcctataattga

SEQ ID NO: 13091 - DNA, 111 bp, Zea mays
  Peptide Sequence Number=SeqID_56466
atgcgtcgcttctggcaggagaagcgggcgacgcttcgccttcgccgtaataaccgcgccaaaaaagggaccgggaaagggggataccccgaaaaggatccttccccatga

SEQ ID NO: 13092 - DNA, 657 bp, Zea mays
  Peptide Sequence Number=SeqID_56467
atggcgcttcctgttgacgtggctggcctgcgccctaggttgggcgatgtggaggctcctccgaagccgaggtcgagtctgtcttccatggccgaggccgaggccgagctcctgggtcgggcgaggcgggggtcgtcggcagaggctagggcggagtccgagccctggggtcgggcgaagcggagttcgtcgtcttccgggactgagcccgagtccgagccctgggtcgggcagagcggagttcgccgtcttccgggacttaacccgagtccgagccctgggtcgggcggagcggagttcgtcgtcttctgggacttagcccgagtccgagccctggggtcgggcggagcggagttcgtcgtcttctgggacttagcccgagtccgagccctgggtcgggcggagcggaggcctgactgcctgtcagtctcattctgtcaagtggcactgcagtcggagtggcgcaggcggcgctgtccttctgtcaggccgctttatgctgatgggggttaccagctgagaattaggagtcttgagggtacccctaattatggtccccgacaggaactgacggacacgtcgacctcaacaaaggaggaagagtacatcagggacgtgccaattcttaggaaggtccctggtgtcttggagttctaa

SEQ ID NO: 13093 - DNA, 210 bp, Zea mays
  Peptide Sequence Number=SeqID_56468
atgagaatagggtcaaacgactgtggcttttatgtaatgagttacatgaagtattatgatcacaattcaggtgtcatcacttcttacactcaaccagacaattctcgagacctacgtgctcatgccctatatcatctcacattccatcgcatgaacaaggcgctgccactaccaatagagatccagagatttatgtttgcgcgcaagtga

SEQ ID NO: 13094 - DNA, 480 bp, Zea mays
  Peptide Sequence Number=SeqID_56469
atgggcaagaacaacaagcgcaagcgtgagccgactcctccatcggaggagtttggtgactcggaatactcagaggaggagttctcctctgagtccgaggggtctccggctcccatccccctgcgtgagtcgtctgatgactcagacgactcccaggggctggcggcggagatctggacgtacatccgggccgtcgagcgctccgggctcgagggctcggatgagtctgagttctcctcggacgaggaggactcggacggcggcgaggacgaagatgacgacgacgacgacggcgacgacgacggcgacgacaacgacggtggcgacggcgacggtgatggcggcaacggcgatggcggcaacggcggtggaggcagcggcggcaaggacagcaccagaggcggcagcagcacgggcagcaccagaggcggcagtagcaagggcagcaccaaaggcggcggcagcaaggccagtggctaa

SEQ ID NO: 13095 - DNA, 423 bp, Zea mays
  Peptide Sequence Number=SeqID_56470
atgggcaagagcaagaagggtggtagttcttcgcatcacttcggcgacaagcagaagcgtgagccgactcctccctcggaggacttcgacgactcggagtactcggaggaggagttctcctccgagtcagagggctcaccggtccatgcctctccctcggcgttgtctgatgactcagacgactcacaggggatcgccgcagaggtgtggacctacatccgggtcgttgagcgcgccaggctcgagggctcggatgagtcggagtactcctcggactcgtccgaggagggcggcggcaacgacgatggcggtgacggtgatgacggcggaggcgatggtgacggcggcggcaagggtggcagcggcgacggcggcgatggcagcaagggcagcagcaggggcagcaacaaggccagtggctag

SEQ ID NO: 13096 - DNA, 1095 bp, Zea mays
  Peptide Sequence Number=SeqID_56471
atggatcaccattgtgcggccaatgatggtgagccatacgatcttggggatgtcagacggatttctcgtccacgcccacaggttgaggaagtctcttgcagtgacggccgcctcccggtggtgggggtgtgtgaaggtgacgaggaagtcgcccagagggcttcgaaccaccttgatgtcctctttcctcaccccaaagcgggagcagaaggcccaccgctccgggctgatgtcagggcggtcacgcccgagccacactaccacaacatgagaactcagccactcaagctccctttccatgttgctggtggaggaggcgatgatgcaggaatgctcctggcggtcagcagggtcgccgggttgagccatgggcggggcagcgagcacgagcgatggaaagttgacgttatcgaggcggggagcttggcacttgggggttggaggtgtcttactaccccttccggagcactgccaggaacggtgtccgttgcgcaggcaatttatgcacctcaccgggtctctgcaatcaatggagaagtggcctctgcccaggaagcgggcgcatttaccttgcagacttaccagcagacggctaggagtcgaggtcgagtgaggcacccttgtcatgcggtctggttccgcacaggcagcgcgttgacgcctacgctgaatcgttgtccacctgctaggagcatcgtcttcaatgcggtcgcagccatgggttgtcggatcgggggagacatcaaggcgactggatttgctggtggattcgagggaggagaggtaagtgacgtctggcgagccactcgcaatcaatgcaaagcgtacacgcttggaggagggaaggatttagggcaggctggcagacacgggagagcgcggtggaggcggagcgggggcaggggcatgggaggccgagctagcggtgctaggggagtacgctgggtgggatctgccgaggacgacgggacagcagcagatcgggcggatgctacggcggggggagctcggtcgccgtgggggagagagtgggtggggagggaggccatctcgctgctattactttttttgctccccgtttatggcaatatttag

SEQ ID NO: 13097 - DNA, 135 bp, Zea mays
  Peptide Sequence Number=SeqID_56472
atggccgagagtctggatgaggccgagcctggaaggattcacgcggccatcggtgttctgttgggcaaaaaaggatgcggcttcgccttttatataccgagaaggagaccgaacgagggcggcgccggtggataa

SEQ ID NO: 13098 - DNA, 303 bp, Zea mays
  Peptide Sequence Number=SeqID_56473
atggtcacgggccagtcagccgtgggaataggcgcggtagttggcatggccacaggcgggccggcagtaattgcagcaacaggcgcgcaggcggtcaggcggtgtcaaggtcatccagtaggcggcacgcatgctgggtctgctggcgaacagtacggctatgccaggcagcacactgtactcaacatctctcctacaagagtcttcctctggcgggtgcactccaccacccggccggagatttcctctctgacaatgaccaaggctgggaccttagaccgtgggacagacgaggatttttaa

SEQ ID NO: 13099 - DNA, 294 bp, Zea mays
  Peptide Sequence Number=SeqID_56474
atggctggatggagtcttgagcgcctcgacactagccaggagccccttgagatccttgctggaggcgcgggcgtcgaggaggaggcgatggacgaatgtgagggaggtaaccaagggggggtctgtcgcagcgaggcagggagccggggaggcagggcaacacgcggggcaggcgcagacgggggccggagtggagtattgcagaagcttctgtatcgaataccttcagaacaggatgaggacaaagatgaagatgttaagctctgtcacaatagcatatggaaatggaggtga

SEQ ID NO: 13100 - DNA, 699 bp, Zea mays
  Peptide Sequence Number=SeqID_56475
atgggttttggcactcgttggcgtgagtggatttccatcctttttgggttcgcctcgtctcgagccctcctcaatggccgacaaggagcaaacatccagcacaggagaagggcaccaacccacgtgctgtcgcgtcctagcgccgccgtgccccctcgccacctcgcgccgccgcgcgccggtgtctcctcggcgcgccgccctcgccccctcagtacgtgctgccgcgcgccaacgcccctcggccgcgcgcacgtgcttcctcgccaccacgcgccgcctgactcatgcccctccccggatttctgtggcgtctgctccctccacccggattccgctgggattgagttaatcgcattgcatcctctctccttctccccccgattgttccatctgggtcgtgttgcttctttcttttcgatttgccgtcgccatccacgtcttgcaggagtaggactccgccttgtccgtcctatccacctgtcctcgcttccgtccacgccatcgccgtctctctctccctgccgctgctttcttgggccggtccggggcttcgtccctgtcgggcgtaaatgcgcgtccgtgcagcggatcccagccttcgccactccaagtcccgtcctcgtctgcccccaactaggagcagcaggaggagaatcttctgcgcatgctaatcctagcagcggtggccagagatga

SEQ ID NO: 13101 - DNA, 57 bp, Zea mays
  Peptide Sequence Number=SeqID_56476
atggctgaagacgctagtgagaggaattccgaagccagaggaaatgaatatgcatag

SEQ ID NO: 13102 - DNA, 660 bp, Zea mays
  Peptide Sequence Number=SeqID_56477
atgggcgtgcctgacctctgcgcgcgctggcgcgcaataaatgcgctgcagcctggagggaaaaaggacacatcacccaaaggcacagggaatcgcaccatcgtgggacccgtacagcgcaccgcccagccgccggatctgcgccggcgacgcgcccggacgtcggatctacgccgccgcaggaggggggaggcggcgctgtggccgttctctgcccgtgagcgcccggatccgtcccgccggcttgttcatttcgccgttaatccatgtggattgggtgcaaggattatggatccgaaagagaagccaaatgtatcgagcagtccaccaacaccacggctggactgcataaaatgctttgatatgctctggttctgttactcaccattccaccagatgcagaattattaccggtatggggagttcgacacctgcttcggcaagtggggcgatcttatgggctgcctcgctctcaagacaaagcggaaggcagaggtggaggagatcctcatcgcgcgggagaaggccaaaccacatatctggacctaccggacggtcgatgaggcatcggagaattggtggcggatgtacaagcatgctgtgatgatgtcaccactgccaggttctgctcagcttcctcccaggtccgatgaatcttga

SEQ ID NO: 13103 - DNA, 1161 bp, Zea mays
  Peptide Sequence Number=SeqID_56478
atggctccaggaattaggttcagcaagagagtgagggcaggttcacaaccagaggagcaatcttcaaaaaggcttcactctacagagacagatggccacaatgtacaggaaccaacagatggtaatgatgacataccaaacagccctactacacctggacttgctgatcatttcagcagagctgcagaggaagccatggcatctgctgctcatgacagtacaggtgatgctgaaggcaacagccgtactacacctggacttgctgatcatttcagcagagctgaagaggaagacatggcatctgctgctcatgacagtacagctcctacacagcgagcaccaaggagacccagggcagcaactaagggaaaacaactagataggatgactaaagttatgcaaaggagactgcccatagctgttgaggaaggcaagaaaaggccacatgaacctgttcaagctgccaagtttgcatcagagactggcatcattattcgggaaaccatgcctatcctaactcgttggaaagattacaaggacgaccataaatactacaacagctttgtgtcacagctaaatgggcgcttgtccattaacactgagggcaaggcaacaaaggaagcttgcaccgatatgctacgctctgcggtaaaaaaccagcgttatcggctcaagcagaaatacttcaatggtgtacctgcaaatgaaattaggacaacttctcctgtatcttacatgactgatgaacaatggagggcattagttgcaaagtggtctgatccaaagaacatggaaataagtgaaaagaacaagcagaaccgcagtcaagtcaagtttcatcaggctacgggttctcgctgctatgtggcacacttacatgcatattctcatatggaggctttgagggctgaacctgttgctgaaggtgagatgccagcatccagtgtgcaccttgtgtcgaaggtgctgtcccagagcagctcacaccaattcctgaagagcgtcggcatcaaaacatcggcaacctccaaggcatcatcatcaaatcaaagtgagcttcgggaacaacttgcagctgaagcgacggctgctattcaaggtgaactcgaccagctcaggaagaaatgtgaagaagttgaggaacaacaggcgaggacataa

SEQ ID NO: 13104 - DNA, 294 bp, Zea mays
  Peptide Sequence Number=SeqID_56479
atggcgcggcgacctgccgcggcgagcctccccagccagcctcggcggcctggcgtggcagtgcatcgcggcgtggcagccggcccagccccctactctctgcgcaagctccgagggctcgagcggtttctcgagtgcctctccgttgcctttgatgcaatctatgctcaggtttctggtgcccttctttgggtatacaaggttggggatccaattactacatccgcttttgttgatgagctgttaacatcagagtcatttggaccatctgagaggtactggacttactggtag

SEQ ID NO: 13105 - DNA, 447 bp, Zea mays
  Peptide Sequence Number=SeqID_56480
atggcggacacggatatgggcggcgtggggggacggtttgacggggttttcgcgacgtgggcatctcagacgggagggagaggttggggaagagaaacagtgggcgggggcgctactaataggtgggcccggtggctggtgtcggcgtttcgagacaggggggtccctaagccgacgagtgagtgtgctgcgtaccccagcccagatgggtcgagcgcgtgggcgagcgcggaggggggagaggcgaggcggccggagccgagcgtgagagaggtggaagtcccgcggccttcgtgttcgtcccgcgcccaggtcagttgtaaggagaggatccaggtgtacaatggggatgtagcagagtgctacgtgtctagcggagggagagctagtgccctaggtacatgccgatgtggcagccggagagatctgggcatcctgctggcgtga

SEQ ID NO: 13106 - DNA, 345 bp, Zea mays
  Peptide Sequence Number=SeqID_56481
atggcagttgcatcttcctgttgggagcttctccgcgtaacaaaccgagcgcatgggccgctggcatcccgccaaaatcgcccagaaatcggaccttgctctagtataaaatcccttggccgcctcatcctctcatcatctcggctgccagaaacagagattttggcgccacctattcgtgtgtccgtgcacctgggcgacgagcgccttcactccggcaaggggctaccgcggggaaaggtcggcgctgccgtcttgtgggctggaggtggaagatggcgtgccagccgttggatccgcgatggatgtctgcgattagatcagcccatattggttcaaggttga

SEQ ID NO: 13107 - DNA, 207 bp, Zea mays
  Peptide Sequence Number=SeqID_56482
atggtggggagaagcgagccgggctacgacctctaccccgccctcagcttcaaggatcttcatcatccttgctggggcggagggcgggctgagccggagctctacctcccgcacgggttgtgtctcttttcctcccgttttgcgtatccggactcgttcgtcagtagcaggattgcttacccaagtaagagttatttttcgcggtag

SEQ ID NO: 13108 - DNA, 1080 bp, Zea mays
  Peptide Sequence Number=SeqID_56483
atgcatgaggagagtgcgaaggcatggttgccatccaagggggtcaccctccttttaaaggcaactctcccaacttgcgtcctcaaccggcgcggactgagtcttctccaacacgctccaaggccctcccctatgacacgggggctgggtcccacgcgtcatgcaagctggcccaggacagaagaagccaaaccgccgcgtgcggagcgtgtaaccgcccggcggttacaagcattcctccgtcttcgcccaaaccagcgggtgaaagggcggaccgacatgcaggcggaatgcgactgcaccaagggggcgcacccattcgacttcgacgcgtccagcatggaggcccaggcccacacgtcatgtaactggcgcgccggttactacgtgcgagaaactgcaccgccactcgtgccggtgccgcgccttctcgactgcggaaccagtgccgtgactcgaggtgaccctgcgcatgacccaacagtgccaaccgagcacatcggtcacgggtcagtcagccgcgggagaaggcgcgacgatcgatacggtcaaaagtgggccgacagtaatggtggcggcaggcgggcggaagcagaagtcaagtcgtctgcaagctcacgtccccttctgggacagcaagggagccctctcccacggcgtgaagacgacgcgcccgtgttccgttcctcgaacggctcgctcacgcacaacggctgccccacgaaccactcgtcccatcgcattaactctgcggcagggcaggcggcacatttggcaggcgaagcagggaccgggaaaggggatactctgaagggggtccttctccgcgaaggaagcgggccccgagcccccctactgatcagaggttcgaaggctagcccctcggaagggttcaacagccgcctcagagcactcgggctccgcgcccactactggctggccccgaagggttcgacagccgcctcagagcacgcagagcgagggatgaccctgggctcgggggctgctctcgcaaacccggctccggccaaaccgttgacagcgtcaacataccagcccgagaacttgggacctgactaa

SEQ ID NO: 13109 - DNA, 711 bp, Zea mays
  Peptide Sequence Number=SeqID_56484
atgggcgcgattaaggccaaggctcagtccgctcaagggacacgatctcgcctcgcccgagcccagcctcgggcaaaggaagccgaccccggaggattcacgtctcgcccgagggaagctccgcctcgcccgaccccagggttcggcccccgtcttggcctcggaagaaggacttcgcctcccccgaccccagggctcggactcaaccacgacttagaagacgacgaactccgcctcgcccgaccccagggctcggactcagcctcggctccggaagacgacgaactccacctcgcccgaccccagggctcggactcggcctcggctccggaagacgacgaactccgcctcgcccgaccccagggctcgaaatcggcctcggctcctgaagacgatggactccgcctcgcccgaccccagggctcggactcggcctcggctcccgaagacgatggactcggcctcggctcccgaagacgatggactccgccttgcccgaccccagggctcggactcaacctcgacctcggaggaatcgccacctcgctcaaactcgggaaacaagtaatgatgacaccccgcacgctccatgacgacggcagctcccagccccttacgtcagccaggagacgtcagcaaggatccgacagccccgacagctgtacttccgcagggctccagcgctcctcagacggccacgacatcacatga

SEQ ID NO: 13110 - DNA, 165 bp, Zea mays
  Peptide Sequence Number=SeqID_56485
atggccatgatgggttcaacatcggaaaagatgtacctctaccagaataagataacacgcaatgggagtggagagatggcgagagtagcgtgtaccctccgtggcaagaggctggacggtggtgtatcagtgctctcagttggcgtgaacctgatctggtcttaa

SEQ ID NO: 13111 - DNA, 313 bp, Zea mays
  Peptide Sequence Number=SeqID_56486
atgaaggacgccatgctcagccaacagccgcctcgtgtggtgttattgcagtgtctgggtccaaaaaggcatcgacaagaggtcaaggaggcggctgagctccttgtgttggtggatattgactcggctgagctcctcgtgctcgtggtcgaggtcaaggccatagatcttgacccgactgcagaggaggaggagcgacaacttcaggaccacaatgaggtgatggatgctagacaagccttaatgggtgtcgatgtcactcatgaagatcctatcaagctcaaggattttgcttgctctagaacaggcactg

SEQ ID NO: 13112 - DNA, 141 bp, Zea mays
  Peptide Sequence Number=SeqID_56487
atggcgagagtagcgtgtaccctccgtggcaagaggctagacggtggtgaggaagcgacaatttttgctgcttttgttcgaaggtggtgcctaaagaagaaaatcaagactgaagctgcgggaggcagggtcctccgttaa

SEQ ID NO: 13113 - DNA, 2817 bp, Zea mays
  Peptide Sequence Number=SeqID_56488
atgtgctctcatttttactcggcgtacccgccctttgaagtggcggaggatgatgtggatgaaggggcccttcggtgtgccgccggccagagcagtgggcgcgacttggttgaagagtttgtggcgtacggggtgtggcccttggcgcatggttgggcgttgggcgaagtatgccctcgccagatgcctttccgcggtggagaggtggtgcggagtcccgccttcgcgctaaatctgcgaaaccgtgatccggccgcctttgtgcgtgaggcggaggatggggcggtgcggcttgttggacgttatgtgccgaggacagagggccagcgcagctgggagatccgcgggtcgaatgaccgtctaaacagggtcttcaaattgaaccaactgccgtatgacggctatcctagtcaagacgatgcggaccgccgagggaagaagccggtggtggagactaaagacgaccctgcgccggcggccgccccatcctctaagaagaggaagctaggtactgccatgggaggacttggggtttccgatggctttgctagagagttgatgaggacatgcgcggccccgggggaaaggatgtcttcgcccgagctccgggagtcttcggctcggatgctgaaggttaccgggggttgctggcctaggaatgttcctatcccccgcgcggccagcggggacgtttttacatctcgcatggttcgcaaatggagagtttttccttacgggcggaatattgctgctgttgtgtcggcagtgaaggacaaggatcgccagggggctgcacaaaagcgccaggcggctgtcaggcttgttgaagccaggccgaagaggcagcgggggtcggcgaaggctgcggccctcggcggaggcaagccgccgctggcggcgaagacgggcgtccctgcatctagcaaggcgccagagacagcggcaggcgccgggggctccaaaccggcgaaggctgtgccgccgcccagcagggtggcggaggccgcgaaggcggcccgagcgttgccgtcggctggcaagcgtgtcgccgacttcgccaccgacatttgtgtggaggactatcttggtgggtcggacgaaggccaacttgttatagttgcgcctgccgcggcgacagcggttgctgccgcagcgccgaaggcgaagggcggggctcttagcgccggaggcgaggtggcggccctcgcggctgtgagggatgaggcgggcgctgcgtcccgccggctgaaggaggtggtggagtcgctaagtcaggtggctgacttcgccaaccgcacggcgtcgggggcctttacggcagttgtgtctgccgaagtcgagagacttcggacgcaacatgctgacgccattcgagagaaatcggccgccgacagcaagtgtcgcaagctagcggacaaggtggccgcgctggagggagagaaggctgacctccggtgccagttggcgggggagagaagggagaccaacgaggccctcgtcaaggcgcaagcttcgcaggcggaggccaagctggcccgagcggagggaaatattgccagggagcgcgccgagcagctgcaggagcggctcatcgccctggagagccgcgtggagcgggccgaggccgcgatgcgcgcggaggccgaacggacgcgcacacagcttgtgaacacatatcgtgagctgggtgcgcggaccggtgacttcgaagtgccggaccgagagcccgggcttcgctgtctggaatgggtgcaggaagaactgcaggaactccccactgtcgtgggggggttcatgtcgtacgcctccctggtcacctgcgagggggcgatgaacgcgctctcccgcgaagggtgccggcacttcgaggtcttcgaccaggcggatgaagattttgatcgagatgtttataaggttgaagacctcgtggtgaaggaatctgccggggccctctacgaccggatgtggggtccgcacggtcgcgaggtggtcagggagcgggcggagacagcgatggctcaggcgttgcgtggcgagcgggtggacgacttcgggtcgttgaacagcgcgctgcctgacccggagccgaccccggcggaggccgcgactggggtccccctggagcgaaccccggggaccgcagaagacgcaccggatgcccccgcatccgctgcggccggcgaagaccggcccccaaaggtggacgaaggcgcgcctgatgcccccgcagccgctgcgccgagtgttgaagatcccgcggtggtggctgcggaaacaacagcggaggcaacggcggagccaacggcggaggctcccgcaacgtcagggccttcgcaggttcaagattttgggcctgcgcacgcaaccgctactgctaaatttttggcggcttcgaccgcggaaggtggtaatgaatgtggtggatctgcatctgaattttctgagttttttgattttgctgactctgggagctcggttgagtggactgaggagtcgtcggaggaggatttggactattttgcggctttggatgtggctggggtggagacctcgccgcacgctgtggacacagaagatgtgcctggtcccagtactgggcgtcggcaacgaagggcggttgcgaaacgcagagtgagtgaagcggagggaggtcggcttcgtgtgagtagggctggtcggcaggaactattgtctttgccagccgccgggagtacaggtgagggggaattgcgaagtctttttgcgggtgaagagcttaggattatgttatttaattatagggagatgggaattattcctaaggttgagccgatgtag

SEQ ID NO: 13114 - DNA, 468 bp, Zea mays
  Peptide Sequence Number=SeqID_56489
atgggcaagaacaacaagcgcaagcgtgagccgactcctccatcggaggagtttggtgactcagaatactcggaggaggagttctcctccgagcctgaggggtctccggctcccgtctctcccccggcgtcgtccgatgactcggacgactcccaggggatagccgcggaggtctggacatatatccgggccgtcgagcgcgccgggctcgaaggctcggatgagtcggagtgctcctcggatgaggaggactcggacggcggcgacgagggtgaagacgacgacgacgacgacgacgacgacgacgacggcggctggggtggcgggcgacggcagcagggacagcaccaagggcagcggcagggacagcaccaaggggcggcggcggcggcaggggcagcaccaagggcagcagcggcggcaggggcaggggcagggccagtggctagacgccactggtcttcttag

SEQ ID NO: 13115 - DNA, 900 bp, Zea mays
  Peptide Sequence Number=SeqID_56490
atgtgccacctcatcactcggccattttcctcaaagaaacttgaagaagctggctattactcggcgctgcctctaaaacgccgaccacgtgttcaatcgctcggcattacttctaaaatgccgacgccgaccttcaatcactcggcgctgcctctaaaacgccgaccacgtgttcaatcgctcggcattacttctaaaatgccgacgccgaccttcaatcactcggcgctgcctctaaaacgccgaccacgtgttcaatcgctcggcattacttctaaaatgccgacgccgaccttcaatcactcggcgctgcctctaaaacgccgaccacgtgttcaatcgctcggcattgcttctaaaatgccgacgccgaccttcaatcactcggcgctgcctctaaaacgccgaccacgtgttcaatcgctcggcattacttctaaaatgccgacgccgaccttcaatcactcggcgctgcctctaaaacgccgaacacgtattcaatcgctcggcattacttctaaaatgccgacgccgaccttcaatcactcggcgctgcctctaaaacgccgaccacgtgttcaaacgcccagcattacttctaaaatgctgatgctgatattctatcactcggtgttatttctaaaatgctggccccgtattttgtcgcttggcattatttccaaaatgccgatgccgaccttctatcattcggcattgcctctaaaatgctggtcttgtgttcgattgctcagtgctacttctaaaacgctgatgtcaaccttcacatcgctcggcgctgtttctactatatcaaaagaaccagttcagcattcagcaaaagcagtggcaagtcatcaaaaagaggggataaaacgatatacttcattaaagggaagttga

SEQ ID NO: 13116 - DNA, 597 bp, Zea mays
  Peptide Sequence Number=SeqID_56491
atggctgaaaggtaccaactcccacggagttgcgttcccccaatgacaaggcagaaagactgtgggtatcccccatccgggggcttggaaggtggaaaggcacgatgcataagggagcatgaagacatggtcgcctttcaagggggtcaccctccttttaaaggcgactctccctacttgtgtccccagccgtcgggggctgagtcttctccgacacgctccaaggtcctccccgtacggcgcgagggctgggtcccacatgtcatgaaagccggcctagagcagaagaagccaaaccgccgcgcgcaatgcatgcaaccgcccagcggttacaagcggctctccacttttgcccagaccagcgggcagccatgcaggcggcatgcaaccgcgcaaagtgggcgcacttctccgacttccagcacgcccagcatggaggcccaggcccacgcgtcatgcaaccggcgcgccggatgcttcgtgcaagcaactgcaccgccactcgcgccactaccgcgcctcctcgactgcggaaccaataccgcgagtcgagggaccaggaaagggggataccccgaaaaggatccttacccgtga

SEQ ID NO: 13117 - DNA, 624 bp, Zea mays
  Peptide Sequence Number=SeqID_56492
atgaacaaaaacactggcattcaaagtgccattacaaacggaactccggttccacctccgcagcagcgatggcctccgggcggacgctgctgcaaccttgccctcgcctacgccgacgctcgaggggcgaggacaagtacaaagagctggaggcccgaagcgcagatggtggcgatcctcctggacgagtggggcaccgacctccgcatggaggcgccgtaccggtgtaaaggcaggaccgccccagaacacgaacgccgccctggcagcgcgcgacatcttgggcggtcctcccgtgcgctcggcgcgacaaccgccttcgcggcaggagggggcaccgggagccaagccgacgagtccaacgcaccgaggctgacgacgcccgccgtcgaccagccccgcgttgtcgaagtccgcccctcccgcagggccagtgagcgccctctccctcgaacgatgaaggagaggctgacccacgaaaccgcgcgggaggtagagctccgactcagcccggcctccaccccagcgaggatgatgaacatccttgaagctgagggtgggaccaagatcgcagcccggcttgcttctccccacccaagggctggtggtcaccgtcttgggtga

SEQ ID NO: 13118 - DNA, 813 bp, Zea mays
  Peptide Sequence Number=SeqID_56493
atgtcgtccttttttctttcgctgccgctacgccgccggccgatcctcgccgccggtcgccgcctcgtcgagaagacgctgagtagtttgatggcggaggagttgcgtgccgccgattctgttaattttggcgtgtcgcggatgtcgtcggcccgcgtgcaagatatgcagcggttaggttacttcggcggcggagttgctcgtgccccggggacggaggaagtccccgagccggaggtgatggacaaggaccgccagggagcagcacaaaagcgccaggcggctgtcaggcttcatgaagctaggccgaagaggcagcgggggtctgcgaaggctgcagcctccggcggaggcaagccgccgctggcggcgaagtcgggcgcccctgcatctagcaaggcgccggaggcgacggcaggcgccggaggctccaaatcgacgaaggtggtgccgtcgcccagcggagtggcggaggtcgcgaaggcggcccgagcgttgccgtcggcagacaagtgtgtcgccgacttcgccaccgatattagtgtggaggactatctcggtgggtcggacgaaggccaacttgctatagttgcgcctgccgcagtgacgacgacggctgccgtaccgccgaaggcgaagggcggggctcttagcgccggaggcgaggtggcgatcctcgcggctgtgagggatgaggcggatgctgcatcccgccggctgaaggaggtggtggagtcgctgagtcaggtggctgacttcccccaacgcacggcgtcgggggccctcacggcagttgttcacgaatcaagctga

SEQ ID NO: 13119 - DNA, 834 bp, Zea mays
  Peptide Sequence Number=SeqID_56494
atgactacaacaggtatcgagaagaatggctcaaagatcattggaattgaagcacacacccgcttctcatcaaggccaatctctcagggaaactatgctccccctaatcatatcatctttgtctcatttctacaaacttatcgcaacgggggcaccacacacgatgagactggagtagaggccgaaggtaggagccgacgggttgaaatccccccgcagtcgcagcgtcgtgatggtgcgaatcttgcggctggagtagagaacggtgtgtgctccaagaagacgatagcccctagatgtcgaggtagccgaagtcgaggtggtcgtggtcggaagacgcgcagcaaaagcctgatcttcaggaggggtcgacgttcgagcgtcaacggcaggcagggcgacacagcaaaaaggcaccagcaggccgaccttcctgcttcttcgatcgtccgggcgtcaagaagtcccgccagggaggccgacggcagcgcacgcgtctgtgccagtcatggtgtccgcgcccgcggcagaatagaaggggaaacgacagatccggccgggaaggccacggcagcgacggatccagtcgggaagacacgatccagccaaagggacggcggatcgagcaggaaaggtcgtagcaacgtggatccgaccgggaaggtcgcggcagcgacggatccagcgaaggcgaagaaaggggtgggcggcgtggcgtgtccagccgggcaggggcctgcgccggacctggcagagggtgttgacggcaccggcgacgggagaagctcgaagtgggaggcgctgctggggcgtcagcatggacagcacgtgtga

SEQ ID NO: 13120 - DNA, 1152 bp, Zea mays
  Peptide Sequence Number=SeqID_56495
atgaacaagacatcgacactcaaggtgccattacaaacggaactccggttccacctccgcagcagaggcgacgacgacgacttctgctccggggggccgaacagtagcagcaatgacctcagggcggatgctactgccataaggcccccgcccatgccctcactcgagaggcaaggacgagcagaaggccgtagagttggaggtcagtccgtgggcggcaccggctatctcgtcggcggagaaacctcttccggctgccgtggcggaaggcagcggcggaagcggctccgaagccactcgggtcagagagccgggcacgcggcagctgctagcgccacgaacggcgaacgcccttccccccgatcactgagggaaggagcggaccgccgcccgcgcagggaccgaccccaactcggcgcactcccctccccagcactgatgatgaaaatccttgaagctgagggaggggcagaggctgcagcccggcttgcttctccccacccaggggctggtggtcaccgtcttgggggctcggaaggtggaaagacgcgatgcataagggggcgcaaagacatggtcgcctttcaaggggatcaccctccttttctaggcgactttccccactcgcgtcctcagccatcgcgggctgagccttctccaacacgctccaaggtcctccccctacggcacgggggctgggtcccgcgcgtcatgcaagctggcccagtgcagaagaagccaaaccgccgcgcgcggtgcatgcaactgcccagcggcgggcggaagcagcggtcacgtcgtcagccaagcttacgtcctatccagggacagcaagggaaccctctcccacggacaggcggcatcgttggcaggagaagcgggcgacgcttcgccttcgccataatgaccgcgtcaaaaaaggggccgagaaagggggataccccgaaagggatccttctccgcgaaggaaacgggccccgagcccccctactgatcagaggttcaaaggctggcccctcggaggggttcaacagccgcctcagagcgctcgggctccgcgcccactactggtcagaggttcgaaggccggccccatggaagggttcaacggccgcctcaggccactcgggctccgcgcccactactgattag

SEQ ID NO: 13121 - DNA, 390 bp, Zea mays
  Peptide Sequence Number=SeqID_56496
atggcgcctcctgttgacgtggtcggtccgagccctgggttgggcgaggtggaggctcctccgaggttgaggtcgagtctgtcttccaaggccgaggtcgagtccgagcccctgggtcgggcgaggcggagaccgtcggctgaggccagggctgtgtccgagccctggggtcggcctcactctgtcgagtggcacagcagtcagagcagcgcaggcggcgctgtcctcttgtcaggccggtcagtggagcggcgaagtgactacggtcacttcggctctgtcaactggagggcgtgcgtcaggataaaggtatcaggccacctttgcattaaatgcccctgcgatttggtcggttggcgtggcgatttggccaaggttgcttcttggtga

SEQ ID NO: 13122 - DNA, 111 bp, Zea mays
  Peptide Sequence Number=SeqID_56497
atggggtccaggcatagtgctggctctgccgaggctgagtgccgaggtaaagaagaaggcgtcaaggtggatctccaggagttccaggacgttgatgagtttgaggattag

SEQ ID NO: 13123 - DNA, 411 bp, Zea mays
  Peptide Sequence Number=SeqID_56498
atgggcaagagtaacaaacgcaagcgtgagccgactcctccgtcggaggacttcggcgactcggaatactcggaggaggagttctcctccgagtctgagggatctccggctcccgtctctcccccggcgtcgtctgatgattcagacgactcccaggggattgccgcggaagtctggacgtacatccgggccgtcgagcgctccgggctcgagggctcggatgagtcggagttctcctcagaggaggaggactcggacggcggcgagggcgaggacgacgacgacgacgacgacggtggcgacggcgatggcgacggcagcggcggcaagggcagcaccagaggcggcagcagcaagggcagcaccaggggcggcggcggcaagggcagcagcagcaaggccagtggctaa

SEQ ID NO: 13124 - DNA, 477 bp, Zea mays
  Peptide Sequence Number=SeqID_56499
atggctttgttcagccaaagtctgctcagtctgggtgcaccggactgtccggtggtgcaccagacagtgtccgggttacaagctgtaattacaagaatgcctttacaaactaggcccgtaacacaaaggcggccacgtggggcccgttacaatgggccagatcacacgtgggcctcagagcaggacgaggccgtgctgcggggagacgtcaccgcaggccttcgtctggtgctgaatgaagcgaagggtgtccctgcccgttttgtctttgtcagaccagcgactgcagcgaaaggcgacgagcgaagggtggcgtctttgccttcgccccaacatccggtgcgccagtcgacagaaggcaagaattgccttcctggaatgctctcaacggctcctagctgccttggggctataaaagggacccctaggcgcatggaggagtataccaagcattctcaaagcattcctaagcactaa

SEQ ID NO: 13125 - DNA, 537 bp, Zea mays
  Peptide Sequence Number=SeqID_56500
atgaacaaagagaacactaacttagagcgacataaactacgcgacatcgctaaagtttctgaaaccctagttactgctgctactcaaaagaccctgtgcatcttaggacaagataataagacaaggacgctacctcaccatcctgaccgtggcaactgggttttacgcaaacccaagcattctttgaatgctataaattctccttctactttgatagatgttgttgacgctttttcggagcgccaaacactcaacaagaaccgtggcggtgccctctgcacaggggcggacggtccgcgcgcaggggccggacggtccgcggcctggtgcgaggcgcggtggtgctctctgcgcaagggcggactgtccgcggcctggggccggacggtccgcggcctggtgcgcggctgggacttctgcctgacggccggacggtccgcgccctggggctggacggtccgcacgtacgcagggacggcggaagatcgccgacggcgcctggatctcgctcccgggagggaccccgtcggggagtag

SEQ ID NO: 13126 - DNA, 1425 bp, Zea mays
  Peptide Sequence Number=SeqID_56501
atggagatggacccgccgccgccgccacccctgcacgccgaccgccgccgccgcttccgcgactacctgctggcgctggaggaggagcgacgcaagatccaggtgttccagcgcgagcttcccctctgcctcgacctcgtcacacagactatcgaggggatgaggagtcacatggacagcgtcgtcgtcggcagcgaggagacggtgagcgaccacggcggccccgtactggaggagttcatgccgctcaagcccacaaccctctcgtcgtcctcctcccagccccattaccaggacgagcacgacagcgcccactaccttgaacaccgccgtggttccgccgccacggccaacgacgtcgtcgatgccgacaaggacggcgaggcggtgggcgatctggagacggcagcagccagcagcagcaggccgttgccacatccggaaacgaagaaggcgatgccggactggctgcagtccgtgcagctctggagtaaccaacaacagccctccgcgtccccgccgcagcaccaggatgagctgctgctgccgtgcaggccggtggcgctcaacgcctgcaggaagcccgggggcgcgttccagccgttcgagaaggagaagaagaagaaggacaaggaggagaagcagcgcgccgagctggagctgccgctgcccgccgcggcgagctcggccgtggtcggggacagctgcgacagggccggcgccaccgacacggacaccgacacggccgagaacaataaggccagcagcaacaaaggcggcaacgacaaggaggctcagctgtcctcgcagtcgcaggcgcccagccggaaggcgcggcggtgctgggccccggagctccaccgccggttcctacaggcgctgcagcagctcggcgggtcccacgtggcgacgcccaagcagatacgggagctcatgaatgtcgacggcctcaccaacgacgaggtcaagagccatttgcaggttctcacttcgcccttcattttgaacatcttgggcgggcctcagaagtatcgtctccacactcggcggccgaactcggcggcggcggcggtccagagcggcggcaccagcgtcgttgctccgccggccgcaccgcagttcgtcgtggtggggggcatctgggtgccaccgccggagtacgctgccgctgtcgctgtcgctgcggcagccgcagcgcagccgcagcaggtgcacctagccggcgacgcgtcgggaacgacgacaacagccgccgacaaggtgtacgcgccggtggcgacgacgttgacgcccgcaccgcgaccgcgaccgcgaccgcgtccggagaggcagtcgagcagctgctccggcgcgcggcgcagcggggacgcctgctctggctcgccggccgtgttgtcgtcgtcgtcgcataccgcctctgcctaa

SEQ ID NO: 13127 - DNA, 1329 bp, Zea mays
  Peptide Sequence Number=SeqID_56502
atgggggtggccgccggcggtggggcgcggctgcgtgccagcagcgccaagaagcagcggcagcggaccctgaacaacatcaagatcacgctcctctgcggcttcatcaccgtgctggtcctccgcggcacggccggcttcaacctgctggtcagcagcggcgacctggacggcgcggcggcggacgccaaggtggtggaggacgtggagcgcatcctggccgagatccgctccgactccgaggcggacgacgtggtggtggtggtcgagggcgggtcgtcgtcgtcgtcgtcgccgcgcaacgcgacggcggccagcttcggcaacttctcggcgtcggcgacgctggtcaaggtgcgggagtacagcctgggcccgcccgtgcggggctgggacgcgcagcggcgggagtggatggcccagcaccccgagttcccgcgactccacccgcggggccggccgcgggtgctgctcgtcaccgggtcgccccctggcccctgcgacaaccccgccggcgaccactacctgctcaaggcgaccaagaacaagatcgactactgccggctccacggcatcgacgtggtgcacaacatggcgcacctggacccggagctgacggggtactggtccaagctgccgctggtgcgccgcctcatgctggcgcacccggaggtggagtggatctgctcccgctgtccccgctacgacggccgcaacctcgtcatccacggctacccggacctgctgttcgagaagcgctcgtggatctcgctcaacgccggcatcttcctgctccgcaactgccagtggtcgctggacctgctggacgcctgggtgcccatggggccccgcggcccctcccgcgtcgaggccggcaagctgctcacggccagcctcacgggccgcccgcccttcgacgccgacgaccagtccgcgctcatccacctgctgctggtgcagaaggagcggtggatggacaaggtgcacgtggagacggagttctacctccacggcttctggacggggctggtggacaggtacgagcagatgatggaggacaaccacccgggcctcggcgacgaccgctggcccttcatcacccacttcgtcggatgcaagacctgcggcaggtacgaggactatccgctcgaccgctgcatccggggcatggagcgcgccttcaacttcgccgacaaccaggtgctcaggctctacggattccgccaccgctcgctcaccaccgccaaggtcaggagggtcaccgaccccaccaccaacccgctcgaggcaaaggaggccgcgctcaacatggacgccaagttcacctag

SEQ ID NO: 13128 - DNA, 1473 bp, Zea mays
  Peptide Sequence Number=SeqID_56503
atgcgtacgccggcggccggcgggtggcggctgcacccgcggggcagcagcagcagcaagctgacgaggcggatcatcagcaacgtcaagatcaccctcctctgcgccttcgtcacgctcctcgtcctccgcggcaccgtcggcgtcaaccgccgcctcgtctacatcgccggcagccccgacaaccgcgcggactcggccacggccacggccacgggcagcgccagacccgtcgaggacgtcgagcgcatcctccgcgagatacgcgcagactccgacgacgacccggacgctggccctgacgacaacgacgaggcgccgacgtcgaccagctcgtctgcggccacggggcaccactacgaccgcggcgccgcgtggacgacgacgaactacaggctgcagccgcgggtgacgcggtggaacgccaagcggcggcggtggctgcaccagaacccggggttcccgtcccgcgacgcgcgcggcggcccgcgggtgctgctggtcacggcgtcgccgcaggggccctgcggtagctccgacggcgaccggttcctgctccgggccaccaagaacaggctcgactactgccgcctccatggcgtcgagatggtgcacgccacggcgcggctggaggaccccgagctgcggtcggccggcgacggcaacgggtgggccaagctcgcgctgctgcggcgcctcatgctggcgcatccggaggtggagtggctgtggtggctggacgccggcgcgctcgtcaccgacatggggttcgagctcccgctggcgcgctacgagggcgccccacctcgtggtgcgcggcgactctggtcactggacctgctcgacgcgtggaccgtcatggcgcccaggggccgcgcccgctacgacgccggggcgctgctcacggcgacactggcgggtcggcgggctggcgaggccgacgaccagtccgcccttgtacacctgctcgtcaccgagaaggagcggtggatggaccgggtgtacctcgagaaccagtactacctacacggcgtctggacggcgctggtcggcaagtacgaggaggccatggagaagcaccacccggggtacggcgacgaccgttggcccttcgtcacgaacttcgccggctgtaatccttgcgacgacggcaagaattgcagtgacgagtacccgctggaccggtgcgccagcggcatggagcgcgccttcaacttcgccgacaaccaggtgctcaggctctacggcttccggcacgagtcgctggcgagcgccgaggtcaggcgcgtggcaaaccggtcgacggacccgctggaggccaaggaggaggctctcgctttcttgaagaagcccaatgagccggatctatggagcaacgatgtgcgcaagaatagaaagcgtaagggaaagggagatttagattctgttcttgcaagaatcctgaggagactgggatggcgatccaagtgttga

SEQ ID NO: 13129 - DNA, 177 bp, Zea mays
  Peptide Sequence Number=SeqID_56504
atggagagtcatgatctccgggcagaaagggaatcacgacttgtgggtggcaatgatactgatggttttggttatgactatggtgctggttgtcagcatttgcaacccactgctcaggagaagatgaagctgtggaagaaagacttccaggagttccaagattatgatgagttctag

SEQ ID NO: 13130 - DNA, 276 bp, Zea mays
  Peptide Sequence Number=SeqID_56505
atggcatgtgcacgtgatcatgtccagtccaagcccaaggcccacttctccactccaccagatgaccagacggccagaccgccagtccgccacagctggtcagacaggacaggaccggttgaaccgccccctagggcggttgaaccgccccctgacaaccctggtgacctgactgccagtctgactggcagactgcagatcagaagtcagaggggtcagataccagttgaactgccccccaggaccagttcagctggtctagaccagagagtttag

SEQ ID NO: 13131 - DNA, 252 bp, Zea mays
  Peptide Sequence Number=SeqID_56506
atgacgaggagtgagagaaggattggtgaacctcaggcgctgaagggtgtccactcccttcagagagaagtcgacaagaggttaatttggtccgcggacacagaactgcagctgaccggtcagagccagaccggttcaaccggtcctcaacaccggttcaaccggttttggccaggaaagtcctggttatttctggttaaagcagctgagctgaagttcagctccgaagttcagctggcctcctccaggtga

SEQ ID NO: 13132 - DNA, 360 bp, Zea mays
  Peptide Sequence Number=SeqID_56507
atgacggcccccgagacagttccggtacacccgggtcagtcggtgccctgccaagtcatcatgccggtgattctagccgttggagctctgacatgttggcccgcctggtgtccggtgcacacggacagccgagtcgcccctggaattcccgaaggtgaagagtttgagtctgagtcccctggtgcaccggacagtcccgcagggtttgcctcatccaaagcaattgcgcgcaacaatgtcctgcggcaatgtactcggcttcggcggtggaaagagcaaccgaattttgcttctttgaagcccaagacaccaaggatcttcccaagaactggcaagtccccgatgtgctcttcctattaa

SEQ ID NO: 13133 - DNA, 441 bp, Zea mays
  Peptide Sequence Number=SeqID_56508
atgggcaagaacaacaagcgcaagcgtgagccaactcctccatcggaggagtttggtgactcggagtactcagaggaggagttctcctctgagtctgaggggtccccggctcccatccccctgcgtgagtcgtctgacgactcagacgactcccagaggctcacggcggaggtctggacgtacatccgggtcgtcgagcgctctgggctcgagggctcggatgagtcggagtactcctcggatgaggaggactcggaaggcggcggcgaggacgaggacaacgacgacgacgacggcggtggcgacggtgacggcagcggcaagggcggcggcggcggcagcaagggcggtgacggcagcgacagcagggacagcaaccggggcggcagtagcaagggcagcaccaggggcggcggcggcagcagcagggccagtggctag

SEQ ID NO: 13134 - DNA, 264 bp, Zea mays
  Peptide Sequence Number=SeqID_56509
atggcggctcgacgcgctcccctatccgcgatgtcgccgtcgcccgtgttcgcccgccccgacgtgccgccggcgtgccctgctcgcatcgtgatggcctcggcgcggcctcgagctcggcccagtgtacctttggcgcgcggcctcgagctcggccagcgcgcggccccgacgtgtgcgcgactcgttcgcgacacgatcgtctaccccgagccacccgtctacccccctatgcattccgtgcgtagtgatcgtgttatgtaa

SEQ ID NO: 13135 - DNA, 558 bp, Zea mays
  Peptide Sequence Number=SeqID_56510
atgggggcggttccaggaagaagctctatggcaaactcaactttccactctggtggcatgcccagcgggactaactcggtcaccacttcctctcctagtggggacaccaacttgattgtccttggatcacaactgatgactgcctgtcgactgggaacatacctactatcatgccgggggtctcctgaactgcttcagcctccaagtggttcagtctcccatgattataacgcggctaagagcggttgcctgctccaggctgagacacattctgcttcgctggggcattggggcctgactgctgctgggctgccttcttcggacattgcatcacccaatggccttgctctccacagtggaaacatgccctgtttccaacttgagctggtgctgcctgattgttctgctggtttgctagggcaggaagacgatgtgcttgctgattctgcctctggaactgacctcctgactgattgctctgatgattctgatactggtgctaaggatactgcctttggaactgctgatgttgctgaggtggacgttggttctgcctga

SEQ ID NO: 13136 - DNA, 49 bp, Zea mays
  Peptide Sequence Number=SeqID_56511
tggtggcaagatgccaccagacatggaggcaatagtgaaagttgcctag

SEQ ID NO: 13137 - DNA, 963 bp, Zea mays
  Peptide Sequence Number=SeqID_56512
atgacttcccacggatcctcggacgaagggaatgcacagtcccacactgacggacttgcacgagagggtttcccccgtattttgtgggaggtacttcagggagctggttacacgacgcctccccagtacgcggtgcagttgttcaagaagcatcgagtgcctcgctgtagggtgaggatgaccctagagcctcatcccctgcagccaggctggcgttcgctggactctgagtcttttggataccgggctgaggatactatcgaggcgattgctcttcatggactgaccaccttctacggattccaccccttggagctgtccactcaccccattggcttgttccccacagagaaggaggacgacccaatgtggaaggatcgagtggagcatgccaaggatatctgggctatctacccaggtcagactgctcacttgacagtccggtgcatgaatgccctgtatcgtctgcaagtgatgcgtggagaggcaatgtcccatctaatggcattgttggaggcaaccaagatcactttggataacagagaggaacttgtggttgacttgtccacggagatggtggaaaaagacttacaagtggaacaattgtcaaatgagatccaagagcttgaggagctagtgggaactagggagaacactatcgaggttctcgaggatcagcttatcaacactcagcagcaactcgcggaggctaaccagcatctagatatggcattgttggaggcaaccaagatcactttggataacagagaggaacttgtggttgacttgtccactgagatggtggaaaaagacttacaagtggaacaattgtcaaatgagatccaagagcttgaggagctagtgggaactagggagaacactatcgaggttctcgaggatcagcttatcaacactcagcagcaactcgcggaggctaaccagcatctagatatgcaccactag

SEQ ID NO: 13138 - DNA, 483 bp, Zea mays
  Peptide Sequence Number=SeqID_56513
atggcacccaagagagctagttcgaaggcagccccatccgtcgacgaagcagcgaaggcagcgctgctagcagagaaaaagggcaaggcccttgcggacaacaccccccaagaagcctatgaagacgaagctctcagcacaagacagcgccacgaacaccccactcccgaaggcaccctacgcacctgcagctccggaggactaccacaagcgccacccctaggcttcgctccaccagagggcgaagatgcaacagaggacagcaaggtcatcggagtctcaaccgaagagcaactacagctgcgggccctgcgcatcaagaaccgcagcctccaaaaacagaaagatatcctcgaagccaagcgccgacgtgtcaccgcgcaagccaaggtgcgccagatgatacaagacaaagagcaaaaagctcgggaactcgagcaagagatcgcgctcatgcagtgcgaaggccagcatgatctatag

SEQ ID NO: 13139 - DNA, 186 bp, Zea mays
  Peptide Sequence Number=SeqID_56514
atgcaggaatcccttgcaggaccgccatcgcagcaaaatcttcccgagggcctccctacactgaccactcccctactgcccttgcccctttcggtggtactagatgataaacaacactattacaaaattataggaactggaatgggtcaatttggacttcaaatgaactttctaatgattaaataa

SEQ ID NO: 13140 - DNA, 273 bp, Zea mays
  Peptide Sequence Number=SeqID_56515
atggcgcctcctgttgacgtggctggcctgcgccctaggttgggcgatgtggaggctcctccgaagccgaggtcgagtctgtcttccgtggccgaggtggagtccgagcccctgggtcgggcgaggcggaggtcgtcggctgaggctagggcggagtccgagccctggggtcgggcgaagcggagcggcgctgtccttctgtcaggccggtcagtggagcggcgaagtgacggcggtcacttcggctctgccggggggcgcgcgtcaggataa

SEQ ID NO: 13141 - DNA, 123 bp, Zea mays
  Peptide Sequence Number=SeqID_56516
atggcgcacggaccttcggaaggagaaggcccccaacaatgcgcaacctttgcagagtgtaaaactggtatatcagccgtgctcacggtcatgcatgagcagctcggacactcacatgattaa

SEQ ID NO: 13142 - DNA, 1203 bp, Zea mays
  Peptide Sequence Number=SeqID_56517
atgaacaaaaacactggcattcaaagtgccatcacaaacggaactccggttccacctccgcaggtacgaagaaccccactcgatgggggagggcctgcagagcaacagaagaccgacgaacggcgcgccgtcgcccgctccagcagcagcgacgacgacgacttctgctccggggggccgaacagcggcagcactgacctcagggcgaatgctgctgccaagaggcccccgcccatgcccaaactcgtgaggcaaggacgggcagaaggctgtagagttggaggtcggtccgtgggtggccctggctatctcgtcggcggaagaacctcttccagctgccgtggcagacgccggcgccgcgagcggctccgaagccactcgcgtccgagagccaggcacggtgcagctgccagcgccacggacgacgaccgcccttccctccgatcactgagtgaaggagcgagccaccgcccacgcaggggccgaccccaactcggcacactcccctccccagccctggtgatgaaaatccttgaggctgagggaggggcagaggccgcaacccggctcgctttcccccaccatcaagctggaggggggcaccctccttttaaaggcgactctccctacttgcgcccccaaccgtcgtgggctgagtcttctccaacacactccaagaccagcgggcgaaaggggcgggcagccatgcaggcggcacgcaaccgcgccaagtggacgcccttctccgactcccaacacgcccagcctggaggcccaggcccacgcgtcatgcaaccggtgcgccgaatgcttcgtgcatgcaactgcaccgctacttgcgccaccaccgtgcctcctcgattgcggaaccgataccgcgactcgaggcgacccagagcacgacccagcagcgccagcctggcgtggcggtcagtgcggccaaaaaagggcccggcagtaatgacgatggcaggcgggcgggagcagcggtcacgtcgtcagccaagctcacgtcccatccgggggcagcaagagaaccccctctcacggcgtgaaggcaacgcgcccgtgatccattcctcgaacgactcgcgcacgcgcaacggccaccccgccaatgactcgccccgtcgcattaactccgcggcgggacaggcggcacctctggcagaagaagcgggcgacgcttcgccttcaccataa

SEQ ID NO: 13143 - DNA, 237 bp, Zea mays
  Peptide Sequence Number=SeqID_56518
atggcgcctcctgttgacgtggctggcctgcgccctaggttgggcgatgtggaggctcctccgaagccgaggtcgagtctgtcttccgtggtcgacgccgagtccgagcccctgggtcgggcgagcccgagtccgagccctgggtcgggcggagcggagttcgccgtcttccgggacttagcccgagtccgagccctgggtcgggcggagcggagttcgccgtcttccgggacttag

SEQ ID NO: 13144 - DNA, 639 bp, Zea mays
  Peptide Sequence Number=SeqID_56519
atggcaggggaggccaagaagctcttcttcgcatccgaggttactctccacgcctccaggaaggactgctgggtcgtcatcggcggcaaggcgaccgccccatgccccgtccaggcccgggctcacccctgctgcgccatctgccgagctcgaccctgcgcgctggccgaggccgctgccgcgccgaccaccacgctgggcgagatcgcgctaggtgaggtcgtgctgggcgatgtcatgctggacagggcgcctcacaagctgcaagttgcaaatactagcttcctgctgctgacgaatctacaatttacaaatactagcttcctgttggccagctgttcacttgatcctgcctctggggatgccacggaagcattcgaagaggtgggacacagcacttcagccgtcagcatgatggacagctacttgattggaagcatcaaggactatgttcgtccgagtgcatcgaaggccacagatccttggagcgctgatgttctaccaaattccaggacgatgcaagggaacaaagtcactcctaatccaaataccttcctggactttcttctcccattgtttgtgcttggcctggcatttgcagcttggtattacctaaccttcatctccaagaaccattaa

SEQ ID NO: 13145 - DNA, 213 bp, Zea mays
  Peptide Sequence Number=SeqID_56520
atgggcgtcggcgcattgttggaggcttcctggtacggtgcggacgatccagactcgagggtcggacagtccactgctggttcggatggcctggcttctcgagctggactgtccgagggtactgttgacgccgagtggcccaccattcagcgggtgcgggcgatttggcggttcaccttcccacctgcatcactatataaaacagacgggtag

SEQ ID NO: 13146 - DNA, 771 bp, Zea mays
  Peptide Sequence Number=SeqID_56521
atggaattaccactagacgcgcagagtagcggaagacgtctcgatgtagacgaacgcgtcgagcagtgccgtgcagtcgtcggcgtccttcacgtcctcgcacggttcgtcctagtgctccagatgcagcaccttcgagcctctggcgctgttgtcttcttcggcggcctggtgaagctgaatgcttatcgaaggtggtcgtttgagttcaccggaggatacaagcctattcctcatgacgaaggcacacaagatgaagacagatttaaagaggataagagcgtccacaccgtgcgccatcgttctgccagcctcccgacgctcccctgcggatccggtcacacctttgtcgccgccatcatcggctacctgcccctcaacatcctcccctccgctcctcgtccagatctcaatcgcgcacaacccagtctgtccccccccccgacatcctcgcccaccgtgccgcgcacaccccgtgtcgcgcttccccaccacacccaccgcacacgccacagactgtcgatggaagaaactcgccactcgctcagcgggatgggaggtatgctggaggaagctagactgagagatgggtttcggtgtatccatatggtctgtgtcgaccaactcgagaggggcatcctcgctcctgacaacgtggtagacatgctgcatcttgccaggctgtgtgacgcgccccgcctcgcgctcgcttgtgcccggatggagctgctcgagtctcttgtcgaagctgatacggcgagttctctgtga

SEQ ID NO: 13147 - DNA, 393 bp, Zea mays
  Peptide Sequence Number=SeqID_56522
atgggcaagaataagaagagcggaagtttgtcgcaccactctggcgacaagcggaagcgcgagccaagtcccccctcggaggacttcggtgactccgagtactcggaggaggagttttcctccgagtccgaggggtcgccggggatcgctgccgaggtgtggacgtacatccagaccgtcgagcgctcggagctcgagggctcggatgagtcggagatctcctcggacgaggagaactcctccgactcgtccgaggagaagagcgacggtgacggcgacgacgaggacgacggcggcgatggcggcggtgatggcgatggcgacggcgacggcggcagcgacaagggtgacagcggcagcagcaaggccagtggcaaagcgtcactggcttaa

SEQ ID NO: 13148 - DNA, 423 bp, Zea mays
  Peptide Sequence Number=SeqID_56523
atggacgctctaaattttgaataccctgattatgaacgactcaacaaaggtggcgaaggggcaaaaaggaaaagggttgtcagcgttctgagcaggcaggctgccagcatggtgaaggaagatgaaaaaactttaaagaagagaatccggtcccgagccgaaagcagcggctttgaagaagagaaaagctgcaactctagagccgaagacacctgcagctgcagaataggtcatggcccccagtgcctgataaagggaaaggaattgccgaagctgcttcagaagaaaaaggtttcgatcgtcggaacctggttggtcaagaactctctgaggccgagaagaaggagctacaggaatatggcattttctgtggctactagccaggagccatgctctttggtggaatcgattaagaggccttga

SEQ ID NO: 13149 - DNA, 1293 bp, Zea mays
  Peptide Sequence Number=SeqID_56524
atgggggaaggcctgcggagcaacagaagactgacgggcggctcgccgccgcccgctctgacggcgacaacaacgacccccgctccgggtggccgaactgcagcagtgcaggcctcagggtgggcgctgctgcaatcttgcccttgcccacgccgacgctcgaggggcgaggacaagtacaaagagccggaggcccaaagcgcggatggtggcggtgatcccgtcggcgacggggacttctcgagccgcctccgcctcggcaccgacgacaggggccgtcagccctccggcagatccccactcaaatcctctcggacgagtggggcaccgacctccgcgcggaggcgccataccggtgcaaaggcaggaccgccccagaacacgaacgccgccctagcagcgcgcgacatcttgggcggtcctcccgtgcacacggcgcggcagccgccttccggcaggaggggccaccgggagccaagccgacgagctcgacacgctagggctgacgacgcccgccgtcgaccagccccgcgttgtcgaagtccggcccgcccgcagggccagcgagcgccctctccctcgaactccgtaggagagggtgacccacgaacccgcgcgggaggtagagctccggtcagcccggcctccaccctagcgaggatgatgaacatccttgaagctgagggtgggaccaagatcgcagcccggcttgcttctccccacccaggggctggtggtcgccgtcttgggaaaagcgggcgacgcttcgccttcgccataatgaccgcgtcagtaaagggaccgggaaagggggataccccgaaaaggatccttccccgtgaaggaaccaggctccgagcctccctactgatcagaggttcgaaggctagccccccggaagggttcgacagccgcctcagatcgcgtgggccctacacccactactggtcagaggttcgaaggccggcccctcggaagggttccacggccgcctcaggctactcgagctccgcgcccattactgatcaggggttcgaaggctggccccgaagggttcacagccgcctcagacgccgagcgagggatgaccatgggtacgttcgatacataaccaaggctcgggctgcgctcccgagaggctcatgggctgctctcgcaaacccggctccggccgaaccgttgacagcgtcaacataccagcccgagaacatgggacccgaccgtacacccgggctacggccagttcgcatgagggaacaaccagaccagccgaagcattacgcaaggcattaa

SEQ ID NO: 13150 - DNA, 369 bp, Zea mays
  Peptide Sequence Number=SeqID_56525
atggagggccactttgtcctccctctgtcagcgcatgcacaatcagaagctcagttactgatcatcccagttggtgatagccaatgggatgacatgcctttcgatggccgaggtcaccaaagacaggttaatcaagtcttagaaagacgctatcgtgtggaacttaaggctcaggagcatatagaccgagtattagagaaaaatgagaagaaggtgtgcaaggatgcaatttccaacgctcatctacatgttgtgaacgcgtacatgaaacatcgagggcattctatcaacaactttcgacaatattcgaatgtctacttgactgttgaccagtacatggagttggcaaagcgaatgatgagtatgtag

SEQ ID NO: 13151 - DNA, 981 bp, Zea mays
  Peptide Sequence Number=SeqID_56526
atggcgcctcttgttgacgtggtcggtccgcgccctaggttgggcgatgtggaggctcctccgaggtcgaggtcgagtctgtctttcgtggccgaggtcgagtccgagcccctgggtcgggcgaggcggagaccgtcggctgaggccagggttgagtccgagccctggggtcgggcgaagcggagttcgtcgtcttccggggctgagcccgagtccgagccctgggtcgggcggagcggagttcgccgtcttccggggctgagcccaagtccgagccctgggtcgggcggagcggaggtggtggtgcgcgggagtcttcggaggggtgacaatttctcgacacgctccgtcgcggactcgcgtgacaccgtggccagcacctcaggccacttcaataccgatatgccaccacgcacgaggaaaactgcgcgtaagtccactgtacctattggcgtacctcggcatcagttggctccaagacatgaagggagcagcagcggcagtaacgaccccatcggggacctagaagcccaagtggagcagcttcggacggagctacgtcaccgaaacagggtgttggtagaagatggtcagcgtatgaatgagttgagagctgatgtaagacatctgcaagacgagcttgctgaacgggatttggcaatcgattgggctgtcaattcacgttcgattgcttgggaccgggaagccaaagctcgagcccgtgtggatgagcttagcacggcccttgacaacttgcaggtgtattgcaatactttacatgaggaggtccatgtactgtattcgcgactgcacccagacgtgcctgccgaccctgttgcaatgggagccggaccctcacgaacagcaggtgaaggacttggtggggaattggacctttttaagccccctccttctatgaacctggctgacgagcggtcccctacaacagacagtgaagcaaccaaagacgataaatactag

SEQ ID NO: 13152 - DNA, 1164 bp, Zea mays
  Peptide Sequence Number=SeqID_56527
atgaccgcgtcaaaaaagccgcctcagagcgcgtgggctccacacccactactggtcagaggttcgaaggccggcccctcggaagggttcaacggccgcctcaggccactcgggctccgcgcccactacggatcaggggttcgaaggctggccctcgaagggctcgggggctgctctcgcaaacccggcttcggccaaaccgttgacagcgtcaacataccagcccgagaacttgggacccgcccgtgcgcccgggctacggccagctcgcatgagggaataaccaggccagccgaagcattgcgcgaggcattaagacctcggaggagtcaaaccactcctccgaggcctcgggggctacacccggcgggtgtgctcgcgtgcacccaccggaacaaaacgcaaccgagaaaggctggtccccttgcaaaaaagtgcgacaaaagcctccaagcgagtgttaacactcccttcgaggctcgggggctactgtcggggaccataattaggggtaccctcaagactcctaattctcagctgggctcggactcgggctcatctccggaagatggcgaactccgctccgcccgacccagggctcggacttggactcagccccggaagacggcgaactccgctccgcccgacccaggggtcggacttgggctcagccccggaagacggcgaactccgctccgcccgacccagggctcggactcgggctcagccccggaagacgacgaactccgcttcgcccgaccccagggctcggactcagccctggcctcagccgatggtctccgcctcgcccgacccaggggctcggactcgacctcggccacgaaagacagactcgacctcgacctcggaggagcctccacatcgcccaacctagggcgcggaccggccacgtcaacaagaggcgccatcattaccctaccccaagctgactcaggctacgggaaacaagaccggcgtcccatctggctcgctccgccagacaaagtaatgatggcgccccgcacgctctatgacgatggcggctttcagcccccttacggaagcaagaggacgcttcagcgctcctccaacggcgacgacaccacacgaaccgggtgccaaaacccctccggctaccacgatggcatgtacttagggcgctag

SEQ ID NO: 13153 - DNA, 744 bp, Zea mays
  Peptide Sequence Number=SeqID_56528
atgcccaagcgatggtgtcctctatgcactaatgaggttgctaatcgcaagatgaacacttctctaatctcctcactatacaaagggttatcttatctcttagaaggctttctgggtgccttgttcggtgtggtatctggtgccacaccggacacaacagtctttcttggacgtttattgattttgattcattttatcgtgtacgcattccttggggataacctcatctcctggaccttcaagcgtcagcccatggtcccccgctacagcgtcgaagttgagtaccacaccatccccaatggtgttgttgaggttgaaagaatagctcctggatcattgccgtcatccatgaaagaacctgtcgtgctagttgtaaacaaggcagatggagatgaagaggtcaaagctgctggggataacatagtgggcgttgttcttctacaagaattacctcacctatcacatcttggtgttagagctcgtcaagagaaagttgtatttgtaacttgtgaagacgatgacacgattaaaaacatgaggttacttgagggaaaacatgtcaggttgggtgcatcatccaataatgttgatctttcagttgtatcaaacaaagatgactgtgctgccatgtcttcagagccatccgctggaggagatctatttgcacagcaattctcactattgactacagacaagaagttagaattgtctgaggttaactttcttttgcctcaaatcatgtaa

SEQ ID NO: 13154 - DNA, 201 bp, Zea mays
  Peptide Sequence Number=SeqID_56529
atggagtacagagaagggggagaagtgggggagcaggagggaccttcagatgacatgctcatctcgtcactggttcgcagccaccgccggttggagactacaacagtgcagcaggtgagcaggatacaggagaaggggcaggggacgcagggtgttgtggccgccgcaaatcgtgtcctaattgctgaccagcccgactaa

SEQ ID NO: 13155 - DNA, 510 bp, Zea mays
  Peptide Sequence Number=SeqID_56530
atggaacacagggttcatgacccgatcaaagaccacaaaggtgcctcggagaagctggctgtcgtgaagggagacgcgcacacaatagggaggcatgtggattctggcatggcgaaggacgggcgtcaacagagcaggtgcgagagcggacatgtcgctgccaggaaagtgccctacgcgtgtgccggggtggggttagggaaaccgaagtttaacagtgctggggaaaccgttgggcacaacgggcgtcactgcggtcgcgaggagcagtggaggccgacaattgttggggagaggccaaccaccaagccgggcgtcgtgaagaagctggggagcatcgccgcaatcgaaggaggacatagggtgctgcggggaaggaagcggacaccgaacaaacctgatgagggcgtcgcgaccgatgcagagcgtggttgctggtggacggagtgtgggcgcaaggtgggaggcagcgtggtgagcgaggagatggatgtgggcttgctgtcatga

SEQ ID NO: 13156 - DNA, 150 bp, Zea mays
  Peptide Sequence Number=SeqID_56531
atggcccccctgcgtagcagggggtcgtcggtcgcccgcgcagcaagggaggttcttgggaaagcccttggaatacccgagaacagtgtcagaacatacactgaggctgaaattcgtgctaggtctcgaaactttgcactgtacttttaa

SEQ ID NO: 13157 - DNA, 249 bp, Zea mays
  Peptide Sequence Number=SeqID_56532
atgacgaacggtgacgacgtcatggcttcgcgaataatgctccgggctccggcgagctgcgaagatggctggcgacgaatggcgcctggtgctggtgggatcgagattgggcaagacgcgtacatcgtcaatgacgacacgctcatggacaaagtggaggttgatctctacatgctgcacggggttggtggagagcagatttttcctgagcaacataacgctggtattaagtctgttcatgagcagtag

SEQ ID NO: 13158 - DNA, 546 bp, Zea mays
  Peptide Sequence Number=SeqID_56533
atggagggcgcgagtctcccgattgctgagaaactggttctcaagggaaagccaggcgatgcgggcagtggtgccacgttgcatgaccatctcagcaagttccgggaagatggaaccggagatccacgacttgacaatgcaatccttgcgtgcctagtcggggaaggtaggcgagggagcatcgtcgaggatgtggctgtccagggagtacttgccgacgacgaggagaatctcattgcgccaatgagagtagttgttggaggcgaggtcgagggtgacgtggacgagactccggatgttctggacagcgacaaccttggcatcctgagcagcgagggcgcgagcacaatcagcgcgtgcgagggcggcgcgaacgcgttcggcaaccacgtcgcactcctgggcagcggtggccgcctcctgctctgcctggagagcttgggcgagggcgcgtgcttagctacggtcagcgcagtggtgtcgtcgacggtgggtggggtggcagatctgaaggagccatggccagaggagggcgcggccgggtga

SEQ ID NO: 13159 - DNA, 135 bp, Zea mays
  Peptide Sequence Number=SeqID_56534
atggccaagacgacgatgccaaagtggagtggagctggcgacgaagctccgatctgctggggcggagtcagggacacggtgctgaagggactgggcacccaatatggagtggccgactatcccaggatgccatag

SEQ ID NO: 13160 - DNA, 969 bp, Zea mays
  Peptide Sequence Number=SeqID_56535
gcgactttcaaggctgcagctgaagaagctgtgaagaagaaggctgatgccgataagaaggttgaagcggaggagaaaaggatacagtacgaggataggttgaacatgcttcgtcaggaggccaaagctgagattgacagtttggagaacaacattgatggccaggcaggatccagctcatcatttgatgatatccagttccctgcggagtccgatgatgatatcaacaatttgacccaaccaatccgactttctcaagacgaagtctcagtaggccaggctgatttcagcgagtttcaaaggatgatattcaagcgcctaggtgatagagtgctaaaaaagcctagggagtacatatccccgttcaagatccctcgtaatcgacctgagatacccctggccaaggctgttgcacttaggcggaagatcgcctctgatcctgagctgaaaaggagaattttgttggagtttggctttcttgttggactcactggcaagaaaattttaacctctttttctaatgacacccttggtgagtcaggaatcatagactttttcgtgcactgcatgcgacatgatgatattgtgcacaaggaaaacagcgccgcctgccctgctccgactgctgtgccacccgccagggtgaggctgacaacagccgagtccagcctcatgcgccataggaagctccacctcgcccgacccagggctcgccctctgcctcgacctcggaagacggtctccgcctcgcccgacccagggctcggcctccgcctcagcctcggaaaacggtctctgcctcgcccgaccccagggctcggactcaaccttgacctcggaagaaggtctccgcctcgcccgaccccagggctcggactcagcctcgacctcagaggagtcaccgcctcgcccgaccttgggctcggaccgaccacgttgcaggggggtacatcattaccctacccctag

SEQ ID NO: 13161 - DNA, 933 bp, Zea mays
  Peptide Sequence Number=SeqID_56536
atgccgcaccttctcgactgcggaaccggtgccgcgactcgaggcaaccctacgcatggcccaacggtgccaaccaagcacatcagtcacagggaccgggaaaggggatactccgaaagggatccttctctgcaaaggaagcgggccctgagccctcctactgatcagaggctggcccctcggaagggttcgacagccgcctcagagcactcgggctccgcgcccattactgatcagaggttcgaaggctggcccctcggaagggttcgacagccgcctcagagcactcgggctccacgcccactactgatcaggggttcgaaggctggccccccgaagggttcgacagccgccccagaacacgcagagcgaggaatgactctgggtacgttcgatacatggccgaggctcgggctacgctcccgaggtcaaagctccgtccactcaagggacacgatctcgcctcgcccgagcccagcctcgggcaggaacagtagacccaggcggattcacgcctcgcccgagggcctcctcaagcaacgggcgcaccttcgactcacccgaggccctgctcgggaaaacagtgccgcctgccctgctccgactgctgtgccacccgccagggtgaggctgacagcaaccaagtccagcctcaggcgccatagaaagctccgcctcgcccgacccagggctcggcctccgcctcgacctcggaagacggtctccgccttgcctgacccagggctcggcctccgactcggcctcggaaaacggtctccgcctcgcccgaccctagggctcggactcaacctcgacctcggaagaaggtctccgcctcgcccgacccccagggctcggactcagcctcgacctcggaagaagtcaccgcctcgcccgaccttgggctcggaccaaccacgtgcaggggggtaa

SEQ ID NO: 13162 - DNA, 411 bp, Zea mays
  Peptide Sequence Number=SeqID_56537
atgacacagtggtttatcccgtggttcggccaagaccaacgcttgcctactccacgttgtggcgtcccaacggacgagggttgcaatcaacccctctcaagcggtcctaagacccacttgaataccacgaaatggtccaagggcacatttccctttcaagaagaagctgagattaagagaaaggctgcagctgaagaagctgagaagaagaaggctgatgccgagaagaagaaggcagaagaagctgagaataagagaaagactgaggccaaagaagctgagattaagagaaaggctacagctgaagaagctgagaagaataaggctgatgccgagaagaagaaggcagaagaagttgagaataagagaaaggctgaggcggaagaagctgagattaagagaaaggcttga

SEQ ID NO: 13163 - DNA, 255 bp, Zea mays
  Peptide Sequence Number=SeqID_56538
atggagttcctgacgaaggtggagttaagcacttcgaagaatggcaagttcctctctgctgaccttgaaatgaatctgttcaatgatgccaacctccctatcaatctttgggcacccttccttgactttgatggctccattcaaagtatggcttctatcttacttggattagcttcgataccctttgttgatactaagcaaccaagaaacttacccttcttcactccaaagacgcattttttggatttaatttaa

SEQ ID NO: 13164 - DNA, 282 bp, Zea mays
  Peptide Sequence Number=SeqID_56539
atggctgaaaggagaagcgggcgacgcttcgccttcgccgtaaaaaccgcgccaaaaaagggaccgggaaagggggataccccgaaaaggatccttccccgtgaaggaaccatgcttcgagcctccctactgatcagaggttcgaaggctggccccccgaggggttcaacagccgcctcagatcgtgtgggccctacacccactactggtcagaggttcgaaggccgaccccccgaagggttccacggccgcctcaggtttgaaggccgcgcccattactga

SEQ ID NO: 13165 - DNA, 291 bp, Zea mays
  Peptide Sequence Number=SeqID_56540
atggcgtccccaattgctcaccggagcgatgggttcacggcggacccgccatgcgtcgtggccggcctccttcgaccccctatttccggtgagtaccctctacccaggttcgcaataaagaaagctagtggaagactaccttacccgaaaggggcaagggcagtaggggagaggtcagtgcggggaggccctcgggaggattttgctgcgatggcggtcctgcaagggattcctgtactggatcttcctataaactgtagcgggttttcggaagctagtggaactttgtaa

SEQ ID NO: 13166 - DNA, 498 bp, Zea mays
  Peptide Sequence Number=SeqID_56541
atgacctcaagaaacagcgtaaacatggtacacgagattggccagagcagggcatataaaaatggtaactggcggctacattgtattgcatttgttgaccatgggctgacggcagagaagaagaaactggcgatgattgttcttgctcgtttgtacaaagctgcttcagacacatgcagtggtctaccagccgcgcccaccctaagggcaaactgtgctgcgaatccacggagaaaaaatcctgaaagtattgatccaaacatggtgcctaggatcggtatgacatttggaaatgtcgatgaggcatacaatttttacagtcgttacgcatatgaggttggttttccacttaaaaagtatagggagagaaagaactgtaagtggttaaattgttcaatggagggtagaaatacggaaaggaaacaggcgaagcaacgagaaaagaatgtcaatgatgtgtctaagcttttggcttttttcattatgcaaaagggataa

SEQ ID NO: 13167 - DNA, 498 bp, Zea mays
  Peptide Sequence Number=SeqID_56542
atggaagctccaaagatgacagatacctgtagaagtggcaatggtattacagaagccattcctttcgttgaatggagtgagaaaggaggacgtcggtttcttactcctgctggaattttaacatttaatagacatagcatgagcggattctcaggcatatcaaaatcacttaaaactttttttgatgctcaagtagcaaatacaggtgctttggaagctatccagattgcgtatccaaacactatcggctttaattttacccaagtgggtatctgtgtgttgcaaagtgagcatgaaatggccacatacaataaatgcctgggagaaattgacctcatgggcattccacccgccccaagaggcttgcctcggattgaggttacattcgacatcgatgccaatggaatcgtgaccgtctcagccaaagataaggctacgaggaaggatcggaacatcaccatccgatcttcgagtgggctgtctgaggctgacatctag

SEQ ID NO: 13168 - DNA, 654 bp, Zea mays
  Peptide Sequence Number=SeqID_56543
atgtggtattttcaagagatgacagaaaaatggggggaaaaggatggagaaacaaaatcatataggcaaaaaatgttgcttaaaaaggcaatgaaggtgggcgaagagggtgctgttggaaatgatgaaggtgaacatgtatcgcaatgtgataacgaggagcatgtggcagtacattcacggcaacatgatggaagcataaatattgatgcacatcatcaatctgaattgcaaatgacgcttgttggaaatgatgattgtgaagggacacaatatggggatgttagaaagagattggaatatgatgtagatggcataagcttagtgcgtccaaataatgcaaggccaaaggaaaggacgataaaaactagtgaacaaagagttgtgaaactgggtgcgaaaggagaaaagaagaacactcgaaagtgccaaaaatgtggcattgctgatggacacaacagtctcacctgcctatctatagaggaaaatagggttaaattggctagccttgctgatagaaaaagaggacgaccgcctgggtctagaaacaagaattcaacaatggccccgcattggaatgagacatccacatcaaaaaagcataaacatattgattctggagaacatagttcggatgacgataatttgacatga

SEQ ID NO: 13169 - DNA, 315 bp, Zea mays
  Peptide Sequence Number=SeqID_56544
atggaggaggacgggggagctggcgagtcagaggacagtgggagcgaggttggaggtggggatcggcgctcccagctctgcgcgtctagggaaatagacaggggaggcaaggatcgcgagcaggactggggcgagcggtgccagagcgtggcgaccgcaaacgtggaaggtgtcggtgttttgggtccgatcgcacacccggggttgcccctcaaggcccacgaaagaatgccttacaatttattgactctggcattcgtaggtctttactctttagtaacacgaaagttatctacaaacgacaactattcttag

SEQ ID NO: 13170 - DNA, 426 bp, Zea mays
  Peptide Sequence Number=SeqID_56545
atgtcgtcgcggaagaatcacgagctgccggagggaggagcatggggaagcgacgccggccgcacggcggtgtgggacaccgggagctccttgtatgactcatacaagctggccgccgtgcgccggctcctcgacaagcgcctcctcaccctccgcgacgctgaagagacgaggggcaagggcaggcaactggtggtcatgccggtcgtcagcagcaggagggtccaccacagggggaagggccacgctaagggcgctcttcaggggcggtggcccacctgtgcggcccggacgaggcaggcgctgccgctcgcctatgcctacgctgctggcatggtccatgaccaccagggtggttccccggtcgagccggaggatctaccgtcccgtcccacggtcaactttgatgatcatccctatgtttag

SEQ ID NO: 13171 - DNA, 228 bp, Zea mays
  Peptide Sequence Number=SeqID_56546
atggtagttgatcaggcacagtttttggatcgccaacacctatttgtcaagttcggtagtgtggatggaggggtttctcggagtactgaccaaaacctagcattctttgtcgtgtacaacatggagacaacagatatcgtttcagttcatcaggacattgtgatatttcctgaagatttgtataagtttgtaatttatataaagaagcctaagtatgcgtggtactga

SEQ ID NO: 13172 - DNA, 90 bp, Zea mays
  Peptide Sequence Number=SeqID_56547
atggggacccctctggcggattctttgtcgagtgctgtcaggcagacactcggcaaagatagatgcataatcacaccagaacacaaatga

SEQ ID NO: 13173 - DNA, 285 bp, Zea mays
  Peptide Sequence Number=SeqID_56548
atgggtgggactatctggaagaattaccattgtatacctatggatatgggtgataggaaggtttcatggaccaggttaataatgagtaggctcaatctagccatacaaaatgctcgaccaagatcagccctccctgcttttttgaagtaccctattgaactcttgaattactgcccaacaatgaaattggggtctaatgattgtggattctttgttatgagatacatgcagcactacgactacatggatggagctatcaatgcagtcattgatccggataattaa

SEQ ID NO: 13174 - DNA, 1605 bp, Zea mays
  Peptide Sequence Number=SeqID_56549
atggcgattcgtcttcatcctctcccgccagcgcgattcgccgtcctccgccgtcgcacgccctcaacttcaatcgccgccgccgctgacagtatcgtcgagccactgccgctatcaatcctccgcgccccgcgtcacattggtatacgtccgcggacgatctgtcatccggattccaaggctgctgcttcaataatgcggaaggttgatcgacccccaaccaatccgaagcgtttaatcattgagtcaagtcaagaacgtttcagtgttgatattccacgctcgactgacattggagaccctacaaatacgcagtgtgatggtgatcctccgcagcatagaaagaggggtgttgctgccgatgctaaaaagattcctatgcctaatgtggatgatgatgatgactttgagccaccaaaaaagaagtgcaatatcacaatggatgccccaaataagacgcagagactcaacatcagatgcaacccaggagatgttcttgcgtccattcagatattgaatgaaaggcaacgtcaagctatagtcagaaaagacttcttcagtattcttgacatgacaattgatgcaattagatgtcgaacacttctttgttggctcatgcagaagctagaccccagagacatgactcttcgtattggtccagacaaagaactcaaaatcacccagcagactgtccatcagatattgggtcttccaaatttgggtggtggaaagccacttaatattgatgaagcgaacgatgcggcaacacttcggtcctccttgaatattagcaaggatgaatttgttatttcaaagctacaggacagattgaggctaggccaggatgatgatctttctatcagatgtttttttattctcttcaaccggctgctattcccaacagctagctggtcgatttcttataatgaggttctacttacagaagaattagagtggttccctcaaattgattggtgccatctaatttttagtgacctatgtgaagctgcacataaatggcacaataggagcattaataatgtgtcgacgatgatatacggctgttccatcgttctgcttttgtattatttggaccacttgcaccatgtcgcagctccaaacaacaaaagtggcactccgcgcataaagtattttaataagaatatcataagagcgttgtcaatggctgataagcggaagcctcgccaaggtggcgaaccatttggtgtttgcccttttcagagcagcagtgagacttgttatgtctcaaaatcaccatctactggtcagcttgagaagttccaagctaagttgattgattatgacttagaggttggcaaaatatttgccaatatcaagcaatgtttgaataatattggtacaaagcagtccaagctagctgctacatttggagagttgattgacgagcaaggtcagatagtgccaggtggcatagttgaccatgactctggcccagtatttgacaagactcctattgggagtgtttgtgcaccagacatcttcctatctgaattagaatgtactcgcgctcttcgggcctacttgtgttctaaggtcattgaattggacagatatattatgtaa

SEQ ID NO: 13175 - DNA, 1050 bp, Zea mays
  Peptide Sequence Number=SeqID_56550
atggcgatgctgatgatgacgtggacgtggacatgcaacgccaagctgctgctgatgacgctcgtcttcgctgctgcgctgagcgcgacggtgacgacgtcgcgggcgcagtcgccgccgctgcagtacaacttctacggcgcgtcgtgcccgcaggcggaggcgacggtccgcaacgtcaccgaggggatcatcgccaacgaccgcaccatgggcgccgccttcatgcgtctcttcttccacgactgcttcgtcaggggctgcgacgcctccatactgctggacccgaccagcagcaacacgcaggtggagaagaaggcgatcgcgctgcgcgggtacgcggccgtgaacacgatcaaggcggcggtggaggcggtgtgccccggggtggtctcctgcgccgacatcctggcgttcgcggcgcgggacacggccgtcgtctccggcggcttcgccggcttcggcatgccctcgggccgccgcgacggggtggtctccagcttcatcgaggtgctgcagaacatcccgtccccgaccttcaagctccccgacctcgtcagcaacttcgccaagaagggactcgacgtggacgacctcgtcacgctctccgccgcgcactccttcggccagggcgcactgctccttcgtcaacggccgcctctaccccaccgtcgaccccaccatgaacgccacctacgccgccgggctcaagacggtgtgcccgccgcctggcagcggcggcggcgacccggtcatcagcaacaaccgggtcacggaccccaacgcgctcagcaaccagttctacagcaacctgatgaccgggcaggtgctcttcgtctcggaccagcagctcatgaacaccacctacacggcggccaaggtggccaacaactccgccgattctgccgcctggatgacccagttccaaacggcgctgctcaagatgggcagcatccaggtgctcaccgggacggccggccaggtcaggaagtactgcaacgtcgtcaacagcagctaacagattctcggccggctcggatcactagctag

SEQ ID NO: 13176 - DNA, 462 bp, Zea mays
  Peptide Sequence Number=SeqID_56551
atgggcaaaaacaacaagcgcaagcgtgagccaactcctccatcggaggagtttggtgactcggagtacttagaggaggagttctcctctgagtctgaggggtctccggctcccatccctctgtgtgagtcgtctgacgactcagacgactcccaggggctcgcggcggaggtctggacgtacatccgggccgtcgagcgctccgggctcgagggctcggatgagtcggagtattcctcggatgaggaggactcgaacggcgggggcgaggacgaggacgacgaggacgacgacgacgacgaaggcggtggtggcggtgacggtgacggcagcggcaagggcggcagcagcggcagcaaggacggtggcgggggcatcggtagaggcagcaccaggggcgacagcggcggaggcagcaccaggggcggcagcggcggcgacagcaacagggccagtggctag

SEQ ID NO: 13177 - DNA, 300 bp, Zea mays
  Peptide Sequence Number=SeqID_56552
atggaggtggagggaccgacacagcacaaggtggccaccctcaacctcggtcaagaagtcgccgtgctcacgggctcgccgccatcatctctctccacccgtggtgacgacaccgtgcccgcggacaagctcgatttgtcgatctacttggctctcgcctctcgggttcatctgcttcgttgtccatctactttcatctgcttcgcaaggttagatcgctctcctacgacctcgatcggttctcagctgcgagtgaaccctaactgtgtcgtctccctcttctcagatctgattaactga

SEQ ID NO: 13178 - DNA, 810 bp, Zea mays
  Peptide Sequence Number=SeqID_56553
atggcctcaaatgagccccttggcaccatctcagatgtcactgaaggtgctggtgcatctgaagaaccatgtcttgttggtactactgcttctggttctactggtgccagcccttcgcatagtggtgctggtgctggtagttcctatggatcatatggaaagaaaaggagactcagtgatgaagagctcgggattatgacaggacttactggagctgtgaacaaattggctgaagctgtccaagcacctgttatagtccagaccacatatgtccaccctgatctgtatcaaatttgcatgagtattccaggtttcactgatgaggacttgatgacttgccttacctacctattggacaacaaaaggcaaggtgatggctttgtgaagatggagcctaaacaccgtgtgctttggctaagttcatacaaatctgaggcattttctgtcatcgggatcatgactgccatctgttgttcacaggatgcaagacttacttggactaaggaattgaggaaagcaacacctcaaaagaagacattaaaaagatccaagaaaagtccaagtgtgctgcctgtggactgtctgtgcgtggagcaccggactgtccgatggcacaccggactgtccggtgcccacacgccggactgtctggtgcaccagggaactgaagccaaatggctacttctaggtggcactcggagaaaagaccaccggactgtccggtgcggagaccggactgtctggtgtgaaaagtctacggcgccaacggtcacctactctgacagggcaatggctaggcgcaccggatag

SEQ ID NO: 13179 - DNA, 984 bp, Zea mays
  Peptide Sequence Number=SeqID_56554
atggcggcgacctcgtcagccgccttagtgaccatggtggtggtgatcgctgcagctgcgatcagcacggcttccggcacggcactactgcagtacaacttctacggctcgtcgtgcccaaaagccgaggaggcggtccgcaacgccactcagaagatcatctccgacgaccccaccatgggcgccgccttcgtgcgcctcttcttccatgactgcttcgtcaggggctgcgacgcttccatcctgctcgaccagtccaacagcaacccgcagccggagaagctagccatcccgctacgcggctacgcgcaagtgaacacgatcaaggcggccgtggaggccgtctgccccggcgtcgtctcctgcgccgacatcctcgcctacgcggcgcgcgactccgcggccgcctccggcggcttcgccttcgccatgccgggcggccggcgcgacgggtccgtgtccaacctcaacgacattcccgggaacctccctgccccgaacatgcaggtccaggacctcatcgccagcttcggcagcaagggcctcagcgccgccgacctggtggcgctctccggcgcgcactccttcggccagacgcactgctccttcgtcacgccccggctgtaccccgccgtggacgcgaccatgaacgccaccttcgccgcggcgctcaaggcggtgtgcccgccgccttcgcaaggcgggggcggcaccgtgctcaacaacaaccgtgtgacggaccccaacaagctgagcaaccagtattacaccaacttggccaccgggcaggtcatgttcacgtcggaccagacgctgaccagtagcaacaccaccaacaagatggtgcaggacaacgctgccgatccgatcgcgtggatggcacggttcgcgggggccatgctgaagatgggaggcatccaggtgctcaccggcacccagggtgagattagaagagtctgcggcgccaccaacggcggcaactaa

SEQ ID NO: 13180 - DNA, 144 bp, Zea mays
  Peptide Sequence Number=SeqID_56555
atggggagattgaaagggaaatgtgcccttgggccatttctaagtattttggtgattgagtgccaacacaagtgcttaagtgtaaatcgatgccaattgatggacaaagtgcaaatcaagtctaaagcttgttgcctcaagtaa

SEQ ID NO: 13181 - DNA, 693 bp, Zea mays
  Peptide Sequence Number=SeqID_56556
atggtgacctccggcttgatggtgggggaaagcgagccgggttgcggcctctgcccctccctcagcctcaaggattttcatcaccagggctggggaggggactgcaccgtgcctggctctcggacgcgagtggcttcggagccgctcgctgcgccggcgtctgccacgacagctggaagaggttcttccgccggcgggatagcaagggccggccacggaccgacctccaactctacggccttctgcccgtccttgcctcacgagtttgggcatgggcgggggcctcttggcagcagcatccgccctgaggtcagtgctgccgctgttcggccccccggagcagaagtcgccgtcgtcgctgctgctggagcgggtgacgacgcgccgttcgtcggtcttctgttgcttcgcagaccctcccccatggagtggggttgttcgtacccgcggagggggaaccggagttccgtttgtaatggcactttgaatgccaacttgcctgttggttgtctgaaccgcttcaccaagcgtgagtcgccccgtgtcaaggtgacgagtgagagcggagatccttggaccgcgtcgccgtccgaggctaggtcggacctcaccgaaggtgtcgtcgatgtcgagggtgctgctgcccccttccagcgtcaagacccgagcctgcaggatcagatcgtcttgtag

SEQ ID NO: 13182 - DNA, 1242 bp, Zea mays
  Peptide Sequence Number=SeqID_56557
atggctgaaaggtaccaactcccgcggagttgcgttcctccggcgatgaggcggaaagacggcgggtatcccccatccgggggcttggaaggtggaaagacacgatgcatgagggagcgcgaagacatggtctacttccaagggggtcaccctccttttaaaggcgactatccctacttgcgtccccaaccgtcacgggctgagtcttctccaacacgctccaaggccctcccctgcggcgcgggggctaggtcccacacgtcatgcaaaccggctcagagcagaagaagccaaaccgccgcgcgcggtgcgcacgaccgcccagcggttacaagtgaccctccacttttgcccagaccagcgggcgaaaggggcgggcggccatacaggcggcatgcaaccgcgccaagtggacacgcttctccgactcccgacacgcccggtatggaggcccaggcccacgcgtcacgcaaccggtgcgccggatgcttcatgcaagaaactgcaccgccacttgcgccaccaccgcgcctcctcgattgcggaaccaataccgcgactcgaggcgacccagcgcacgacccagcagcgccagcctggcgcggcagtcaatgcggccaaaaatgggccggcagtaatgatggtggcaggtgggcgggaacagcggtcacgtcgtcagtcaagctcacgtcccatctgggggcaccaagagaaccccctctcacggagaagcgggcgacgcttcgccttcgccataatgaccgcgtcaaaaaaggggttcgaaggctggcccccgaagggttcacagccgcctcagacgccgagcgagggatgaccatggggatcggtccattcgagcgactcgatcacgcctcgcccgagcctagcctcggacaagggcagccgaccccggaggatttccgtcttgcccgaggcccccctccgacggagcatttaacgcaaaggtggcctgacacctttatcctgacatgcgccccccggcagagccgaagtgaccgccgtcacttcgccgctccactgaccggcctgacagaaggacagcgccgcctgctccactccgactacagtgccacttggcagagtgagactgacaagcagtcaggccctgccaaaggcaccataggaagctccgctccgcccgacccgtggctcggactcgggctaagtctcggaagacggcgaactccgctccgcccgacccagggctcggactcgggctaa

SEQ ID NO: 13183 - DNA, 330 bp, Zea mays
  Peptide Sequence Number=SeqID_56558
atggagcctggcggagggacagctgtcggagcggttgggtccttgctgacgtcctcttgcttccagcatgcggggcgccatcattgcctatctggcggagctagccagatgggacgccggtctggttccctacggcccgagtcagctcggggtagggtgatgatggcgcctcctgttgacgtggctggcctgcgccctaggttgggcgatgtggaggctcctccgaagccgaggtcgagtctgtcttctgtggccgaggccgagtccgagcccctgggtcgggcgaggcggaggtcgtcggctgaggccagggcggagtccgaaccctag

SEQ ID NO: 13184 - DNA, 115 bp, Zea mays
  Peptide Sequence Number=SeqID_56559
acattgtggtacaggtggttatgagattgatggttttggttatgactatggtgctggcgaagatgaagctgtggaaggagacttccaggagttccaagactacgacgagttctag

SEQ ID NO: 13185 - DNA, 123 bp, Zea mays
  Peptide Sequence Number=SeqID_56560
atggttggtttacagatgatgatgaggatggttatgatcatgcttatggtaatagtaagtggtaaagaaggcgtcgaggcagatctccaggagttccaagacgtcgacgagttcgaggattag

SEQ ID NO: 13186 - DNA, 627 bp, Zea mays
  Peptide Sequence Number=SeqID_56561
atggctgaaaggtaccaactcccacggagttgcgttcctccaacgacgaggcggaaagacggcggatatcccccatccgagggcttggaaggtggaaagacacgacgcataagggagcgcgaagacatggtcgccttccaaagggggcccacgcgtcatgcaaccggcgcgctgaatgcttcgtgcatgcaacagcaccaccacttgcgccactaccgcgcctcctcgactgcggaaccaataccacgactcgaggcgacccagcgcacgacccggcagcgccagcctggcgccgcggtcaatgcggccaaaaacgggccagcagtaatggagatgggaccgggaaagggggataccacgaaagggatccatccccgtgaaggaaccaggctccgagcctccctactgatcagaggttcgaaggctggcccctcggaagggttcgacagccgcctcagatcgcgtgggccctacacccactactggtcagaggttcgaaggccggccccttggaagggttcaacggccgcctcaggctactcaggctccgcgcccattactgatcaggggttcgaaggctggcccccgaagggttcacagccgcctcagacgccgagcgagggatga

SEQ ID NO: 13187 - DNA, 958 bp, Zea mays
  Peptide Sequence Number=SeqID_56562
tcgtcaggtcaggatgccgcgcacgaagaatgtgtcggcgccagggggaggagatgacgaggatcctccttgccccttcaggcaggtcaagggaaagactgtgtatttggagcagcaggaaggccgcaagaagcggcgtatggacagagtagcccgagcagaggcagcagcagcagcagccgctgagcaggcagagcatggagctcagttgttgtttgatcttcagcgtgctacagcggcacgggtacgtcggttcagatacatacccgtggagtcttggttacctgcacagagagaccctgcagcggcagatccattcaacaccaggattcaggagtctttctacagagcacagttgtcagctcagattgctctgcgagcgcatcggcttttggatatccctgccttcctgctagccgtcggtgccgactctgaggttcacctctcctatctacctagacttctcactcttttgactactagcggtagatatgttgaggaatgggttcgagttttctatgctactgtatggatcgaccctgatcaccactggatgagattccgatttgagccagaggatgttaccattcatgccagtcagattcgtcaggtgtttggattcaacgagtcatcgactcgtcttcacagcatgtgctatggcacctctgaccctcctcgtcgccctcatggtggagttgctcctgagtttgatgtcgtggattttctcatttgtgagatcgaggacaccgtactggatggtctccgtgctcatcgacagctaccttatgctcactatctgtgtcacatctttgctcagctgattcggcccccacagttccagggtactcttgaggcctctcgcctcatctttgggtcgtaccatccagctccagaggatcctgtgccggcacctgctccagtgattgatactcaggccaaggataccacttttcactag

SEQ ID NO: 13188 - DNA, 273 bp, Zea mays
  Peptide Sequence Number=SeqID_56563
atggtcgactctgacagtgaacagtgcgcaacagtacacgcggctgatgtcagagcagagatcagaggggcaccggactgtccggtgccacatgaggacaaagcctccaacggtcgaccagctccaaccccaacagataggctgacgtgggctggcgcaccggacactgtccggtgtgcaccggactgtccggcatgggacgcagcccacgtgaaatacattcatgccctttacattgctaatgactataaggaacaattcaaggaagattaa

SEQ ID NO: 13189 - DNA, 294 bp, Zea mays
  Peptide Sequence Number=SeqID_56564
atgcagcgaatctctccccaaattgagcacagcaccccactccccactcttaggcgatgctccagtacacaatcgagggacgaaacgctggcgggggagcgaacccgcggtgatctccggtccgcccagaacgtcggctcccacacgcggatttgtgcacgatggaggtcgcagcaaggagaaggggagacagatgtgattgtggacattactccacaactaatcacactcaatcaaagatccaaatcaaacaagtatcataagaacaacattcaagcatacaaatacctataa

SEQ ID NO: 13190 - DNA, 2880 bp, Zea mays
  Peptide Sequence Number=SeqID_56565
atgtaccagtggcgcaagttcgagttctttgaggagaagtctgccggccgcggcggcggcgggggttcagccgccgccgtgccggccgagatcgcgggccgagtcacctgctgctcgggcggccggggccgcgtcgcggtggggtgcgacgacggcaccgtgggccttctcgaccgcgggttccgcctctcctatggcttccaggcctacgcctcctcggtcctcttcctccagcagctcaagcaaagaaatgttcttgtcacggttggagacgatgaccagtcatcttctcaggcatcagcaatctgtctaaaggtttttgacctcgataaagtacaagaagaaggatcaagcacaacaactcctttctgtgttcaaattttgcggatcttcactgatcaatttcctcaagcaaagattacatcatttatggttctagaagaagcaccacccatactgatgattgccattggactggacaatggtttcatttattgcatcaaaggtgacattgcacgtgagcgtattacacgtttcaagttgcaagttgaggctgcttcagatggcagcactagtttgcctattactggtcttggttttcgagttgaggggcaagcacaccagctcttttctgtaactcctggttctgtaaccttgttcagcttgcatattcaaccaccaaggaggcaaacacttgatcagattggttgtcagacgaatgctgtagcaatgagtgaccgtatggacttaattattggtagacctgaagctgtatatttctacgaagttgatggtagaggcccttgctgggcatttgatggtgagaaaaagtttgtaggttggtttcgaggctatttactctgcattattgaagatcagagaacacataaaagcacacttaatgtttatgatcttaagaatcggttgattgcacatagcatgcctgtgggggatgtttcacacttagtatgtgagtggggttatattattctcataatgtcagacaaaaagattctgtgcattggagagaaagacatggaaagtaagcttgatatgttgttcaagaaaaatctttatacagttgcaatcaatcttgtacaaagtcagcaggctgatcctgcttccactgctgaggtgctgcggaagtatggtgaccatctgtatggaaaacaggaatatgatgaggctatgtcccagtatatccacactattggtcatcttgaaccatcgtatgttatacagaagttccttgatgcaaagcgcatctacaacttgacaaattatttagagaagttacatgatcgagggttagcatctaaagaccacaccacccttctgttgaactgctataccaaattgaaagatgtggagaaacttaaccattttatcaaggatgaagatggggttggtgagatcaagtttgatgtggaaactgccataagagtatgccgagcagctggatatcatgaacatgctatgtttgtggcaaaaaaggctgggaggcatgagttgtacttgaagattttacttgaggatcttggtagatatgacgaggcactgcaatatatatctggcctcgaggcaaaccaggcaggtcttactgtaaaagaatatgggaaaattcttgtggaacataggcctgctgaaacagttgaaatactgttaaggctctgtacagatgttggagatcctacgtcgagaagaggttcaaacagtatgcacttgcttatgataccatccccaatggactttgtgaatatatttgtgcacagcccgcaatatctgatgggatttctggaaaattatatcaaaacagtaacggactcacctgcgcaaacagaaattcataacacccttctggagctctatatttcaaatgatttgagcttcccgtctatctctcaagaaaatgaatatgagaatcactatatcaaagaaataaaaggtaaagaaactgctaatgtctataggtcaggaataaaggaaaaaactggtcttggaaaagaagatcctaaagtagcaaagaatattgttgataggagaaggaaagggcttgcgttactcaaatctgcttggacatctgagatggaagatcctttgtatgatgttgatcttgctctcattctttgtaacactaatgcattcaaagatggtttgctatttctatatgagaaactaaaactttacaaagaggttattagttgttacaagcaagcacatgatcatcaaggtttaattgcatgttgcaagaagttgggggactcatctcaaggaggggatccttctctctggggggatctattgaagtattttggggatcttggggaagattgctctaaagaagttaaagaggtcttgacctacattgagaaagaggatgttgtacctcccatcgttgtgctacagacactatcaaaaaacccatgcttgacactctcagtcgtcaaagattacattgctcgcaagcttgaacaagaatcaaagctaattgaagatgatagaaaatccattgataagtatcaggcagagacagagttgatgaaaagggaaatacaagatctcaagacgaacgcgaaggttttccaactgagcaagtgtagcgcgtgcactttcacccttgatctacctgctgtccatttcctgtgcatgcactcgttccaccttcgctgccttggtgacaacgaaaaagaatgcccagaatgcgcgcctgaatacagatccgtcatggaggcaaagcagaagctagagcaaaacgccagggaccatgatctctttttcaggcagttgaggggttccaaggacggcttctctgtcattgcagactattttagcaagggcatagtgagcaagacaaccttacctcctgagaatggacggtag

SEQ ID NO: 13191 - DNA, 519 bp, Zea mays
  Peptide Sequence Number=SeqID_56566
atgggaaagtgccggacccctgtatatgcagaccgtacgtccgggcagagcgccgatgctgccacgtggcctactgcccgtgacgtaagccagcgggtgaagcctaacctagcaggcaaaacgcttaggcccctcctcatcttaggatttagggtgggtgcgttacgccacccggccggagaatttcctctccgacatttggcgcgccaggtagggggcctaggctttaggtttttgcttgtttctctgctcgacgccatagttcacatcgtcgagcaccatgatctcatgcccgaggacttcatgctggaggaggaagctgcctcctccacatcgcaggccaccaatctccctgcacctgttgcagccgctgctgtgcactctgcgcggcagcacactcccgcgcagacgtccagggcgtatagggctgcgcctgaggcgcggggcgctgtcagcggccagagagttgttgcgccacccccaaggtccacggcctcaccgggggccatgaagaagtga

SEQ ID NO: 13192 - DNA, 882 bp, Zea mays
  Peptide Sequence Number=SeqID_56567
atggggagagaggggagcaacaatgggttcgaaggtgcggggttagggttgaggcgaaggaggttgggaggagggtggcatgtccaggaggtagaggtagccgagggaacaccgtcgcatagggcgcgcttgtcgcagaggacgtggtttgagggaactagtcggatgaggatttggacttcgcatccttatccaggcggtcgagtgtggacgatgactggcgcagaggttgtttgcggagcgacagcgttgggtaggacgcatggcgcggcttgtgcggggaggtggctctcgcgacgagggaggacggaggcgggggcggtctacattaccatcttaatagatagtagagataaagcaacagtttcaacggatgatcgtcttgcgtcacatttttatgagaaacccctctatctctccaaaatcaactcgcagttctgcataaagcctctggtactaaacctaacgagacgcacatttactcctcatcaccgcaatccacgcctccacctggtctccactctcaacccctccttccttctctccccatcgcccattgccgccgcgaccgcacgggcactccccaaccatcgggagttgctaccctttcaccagactagagcatgcgaattgtcgcgatgcaacccacctccgctctccctttctcttctcctactggtcctccttgcattcgcgtccatcgcgatcagagcaaacatggacggtcatgtcctcgacggcgtgaagaagaacattgtcgttgccaacaacgccgaatccgacgggctcgaccgcttcgccgtcgacgagcacaagtgtgaggtcagtggccatgtggttttcctgacgggtgacatgtcactcacacgtacccgctgttga

SEQ ID NO: 13193 - DNA, 642 bp, Zea mays
  Peptide Sequence Number=SeqID_56568
atggacttcctattcaccatcgtcggcttcctcaccgcgtgctcggtggacaggagaggagagaagaatcctcagagttggatgcaattccaactagggttaagcttgcgaattgtggatcttgattcaactcttaatgagcttggagatggggaggacactcaaggatctaaagaaaaggagaaagaactccatgctctgaagttcctcacggttgagtcagaacaaggcgtggatgggtgcgacggagctatcagatctcttgtcctccagcttagagaaattcatggagatgtacaggttgtatcaacacctcaggctgaagaactgtttgtggaggttgtggctccagaagggaaagcattcgacaccaggtgcacccgcatgaagttctggtctgaactattatgtgcgctttgggactcttcaagtgtggccaagatgttacttcttaccatcagcaccaagagctacgagctaggatccttggattgtttggagcagatgattattcatgagatgacgatcacgagatggataccacagtcgtgtcgtgagcaacaagacaaaccatgtaaagaagaaaccaacagggataggcaaagacaaaaatcctgcagagaagtattgagcaacgaataa

SEQ ID NO: 13194 - DNA, 480 bp, Zea mays
  Peptide Sequence Number=SeqID_56569
atgaacacggtgtacgccgcagcacgggcgtactgcctgccaacggaatggacaggcacgccgcctctaaggctccgcccgctggcttatgtcacgggcagtaggccacatggcagcatcggggctccgcctgaacggggagtagaggcgtacgtggaccccgccatgagtggcccaaaccccacgcagaggggttcggaccccagtcgggggtccggtctgcacccgtggaggtttggtctgcatatacaggggtccggcactttcccatgggggtccggacccactgttgataccttggaggatattgtcttctctggccacacggcggccctagagccgtccacgtggtggggtcggggtaccgacaattctgattttgtgaaggggctctatgggacacgaagctcggccattttatcaatgaactatgaccgtgaagctagcttgtatgagaagtaccttgagagtggtatatga

SEQ ID NO: 13195 - DNA, 1104 bp, Zea mays
  Peptide Sequence Number=SeqID_56570
atgaagcagtggcgcgatgacgtcgaccgcctactcggcatggcacactctggcttagctaggcccaggcctcggtcgtctcggcgccaacatgaggcgtcggcgtcagtgcgctcaccctcggtgagggccacaccgaccgaagacctacgggcggagctcaaccgccgacgtgcgggagaggacgctccagtctccttggagaggtctaatgacctgcgagcagagctcaaccgcaggcatgcgggcgaggatgcccgcgtctctctagagagggcgcgcgagcatcgacaaaatgtcgagggtcacaacctcgactacgacttcgctgcggttgcaccgcagaccccaacgggcgcccggatccaagcggcgaacttcaccatcgcttatcaacggcatggcgtggaggctcacctccatgcagtgaggcaggaacccgaggaaactctccggaccttcatctcccgcttcaccaagatgggtggcttgggtgtcgttgttcaagacggcaaaaagaagaagaagaagaaccacgaccatgagaggccgccgtccgctgctccgatcgtcgcagccgcgactgagggccggggcaagcgcaacaagcgcccacgaccgcagaggggtaacagcggctcatgccctgtacaccccaacagtcgccacagcgccacggagtgtcgcgagatcatcgagctcgcgaagcgcgtcagcgaacggcgcgagcagacttccaaggatggttccccacctcatcaccgacctggcaaggaaagggtcgacgatggcgaggtgaccacgagagaatgggacctcgggaacagctacattgtgtggacgtggacttcatcgacgagcacagatggcaagcggcgatccaaaatgcacgttactaccaagcgctcgggcgctactgccagcggttcgtgcatagtagggagctcggggtcgagggacctggtcctaaggcgaattctaaaccgagaagggctccacaaactcccctccagttgggaaggacccttcaaggtgacggaagtatgccgacctgggtatgtccgcctcaccacagctgaaggaatgcctcttcccaacccctag

SEQ ID NO: 13196 - DNA, 735 bp, Zea mays
  Peptide Sequence Number=SeqID_56571
atgatcctttgccactccggcgcggtggatccctcacgaccgcttacaaacttgagttgggtcaccaacaagatctccacgggtgcgccggcgttcgccggaaggatccgtgccggcgcttctcccctcggtgatctcgccgccggggagttcgtgctcttcgtctcctacctctcctgcgggttggcggtgccgatctcgcctttcttcctgctgctgttggaggagttcggcctccagcttcaacacgaggatggagtgggggtggcgcttcttccgccagtgcccggacgaaaggcggcctcgcagtacgcctccatgaactggtcgagctccggctccgtctcatcggccaggccgctgggcgccgtgcactaccgcgcctccatctctttggctttaatggcttcggcatcgcctccaatgatgggggggctccttcgccttgacgcacgcatcaaggagaccaccgtcgttggcaagctgcagcactgggttgccgccaacgccgctgttcctagtggccaccaccgtgttcagggtgagcgacaggcttgcgcccggcggttgccgtggcagctgcgctacgacggcgctgagggaggatgcacacgggcggcggtagtgattgctggtccggctgccgccactgaagacaccgcctgggaggtcgtacaagacaccacggagacagcggccgcgcgctttcagcgcgaccctactgatgtcgagtag

SEQ ID NO: 13197 - DNA, 122 bp, Zea mays
  Peptide Sequence Number=SeqID_56572
gtggctatgagatcgatggttctggttatgactatggtgctgcattgcaaccactgcttcacgcgaaaatgaagctgtggaaaggagacttccaggagttccaagattacgacgagttctag

SEQ ID NO: 13198 - DNA, 645 bp, Zea mays
  Peptide Sequence Number=SeqID_56573
atgtccggtgcaccagaggactccgacctcatagtcttcgctctcggaaatttccagaggccactccgctataattcaccggactgtctggtgtgcaccggacatgtccggtgctccaagaaagaacggcctcaggaactcgccagcctcgggttttcacgccagtcgctccgccataattcaccggactgtccggtgtgcaccggactgtccggtgcatctacggggcaacggctacttcaggcgccaacggctacctgcggcgcatttattgcgcgccagcgcgcgcagaggtcaggcacgcccatgatggcgcaccggacactctacagtacatgtctggtgcgccaccagatatcaaggcgggcccagaagtcagaactccaacggtcgatccaatggccatttggtgacgtggctgtcgcaccggacatgtccggtgtgcaccggactgtccggtgcgccatcgaacagacagctccaccaacggtcaagtttggtggttggggctataaataccccaaccaccccaccattcatggcatccaagttttccagcttccaaccactatacaagagctagcattcattgcaaagcacaacaaaagagatcaaatcctctcccaactccatacaaagccctag

SEQ ID NO: 13199 - DNA, 603 bp, Zea mays
  Peptide Sequence Number=SeqID_56574
atgaagtcacgcatggcaccgggatcacggagtccagagaaatcccaactgacgtcggggtcgtcctcttcctcaaaacccacgggcccagaggttgagacggccgtcagtcggtcccaagttgaccacatatggtaccccggaaggcgcgagactgatgcccgacaagtccctcgcaaaggtgtcggcgtcatcagttcgcctggggttggcgttttgctaggaagcgacacccgtcgttgtctcaggtgtgaggataacgcccgacatatcccccgcaggggtgccggcgtcgtcgactcgctctggtccgacagccgtcgaggtgctgccccctgcctggccatggttgccccgtctccgtctcctctggcgaggagggtggcggggttgactcgggtgttcctcttctgccacgtggagatgtcgtcgtcgagttcgtctccgccgggcgagccgacgaccgtcgttgttgtcgtgctgcgaggggaggagtaccatgtcatagctgccgtcgcgggacatgaactcgagactcccgggctaaagaggctgccgaagattgtccatctagaactcaacaggaaagtatttgtcaactga

SEQ ID NO: 13200 - DNA, 300 bp, Zea mays
  Peptide Sequence Number=SeqID_56575
atgggggcggggctggaccctagcccgagcttcggcggctgctcggaccccgtgttggtggagctatccatgggcggggactactaccgcgcctgctgcggcgagcccgactccgatatccccgaggggcccaagctgccctgcgttggggacaagacttgcactgatctagtgcaaattctagtcgtggccgtctgtaccgctctggggggatcagacagtgcagcggcgcagttgagtgttggttacttggtgttcaagttgtgctggatgcaccaagttagtaggtggtctgtttga

SEQ ID NO: 13201 - DNA, 1767 bp, Zea mays
  Peptide Sequence Number=SeqID_56576
atggggcgcggcctctgcgcgtcccggcccccggcgctcgcccatggggtgcggcccctgcgcgctcgcctccccttccccttcttccccgcgtccgtctggctggcgtgcccgccagcggccccccggctcgcccggcgcggcgtacccgccgcagccccggctcggcgttgcgcgcggccgtggcggcttgcccgcccgtggtcgacccggccccagccttgcgcgcagcttggcgtggcggcgcagctcgcctgcccccagcttggcgtggcggcgcagctcgcctgcccccagctcggccgtggcggcgcagctcgcctgctccctagctcggccgcggtggctggagttcggccacggcgccccgccccgcccggcacgcgagttgtcgagtatggtaagggttacgttattctcactacttcgaagggtcagagcgacctggtcgaggaacccgaagagctcgcaggagaagcccctgagcagcagtcggttggtggaggcaagatccggggtgtagttcgcttcgccgtcgtgccgtcaatggggctcggtgtatgcggctcgctctgccaaggtggttatgagattgatgattctggttacgactatggtgctggtaagtgcattgcaaccactgctcaggcgaagatgaagctgtggaaggagacttccaggagttccaagattacgacgagttctaggtgtgggttagcggcaacccccagtcggctgcctgtgaaggccgcgatggctcgacttagacacactgcacgaaagtccgtcatccccttcttaccctcccgccttgctgagcgtccgcttcgccgtcccgtggccggacagtccagccacttggagagactgcaccaccgcctgcatgaggagcaggaacgtcgacgacaggagcagcagggctcttccttctcgctccagcaggagatagagtccgtgaggagctgctcccccgtgcttcccctggaggcgccccctgcaccaccactgggcgccccagcctctggagtagctgctggaggagacccagacgacggatgtggcgacgacaactcgagccacgacatcgacttctctgctagccatgagccggaaggatgggttgctcgacccatcactcgcgacgctgctcgcgggtgtcacttccacgacgcgcttgacaccctgctacgtcaggtacttaaccggcgtacttggtccatcgagtatcgctgtgtggtctaccagcatagtcgcggggtctacccggaccgctgggaggcaacctgcttggtgcgccgtccggagaacagtctccagggtgcggaggcctgctcagagcactattctatctctgagcgggactcagctgaggcagccatgcaagatgctgcacggcgtgcgctttcgcactactgctcggttttcggtggggtagctgacggtcttgacctgaagtattacccccgccgtccatctggcagcacaggaggcgtgattgtctcacctgtcggtgagggcaatcctaggttgagcagcacagtcaacctagccgccgtgctaaacacggagctggaccatgcattagatgagctgagtagggctcgtgctgagatcgccctgttgcgggctgagcgcgcggaacgtcgtcacctggatggtggttcccccgctcccgttgggactcagcacccgtaccgctcccctcggcgtggacaccagtcttatggcaaccccgactgcaagaccaagatagacttggaaccatag

SEQ ID NO: 13202 - DNA, 267 bp, Zea mays
  Peptide Sequence Number=SeqID_56577
atggcagcattcctttatgcacttcctgataaactcacaaaaataagcaagatcgctgctagcaagaccaagatttatatggtacttcagcttgtcaataggggcgacctgttcgacaggatcgtaatcccacgaatggaactccttatacttattttgtccattcattcttatacaagtaccaagaaggtcgtgcccgatgacaagatcgctgagttcgcactcctcgaccccaagccaccaagaggtgagcaggcgctatcctaa

SEQ ID NO: 13203 - DNA, 1689 bp, Zea mays
  Peptide Sequence Number=SeqID_56578
atgggctcgacgtgcctgtcgtgcggcgagggcgcggtggtggcagacgcggactcgggcgtgctcgtctgcacctcatgcggcatcatccaggacgccggcggcgcggagttcgtccaccagtccaccttcaacgagtcggggggcctcgatcgccgcgtctcctccctcgtccgcaacgactccgactccgcctaccgcgaccagaagctcgccatcgccaccgcgggcatcacctccatcgccacccgcctcggcctgtcccacacccgcgccgaggaggcgctccgcatggccaagtccgccaccgacggccagctcgccaccccgggcagcgccttcctccctgccctcgccgccgcctgcgcccttctcgtcgcgcggtcccaccgcctcccgctctccctcgccgaggccgcggaggccgccttctgctccgcgcccgccctcgccgacctggtctcccgcgtcaccgcccagctatccctccctcccctcccatgcttcgactacaccgccgcgctcgaccgtgccgtgcacctctcgacctcgctcaacgccgccgcgcccgacaagacggacgccattctcgcccaggcccggttcctcttccgctgcgcatccaagtggtcgctcaccacggggcggtttccacttcccctcgtcgcggctctgctcgccttctctgcggaggtgaacggggtcacttctgtctctttggaggacattgcaagggacatctcggcaggattgaggaccagcctgctccgatacaaggagctcgttgacgccctggtgcatgtcgcggggcacctgcttccatggggtgccgatgtcaatgccaagaacctgctcctcaacgctccggtcttgctccggctcatggagatgcggtcacaatcggacccttctgaagagtttcttatgagctgcgctccgaacattgctgcaattgtgcaggctaactctaaagttgatgacgaagtgtctaaataccttcacattactccagtgggttctgatgactttgatttcgataatcttgagccagaggagaaagaatttgaaaatcagaatatctcagagaagggcctatcagatgcttaccaaaatgtcttaaataggcttgcccagctacagaaacttgggaaggttggtaaaggtactgacaggaggaagcgattgaaaggaggactggagctggagccatgcatggacacagtgaataatggttggagaaaggacatgctgcttgaggatgtggtggatattgacgttggctatgatgcacctccaccatcgtttactgctggtttggagttgcagaagcagaggagagcacgtattgaagctgctaagcagcgaattgatgcaactaggaaggctcctgctgctccagctgcaaaagcaaataactcagaagacgttgtaagaaaaaaattgaccatgaagaatcgagggggaaagaagaaggatgatatcgatcatatccttcccagtgacaatatgacaggttgttcaggtgctaggaaaaagagacgaagaggttcctgtgacagtattgattgggaagattgcatcattgagctcctgctactgcatggtgcaaatgaagctgagattgaacaaggccagtacagaagattgttggagttgcatgtattcagtgcagtaagtggggagaattga

SEQ ID NO: 13204 - DNA, 594 bp, Zea mays
  Peptide Sequence Number=SeqID_56579
atggagcacgcgccagatcagcgactacaaggccttgtccccgctgtaccactagcagcccgcgtaggcctgagtgctgtgctcccgatggttggatcgacgcactgtgatgcaggccactccatccaaagcctcgctgccccggtcggcgatgatcttctcgcggcccgcctaggtgaccgtgcccgcccagatccaccagaaggaggggaaatggcctcgccgtcgctgtcatcgtgggccgcatgggcatcccgtgtcctgctcgggcggcggctagggttaatgcccgtgcgttgcgacagcaaaatcgatcgcgagaagcaagaaagagaaatatacctacatgctttgcacaaaagcaaaaggttgcgctgcggcagttgcgcagacccatctcattttccctctgtgcttgtgttctcatacctggggttttctctggcggcgctcgctccaccacggcgaccgcgcccagaagcccgactcgccgcccaacaccgtcgtctgcaaagccagctgccgagtccaggatccaacatctggtatcagaggcaggggaagttctacagtggttgtgtgagcccgccgtga

SEQ ID NO: 13205 - DNA, 381 bp, Zea mays
  Peptide Sequence Number=SeqID_56580
atgtccagacagctgctgaagtccacttgcctgcgtgatgtagactctcaagtgttcgccgttgccttcgctgtattagctgctggtgctatagttctgacactcaatgttctactgctgggtgggaacatcatcttcttccaaagcctcagtcttctcggatactgtctgttcccgctggacgtgggggctctgatttgcatgcttaaggacagcgtcatactaaagatggttgtggtgacggtaacattggcatggagctcttgggcagcataccccctcatgagtgctgctgttaacccaaagagaaaggccctggcgctgtatcccgtgttcctcatgtatatctcagttgcatgtctcataattgctatagattaa

SEQ ID NO: 13206 - DNA, 276 bp, Zea mays
  Peptide Sequence Number=SeqID_56581
atggtggttggagaaggtcggtccacgtgcgcaggcgggggagctcgtcggcgccgcgggcgaccgaagtccggcgaagatgatctcgggtctccggtgaggttctatcgggtccaagagcttggaaagctccacgggccactggcgaagctaaccgagaggccgacgcaacttggacgtggctggagcgagttgtccgcggtggccgaggcttgggcagtgatggcgggcgatggcgcggcgtgctcgaggcgaagtccggtgaactttgcttag

SEQ ID NO: 13207 - DNA, 444 bp, Zea mays
  Peptide Sequence Number=SeqID_56582
atggctcaccagattgcttggtccacgcgcggccgcgggcgactgaagtccggcgaagatgatctcgggtctccgttgaggttctgtccggtccgagagcttggaaagctccacaggccactagcgaagctaaccgagaggtcggcgcaacttggacacggctggagcgagttggccgtggtggctgaggcttgggcagtgatggcgggcggtggtgcggcgtgctcgaggcgaagtccggatttggcctactggtttcaaagatatggagctctcaagtctggtctatctctcagcccgagcccgaggcaaatcttcggttttgtcgtgtctagggctcgcgtcccgatgccatcttcagacatgtggcagaggggattagagctaaggatcaaggtgaacgtgctcggttttggttcaaaggttgaaaattcagaaatctga

SEQ ID NO: 13208 - DNA, 138 bp, Zea mays
  Peptide Sequence Number=SeqID_56583
atggcctggcagtggcaggcgcttacaatccgtatggaaatggactggcaggtgcttatggtgtgcttggtgctcatgctgcacagtggtatttccgtgtttggtccttggtctttggcagtcagcagcatcatgtaa

SEQ ID NO: 13209 - DNA, 1308 bp, Zea mays
  Peptide Sequence Number=SeqID_56584
atggcgtccgtttccctttcgatgtgcaaacgagacaatgccgtggcagcagtcgacgcgacgtccgcgacggcgatggctgacgcgcgcacccagatgaaagacatgtaccgagaggcgttgtggcagaagagaggtcgtcctcgggagttatatccggacgtatctagtaaggatgctcctgttcctcctgaactccccgtgcctaactgtgactgtggcagactggcttggggacatcagaggtgtttctttttccagtggatcgatggtcctgataaatttgaccctcgatatcttcttttcgttaattggttgagtggaaggaccactcatgagcgttttaagcgttgggtacctcctcccccgaatcctccaccaatgacggatgcggagaaggaggtagcaacagaaaggcggatggactcaccgcctcgatgcgattgtggagaccgtgctgtcatcgacgaagactatgacaagcagttctgttgtccgaacattgactatccatacgggtggcgtaagtgtcgtttcagagagtggttgtatggtcctttgtcccattggccagagccacaggagacgaggaaatgtagttgggagagttacgacgacaaaggagaggtgatgcggacaatagagtccaagagaataatgggacagaagatgcgttggaagcaaagtctgccttttatgatagccccgaagcgtgcagagtataggaggttgaaggcggcagatgagaagagagcacaggatgcaagggaatgggaagcggctcaagccgagaaacagatgttggataatcttgctgatcgcctcaagggaaagattggaagcggcgtaaactatttggccgatgaggcgcatgcgagatatgttcaggataaaatggcaacggttgagctgatggaggaggaggacgacgacacatctagattgagtgagcttatcgccctcgcagaggcaggattacataaagaagaggaggacgacatgtcaaggttgagtgagctcatagcactagctgaggcaggattacgtgctcaagaggaagaggatgagtttctgtcacaggccgccgcagaggtagaggcagcttattacaagaagaagtctgatgaggctgaggctgaggatgagctattctcccaagctgcagatgaagcagaagccaattattacaaaagaactggtgacaagtgtgatgcaggacaatgtagcaagtggaatgaggttgttgttgaggattgcgagacggatgactccgaagatgagttactcatagattgtgattcagactga

SEQ ID NO: 13210 - DNA, 393 bp, Zea mays
  Peptide Sequence Number=SeqID_56585
atggccattaaaaacctaatgttatcacgaaagtgcctagcatcagagtctgcactatcccacaacctcttgagttggggagaggtctcaagtggggatagttcaaccttcccaccacgacaacaaaaaccagacatatgggtttgtgtcgaatcatcctcttcctcggcatcactaataatatcctcagccacattagccatgttccttgaaatggatgcttcaaattgccggtttcgacggggtaagatagcttgtctttcaccacgtggcacatgttgtttacgtgttagtggtctagtagacatacgcagtgaatcggcatcctcagtctgtgttgaagctggtaggaacgggttactggcgatatcagggataacccagtcggaggag

SEQ ID NO: 13211 - DNA, 660 bp, Zea mays
  Peptide Sequence Number=SeqID_56586
atgaccaatccatcccacctgaaggttaccttcgacatcgacaacttcaatagtgccacttgcatagctcacccaaaccctgtctccgagtgtctttatgcatcgaacagaagaactatgagccgaagtgaccgcagtcacttcgccgctccactgaccggcctgacaagaggacagtgccgcctgcgccgctccgactgctgtgccactcgacagaggctcggactcgacctcggccccggaagacgacgaactctgcctcgcccgaccgcagggctcgaactcggcctcgaccccgaaagacgacgaactccgcctcgcccgacccagggctcggactcggcctcggccccggaagacgacaaactccgcctcgcccgaccccagggctcggactcggcctcggccccggaagacgacgaactccacctcgcccgaccccagggctcggactcggcctcggcctcggaagacgacgaactccgcctcgcccgaccccagggctcggactcagccctggcctcggccgacggtctccgcctcgctcgacccaagggctcggactcgacctcgacctcggaggagactccgcctcgccctacccagggctcggaccgaccacgtcacaggaggggccatcattaccctacccctagctag

SEQ ID NO: 13212 - DNA, 249 bp, Zea mays
  Peptide Sequence Number=SeqID_56587
atggctgagttggggcagaaggtgagatggcagaatgtaaaccggaggattagctattatgttccagctagcacaaaaacgttgctcgagtatgggcctacagataaagatatcttgctggcttctcaacatgaagggatcattccagagaacgaggaagcgacacacctagatggcatgacactcattgagagttttggctcaactcatggtgtaaatggttatggacgatttagcgtgtcgaagtga

SEQ ID NO: 13213 - DNA, 687 bp, Zea mays
  Peptide Sequence Number=SeqID_56588
atgcacatggtggcgtttcacgagcggcaaatggtcgagcgagtcgtcaaccgtccaggtgttgataggtcgatgctcacatcatattttgaggcgaatatgctacacgatgaggctcgttgcatcctatatcgtgatttccctgagtggtacacttggcagagtggtaagggcaaagtatggcaacggaggaaacgagatacaggtggacaagtcggtagaatagtctctgctcatccggccgagggggagcgctactatcttcgtgttctcctaaaccacgtgactggcgccacctcctatgtggatctaaggacagttgatggtgttaccctaccgacttttcatgccatcgtcgctgcgacggctttttgccacaatactggtgtactgaacatgctgcagtcaatgggaaaggacataaagacattccctctacctcctatcatcgacgcgtatgacgatgctattggtactgctagggaggtttacgaggaggaaagtatcgaaccgacagcgggagatgtggctcttaaagactctcttaacgaggaacagagggacgcctatgataagattatgtctgccgttgacaccgatcagggcggattgttctttgtggatggacctggtggcaccgggaagacttatctatacagagtgctcctcgcgacgctatgcaactag

SEQ ID NO: 13214 - DNA, 204 bp, Zea mays
  Peptide Sequence Number=SeqID_56589
atggagaaggcagagccacatccaatcacccaccgtgaaatcgagctcacaatgttggtcgtcataaggcgtctagggccgactgtacaccacctagaagggagtggtgcggagcgccgtgtggaacgaggtattgtagcaatattccacccacagaagctagtcgacccaagtacacagtcggtccatagtggcgcaacagag

SEQ ID NO: 13215 - DNA, 1161 bp, Zea mays
  Peptide Sequence Number=SeqID_56590
atggctgctatattactatcttcagacctgaataagagaagggggtgtctgttatacaagaatgaaaaagaagttgactctggaagctcatctgatgttgagatattagaaaacccaacagattctaataagaggaaactactccacgtgcttgatgatagcgaagtggtgtatgaagatgaggaaggccctattactcaagcagacttgcaaaggtggtttgttgatgattgggataaaaaagctcctgtaaaagtatctaccgatggttgcaccaatgactttttaatggttggcctttccacaaaggacatgccagtgaccaaagccgattcaatagatgttttatgtgattatatcatggcaatagaagacgatacgacactagacaagaaacgttctggatgggcggaggatatctttaagtgggaacatacaattcagactggtgttccaattgacttaagagggtttaataccagctacctcgttctacaagctatggccatgtgggggaatgacagacgactgaaatttgttgggcctcctgagaactggaacagtggtgttgggtttgtgtctaaggaaatgatccaatctcattgtccagcgcctgctgagtacattcagagttctgtttctgtggcggtcgatgctgttgacttggtagatgacaagggagatagcgatgatgacatcgtcgatcaccatggggacgaggacaggatgactgatgtggagctgtggcagcaacttgaaagtgagttgtaccggaagagggagggagaagaagatgacatagccgaagagatggctgaaagtacaattgctgaggaggtgggtggcgtggctgaagatgtgctcagcgagacaaaggaagataatggcttagtgccaattgtggagccagagatccttcttgatggagaccatgggatcgaaagaactctcgaggtggcagagaaagtgtggtctgaggtgttcttctacttggcccagaacaatgttctgtttgagggtatcctgctgaagcccagcatggtcactcctggagccgaccacaaggagaaggcttctccagaagccatcgcaaagcacacgctaacaatgctcaagcggatcccttctggttgtgtccttcatgttgcacgagatgactaa

SEQ ID NO: 13216 - DNA, 678 bp, Zea mays
  Peptide Sequence Number=SeqID_56591
atgacattccaaggtcatggaatgtggatgagcttcgtagatattatatatatgtcggggaccataattagcggtacccccaagactcctaaacacggctggcggattcacgcctcgcccgagggcctcctcaagcaacgggcgcaccctcgactcgcccgaggcccagctcgggcaggcttcgcagtgaagcaaccttggccagatcgcctcgtcaaccgactgtatcgcaggagcattcaatgcgaggatcgcctgacaccttatcctgacacacgttcctcagtcgataggtccaaagcgcaacaagaagctccgcctcgcccgacctcagggctcggcccccgccttggcctcggaaggtggtctccgcctcgcccgaccccaaggctcggcgtcaacctcgacctcggaagacggtctccgcctcgcccgaccgcagggctcggcctcaacctcgacctcggaaggtggtctccgcctcgcccgaccccaaggctcggcctcaacctcgacctcggaaggtggtctccgcctcgcccgaccctagggctcgccctcaaccttgacctcggaggagtcaccgcctcgcccgaccttgggctcggaccaaccacgccacagggggggctcaagcgctcctccgacggccacgacatcacatgcacagggcactag

SEQ ID NO: 13217 - DNA, 195 bp, Zea mays
  Peptide Sequence Number=SeqID_56592
atggtggcactataccagcgacaacaaacgaataaggatgacaggctggctgactgtcggttgcccgtgcgttgcgacggcttacaacaatacccaccaacctcaaacaccatggagtccattgcgcccatgtggtctcagaaacaacctaatgcttgcaagagccaagaacgtcgtgccgtgcttgggctgtag

SEQ ID NO: 13218 - DNA, 1470 bp, Zea mays
  Peptide Sequence Number=SeqID_56593
atggatggcggcaaccacccccgcggcggtaagccctccgtctcgcagctcctacaaggcctccaggatgggctggagtttctcctgtttctcgcgcgtggccccatagcgccagttgctgccagcggcagtcaccactcgttgagaaaacgacgggagcctcccatcgtcattccggagccaccggcccgcaccgccatgcggaccttctttccccccgtcgtcaaggcaaaaggctccgcggagaagagatgggtccatagatctcaatgggggagcgcccgcatgaaacagcttgctagcactccgaacccccgctcatggaaggagacgaaactcagcacataccctggcggcgaggtcgggccggccccgctcggagggaccatccactccggctgcgggccaccggagaggggacggagcaagccatcggagacaagggcctccagatcatccaccgtgacggtggagaaaggccacgggtcgcgcggcggaacgacggttacccggtcggccatcgccaagcgaaggaggtggcggcggagtggacaagggaccgggaaaggggatattctgaaaaggatccttctccgcgaaggaagcgggccccgagccctcttactgatcaggggtttgaaggctggaccctcggaagggtttcgacagccgcctcagagcactccggctccgctccctcctactgatcaggggttcgaaggctggcccctcgaagggttcgacagccgccccagagcacgcagagcgagggataactctaggtacgtccgatacatggccgaggctcgggctacgctcccgaggcggattcacgcctcgcccgagggtctcctcaagcaacgagcgcaccctcgactcgcccgaggcccagctcgggcaggcttcgcagtgaagcaaccttggccagatagcctcgtcaaccgaccgtatcgcaggagcattcaatgcgaggatcgcctgacaccttatcctgacacacgttcctcagtcgacaggtccaaacctcaggcgcaacaagaagctccgcctcgcccgacctcagggctcgacccccgccttggcctcggaaggtggtctctgcatcgcccgaccccaaggctcggcctcaacctcgacctcggaagacggtctccacctcgtcggaccccagggctcagcctcaacctcgacctcggaaggtggtctccgcctcgcccgaccccaaggctcggccacaacctcgatctcggaaggtggtctccacctcgcccgaccccagggctcggcctcaacctcgacctcggaggagtcaccgcctcgcccgaccttgggcttggaccgaccatgccacaggggccccctacggaagcaaggagacgtcagcaaggtcccgtcagccccgacagctgtgcttctacagggctcaagctctcctccgatggccacgacatcacatgcacagggcactag

SEQ ID NO: 13219 - DNA, 390 bp, Zea mays
  Peptide Sequence Number=SeqID_56594
atggaaggagagcaactgttctctgagcttgccctaatgctagcttcagatgtcccaaaagaaaaagggggaggttcaattatggtggccggagctactgtgccacgtgctgaggacgctgatgtggacccagctgaggggttggatgatgattgtggagatattgatattgaagtagacaagccattcctacatggcccatgcgccgctgtgtacggcaagctccggcacagccgtcgcttggacgtggtccagagcggctgcaccgcgctgtccatcgtcaaacatggggacctcatggtcgtcgccaatgtcgacgactctcgggttgttctgggcatcgcaacctacgacgacgccatcacgccgtctagctcatcatccacctga

SEQ ID NO: 13220 - DNA, 1005 bp, Zea mays
  Peptide Sequence Number=SeqID_56595
atgcacgtgctgactaccttctgcgcatttcaccccttagagatggcaacacaccccattgagttattccccactgcaaaagaggatgatccgatgtggcaagaccgggtggaccatgccaaggaggtgtgggcactcttcgctggggccactgctcgactgacagtttggtgcatgagtgcactctaccgcctgcgagacctacagcgcgaggccatgccacaactgatgggcttggctcaggatgcaaaggtcaccatcactgaccgggaggatctggtggtggatctatccattgagttggtggagaaggaccttcaaactaagcatatgaatgcccgaatcaaggagcttgaagagcaggtggaagaaaggaactacaccatcgagcaacagcttgaagaggcaaacgagcacctagacatgcatcaccaggagatgcaacaggacatgaagagcgagccgtgggtagaactagcagattcccccgccactgtcgcagcctcctacgatgcaggagctgatggccccagcagaatgaaattttgtgatagcttgcatagtgccagcggcagcctcgaccctttgggggtaacagacaatatcagcgcccaccagccgcagctacctaccaggagttcctcagcacttagccaccacttttcactagggcggaggatccacttgacatgggtgtatggctctgggtggtggaatccaaattcccactactcacgggggcatgtcccgatgccaccaagaccatgtttgccgcgcagcaacttcgtgggccagccaggacctgaggccttcaatgatctttgtcaatatgctggctatcatgcggacacagatgagaaaaagagggatagattcaggaggggccttagcaccaagctcagagagcgcctcaacactgttagggccaacagctacaatgagctggatattgtccaacatccagagaaggggaccacaacagcaacaaggaagatgggtacttag

SEQ ID NO: 13221 - DNA, 318 bp, Zea mays
  Peptide Sequence Number=SeqID_56596
atggcgcctcctgttgatgtggtcagtccgtgccctaggttgggcgatgtggaggctcctccgaggtcgaggtcgagtctgtcttccgaggccgagatcgagtctgagcccctgggtcgggcgaggcagagaccgtcggcggaggccagggctgagttcgagccctggggtcgggcgaagcggagttcgtcgtcttccgaggctgagcccgagtccgagccctgggccgggcagagcgaagttcgccgtcttccggggctgagcccgagcccgagccctgggtcgggcagagcggagttcgccgtcttccggggctaa

SEQ ID NO: 13222 - DNA, 333 bp, Zea mays
  Peptide Sequence Number=SeqID_56597
atggcgcccgaggccggacttggctgctgtaagcctctctctgtcgagtggcacatcagtcggagtggcgcaggcggcactgtcttcttgtcaggccgggcgcacgtcaggataaggtgtcaggccaaggttgcttctcggcgaagactgggccttgggcaagccgaagagaacgaagaagaagtagtggttgaaaaagaagaagttgcaccaccaccacgtgaagacccacctaccgggaactacttttatttccatatttgtggagcagagcccgactctcctataacacaaggcaagccccggtgtatttgccacctccttgctatttaa

SEQ ID NO: 13223 - DNA, 366 bp, Zea mays
  Peptide Sequence Number=SeqID_56598
atggcgagagtagcgtgtaccctctgtggcaagaggctggacggtggtgtatctgtgctctcggtgaggaagcaacaaacttttgttgtttctgttccaaggtggtctcaaaagaagaaaaccaagagtaaagctgcgggaggaaaggcaacaccaaacccacctccagtccctcccacgttagccgaggctatcgccgccttggtgaatgctacagcagataatacccgtttcctacaggagatggcaggtcagcaactacaacaacaaggcgggcgggtatatcagcagggcctccgtgaaacgtcttatttggatttctccgaaacgcgccccggttgttcatcaaggcagaagatcctttag

SEQ ID NO: 13224 - DNA, 323 bp, Zea mays
  Peptide Sequence Number=SeqID_56599
atggcgagctccagacggcgagtgcgcggcgatgacgaggcaagcgcgacgacaagctcgacggggatggcgatgctccggcaggacgagcccgacgggaaaaggtgcgacgggcgggcacacgcgcacgtcgcactgggtgggggccgctggctacaccggcaggggagcacgcctgggcaaaggcactgcgctagggcgcgcagggccacggaaggccgcaccgagttgcgctccgggcaggctgccgcgcaggctggccacgcaggctaccgcacagggcaagccgcgggccgccgctgcgagcgcgtctcggcgggctg

SEQ ID NO: 13225 - DNA, 645 bp, Zea mays
  Peptide Sequence Number=SeqID_56600
atgccctccctgggtgggcggaaagtgcaaagtccactttttgctttggatgtgcgaggccgggatcctgccgcggtcgtgcgcgaagcggaggatggggcggtgcgaattgtggggcgttacgtgccgaagacagagggtccgcggagctgggatatccgtgggtccaatgacaggttgaatcgggtcttcgaattgaaccggttgtcgtacggtggttatcccggggaagacgccgccgaccgccgcaggaagaaaccaatgggcgggaccgaagaagggccttcgcaggatgctgctccgaccgctaagaggaggaaattaggtactacggtggggggagtgggggtgtctgataattttgctatggagttgatggggacatgcgtggccccctggggaaggatgtcttcgcccgagctccgggagtcttcggcgcgaatgctggaggttaccgggggtcgatggccaaagaatgttctgatcccctgggcagagggcgaagacatgtctacgtctcgtatagctcgtggcttgaggattttcccttacggacggaatattgctgctgttgtgtcgatagtgatgaacaaggaccgtcagcacgctgcgcagaagcgccgggcagtcatcaggatcgcataa

SEQ ID NO: 13226 - DNA, 1626 bp, Zea mays
  Peptide Sequence Number=SeqID_56601
atgccggctacgaaaccggtcgcgcccggatccggcaagtcgtcggcgagcgcgaaggctgccggtgccggcgggaccaagcctcccctggtcgaggctgcaaaagtacgggagctgccctcaccggtaaaacgtgttgctgatttcggcacgaatatcagcgtggaggactattttgttgggccgggcgaggaacaaatggttgttgtcccgcctttggtggcgaccacttcgccatcggcggtggcggccgacttcgctgaccgtgttgcgtctggcatcctcactgcggacgtggctgccaaagtcgagagacttcaggcgcagcacgcggacgccgtctgggagaagtcggctgcggagagcaaaaaccgtaggctggcggagaaagtggccgccttggaggccgacaagacggacctccggcgccagctagtggaggaatggaaggaggcgaaccaggccatttctgaggcacaggctgcgcaggcggaggccaaagtggcgcgggtggagggaagtctcgccagccagcgcgtcgaggagtgggaggcgaggttcaacgccctgcgcggtcgtgtggacaaggtcgaggcctccacgcgctcggaggttgagtggacgctcacccagttcgtgaattcgtatcacgagctgggtgcgcgtactgctgactttgaggtgcccgaccgggaagcgggccttcgcttcctcgagtggttaccggaggagttgctggtactcccgaccatcgtcgagggtttcatacactacgaggtcttcgaccagtcagacgagagctttgagcgcaagatcttcaaggccgaagaccctgttgtgaagcagtcagcgggggcactttttgatatgatgtggggggcacatggtcgggaggctgtcagggagcgctttgaccaggcgagagagcagatggagcgtgccgaagacatcgaggaccttggaggtctggtcggcgcgccgcccgaggctgcggagggcaatccggtgctgcccttggatgccagtgaaggcccctcggccgcgcccgtgcctgctatggccggcgaagaccctgcgtcggctcctgagccgacggtcgaaggcgccccggaggcggtggcggagccggcagtcgaagaccccacggccgcggtcgtgccctcgcaggttcagggttttgggcctgcgcacgcaaccactactaacaatgctaattttgtggcggcttcgaccgtggttgctgaaaatgattcggatgattccgtgtctaagttttttgagtctgatgattctgggagttcggttgtgtggacggaagagtcttcggatgaggacttggattattttacggccttggatgtggctacggcggaggcttctccacgtgtgatggatgctgaagttcttcctggtccgagtgctgggcgtaggcggcgaagggcggtggcgaagcggagagtgagtgaggtggagggtggtcgtcttcatgtggatggggctagcaagcgagaattgttgtcctcgccggttggggcgagtgtaggtgagggggagttgcgaagtctttttgagggtgaggagttgaggataatgctgttcaactatagggagatgggtatcatgtaa

SEQ ID NO: 13227 - DNA, 273 bp, Zea mays
  Peptide Sequence Number=SeqID_56602
atgtttcccaagcataatatatgtacaggaaccttcggacttgggatgaagctgtacacaatatggaaagcaggatcggaacgaaggttgaaccagcgccgaagctgcgcgcaaggaagcttcggcttagtagaagaaagaggaaccgacttaaggaggaaaaggctatctagtcctcaacagattgttattaagtcaatagtgtcaatagtgaatatgaagggtattctttccgtttggaaggagtacttttgggttaacaacttgggttaa

SEQ ID NO: 13228 - DNA, 621 bp, Zea mays
  Peptide Sequence Number=SeqID_56603
atggacttcgcacaggatttggacgccttcggtctcgtatccctacaggaacagggttattggtgcccgccagtcttcggtcatgatgaggttgactatgtggtggccctcgctgtcattggttatttggaggccctctgggctgcggatggctggcgtgctgatgacatggtagaatacgtcggagggcagggcctcgcctctggcggatgccttggccaatgcgtcggcctcctcattcttggctcagtccacatgctgcaaggtgaaacctttgaattgcctctcgagactgcggatagccgcgaggtagtgacaccaagtgcccttagcttgcgaaggccgaggatgacaacttcgtattctgctatattgttggtgcatctgtcagactccaaagcaaagctgaggcatgctgcatatctgtgcttgacccctgtgggtgaggtaatgactgcagcggcgcctgcccccgcatggcaccatgcgccgtcacaatggattgtccacaccttctctgcggacgtgtccgactgcgttattggcccagtccagtcgacgatgaagtctgccaggacttgtgacttgatggctgtcctgggctcgaatgtgatatggtag

SEQ ID NO: 13229 - DNA, 255 bp, Zea mays
  Peptide Sequence Number=SeqID_56604
atggcccatgaaattataaagaaaagtgaaaaagacacccatgacgcccgagttgaagcaagacaagctgaagaagctgtagagcgtgaaaagtgtatagctgaattatctccgccgctggaactgctcgatcccctggctgatccaaaaacgaaggaagcgttggagatcattaatatggctgaatctattgttgatgaagttgttaaaaaattactaaacgaagttgtagaaaaagtcctcaaagaggaatag

SEQ ID NO: 13230 - DNA, 75 bp, Zea mays
  Peptide Sequence Number=SeqID_56605
atggcgggcggaaataagctcgccggagctaagggaaaggggctggccggtgaggagaacacagatgatctttga

SEQ ID NO: 13231 - DNA, 447 bp, Zea mays
  Peptide Sequence Number=SeqID_56606
atggccttgctctccacagtggaaacatgccctgtttccaacctgagctggtgctgcctgactgttctgctgattttgctggggcaggaagacgaggtgtttgctgattctgcttttgaaactgacctcctgactgattgctctgacggttctggtactgatgctgaggatactgcctttggaactgctgatactgctgacgctgctgaatggcggccagagtctgaccgatggcttgaactgcctgagtctgcatcagaaacatctgctcgatcgacatcgggggcgggggcggcaggtgctgctgctggggcacctcatcctgcggagcggctcgctcctgctgagcacgccttcctcctctacgcctgttctctgacatctgcagaacgcaaccacacatcagaactgatctggcaaagcttgcagcataagaaaagagtatag

SEQ ID NO: 13232 - DNA, 324 bp, Zea mays
  Peptide Sequence Number=SeqID_56607
atggaagttctcggggtcctcgtcgtcggtcacacatgtgttgacgaagattccacaccactctccgagcaggtcgacgacgtgagttggaattctttcatggcggcggcgaggttgtcgtgcccagagctccctcatcggtactatggcactggtggtagggtttcgagggggaaagaaatctggtccatggattacggctttatagccctagaaaagtggctcaagcgcccgcaaccaccctcgaattcggcaccggtgatccgagcttcgtggagtcaactcggggaaggagacggaatggcgcagtcgtgttggggttga

SEQ ID NO: 13233 - DNA, 294 bp, Zea mays
  Peptide Sequence Number=SeqID_56608
atggcgccattatgtcgtccagctcatcatccacctgaagcccaactgccacgctcttccttaaagcctggacgcagggcgaactttttcctgacccatttcttctcaaaagcaaaaggaggcggatgcaaatgcaaaagaaatgaaacgaagaggccgtggcagaaaatgggcagccaaggaaaaggaaaccgcttctggccaccaaaagctgctgcggactgccaaacactcagcttttcagccaacttctataaaattcgtttgggtaaaaaccattcaaaatcaacataa

SEQ ID NO: 13234 - DNA, 789 bp, Zea mays
  Peptide Sequence Number=SeqID_56609
atggcactcgacaaagaaggaaacctgggaaccggcaaagccatctttgccgagtgctgttgccaaggcactcggcaaagggactggcaaaggggacccactggaggactctctgccgacgaccgtctccctagacactcggcaaagagtcctcctttgctgagtgcctacgagagctctcggcacagggactggcggtggggcccactggacccgtctttgccgagggccatgatagcaggcactcggcaaaattggcctctttgtcgagtgccaaagaagacactcggtaaaggatccgtcaccgtcacttggcgccgtgacggtgacttttctttgccgagtgtcaaatggcactcggcaaattctttgtcgagtgcccgacaaaaagtactcggcaaagagaccgctgccgatgtacagttcgccgagcgttctttgccgagtgttacactcggcaaagcctttgccgagtgtaaaatagcctttgccgagtgtctgagacacacgacaaaggagctgtgtccggtagtacgaataactaggttgatgttgagctacaagacactactgaaatccggatctttgccgagtgctcgatgttttgccgagtgttttttgtcgggcactcggcaaagtcttgctctcggtaacgatggcgtttgccaagagcaggactctcggcacaggcatacactcgacgatgggcggcaaacgcccgtcaaccacagtgtaaagctgacggctattatctttgccgagcgccgagttctggcactcggcaaataa

SEQ ID NO: 13235 - DNA, 363 bp, Zea mays
  Peptide Sequence Number=SeqID_56610
atgacaaagaatatgggatttccgaagctagagcttggcttatctgcaatgtcgaaggatgaacttgcagatagccttgcttataatagcttgaagggtggtcgtgagatggctgacgaagccattaaaaagaatgagaaagaatatcacgacgcccgtgaggaagctaagaaagctgaggaagctgtcgaacgcgccatgattatagccgacctctctcccccacaggagccatacaaccccgaagctgatccggttatgaaagaagctttagatgttatgcaaattgctaacgaagttgttgataaagtcgtcgacaaacttttacatgaagccgctgaaagaattctgaacgaagactag

SEQ ID NO: 13236 - DNA, 777 bp, Zea mays
  Peptide Sequence Number=SeqID_56611
atggctgaaaggtaccaactcccacggagttgcgttcctccaacgacaaggcggaaggactacgagcatcccccatccgggggctcggaaggtggaaagacacgatgcataaggaagcgcgaagacatggccgcctttcaagagggtcaccctccttttaaaggcgactctccctacttgcgtccccagccgtcgtgggctgagtcttctccaacacgctccaaggtcctccccctacggcgcgggggctgggtcccacacgtcatgcaagctggcccagggcagaagaagccaaaccgccgcgcgcggtgcatgcaagcgccccagcggttacaagcgcccctccactttcgcccagaccggcggatgaaagggcgggcagccatgcaggcggcatgcaaccgcgccaagtgggcgcgcccctccgacttccaacgcgccaagcatggaggcccacgtccacgcgtcatgcaaccggcgcgccggtcgctacgtgcaagcaactgcaccgccactcgcaccactgccgcgcctcctcgactgtggatccagctccgagcccccctactgatcagaggttcgaaggctggcccctcggaggggtttaacagccgcctcagagcgcgtgggctccacacccattactggtcagaggttcgaaggccggcccctcagaagggttcaacggccgcctcaggccactcgggctccacgcccactactgatcaggggttcgaaggctggccctcgaagggttcacagccgcctcagacatag

SEQ ID NO: 13237 - DNA, 396 bp, Zea mays
  Peptide Sequence Number=SeqID_56612
atggcgccacccactgtcgagaagacgtcgattatcgcgaggagtggaatagcggcgccgatgctcgtaggcggtggcggcaggggcctctatctcgttgaagtgttgttggcagtctactcgtcgtcaacattgcgacatacgaaggagtatacaaccatgtcacatgttcctacgtgcacggcggcgagggtgggagggagtgaagggcgggtgacgagggatgggcagtctatacggcgaagggagcacaagagacatggtccgtggagaggggaggcgctggaggaaggtagtaagcaccgtgacagcggcagaggtggccatcgttgcctgtggccagttgagcgagtgcggcaagaagtcatcgatctccgagaagtgaggagagaatga

SEQ ID NO: 13238 - DNA, 813 bp, Zea mays
  Peptide Sequence Number=SeqID_56613
atgaggccgcacgcggtggggacgggcggcggtggcgtggggaggcggaaggcgggggccgccgctgctgccgcaagccgggagtggatggtggtgccggcgtcgggtccggctcgggtggaggaagccgggaagcacgcggtgatggcgcgtacagggcttcccgcgcgcgatctcagggtactcgacccgttactctcgtacccgtccacgatcctgggccgcgagcgcgccatcgtcgtcaacctggagcgcgtcaaagccctgatcacagccacagaggtgctgcttccaaacaccaaggatcccgcctttgcgcgcttcgtccgcgacctccagacccgtgtcctcgcatcttcgtctgaccaggcagctgagttcactgacatggaaggtgaatcatctaatgttgcttcaccatttcccctaccaagtgcatccaaaggacatgaaatggagatgactaagaagactactgctgttgtgcctgagatgactagtagcagcagtatgcccaatttagctattgcaaaagatggaaacaccaacgttttgcctttcgaatttcgagctcttgaagtgtgccttgagtcagcctgcagatctttggaagatgaacgtggtggggatgctgagaactcatatgtcactggcagcgacacgttcgcggatgaagtgcaggtcgatctccacgtggttcgtgtgctgatgacacatgggattggtagagaagtagaccgcgctggcgttgtcgcactagacgagggtggcgtgctgaagggggttgtggagcttctgaagaagttggcgtag

SEQ ID NO: 13239 - DNA, 711 bp, Zea mays
  Peptide Sequence Number=SeqID_56614
atggggacacagccacataagatgaaaagaagcgggatctggccgctcggccaggggaggcgcaaggcaagccaccagctgggcgccaagcacgccgccgcgcgggattggggagggagcaggcactgggcgggctgggcggccatggctagaatgggcagacgacgccgcttgttggggcaacgggacaggggctccacgcgggggagctgggctgcgcgctggccgaggcgagcaagcatagtggagcgacagcacgcgtgcgcaacagacgacgacgcgaaggctacacgcacaaagactcagcagggaggggacgcggaccttaccagtcaagacgacatcggcaagcatgatgcgcaaggtgttccggtgaggcacatctacgccggagctccgacgaggagagtcagcatggtgtgcgcggagtggactgcgtgtagtaggggagttgctacagggcttgaaggagcgttagttgctgaagttgtggatgcatctagcggcggaagaaatggagcgaagcagttactggagagaggagatagaaatggcgtgcggggcccagccagatcggacgtgggatgggagatgagagcgctggcgatccttgcattgaatgctcctgcgatacggtcggttgacgaggcgatctggccaaggttgcttcactgcgaagcctgcccgagctggtcctcgggcgagtcgaag

SEQ ID NO: 13240 - DNA, 855 bp, Zea mays
  Peptide Sequence Number=SeqID_56615
atgcattgcgtccttccgccttctgagcccccggatggggagcgcccgcgttgccttcgtctcgttgtgggaggagcgcaacctcgtggaggttggcacctttcagccatcgctcggcttcaaggattttcatcaggcagcccggttgcatcccctcaccaatggtcacgcaggagggtgaccaccggttcgatggtggggagaagcaagccgggctgtggcctctgccccgcactcagcttcaaggatcttcatcatccttgctggggcggagggcgagctgagccgaagctcttcctcccgtatgggtcggcgggccacctcctccttcagcattcaggggagaaggcgctcaccagcctagcggagggggcggacttcgacaacgcggggccgatcggccgcaagcgtcgtcagctccagcatgcctggttcgctggctcagctggctctggcacagctttcggtgccacctcccaccgctgggtggagtgtggctatctgcccgccgtacgggcggctgttgcgccgcgcgcaccgggggaccgcccaagacgtcgcacgccgctagggcggcgttcgtgttcttgggttgtcctgcccttgctccagcacgacgccttcgcgcggaggtcagtgctcgcccgtccgaaaggacttgagtggggatctaccggtgggcaggtggttgttgtcgtcggtgctgaggtggtggcagccggagaaggcttctccaccgatgagaccgtcagcgccacccgcggaccgacctctggctctttggctttgatagcttgtcctcgcccctcgagtgggacgcgggcgagggccttgtcgcagcagcgtctgccctga

SEQ ID NO: 13241 - DNA, 783 bp, Zea mays
  Peptide Sequence Number=SeqID_56616
atgctgctcttccgccacgtggggaagacgtcgtcgattccgccgccgccgggcgggctgacgaccgccattgtcgttgtcgcgcggaggaggaaggagtaccatgtcgtagctgccgtcgagggacatgaactcaagactcccgaaacggagcagcatcccgggctagagaggttgctggagactacccatctggagcttgacgggaagctgttcgtcaacacgcagcaggcccctacctggcgcgccaactgtcggcgtttcgaccccatgggggttcctggaccgacgagtaaattgtcgctgcgtgttccagcacagatgggtccaagcccaaggtcgggcgaggcggtgactcctccgaggtcgaggctgagtccgagccctggggtcgggcgaggcggagaccgtcttccgaggtcaaggttgagtccgagccctagggtcgggcgaggcggagaccgtcttccgaggtcgaggcgggggccgagcccggggtcgggcgaggcggagcttcctatggtgcctgaggctggactcggctgctgtcagcctcaccctggcgggtggcacaacagtcggagcagggcagcggcgctgttttcctgtcagatgacagatacctgtagaagtggcaatggtattacagaagccattcctttcgttgaatggagtgagaaaggaggacgtcggtttcttactcctgctggaattttaacatttaacagaaatagcatgagcggcatatcaaatcactcaaaactttttttggtgctcaagtag

SEQ ID NO: 13242 - DNA, 1392 bp, Zea mays
  Peptide Sequence Number=SeqID_56617
atggcattggatcaaatagaaaacccagggtcgaagaagaccatagtcgagggtgtcgcggaggtagcgaagaatccgcttcgcaacgataagctaagcgatcgtgtggtgaagggcggcattggatgtcgtgagcacgatgttgtcaacgtagagcaaaaggtacatgatgttgtcaccgcgccgaaggataaacatggatgtgtccaacttgccctcaacgaagccgagggagacataggaggcaaagcgattgtaccaaccccacaacacctgcttgaggccatacaaagagcggttaagcttacagaccatacccaggcgagtggtgtcgacgaaaccaatgggctgactgccgtacaccatctcggtcagagtgtcgtgaagaaaggcattcttgacatccaactggtggactatctattcctaggagagcgtgaggaagtggacggtccgaatggtggcgaacttcacagcgaggctgaaggtctcatcgtactccactccagggcgataagtaaagccacgaagaacccaacgagacgtgtaccgatcgagggaaccatcggccttgagcttgcaccgaaagatccacttgccagtgactacattgatgccaggggacacgccactaggtcccatagcgctggcggttgtgagcaccagccagtcgactggtcggagaacgccggatggtgcaccgagggctcatcaagggagcgggccagagcacgtggcgactcgtcaaaagagggtgaaaagatcgaggaactggtaccccttgtgatcagaagagtacccgaggaaaaggcaacgagtgcatcggggcacaagtttgtggggagcgatggcagaggtgttaaaatagcaagcacaaccaaagacacgaaggtgcatataggaagggcaggtgccaaagaggacgaagaaaggagtaggatgactgaccgccttggaggggaggcggttcagaaggggatgaccgaggtgcccgagagtctaagagaacgttatgaccgagctgcccaagacgacggtgccaagtggaggcagaggcgacgacgagacaatctcggcaccgcggaacacaaatggccctggagcgtggtggacctcttgagggtggacagagaccagagggtggcagagctcgacgcagtcacggagaaccgagttcatttatcggtcaaatgccatgagcgtgccccagagaagttgcctgccgtgaaggagtgcacaaacacggtagggtggcacgtggaccgcagcgaagcgaaggacaagcgtcgaggtagtagccacaaggtggcatggggactgcgtcagcccatagagctaacacaacggcggtaccggcagcctatgcaggggcgatgggaccagtgcgactag

SEQ ID NO: 13243 - DNA, 630 bp, Zea mays
  Peptide Sequence Number=SeqID_56618
atggagcaaaaattgtatggagcagccctatacttgaatccgagcaaattctttgctttaagggataaagataggagacaagctgctagacttagatccatgttcaatgatgtgatgtggaagatgatcaatgatgatgatgagcaaacaaaaattagcaagcaagcggatgactatgagaggtctgaaggattgttagcctatgttgttcagcatctgaatgtgaacgaaattggagtgactttgcccaagtccatacaaaaaaacagattagagcaccaaagattgaataagttggtgtatgtgagctacaaccggaaaatggaaaatcggttcgcaaaaataagaaagctcaattccaaaggcaagaaaagaaaaccactggtgcttgaagagtttcaatgggaaaatgaatgggttgatgaggaatctgatagtggtaatctttgggctgctgttgatgaagcattgagtgcaacagagggtctccggggccaaaatgtacctagggctgctggtggtctgccagtacaaactcaaggagaagtcgatgaggaagaagaatctgagtcaggtggaggggctgctagtgatgctgcttttcaattggatgaggctctactgctttag

SEQ ID NO: 13244 - DNA, 827 bp, Zea mays
  Peptide Sequence Number=SeqID_56619
atgcaggcggcatgcaattgcaccacggggatgctccctttcgacttcgacgcatccagcatgggggcccaggcccacacgtcatgtaaccggcgcgccggttactacgtgcgaaaaactgcaccgtcacttacgccaatgccgcgccttctcgactgcggaaccggtaccgcgactcgaggcaaccctgtgcatggcccaacagtgccaaccaagcacatcggtcacaggtcagtcagccgcgggagaaggcgcgacggtcgatatggccaaaagtgggccggcagtaatggcggcggcaagtgggcggaagcagcagtcaaatcgtctgcaggctcatgtcccctcctggagcagcaggggagccctctcccacggcatgaagacgacgcgcccgcgttccgtccctcgaacggctcgcgcaacggctgccccgcgaagcgggcgacacttcacctccgccatgatgaccgcgtcaaaaaagggaccgggaaaggggatactccgaaagggatccttctttgtgaaggaagcgggccccgagccctcctactgatgaggggttcgaaggctggcccctcggaagggttcgacagccgcctcagagcactcgggctccgcgcccactactggtcagaggttcgaaggctggtccctcggaagggttcgacagccgcctcaggccactcgggctccgcgcccactactgatcaggggttcgaaggctggccccccgaagggttcaacagccgcctcagaacatgcagagcgagggatgactctgggtacgtccgatacatggccgaggctcgggctacgctcccgag

SEQ ID NO: 13245 - DNA, 1230 bp, Zea mays
  Peptide Sequence Number=SeqID_56620
atggggagcgcccgcgttgccttcgtctcgttgtgggaggagcgcaacctcgtggaggttggcacatttcagccatcgctcggcttcatggattttcatcaggcagcccggctgcatcccctcaccaatgcttcaaggatcttcattatccttgctggggcggggggcgagtcggggcccgccttcgcgtgggctagcgtcccgcttcttcctccggcatctgggggtggaaaccatccttcagctctatggaggggcatcctccagccatgcggggggaaggcaaactgctgctgcccggccagggtgcagcattccgtcctctgtccgggcgactgtggccggccgcaccggagggtctcacaacatgtcgtacgccgcgagggcggtactcgtgttctgggacggtcccgttctcgttttcgtggcgagaatgggggtgaggacctgccggtgcgctttagggcggccggtgctcgctggtgcggagttggtgggcaggtcgatgccgctgtcggtgctgaggtggtggcagctagagaaagcttctccgccgacgagaccgtcagcgccacccgcggaccgacctccggctctttggctttaatatctggttctcgtcctccgcgaggggacacgaacaagagccttccagcggtagcgtccgccctgggaccatcgctgctgctgcagaggtcgccagcgagtcacccggagtttgtcgtcccgcaggccctccgatgtgggggttgttcgtacccgcgggagtggaaccggagttccgtttgtaatggcatcttgagtgtcggtgagtccctcggctcggtcggccttgccgcccaaggcttctcttgctcagttaaagaaaccctcggccgctctgtgatgagccggagctggaggcagcggtgtcagcatggacagaggcagagttggctcgagaagaaacttcgtcggcctaggagcaggcgcggtgctgacatcttccttcgaggtggagatcctccgaccgtgtcgccgtctgaggccgggccggattccgccgaaggtggagtcgacgccgagggtgctgctgctccccctattgatgacttgtttgtcggtagcagaatcgctcattcgagcgagaattacttatcgcggaaggtgatgagtgaggagtccctcggctcggtcggccttgctgcttacgtgtactccatcattttcaggatcccgctatcgaagtag

SEQ ID NO: 13246 - DNA, 525 bp, Zea mays
  Peptide Sequence Number=SeqID_56621
atggtcaatcacgggcgaatcgagacgaccacggcggcggccacttccgtcgcgctgtcccatggcgggatgagcacgggcccgcacagacggcagcgtgctgaccagcggcgccccggcgtccagtcttatagccctgaggcaggccgaatccaggggcacaacgttgaggaaaggaggttggcgcgagtacttcggatcgccaggaggggacctgcccgtgaatcacgccgatttagggggaaaggatcggtcgcaggcgcgcgagtttgttgtgggaaggtagatggagcttctgcgcagctggccccacatggcggtgaaacagcacacccaggcgtgcactgtagtgaccagaagtgcgggacccgcccgtcagtcgcagagagggaggagcgcgtggtgtttatgtgggctgggcaagggggcaaagattttggtctttacaggctagcttgcatgtcgtgtgggacccagccccgtgtcgtagggggaggaccctggagcacgttggtgaagacttag

SEQ ID NO: 13247 - DNA, 303 bp, Zea mays
  Peptide Sequence Number=SeqID_56622
atgcaggcggcatgcaactgcaccacggggatgctccctttcgacttcaacgcatctatcatgggggcccaggcccacaagtcatgtaaccggcgcgccggttactacgtgcgaaaaactacaccaccacttacgccaatgccgcgccttctcgactgcggaacccggtaccgcgactcgaggacaccctgcgcatggcccaacattgccaaccaagcacatcggtcacagggaccgagaaaggggatactccgaaagggatccttctctgcgagggaagcgagccccgagccctcctactga

SEQ ID NO: 13248 - DNA, 585 bp, Zea mays
  Peptide Sequence Number=SeqID_56623
atgacgaatgggcaggtggagcgtgccaacgagggcctgcgggacaacaaactccgggtggctcgccggcgaccactgcaccagcagcgcggcaacgacctccgtctcggacggcaagacagctgcagcgatggcctcaaggcaaacgctgctgctgaaaagccctcgttcacgtcccctcacggcggacgagaactagccattaaagccaaagagccggaggcccgaagcgcaagtggcactgacggtgtcgtcggcggaagcaaccgcttcggcagaggcagcctcacctatggcgaccaccacctcagcaccaacgacaacggccacctgcccaccaacaccgcaccagcgagcggcggccgccccaaagcgcaccggcaggtcctcgctcccgctctcgccacaagaatgagaacgggaccgtcccggaacatgagtaccgccctcgcggcgtacgacgtgttgtgcgaccccctggtgcagccggcgaccgtcacccgggtggaggacggacaactgcaccctgtccaggaagcaacaattcaccttcccccgcatggctggaggatgcctcctccgtag

SEQ ID NO: 13249 - DNA, 609 bp, Zea mays
  Peptide Sequence Number=SeqID_56624
atggcccaagggcacatttccctttcaggtgactcctccgaggtagaggctgagttcgagccctggggtcgggcgaggcggagaccgtcttctgaggtcgaggctgagtccgagccctggggtcgggcgaggcggagaccgtcttccgaggtcaaggttgagtccgagccctggggtcgggcatggcggagactgtcttccgaggtcgaggcgggggccgagccccggggtcgggcgaggcggagcttcctatggcgcctgaggccggactcggctgctgtcagcctcaccctggcgggtggcacagcagtcagagcagggcaggcggcgctgttttcctgtcaggtgttctctgatgctgacaatcagacccaagtgggtatctatgtgttgcaaagtgagcatgaaatggctacatacaataaatgcctggatgaatttgacctcatgggcattccacccgccccaagaggcttgcctcagattgaggttacattcgacatcgatgccaatggaatagtgaccgtctcagccaaagataaggctacgaggaaggatcagaaaatcaccatccgatcttcgggtgggctgtgtgaggctgacatctag

SEQ ID NO: 13250 - DNA, 243 bp, Zea mays
  Peptide Sequence Number=SeqID_56625
atggccggctcggccgccccgcccccctgcctcgcccggctcggccgccccacggccggctcggccgccccctgcgccgccccctgccccgccgggttcggccgcccctgcgctccgccgagacattgtggtacaggtggttatgagattgatggtttggttatgactatggtgctggtaaagggcgaagatgaagctgtggaaggagacttccaggagttccaagactacgacgagttctag

SEQ ID NO: 13251 - DNA, 405 bp, Zea mays
  Peptide Sequence Number=SeqID_56626
atgcaggaggcgtgcaaccgcaccacggttgtgcaccctttcggcttcatcgcatccggtggggcaagcgacacctttggcaggcgaagcgagcatcgtttcgcctccgccatgacgaccacgtcaaaaagggaccgagaaaggggatactttgaaagggatccttcccggcgaaggaaacgggcgccgagccctcctactgatcaggggttcgaaggctggccccttgaaagggtttggcagccaccccagagcactcgggctccgcgcccactactgatcaggggttcgaaggtggcccctcggaagggttcgacagccgccccagagcactcgggctcctcgcccattactgatcaggggttcgaaggctggcccctcggaagggttcgacagccgccctag

SEQ ID NO: 13252 - DNA, 460 bp, Zea mays
  Peptide Sequence Number=SeqID_56627
atgacgacggtggttctcagtcccctacggaagcaaggagacgtcagcaggatcccagcagcactgccagctgtgcttctaaagggctcaggcacttctccgacggccaccgacaaatttactggttggcttacggacccccgggtccgaaacgccgacagttgcgctggtagccgttgctccgctggtgtactggacagttcggtgacacaccggacagtccgtgagtcagtgctcaccatcctcggcgccgcggcccagcaacctgcctgcaccctgctcggtggcccaacaacctgcagcgagcatcggcaaggcagcaacatgagttcatcatccgacgagtggggttggcgccgtgaacgtgcaacagctgttgaggtgatcatgggagactcatacattagagaagagagcactggtggtggtgatgcgactgctgaaagtcgcctagaggggg

SEQ ID NO: 13253 - DNA, 264 bp, Zea mays
  Peptide Sequence Number=SeqID_56628
atggggcacggacgtctgctcagattacccgccagcagctcaccggagacaccatgttcggcgcccaccgagggcaacatggcgctttcccccctcctccttgcggaaaggcgacgcaggggcagtgaggctgacaggcagtcagacccgacctcaggcgccttaggaagctccgctccgcccgacacagggctcggacttgggctcagccctggaagacggcgaactccgctccgcctgacccagggctcggactcgggctaa

SEQ ID NO: 13254 - DNA, 459 bp, Zea mays
  Peptide Sequence Number=SeqID_56629
atggaacacgcgtccgccttcctcgcgcgcgcgctcaccactccgctcccggcacccgccgccctcccgcgccgccgcccggctcgcgtggccgtcgccgccgcggcgccggagcgcaggccgccgggcgcggtggcgtccaccaccaactacgtcgtgccgctcgacgcggcgccgtccgggatcacgcgcccgctcgtcgagatcctccgcgacctcaacaagcgcgtcccggacgccatcgtgcggccctcctcccggcgcgcctccgcctccgaccccgtcatcccctggtaccatgccaataggatgctcagcttttatgctccaggtgaggctacactccgaactcatgctactgataatgcccactcactcactcactatcatgtcatgcgctctcggtacaactcagcttgcttttcatacacatacaccattgagcttgttgaaacttga

SEQ ID NO: 13255 - DNA, 981 bp, Zea mays
  Peptide Sequence Number=SeqID_56630
atggtgacctccagttcgacggcgggggaaagcaagccgggctgcgacctctgcccctccctcagcctcaaggattttcatcaccagggctggggaggggactgccgcgtgcctggctctcggacccgagtggcttcggagccgctctcggcgccggcttccgccacggcagctggaagaggttcttccaccgacgagatagccggggccgcctacggaccgacctccaactctacggccttctgcccgtccttgcctcacgagtttgggcatgggcgggggcctcctggcagcagcatccgccctgaggtcatcgctgccgttgtttggccccccggagcagaagtcgtcgtcgtcgccgctgctggagcgggtgacggcgcgccgttcgtcggtcttctgttgctccgcaggctcccccccgtcgagtgcggagactcgcctgttggttgtctgaaccgcttcaccaagcgtgagttgccccgtgtaaaggtgacgagtgaggagtccctcggctcggtcagccttgtcgtccgaggcctctcttgcttagttaaaggaaccccttggccgctcttcgatgagccgaggccaggggtagcggtgtcagcacgaacagaggcagagttggctcgaaaagaagacctggtcggccggagcctggccgggtcgtccgttagcgggactgacgccggagttgatctttcgaggcctcgggccgggctgatgtcttcgggggacagctcaccgaggcctcggggtgatcagccgagccgcctgcttgggccagattctcggagaagaccctggcggcgatggcccgggcgtggtgatgacgtcgtccttcagagtggagatcctcggaccgcgtcgccgtccgaggccaggtcggacctcgccgaaggtgtagttgacgccgagggtgctgctgctcccttcaaccgtcaagatccgagcctgcaggatcggattatcttgtag

SEQ ID NO: 13256 - DNA, 249 bp, Zea mays
  Peptide Sequence Number=SeqID_56631
atggcgcagtcgaccgttggcagcctgggagccgttggcgcaccgaacatgtccggtgcacaccagacagtccggtgcccccttctagccgttggctcggccacgtgtcccgcgcagatcgcgcggtcgaccgttggcccggccgaccgttggctcaccggactgtccggtgcacaccgaacagtccgggttcaaagtagtagatctgagaagggcacttctcaaaatccacacaccaaaaagatataa

SEQ ID NO: 13257 - DNA, 1419 bp, Zea mays
  Peptide Sequence Number=SeqID_56632
atgtcttcgagctccccttatgcatcgcgtctttccaccttccgagcccccggatggggaacactcgcaatccttccgccttgtcgttggaggaatgcaactttgcggaagttggtacctttcagccatcgttcggcttcaaggattttcatcaggcagctcgaccgcatcccctcgccggtggtcacccaagacggtgaccaccagctcctgggtggggagaagcaagccgggctgcgacctctgcccctccctcatcttcaaggatgttcatcatcagtgctggggaggggactctccggtccgagcggcttcggcactgcttccggtgccaccttccgccgcggcagccggaagaggtttctccgcgacgagatagtcggtgtcgcccgcggactgacctccaactctacggccttctgctcgtcctcgcccctcgagtggggacgtgggcgagggccttatggcagcagcatccgccctgaggtcatcgctgctgctgttcggccgctcggagcagaagtcgtcgtcgctgttgctggagcgggcggcggcaagccatccgtcggacttctgttgctccgcaggccctccaatcgtgggggttgttcgtacctgcggaggtggaaccggagttccgtttgtaatggcaccttgagtgccgttaaaggaaaccctcggccgctcttcgatgagccgaagccgaaggcagcggtgtcagtgtggacagaggcagagttggctcgaaaagaagacttcgttggccggagcctggccgggccgtccactggcgggaccgacgccggagccgagttgccgaggccacgagccgggctgatgtcctcgggggatagatggctgaggcttcggggtgtagttgacgccgagggtgctgctgctccccctccgtcaagaattgtttgtccgagcgagagttacttttcacggaaggtgatgagtgagaggacttcgacttcaacccttcgccctccagaggacttcgacttcaacccttcgccctccagaggacttcgacttcaacccttcgccctcgggaattcgcggaggccggcgcgctataattcaccggactgtccggtgtgcaccggacatgtccggtgcgccaacgaaccgcggcctccggaactcgtcatcctcgggttttcacgacagccgctccgctataattcaccggactgtccggtgtgcaccggactgtccggtgtgccagcggagcaacggctctctgcggcgccaacggctccctgcgcagcattaaatgcgcgcgcagcgcgcgcagacgtcagggctgcccataccggtgcaccggacatcaaacagtgcatgtccggtgtgcaccggacacccaggcgggcccacaagtcagaagctccaacggctagaatccaacggcagtga

SEQ ID NO: 13258 - DNA, 645 bp, Zea mays
  Peptide Sequence Number=SeqID_56633
atggcccctcctatgacgtggtcggtccaagccctgggtagggcgaggcggaggctcctccgaggtcgaggccgagtccgagccctggggtcgggcgaggcggagttcgtcgtcttccggggccaaggccgagtccgagccctagggtcgggcgaggcggagttcgtcgtcttccggggccgaggccgagtccgagccctggggtcgggcgaggcggagttcgtcgtcttctggggccgaggccgagtccgagccctggggtcgggtgaggcggagttcgtcgtcttccggggccgaggccgagtccgagccctgaggttgggcgaggcggagcttcccatggagcccgaggccggacttggctgctgtcagcctcactccgtcgagtggcacagcagtcggagtggcgctgtcctcttgtcaggccggttagtggagcggcaaatcgtcgtggcgatttggccaaggttgcttcttggtgaagactgggtcttgggcgagccgaagctttgtgctgatgggggttatcagctgagattaggagtcttgggggcctcggaggagtggtttgactccttcgaggtcttaatgcgtttcgtgatgcttcggccggtctggttgttccctcaagcgagctggccgtag

SEQ ID NO: 13259 - DNA, 495 bp, Zea mays
  Peptide Sequence Number=SeqID_56634
atggacgcaattcaggtcaaggcttcgtctactcaagggacgcgatctcgcctcgcccgagcccagcctcaggcgggaacagtagtcccaggcgaattcacgcctcgcccgagggcctcctcaagcaacgggcacaccctcgactcgcccgaagcccagctcgggcaggcttcgttgggaagcaaccttggccaaatcgcctcaccaaccgacccctcaggcgcaacaggaagctccgcctcgcccgaccttgggcctcggcctcaggaggaggtctccgcctcgcccgaccctagggctcggccctcgcctcggcctcaggaggaggtctccgcctcgcccgaccctagggctcggcctcaacctcgaccttgggaggaatcgcgtcctcacccgaccccagcctcggcctcaggaggagtctccgcctcgcccgaccttgggctcggaccgaccgcgccgtgggggatacatcattaccctacccctagctag

SEQ ID NO: 13260 - DNA, 1329 bp, Zea mays
  Peptide Sequence Number=SeqID_56635
atgtcttctccctcccttatgcgtcgcgtctttccatcttccaagcccccggatggggggtacccgccgtctttctgcctcctcgtcggaggaacgcaactccgtgggagttggtacctttcagccatcattcggcttcaaggattttcatcagctggcccggctgtacccccacgccggtggtcacccaagatggtggccaccagtttctgggtggggaagagcaagccgggctgcgatattggtcccaccctcagcttcaaggatgttcatcatcctcgctggggtggggcccaggctgagccggcgctctacctcccgcgtgggtctgcgggtcgccctctcccgcgacgttcgagggaggaggcgcccactggccctgcgggcggcgcggacttggacaacgtggggctgatcgacggcgggcgtcgtcacctccagcgtgtcggagtcgtcggcttggctcccggcggcccctcctgccggggggggggggggggcggctgccgcgccgtgagcacgggaggaccacccacgatgccgcgcactgctagggcggcgttcgtgttctggggtggtcctgcttttgcaccgggatggcgccctccgacagaggccggcgccccacttgtctgggaggatttgagtggggatctgccggggggccggcggcccccgctatcagcgccgaggcggaggcggctcgagaagtccccgtcgccgacgggatcattgccaccatccgcgccccgggcctccggttcttcgcacttgtcctcgcccctcgagcgtcggcggaccccttggccgctcttcgatgagccgaggccaggggtagcgatatcaatacgaacagaggcggagttggctcgaaaatgggaacctggttggccggagccgagccgggttgcccatcagcggggctcgtcgtcggagtcgatgacccgaggcctcgggtcgggctggcacccttggaagatgcttggccgaggccccaggggtaactggccgagccgcctgctcgggccggattcccggaggagtccctgggccgcgtcgccgcccgaggctgggtcggaccttgctgaaggcgtcgtcgatgccgagggtgctacagcccccttcagcgtgaagacccgagcctgcaggatcagattgtctcgtagcgtggatgtttgtgtgggcgagagttgcttctcgcggaaggtgatgagtgagaaggtgatgagtgaggtatccgtatcccggaggcgtaggagtccctcggctcggtcggccttggctgcttacgtgtactccgtcgtttccaggatccgcttttcgaagtag

SEQ ID NO: 13261 - DNA, 1176 bp, Zea mays
  Peptide Sequence Number=SeqID_56636
atgtcttcgcgctaccttatgcatcgtgtctttccaccttccaagcccccggatgggggatacccgccgtctttccgcctcgtcgtcggaggaacgcaactccgtgggagttggtacctttcagccatcgttcggcttcaaggattttcatcagccagcccggctgtacccctacgccggcggtcacccgagacggtgactaccagcccctgggtggggagaagcaagccgggctgcgatcttggtcccaccctcagcttcaaggatgttcatcatcctcgctggggtggaggccgggctgagccggagctctacctcccgcgcgggttcgtgggtcggcctctccttctgcgttcgagggagagggcgctcactggccctgcgggcaggtcggacttcgacaacgcggggccggtcgacggcggcgtcgtcagcatcagcgcgtcgggctcgtcggcctggctcccggtgtcccctcccgccggaaggcggctgccgcgccgtgtgcacgggaggaccgcccaagatatcgcgcgctgccagggcggcgttcgtgttctgaggcggtcctgcctttgcaccggtacggcgcctccgcgcggaggttggtgccccactcgtccgggaggatctgagtggggatctgccggagggctgacggcccccgtcgtcggtgccgaggtggaggcggctcgagaagagtccctcggctcggtcagccttgttgcccgaggcttctcttgcttagttaaaggaacccctcgaccgctcttcgatgagccgaggccaggggtagcggtgtcagcgcgaacagaggtggagttggctcaaaaagaaaacctggtcggccggagcctggcagggtcgtccgttagcgggaccgacgccggaattgaccagccgaggcctcgggtcgggctgacgtcctcggaggacagctggccgaggccccggggtgaccggccgagtcgcctggtcgggccggattcccggagaagaccctggcggcgatggcccgggcgtggcaatgacgtcgtccttcagagcagagatctttggaccgcgtcgccgtccgaggctaggtcggacctcgccgaaggtgttgtcgacgccgagggtgctgctgctcccttcaagcgtcaagatccgagcctgcaggatcggattgtcttgtag

SEQ ID NO: 13262 - DNA, 501 bp, Zea mays
  Peptide Sequence Number=SeqID_56637
atggcgctccctgttgacgtggcgggctcgtgccctaggtcgggcgacgtgggggttcctccgaagccggggtcgagtctgtcttctgtgccgaggctgagcccgagccctcgggtcgggcgaggcggagattgttcggccgaggccagggcggagtccgagccctggggtcggctttatgctgatgggggttaccagctgagaattaggcgtcttgagggtacccctaattatggtccccgacaaattggaaaccaatcaaccttccctgtctgcagtcatgacttgctcgacacagtcacggctcgcccaacgcagtacgattcgttcgaggccaactccgggcggggagacgcagttccaatttgccagagcccaaccttggcgggagacgcggttccaattcacccggggccaaccttggcggagacacgatttcgattggcccaaggccaacctcagcgggagacgcggttccgattcatccgagcgcagtcatga

SEQ ID NO: 13263 - DNA, 234 bp, Zea mays
  Peptide Sequence Number=SeqID_56638
atggggggtccacccgtcagcctcttcgtcgcactgtgtgcaccgcgccggctgtcaccaccagttgggccccagtcaccaggtcgacccttctccccctgttcctttccgaggctcaccctggtgtcgcagacggtccgccgcaagggcccggacggtccgagcattggtgtttttccagaaaaaacttctcctgtccggaataatctacggtattccggacagtcgacttag

SEQ ID NO: 13264 - DNA, 1059 bp, Zea mays
  Peptide Sequence Number=SeqID_56639
atgcctaaggacgcgagtgggccacgccttcgcactctcttcatgcattgcgcccttccaccttccgagcccccggatggggagcgcccgcgttgctttcgtcttgccgttgttggaggagcgcaacttcacagaagttggcacctttcagccatcgctcggcttcaaggattttcatcaggcagcccgaccgcatcccctcaccaatggtcacccaagacggtgaccaccagttcgattgtggagagaagcaagccgggttgcggcctctgccccgccctcagcttcaaggatcttcatcatccttgctggggcggagggcaagctgagccggagctctacctctcgcacgggtcggtgggccaccttttccttcagcattcaggggagagggcgcccaccggcctagcagagggggcggacttcgacaacgtggggccggtcggccgtgagcgtcgtcagcttcagcacgttgggctcgctggctcagctggctctggctcagcttccggtgccccctcccgctgtcgggcggagtgtggctatctagccgctgtacgggcggctgtcgcgccgcgcgtacagagggaccgtccaagacgtcgcgcgctactagggcggcgttcgtgttcttgggctgtcctgcccgtgctccggcacgacgcctccgcacgaaggtcggtgctcgcccgtccgggaggacttgagtggggatctgccggtaggcaggtggctgccgtcgtcggtgctgaggtggtggcagctggagaagtcctcgtcgccgacgagatcgtcggcgccatctgcgctccgggcctccggctctttggctttgatagcttgtcctcgcccctcgagtggggacgtgggcgagggccttgtcgtagcagcgtctgccctgaggtcatcgctgctgctgtttggccgcccggagcggaggtcgttgtcgctgctgcaggagtgggcggcgacgagccacctggaagttgtcgtcccgcaggccctccgatgtggaggctgttcatacccgcgggagtggaaccagagttccgtttgtaa

SEQ ID NO: 13265 - DNA, 804 bp, Zea mays
  Peptide Sequence Number=SeqID_56640
atgaatgcgttgtctcgcgagggctgtagacactacgaggtctttgaccaatcagacgagagctttgagcgcgagatcttcaaagccaaagaccctgttgtgaagcagtcagcaggggcactttttgataggatgtggggggcgcatggtcaggaggctgtcagggagcgatccgactgggcgagagagcagatggagcgtgccgaggacgtccaggaccttggaggtctggtcggcgcacagcccgaggctgcggagggcaatccggtgttgcccttggataacggtgaaggcccctcggccatgcccgtgcctgctatggccggcgaagaccctgcgtcggcccctgagccgacggtcgaaggtgccccggaggtggtggcagagccggcagtcgaagaccccacgaccgtggtcgtgccttcgcaggttcagggttttgggcctacgcacgcagccactactaacaatgctaattttgtggcggctttgaccatggttgctgaaaatgattcggatgattccgtgtctaagttgtttgagtctgatgattctgggagttcggttgtgtggacggaagagtcttcggatgaggacttggattattttgcggccttggatgtggctgcggcggaggcttctccgcgtgtgatggatgctgaagttcttcctagtccgagtgctgggcgtaggcggcgaagggcggtggcgaagcggagagtgagtgaggtggaaggtggtcgtcttcgtgtggacggggctagcaagcgggaattgttgtcctcgccggctgggcgagtgtag

SEQ ID NO: 13266 - DNA, 339 bp, Zea mays
  Peptide Sequence Number=SeqID_56641
atgacgcatttcctcaccggcttcatcaatcttcctctaaagatcggcgagacaaagcatcttttctttcttcttctggacctattgatggatggcttcgaggtccctgatctcttggtccaactcctcctcctgagtggctgcaatgcagcccctagccctgatgacttcttcggcggcatgacgaagatcacgctttttcacactatgcacgccttcgtcttaaagctgaagcttcctatgacagtatactatactggaaaacatgttagtcgcgtttttgaggaccttcagaagatgaaggcccccaacactgttcttgacctgttgggggtgtga

SEQ ID NO: 13267 - DNA, 681 bp, Zea mays
  Peptide Sequence Number=SeqID_56642
atgaagcttctcgagccctcagacctagcgcaacctaaccgaaaaccccgaatcaccgtcgtcggacttcttccgctcacacgcgaacgtggaccagattgcaacctcgctgacggagagtacatgctcatccctgagcaaggagttgacggtttattccgatttaagtgcgtcgttgcctctaaggcgagtcttgggcacttaagctggaataattcggacggttctgccacagctgatgacttcacccacccctgccaatggaggagacacccgtttcagtttcgactaccttgcccacgagggttttccctctatcttgtggaggtgctctgctccgccggttaccctacaccccctctctacacagtgcagttgtacgaggagcatcgggtgccacgttgtcgggtttggctaactctgaaagctcaccctctacagcctggatggcgttcccttgattccgagactatcgggtttagggcggacgacaccactaaggccgcagcactaaagaccctaacaaccttctgcggataccatcccttggaaatggtgatgcacccactgggactcttccccgccgagaagagggatgaccccatgtggtgcaacagagtgagccacgtgaaggacgtgtgggccatgcatcccgaccatgttaggaggatcactgtttag

SEQ ID NO: 13268 - DNA, 477 bp, Zea mays
  Peptide Sequence Number=SeqID_56643
atggaggactattttgttgggccgggcgagggacaaatggttgttgtcccgcctttggtggtgaccacttcgccatcggtggtggtaagggcgaaggggaccgcgcaggacccgtgggccgccttctgcgccagcagcgagattctgacagccactaccggtaaggacgtgacgggcacgatgtcccagcggctgagggatgcatcgcagcggctgtcgcagcagctgagtcaagcggccgacttcgccgaccgtgttgcgtctggcggcctcactgtggacgtggctgccgaagttgacaaacttcaggcgcagcacggggactccgtccgggagaagtcggttgcggagagcaaaaaccgcaggctggcggagaaagtagccgccttggaggccgagaagacggaactccggcgccagctggtggaggaaaggaaggaggcgaaccaggccatcgctaaggcgcaggctgcgtag

SEQ ID NO: 13269 - DNA, 1110 bp, Zea mays
  Peptide Sequence Number=SeqID_56644
atggcggcggcagagttacgaccgggtgatatggtggaatttggtgtttcgcggatgtcgtcggtccgcgtgcaagatatgcaacatttgggatattttagcggcggggttgggcgtgtcccgggggcagaggagaagttcgaagtccaggttcaccagctgacacctaacgctgtggtggctctggcgaagtacgtctgggcaacgacttcatatggcggtcagccttcggtggaagtcttcgccaagcagtactgtctgcactggcagaagagaaaaattggacataagatcgcacaatttggatcatgcactttcacgccgaagtccgggaagacttcgatggaagtcatggagctggtcccctgtgcccgtaataagtggggcaactggtgggattactggttctatgtttcagaggccgaagtcgaagaccacccagggctcctcgcggccattatgtgctctcatcattatgtggcatacccgccatttgaagtagcggaggatgatgagaatgaaggggcccttcggatcgctgcccgtacgagtagtgggcgcgatctagttgaggaattcatcgggggtctgcggagctgggatatccgtgggtccaatgacaggttgaatcgggtcttcgaattgaaccatttgtcgtacggttgttatcccggggaagacgccgccgaccgccacaggaagaaaccgatgggcgggaccgaggaagggccttcgcaggatgctgccccggcccccgggggaagtgggggtgtgggggtgtctgataattttgctgtggagttgatggggacattcgtggccccccgggggaaggatgtcttcgcccgagctccgggagtcttaggcgtgaatgctggagtgatgaacaaggaccgtcaggacgctgcgcagaagcgccgagcggtcatcaggatcgcagatcctaggcgtgaagcgaagaaggagcgggggagcgcgaaggctgcagcccccggcagcagccagccaatgccggctgcgaaaccgaccgcgcccggatccagcaagtcgtcggcgagcgcgaaggcagccggcgccggcgggagcaggcctccccggtcgaggctgtga

SEQ ID NO: 13270 - DNA, 183 bp, Zea mays
  Peptide Sequence Number=SeqID_56645
atgctttttcatattgtgtacaacttcattccgagttcaaagcttggtggagctggtggtggtggtggaggtagtggaagattgggagagcataggtatccagctactatttatgtgggatataaaccgaacaggttgaggtggggcatagaaaacaacgatacatcagaatttggccattag

SEQ ID NO: 13271 - DNA, 303 bp, Zea mays
  Peptide Sequence Number=SeqID_56646
atggaggccgggagggagtcagtggatagaaatgcactgccgccagcagggggctgggcgaggcgcgggcgagctcggcgagaacccggcataatcggccgcgtgagaacagcggactccgttgagatgagtatggagcaaggagagggtgatgacagggcggccccacagcccagatgggtcgagcgcgtgggcgagcgcgaaggggggagaggcgaggtggccggagtcgagcgtgagggaggtggaagtcccgcggccttcgtgttcgtcccgcgcccaggtcaggtgcgcttgcagtag

SEQ ID NO: 13272 - DNA, 1548 bp, Zea mays
  Peptide Sequence Number=SeqID_56647
atgacgactcaaggaggtttgcagccgacaagcaatgaagctaatatgtgcaccaacgacaatggtagccaacttggtacacggattgtggacgagattatggccgggaagaacgtcttctttgatcttcctgacaagttgactgtaaatattgataaagcttatgttgccttttacaacgtggtgtacataaaatcgaaacttggatattctgggagggacttcttgttttacaagaaacgatgtggcattgatcgatccaggctattggcacttgattacatccaccaagaagaggccatgctgtctgataacatggatgagagaaaaataagttttgtgctcacaaaagatccacccagtgatctagaggtaagcataactcccatcaagcgtccaaggcagcgaacaaatgttgatgaagaaactatagaagtgtcgattgatgcatataaggagtggcttgcaatactacaacatgataatccagaaatggatgttattggtatatatgtagataacgatggagtctttaaaaaggaggggcgtggtacccttaagggtatagcagcagccaccaagcgaatcaagaacggtgatcacaaacttaagattgaattttcatctaagcttggaggtcctgtaggaccaaacgctcgcacttttgtggatgaaatcgtattgtttacaaagaaaaaggcaccactcattggagtgaaaaagtggaaagatatagagctcaatgttagatcttctatagcctctgacgtactgcgaaggtgggagtttctaaccaatgaggacgcgcatgaaaagatctggtctattgctaaggagagatacaaaggatggcgatcaacgttaagctcaacatacaaggcatacaatagttatgctgaaaggatgaaaaacaagcctgaagatgtagacatcgtcgagtggcattacatgatgttgtattttggatctgagaaattccagaaaataagcagccggaactcggaaaaccgtcagaaacaaagaacgaagcatataatgggttctagaactttttcccaaataagctttcaacagagagatccagaaactggtatagaaccaaccaatctatccctttggatgattactcattgtaaaaatgatgaatggtcggaagaggcttcacgtggcatttatgagaaggcagctcagaaaattgttgagaaaatatatcaaacagaaagatttaagctaacaagagaagaggaaaatgctattttccaaacaacattcaaggaaacaacaggatgtaaggcaaacagacttcatggtcatgggtacctatcaagatatccaacaagaagtcaagtgatggaatcaaagttcctcgaacaagctcgtgccacggttgcaacaaaccaaaagaacattgaactcgaaagtcaggtccagttgttaaatgaaaaacttgcgtgtgaggttgcagaacgagaaagaatactacaggaaaaatgcaagcactgcaagaagaagaagaaagaaaaagacaagtgcttagagaagaaatga

SEQ ID NO: 13273 - DNA, 159 bp, Zea mays
  Peptide Sequence Number=SeqID_56648
atgttgaagaacttcggcaatccaaggaaagctgaactatctcagccgccagaaccgtacgatcccctagccgatccagaaatgaaggaatccattgtcgatgaggtcgtcaacaaattattgaacgaagttgcagagaaagtccttaaagaggaatga

SEQ ID NO: 13274 - DNA, 183 bp, Zea mays
  Peptide Sequence Number=SeqID_56649
atggcagtcagggtcattgaggcattgtacgccaaggcggtgagcccctttctgttgacggggaatcgatggggacggttgatgttctctggaggatatggttactggagtgacttggtcgtccaccttgccactaggttggacagtcgagtgggacactaccacaacaggagaggagcatga

SEQ ID NO: 13275 - DNA, 204 bp, Zea mays
  Peptide Sequence Number=SeqID_56650
atggtctcccattccggttatggtgggtacaagtgcggtcactccacgacggcagtcggggtcagtgaggcattgtacgccaaggcgaattttacaggttctctggaggacatggttgctggagtgacatggccatccatcttgccacctggttggactgtcgagtgggaccctacctcggctgaggaggagcatgaggagtga

SEQ ID NO: 13276 - DNA, 996 bp, Zea mays
  Peptide Sequence Number=SeqID_56651
atggatgcccaagtacttggaactataagtcctgtgcgtccgacaacctggggtccagaactagagaagcgatgcttgtctcctggggtggtctggaggcgtgtagccactcagcctggtcccgtaccgtgggcctgcacactccactaccctgcggcaggagtcacgctggaagttggctccgagcaacctcaccagcggcggcggctacctctacatcagcggatcgccggcggcagcaaccacctctacaccagcagcgacaacgacctccgctccgagcggcttaccagcggtggcgaccaccccaaggaggaagaagcgagtcaccagcccgcgtggagggtagggccccgacttggctcgccccccactccagcgaggatgatgaacatccttgaagctgaagctggggggaagccgcagcccggcttgcttctccccaccgcgaggctgatggcgcaccccatctgggggcccagaaggtggaagggcacgaaggatgcaaaaggaccaaggcatgactactacccgaggggtcaacccctgtttaaaggggagcggtcaagaatgctaaccgccacgcaggaagcgaacaactgccccgcggttatacgctcccttggcttcgcgccagtcggcggtccaacatgcggacccaggcccacatgtcatgcaaccgacgcgccgaaccggtgcagcgactcgaggcaccccgcgcatggctcaacagtgatattaagtacaaaggtcatgggccagtcagccgtgggaacggacgtgacagtcggcgtagccataggcgggccggtagtaattgcaccaacaggagcgcaggagcagcaggcagatcgacaatcaaactctggccccacctgcaggctcgtatcctcccctgaggcgggcccgggggccactgtcagtaccctcgatcaggggtaccctctcctaaagcatgaagacgccgcatccgtacaacacctcaaggccacgtga

SEQ ID NO: 13277 - DNA, 474 bp, Zea mays
  Peptide Sequence Number=SeqID_56652
atgacggtggcaggcgcgcgggagcagcggtcacgtcgtcatccaagctcacgtcccatccgggggcagcaagagaaccccctctcacggcgtgaagacaacgcgcccgtgatccgttcctcgaacggctcgcgcacgcgcaacggctgccccgccaactactcgccccgtcgcattaactccgcggctggacaggcggcgcttctggcaggagcagcaggcgacgcttcgccttcgccgaaacaaccgcgccaaaaaagaggttcgaaaggctggccccccgaagggttcaacaacgcgcctcagatcgcgtgggcccgacacccactactggtcagaggttcgaaggccggccccctgaagggttccacggccgcctcaggctactcgggctccgcgcccattactgatcaggggttcgaaggctggcccccgaagggttcacagtcgcctcagacgccgagcgagggatga

SEQ ID NO: 13278 - DNA, 459 bp, Zea mays
  Peptide Sequence Number=SeqID_56653
atgggcaagagtaagaaaggtagcggttcttcgcctcgctctggtgacaagtgcaaacgtgagccgactcctccctcggaggacttcggcaactcggagtactcgaaggaggagttctccttcgagtccgagggatctccggcccccgtctctcccccggcgtcgtctgatgattcagacgactcccaggggattgccgcggaggtctggacctacatccgggccgtcgagcgcgccgggctcgagggctcgaatgagttggagtactcctcggatgcggaggactcctcagactcgtccgaggagggcagcggtggcgatggcgacgacgacggaggcgatggtgacggcggcgacggcagcggcaagggcggtcacgacagcggcaagggcggcggcggcgatggtggcagcggcggcaagggcagcaacaggggcagcaacgaggccagtggctag

SEQ ID NO: 13279 - DNA, 54 bp, Zea mays
  Peptide Sequence Number=SeqID_56654
atggcgtccaagccatactatcttcggaaattcaactatcaagcaaaggtttaa

SEQ ID NO: 13280 - DNA, 276 bp, Zea mays
  Peptide Sequence Number=SeqID_56655
atgtccggtgcgctagccatgtcaccaggccgttgggattcgaccgttggagcttttgacttctgggcccgcctggctgtccggtgtgaccgttggcgcgaagtagctgttgctctgctggttcatcggacagtccggtgtacaccggacatgtccggtgacgagtttgacttggagtcccctggtgcaccggacactgtccggtggcacaccggacagtccggccggtcagtgaaagggcgaagtgactgcggtcacttcgaccttgacgactga

SEQ ID NO: 13281 - DNA, 342 bp, Zea mays
  Peptide Sequence Number=SeqID_56656
atggacctcgccttcaaggaggagatgcttgagaggcgggataagctattggccgattatgagctcgaggaagaggagaaggagtgggcgctggaggagaaagagcggacgctaggggagcggatccttggcgcccacctagaggccaagggtagcagactctgccggtcggtaatagagtacatcctgacgtgcctctggagccacgacctggccatctccttagtgccggtgatcgcaggtccggtggccgacaccgaagacgccgcccgggagggcgtacaagatgttgtggatgcggtggccgagcgcttccagcgggatcccgctgatgatgagtag

SEQ ID NO: 13282 - DNA, 642 bp, Zea mays
  Peptide Sequence Number=SeqID_56657
atggaggcccaattgctcatgtcgcttcgtcgccttgcagcctctacacctacaggagctgctagttctgtgactcagtcctctgcatctaaaggttttgatgttggttctctatcgtccactaagggaccaccttccatttccatttcagtgtccatcgtccaagctcttaaaatgatgatggggtttaggccttttcttgacaatccgtcaacagccttgctggccctgtcccttcagccctcaaaggatgtttctccaagctgggatgagagggtaccactaaacaatgggggttctctggtcatagaacagactgaagctctggtatcagttgatgtgaatggtggtcacagtatgtttggtcagggaacttcacaggagaaggctattttagaagttaatcttgaagctgcaaagcaaaaggtcgttgtggatggactaaaacgccaggaacatcatggtgtgcctgatggtcttcatatgctcgaactaattgttgagaccgcgaaggaggttgaggacgagcaaaacgacatcgaggtgaaggacgataatcttgtgattgcccagaaagtggtcctcgatggcgagctaggcatctcgggctgtgccaccacggatgcaaaccatgtcttgtag

SEQ ID NO: 13283 - DNA, 573 bp, Zea mays
  Peptide Sequence Number=SeqID_56658
atgccgacagcagcccacgcgtctgcgccggtcatgccaaagggacggcgggtcgagccggaaaggtcgcagcaacgtggatccggccgggaaggccgcgacagcgacggatccaacgaagacgatgaagggggtctcttagttatctcgtgcccaacaggagagtgcgcaacgcaccaaggaggacaccaacctggtcgccaaagccaccacagaggatgttgcgatacacatgtccgtgtcctagctgcaaccgaagccctggataaggtacaagcagctgccactgccctggagtgtgcggtcactaccgctctgaagctagcgcagcacctcatcaccttctctgatgccgaggtcactaaggcctccgtcatcgccaacctccacgagcaggctatcggcgtagaacatctgatagctcgtttcggtcaccctggaggcctggaccccctatccaccaactaccccaatggcacgatctcgtcctcctcaccctcaagtgctacgccattgatagccacgtcctctcctacattgtctacgcctccacctctatatggcagcgcatag

SEQ ID NO: 13284 - DNA, 510 bp, Zea mays
  Peptide Sequence Number=SeqID_56659
atggggctcggtgtatgcggctcgctctgccaagtttgggttcgccccttggggaggagtgcggtggttatgagattgatggttctggttatgattatggtgctgatggctcgtcttaggcacactgcacgaaagtccgtcatccccttcttaccctcccgccttgctgagcgtccgcttcgccgtcccgtggctagtcagtccagccacttggagaggctgcaccaccgcctgcatgaggagcaagagcgtcgacgacaggagcaggggcagcagggctcttctttctcgctccagcaggagatagagtccgtgaggagctgctcccctgtgcttcctctggaggcgccccctgcaccaccactgggcgccccagcctctagagtagctgccggaggagacccagacgacggatgtggtgacgacagctcgagccacggcaccgacttttctgctgaccatgagccggaaggatgggttgctttacccatcactcgcgacgctgctctc

SEQ ID NO: 13285 - DNA, 141 bp, Zea mays
  Peptide Sequence Number=SeqID_56660
atggggctcggtgtggcaatgagattgatggttctggttatgactatggtgctggttgtcaacattgcaaccactgctcaggagaagatgaagccgtggaaaggaaacttccaggagttcaagaataccgacgagttctag

SEQ ID NO: 13286 - DNA, 435 bp, Zea mays
  Peptide Sequence Number=SeqID_56661
atggcagatttagtcgctgctgccatacaccagatgcccagatcttcttcaggccctttgtcggcgaggagtataacaagccagattcttatcaaagctcgtgatgttgctaggagcagtgctcggaatagcttgtctgaaaggaataatttgctatgggttactacggtctcaaagaatgttgaaggcaagcacgtaccttttggttttattgatctgatgttggcacatttcataaaagatgactatggtcttgaaagcctatgctcgacagtaaattgtgagatatttttgccacgaccgcgtgatccgggaacgatcgttgcatctgcagaacattcagaaagcgtcgtctctgtcattacgttgttgcaatacacagtcattgcttgtgcaaacatatattttagtgatgccaataaaaatgtagaataa

SEQ ID NO: 13287 - DNA, 282 bp, Zea mays
  Peptide Sequence Number=SeqID_56662
atggccgcctgcgtgctgggcctagcacctactctcgttagcatgtggcccctccggtgcgctaccgcttgctccgccgctacagaggcctccaccacggccgctcatgcgtcgcgtcgcggcgtgggcgcggtcagctcggctctgtccggtcttcgaggaaggcactccttatcttcggcgcaattcatggatggtcttagaagcaatcttcaagtggaaaggaacctgacactttccccaaagtcaccaatgtctcgtagtggtaatttctatttttag

SEQ ID NO: 13288 - DNA, 606 bp, Zea mays
  Peptide Sequence Number=SeqID_56663
atgcacgtggtcggagacttcttgaagtgctggatcgcgctgctgcagcagagggcgtgcctatgctgctggttcaccagctcaaacaacatcggccgggtgcagcgcgggccagggaccgacctgtcctgggaggagctggaggttctggtgaaggggattactggtgagtccttcgtccctgagtctctaatcctccccgagggcatccctgcgctctgcgacgatgttgggttgaggacggtgattttggccacgctgccgaccctcgacgagctcggcgtcgcggggcaccagcagcaacaacaacaacagcagcagcagcagaagcagcggtcacccaacttccagggtcggtggaaggtccagggccccaaggcttcctccccctctgctcccaaggtcgtgcctcccccgcccccagctgctgccgccgagacagcgctaccgggcccccaagctcccgctgggggtccggcagcagcggcgccagcgccaagcggtgccgcagcggcggagggggtccccactgctccgacggctggcacagcctcaatgacggcgatgtcgtcgagtacaccgtcggcagcggcagaggaggcctga

SEQ ID NO: 13289 - DNA, 339 bp, Zea mays
  Peptide Sequence Number=SeqID_56664
atgtttgaaatgcgggagaagctgctggtcgatcatgagctcgaggcagaggaaaagaagcgggcgctggaggagcgggtacgccagttcgaggcagcgcaggcagcacaggcagcaccgggcccccaggcggtggaggcgatgcagaagacacttgaagatctccaggcggagcagcgcgtcggggtccagcgcatcgccgcatggatcggcgaggcgagtacgacactggtgccgctaggggtgagacccatcccggtgtcggagctgccgacgtccatctccgacgcgctcctggtgctggactccgccgccgaccgcctccgacgcctggactag

SEQ ID NO: 13290 - DNA, 174 bp, Zea mays
  Peptide Sequence Number=SeqID_56665
atggagagtcatgatctccgggcagaatgggaatcacggcttgtgggtggttatgagactgttgaatctgattatgattatggtgctggttgtcagcattgcaaccactgctcaggcgaagatgaagctgtggaaggagacttccaggagttccaagattacgacgagttctag

SEQ ID NO: 13291 - DNA, 408 bp, Zea mays
  Peptide Sequence Number=SeqID_56666
atgacggaggtcgatgcttgccgaaggtgttcgaaactcaaaaagtggaaaagagtaggaatgatgttgggttacaaatatacctttgacttgaaagaagcttgcgatccagaaatccctgttggaatatggtgtccccagaaagctgtcttgaattcctcccatgtcacctcatggtcagtaggtaacatggcgcgaaaatggtcccaccatgtcctagaaggaactcttgataggttgctatggctggaggatgctgcagctggcctccaccatactgctgagggtggggctgacgctgcaatagctgccacagaatctcattctgctgagccattagctcctgcaccgtgggagctggaggaggtggtgggggaacctgctcgttctgcccgcgacgctgcctag

SEQ ID NO: 13292 - DNA, 648 bp, Zea mays
  Peptide Sequence Number=SeqID_56667
atgacttcacccacccccatcaatggaggagacactcgtttcagttccgactacctttcccacgagggtttcccttccatcttgtgggaggtgctctgctccgccggttaccctacacccgctctgtatactgtgcagcgatacgaggagcatcgggtgccgcgttgcagggtttggctgactctggaggctcagcctctgcagccgggttggcgttcccttgactccgagactattgggttcagggcggacgacaccaccgaggccgcagctatgaataccctgacgactttctgcggataccatcccttagagatggtaatgcacccactgagactcttccccgccgaaaagagggatgaccccatgtggcgcaacagaaccctgcagagcgatgccatggcacacctcactaaccttgctcagaccactaagctcacccttgacagtcgagaggacttcgtggtcgacttgtcttcggaattggtggagaaagacctacaggtggaacagttgagccagtgcatcgcaaccctggagcagcaggtggagatatgggataacaccattgatatcctagagatccagctccatgatatgcaagaggaactcgaggaagccaacgaccacctagagatgcaccactag

SEQ ID NO: 13293 - DNA, 682 bp, Zea mays
  Peptide Sequence Number=SeqID_56668
atggggaagcctgtcccatcactcctcatgctcctcctcagccgaggcggggtcccactcgacagtccaacccggtggcaagattacaatggatcaagcagtctcattagctgcgagaagcagacgattcgaatcgagtttttttatccttgcaagaacagggctcaccgccttggcgtacaatgcctcactgaccccgactgccgtcgtgcagtgaccgcacttgtacccaccataaccggaatgggagaccacgtctcaggtcgcgtgaggggcaaagtctactgccaggtcctctggtgcaggctctggtgctggatctggggctacctcctgagcagctccttgctccggcacgaggacatattcttcgtcagcaaggcgggtgttctcgtcggcggcgagtgtaccggccaaaccacggcgatctggttcaatccaagggcacgcggggttatgaactccggcgaccgtggactggcctctccggcgaagcaggcttcgattcctcgctcggggagcttcaccgaggcgcgggcgcgggacagggcgccggctggccgttggcgcgacgcggggcacgcgggggcgcgcgcgggcgtgctctggcgagctcagagcgcgtcgaacacgtggctcgttgcttctgcccatgttcttccctctgctgagcggccaaaac

SEQ ID NO: 13294 - DNA, 420 bp, Zea mays
  Peptide Sequence Number=SeqID_56669
atggagggggagcagcagcaccctcggcgtcaactccaccttcggcgaagtccgaccgagcctcggatagcaacaagggcctccagatcacctgccgtgacggtggagaaaggccccgggtcgcgcggcgaaacaacggtcacccggtcggccatcaccaagcagaagaggtggcggcggagaggacgagggaccgggaaaggggatactccgaaagggatccttctccgcgaaggaagcgggccccgagcccccctactgatcagaggttcgaaggctggcccctcggaagggttcaacagccgcctcagagcactcgggctccgcgcccactactggtcagaggttcgacggctggcccctcagaagggttcaacggccgcctcaggccactcgggctccgcgcccactactgattag

SEQ ID NO: 13295 - DNA, 324 bp, Zea mays
  Peptide Sequence Number=SeqID_56670
atgagggaagctagaacatcaatcaaagaggctcgagctaacctgcagaaggctggccacgacgcggcggccaactctggcgaggctatctggaccgaccgtgaggcaagtggttacggcggccagcccttggtctcatccgcggtgaagatcttttcaccccaaagcgttatccggccaccaaagggcacgaatcgcatcgccgacgcaaatccaggcgcggtggtcgccggcggcaagactcctctacccttcttcagctcaccgcggtcgcttgacgtctggctggccaaccctctcgccctctactgcagtgccatgtag

SEQ ID NO: 13296 - DNA, 486 bp, Zea mays
  Peptide Sequence Number=SeqID_56671
atggccgatgggggtagggtatgtcgccgcagtggcgggaggcttgccggcgtcttcaacgttggtgtcttctcatcgtctccttcatcacaccacctccgacgaagaacctggcaaaccccggacaaagaacgcagcgaggaagaaatgctgggacaggttttgcgaagactccgaccagcggtggcggctgaggtggcgaggggctactccgccgcggcgaaggagatgactgtccgtgatgcattgaactctgcattggatgaagagatgtctgctgatccttccgtttttctgatgggagaagaggttggagagtaccaaggtgcatacaagatttctaagggcttgcttgataggtatggtcctgatagggttcttgacacgcctatcacagaggctggttttactggcattggtgttggtgcagcttatcatggtcttcggcctattatagagtttatgacatttaatttctcgatgcag

SEQ ID NO: 13297 - DNA, 450 bp, Zea mays
  Peptide Sequence Number=SeqID_56672
atggcgcctcctgttgacgtggctggtctgcgccctaggttgggcgatgtggaagctcctccgaagccgaggtcgagtctgtctcccgtggctgaggtcgagtccgagcccctgggtggagtccgagccctggggtcgggcggagtggagttcgtcgtcttctgggacttagcgcgagtccgagccctgggtcgggcggagcggagaccgtcggctgaggccagggtggagtccgagccttggggtcgggcggagcggagttcgtcgtcttctggggctgagcccaagtccgagccctgggtcgggcggagcggagttcgctgtctttcggggctgagcccaagtccgagccctgggtcgggcggagcggagttcgccgtcttccggggcttagcccgagtccgagccctgggtcgggcggagcggagttcgccgtcttccggggcttag

SEQ ID NO: 13298 - DNA, 1272 bp, Zea mays
  Peptide Sequence Number=SeqID_56673
atgtcttcgcgcttccttatgcatcgtgtctttctagcttccaagcccccgaatgggggatacccgccgtctttccgccttgtcgttgggggaacgcaactctgcgggagttggtacctctcagccatcgttcggcttcaaggattttcatcatacagcccagttgcacccctccgccggtggtcacccaaaacggtgacctccagcccctggatgaggagaggcaagccgggctgtgatcttggtcccgccctcagcctcaaggatgttcgtcatccttgctggggcggggagcgaggcgagccggggctctacctcccgcgcgggccggctggccacctcttcttccagcttctggtggtggcaaccatcctccagctctgcggaggagacgtcctccagccatgccggggaaggcgaactgttgctgcccagctaggatgcaacattccgccctcttcctcgctttcgtggcgagaatgggagcgaggacctgccggtgcgctttggagcggcccgctctttggctttaatagctggttcgtgtcccttgagcgggaacgcaaacgagagccctccggctgccgcgtccgtcctgagaccatggctgctgctgtagaggtcgctggcgggtcccccagtgctcgtcgccccgcaggctcccggtgtggaggttgtacatacccgcggggacggaaccagagttccgtctgtaatggcacttcgaatgccagtgtttttgttcatcgtggctgtcgaggcctgaacatgtatgtaattccagcacagagccatgagtccctcggctcggtcagccttgttgcccgaggttcctcttgctcagttaaaggaacccctcggccgctcttcgatgagccgaggccaggggtagcggtgtcagcgcaaacaaaggcggagttggctcgaaaagaagacctggtcggcctgagcctggccgggtcgtccgttagcgggaccgacgccggaactgacctgccgaggcctcgggtcgggctgatgtccttggaggatagctggccgaggccccggggtgaccggccgagccgcctgctcgggccggattctcggagaagaccctggcggcgatggcccgggcttggtgatgacgttggtcttcagagcagagacccttggaccacgtcgccgtccgaggctaggtcaggcctcgccaaaggtgttgtcgacgccgagggcgctgctgctccctttagccgtcaggatccgagcctgcaggatcggattatcttgtag

SEQ ID NO: 13299 - DNA, 306 bp, Zea mays
  Peptide Sequence Number=SeqID_56674
gctgcagagatactgtccaaggaaggaatcagtgctgaggtgatcaaccttcgatcaatcagaccacttgatagagctgctattaatgcatctgtcaggaaaaccaaccgattggtgactgttgaagaagggttcccccaacatgggattggtgccgagatatgcatgtctgttgtagaagaaagcttcgcgtaccttgatgcaccagttgagaggattgctggagctgatgtacctatgccctatgctgccaaccttgagagaatggctgttccgcagaaattctaccagtggctaattgtgtaa

SEQ ID NO: 13300 - DNA, 1020 bp, Zea mays
  Peptide Sequence Number=SeqID_56675
atggcggcgcgaagggcaggaagggcggttctctcttctctggctagatctcttgggttccgaaaacctaaggggcaggcaggaagcagagcaaagaaccatcaccggaccctctccggggtatataaagaccaaggcgaggacggtttcaacgttccgcctggaccggacgcgggattaaaaaacgcgaagcgaaacggtcgttcctcaaacggctcgcgcacgcgcaacggctgccccgccaactactcgccccgtcgcattaactccgcggctggacaggcggcgcttctggcaggagcagcaggcgacgcttcgccttcgccgaaacaaccgcgccaaaaaaggtacgccgcgtcgttcggtttcgctccgagcctccttaatgatcaggggttcgaaggctggccccccgaagggttcaacagccgcctcagatcgcgtgggccctacacccactactggtcagagaggctcgggggctgctctcgcaaacccagctccggccaaaccgttgacagcgtcaacataccagcccgagaacttgggccccgaccgtacacccgggctacagccggctcgcatgagggaacaactagaccagccgaagcattacgcaaggcattaagacctcgaaggagtgaaaccactcctccgaggcctcgggggctacacccggcgggtgcgctcgcgcgcacccaccggaacaaaatgcaaccgagaaaggctggtccccttgcaaaaaagtgcgacggaagcctccaagcgagtgctaacactcccttcgaggctcgggggctactgtcggggaccataattaggggtaccctcaagacgcctaattctcagctggtaacccccatcagcataaagctgcagaggcctgatggggctcagactcgggctaagccccggaagacggcgaactccgctccgcccgacccagggctcggactcgggctaagacccgggagacggcgaactccgctccgcccgacccagggctcggactcgggctaa

SEQ ID NO: 13301 - DNA, 198 bp, Zea mays
  Peptide Sequence Number=SeqID_56676
atgatgccagtcggcgtcggtgtcatttgctggcttgacataatccggtgcccttacccaaacagcactaacaactactgtactataagagtgaacggaacggagcgtgactgtgagagcgggattggaacggagcggctccgtcccattgattttttggagcggaatggttctggatctgaggagaatattccctaa

SEQ ID NO: 13302 - DNA, 636 bp, Zea mays
  Peptide Sequence Number=SeqID_56677
atggatccgaagggaagtaaccctaactgggatcgatggaatcagaaagagaatcctcaaggttcacagtcgtggaacaagatccgtaatcccagttggaggttgaagccgattattggaaaagctgagaccaaagaagacattggcgcttcgtctgctggtgagggaggtcacacagaagatcttgagaaggactttgggtttcacttcccctggggcaagacttggaaagcgaccaagtgtcacgctgggtatcttatgcagttcccttctcaagaaaaacttgatgaaatgatcaacttccctgaactgaaaatgaaaatgtcgggagcaaaaatttccgtttcacattggagttctcaggccaaaccaaaatccaaactgcatgcagtggataggcaaggtatggatgaccctgcttgtgaaaaaactggtaaaaaagccagaaatgtgggagacaaaatgaaagaagagcttggagtggaaaaagtgggtgaaccattgtctcatggcaaaaatattattcagaagtctgacttcgggattgtgaatgaagatttaaatccaatttctgaagaccctgtcaatgaggaggatgaatttcatgaaagtgaagatgaccttttaagttcttaa

SEQ ID NO: 13303 - DNA, 309 bp, Zea mays
  Peptide Sequence Number=SeqID_56678
atgtccggtgcaccaaaggactccaactccaactcgtcaccttcgggaaattccagaggcgactccgctataattcactggactgtccggtgtacaccggacagtgtccggtgctccaaggaagagcggcctcaggaactcgccagcctcgggaattcgcttcggctgatccgctataattcaccggacatgtccggtgtacaccggactgtccggtgtatctgcggggcaacaacacttcgcgccaacggtcacctgcaacagcaattaatgcgcgccagagcgcgcagaagtcaggcacgcgcgtag

SEQ ID NO: 13304 - DNA, 174 bp, Zea mays
  Peptide Sequence Number=SeqID_56679
atggagagtcatgatctccgggcagaatgggaatcacggcttgtgggtggttatgagatcgatgattctggttatgactatgatgctggttgtcagcattgcaaccactgctcaggcgaagatgaagctgtggaaggagacttccaggagttccaagactacgacgagttctag

SEQ ID NO: 13305 - DNA, 1158 bp, Zea mays
  Peptide Sequence Number=SeqID_56680
atggcgccggaggaggcgctgcgctacgccaagaaggaaatacgggacgccgagccggtgctcgacgaccccgacctgtacgcgcctctgttcaagaacgtctcccagttcaagaggagctatgaactgatggaacggatactcaaagtttacatttaccaggacggccggaggcccatcttccacacgcctcccctcagcggcatctacgcctccgagggctggttcatgaagctcctcaaggagagccgccggcacgtcgtcgccgacgcgggcaaggcgcacctcttctaccttccctacagctctcagcagctgaggctcacgctctacgaggccggctcccacaacctcaggccgctggccgcgtacctgagaaacttcgtcagaggcctcgccagcaagtacccgttctggaaccgcacgagaggagccgaccatttccttgtcgcctgccatgattggggaccttacacgacgaccgcgcacagggacctccgcaagaacgccatcaaggcgctgtgcaacgccgatagctcggagggcatctttacccccgggaaggacgtctccctgcccgaaacaaccatccggacccccaggcggccgctccggtacgtcggcggcctgccggtgtcccgccggagcatcctagccttcttcgccggcaacgtgcacggcagggtccggccagtgctcctcaggcactggggcaacgggcaggacgacgacatgcgggtgtacagcctgctgcccagcagggtgtcacgccggatgaactacatccagcacatgaagaacagccgcttctgcctctgccccatggggtacgaggtgaacagcccccgcatcgtcgaggcgctctactacgagtgcgtgcccgtgatcatcgccgacaacttcgtgctgcccttcagcgaggtgctggactggagcgccttctcggtggtcatcgccgagaaggacataccggacctcaagaagatcctgaaggggatctcgctgcggaggtacgtggcgatgcacgactccgtcaagcgcctgcagcgccacttcctgtggcacgccaggccgatcaagtacgacctcttccacatgatcctgcactcaatttggttgagtagagtcaaccaggtccaggttcagcttgagggatga

SEQ ID NO: 13306 - DNA, 393 bp, Zea mays
  Peptide Sequence Number=SeqID_56681
atggacgcggccgctggagggctctcgttcgcattcccgctcaagggacgcgaaccagctattaaagccaaacagcgggccacccccaagcgcaccggcagggaccgggaaagggggataccccgaaaaggatccttccccgagaaggaaccaggctccgagccccccctactgatcagaggttcgaaggctggcccctcggaagggttcgacagccgcctcagatcgcgtgggccctacacccactactggtcagaggttcgaaggccggcccctcggaagggttccacggccgcctcaggctactcgggctccgcgcccactactgatcaggggttcgaaggctggcccccgaagggttcacagccgcctcagacgccgagcgagggatga

SEQ ID NO: 13307 - DNA, 1158 bp, Zea mays
  Peptide Sequence Number=SeqID_56682
atgcaggcggcatgcaaccgcatcaagggggcgcaccctttcgacttcgacgcgtccagcatggaggcccagggccacacatcatgtaaccggcacgccggttactacgtgagagaaactgcaccgccactcgcgccagtaccgcgcctcctcgactgcggaactggtgccacgactcgaggcgaccctgcgcatgacccgacagtgccaaccgagcacatcggtcacgggtcaatcagccgcgggagaaggcgcgacggtcgatacagccagaaatgggccggcagtaatggtggtggcaggcggacggaagcagcagtcaagtcgtcagcaagctcatgtcccctcatggggcagcaggagaatcctctcccacggcgtgaagacgacgcgcccgtgttccgttcctcgaacggctcgtgcacgcacaacggctgccccacgaaccactcgtcccgtcgcattaactctgcggcaggacaggcggcacctttggcaggcgaagcagaaaggggatactccgaaaggaatcctcctcctcgaaggaagcgggccccgagccccctactgatcagaggttcgaaggctagcccctcggaagggtccaacagccgcctcagagcactcaggctccacgcccactactggctggcccccgaagggttcgacagccgccttagagcacgcagagcgagggatgaccctgggtacgttcgatacataaccaaggctccggctacgctcccgagcctcgggcgccataggaaactccgcctcgcccgaccccagggctcgggctcaacctcgacgctagacgacggactccacctcgcccgaccccagggctcagacacagcctcggcctcggaagacggtatccgcctcgcccgacccagggctcgggctcaacctcgacgctggatgacggactctgcctcgcccgaccccatggctcggacacagcctcggcctcggaagacggtctccgcctcgcccgacccagggctcggactcgacctcgacctcggaagacagactccgcctcgctcgaccccagggttcggactcagccttggcctcagaggaatcgccacctcgcccaaactcgggtccagaccggccacgtcgccaggggggccatcattaccctgcccctag

SEQ ID NO: 13308 - DNA, 336 bp, Zea mays
  Peptide Sequence Number=SeqID_56683
atggacttcgcctcgcccgaccccagggctcggactccgcctcagctccggaagatgacggtctccgcctcgcccgacctagggctcagactcaacctcgacgctggacgatggactccgcctcgcccgaccccagggctcggacacagcctcggccttggaagatggtctccgcctcgcccgacccagggctcggactcaacctcggaagacggactccgcctcgcccgaccccaagggtcggactcagcctcgactccggaagacggactcgacctcgacctcggaggagcctccgcctcgcccgacctagggctcggaccgaccacgtcatag

SEQ ID NO: 13309 - DNA, 1078 bp, Zea mays
  Peptide Sequence Number=SeqID_56684
atgaaccaaagaagagcttcagttgaatgtgagcatggcgaaggtgcatgccgaagccgtcaactttggcgccaaagggattcagcaatagagcaaggggacacacttcctccaaagtacattcgagctattctctatgtaaagccgaagttttcgcccggagctgatactacgccgccaggctcggcgccgccgttcccgtccccgtctccgagccgtgacgcccgccacgccgtcgccgagcccgagcccaaccgccaccgtctccgagctgggccccgtccccgagcgccaccgtctccgaggccaacgccgccgtccccgtccccgagcccgagggccgccgagcccatctccgagtgcgccaccgtccccttccccgtccctgagcccgagcacgccgagcccatctccgagtgcgccaccgtccccttccccgtccccgagcccgagcgcgccgccgtgcccatctccgagtgcgccaccgtccccttccccgtccccgagcccaagcgccaccgtctccgaggccaagcgccgccgtccccgtcctcgagcccgagcgccgccgagcccgagcgccgaatggaaaaagagccacttgacatggttgagagctcagttcgagtcatcgagacacatgttgacatcattcgcagtctagtgactgatggggttgtggatactagtgaaccggaatcagtgtacacacttaagaccactttgtttcaaattggagatgtatgcgacatgcttgagaagtgtgctctgtccatcaaaaagtatgctgactccaagagggctaaaattattcaagatgaagccctgcaatatgctgaagatgatgaagctgcagatgatttggaggaactcccaagcccagatctccttactcaagccgacatattggaaaaatattttggaattgatgatatcgatgaccccaagaagagattaagtcctgtagtctaccacctcccgttatttgtgggcttcaccgatggctggaaacatttggtgatagcaaacgaccttcgggttgaagacgtctgcgagcttgttaaggggccagacgatg

SEQ ID NO: 13310 - DNA, 1230 bp, Zea mays
  Peptide Sequence Number=SeqID_56685
atggtacagtgctcggatgtagatcagactgccagcaccggatgttcaccgccggcgacctcttcgccgggattcgtgctacgggcgtatgggttttgttcaccaggtaatcgtgcgtccagtgaaaccactcgtagctccgatcgtctcccacagcttcccaatttgggatttcccccaaaacggttgaagaacaccgcgaacccaagctcaccgtgggaagctctcctcagcttccgcatctctatatctccgatgttctataatgtctgcaagacgggtgaaacgttcctgatgaatcaacaagaagctcctacaggagttggagagtttctacgagattttggtgttccagtggtcctgtggcgactacttcaagaagttgggtatatcgaagcacccaagtaccagtggtcacgcactgttcttagaggacaaccatggtatgaggtagtagtgcgtattccagaacgtgctagaaagccatcttggccacattggatgttccatgctgaaggaatgactccttgggagggtgctcaggtagctgccttagaggtgctaacaaccatttgttaccagaaaagggaagaaatacaagccacatctatgaggttgttccctgcagttgccttaagtgacccatttgtgtatcaccaccaggcccgattattggaaagcattcctattgggcaggattctgttgaatcggcatctgctcgagttttgatggccgtgctagagttgcaacttactcgagggcacagtcatcaaaagtggcagcagttgtacactgggagttatgcaacatttaagatgatggaaatggccatgaatagggcttgtacccaggcacaagaacgacttgaggaaacaaaggttcaagcggaacagattattggactagagcatcaggtgacagaacttcagacgcaacaccaagctgatcagaatcgcattaaggagcttgagcatcagctaactaatgctcactctaaatcaaaagttttgagtcagcaacaagaagaaattcgcttgtatgttgttgctgttagagaagaccttaaggaaaccataagcttcataagccatcaggatcaggcgatcaaggaattgaatcgtgctcatccaatggaatttcaagtagcacaacggcttgtcaaccatctgcagcaagcagtgcataggctcaatgtttccttttatcctactcctgcatcagcggactaa

SEQ ID NO: 13311 - DNA, 2497 bp, Zea mays
  Peptide Sequence Number=SeqID_56686
atgatctactgtggatctatacatttttatatattttcccctaacagatttcctcggttcgagtgcatgatatgcagcagttggggtattttgggaacggcgttgggcgtgtcccaggggcggaagaggttcctgagcttgagggcgagtccaccagttgacaccgaacgccgtggtggccctggcgaagtatgtctgggcggtgacttcgtacggtggtcagccttccgtagaggtcttcgccaagaattactgtctgcattggcaaaaagaaagattggaaacaagattgcacaatttggatcgtgcacctatatgccgaggaccaaaaagacttcagcggaagtcgtggagttagttccctgtgtttgcaataagtggggcaactggtgggattattggttttatgtttcgggaagcgaaattgaagacctctcagggctccctgtggccgtgatgtgctcccattgttatgtggcatttccacaatttgaggtggcggaggatgatgaggacgaaggggccatctggtgcgctgcccgtatgagcagtgggcgtgatttggttgaggagttcattggttatggagtgtggcccctggcgcatggcttggtgctgggcgaagtatgcccccgccagatgcctactttgggccagcagctagtgcgaagtctggccttctctttggatctgcgcggccgagacccggccgcattcgttcgtgaagtggaggacagatcggtgaggattgtggggcggtatactccgaggacgaagagtctgcggagttgggatatccgagggtccaatgttcgcttgaatcaggtcttcgaattaaaccgtttgccatacggtggctaccctagagatgacgctgctgcggctgctgaccgccgcgggaaaaaaccagtggtcgtggctgaggaaggcccttcgcgggacgctaccccagccactaagaagagaaaaatagttgatggggacttgcgtagccctcgggggaaggatgtcttcgcccgagctccggtagtctttggcgcgaatgctgaaggttaccgggggtccatggccaaggaacgttccgattccccgcgtggccggcgggacatatttacgtctcgtatggcccgtgagttgaagatttttccttatggatggaatattgctgctgttgtatcggtaatggtggacaaggatcgtcaagatgcggcgcggaagcaccgggcaatcactagggtcggggaccctatgcgcgaggtgaagcgggcgcggggaggcgcgaagtccgccgcccctgtcggcagcaaaccaccgccggcagcgaagcctgccatccccgggcccagcaagtcttcggcgggttcgagggctgccacttctggcgcgagcaagccgccattgactgaacccgcgaaggagcgaaggccgccgtcgccggtgcgcaccgacaaagcagcggcgggtgggtcggatgcggggcagctggctattgtcccatctccggtggcggccacttcgcctgcggcggcggttggagcgaagagcacttcgcaggacccatggtccaaattctgcgccagcggcgagattttgttgaccagcgccgctagggacgtggcggccattgtgtcccagcagctgaagcatgcgaccgccttcgccgaccatgttgcgtcgggtgccttgtcttcggagttcgctgccgagaggcaacgactcaagggcaggatcgagcgcctccgagcgcagcatgtggatgttgttcgggacaagtcggctgcagaaaagaagagccgcaggctggtggagaggctggcggctgcggaggccgagaaggaggaccttaggcgccggttggcggaggagaggagggacgcaaacaaagcttatgctgaggtgcactccgcgcaagccgaggccaagcttgcgcgggcggaggccagtctcgcccggcaacgcaccgatgagatggagacaaggctcggcagcctgcgcgaccgcctggacaagacggaggcctcgacacgcgtggaggtcgagtggacgcatactcagcttgtggacgaggagctggaggtgctcccgaccattgtgacgggcctcatgtccttcgcctccctcgtcacctgcgagggggccgtgaataccttgtcccgcgaggggtgcgggcacttcgaggccttcgaccagtctgacgaaggcttcgagcgcgaaatcttccaggtcgaggacccagtgatgaagcggtcggctggggctctttttgataggatgtggggccctcacggccaagagattgtccgggagaggtctgacagggcgatggatcagatggcacatgacgaagaggttgaggaccttggtgatctggacagcacgttggccaaggcatcgggggtggagctggtgccgccatccgatgcaggagagggcccgtcgatgaccctcacgccgactggagctggcgaagaccccgcgctagctactgcgctgacgg

SEQ ID NO: 13312 - DNA, 885 bp, Zea mays
  Peptide Sequence Number=SeqID_56687
atgcgcgcaactgtccaacgccgaccgtccttctccccgcgtcgtatttggagaggtattcaggagatcatagatgaagaaatggaagaagatgtcatagtcaaggctgtggactgctcgaaccaatcagagtttaacataccactgttaaatcttagagatcatatcgctttcgatccaaaggagaccaaccgctttgttgctaccgattgtttggatggcaaagtgacgatttggagcctcgactctcccgaacctgaatatcatctgcctgagacggattttaagggtatcatgttcctggaattcttcacacgttatggttggcagtatttgattattgctgatgaagatcacaaagcacacgtatgggactttaggttgcgcaaatttgtttctgagaagcgaaaattattatctcgtgaaacttttgtcttctcacgtcctaatgtaccgttactacttacaccttcatctaaaggcacttgccgtttctgggacgctaagaaattcagccaatttaacacatcatctctcattgttctagttgagcatgataatcttggtagttgtttcaaactctgtaaggtgaggtctattcagtttggccaaaaaggcatcccctacctgaacacctacgacggccgcaccatccgctaccccgacccgctcatcaaggctaacgacaccatcaagatcgatctggagaccaacaagatcatggacttcatcaagtttgacgtcggcaacgtggtcatggtgactggcgggaggaacaccgggcgtgtaggagtcatcaagaacagggagaagcacaagggcagctttgagaccattatgtattttagtttagatttagagtacacttatgtatgcgttgtttga

SEQ ID NO: 13313 - DNA, 741 bp, Zea mays
  Peptide Sequence Number=SeqID_56688
atggggaagtgctacgcgaggaacgtgcacggcgtcgacgcggacggcggtggcatggaggcgaccaccatcacggtctcagcggcaggcgggccggaggatgcggcgtcggtagggggagggcaaggaggcggagggaggcggagcgcgcgaccgtcgccggccgggaagccgcgcgggggcagggccggggcgactccggcgcggttgtcgacggcgggcagcccctggacggggagcccactcggcctccccgacggcatcgcgccgtcgcccgcgacctcggcgtccacgccgcgccggtccttccgccgccccttcgcgccgccttccccggccaagcacatcaaggcgtccctcgcgcgccggctcgaccatcgctcaccgccctccgcgttgcaggttcccaggccgcccgtcgaggtcccgatcccagagcaaggggccggcgacgctggggaaggaggtgggccgcggccatttcggccacacctgcctcgcgcgcccctgcaagggagacatgagaggccaggtcatggctgtcaaggtcatctccacagggtgatcagtttttttccgatggtattggcattggcatttccccgcaggatgacaacgacaatatctattgaggatgtgcgcaaagaggtgaaaattttgaaggcgttatctggacattccaatcttgcaatatcaattaagattaagattatgttttatgacaacggcaatatcaattaa

SEQ ID NO: 13314 - DNA, 633 bp, Zea mays
  Peptide Sequence Number=SeqID_56689
atggagctttgtgaaggtggagaactattggatagaatcttgtccaagtattacattttcttgagaaatcattttgcgaacaccactacaagaggtggaagatacaatgaaggggatgcaaaaattattgttgaacagatattaaaagtagttgccttttgccatcttcagggtgttgttcaccgtgatctgaagccagagggtgatcagggggtaaatgccacacagtggctgcataacgaacctgtacttgttactgtaagtggtgatggcagtgttggaatgtgggacgttactttaggtcaaccttgtgtcagacatatcgttgcccatactcgatgtgctaatgtggttgttgtggcccctaatgacaaatacctctgcacaggaggaagcgatcagaaagttgttgtggcccctaatgacaaatacctctgcacaggaggaagcgatcagaaagttgtgagttgcttatttgtccttttagtttcttatgtggcttatgttatgtcgtactggaaaaggttttatatcataacagaagtgggcgtacacatcttaattggcgtctttcacatcctctgcaaggaaatgattgatatgctgccagaaatcatagaattgttccgctaa

SEQ ID NO: 13315 - DNA, 915 bp, Zea mays
  Peptide Sequence Number=SeqID_56690
atgacgaaggtagttgttggagttcttcttgacgaaggtggtcgtttgagttcaccgaagtgcagacagacaagacttggcaccaccatatcttccaagccaaacccgatctccccttggagctcacatgaactagatagctctaggtgcagggaagagatcttacacaagtcatatggcaagattccacgtttgggagctctgcaggcgcaagaactcgggcagattaacatggccacgtgttcgacgcgccctggcaacgccagagcacaccgcggcgcctggcccgcacgcaccgcgctgcgccgcatcaaccccgcgcccacgcccgcgcccgcagctataaagcccaccccgacctcgactgtacacccccacacgctcccaaccctgcccgagcacgagttcactggcgtttgcccagagaacggcatgccagcggccgcacgagccccgcccatcgttgaccggccacgccagccctccaccccgtccgacccctcggctagcttccctggagctcagcgaagctccccgagcccacagaccgaacaccacctcaccggagacgccagattgacatcaccggacttcaaccagccgtcgtcgcacatagaccgagctacacgtgaagctccccgtgcaattcaattgagctataccgccgcgaataggccgcagcacacgccgccgatgaacccgaccgccagcgcacgcggccagccctattccggccatcatcgccggcaattcgcccctcaacgtgaccgccaggacctcccggacctcgcccagccctccaccggacctctcccgccgctggcggggagggagctcgggttgagagagataaaagccaagggtatttgcaaagtcagtgactcggtggaacaattccgcaggggcaccgtttaa

SEQ ID NO: 13316 - DNA, 480 bp, Zea mays
  Peptide Sequence Number=SeqID_56691
atggcagtcggggtcagtgaggcactgtacgccaaggcaactcagctagtgcttttggcaaacaaaacccctcagccaaacagctgcatgtctagaggtagaggagtagactcctcacaccggctaggctggcgttccttggactcagagtccttcggtttcagggccgaggatactgttgagtccactgctctgcatgtgctgacaaccttctgcggatttcaccccttggagttgacaacccaccccattggcttgttccccactgagaaggaggatgacccaatgtggaaggatcgggttgagcacgccaaggacatgtgggctctctaccctggacataccgctcacctgacggccttgcgaggtgaggaaatgtcccagcttatgggcctagtggagtctaccaagatcaccctggataaccgggaggaccttgttgtctacttgtccactgagctggtggaaaaggatctctag

SEQ ID NO: 13317 - DNA, 600 bp, Zea mays
  Peptide Sequence Number=SeqID_56692
atgtcgcagcgcatgaggaaaaccacgcgaaagtccataggacctattgacgtacctcggcatcagctggctccaagacatgaagagagcagtagcggcagtaatgaccctatcggagacctagaagcccaagtggagcagctgcggacggagctatgtcaccggaacagggatcaggatgctaaagctcatgctcgcgtggcagagcttagtgcggccattgacaacttgcagatgccatcgaggactcgtgcgcatgatggcgccggtacttcccgtggtcgggaagacacgcccaatccaccgcctgtaccgccaacgttggccgaggctatcactgccttggtcaatgcgaccgctgacaatacccgctttctgcgtgaaatggcgggaaatcaattccagcaacaaggcggaagggcttatccgcagggaccacgtgagacttcatacctggacttctctgaaacacgtcccccactcttcgttaaagccgaagatcctctggaagccgacgaatgggtacgggtcataaagcagaaatttggactcatccactacactattcccaaaagtcgttgttcgcggctcaacagctaa

SEQ ID NO: 13318 - DNA, 429 bp, Zea mays
  Peptide Sequence Number=SeqID_56693
atggccacctacctagatctctcctacagcagggctgtcagcacagcgctggcagtagaagctaagaacacaggctcaagaaaatcgaaggggttcggaggtgacaggtccaatcaggggcctgaaaagcgaccaaggggacaaatattcactaaagaagtggctttccatgtgcccgtaacattggctgaacgggactttcccaccaacatgattgttctgaaaggccaagatatagatgtaattctgggcatgaattggttagcccggcacaaagctatcctcaacactgatttaagaaacatcaggttgagttatggccatgaagaggttctcttgtccatccctgtagctattccagctaaaccatttggcagagtcaatgaagctatcataccaaaaaatctaagatattccagtagtgtgtga

SEQ ID NO: 13319 - DNA, 312 bp, Zea mays
  Peptide Sequence Number=SeqID_56694
atggggctgaccagtggcccccacgcgcgagtgaaacaaggcgcgggtggccgagaaatagctgatgagaccattaggaaaaatgagaaagagtctcgtgacgccttagaagaggctaagagggctgaagaagctgttgaacaggctaggcttatagctaagctttctccccctcccgagccatatgatcctgaaactaacccatctttgaaggaggcgctcgatataattaagattgctaatgaggctattgacgaagctgtcgacaagctgctgaatgaagctgccgacaaaatcctaaaggaagactaa

SEQ ID NO: 13320 - DNA, 276 bp, Zea mays
  Peptide Sequence Number=SeqID_56695
atgaagctttccaagtcctcggacccggcagaacttcaccggaagcccaagatcaccctcgccgaacttcggtcgcccgcccccgcgcgtggaccgagctctccgataggccggaatcctcgccaccgccgagctcccccgcctgcgcacgtggaccggccgactccgaccatccccgacggcgacacgcacatcgccgtgaccctcaggacctcccctacaccctcgaccacctcaccggagcaatctcgccgccgatgttcaaatcccatttaa

SEQ ID NO: 13321 - DNA, 276 bp, Zea mays
  Peptide Sequence Number=SeqID_56696
atggggtccaggcacagtgcttgctctgccgaggctgagtgtcgaggttctttcgttttgcttttgttagtcaccctcctgcggggagagtatttcctctctgaggaggttgcctttggtgcaatctatgctcaggtaaagaagaaggcgtcgaggcagatctctaggagttccaggacttcgatgagttcgaggattaggctagcgacctcccccagtcagctgcctgtggtgggtttgtttacgttggctacgtttcgattctggatactttga

SEQ ID NO: 13322 - DNA, 294 bp, Zea mays
  Peptide Sequence Number=SeqID_56697
atgaccaaggatgaaggcctcaacatagagagcttcgtcaagaaaatccaaccaacgataatggatggtatgatgacttctaccatgcctaggaacgatcatgtcatggcaaaagatgaaggatatgctggtaaccagcttccaggctttccagacgaagcctgtgactgcccaagcactttttccaatgtacaaaagaccatgaggagtacttgcaggcatatgtctgaagattcttgtgactcagagcccaggccccaacagtgcccaatgagatcgttattgatgctatga

SEQ ID NO: 13323 - DNA, 201 bp, Zea mays
  Peptide Sequence Number=SeqID_56698
atgccgtcaatggggtacaggcacagtgcttgctctgccgaggctgagtgccgaggaagtgatcaatggggagtcatgatcctcgggcaaaatgggaatcacggctcttgggtaaagtgtgcgacctctgcagagggtaatgaaactgatatatcagccgtgctcacggttaagagcagccttgggatcctctttgattag

SEQ ID NO: 13324 - DNA, 555 bp, Zea mays
  Peptide Sequence Number=SeqID_56699
atggctcttcttagacacaccgcacagaagtccgtcattcccttcttgccttctcgtctcgccgagcgtccgcttcgtcgtctggtgactgggagtggagtctgtgaggagctgctcccctatgctcccgctggaggcgcccccgcaccaccactgagtgccccaaccgctggagtacctatcggaggagaccctaatgacgaaggtggcgatagcagctcgagcttcagcacccacctttcagccgagcatgagccagagggatgggttgctcgacccatcactcgcgacatcgctcgcgggtgtcacttccatgatgtgctcgacaccctgctgcgccaggcactcgaccgacgcacttggtccatcgagtatcgttgtgctgtcttccagcaaagtcgcagggtttactcggaccgctgggaggcgacttgcttggtgcaccgtccggagaacagtctccggggtgcggagatgtcagacaacagacgcagaggaggaaggcgtgctcagcaggagcaggcaacaccgcaagatgaggcaccccagcagtag

SEQ ID NO: 13325 - DNA, 378 bp, Zea mays
  Peptide Sequence Number=SeqID_56700
atggcgtggtgtctcacgggtggcgcagttgacaaaattggggggaaatccggtgtctgggagctacggtgcacgagagcggctagctgggggtggaatgagggcttaatacagaggcggagcgagggcagcactcaatttaaagggatcggctacgcgtctcgccaattttggtcgaagacgatcacgacggcggtgggatatttcactggcgagttcgtcgtggcgcctgccggtgcaaaggctcaaagatgtgcccaagctcatcccatcgccgagatttttttaccgcaagtcattatccgcgtgtcacagggcatgaatcacaacaccagcggggatcgtggcgcggagatcaccggcggcgagattcactga

SEQ ID NO: 13326 - DNA, 795 bp, Zea mays
  Peptide Sequence Number=SeqID_56701
atgacttcccacggatcctcagacgacgggaatgcactgtcccacactgacgggcttgcacgagagggctttccccgtattttgtgggaggtacttcagggggccggatacatgacacctcctcagtacgcggtgcagcagttcgagaagcaccgagtgccccgctgtagggtgaggatgaccttggagcctcatcccctgcagccaggctggcgttcactggactctgagtcctttgaataccgggctgaggacacgatcgaggcgattgctctgcatgggttgaccactttctacggattccatcccttggagctgtctacccaccccattggcttgttccccgcggaaagggaagacgacccaatgtggaaggatcgggtggagcacgccaaggacatctgggctatctacccgagacagatggctcacttgacagtgcggtgcatgaatgccctgtaccgtctgcaagtgatgcgtggtgaggcgatgtcccatctgatggcattgttggaggcaacaaagatcaccttggacaacagagaagagcttgtggttgatttgtccactgagatggtggaaaaggacttgcaggtggagcagctatccaatgagatccaagagctggaggaattagtggggaccagggagaacaccatcgaggagatccaggatatggaggccaacgaggacgtcgacatcgagggaggagaggagcctgcctccagcttggacactgctggctcagggagaccaccttcccccgagtcgagtgttgactcgttcgctcactag

SEQ ID NO: 13327 - DNA, 291 bp, Zea mays
  Peptide Sequence Number=SeqID_56702
atggggaagcctgtcccatcactcctcatgctcctcctcggccaagtgaccgcacttgtacccaccataactggaatgggagaccacgtctcaggtcgtgtgaggggatatgtccactgccaggttcactcaggatttaataacattatgctaaagaagaaaactaagttaatgagtaacttagggttttttggtcatgcggggcttttagtggtttatgcttatcactctaggtttaggtttttgttaaggataagcatagtggattggtatttcctttacatattttag

SEQ ID NO: 13328 - DNA, 681 bp, Zea mays
  Peptide Sequence Number=SeqID_56703
atgcccttggcggcgccgacattccaatgcagcgactactgcacaaagctgctcgtcgtctatagcgtgatggaaggatacgtgatgcgatgtggtggcgctggaacagaggcacgaccggcaggagcaagtgccacgccgacgttggatgaagcgagcaagcgtggcccacgcgacctgctgatggcggcgaaggggatggcggcaggagcaggctacagcgacagcaacggcaagaatgtaatgcccttggcggcgccgacattccaatgcagcgactactacacggagctgttcgtcgtctatagcgcgacagaaggatacgcgatgcgatgtggtggcgctggaacagaggcacgaccggcaggagcaagtgccacaccgacgtttggacagagcgagcaagcgtggcccggcgacctgctgatggcggcgaaggggatggcggcaggagcaggctacatcgacagcagcggcaagaatgcaatgcccttggcgacgccgacattccaatgcagcgactactgcacggagctgctcgtcgtctatagcgcgacagaaggatacgtgatgagcaagtatgggaacgaaggcacggacaacaggagcaaatggcacgcctacatccaaacggagcgtgcgagcacgacccgacaacctgctaagaaaattgtagcgtag

SEQ ID NO: 13329 - DNA, 961 bp, Zea mays
  Peptide Sequence Number=SeqID_56704
atgcgcctccacgccggcgcacgcctcgcgctcctgctcgcccgccgctccctctcctcctccccccgtatcccgcgggtgcacacagggaccaggccggtggcggcaagggactactacgatgtgctcggcgtcagcaagagcgccagccaggcggagatcaaaaaggcctattatgggactctaaaggatgaacaaaaaagatcattatatgatcaggttggccctgatcagtatgagaaaactgcttctggcggaggcggaactggcttcgagggtggttttggaaatccatttgaggatatttttggtggtggcggtggcggtggtggaatgaatgatttctttaggaacatttttggggatagggactttagaggacgagatgttaaggttgcactcgaactatcatttatggaagcagttcaagggtgcagcaaaacggtcaccttccaaacgtctgtaacatgtgaaatctgtggtggagccggtgtgcctcctggaaccacacctgaaacatgtctatcttgcaggggttcaggatttatattcatgcaaaccgggcccttcaggatgcaatcaacctgcacaaaatgtggtggttctgggaaaactgtgaaggaattctgcaaggcatgcagaggaaacaaagttgtgcctggaaggaaatcagtccgccttgacatactgcctggtttggataatgaggataccataaaggtggttcgatcaggtggagaagacccagatggccgtccaggtgatctttatgtgaccctcgaggttcgtgaggatcctgttttccgaagagagaaaggtgatattcatgttgatgctgtcctgaatgtgactcaggcaattttgggagggacagttcaagtcccaactctcagtggagacgttgttctaaaggtcaagcccggtactcaacctggtcagaaggtagttctgagaggaaaag

SEQ ID NO: 13330 - DNA, 453 bp, Zea mays
  Peptide Sequence Number=SeqID_56705
atgtgggatgagaaaagggcagtgtttttactaaacgatgatttcaaaaagtgtatgatgaagggtattcaccctcatcacctttacaaccactcaagactgtatgggcagtcactcaatctgaactcatacggtccaaaccccagggttatgaaggctggggagcaccaggaggataaggagggggaatgttttgtccggtttggacatggcggtggcctaactccttccggtataaccgttatgacccttcttttcctctaccagatggaaggctccttggtcattaggacatcctactgctcagaggtggaaggattccctcatctcttgtggagttgcgcgcttcgcatggagattcgcaagaaatcggagtacatctggaaagaataccacgagaatggaactgagaagtgctctatggcagtctacctgggagaaaaccgaaactaa

SEQ ID NO: 13331 - DNA, 207 bp, Zea mays
  Peptide Sequence Number=SeqID_56706
atgacgacgaaggaggtgttcatggtcacctccaccacccttgtgaagctagtatgccctccatactctctggcgatgtggtccagcacagtcgtgtttgttggaaaattaacaggacctaagattaatttgataatgcagcataaaacgaaaaacccagatctactaccagatagtatccatgacattaaaacagaacatatctaa

SEQ ID NO: 13332 - DNA, 1089 bp, Zea mays
  Peptide Sequence Number=SeqID_56707
atggcggtggcagtcgggcagaagcagcggtcacgttgtcagccaagctcacgtcacctcgtgggacagcgagagaaccctctctcacggcgtgaagacgacgcgcccgtgctccgttcctcgaacggcccgcgcacgcgcaacggctgccccgcgaaccacccgccccgtcgcattaactccgcggcgggacaggcgacgcctctggcaggagaaggaccaggaaagggggataccccgaaaaggatccttctccgtgaaggaaacaggccccgagcctccctactgatcagaggttcaaaggctggctcctcggaggggtttaacagccgcctcagagcgcttgggatccgcacccactactggtcagagaggctcgggggctgctctcgcaaacccggctccggccaaaccgttgacagcgtcaacataccagcccgagaacttgggacccgatcgtgcacccgggctatggccagctcgcatgagggaacgaccagaccggccgaaacattgcaaaatgcattaagacctcgaaggagtcaaaccactcctccgaggcctcgggggctacacccggtgggtgcgctcgcgcgcacccaccggaacaagacgcaaccgagaaaggctggtccccttgcaaaaaagtgcgacaaaagcctccaagcgagtattaacactcccttcgaggctcgggggctactgtcggggaccataattaggggtaccctcaaggctcctaaatctcagctgcctcgggcaagggcagccgaccctggaggatctacgtctcgcccgaggaccccttccagcaacggacacaccttcggctcgcccgaggcccagtcttcaccaagaagcaaccttggccaaatcaccacgccaaccaaccaaatcgcaggggcatttaatgcaaagggctcggactcgggctcagccccggaagacgacgaactccgcttcgcccgaccccagggctcggactcgggctcagccccggaagacgacaaactccgcttcacccgaccccagggctcggactcgggctcaatcccggaagatgacgaactccgcttcgcccgaccctag

SEQ ID NO: 13333 - DNA, 450 bp, Zea mays
  Peptide Sequence Number=SeqID_56708
atggaaactgttgaatctgccgaagctaccctctcaaccttggagataatacatgtcgcggcagtcgaaactaccaccgttcagctagagatatcagaaccagggagttctaggaccgagcagcaaccgaagctgcagagtccttcagcaatggtggggttatcaaagatagcaaccgctacagcagcaactcctaggaaagggaggagaatgaccagcgttctggatgctgtattcaaaactttgaagacaactactcctgctcctactacggtttctgaagagaaaatcgaagaattgaagacacctgctccaacaaagatttctgaaggcaaggttgatgaattgaaaatgacttctgacaaagctactcttcctgattctgccaaagtcggacctacggagaccagaccctttgaacaagaatgcaaaagtctagccgaaaaataa

SEQ ID NO: 13334 - DNA, 270 bp, Zea mays
  Peptide Sequence Number=SeqID_56709
atggccaaggccgaagctgccttctccatggacgtcatgaaggacccttcagctgaagcaaccttaatgggcggaaaattttataatgatgtactaattaaaaaaaaatctgcagctaaattatctccacctctagaaccgtttgatcccctggccgaaccagaaacaaaggaagcactggaaattattaatatagctgaatctgttgttgacaaagtcgttaacaaattgcttaacgaagttgcggagaaggttctgaaggaagaatag

SEQ ID NO: 13335 - DNA, 237 bp, Zea mays
  Peptide Sequence Number=SeqID_56710
atgtcatgtcgtgtcgacgtggctagactgtaccaggttggctcttcctatgagtcggctgtcatcttgttgggtttcttagaggaccagttggtcggcatcctcgccttgctagattattcggtgggcagggtgttcgaggatgttgttgacaaatatgactacaaatttccacacccaccacaagatgaggatttcttctataaacaggacgcgacatgtatttcgaacaactag

SEQ ID NO: 13336 - DNA, 144 bp, Zea mays
  Peptide Sequence Number=SeqID_56711
atggagagtcatgatctccgggcagaatgggaatcacggcttgtgggtggttatgagattgatggttctggttatggttatggtgctggtgagtggtattctttccgtttggaaaggatacactgggttaataacttgggttaa

SEQ ID NO: 13337 - DNA, 225 bp, Zea mays
  Peptide Sequence Number=SeqID_56712
atggcatgggatgacccatggaagccacgaagcttcgcatgtcatcgtgtagcacctaagtctcgtgcatgtgcacagcctcctcgacaacacggttgcgacacatggcaaagaccccaacgatcccctttgccagacacacaaataggcctcgaccctgacccctaccctgaccttgacctctacctctatcgctatggtctatcaaacgcgaggcaacagtag

SEQ ID NO: 13338 - DNA, 201 bp, Zea mays
  Peptide Sequence Number=SeqID_56713
atgggtttcgaccggatttccgaggttcacggccagctcccagaatcaatcgcgccagcccaggattctccaagcacgcgaggtgatttccgttgttgcggaggagcgcagttcgtgctcacgtttctgtttgaagcagggataggagatgggcatgacagggaggtcccacctgccagagacggaaacatatttttataa

SEQ ID NO: 13339 - DNA, 444 bp, Zea mays
  Peptide Sequence Number=SeqID_56714
atggattcgtgggtatcctctgttggaacagtgaccccgtggcaaatccgccaagaacagagctccttcggaggaaggaccccgatggacacgagatggagaaggtcagactcagaaacaacagacatatggttacctgcgaaaggcaactggctgttggggtcgatagggggaatcaccgcagtagatgaactcgaggcctttcgcttgggcgccatctcaactccaccggcgaacagagcaggagccgaaatgcaaaaggacagagaagatctggaggcaggaaagcaagaactagggcacggaaagcagaggcggctgaaagcgcagtacatatggggtcttctcgggtcggataccgtttccaaaaagcgcccagtcatcactcggcggttacttctaaaacaccggcgtgccatgtcatcacccggcggttacttctaa

SEQ ID NO: 13340 - DNA, 456 bp, Zea mays
  Peptide Sequence Number=SeqID_56715
atgggcaagagtaacaaacgcaagcgcgagccgactcctccatcggaggacttcggcgactcggaatactcggaggaggagttctcctccgagtccgaggggtctccggctcccgtctctccaccggcgttgtctaactatttagataactcccaggggattgccgcagaggtctggacttatatccgggccgtcgagcgctccgggctcgagggctcggatgagtcggagtactcctcggacgaggaggactcttcggactcgtccgaggagggcggtggcggcgatggcggaaacgacgacgacgacgaaggaggcgacggtgacgacggcgacgatggcggtgacggcggcagcaggggcggcaacggcggcagcaagggcggcaacggcggcagcagcaggggcagcaacggtggcggcagcagcaagggcagcaacaaggccagtggctag

SEQ ID NO: 13341 - DNA, 168 bp, Zea mays
  Peptide Sequence Number=SeqID_56716
atggcggcctcacgctggctgtggccgtttcctattcacatctgctggctagagggtcttgtagaggacgtcgttgcagccgtggagggctcctgtagccgccagatcaaggggagggggcggcctggcgtccctgaaattgattggggtcatcaagtgattgtgtag

SEQ ID NO: 13342 - DNA, 462 bp, Zea mays
  Peptide Sequence Number=SeqID_56717
atgaagggtttggaaaaggttctgtacggacacatggtcaaagtctgcaatgatcagtacagtttgactaacaaatatactgatggctggctgtcttcagtgctgggaactacaattctcacgctggtgtacccggctgcatttacatggttcactaccagattcccctttccaaggctctgtgcagctgttcagccatttctcccttcgatgtcggtgtttgccactgctctgtgtgttggatcaccattgacaataaatatcaagtttactgacatcaagattgagatcaaacgtgtccccaagaagacaaccctgatcaaggcgatggaggaagctgatgtgaagaccaagtgggagaacagctcatggggcaagaagctgattgtccagaagaggagagcatcgctcacccaacgagccctccacggctgcaacgacgtcctctacaagaccctctag

SEQ ID NO: 13343 - DNA, 228 bp, Zea mays
  Peptide Sequence Number=SeqID_56718
atgacgacggcggttctcagccccctacggaagcaaggagacgtcagcaagggaggtccagggccttcatgcgagagggtcgcgcgggagaacgggctgacgagcaggctcactctctctcgcgcgaacgcttgtaacccctactgcaagcgcatccccctggcgcaggataacacgagccgcgttttcccccttgtgttccatctcgcgccaacccatctgggctga

SEQ ID NO: 13344 - DNA, 387 bp, Zea mays
  Peptide Sequence Number=SeqID_56719
atggcacaacatgtccatgggctagattacgatctgatgaccgaggacatcgacagagatatcctcatgagggtcggaggaggcaagaggcatgggcgaaatagaaaacaagaaaagaaaataggaaaaacatgtgtgggacgattttccccaactccggcccatcccgcgctcggtcagcccagctatgccgccgcgcctgccttgcgtgccgacatgtgggtcatcccgtcaaccgcaaattgcgcacgctcgttcaactacggtcgtcgacaacatgggctcgcatggcatccacactaccatggccgctttccagctctccctgacgggcgggcccattcaccagatgcaagctccacacgtgcgctcgccttgtctcactga

SEQ ID NO: 13345 - DNA, 177 bp, Zea mays
  Peptide Sequence Number=SeqID_56720
atggggctcggtgtatgcggctcgctctgccaaggtggtgatgaggatgatggtttttttattatgattatggtaatggttgcctttggtgcaatctatgctcaggtaaagaagaaggagaacggtgtcgaggcggatctccaggagttccaggacttcgacgagttcgaggattag

SEQ ID NO: 13346 - DNA, 811 bp, Zea mays
  Peptide Sequence Number=SeqID_56721
atggaggctttgaatgtgtcttggaatgaattgctagctcttgtattgaatgttgaagaggtccgaggcccaactgaaagagcccaaacgctagccccattcaccctacggggtcacaccagatcgtcaaccgccctcatcccctctctcctcacgccaatccaaaccctagccatcgccgccatcgccgagtaccaggcctccggggaacgcctcatcggcctgcatgtcgatccacaccgcccgccctgctccgtgcgtcaccctccccacggaggcgaaggcgccctgcgccggagatcgcgggatggttccacgcggctcctaggctaccagctggccatacggatctttccaagatcgcttcctcactcctcttccctgaaggcgacaacgactgtggaggaggcagcggggcctcacggcccgagttatgtctcatcttcccccctccccgacgacgcggactcccatggtttgtggcttcgtgattcatcatattggaacccctcgccgcctgcccagccagcgccagcgcccccacccagcgaccccgccgtcgccggtgaccagccccaaccccatcacaaggccggcgacaaggaagcggatgttgccaccgccgaaactgatgggtacaaggcggggtcgtcctcatcgcacctgtctcgactgctccgggaggtgcttgacctcggggagaacctgctctccggcgtgctccacccgacgctgttcggcaacctcaccagccttttgaagtcatatgtgcataatagggcttcgattctcaagtcctgtaatattggaa

SEQ ID NO: 13347 - DNA, 987 bp, Zea mays
  Peptide Sequence Number=SeqID_56722
atgcagcccggtcgcacccctccgtcggtggtcacccaagacggccgggctgagccggagctctacctccgcgcgggttcgtgggtcagcctctccctcagcgttcgagggagagagcgctcactggccctgcgagaggggcgggacttcgacaacgcggggctggtcgacggcgggcgtcgtcagcttcagcgcgttgggttcgccggcttggctcccggagccccctcctgccgcaagggcggttatcgcgccgtgcgcacgggaggaccgcccaagacgtcgcgcgctgccagggcggcgttcgtgttctggggcggccctgcctttgcgccgatacggcgcctccgcgcggaggtcggtgccccgctcgtccgagaggattcgagtggggatctgcggcgggctgatggcccctgtcgtcggtgccgaggcggaggcggctcgagaagtccccgtcgccgacgggatcaccgccaccatccgcgcttcgggcctccggctctttgtacttgtcctcgcccctcgagcgtcggcgtgggcgagggcagggttgcagcggcgttcgccctgaggccatcgctgctgctggagcgggcgacggagtccctcggctcggtcagccttgttgcccgaggcttctcttgctcagttaaaggaacccctcgaccgcccttcgatgagccgaggccaggggtagcggtgtcagcgcaaacagaggcagagttggctcgaaaagaagacccggtcagccggagccaggccgggtcgtccgttagcgggaccgacgccggaattgacctgccgaggcctcgggccgggctgatgtccttggaggacagctggccgaggccccgggagacccttggacccgcatcgccgtccgaggctaggtcgggcctcgccgaaggtgttgccgacgccgagggtgctgttgctccctttagccatcaagatccgagcctgcaggatcggattatcttgtag

SEQ ID NO: 13348 - DNA, 1026 bp, Zea mays
  Peptide Sequence Number=SeqID_56723
atggctgaaaggtaccaactcccgcggagttgcgttcccccaatgacaaggcggaaagacggcgggtatcccccatccgggggcttggaaggtggaaagacacgatgcataagggagcgcgaagacatggtcgccttccaagggggtcgccctccttttaaaggtggctctccctacttgcgtcctcagtcgtcgtgggctgagtctcctccaacacaccccaaggatctcccctacggcgcgggggctgggtcccacatgtcatgcaagtcggctcagagcagaagaagccaaaccgtcgtgcgcggtgcgtacaaccgcccagcggttacaagcgaccctccacttttgcccagaccagcaggcgaaagggcgggcagccatgcaggcggcatgcaaccgcgccaagtgggcacacttctccgactcccaacacgcccggcacggaggcccaggcccacgcgtcatgcaaccggcgggccgaatgcttcgtgcatgcagctgcaccgccacttgcgccaccaccgcgcctcctcgattgcggaaccaataccgcgactcggggcgacccagcgcacaacccagcagcgccagcctggcacgacggtcaatacggccaaaaatgggccggcagtaatggcggtggcaggcgggcaggagccgcggaaaggcggcgcctctggcaggagaagggagcgacgcttcgccttcaccataatgatcacgtcgaaaaagggaccgggaaagggggataccccgaaaaggatccttccccgtgaaggaaccaggctccgagcctccctactgatcagaggttcgaaggctggcccctcggaagggttcaacagccgcctcagagtgcgtgggctccacacccactactggtcagaggttcgaaggccggcccctcagaagggttcaacggccgcctcaggctactcaggctccgtgcccactactgatcaggggttcgaaggctggcccccaaagggttcacagccgcctcagacacagagcgagggatga

SEQ ID NO: 13349 - DNA, 444 bp, Zea mays
  Peptide Sequence Number=SeqID_56724
atggcccgcgcccgcgcctataaaaccctcccagacttagattgtacccttccgcgcaccctcaaacctcgccggagtctagctcgccgccgtttgcccgtgcgcagcgtgtccgcggccgcccaatccctctgccaccgtagaccggccagtggagcctttcccaactccgtccagctctcggagaagactgtgcacacctccgtgaagctccccgagcaaggaatcggagtttgcttcgccggagaggccagttcacgctcgctggagctctcaaccccgaccggagtacgtggaccggactgtaatcttgctgacggagagtacatcctcgtgccggagcaaggagctgctcaggaggtagccccggatccagcacccgagcctgcaccagaggacctgccagccactgctttggaaggcaagccccgattttatgcataa

SEQ ID NO: 13350 - DNA, 1323 bp, Zea mays
  Peptide Sequence Number=SeqID_56725
atgtcttcgtgctcccttatgcatcgtgtctttccaccttccaagcccccggatgggggattcccgtcgtctttccgcttcgtcgttggaggaacgcaactccgcgggagttggtacctttcaaccatcgttcggcttcaaggattttcatcatgcagcccggttgcacccctccgccggcggtcacccaagacggtgaccaccagcccctgggtggggagaagcaagccgggctgcgatcttggtcccaccctcagcttcaaggatgttcatcatccttgctggggtggaggccgggctgagccggagctctacctccgcgtgggttcgtgggtcagcctctccctcagcgttcgagggagagagcgctcgctggccctgcgcgaggggggacttcgacaatgcggggctggtcgacggcgggcgtcgtcagcttcagcgtgttgggttcatcggcttggctcccggtgccccctcctgccggaaggcggctgccgcaccgtgtgcacgggaggactgcccaagatgtcgcgcgctgctagggcgacgttcgtgttctggggcggtcccgcctttgcaccggtatggcgcctccgcgcggaggtcggtgccccactcgtccgggaggatctgagtggggatctgccggaggactggcggtccatgtcgtcggtgccgaggtggaggcggctcgagaagtccccgttgccgacgggatcaccgccaccatccgcgcttcgggcctccggctctttgtacttgtcctcgcccctcgagcgtcggcgtgggcgagggcaagattgcagcagcacccgccctaaggcctacgctgctgcggtttggccacccggagcgggggtcgttgttgctgctgccagggtgggcggcggcgagccgcccgtcagtcttctgttgctccgcaggcccccccccatcgagtggggttgttcgtacctgcggaggtggaaccggagtttcgtttgtaatggtaccttgaatgccagtgtttttgttcattgtggctgtcgaggcctgaacatcgggaccgacgccggaattgaccagccgaggcctcgggtcgggctgacgtccttggaggacagctggccgaggccccggggtgaccggccgagccgcctgctcgggccggattctcggagaagaccctggcggcgacggcccgggcttggtgatgacgccgtcctccagggtggagatcctcggaccgcgtcgccatccgaggctaggtcggacctcgccgaaggtgttgtcgacgccgagggtgccgctgctcccttccagcgtcaagacccgagcctgtag

SEQ ID NO: 13351 - DNA, 1029 bp, Zea mays
  Peptide Sequence Number=SeqID_56726
atgcaggcggtatgcaactgcaccaaggggatgaaccttttcaacttcgacgtgtccagcatggaggcccaggcccacacgtcatgcgggcggaagcagcattcaaatcgtcttcaggctcacgtcccctcctgggacagcgagagagccctctcccacggcatgaagacgacgcgcccttgttccgttcctcaaacggctcgtgcatgcacaacggctgccccgcgaaccactcgtcccgtcgcattaactccgcggcagggcaggcgacacctttggcaggcgaagcgggcgacgcttcacctccgccatgatgaccgcgtcaaaaaaggaaccgagaaaggggatactccgaaagggatccttctccgcgaaggaagcgggccccgagccctcctactgatcagagccacctcaggccacccgggctccgcgcccactactgatcaggggttcgaaggctggccccccgaagggttcgacagtcgcctcagaacatgcagagcgagggatgactctgggtacgtccgatacatagccaaggctcgggctatgctcccgagaagtgaccgcagtcacttcgcccctccactggccgacctgacaggaaaacagcgccgcctgctgctccgactgctgtgccgcctgtcaaggcgccataggaagctcctcctcgcccgaccccagggctcggactcaacctcgacctcgaacgacggactccgcctcgcccaaccccagggctcggactcaacctcgacctcggacgacggtctccgcctcgcccgaccccagggctcggactcaacctcgacctcggacgacggtctccgcctcgcccgaccccagggctcgaactcagcctcgacctcagaggagcctccgcctcgcctgaccttgggctcggaccgaccacgccgcagggggccccctacggaagcaaggagacgtcagcaaggacccgacagctccgacagctatgctcctacagggctcaagcgctcctccgatggccgcgacatcacatga

SEQ ID NO: 13352 - DNA, 222 bp, Zea mays
  Peptide Sequence Number=SeqID_56727
atgggaaccgagcgggcggatagccgccctcaccgtcggcggtcgtgctcggcaccaaattggaaccccgtgtgcggcccgaaagcttcgcccgagtccctggtccgcttcggtggagattccggggcaggtggccgaccagtgggtgctcaatttgtctccgccgtcacagggtccgcgggtcgccgtggactgactggagcagtgccggattcaatgtaa

SEQ ID NO: 13353 - DNA, 420 bp, Zea mays
  Peptide Sequence Number=SeqID_56728
atggaggaccttagtgttcaaggagatttgacttatgctgagtaccccatcaggattcttgatacattgactcgagttacaagaaataaggtgatcggcgctccacgcagccaaggcgtggacgggttcccgctgttgagtgggaccaactggtcggcgtttcacagccgcgaagtgcacgacgctgcatccgccaacaaagaagccgggaaaggtgctggtggcctcggagctgtattagtgaacggggaccccggaattgctcgccgtcgagtaccgcctccgcagcgtcgtgggcttggcgtgcgagctgggaggatcgcggtccgcatcaatggcgccgccgtgggggcacggccaccgccgtcgcccggcctctgggttgaagatggaatgcgcgtcgtccgatctggaatgtag

SEQ ID NO: 13354 - DNA, 336 bp, Zea mays
  Peptide Sequence Number=SeqID_56729
atgccccccccatttcacggcggcgccctcgccgaggtcaggcgatcagcccccctggtgacccatatcacatgcttacacgcgttatacgatgcagaggtcctggcaaaacaggtgacagcacgacatgagatcccgagctcccacggcgccttggcttgggaggacgaggagccgcggtgcccgagattaatcctaacagaaaatcgtttgcaatcgatccaggaagatctcacacggagatggtggctgactgcgcgggcctgtgatccagtgagagcgcacacggttgagcggatgacagaacgtccctacgtgtcggcaccggatgaatga

SEQ ID NO: 13355 - DNA, 357 bp, Zea mays
  Peptide Sequence Number=SeqID_56730
atggagcagcgtcccgggttggagaggttgatggagactacccatctggagcttgacgggaagctgttcgtcaacacgcagcaggcccctacctggcgcgccaactgtcggcgtttcgaccccgggggatgtaaggagaaggcccaggtgtacaatggggggtgtagcaatgtgctaatgtgtctagcagagggaagccagagtcctatgtacatgccgacgtggctgtcggagaggttttggcgccctgttcatgtgatgtcgtggccgtcggaggagcgcttgagccctgtaggagcacagctgtcggagctgtcggatccttgccgacgtctccttgcttccgtagggggctga

SEQ ID NO: 13356 - DNA, 867 bp, Zea mays
  Peptide Sequence Number=SeqID_56731
atggcgcctcctgttgacgtggctggtctgcgccctaggttgggcgatgtggaagctcctccgaagctgaggtcgagtctgtcttccgtggccgaggtcgagtccgagcccctgggtcgggcgaggcggaggccgtcggctgaggccagggcggagtccgagccctggggtcgggcagagcggagttcgtcgtcttctggggctgagcccaagtccgagccctgggtcggacttagcccgagtccgagccctgggtcgggcggagcggagttcgccgtcttccgggacttagcccgagtccgagccctgggtcgggcggagcggagttcgccgtcttctggggctgagcccaagtccgagccctgggtcgggcggagtggagttcgccgtcttccgggacttagcccgagtccgagccctgggtcgggcggagcagagttcgccgtcttccgggacttagcccgagtccgagccctgggtcgggcgaagcggagcttcctatggtgccttcggtcgggcctgactgcctgtcagtctcactctgtcaagtggcaccgcagtcggagtggcgcaggcggcgctgtccttctgtcaggccggtcagtggagcggcgaagtgacggcggtcacttcggctctgccgactggggggcgcgcgtcaggataaaggtgtcaggccacctttgcattaaatgctcctgcgatttggtcggtcggtgcggcgatttggtcagggttgcttcttggcgaagacagggcctcgggcgagccggaaatatattcgccgctggagaggggcctcgggcgagacggaaatccttcggggtcggctgcccttgtccgaggctaggctcgggcgaggcgtga

SEQ ID NO: 13357 - DNA, 672 bp, Zea mays
  Peptide Sequence Number=SeqID_56732
atgtcgctccgctttggctccttccccatcgtcgtgggctcctccgtcgaggtggccgaggtcctcctcaagacccaggacctggcaaacgtcgactggccccgcatggcctgcggcaagcacaccgtgtacaactactccggcatgctgtggtcgcactacgggccctactggcgccagctccgcaagtcgtgggtcacggagctgctcagcgcgcgccagctccgcctcacggagcgcgtgcgcgccgaggaggagcgggatcgctcctccatcgcaccgtgggcgggattggcgtgcctgaccgtggatcgcgccaaggaggagaccgtgaccccagtattccatagcccgcagatcggtgggggagtggatcacacagagtttttggatcgcgtgggagaggcaaccccggtattccatagagaggagatcggccacgggggagaggccgaggaggataccacgacacgggagtggatcgcgccgatctgcacgctgaggaggggatctgcgccgcgacacgggaggggatcacgccgatgggtggagaagtggatcacgccgatggagagcagatgggtgggggaagtggatcatgccgatctgcgtgccaaggaggagatctgcgccgcgccgagacatgtggatgatgctgttgtggaggcttga

SEQ ID NO: 13358 - DNA, 474 bp, Zea mays
  Peptide Sequence Number=SeqID_56733
atgactctgggtacgtccgttacatggccaaggctcgagctacgctcccgaggtaccctaggacatttccgagaccagcaggagcgattttgtaacggaatcccaccagagggaggcatcgagccctcggaccctatcgaatgggtccgggtccggcaaatcacctacaggtcaagacctcgtctaccaagggacgcaatcttgcctcgcctgagcccggcctcggacgggaacaatagtcctgaacgaattcatgcctcgcccgagggcctccataggcggtgggcgcaccctcggctcgcccgaagcccagctcgggcaggcttcgtcgagaagcaaccttggccaaatcgctttaccaaccgatcatatcgcaggcgcattcaatgcgaagatcgcctgacaccttatcctgacacgcgcgtctcagtcggcaaggtcgaagtgaccgcagtcacttcaccctctcactga

SEQ ID NO: 13359 - DNA, 399 bp, Zea mays
  Peptide Sequence Number=SeqID_56734
atgacgaaggaccttctgaggacgaaggcccccaacagccggcccaactcggcccagccaggccgcgcgcccgcgccgcctgacaggcggaccccgcctgtcagcggcaacgctctctcccgcgcgccctccctctctcgctcgctgcccagtggggccaacctgtcggtgccgagttacttcggcccgcccaagacattctccccgctgttctcccctctttgccctcggattcgtggcctcttccccgccattgagttcgctgtggcgctctctccctctctgcccaactccggcgaccccggagccaccctagctcatgcctgccccaacttcggagacctcaccgcgcggagaggcgcagcgctgcccgcagccgttcgcccctccccggtctga

SEQ ID NO: 13360 - DNA, 372 bp, Zea mays
  Peptide Sequence Number=SeqID_56735
atgacctcagggcagacgcttctgcgacaaggccctcgcccgcgtccccgctcaaggggcgaggacatgcagaaggccgtagagttggagccgtcgcgggctgagtcttctccaacacgctcaaaggtcctccacctacggcacgggggctgggtcccacgcgtcatgcaagctggcccaggacagaaggagccaaaatcgccgcgcgcggtgcgcgcaactgcccagcagttacaagcattcctctactatcgcccggaccagcgggggaaagggcggaccgacatgcaggcggcatgcaaccgcaccaagggggcgcaccctttcaacttcgacgcgtccagcatggaggcccaggcccacacgtcatga

SEQ ID NO: 13361 - DNA, 1149 bp, Zea mays
  Peptide Sequence Number=SeqID_56736
atgggcgaggaggcggccaagaaggaggaggtggagaagcccaaggaggccgcggcggcagaggagaagaagaaggacgacaagcccaaggaagtaggcggcggcggcggcggcgagaagcccaaggacggggaggaggaggagaagaagaaggaggacgcgcccccgcctccgccaccggaggaggtcgagatgcgggtctacatgcactgcgaggggtgcgcccgcaaggtcaagaagatcctcaggcgcttcgacggagtggaggatgtgatcgccgactccaaggcgcacaaggtgctggtgaaggggaagaaggcggccgccgaccccatgaaggtggtggagcgcgtgcagaagaagaccggccgcaaggtcgagctgctgtcgccgatgccgcccccgccggaggtggaggagaagaaggaagatgaggcggagaagaagaaggacgatgagaagaaggcagagcccgagccgccgaagccggaggagaagaaggagccgccggtgatcgctgtggtgctgaaggtgcacatgcactgcgaggcgtgcgccgaggggatcaagaagaggatcctcaagatgaaaggcgtgcagtccgtagaaccggacctcaaggcgtcggaggtgacggtgaagggcgtgttcgaggagtccaagctggcggagtacgtgtacaagcgcacgggcaagcacgcggccgtcgtcaagtccgagccggccccggcgccggagggcggcggcggcgacaaggcggccaaggaggaggaggagaataagaaggatgcaggcggtgccggaggcgaggagaagaaggacggcaaggaggaggaagagaagaaggatggcggcgagaagaacgaggagaagaaggacggcggcgacggagacggcgacaagaaggacgaggccggcgacaaggacaaggacccggccgccagcctgtacatgcactacccgcggttcccgttcgctggagggtactaccagccgccggcctacccgccacctccggggtacccgtacgcctaccagccggcctacccgccgccgttctacgcgccgccgcaccacctgcaccagcagcagcccatggcgccgcagatcttcagcgacgagaaccccaacgcctgctccgtcatgtag

SEQ ID NO: 13362 - DNA, 195 bp, Zea mays
  Peptide Sequence Number=SeqID_56737
ctagttgtttacgcgcatcttttccttccacatcgtgatccgggtcgcggagattttgaagatcttagacatcgccagtgtctacttaaggatgatggcaaaggtgtcggagagtcacttgatgaagtggtctgccaagtctgctcactctttttccttgcttttactcatgaggtatatttgcttaccatctga

SEQ ID NO: 13363 - DNA, 2259 bp, Zea mays
  Peptide Sequence Number=SeqID_56738
atggagaaaagcaaaccaatcaagacccccatgccaacaaatggacatctcgacttagatgagggagaccccctcgccggcgaccaccctgcgtccaccgtctccggtcgtgctccagcgacctccgacctcctgcgctcatcccttctccctctggtcaggatgccgcgcacgaagaatgtgtcggcgccagggggagccgatgatgaggatcctcgtcgccccttcaggcaggtcaagggcaagacagtatacttggagcagcaggaaggccgcaagaagcgacgtacggacagagcagctcgtgcagcggcagcagcagcagccgctgcgcaggccgagctaggggatcagccagagactccgttagatcagattgtgtaccatgttcgtcgcctcgcctcccagcctcgctcctccactcacaccactgcttccactccaccacccactctgcctgctcccgtcacccctgttgcaccatccaccaccacagccatacccgctacctccactacaccagcttccactgctcctcctcccgctcccgcttccgcccctcctatccctcctcctcgattccgggagcgcgatgagactgagagggaccctgtagcagttgacctcttcagcaccaggattcaggaatccttcttcagggcacagatgtatgttgaggagtgggtccgagttttctacgcgactgtatggatagacccagatcatcactggatgaggtttcgttttgagcgagaggatgtcactattactgctagttggattcgccagctctttggatttcccgaatcgtcgactcgacttcacagcttatgctacggcacctctgaccctcctcgtcgccctcacgacggtgtggctccgggtacagctcacgtcgcggctctgttccgcccgcccttctctgatgggtcgcgacgttcaccagcagatttcactacagcagccaagttcttatttgagcttatcagacggactcttctgccgaggatgagatacagggaggctaccacacatatccagctctggctccttggtgccctggtctctcactccgagtttgacgtcgtggatttccttatttgtgagatcgaggacactggcacacttgaggcctcacgccttgtctttgggtcctaccgtcctgcgcctgaggctcctgtgccagcttctgctccagtttttgactctcaggccgaggatgttgctcttcatcagtttgaagctcaggatgcagcagttcatgatgatgatgatgatgatgatgatgattttggggttcctcctccgcctccgcctcctatgcctccacgctcacatgatcatgaggctgggagttctagtgctaccactgctgcccctccggctattgaccctgctattgcttcgattctccactctctcactcagcagcaggctcacctggcagccgagcagacccggttatccgagaggatgctctcgatgtttcagaccatacaggacaggcaggattctcttctgcagcagtactctaggatcgagctgagagcagggcattcatggctcttatgctacagcattctggtgtctcggttcccccggttcagtctgcaccacctcctccgcttcaggttcctgttgtgccagcgattcagtcaggaccccctcttccttctgttggtccttcttcctctcctgtcacacccggatttcggggcaccaagacccgggcgcgaacaatcaccagcatcctccatgcgccttatcctatggtacccgttctgtgagacagcaagagtgagctcacatacgttcatcgctcaacaagttgtggggaataatgtgcatgaactcgccaaaggtgggagctcacgtgaagtaggttgcacatctttacccacaagtcatgttactcatctgccaagggatcacgacttcccatacacctctaccgaggaggcgaggcaggggatcccttgcctgaccgccatcgcagcaaaatcaaccaaggacctccctacactgaccactcccttactgcccttgcccctttcgggcggcgccaagtccgagccggggcgagcagcgaggatctcggccggggaggttggagatcgaatcgcggacgtcgttggccaaacctgcgatttccgcgcggactctgttccaggacgcgctctgtccgcggggacgaagcgcctgaccacatgggtcccgctgaggaggtccgagtccggcggcgagggtttcaggcggtga

SEQ ID NO: 13364 - DNA, 276 bp, Zea mays
  Peptide Sequence Number=SeqID_56739
atggcggccatctcctgcttctctctgcgctcccggatctccctctccgacctttcctctctcccgtggcggtggatgcccgttttggtgacaagagctagcaccgacggaactcgggtcatccggttgagggaggtgaacctgacaaaacgggcccgcatgccggtgactgaggagttcgcgcgagaggaagactggctgaccgcgtggggtccacatgtcagcgcgcagaattgggtggactggcgtgtgcggtttgtggaagaagtgggctga

SEQ ID NO: 13365 - DNA, 342 bp, Zea mays
  Peptide Sequence Number=SeqID_56740
atgcctcatagctgggggtcgcccggggtcctcggatgtgtcttgatcgattcgtcagcatgtggggatggtaatcgaagtcgaatcagagctcagggcgtcatgggcgaatggaattctcaccgtgctgctcgtagccgcgagcgcactcgaaatccggaatcgctcaccgaagttatagcgtgccacgaagctctcactcgccgcggccgggtacttggacagcagactgcatcgcgcaggggcggatatgaagcagatcattatgttaatgggaacatggagaaccacccgggaaaacagtgctaccacaagggtttatggacgcccttggctgattaa

SEQ ID NO: 13366 - DNA, 747 bp, Zea mays
  Peptide Sequence Number=SeqID_56741
atggcgagaggacgtgacggcggcgtgctttcttcctttatcccgacggcggggcttggcggcctggctcctggcgtggattgcgatgggattgtgacgtgcgtcggggctcggtattataccagggccgaccaaccacccgaccgagatcactggagctccccagccgagatccggcagcatctgttggcgcgacccgagctctatggtgaggacgacgcccctgaccagtgggcccttcgtgcagtcaccaccgaacacggccgagctgttgctgcagaggaggggctgacgagtgagccccaccagtcatcggcaggcatcaccacgtgtccacgtgagcacgcgcgacgaccgctgacaggctgggcccgcctgtcggcgcggcgcgcagccaggttcagccgagctgccccgcgtgtcgtacgtggcggtgtgggcgggctggcggtgctctgcgcctacccgttccgcgtgcccgccaggggcgtcctctcgctggcgtacgtggcgcgcgcgcagggcgccccgctgggcgacgccggcagcgccgccatggaggccgcgctctgcgacggcgtggtgccgttccgggtggatgtggaggcccggacgcgatggaaggtcgcggggatcatcgtcgtcgaccagtggacgcgcctggcgtgccagctccgcttcttctggcccaacggcaccgtgctccccttcagatgcatctccaagtccaagttcttgttcttctga

SEQ ID NO: 13367 - DNA, 422 bp, Zea mays
  Peptide Sequence Number=SeqID_56742
gcaacattggaggagctgatccaccgccgatcaacgacgggaaccattctcctcaacacacgcaggaagatcgagaaggaggaggagacggaccttcactgcaagacgtcgtcgcaatgatggataggaacaacaacgacggggaggcttctcgtagaagggatgatgagctcagtgcgccgctcggcacgggcgcactgtttgtcaatagactggataggcgcgccgtctgctgggcggcgcgtcctctccgcaataaatgcagaggctgcgcggcgttatgggcctcacgtcaggcccagcccgttggcttatgtcacgggccacaagccacgtggcagcagcgggtctctgccctgagcggggagcgcagggcagggcctggacgcgtgtcagcatcgaaccctttgaaagtcacctag

SEQ ID NO: 13368 - DNA, 738 bp, Zea mays
  Peptide Sequence Number=SeqID_56743
atggcgcaccggacagtgaacagtgcctgtccggtgcaccaccggacggtccggtggccccacaagtcagagctccaacggtcgaaccctaacagctgggtgacgtggctggcgcaccggactgtccagtggcgcatcggactgtccgatttgcatatccacccccctctaggcgactttcaacagagcttcaaggagatctacgccacgctctgcgactgtagaatggaccccgacatagctgtcgagaggctcatatcccaggaaaatgaagttctggcaattgatcacataattaattcagctgccaaatcaaactacatgtctgctgggcagatatctgttcctattgtcttgaggggtccaaatggtgctgctgctggagttggtgcccaacactcacaggtttttgcacaaacttgcctctatatggttgctctgttgctgctgctggagttggtgcccaacactcacagatctagtactgttttccctagcaaatgctttagccccctttacttgtttgggccttcatgggctgttagatggggtacatatggatcagtgaatcttgttttgtcttatgatggcaaacctacatctcagtttgttgtggtggagccctccaaaaagggaagatatttgacaaagaagcgcttgaagcttcaaaggaagcgtataaagaatgagaggaaagaggcaaataaaaatgatcagcaaagtattaggcgtaagtga

SEQ ID NO: 13369 - DNA, 183 bp, Zea mays
  Peptide Sequence Number=SeqID_56744
atggagagtcatgatctccgggcagaattggaatcacggcttgtggctccggttcctaccggtgatggctgggatcaaactgtggccctgttcctgtggatggcactgttcctccagtggtcgctcctactggttgggaatcagcagcctagcccactgcccactacccaaggttgggagtag

SEQ ID NO: 13370 - DNA, 279 bp, Zea mays
  Peptide Sequence Number=SeqID_56745
atggaggcaaagtcacaccaacaaccaatcatcctaaggagtacctgcaaaaattgtgccacaagcaaggctgagtatactaatactcagctagacttacccgcagcatggatcaagcgtctcattagctgcgagaagcagacgattcgaatcgagtttttatcctcgcaagtgaccgcacttgtacccaccatagccggaatgggagaccacgtctcaggtcgcgtgaggggatatgtccgcttgcaggttcactcagatttttggacagcaacatag

SEQ ID NO: 13371 - DNA, 408 bp, Zea mays
  Peptide Sequence Number=SeqID_56746
atggttggagctgcagctgtcgtgggaaaaaacagagaggaggactgcgtaagggagaagaaggtggctagtggcggctgggaaaagaatagggccgagaaaaagggcaaggcccttgcagacactacccatcaagaagcttgcgaagacgacgctgtcagcaagagacagcgcaacgaccaaccaactcccgagggcagcctccgcacctgcagcttcggaggaaagccacagcaaccacccccaggcttcgctccgctagagggcgaggatgccacagaagacggagaggtcattggcgtttcagcagaagaacaactacagctgcgggccctccgcatcaagaaccgcaacctccagaagcagaaagaaatcctcaaggccaagcaccaacgtgtttccgcgtag

SEQ ID NO: 13372 - DNA, 618 bp, Zea mays
  Peptide Sequence Number=SeqID_56747
atgcaggcggcatgcgaccgcaccaagggggcgcaccctttcgacttcaacgcgtccagcatggaggcccaggcccacacgtcatgtaaccagctcgccggttgctacgcgcaagaaactgcaccgccactcgcgccactaccgtgcctcctcgactgcggaaccagtaccgcgactcgaggcaaccctgcgcatgacccagcagtgccaaccaggcacatcggtcatgggtcggacgagcggcacctttggcgggcgaagcaggcgacgcttcacctccgccataatgaccgcgtcaaaaaagggaccgggaaaggggataccccgaaagggatccttctccgcgaaggaaacgggccccgagcccccctactgatcagaggttcgaaggctggcccctcggaggggttcaacagccgcctcagagcgctcgggctccgcgcccactactggtcagaggttcgaaggccggcccctcggaagggttcaacgaccgcctcaggccactcgggctccgcgcccactactgatcaggggttcgtaggctggccctcgaagggttcgacagctgccccagacgcagagcgagggatgaccctgggtacgttcgatacataa

SEQ ID NO: 13373 - DNA, 999 bp, Zea mays
  Peptide Sequence Number=SeqID_56748
atgcgtcgcgtctttccaccttccgagcccccggatggggaacactcgcagtccttccgccttgtcgttggaggaacgcaacttcgcggaagtcggtacctttcaggcatcgttcggcttcaagaattttcatcaggcagcccggccgcatcccctcgccggtggtcacccaagattgtgaccaccagttcgatggtggggagaagcgagccgggctgcgatcttggtcccgccctcagcttcaaggatcttcatcatcctggctggggcggaagccgggctgagccggagctctacctcccgcgcgggttcgtgggtcaccttctccctcagcattcaagggagagggcgcacaccggcctagcgggagggtcggacttcgacaacgcggggctggtcggcggcaagcgtcctcagcttcagcgtgttgggctcactggctcagctggctctggctcggctcccggtgccccctcccgccgcaagagcggttgtcgcgccgcgcacaccggaggaccacccaagacgtcgcgcgctgctagggcggcgttcgtgttctggggctgtcctgcctttgccccggtatggcgcttctgcgcggaggtcggtgctccgctcgtccgggaggatccgagtggggatctgccggtgggcagatggcttccgtcgtcggcgctgaggtggtggcggctgaagaagtcctcgtcgccgacgggatcaccgtcaccatccgcgctccgggcctccggctctttggctttgatagcttgtcctcgcccctcgagcggagacgtgggcgagggcattgttgcagcggcgtccgccctgaggccatcgctgctgcagttcggccacttggagcggaggtcgttgtcgctgctgctggagcgggcggcggtgggccacctggagccttatcgccccgcgggccctccaatgtggggggttgttcgtacccgcggaggcggaaccggagttccgtttgtaatggcaccttga

SEQ ID NO: 13374 - DNA, 396 bp, Zea mays
  Peptide Sequence Number=SeqID_56749
atgggtaaaaatacccgcgcggatacgggtatgggtaagattttatacccgcgagcatatatgggtaacctgacgggtagatttttttttgatgggtacgggtatagaatggtactacccgacgggtatgtacccgttgccatccctagacacgagcatgctacggaaggagcggtgggaggtgttaggctggtggcaatgggggctagaagggaggcgagaagggccctctaccgccccgcgcgaggcgataggcaggcgagagggagagagagggcgacggcactcacgcccggcgagagcgggcgatatcgccccgctctcgcccgcgttggcgcgcgcgtctgggcgagagggaggcgagaggggggcgacgcactgacggggcgagagtga

SEQ ID NO: 13375 - DNA, 594 bp, Zea mays
  Peptide Sequence Number=SeqID_56750
atgggatgctccaaagcaatcatcccctttctgcgaaagcgtcttggatactcagctcataagctgctcagtgctgatttccctagcgaagatgccggaaaaagatggcagagtaaactgataggtgataagcctgaaaaggattttgaggtcgaattcgaggagtttggggtgaaggccgacgactcggagctcgactccgcagatgaggcaatgaccttcgccgccccaggagcgcactcgccagaggatacaactggctcttcccaatctccaaagctatccttgtttgtcaccccattcttggctacaatagcagttcctcttgaagaaaaaacttcaacgcgctacatggccctcgtggatctcgaggaagggaacgagaggcttttctacaagctgctcattgacaacattgaggagccgttggtgaggcctgccaaaagacctgcccctgatcaacttcaaaaagcgcttaggaagacgttttcagctgaaaagaaaagtaaaatccggaaggcatgggatggaactaaagtcatttataatgttgcttcatggggtgccactgctgttgggcagcataaagcttga

SEQ ID NO: 13376 - DNA, 1245 bp, Zea mays
  Peptide Sequence Number=SeqID_56751
atggcgcctcctgttgacgtggcggtctgtgccctaggcagggcaacgtggggggcggagtccgagccctggggtcgggcgaggcggagtttcgtcgtcttccgggttttagcccgagtccgagccctggggtcaggcggagcggagttcgccgtcttccgggtcttagcccgagtccgagccctggggtcgggcggagcggagttcgccgtcttccgggtcttagcccgagtccgagccctggggtcgggtggagcggagttcgccgtcttccgggtcttagcccgagtccgagccctggggtcgggcggagcggagttcgccgtcttccgggtcttagcccgagtccgagccctggggtcgggcggagcggagttcgccgtcttccgggtcttagcccgagtccgagccctggggtcgggcggagcggagttcgccgtggcgcctttggcaaggcctgattgcctgtcaaactcgctctgtcgagtggcactgcagtcggagtggcgcaggcggcgctacccttctgtcagactggccagtggagtgtgtggcgatttagtcaaggttgcttctgagcgaagccaaggcctcgggcgagccggtgatgtgtccgccataaaaggggggcctcgggcgagacggaagtctctcgagctttatgctgatgggggttaccagctgagaattaggcgtcttgaggcccccgagcctccgcacagggcgagagggcgatcagggacagactcgactttttacatacgcccctacgtcgcctttccgcaaggaggagggggggagtgcgccatgttaccctcgatgggcaccgaacatggtgtctccggtgagctgcaagcggcaactggcgcaccggttgctcgacgcgtgggcctgggttccaagctggcgtgtcagaagtcggagaagcgcgtccatctggcgcggttgcatgccgcctgcatggctgcccgccccttctgcccgttggtctgggcgaaaatggggggtcgcctgggagagccttggagcgtgtcggagaagtctcagcccgcggcacctgggggcgcaccgtcgtgccttctcatcttccaagcccctggatgggggcctggccacaccccgccaccggcggtcacccaagatggtgacctccagtttgacggtggggaaaacgggccaggccgcggcctctactcctccctcggcctcaaggatttttgtcatccaggccaagatggaagatga

SEQ ID NO: 13377 - DNA, 438 bp, Zea mays
  Peptide Sequence Number=SeqID_56752
atggcgcacccccagtccctgctttctctttgcctctctctcttatccatggccgccggtcgctcctttctgtcccgcccggtgctctgcactgctccgtcgcttggtctccggctcgccgcgtgcgcaaggcttccctgccggagttccgccatccgcggcctctgccctgcttccttggctgcgtgtccttctgccggccaagctcggctctgcgctttccctttctctgtgcttgtgctcgccgtgccgtgctcgattaattgcgtgagtcacgaaactctcgtcgacttcgcagttcttgcgattatcaagccaggaacgttaatcaatcgcgcgatgcggaagacaagccaagtcgaccccaagcgcgggctactccgcaggatgatgctgatggacaagcctgaagatactcgtcaagtggacgtcacctaa

SEQ ID NO: 13378 - DNA, 174 bp, Zea mays
  Peptide Sequence Number=SeqID_56753
atggagagtcatgatctccgggcagaatgggaatcacggcttgtgggtggctatgagatcgatggttttgattatgactatggtactggttgtcagcattgcaaccactgctcaggcgaagatgaagctatggaaggagacttccaggagttccaagactacgacgagttctag

SEQ ID NO: 13379 - DNA, 288 bp, Zea mays
  Peptide Sequence Number=SeqID_56754
atgaggatcaagctcaagatgatgaaaatgaagatcaagaggagccacctcaagaggaggacaatgatcaagggggagatgccaatgatcaagacaaggaagatgatgagggaccaagactgccacacccaagagtccactaggcgattcaaagagatcaccccggtagaggatgcacttaaagattcggattgggtgctggtgatgcaagaggagctcaacaacttcacgaggaatgaggaaccaagttggtattctgcaacaagcaagatgagcatggtgtggtga

SEQ ID NO: 13380 - DNA, 447 bp, Zea mays
  Peptide Sequence Number=SeqID_56755
atggaatccttcgaccaaatgagagcgcacgtaagcggcaaggccgaccaagccgagggactcctacgcctccgggatatggatacctcactcatcaccttccgcgaaaagttcgggcatcggcagggggagcagcagcaccctcggcgttgtttccaccctcggcggaacctggcccagcctcggacggcgacccgggcaaaaggacctccacctaagggaggacgccagcaccgcgctagaagatgtcttggccaagctccagcgactgcttccacatcttcctcggcctgggaagccgccatctcccgagccgatgaagtctctttccgagccgactccgcttctgtccgcgctaacaccgctgcctccggctccggctcatcgcagagcagccgagggttccaaaaactaagcaagggaagcctagagtggcaagaccgatag

SEQ ID NO: 13381 - DNA, 882 bp, Zea mays
  Peptide Sequence Number=SeqID_56756
atgttgccctcggagggcgccgaacatggtgtttccagcaagctgctaacggaccccttcgacagggtccgagggctcgatgcctccctccggtgggattttgttacaaatcgttcccgccggtctcggaaatgtcctagggaggggacgcgagcctacaggcgacttgaccgctgcctctgctcgtctgccgctgcagttactaccggcccgcttttgaccatgccagccgtcgtgcctaccccgcggctgaccggcccatggccgtcacctttaactagcactgttgggtcctgcgcagggctacctcgagtcgcggcccgcttcctttgcgctggtccgccggatgtggacggagccgaaggggcgcacagttgcggtgcagttggatgcctgtcgcgtggcagtccaccctttcgaccaccggtttctgcgaagatgggagagcgcttgaggagaaccctggaggatgtcagtggagatttcgcccatgacgctaaggggtgcaacgccgccttgctcttgctgtcgttggaggagcgcgacctcgtggagatcggcacctttcagccatcgctcggcctcaaggattttcgtcgtgcagcccggctgcattccctcaccaatgggcagtttggtggggagaagctagccgggctgcggcctccgccccgccctcagcttcaaggggagaaggcgctcaccgaccttgcggaggggcgaacttcggcaacgcaggaccggtcggccgcaagcgtcgtcagctccagcgtgcctggctcgctggctctgtcgtggcctccgatgctgcctcctgccgcttggtcctcgtggggaccggcgctggcctgtggcggaaccatccgaattattccaacttaa

SEQ ID NO: 13382 - DNA, 543 bp, Zea mays
  Peptide Sequence Number=SeqID_56757
atggcggcgattggtgagctcgggaccacggatagggtacttataccgacggccaagcctatattggcggcggattcacgggccgttgaagcagtctgcgagctcatcggcgaccagagcgcgcgcacacatgggcaaatgggtgatgggctgactgctggggaaataggcccacggtctcctattcctaaaggtcactttaggcacaggatttcaaagtgtgaaatccacatttgtcttttagaaggaaaaaggtttcgtcctacagtcaacattgctctgataccacttctgtcacgcccggatttcggggcaccaagacccgggcgcgaacataatcaccaggtgggagctcatgtgaagtgtaaggcttaccaacggagatggttagagctgagcattgcttttaaggtcatggaattaccactagacgcgcagagcagcggaagacgtctcgatgtagacgaacgcgtcgagcagtgccgtgcagtcgccggcgtccttcacgtcctcgcacggttcgtccaagtgctccagatgtag

SEQ ID NO: 13383 - DNA, 396 bp, Zea mays
  Peptide Sequence Number=SeqID_56758
atggccgcagttcgacccgcccgccgagcagtagcagggccgaccaggccgtcaggccgaggaaggaagccgccagagcgttcatgccgttatgcgatgcctgcatcgccctgcgcaagcgttcagctgcgtttacgcccaagaactactgcggttataggtcatggaattaccactagacgcgcagagcagcggaagacgtctcgatgtagacgaacgcgtcgagcagtgccgtgcagtcgccggcgtccttcacgtcctcgcacggttcgtccaagtgctccagatgtagcacctccgaggtatccacacgtacagggaggaagcaccgcgtaccgaactgctaggttcgcgacggcggcttggcgagggcgagaggtgggcggcggctgttag

SEQ ID NO: 13384 - DNA, 633 bp, Zea mays
  Peptide Sequence Number=SeqID_56759
atggcccgcgcccgcgcctataaaaccctcccagacttcggctgcactcttccgcgcaccctcaagcctcaccggagtccagctcgccgtcgtttgctcgtgcgcagcgtgtccgcggccgcccaatccctctgtcaccgtagaccggccagtagagccattcccaactccgtccagccctcggagaagactgtgcacacctccgtgaagctccccgagcgaggaatcggagtttgcttcgccggagaggccagtccacgctcgccggagctctcaaccccgccggagtacgtggaccgggtaaaccactccaccatccttcgattccctgtgcacacggtcgctacgttaccccgtgaggctcaccgtgccctcggattgaaccagttcgccgtggtttggccggataacttagaaaaaccctacaaaaataaccccaagacaatacaaatccactatgttatcctaaaagaaaacctaagcctaaaagactgtaaccttgctgacagagagtacatcctcgtgccggagcaaggagctgctcaggaggtagccccggatccagcacccgagcctgcaccagaggacctgcctgccactgctttggaaggcaagccccggttttatgcataa

SEQ ID NO: 13385 - DNA, 816 bp, Zea mays
  Peptide Sequence Number=SeqID_56760
atggagcctggcggagggacagctgtcggagcggtcgagtccttgctgacgtcctcttgcttccgtaagggggctgagagccgccgtcgtcacagagtatgcgaggcgccatcattgcctatctggcggagcgagccagatgggacaccggtcttgttccctgcggcccgagtcagctcgggtagggtgatgatggcgcctcctgttgacgtggctggtctgcgccctaggttgggcgatgtggaggctcctccgaagccgaggtcgagtctgtcttccgtggccgaggtcgagtccgggcccctgggtcgggcgaggcggagttcgtcgtcttctagggctgagcccaaggctgagcccaagtccgagccctgggtcgggcggagcggagttcgtcgtcttctggggctgagcccaagtccgagccctgggtcgggcggagcggagttcgccgtcttccgggacttagcccgagtccgagccctgggtcgggcggagcggagttcgccgtcttccggggctgagcccgagtccgagccctgggtcgggcggagcggagttcgtcgtcttccggggctgagcccgagtccgagccctgggtcgggcgaagtggagcttcctatggtgccttcggcagggcctgacttcctgtcagtctcactctgtcaagtggcaccgcagtcggagtggcgcaggcggcgctgtccttctgtcaggccgctttatgctgatgggggttaccagctgagaattaggagccttgagggtacccctaattatggtccccgacaagcagcgtgttataacctcatatag

SEQ ID NO: 13386 - DNA, 225 bp, Zea mays
  Peptide Sequence Number=SeqID_56761
atgaaggatgtcaagcccatcaagacacccatgggaaccaatgggcatctcgacctcgacatgggaggtaaatccgtagatcaaaagcaccggactgtccggtgcaccaagtggagcaacggctatcagcgcaacggtcgactgcatagtgccctgacagagctacagtcgcgacagaagtcagagcaggcgccaaaggcgcaccaggcagttgagagcacctag

SEQ ID NO: 13387 - DNA, 537 bp, Zea mays
  Peptide Sequence Number=SeqID_56762
atgaggaaagttatgaagaaaatatttatagggacttcaaaaatgattcggaaggagctgtatgaagtgtgcgccatcttcggcgtccgaaacgggtaccgcgggttctaccaactccgaggaggaagaagagcccgcgacggtgcacagattgtggacaccatcgaccggcgcgggttcaaccaggtgtgcgccatcggcggcgagggcacgatgcgcggcctggtgaggatcttcgagggggtccagcggctgggcgtccccgtggccgccgccggcgtcccgaagacggtggacaacaacgtgggcatcatcgaccgctccttcgggttccacacggcggtggaggcggcgcagcgggccatcgccgcggcgcacgtggagccgagagcgcggcgtaaccgcgtggggctcgtgaagctcgtgggccggagcgcggaccacatggcgctgcacgccacggccgcgacgtcgactgctgcctcatccccgaggaggatttctacctccgcgtttggctgcggcgggggctgttag

SEQ ID NO: 13388 - DNA, 2280 bp, Zea mays
  Peptide Sequence Number=SeqID_56763
atgctcacggtgaagtacatcgacccgtcgtacatggtccgcgccgtggcggccgacaacctgtgctgcacgctgctggcgcactcggcgatcgacggcgccatggcggggtacacggggtacgtgccggggctcatcaacggcaactacggctacatccccgtggtggaggtcgccgaggcgcgcaaccccgtcgacacaagtgggcttgggtcaggacaagactcacccccatgccgtgtcatgccattgccacccatccttgggagctgcagctgcctatataataccaacagtgccgaagcaagaacatccaccctgcaccaccaccaccgggcaccagcgtcgtcgaagctgctcactccatcgccgctccaagcttcgtacgtcgtctacctcggcggccacgcgcacggccgcgcgggcgcggcgctggcgtcctgcagggcgcgcgccaggagctcgcaccgcgcgctcctgggctccgtcctgcgcagcgaggcccgggccagggacgccatcttctactcgtacacccgctacatcaacggcttcgccgcgacgctggaggaggacgaggcggcggaggtctcgaggcatccgcgcgtcgtgtcggtgttcccgaaccgaggccacccgctgcacacaacgcgatcgtgggagttccttgggatggaggaggaaggtggccgggtgaggcccggctccatctgggccaaggcgaggttcggcgagggcgtcgtcatcggcaacctcgacaccggtgtgtggccggaggccggcagcttcagggacgacggcatgggcccggcgccgcccgggtggcggggaatctgccaggaccagcaggcctctgacgacgcgcaggttcgctgcaacaggaagctgatcggcgcgcggttcttcaacaaggggtacctggcgacggtggggcggcggcagcagcagcaggaggtgaacccggcgagcacgcgggacacggacgggcacggcacgcacacgctgtccacggcggcggggcggctcgtcccgggggccaacctcttcggctacggcaacggcacggccaagggcggggccccagcggcgcacgccgccgcgtacaaggtgtgctggcgccccgtgaacggcagcgagtgcttcgacgccgacatcatcgcggcgttcgacgccgccatccacgacggggtgcacgtgctctccgtgtccctgggcggctcgcccgccgactacttccgcgacggcctcgccatcgggtcgttccacgccgccaggcacggcgtcaccgtcgtctgctcggccggcaactccgggcccggcgccggcaccgtgtccaacaccgcgccgtggctgctcaccgtgggcgcgagcaccatggacagggagttccccgcgtacctggtcctcgacaacaacaagcggatcaaaggacaaagtctctcgcggacccgccttcctgccaacaagtactaccagctgatcagctcagaagaagcaaagggagccaatgcaacagtaacgcaagcgaagttgtgcatcggggggtcactggacaaggcgaaggtcaaagggaagatagtcgtgtgcgtccgtgggaagaacgcacgagtggagaaaggtgaggcggttcaccgggctggcggagctggcatggtgctggcgaacgatgaggctagcgggaacgaggtcatcgccgacgcacacgttctccctgccacgcacatcacctacgctgatggagttacgcttttggcctacctgaaagctacaaggttggcatccggctacatcaccgtcccgtacaccgcgctggacgcgaagcctgcgccgttcatggccgccttctcgtcgcagggccccaacaccgtcacgcctgagatcctcaagcctgatatcaccgcgccaggggtcagtatcctggcggcgttcaccggggaggcgggaccgaccgggctcgccttcgacgaccgccgtgtcctctttaacgccgagtccggcacctccatgtcgtgcccgcacgtcgccggcatcgccggactcctcaaggccgtccatcctgactggagccctgccgcgatcaagtcggcgatcatgacaaccgccagggtgcaggacaacatgaggaagccgatgagcaactcgtccttcctccgcgcgacgccgttcggctacggcgcggggcacgtgcagcccaaccgcgccgccgacccgggccttgtctacgacgccaacaccacggactacctcagcttcctctgcgcgctgggctacaactcctcg

SEQ ID NO: 13389 - DNA, 489 bp, Zea mays
  Peptide Sequence Number=SeqID_56764
atggggatctcgagcatgccggagccgcgggacagcctgctggggtacctggtgtacaacgcggtggtgtcgatcgcggcgctggcggggctggtgcgggcggcgctggtgttcctggacctgcaggccgcgcagctgcccgggggcgcgggcgcgggcgcggacgacgaccgtctcgcggcgtcgggcccgggcctgggcctggcggagcggttcctgagggccttccggccggcgctgtacggggtgctggtgtccacggcgtgcggcgcggcggaggcggccgcgggcgacgacgactgcagcgtgtgcctggccgggttcgaggcggaggccgtggtgaaccggctcccctgcggccacctcttccaccgcgcctgcctcgagacctggctccggtacgagcgcgccacgtgcccgctctgccgcgcccacgtgcccctccccgccgacgagacgccggtgctccgctacccggagctcgagtga

SEQ ID NO: 13390 - DNA, 381 bp, Zea mays
  Peptide Sequence Number=SeqID_56765
atggcgcgctccgcctccgcgacggcccccgtctcctgcgccattgaccctgccatggttctctctcacaagttccccgaggtcgcgtacgagtatgatgagagggatgaagtgttgtacgcgctggcgatgggagcttgcaacgcagatgcagccgatgagaaggagcttcagctggtgtaccacagggatggtcagtcctccattaaggttttacctacttttatttctgcacttaatgcaaaaactggcgatgggttttacatggatgtccctggccttcactataacccaacacttttactgcatggtcagcaatatatagagatatataaaccaattccttcacgagataatatagcagatggtaaattcttttag

SEQ ID NO: 13391 - DNA, 177 bp, Zea mays
  Peptide Sequence Number=SeqID_56766
atggggatatcctacacatccaatggggacttagggacgcccccatggccaacacagccacttccatcaccagcggattccggctctcatcaagtgactcctccccctcacgctgactttgcggacagatgtctcaattctagtggcgcagctacgaacaacaatacgatgtcctaa

SEQ ID NO: 13392 - DNA, 660 bp, Zea mays
  Peptide Sequence Number=SeqID_56767
atggttgctctcgggcggcactggcgggtcgaggggaggtcgccggagctaagggctagctcgggaaggtcaggcgaggccacctttgcattaaatgcccctgcgatttggtcggttggcgtggcgatttggccagggttgcttcttggcgaagactgggcctcgggcgagccggaactttgtgctgatgggggttaccagctgagaattaggagtcttgaggaggcgctccgcaaaaattcaccgggttgtccggtgtacaccggacagtgtccggtgctccaaggaacggcgcctcaggaactcgccagcttcgggaattcgcaacggctagtccgctataattcaccggacatgtctggtgtacactggactgtctggtgtgacatcgaagcaacggatacttcggcgccaacggctacctgcagcgcattgaatgcgcgccagcgcacgcagaagtcaggcacgcccatactggcgcaccagacactctacagtacatgtccggtgcgccaccggacatccaggcgggcccagaagtcagagctccaacggtcggaacccaacgactttggtgacgtggctagggcaccggacatgtccagtgtgcaccggactgtccggtgcaccatacgacagtcagccccaccaaacggctag

SEQ ID NO: 13393 - DNA, 267 bp, Zea mays
  Peptide Sequence Number=SeqID_56768
atgacgcatttcctcagcagcctcatcgatcttcttctgaagatcggcaagacgaagcatcttgtccttcttcctctggacctattgatggatggcttcgagcggctagaggacgttgctgctggcctccaccatactgctgagggtggggctagcgctgcaatagctgccacagaatctaattctgctgagccattagctcctgcaccatgggagctggaggaggtggcgggggaacgtgctcgttctacccgcgacgctgcctag

SEQ ID NO: 13394 - DNA, 276 bp, Zea mays
  Peptide Sequence Number=SeqID_56769
atgacacttacatctaaccctctttcacatatgacttcacccacccctatcaatggaggagacacttgcttcagttttgactacctttcccatgagggttttccctccatcttatgggaggtgctctgctccgctggttaccctacaccccctctgtatatggtgcagttatacgaggagcatcgagtgccacgttgcagggtttggctaaccctggagtctcaccctctgcagcctggatggcgttcccttgattccgtgactgtcgggttctag

SEQ ID NO: 13395 - DNA, 675 bp, Zea mays
  Peptide Sequence Number=SeqID_56770
atggccatgatgggttcaacatcggaaaagatgtacctctgccaggtaattttacttaacttgacaaataaaactggacttttaaggatccactttagtaagcatttctgcaaaacagagtctttgattattgaaaagccttaccttgactcccttaaccagcatacccttgagagtcttttctttagtcgggtgaggaagcaacaaatttttgttgcttttgctccaaggtggttcccaaggaagaaaaacaagagtgaagctgcgggaggacttggtcctccatatagaacttttatgaaagaactatcgggaggagtttttgcctcccttggtattgtaataatattactctgcactcctaggataactttggtaagaaagaagatactgaacttgtcaagtggttcaggggcacctacagggttgtctaagaaaatgccgtcgcgcacaaggagaatagcgcgcaaacatactggaccgattggtgtgccgagtcaccagctggccccaaggcatgataatagtagtagcggaagaaatgatcctataggggatctcaaagctgaagtaagtcggctccaagcggaacttcaccgcaggacggctatatgggtcgtagatggcgaccgcataaatgagttgagaagagacgtccgccatctacgagattag

SEQ ID NO: 13396 - DNA, 636 bp, Zea mays
  Peptide Sequence Number=SeqID_56771
atggccatgatgggttcaacatcggaaaagatgtacctctgccaggtgaggaagcaacaaatttttgttgcttttgctccaaggtggttcccaaggaagaaaaacaagagtgaagctgcgggaggacttggtcctccatatagaacttttatgaaagaactatcgggaggagtttttgcctcccttggtattgtaataatattactctgcactcctaggataactctggtaagaaagaagataccgaacttgtcaagtggttcaggggcacctacagggttgtctaaggtccgttggacaaggacaactgtaggtgggcctaattacttgggaggttccgtcacaatgagcgcattgtacaacctacaagccttgcagagcgacaccatggcacacctcactaatattgctcagactactaatatcaccctcgacagtcgagaggacttcgtggtcgacttgtcttcggaattggtggaaaaagacctacaggtggaacagttgagccagcgcatcgcgactctagagcagcacgtggaaatatgggacaacaccatcgatatcctagagatccagctccatgatgtgcaggaggaacttgaggaagccaacaaccacctggagatgcaccactag

SEQ ID NO: 13397 - DNA, 246 bp, Zea mays
  Peptide Sequence Number=SeqID_56772
atggcacatcgaatgttgccgttgtgggcttctatttatatgcctagtgcattgcaacttggcgggccccatttgtcatcgactttcgctattctagcgaagggaaggaacaaattaatactgcgaggggctactattgggggccttcatcttttgaaggtcctcaaaaacacgactaacatgttttccaagtataatgtactcacagggaccttcggccttgagatgaaggtgtacaagatatga

SEQ ID NO: 13398 - DNA, 273 bp, Zea mays
  Peptide Sequence Number=SeqID_56773
atggcgaggtgtatggagtccgatcaaccccatggcaaatgggtaacacgacttgtgggtaaagatgtgcaacctctgttgagtgtaaaactgccttacacttcacatgaactcccacctttgattgtcaataccaggaagggtggtggaattgatctagctcccaatcgacacacttggaggatatttagacaaccacaacaacaacaacctgagatggatcctccacagcctccaccagccaaagctgacccagctgttgcagatggctga

SEQ ID NO: 13399 - DNA, 372 bp, Zea mays
  Peptide Sequence Number=SeqID_56774
atgaacatatgtgagctcacccttgctgtctcacaccccccactggtcaagaacaggtaccacaggatgaggcgcatggaggatgctgtggagtcacacctggtgattctgttcgtgccccagtccctgaaacacgggtgtgacatactgggaggcagaccatctagccagactgtctgcgagaggggctgcatactgcagacctctctgttggactccagatcattcgactataggggtcggaccgtccacgtgctgcatttggagcactgggacgaaccgtgcgaggacgtgaaggacgccgacgactgcacggcactgctcgacgcgttcgtctacatcgagacgtcttccgctgctctgcgcgtctag

SEQ ID NO: 13400 - DNA, 867 bp, Zea mays
  Peptide Sequence Number=SeqID_56775
atgaacaaaagaccggcattcaaggtgccatcacaaacggaactccggttccgtccccgcgggtatgaacaacctccacaccggggagcctgcggggcgacaagttccgggcaactcaccagcgacctctgcagcagcagctatggtcccaggacggacgcggccactggaaggctctcgttcgcatccccgctcaagggacgcgaactagacatcaaagccaaagagtcgtgtggcgtccgcctcttcaccaacgccgcaccggcgaacgcgggccgctccaaagcgcaccggcaggacgcctcctccgcagagctgggggatggtttccaccaccagaagctggaagagaaggtggccagccgacccgtgccggaggtagagccccggctcgcctcgctctccgccccagcaaggatggtgaccgccggcgagggggtgcagccgggctgcatgatgaaaatccttgaagccgaacgatggctgaaagaccagcgggtgaaaggggcggacagggcgtgcaagcggcatgcaacccgcgccaagagaagcaagcgacgcttcgccttcgccataatgaccgcgtcaaaaaagggaccaggaaagggggataccccgaaaaggatccttctccgtgaaggaaacaggccccgagcctccctactgatcagaggttcaaaggctggcccctcggagggattcaacagccgcctcagagcgcttgggttccgcacccactactggtcagaggttcgaaggccggcccctcgaaagggttcaacggccgcctcaggccactcgggctccgcgcccactactgatcaggggttcgtaggctggccctcgaagggttcacaactgccttag

SEQ ID NO: 13401 - DNA, 393 bp, Zea mays
  Peptide Sequence Number=SeqID_56776
atgtgcgggtcgccgtcggggatggtcggagtcggcggtccacgtgcgcaggcgagggagctcgtcggcggcgaggagtccggcctatccagggcacaattgaccaatcaaatgggtcagagagcttcaccagggatcaaggagggcgggcggctgaagtccggcgaggacgatcttggttctccggtgaagttctgctgggtccgagagcttgggaagcttcacaagctcttggcgaagctatccgagaggctggcgcagcttggaagcgatcggagtgggttggccacggtggccgaggctcgggtggcattggcgggcggaagagagctcgccggagctaaggaggggcgtctggccggcgaaggttttgctgactggatcaagagatag

SEQ ID NO: 13402 - DNA, 78 bp, Zea mays
  Peptide Sequence Number=SeqID_56777
atggcgaagcggacgctccgcgagacgagagggggttgcaatgctgacaacctggggatgggggggtttggtgtgtag

SEQ ID NO: 13403 - DNA, 408 bp, Zea mays
  Peptide Sequence Number=SeqID_56778
atggcttgccggcactccaaacccccgctcgtgaaaggagacgaagctcagcacatactccggtggcggggacggggcaactccgctcggaggggccatccactccggctgcgagtcaccggagagagggcaaagcaaaccttcagcaacaagggcctccagatcacctgccgtgatggtggaaaaaggccacgggtcacgcggcgaaacaacggtcatccggtcggccatcaccaagcagaagaggtggcggcggagaggacgaggacaggcgacacctttggcaggcgaagcaggcgacgcttcacctccgccatgatgaccgcgtcaaaaaagggaccagaaaaggggatactccgaaaaggatccttctctgcgaaggaagcgggccctgagcccccctactga

SEQ ID NO: 13404 - DNA, 1404 bp, Zea mays
  Peptide Sequence Number=SeqID_56779
atggccataatctcaaagatttggagccaatccatgcttgaactcgacctctctctgtgctgcctcgtgctcgacgctgtgccaggcgccagagcgcacactggcgttcgcccgcgcacgccccgagcacttgtcagagccccgccctcggccgtgctcgcccgcgcctataaagcctccccgggcgcgcctcacctcaccccatgctcaccttcgccggccagatgcccctccttagctccggcgagctctcttccgcctgccattgccacccgagcctcggccaccgtggccaacccactccggtcgcttccaagctacgccagccgctcggatagcttcgccaagagcttgccggactcctcgccgtcgacgagctcccccgcctgcgcacgtggaccggccgactccgaccatccccgacgacgacccgcacatcgccgtgaccctcaggacctcccctacacccttggccacctcaccggaacagtctcgccgccgatggctcgtcttagacacaccacacggaagtatgtcatccccttcttaccctctcgtctcgcggagcgtccgcttcgccgtcccgtggccggtcagtccagtcacttggagaggctgcaccaccgcctgcatgaggagcaggagcgtcgacgacaggagcaggagcagcagggctcttctttctcgctccagcaggagatagagtctgtgaggagctgctcccctatgcttcctctggaggcgccccctgcaccaccactgggcgccccagcctctggagtagctgctggaggagacccagacgacggaggtggcgacgacagctcgagccacgacaccgacttttctgctgaccaggagccggaaggatgggttgctcgacccatcgctcgcgacgctgctcgcgggtgtcacttccacgatgcgctcgacaccctgctacgtcgggcacttgaccggcgtacttggtctattgagtatcgctgtgtggtctaccaacatagtcgcggggtctacccggaccgctgggaggcgacctgcttggtgcgccgtctggagaacagtctccaggctaacggtctcaacctgaagtattacccccgccgtccatctggcagcacgggaggcgtgattgtttcacctgtcggtgaggacaatcctaggttgagcagcacagtcaacctagccaccgtgctaaacacggagctggaccatgcactagacgagctgagtagggctcgtgctgagatcgccctgctgcgggctaagcgcgcggaacgtcgtcacctggatgatggttcccccgctcccgtcgggacacaacacccataccgctcacctcggcgtggacaccagtcttatggcaatcccgactgcaagaccaagataaatctagaaccatag

SEQ ID NO: 13405 - DNA, 384 bp, Zea mays
  Peptide Sequence Number=SeqID_56780
atggccacggtggcgacgagccacccggcggcgccgtgcgtgccactggccgcgggcgtggcggctggggccgtgcgtgctggcgtcggacgccgctggtaccgagcgcgccggtgcggcagccccggtgccatggcctacgcaaggccgtggagtacgacatccagctcgagacggaggagtgcgtgcggtctgctgccgcttgcgcacagtgtaggaggcggggctggcgccacgcggtcagtggcggggcttgcggacgagcaccgggagcttgaggcggtgctcaggaagatgacgccgcccaacggccgtaccgtgcttatcttccgtgcgccatgcgggtgccctaaggacaggatggaggtctggggcgccggatga

SEQ ID NO: 13406 - DNA, 453 bp, Zea mays
  Peptide Sequence Number=SeqID_56781
atgctgttctgggaaagaaccattgtcagttgtcacaggtgccatgttgtcgtgttcagcgttcgagatgctgcaataccaaagagcgttgttgggtgtgccaatattccaaatttctcacagccaacagtcgcgcaggacgctgcgaggaacgcaagtgccgcgagcgaggcgaggagcgcaagcgcgtcgaccgcagccggcgaggagtggtcgcagagggcgggaaataaccggccccgcgatcgcgaccgcgaggtggaggaggagggacgcgcggcgggaccacggggaggaaggatcggaggaggcgcggcgcttgtgcagttgtggtgctcgaaggtccggactagtctgggaatatgggtcgggtttttcgaacaaccacaaacacggcccaaaaataagaaaccaaaaggccggcccggcatgaaaaaaaatgggtcgggctag

SEQ ID NO: 13407 - DNA, 528 bp, Zea mays
  Peptide Sequence Number=SeqID_56782
atggcacccaagagagctaacccgaaggctgacgaggctgcgaaggcagcactgcttgccgcaagaaagggcaaggccctcgccctcacccaatccacccaccaagagaccactgaagaccacgttccccgcacctgcgaagacgacactctccgcacctgcggccctaaaggacaatcgcagccacccccaggcttcgccccactgaagggcgtggacctcaccgaggatggtgaagtcctcggcgtctcagcggaagaacagctacagctgcgcgccctgctgaaagggaaatccaagactttgctcagtctggagcaccggactgtccggtggtgcaccggacagtgtccggtgcgccaggctggctcgagcgaactggccgctctcgggaattcaccagcgacgtacggctataattcaccggactgtccggtgtgcaccggactgtccggtgagccaacggtcggccgggccaatggtcggccgcgcgatctgcgcgggacacgtggccgagccaacggctag

SEQ ID NO: 13408 - DNA, 213 bp, Zea mays
  Peptide Sequence Number=SeqID_56783
atggcgccgacaggtggaccccttgcgtcggtgacctgcacgcttcaatctctgctcgtttgggcccgctcgtcaggttctctctcggtctccgcctccgcttcacccggcgtgatggccgcgaagacgcaactactccaacgactccggcgattttttgggggccgagttccgcacgacgggcggacttcaaggagtgtcatactcagctaa

SEQ ID NO: 13409 - DNA, 609 bp, Zea mays
  Peptide Sequence Number=SeqID_56784
atgaagctgtggaaggagacttccaggagttccaagattacgacgagttctaggtgtgggttagcggcaacccccagtcggctgcctgtgaaggccgcgttatctacgtttcttttccgcactttgatttattgtaagacctatatggacgtctcagacatggctcgacttagacacactgcacgaaagtcagtcatccccttcttaccctcccgccttgctgagcgtccgcttcgccgtcccgtggccggacagtccagccacttggagagactacaccaccgcctgcgtgaggagcaggaacgtcgacgacaggagcagcggagctcttccctctcgctccaccaggagatagagtctgtgaggagctgctcccctgtgcttcctctggagccgccccctgcaccaccactgggcgccccagcttctggagtagctgctggaggagacccagacgacggagatggcgacgacagctcgagccacgacaccgacttctctgctaaccctgagccgggaaggatgggttgctcgacccatcactcgcgacgctgctcgcgggtgtcacttccacgatgcgctcgacaccctgctacgtcgggcatttga

SEQ ID NO: 13410 - DNA, 234 bp, Zea mays
  Peptide Sequence Number=SeqID_56785
atggggtgcacttcgccgatgccggggaggaacaaggagcttcacagccacgacatcaccgccagacacccaaaatttcatgggattgggttgaaaaggggcaaaaggcataatccccttgggaaatcacaaaaatcccttggggccaaactttctgaaggaggaagtggggacaaacaaccccctcaggggcctattggaaatgggaacccttcgttggttgggggcccctag

SEQ ID NO: 13411 - DNA, 1044 bp, Zea mays
  Peptide Sequence Number=SeqID_56786
atgcaggcggcatgcgaccgcaccaagggggcgcaccctttcgacttcgacgcgtccagcatggaggcccaggcccacacgtcatgtaaccgacgcaccggttactacgtgcgagaaactgcaccgccactcgcgccagtaccgcaccttctcgactgcggaaccggtgccgcgactcgaggcgaccctgcgcatgactcgacagtgccaaccgagcacatcggtcatgggtcagtcagccgcgggagaaggcgcgacggtcgatacgaccagaaatgggccggcagtaatggcggtggcaggcgggcggaagcagcagtcaagtcgtcagcaagctcacgcccccctcctgggacagcgagagaaccctctcccacggcgacgcttcacctccgccataatgaccgcgtcaaaaaagggaccgagaaaggggatactccgaaagggatccttctccgcgaaggaagcgggccccgagcccccctactgatcaaaggttcgaaggctggcccctcggaagggttcaacagtcgccttagagcactcgggctccgcgcccactactggtcagaggttcgaaggctggcccctcggaagggttcaacggccgcctcaggccactcgggctccgcgcccactactgatcaggggttcgtaggctggcctccgaagggttctgacagccacctcagagcacgcagagcgagggatgaccctaggtacgttcgatacataaccaaggctcgagctatgctcccgagccttgggcaaaggcagccgaccccggaggattcacgtctcgcccgagggaccgggaaaggggatatttcgaaagggatccttctcagcgaaggaagcgggccccgagccctcctactgatcaggggtccgaaggctggcccctcggaagggttcgacagccacccagagcactcgggctccaagcccattactgatcaggggttcgaaggctggcccctcagaagggttcgactgtcgccccagagcgcctgggctccgcgcccactactgatcagggattag

SEQ ID NO: 13412 - DNA, 648 bp, Zea mays
  Peptide Sequence Number=SeqID_56787
atgtcggggaaggcgaactgttgctgcccagctaggatgcaacattccgtcctctgtcctctctttcgtggcgaggacgggagtgaggacctaccggtgcgctttggggtggccggcgctcgctggtgcggcgctagtgcacaggtgggcgttgtcgtcgatgctgacgtggtggcagctggagaaagcttctccaccgacaagcccgtcagcgctacccgcggaccgacctccggctctttggctttaatgtctggttcgcgtcccttgagtggggacgcgaacgagagccttccagctgcagcgtccgtcctaggaccatcgctgctgctgcagaggtcgctggcgagtcgcccggagcttgtcgccccacaggctctccggaaccctcggccgctctgcgatgagccggagccggaggcagcggtgtcagcatggacagaggcagacttggctcgaaaagaagacttcgtcggccggagcctggccgggccgtccgctggtgggaccagcgccggagtcggagatcctccgaccgtgttgccgtccgaggctcggtcggacttcgccgaaggtggagttgacgccaagggtgctgctgctccccctccatcgacgtctgagcctgcaggatcggttcgcctgtag

SEQ ID NO: 13413 - DNA, 3195 bp, Zea mays
  Peptide Sequence Number=SeqID_56788
atgtgttcgcatttttactcagcatacccgccttttgaggtggcagaggaggatgcggacgaaggggcccttcggtgcgccgccggcctgagcagtgggcgcgatttggttgaagaatttgtggcgtacggggtatggcccttggcgcatggctgggcgttgggcgaagtgtgccctcgccagatgccttcccatggtgggaagctggtgcgaagtcctgccttcgcgctggatctgcaaagccgcgatccggccgcctttgtacgtgaggcggaggatggggcggtgcggatcgttggtcggtacgtgccgaggacagagggccagcgtagctgggatatccgcgggtcgaatgaccgtttgaacagggtttttgaattgaatcggctgccgtataacggctatcccggccaagacgatgtggaccgccgcgggaagaagccggtggtagagtctggagacgaccctgcgccggcggccgccccatcctctaagaagaggaaactaggtactgctatgggaggacttggggtttccgatggttttgctagagaattgatgaggacatgcgcggccccggggggaaggatgtctttgcccgagctccgggagtcttcggcgcggatgctgagggttaccgggggttggtggcctaggaatgttcctatcccccgcgtggccggcgaagacttttttacatctcgcatggttcgtgaatggagagtgtttccttacgggcggaatattgctgctgttgtgtcggcagtgatggacaaggattaccagggagctgcacagaagcgccaggcggttgtcaggcttcatgaagccaggccgaagaggcagcgaggggctgcgaaggctgctgctcccggcggaggcaagccgccgctggcggcgaagtcggtcgtccctgcgtctagcaagacggcggaggctgcggctggcgccggtggttccaagtctgtgaagactgtgccgccgtccagcagggcgccggaggtcgcgaaggcggcccgagggttgccgtcgccgggcaagcgcgtcgccgacttcgccaccgatattagtgtggacgactatcttggtgggtcggacgaatgccaacttgttattgttgagcctgccgcggcgaccacggcggctgccatagtgccgaaggcgaagggcggtgctcttagtgctggaggcgagatgccggcactcgctgctgtcagggacgaggcgggcgttgtgtcccgccggctgaaggagatgaaggaggcgctaagtcaggcggctgacttcgcagaccgcgcggcgtcgggggccctcatggcagttgtgtctgccgaagtcgagagacttcggacgcaacatgctgacgctgtccgagaaaaatcggccgccgacagtaagtgccgcaagctggcggacaaggtggccgcgctggagggggaaaagactgacctccggcgccaattggtgaaggagaggagggaggccaatgaggccctcgccaaggcgcaggctgcgctggcggaggccaatttggcgcgggcgaagggtagtcttgccagggagcgcgccgcgcagttggaggagcggctcaacgccctgcagagccgtgtggagaggaccgaggccgcggcgcgcgcggaggctgagcggacgcgcaaacagcttatggattcataccatgagctgggcgcgcggaccggtgacttcgaagtgccggaccgagagcccggacttcgctgtctggagtgggtacaggaggagttgcaggcactccccactattgtggaggggtttatgtcgtatgcctccctggtcacctgcgagggggcgatgaacgcgctctctcgcgaagggtgccggcactttgaggtcttcgaccaagctgatgaggattttgagcgagatatctacaaggttgaagaccctatagtgaaggagtccgccggagccatctacgaccggatgtggggcccgcacggtcgagaggtggtcagggagcgggccgagacggcgagggctcaggcggcgcgtggcgagagggtggatgatttcggggcattgaacagcgcgctgcctgacccggagtcaaacccggcggaggccgtgtccgaggccgccctggagccgcccccggagactgccgaaggcgctcctgatgccctcgcagccgctacgaccggcggaggcccgcccccagagaccgccggaggcgctcctgatgcccccgcagccgctgcgccgagggctgaagatcctgcgacggtggcggcggaggcgacagcggaggctcccgcgacggctgggtcttcgcaggttcaagattttgggcctgcgcacgcaaccaccactactaattttttggcggcttcgaccgtggatggtggtaataaatatgatgggtctgcatctgagttttctaattttgctgactctgggagctcggttgagtggactgaggagtcgtcggaggaggacttggactattttgcggccttggatgtggcagcggcggaggcttcaccgcacgctgcggacacagaagatgtgcctggtccgagtactgggcgcaggcggcgaagggcggttgcgaagcgtagagtgagtggggcgcaggccagtcggctttgtgtgagtagggctagccggcaggaactgttgtccttgcctgccgccgcgagtacaggtgaaggggaattgcgaagtctttttgcgggtgaggagcttaggataatgttatttaactatagggagatgggaattattccgaaggttgagccgatgactggtgcgtatatagtcggtcttggcgcggatagtttggtgtggtcgtttttgcttttgttacgcttcgtccggctatgcccctcgggcaacttctgcgtggacagtttttgcagtggacttcggtttttcgcacttggctgtgctagtccgggctacacccctttaggcaacttctgcacggttgtcgatgttccaggagtgctccaggtcttcgccgcttggcgttgtgagcctgtaagcgctgggggaagctttcgtcttgactatgaaggggccctcccacctgggctccagcttgcccctggactctgtccgagctgtccggacgagtacgagatccccttcgttgaattcccttgggatgactgcatggtcgcgccatgcttttgtctgggcttggtatttgtttag

SEQ ID NO: 13414 - DNA, 705 bp, Zea mays
  Peptide Sequence Number=SeqID_56789
atgggcgcgattaaggtcaaggctcagtccactcaagggacacgatctcgcctctcccgagcccagcctcgggcaaaggcagtcgaccccagaggattcacgtctcgcccgagggccccctcaagcaacggacacaccttcggctcgcccgaggcccagtcttcgcagagaagcaaccttgaccagatcgccacgccaaccgaccggctcaggctcaacctcgacgctgaacgacggactccgcctcgcccgaccccagggctcggacacagtctcggcctcggaagacggtctccacctcgcccgacccagggctcgggctcaacctcgacgctggacgacggactccgcctcgcccgaccccagggctcggacacagtctcggcctcggaagacggtctccgcctcgcccgacctagggctcgggctcaacctcgacgctggacgacggactccgcctcgcccgaccctagggctcggacacagtctcggcctcggaagacagtctccgccttgcccgacctagggctcggactcaacctcgacctcggaagatggactccgcctcgcccgaccccaggggtcggactcagcctcgacctcggaagacggactcgacctcgacctcggaggagcctccgcctcgcccgacctagggctcggaccgaccatgtcacaagggggccatcattaacctacccctag

SEQ ID NO: 13415 - DNA, 381 bp, Zea mays
  Peptide Sequence Number=SeqID_56790
atggagatgagcttgagggagaggacgaacgccgacctgggcgagctccatggaacctacggacggacgagaagggcccccgagctcgtcggcgagggacgtaaacagactgaattagaacaacgtttgggctacacatatttgtcggcgtttcggacccgggggtccctggaccgacgagtaaatttgtcgctgcgtgcccctgcccagatgggttggcgcacgatggaacacaagggagaaacgcggctcgtattatctcgcaccagggggggggctgagaaccaccgtcgtcatggacgcacgcggggagccatcattacttatttccggggcgagccagatgggacgccggtcttgttccctcgtagcctgagctag

SEQ ID NO: 13416 - DNA, 810 bp, Zea mays
  Peptide Sequence Number=SeqID_56791
atggaggccttggcccacatgtcatgtaaccggcgcaccggttactacgtgcaaagaaaccgcaccgccacttgcgccaatgatgcgtcttctcgggactacagaaccagtgcaacgactcgaggcagcctcgcgcatgacccaacagtgccaattaagtgcgacggtcacagggatcggaaaaggggatatttcgaaaggatccttctcagcaaaggaaaggaaccccgagcccgcctactgatcaggggttcgaaggttgcgccccgcggggttcggcgaccgccccagagcactcgggctctgagccctttactgatcaagggttcgaaggctcgcccctcgaaagggctcgggctacgctcccgatgtaccctaggaaatttccgagaccagcgggaacgatttgtaatggaatcccaccggagggaggcaccgagccctcggaccctatcaaatgggtccgggtccagcaaatcacctgcaggaaaacaacactattcaccccattccgactactgtgccaaccaccagggtaaaactaacaacagtaagtcacgacatcccccgagttcagcctcgggcgcaacagggagctccacctcgcccgaccttaggcctcgggagaaggtctccgcctcgcccgaccccaggcctcagcctcgggagaaggtctccgcctcgcccgacctcgggcctcggcctcagcctcgacctcgggaggagtcacgacctcgcctgacctcagcctcgacctcaggagaagtctccgcctcgccctacctcagcctcggaccgactacgctatag

SEQ ID NO: 13417 - DNA, 571 bp, Zea mays
  Peptide Sequence Number=SeqID_56792
atggagcgtgttcagaggtcactaaagtcaggttcgccacacagcagcttcgcggacccgcaaggacttggtgggaccattttcatgccatgcagccagaggaccgagagatacggacgagaagaagcgagacaggttcagaagggggctcagcacttgctccgtgaccgtctcaacaccgtcagggccaacagttacaatgagttggtcaacatggctatctcccaggaggactgcattacagctcgacaggcagaaaagaagaggaagacccctgtggcaggaccctcagctcagccacagcgcttcaggattgtgtccgacacacagaacaggggaccccagcagcagcaagggagatgggtgatccgaccacagcagcagcagcaggcacccaaccgcacccagtttccagctcagaggaacaatcagcagcagcagcagaaccagcagaggcaggggcagaatgttaatcagaaccaaggcaagaggcagaaggtgcaagtgaggcagggcaaactgaacttcaccaccatggctgatattccagagggagcacccgtcatgactg

SEQ ID NO: 13418 - DNA, 687 bp, Zea mays
  Peptide Sequence Number=SeqID_56793
atgacttcccacggatcctcagaggacggaaatgcactgtcccacactgacgggcttgcacgagagggctttccccgcattttgtgggaggtacttcagggggccggatacacgacaccccctcagtacgcggtgcagcagttcgagaagcaccgagtgccccgctgtaggctggctacccaccccattggcttgttccccaccgaaagggaggacgacccaacgtggaaggatcgggtggagcatgccaaggatatctgggccatctacccaggacagactgcgcacgtgaccgtacggtgcatgaatgctctgtaccgtctgcaagtgatgcgcggtgaggagatgtcccatctgatggcactattggaggcgacaaagattactttggacaacagggaggagctcgtggtggagcagctatccactgatatccaagagttggaggaattagtgggcaccagggagaacaccatcgaggttcttgaggatcagctcattaacacccagcagcagcttgccgaggctaatgagcacttggatatgcatcaccaggagatccaggatatggaggccaacgaggacgtcgacatcgagggaggagaggagcctgcctctagtgtggacactgctggctcagggagaccaccttcccccgagtcgagtgttgcctctttcgctcactag

SEQ ID NO: 13419 - DNA, 768 bp, Zea mays
  Peptide Sequence Number=SeqID_56794
atggttaagcagtctaggttcatgactgctggttcatacagtacaaagtttgtcccaaacagtgattatgacaatggcagtgatgttgtgattagcatggacaagaaagaaccgaaagatgaacccttgaatgagctagatggttctgcacgattgcatgtcgccagcagtcttaagctctgtgatagtaagccaaacactgctactgataaagctgaacctaagaagaagaccagagtgaggtactctgcatcaaacttgaggtcgaagactagaccagctgcaggaacagtggtcgtctgccctgctagtgttcttaggcagtgggctaatgagctctctgtgaaggttatggaagacaataaattgtcagtcttggtttatcatggaagttcaaggactagagatcctaatgagttggcaacatgtgatgttgttgtcaccacgtatatgactgtggcaaatgaagtacctaaagaaaattctaatgatgagcgaaagaaatgtgaaatggacggaatatgtctagaaatttccatcggcagcaaaaggaaaaagcagagcaagccaaagaagaaaaacaaacctagcaattcagaaggtggcccacttgccaggctggtacctcatctgtcgttgtccacccttgagcaaatcggcacatgcggctttgattgcattattgttggtgtccatgggaatgtcatgtgtgcctgcagcgagcacgccactggcctgacgccaggcacgttctttcaatttgtttaa

SEQ ID NO: 13420 - DNA, 600 bp, Zea mays
  Peptide Sequence Number=SeqID_56795
atggcgcctgggcgtaaaactacagccaaatcaaccaaaccaacagaagtgccactaacagaatatgagaaattgagagctgagaatttgatgaggaataaccaaaagttgcaaagacttggtgtcactacactagcgtcaatacttaaccatacttctgcaaagagcaaggttgacactcgtgaaaaatctggatctttgtatgaggtcctggaaggtgcacttaaggcaaccatagatccaaatggaaaaaggaatagaagtatgggcagagaactggataggataagtagaggtttatgcactaacatccccatacacattgctgaaggaaagatacggccagaagcacctatgcaagctgccaaacttgcatcagagggcgggattatacttaggcaacaaatgcccatcctccggcattggaaagagtacaagaaggataagtcaattgttacaaactatatcgacaaagttgctgcccaattcaccatggacaccaacaataatgcaatcaaagccgcatgtgccgatttgctcaagggtggacaacgacagatgagtcaatataaatttaacaagcttgagtattgttgctaa

SEQ ID NO: 13421 - DNA, 1092 bp, Zea mays
  Peptide Sequence Number=SeqID_56796
atggcgctccctgttgacgtggcgggcccgcgcccgaggccgggcgacgtgggggctcctccgaagctggggtcgaatctgtcttccgttgccgaggccgagtccgagcccctgggtcaggcgaggcggaagtcgttcggcagaggccagggcggagtccgagccctggggtcgggcgaggcagagttcgtcgtcttccggggccgagcccgagtccgagccctggggtcgggcggagcggagttcgccgtcttccgggtcttagcccgagtccgagccctggggtcgggcggagcggagttcgccgtcttccgggtcttagcccgagtccgagccctggggtcgggcggagcggagttcgccgtcttccgggtcttagcccgagtccgagccgtggggtcgggcggagcggagttcgccgtcttccgggtcttagcccgagtccgagccctggggtcgggcggagcggagttccctatggcgcccctggcgaggcctgactgcatgtcagactcactctgtcgagtggcaccgcagtcggagtggcgcaggcggcgctgtccttctgtcagaccgttcatcgacgaacgaagggagaggaggaacgatgtcgagcagggagcagttgacagcgaggcacgggggctggggcacggcgcagtcggggacgacgcgatgtggcacggccgagacaggggcacgggcacggtcgacgacgagctccagcgacggcgatgtcgggctccggcggcggcgtcaagcaagggaggagggagggcgtttgggggagagggagagacagcagccagcgtcgttaccgccattaatggcacggccaaggtggagggggagtgggggaaggggaagaggagagggtggtcgttgcggggaggcgaggcagcgttggggaggccgagcggcgcgacggcggcacagggcaggcgaggcggcgctggggaggccgagcgacgcagtggcggcgcgtccgcccgcgcgctctggcgcacccatgcgaagaagagggcggggcctgggcgggcccgcctcgaagtgtgggaggggtggggaaaaggggaggggctgatgggctag

SEQ ID NO: 13422 - DNA, 333 bp, Zea mays
  Peptide Sequence Number=SeqID_56797
atggcgggtttaaatctaaatagtccaggggttcaagtgaaattctctcaggtgaaggggtatcttttaatcctggccgttggattaggattacgcgccccagattacaccacccatttaagcgaagcgttacgcgatgtggacaatgcggtgaactgggccgtggcaaacttaccgccggtgcggcgaggttgtggccagcagcgaggacggcggtcgtggcctccgatgaccaaccccgatcaggaatcggcggagttccaccagcgcaccagggtgtttccggatatgatccacgtcgcaagcactgggctatcctcccatggccactag

SEQ ID NO: 13423 - DNA, 303 bp, Zea mays
  Peptide Sequence Number=SeqID_56798
atgaccaaccccgatcaggaatcggcggagttccaccagcgcaccagggtgtttccagacatgatccacgtcgcaagcactgggctatcctcccacggccaccagaggactccaaaccggcacaagcgcccgaatttcaatggaggtgaggagctcagccgccctggtgttgtggcttccgcagtcgactcgaggaggatgaaagatatctttaaagcatatatagttttgggtaagaaggaatggggtcaagttgttgggtatggccgagttgatctaagttaccgatttaagcttgggtga

SEQ ID NO: 13424 - DNA, 993 bp, Zea mays
  Peptide Sequence Number=SeqID_56799
atggcgccccgcatactctgtgacgacggcggctctcagcccccttacggaagcaagaggacgtcagcaaggactcaacagctccgacagctgtccctccgccaggcttcagcactcctccgacggccacgacatcacaccggctgggtgccaaaatctctctggctgccacgacggcatggccctcttagagaaggttggccgcgcggggacgaggacgagacaggcgctcgcgcgaggccgctcgctccctctcccgcgtggacgcttgtaaccccctactgcaagcgcacccgaccagggcacgggacgaacacgaaggcctcaggatttccacctctctcacgcctgtctccggccgcctcacttccccccttcgcgctcggcctcgcgctcgacccatctgggctggggcacgcagcgacattcactcatcggcttagggaccccccccgtctcgaaacgccgacaaatagtaagaaacaaaaaggtaggatatggagcagggaagagaccatacacagtggttttgccaagatacgcacgctaaggtgctcaaatccgtcgttgaaccatggcagaagcgagctcccacgtgttcgacgcgggctgacactcgggggcgcgctcagatcacgcccgtgcgcgaacccccgcgcgcccgcgaccgcccgtgaccacgcccgcgccacggctataaagcccgtcccagtgcccggctgccttccccgttgccttctccgtaccacgcctaactccctcgagctcgcccatagctccggcgacctccccagcttgccaaggcttaaaccgaggacccgcgccaccgggaatagcgaaatcgtgctcgccggagttcagaaccccgccggcgcacgtggaccgggttctctggaggacatggttgctagagtgaattggccgtccatcttgccaccgggttggactgtcgagtgggaccctgcttcggctgaggaggagcatgaggagtga

SEQ ID NO: 13425 - DNA, 735 bp, Zea mays
  Peptide Sequence Number=SeqID_56800
atggatcaagcagtctcattagctgcgagaagcagacgattcgaatcgagtttttattccttgcaagtgaccgcacttgtacccaccataaccggaatgggagaccacgtctcaggtcgcgtgaggggcaaagtctactgccaggttcaatcagatcctctggtgcaggctctggtgctggatccggggctacctcctgagcagctccttgctccggcacgaggatgttctggcggtcacaacggtgtacggctcgacggcggggctggcaggaatcgtccggtccacgtgcgcaggcgggtgctctcgtcggcggcgggcggggttctaaactccggcgagcacgatttcgcttttccggtggcgcgggtcctcggtttaagccttggcaagctctacgacctcccagggaagctatctgaaggcttggatcaagcggaggagggtgggaaaggggttggccatggtggttgccctcgggcggctctggcgagtcgcggggaggtcgccggagctatgggcgagctcgggggagttaggcgtggtacggagacggcaacggggaaggcagccgggcactgggacgggctttatagccatggcgcgggcgtggtcacgggcggccgcgggcacgcgggggttcacgcacgggcgtgctctgagcgcgcccccgagtgtcagccctcgtcgaacacgtgggagctcgcttctgccatggttcaacggcggatttga

SEQ ID NO: 13426 - DNA, 606 bp, Zea mays
  Peptide Sequence Number=SeqID_56801
atggcgcctcctgttgacgtggccgatctgcgccctaggttgggcgatgtggaagctcctccgaagtcgaggttgagtccgagcccttgggtcgagcgaggcggaggctgtcggctgaggccagggcggagtccgagccctgggatcgagcgaagcggagttcgtcgtcttctggggctgagcccaagtccgagcccttggtcgggcggagcggagttcgtcgtcttccgggacttagcccgagtccgagccctgggtcgggcggagcggagttcatcgtcttctggggctgagcccaagtccgagccctgggtcgggcggagcggagttcgccgtcttccaggacttagcccgagtccgagccctgggtcgggtggagcggagtcagtggagcggcgaagtgatggcggtcacttcggctctgtcggctggggggcgcgtgtcaggataaagggcctcgggcgagccggaaatatgttcgccgctggaggggggcctcgggcgagacggaaatcctccgggctttatgctgatgggggttaccagctgagaattaggagccttgagggtacccctaattatggtccccgacactattatttgtag

SEQ ID NO: 13427 - DNA, 201 bp, Zea mays
  Peptide Sequence Number=SeqID_56802
atgacggcgattggtgagctcgggaccacggatagggtatttataccgacggccaagcctatattggcggcggattcacgggcagttgaagcagtctgcgagctcatcgatgtaattgtgggcattactccacaactcatcacactcaatcaaagatccaaatcagacaagtatcataagaacaaacattcaagtgcatag

SEQ ID NO: 13428 - DNA, 258 bp, Zea mays
  Peptide Sequence Number=SeqID_56803
atgcctatgtcgcggtgccaccgtacttcggggacaagtctcctttattgccccaagcccgataacggtcagttggtgaagaccgaaggagttgcaggtgaagaccctgagcagcagtcggttggtgaaggtggtgacaaggatgatggttatgattatgcttatggtaatggttgtccacgttgcaaccactactcaggtgaagacgaagtcgtggaggaggacttccaggagttccaagagtacgatgagttctag

SEQ ID NO: 13429 - DNA, 804 bp, Zea mays
  Peptide Sequence Number=SeqID_56804
atggccatggggcaggtcagggtcctcgtcgtcgcgtacaggagctaccgccgctttgagttcttcgatggagaccatgagggaggtaaagagctaaaagcataccgaagtgtgccctggtctggcgcaccggactgtccggtggcgcaccggacagtgtctggtgcaccaggagacatcgcccagaactcctcatcctcgggaaaatctcagagccggcgcgctaaaattcaccggactgtccggtgtacaccggacagtgtccggtgctccaaaaagtcgcggctccggaactcggcagcctcgggaattcagaacggctgctctgctataattcaccggacatgtccggtgtacaccggactgtccggtgcgactgtggagcaacggctacttcgcgccaacggtcacctgcaggcgcattcaatgcgcgccagaatcgcgcagaagtcaggcacgcccatactggcacaccggacattgaacagcacatgtccggtgtgcaccggacatccaggcgggcccagaagtcagaactccaacggtcaaattccaacgacattggtgacgtggctggcgcaccggacatgtccggtgtgcaccggactgtccggtgcaccatacgacagacatccttcaccaacggtcatgtttggtggttgggactataaataccccaaccaccccaccattcatggcatccaagttttccagcttccaaccactatacaagagctagcattcattgcaaagcacaccaaaagagatcaaatcctctcccaactccacacaaagcctaagtga

SEQ ID NO: 13430 - DNA, 462 bp, Zea mays
  Peptide Sequence Number=SeqID_56805
atggctggggatggcggcactatggacgacggtgaatcgaacgtcggtgcagcggatggaggcatcgcaatcgatccgtcgcggtcatctccccatcgcaatcgccccccatcgacgcagtggatgctggcggcgcagcggatcgaacgttcattaagccaaaattcctgtgcgaaaagaggcggcgtgctgctcgggatagttgcctggcgttcggaggctgggacgagatccccatggaagcttggctcagggttgggccgaaatccctatgctgctgtcttccaaagaggccaaaaaatgtcgcacagattcttcacacccaatgggatgacacgtctttcgacgatggaggtcaccatagacagctggtcacactttgcactagctccacatgctacatatggaatagctcagtgcaccatcaagcataatttttggatgcaggagacttacaggtag

SEQ ID NO: 13431 - DNA, 525 bp, Zea mays
  Peptide Sequence Number=SeqID_56806
atgtcgccctcgccgattcccgagagcagcgtcttcgctgctgaaccagcctgtgcaccggacactgtccggtacacaccagatagtctggctcactcaaaggttgcaaggtttcgcaagaagccatttcctcttttctactctttagaagcactttatgaaggtagtgtggctacaagagaattaaattttacatcaactcaacgactgcctccttatgctcctctatctgttgataatcttgctcctcctgctactgttcctcctcttgctcctcctgctcctacttttgttattccttcagctagaacaagagagggagaaggtagcaaaagcagaaagcataagcagagccatgttggagcagctctcgaagactatgtggagttcaaaaagagccaaactaacaagacacttgatgctcttaaagaactttccatgaggaagtgtatgaagaaaatggaagcaatggatggattcacagatgagaagaagtcatatgctgtggaggtctttaagtcctag

SEQ ID NO: 13432 - DNA, 747 bp, Zea mays
  Peptide Sequence Number=SeqID_56807
atgtcatgcaaactaatcctaagagggagcgtgcgactgccctgcggttacgcgccccttcattttcgaggcaaccagcggttaggaagacggaccaccgtgcaaggggcatgcaaccaccccacgattaagtgcccttttcatcttcgccgtatccagcggtcaaagaggcaaaccgccgcgcaagaagcgtacaaccgtcccacggctgtgcgctccctcagctccgccacaactggtggtccaactcaggggcccaggcccacacgtcatgtaaccggcgcgtcggttaccgtgtgcaaagaaggtgcccgccgcctgcgccaatgccttgtcttctcggaactgtcacagattctgaaaaggctcgtttcctcccctgaggcgggaccgagggccactgtcggtaccctaaatcacggataccctctcctacagcataaaggcatcacacccatgcgacgtctcctagccacgcggaggaccacgcctaactccactagatgggcgggccaaagggcgccatgtggcgaggaaaggcaccatgcctcagtaaggctggacccccacagagggtcaccgggcccctatatacatacaggtccggagcccccgggcggcgtcaaggtcatccagcagacagcgcgcctgctgggtctgctggtgaacagtacacctgtgccgagcgacgcactgtactcatcttctcttccgcaagaagcctcctcgtttatcgttttcgaataa

SEQ ID NO: 13433 - DNA, 1152 bp, Zea mays
  Peptide Sequence Number=SeqID_56808
atggataggggcaagggacctgcaagcagctcctccgccccaggtggcaccggggggtcggaggaagagaggcgacgcaggcccagggcgcgcagaggcgcgtcagtcctccgccactaccaccatcgggccccccgccaccaccaccaccaccaccatcggtcccgccgctaccaccaccacctaggggaatctgctgggagcggtgccggcggtccacctccaaccgctgcccagatagcgccagcggcttctcaagcctcagccgtgggtccagcagcagcggcgtcagcatcaggtggcgtcgcagcgatagaggaggtcccaactgcgccgacggctaccgcagccttaatgacggtgatgtcgtcgagtacaccgtcggcagcggcggaggaggtcccaactgcgcccacccccgccatcgagggtgatgtggggggcgtgtccagctccatcccgccgcccactccagaggagacggaggtggtttttgggcgacggctccggtccggcgccgagccagaagcagcgccagttcccctcccccgggtgctgtctcctagaggagcgcaccaaggcagcgtcccgctagttcacctccgagcgggaccacaaggattacaaaagggacctccagaaggtgtacgtccgggagctagaggcgtcgcgatgggagaagaggttggccaagagggaagaagccctaagcgagagggaggccctcacaacagagtttcgggccaagctgcaggccctggactagaccctggaggcccagtgagtcagcaagtagaggccatagaaaggatgaaaaaatggaaaaaagagctggaggacaaggccagagacattgcgctcgctgaggagaacctcaaggagaaggatacatccctggacaggcgggcggcggatctcgccaggcgagagacatacctcgccttccagaaggaaatgcttgaaaggcggggcatgttgctggccgagcacgagctggaggcagaggagaaggagcggaagctggaggagcagatccggcagttccaggcggcgctggcggcaccgggcccccaggcggtggaggccaccaggaaggctcttgaagaccttcaagcagagcatcgcgccagggttcagcgcatcactgcatga

SEQ ID NO: 13434 - DNA, 342 bp, Zea mays
  Peptide Sequence Number=SeqID_56809
atggcttcgctaggtcatcccgaccgcttccagactgaggtggcgctcaatctggtgcgcggcctgctcgggtggagtgcaccggggctcaccggaaggattcgcgctggcgcagctcccctcggtgaccttgtcgtcgtggagttcgtgctattcgtctcctacatctcctgcggacgggattcggccgtagcctacatctccaccctcggcggcgtgaggtgggaaaactggcgcaccgattgggtgatcgccagcgccgaggccaacgaccgcctcgtcctgccaagcaacgggccatccctcgaccgcaagcactggaggaccaagccatcgctatag

SEQ ID NO: 13435 - DNA, 654 bp, Zea mays
  Peptide Sequence Number=SeqID_56810
atggccatgctggttcgccctgatcactaccaaaccgaggaggcgctcgactcggtgcgccgtatgctcggatggggctcgactgcgctcgctgggaggatccgggccagcactattcccctcggcaatcttgccgccggggagtttgtgctcttcgtctcctatctcttccgtggattggcgctgccgattttgtcgttctttctgttgctgctggaggagtttggctccaactccagcatctcacgccccactccatcctccaggatcctgcgcgagcctgggactaacctgacctgggaggagttggaaattttcgtgagggggattaccggtgaggctttcatccccgaatccttgatgcttccccagggcatttcgccactctgcaacgacccaaggttacagtcagcggtgctggcccagctgtcgacccttgatgagagtggtgtggcggttcgccagaccagcggccgggaccccatcgggggatccatattcctgatcgatcgtcatcaccgcaggggcagcggcagcaacgacaacgggcgccccgcttccaaggccactaggaggttcatggccccaaaggtagtgccgtcggacccccaggatccgcctatcaccgtcgaggcggcacctttgggtccctga

SEQ ID NO: 13436 - DNA, 2409 bp, Zea mays
  Peptide Sequence Number=SeqID_56811
atgcgggatagaagaaagcaaagaggttctgcactcgaagcgaagcccaagatactgttctcaactgcgcacaggcacatgctgttgtcagctcggcaacaccaccggtttttcatcggcaacggcatggagcgacgacgaaggagcgtgcaacgctggccgcgctgcggcgagggcgggccacggccagcgcctagcggcgggctgctgcaagtgcaagcggagccgagcgccgcggccgaccggccagcctggttgagctgggcgtggccgcgagtgcatgctgcatgtgcctgtgcggctgggtggaggacaaatcagcagctggccccgctggagccgtcgttggcgcgagcgagcgaggaggagctggcacgggggcggagacgggccagggtttccactgcccaggcggcggatgagattgagatgagatcatggccccgcctgtggctgctgcgatgcgggttgcgcactccatcagccggccggcccgggcgtggcgcaagtggacggacgcgcggtcccgcccgtgccatcatctcgtctcgtctcgtctcccttctgcccccagtcgcccagctcagctgtgctcgggcggcttgcgttgcgactactgagctgcacggtaaaaaaggtctggcgctcagggaaagcgaaggcgaatctaccacgctgacattggagcagggcgcgacggcgcaagagacaaacgtggtacgggcacggggtacggctggcctggaagaaggcagcgacaagaacaagcagagcgatggatggatacggttgcagtctattttcaccgctatatctacgtccctgctgagattagtgaggtgtcgcgggcacgcgcgcccggctcttcgaacgaacgcaaagcgaacccaatcagcgccgcggatctgccggacggacggacggccggccggagagtcgttctggcggaccgctcaaacgttcagctcgtaccatctagcagctcagttaggcacgcccgggtactccgaccggaggggtgctctggcggtctggctctggccccgcctggatgcggcggttgccgccagcgctgctgctgcgtggtctcgctcttgccttgccttgccttgccttggactcttgggcccggccccgcccgtcgttccagacccttctcctgcccaccaccgccttccagcaggtccgaacccgaattctctccatccctatccaccaccagccagccaagaccgggaccagggccagggccagggccagggccagggccgcccgagctcgatcgctgttccaacggcgacgtcgacgacagccgctggggtctgggcgggccgccacgccgcgcgcagccacacatccatggacccggtggctacgtgtcgcgcctcggctggcgcgccgcaattctttaccatatatgtctctggctatacggttcggttcctcgagatgctcgcacattcatctcgttgtcgttgctcgcacattcacgaagagcgtggctggccgcgtcagcctctctggctcgcctggcacggtcaacagggcggcggcagcagcagcaaacctgtggatgaggatggatcagcccagtcacgttgcatcacgcaccgccagtccggcaccgctgcagcggagattctggcatggctcggcttcttcagttcttcttcttttttttcctcctccttaaacggtgaagagaagaacgaggtccggagcccccgggtaggtccgaaccccggcagtgttccggaacgagaaggaccttggggcgatgtaaaggtcatccagcggacagcgcgcctgctgggtctgctggtgaacagtacacctgtgccgagcggcgcactgtactcatcttctcttccgcaagaagcctcctcgcatgatggtgcggatcatcgagcaccgcgccgaaacttcggaggatttcgtgatgttgcaagaggttgcatcctccgcgccacgagtgcccgaccgccccgactctgggactgctgccgtgcacgtcgtgcagcagcacacgccagcgcaggcgtcctggactccgtcgagggcagcgcctacggcgatgtctacggccagagagttgctacgccaccccctagctctacagcatcaccgggggccatgaagcagtggcgcgacgacgtcgaccgactgctcagcatggcacattctacttcgaccaggtcgaggcctcggtcatcctggcgccaacgcgaggcgacgtcgtctgtgcgctcgccctccgtaaggggtgcacagatcgacgacgtccgggcggagctcaaccgtaggcgtacgggagaagacacccgggtctctttggaaagggcgcgtgagcgccgacaaaacgttgagggtcgcaacctcgaccgagatttcgctgcggaggcaccgtag

SEQ ID NO: 13437 - DNA, 909 bp, Zea mays
  Peptide Sequence Number=SeqID_56812
atgcaggacaggcaggatgcgcttcagcagcagctacttcaggatcgggctgagagtagggcatttatggctcttatgctacagcagtctggtgtctcagtacctccggttctgtctgctccacctcctccgcttaacgctccagttgtgccattgattttgtcaggaccccctgttggtacctctccgctccggccggtcactttggcgttcacctctccggttctcagctctgtctgcccgcagccgccagtgccaccagcatctgctgttaccactactactgtggcagtatctgtgaccacttctgttccggtagctcctgtagcacggcctcagtccgagtcagtaccagctccagcttctaccgcagatcctggatccgagactgactctgaccctccaccggccgtgactggccctttagggctggatggctctgatgctgcctccgacgctgcctcccgccgtctgggcgcactgggggtctgtacaagacgtcgggcgagaaccccttcgtgcgtgctgaggcagccgccgcccaccggtgcagaggtggtcaccgtcgctgaggtggtcgacgtcgttggtggggctgtccggagccagcttccagcgcggctcttgctggtgtggaggctcacgatacgggaccaggctgagcggctacatggcttccggaccccccaggagacaaggttttgggtacgggaccaggctaaccggccacacaggctccggaccaccctatggaacgggcatccgttccttagaactggctcccaggccttcccctgttttgtaaagctcgacgtgtcgaggctggacaccagtgtgtataaaagagttatcaacggccttcgggaggcagcctcaccgagacctggatctatatacagctttagctaa

SEQ ID NO: 13438 - DNA, 492 bp, Zea mays
  Peptide Sequence Number=SeqID_56813
atggacccagggcgaggtggggcgccgacgtactgggcccacgagctagtggctcgagcgggtggcttgggcgcaggtcgggctgacagggagaccccagcggaacggggcccgttggtaagtgacgaggccggtgcgtggctcggtgagacgcgagatcgtgcaagcaggtggggtctgcccgtcgatgatctagtgaggggaaaagaagggagcggtgttggggctgatgggtgggccctaggtgtcagggttcccgttcctctagccgagcacgcgcggcggcgcttcgggcgtaggcccacgagctcgccggcgtgtccacgagcacggtgcagggcgtgggggtttggccgatcgatcgagcggttatggtcggggagaacagaggaggggaagatggtgcgatggatggagagggggaagcgggtgctcacccacagggtcaccaacgtggacgaagcttggcttggcagaggtcgaatctggtga

SEQ ID NO: 13439 - DNA, 1317 bp, Zea mays
  Peptide Sequence Number=SeqID_56814
atgccccaccgcgtcgctgccctcctcctcctcccgctcgctgccgcgtcggaggcgccgggaccggcggctgaggccgcgctgctggagcggcacgagatccgcggacccggatccctcgcagcctgttgccctggcggcggccgtcggggaccgtcccacggccgcgtcttcgtcttctccgcccgcgctgctcgagctcgaggcgagtgccgcgtcaccgcgctcctcgtctacctttcgccgcggagccgccaacatttgtcgtctcttgcgctgctcgccactgcggccgcctctccagccgccgctccccagcagctcccgcctcctcccctctctctccagccgccgatgccctgcagccgccgctgctccctccccggcgcccgcgcccatcgccccgcgacgctccgcgtcctcccaccgcggctgagcgcatccggcattccagccgccgccgccgcgtacctgcaggctgccgccgccgccatagccgctggcaacgccgcaaagcacaggccctgccgctgcggacgaccttctccgggccggcgcgaccacccgcctcctcactgctgccgcaacacctctactatggcctgcgccatctcgcagcacccccactctggtctggcaccatctggcagccgccgtccttgtagccctccctctgtccgccgcggccggccccgatgctcctcggcgctagcgcgcttccccagccacggcgcgacagcccctcaccgcaggcacccccggcagcggcttgctctcctcatacgctgtcgactccctatccatgtacgagcaggcgcctgcgctgctcacccctccctcctgaggctctacagcgtcgcccggatccgcgccgccgccgcgtcctctgactgcgccgtcaccgagcagtgcctcctcacgcttctcttgtcaccagcgtcacccatcccctgccaagtccgacgcaggcccctgcctggctggaaccgccctgtcgccctccccttcctcgccttcgttggatccgtcgctgccgcggccttctcggccggatccacgttgttgcgtccttctcggctcgatcagccgtccctttggctggatcgtgtctccccgtccggatccgtcgctgccgtggccttcccggccggatccgacattccccttcttttctgccgcgggcgcggacaccttgaccagcgcagccgcgtgcgctgctgtcggcctccctggcggggctccttgacgtctggtcgatcgaagaagcaggaagagaggaagagaaaggacaaagttaacatgaaaaaaaggcagtag

SEQ ID NO: 13440 - DNA, 324 bp, Zea mays
  Peptide Sequence Number=SeqID_56815
atggatgtgtggtgcatcggcaatgaaggcgttgtcctcaaggtcgtccccatcaaggttggcgtcattcggaggcggctcgaccatagcacacgcacgagcggtgcgatcgagggtggcgtggatgcgggcatccacgacatcacgctctgcctaggcgaggacgacattgcgcttagccttagcaacatgagcaaggcgattgtagtcgcgctccaggccttcaccgagagggggagctcctgccggcggcttgagggagttgagggagagggagcaggtttggtgataactgattgcttgattccattcctccaagtctga

SEQ ID NO: 13441 - DNA, 498 bp, Zea mays
  Peptide Sequence Number=SeqID_56816
atgaccgcgtcaaaaaaagggaccgggaaaggggatactctgaaagggatccttctccgcgaaggaagcgggccccgagccctcctactgatcagaggttcgaaggctggcccctcggaagggttcgacagccgcctcagagcactcgggctccgcgcccactactggtcagaggaaaacagcgccgcctgccctgctccgactgctgtgccactcgccagagtgaggctgacagcagccaagtccaacctcaggcgccataggaagctccgcctcgcccgaccccagggctcggactccacctcgacctcggaagacggtctccgcctcgcccgaccccagggctcggactcaacctcgactccggaagacggtctccgcctcgcccgaccccagggctcggactccacctcgacctcggaagacggtctccgcctcgcccgaccccagggctcggactcaacctcgacctcggaggacggtctccgcctcgcctga

SEQ ID NO: 13442 - DNA, 720 bp, Zea mays
  Peptide Sequence Number=SeqID_56817
atggctcgtattagaggcactgcacgtaagtcaatgatcccctttttgccttctcgcctgacggagcgcccactgcgtcgcatagtgccaagtcagtccagtcacctggagagactgcatcgtcgcctgcatgaggagcaggagcaccgacgccaggagcaggagcaggaccaggagcaggaccagcaagactcttccccctcgcttcagcaggagagccacaacacaaatctctcagaggagcaggagctggagggatggatcgctagacccatcactcgtgacgtcgctcgcgggtgtcacttccacgacgctctcgacaccttgttgcgtcggggcttcgaccgacacacttggtctatcgagtaccgttgtgtagtctaccagcctcgtcgcaggttatacctagaccagtgggaggctacatgtttgaggcccttcttagagcactatttgatcactgagagggatactgccgaggcaggcatcggggtagctgatggccttgacatgaagtattaccctcgtcgttcgaccggtagtgttggaggtctgattgtctcgcctgttggtgaaggcaatcccaagctaaacatcatggtcaacctggccgccgtgctccacactgagctggaccacgcccttgatgagttgggcaagatgtctgagaacaggcacagaggtgcaaggcgtgctcagccgggacagcaggcaccctag

SEQ ID NO: 13443 - DNA, 279 bp, Zea mays
  Peptide Sequence Number=SeqID_56818
atggaggccaagtcacaccaacaaccgaacatcctaatgagtacctgcaaaaattatgccacaagcaaggctgagtatactaatactcaactagacttacccggggcactctgtcccacacatatcagccgtctccattggttcccaggcaacagaacagggctcacaaccttggcgtacaatgctcaaattgtccccgactgccgccgtgcaatggccgcacttgtacccaccataatccggcatgggagactccgtctcaggtccagtgaggggtaa

SEQ ID NO: 13444 - DNA, 927 bp, Zea mays
  Peptide Sequence Number=SeqID_56819
atggctcgccttagacacaccgcacggaagtctgtcatccccttcttaccctctcgtctcgcggagcgtctgcttcaccgtcccgtggccggtcagtccagtcacttggagaagctgcaccaccacctgcatgaggagcagcagcgtcgacgacaggagcaggagcagcagggctcttctttctcgctccagcaggagatagagtcagtgaggagctgctcccctgtgcttcccctggaggcgccccctgcaccaccactggacgccccagcctctagagtagctgctggtggagacccagacgacggaagtggcgacgacagctcgagccatgacacggacttttctgctgaccaggagccggaaggatgggttgctcgacccatcactcgcgacgctgctcgcgggtgtcacttccacgatgcgctcgacaccctgctacgtcgggcacttgaccggcgtacttggtctatcgagtatcgctgtgtggtcttccagcatagtcgccgggtctacccggaccgctgggaggcgacttgcttggtgcgccgtccggagaacagtctctgggtgcggaggcctgctcagagcactattccatctctgagcgggactcagctgaggcggccatgcaagatgccgcacggaggcgtgattgtttcacctgtcggtgaggacaatcctaggttgagcagcacagtcaacctagccgtcgtgctaaacacggagctggaccatgcactagatgagctgagtagagctcgtgctgagatcgccctgttgcgggctgagcacacggaacgtcgtcacctagacgatggttccccctctcccatcgggactcagcacccgtaccgctcacctcggcgtggacaccagtcttatggcaatcccgactgcaagaccaagatagacttagaaccatag

SEQ ID NO: 13445 - DNA, 531 bp, Zea mays
  Peptide Sequence Number=SeqID_56820
atgacccaatgtggaaaagatcaagtggagcatgccaaggatgtgtgggctctttacccagggcagactgctcacctcacggtgccatgcatgaatgccctgtactgcatgcaagcggtgcgaggagaggcaatgtttcagctaatgggcttggtggaggctaccaagatcaccctggataatagggaggaccttgtggtagacttatccactgagatggtggaaaaggacctccaggtggaacagatggccacccagatccaagaacttgaggagttagtaggagccagggagaacaccatcgaagttctcgaggatcagcttataaacactcagcagcatcttaaggaagctaagcagcacttggatatgcaccatcaggagattcaggacatggaggccgacgaggatgttgacatcgagggaggagtagagccggagcctgcatccagcttggacactactggctcagggagaccacctcccccgagtcaagcgttgcctcgtttgctcattaggttacaaggataa

SEQ ID NO: 13446 - DNA, 225 bp, Zea mays
  Peptide Sequence Number=SeqID_56821
atgagagtctgcgattatgccttgagccggaaggcccagtgcaactgtgtgattatggactccaagattgccactctgtgtgaggagttatgcaagctgaacatggaagttgtttcctcaggtaccttgagttatatctcagtggagcccactttacatgagcaaatagtcatgacacagattagtgacaagggtgttcaagtcatcaagaatatgctcgaataa

SEQ ID NO: 13447 - DNA, 468 bp, Zea mays
  Peptide Sequence Number=SeqID_56822
atggggaatctatggatactagcagcgaaggtatcagttcttgcaagtagatttccagatttgaagaaattcagaagttgtgacctgctgccaaccagttggatgtctgttgcatggtaccctatctatagaatccctactggaccaacactcaaggatttggatgcatgtttcttgacatttcattacttatcaacaccttccaaggatactgatcccagtacaccaccatgccccaatttgggggggcttaattgcaacatgaacgccgctggcaaactaacattgcccgtctttggactggcatcatacaaattgaagagctctatttggtcgtcaaataggcctgaggagcagcagcttgcagcttcactgacgcagacagcagatgactggcttcgccatcgccaagtgtaccatccagacttccggttctttctcacccacttcaacacagcattgagatga

SEQ ID NO: 13448 - DNA, 144 bp, Zea mays
  Peptide Sequence Number=SeqID_56823
atgtggctcttcgcggcggtggacgacgcggacgtgcggccccgggacccgcggcacggccagcgcgaccccgacccagcgacgtgcgaatgcgccccccctcggcgcgcgggcagccccgacgcgcaggatttagctatttaa

SEQ ID NO: 13449 - DNA, 348 bp, Zea mays
  Peptide Sequence Number=SeqID_56824
atgccgtcctcttcttcttccgctgacaccacgccgccggcggccgcctcgtctgaggagacgttgagtagcttgatggtggaggagttgcgcgccggcgactctgttgattttggtgtgtcacggatgacgtcagcccgcgttgaagatatgcagcggttgggctactttagcggcggagttgctcgtgctccggggacggaggaagtccccgagccggagggtgagttggtcgttttcgaggcgttcttcgcccgccggcctccgcttgcctgcgcaccgaagaggatgggtggggacggagttgcccagttcgggtcatgcacattcacgcccaagaccggctag

SEQ ID NO: 13450 - DNA, 796 bp, Zea mays
  Peptide Sequence Number=SeqID_56825
atgtccggtgcacaccggacagtccggtgcccccttctagccgttggctcggccacgtgtcccgcgcagatcgcgcggccgaccgttggccctgccgaccgttggctcaccggacagtccgagaaggagatcgctgatcggccccactttgatgatatgtcccgagttgtggaccaactcttaaagttgatcgccacctttataggattggggcgcttcaaccggtactctacaggaacccttggatctgatccaacagcccacagtcgagccgtggattggatcacaaggtctgatccatccgtctgtccccagatcgacggttacagatatggaggagggtcacccgagaactctggtgccacaaataggcgcatagtgctccgggatttgagcaacagctcgcacgtccgtgccgcaatcacgccattgtcgacgatcaggtggagcggtcacagacggcactggcccacctggcagcgtctgcacgatcgcacggagtttgtggaatgggagaatgccatgtgggtccggggtgtcagcgttaggcggatgccggatcgcgcgaaggggagtcaagacacccgcaccctccgcgtcgaacacccgatccggacaccgctccaggctccacctctctcccatctcacgccaacgctcactggaccattcctccgtgctggggagcggcggagagctatccacctcgtctcaggcaccctctggcgtccccctccccccgccgcgtgccggcgagccgcggagatccggggttctgacctcgctccttctgctg

SEQ ID NO: 13451 - DNA, 105 bp, Zea mays
  Peptide Sequence Number=SeqID_56826
atggcggcaccggacccctacatggacgaagggcttgcaccaaggacgcagcctggccgtaggttctcggcatgcaccccacggggtccagaagttgatgcttaa

SEQ ID NO: 13452 - DNA, 985 bp, Zea mays
  Peptide Sequence Number=SeqID_56827
atgaacgcactctcccgcgaagggtgccggcacttcgaggtcttcgaccaggcagatgaagattttgagcgagatgtctataaggtcgaagaccctgttgtgaaggaatctgccggggccctctacgaccggatgtggggtctgcatggttgtgaggtggtcagggagcgggccgagactgcgagggctcaggcggagcgcggcgagcgggtggacgacttcggggctctgaacagcgcgctgccagacccggagccgacccttgcggaggctgtgactggggtcgctctggagccaaccctggagaccgcagcaatcacgacggctgcctccacatccgctgcggccggcgaagacctgcccccgaaggtggccgaaggcgcccctgatgcccccgcagctgctgtgtcgagtgctgaagatcccgcggcggtggcggcggaaacaacggcggaggctgcggcgggaccaacggcggagccaacggcggaggctcccgcagcgtcagggccttcgcaggttcaagattttgggcctgcgcacgcaaccgctactactgagtttttggcggcttcgaccgcggaaggtgggaatgaatatggtgggtttgcatctgagttttttgattttaccgactccgggagctcggttgagtggactgaggagtcgtcggaggacttggattattttgcggccttggacgtggctgcggcggaggcttctccacacgccgcggacgcgccagacgtgccaggccctagcaccgggcgccgccgacgaagggcggttgcaaaacgtagggttagtgcggaggagggggctcggcttcgtgtgagcagggctggtcgtcaggaactgttgcctttgccggccgctgcgagtacaggggaaagggaactgcgaagtctttttgcggaggtttgtacgatgaagttgtgtgccctcgcgtgcctgtgcctgcgaggacgttgtgtgcctttgtctg

SEQ ID NO: 13453 - DNA, 816 bp, Zea mays
  Peptide Sequence Number=SeqID_56828
atggagttggacgcaacagaactcgcgcaggaagccgcgcgtcatgggagagaccaagctagggccgacgcgagcacaggaccgccatgggggagctcgaggacacgcccgcacgacaccagggagcgagcaggacgccgcggcatggacgagggagaagcaggggcgtcgctggctgcgacggcgagcaaagcgcagagcgcacgagcgcgcgcagcagggggcgcggtcgagcagagcatcggccaacagagaaccgagagggagaggaaggagctggagggaaagctccgtgatggtgacaaaaaagtaaacgtggatccagatgatgatagcgactggctgcatcggaatgagacattccagtcaaacgactatgtcgcaatgacacaccttctgacaccaggcagtgtgcatgattctgttggtgtcattggggaaccgggtatcgacgtgagggagtataggcttgaacaccttaggttgtataatcagacaccaaagcagaaagaggcaaagatagagtacatgataaaacatagagcgctacaggctgacactttgaatgttgcgtccatcgccatggaggacccaacatatacccctaaggttgtacaccttacaacagatgcaacagaacctgatcgatcctctagttatcgcctgcgactgggtttccctgaattcatcaggacacctttcctgccagctcaaacacagaccgaggatgtcggttcatttgatatgtctagtgaagcaataagacgtaaagtgccacatggggaaagacaagctatcttagcctgtcgaaactag

SEQ ID NO: 13454 - DNA, 348 bp, Zea mays
  Peptide Sequence Number=SeqID_56829
atgggcagcattgtgagcgtggggaaaagagctcgtggggatctcatctgtaagctacttgcctcgtcggggtcctgctgtcgggttgaggagcttcgcctgtgccctggggaggttgggatagcatcaccgtggttgaagggaccaccgtgtgccctgaatttctcacctggggtcggcatcgtcgcggtccgccgcgtgctatgtgcaggacccctgctgctccaatccgaggttaaaatgttgcacttagtctattctatacttaaccacgtgggatcttcggaaaaccataactccataaccgtagctccgaatttagctgttctcgatcccacgatctcgtag

SEQ ID NO: 13455 - DNA, 183 bp, Zea mays
  Peptide Sequence Number=SeqID_56830
atgaaggaagcactagatatgataagaattgctaatgaagctgttgacgaagctgtcgacaagctgctaaatgaagccgctgagaaagtggcatttaagctctacattcccttaggaacgacttcggagcttcgtgacttactctacattcctttaggaacgactttggagagaaaaacataa

SEQ ID NO: 13456 - DNA, 225 bp, Zea mays
  Peptide Sequence Number=SeqID_56831
atggaaaaaatagtaatgatatcaaattacaagtgtaccttcagcttgaaagaagagacaactgatcaagccaagtatggaggcaagaagagcttcgaggtactaagtgcacaagagaaggtcaaggagaccaggaacccaaagccaggggtgaagaagaagacttgcaaagtcaaggttgatcgagttaagaagagttatggtgcatcaaggatcactacataa

SEQ ID NO: 13457 - DNA, 681 bp, Zea mays
  Peptide Sequence Number=SeqID_56832
atggagtccattgcgccaatgtggtctcagaaacgacctaatgcttgcaagagcccaagaacgccgtgtcatgcttggactgtaacctcggcctgtagtgctgacggtgatggtgcgcccacagcatccggggggctgacggtgacccggcgcgcgcatccagccccaggtggcgccgccccactggacccaccgtaccgtttgcgtttgatgcttcctgcatcctgctccgcgctgatgatgctccagccgacacggcacggcagggaaggcggcgggccggcggggcccgcctggcagcttccgcctctggaaaccacgaccctgcgtcgcgttcgcgtctcacgctatcgctggtttttgggcaaggccccctatatcgacgatttacgaaagagggacactttcgtcgtgaaccaggaggtgttgttcgtactggtagggaccaatctgcaaaaaaaaggtctgccggctggaccccgcaaccgcggaaaggcgaccccacacgcgccccgcctcggagacttcgccgcccgctccgcgtcccccgaccccgaggctgcctccgctaccgctactctgctggctgctgcacctgcaccaccccaaaatcagcggtggggccgagagcgaccgccttccctctttatcctccccgtctcccgccgtcgtcttcactga

SEQ ID NO: 13458 - DNA, 1284 bp, Zea mays
  Peptide Sequence Number=SeqID_56833
atgccgcggcgcaaccccctcctcccactattcctcctgcccatctcggcgctcgtgctggcgtggccggcatcgtgcaccgccgaccccgtccccgtgctcttcccggtggccaaggacccagccacctccctctacaccatccccgtccgggacggcgccagccacgtgatcgacctcgccggcccgctcctctggtccacgtgcgacgacgaccacctgccggccaacatctcctgccgcgaccggctctgcaagctcgccaacgcctaccgcgcgccgagctgcggcggcggcgtcgcgggccacccgtgctcaaagcggtgcaaggcgtacccgtacaaccccgtcacggggcggtgcgcggcggcggacctcgtccacaccaggctcgtggccaacaccaccgacgggcggaacccgctgagccaggtcccggtccgcgcggtggccgcgtgcgcgccgcggacgctcctggaccaccggctgcccagggatgccacgggcgtcgcggggctgtcggccgccggcctcgcgctgcccgcgcaggtcgcgacgtcgcagcgcgtcgccaacgccaacgcgttcctgctctgcctccccaggtccggctccggcgacggtgtggcggtgttcggcggccggggccccttcttcctcaagctcttcgtcaccggggagccgtcgagcggggacctcacgcggacgctgcagttcgccccgctccgcagcaggccgggcaaccctctgtactacgtccccgtgagcggcgtcgccgtcggccgggcgccggtgccgctcccgccgcgcgcgctggccgccggcggcgtcgttctgtgcaccagggtgccgtacaccgccctccgccccgacgtgtaccgccccgtcgtggaggctttcgacaggggactggtacggagcgacatgagggtggccgccgtgccgcccttcgagttctgctacaaccggaccctgctgccgcccacgcggctcggctacggcgtgccggagatagccctgctgctggagggcggcaagcaggagtggacgttcgtcggcagcagctccatggtggacgtggacgcgcgcaccgcctgcctcgcgctcctcgagatgaagggggtcaaggccggggaccccagcgcggcggcggtggtggtcgggggtttccagatggaggaccacctgctgcagttcgacctggataagaagcagctagggtttgccagggtgcccattccttctgcgtgcagcaacttcaatttcaccagggggcgacagtag

SEQ ID NO: 13459 - DNA, 2988 bp, Zea mays
  Peptide Sequence Number=SeqID_56834
atggcgagggcgcgcctccctctcctcctcctcctcctcgtggcgttcctcgccggcacaggctccacggcggcccgacacgccgcgcccgcacccgcgtccgcgccccgggcgtcgccgtccatctccgcggcgcccgagtacggggcgccgctcccgcgcctcccgaaccagcaccagcgcccctccgcgcttgcgccgtcgcaggcgctggcgccggacataatgcccgtgctgccgtctccggccgaggacggcgccgcgccgccgcccgacgcggacgagcccaccatcccgtccagccccagcccgcccaacccggacgcgctggagcccgcgtgggcgctggcgccgttcggctccgcgcccgccgtcgccgcgcagtcccccgccgccgcgccggccccggcgtcggcgctcgtgctgctggccgtgccgtggctgctgctggtggtggtgggtgcacggaaaaaggtggtcctcgcgggttggtcggcctcggccgggctggctggctctgcagctcgccttgccgccactactctctgcgtcctcgtgaagaactgctgcttctgctgctacatctcatcagcttttacttctctatatctcctcggagattattatttgggtgattcttgcagagcggcgccgcagccgccgcctaagctcgacgcgccgcggcggtggatgcgacgccacacccccggccttctcgccgccaatctcctccgcgcctcgtcgctcctcagacccccgtccgtcctcgccgcccgcgcggccttgctccaccatgcgccggacgacgcccaccgcctgctcgacgaaacgccgcgcgggagggcggccgccatcgtacgtgccctcacgtccgcaccgtcttcctcctccggtgacacggcctgcatcgcgtgcctccactgcgcggccctcaagtcaggcgccgtgctggacccgccagtgcgcacgtccctgctcgcggcgtacgccagggccggccgcggcgcgggagcgggagccggagcaggcgccgccctggcgctcttccgcgaggccgttgcgcccgacgtgatcctgtggaacgcggccgtcggcgccctgacgacgagctgccggtacgacgacgccgcggctctgttccggcggatggcgcgcgagctcggggagtttgactccaccaccgtggtcgtcatgctgtcgggggcgtcccgcgcgggtaaccttcggcgtggaatggagctccatggcatggcggccaagagttgtctcggcgctcattgtctcggcgcgtggaacgctctcgttgacatgtatgcaaagtgtggtgagtttaggtccgcagaggttgtgtttcatagcatgccgtgcagggacaccacctcatggaactctgtcataagtgggagcatttttaacgggctcgctgaggtgtcagcgtgctacttcagggaaatgagttgctccatcttccagccagatgaggtgagcctctcttctgtcctctcagcctgctctcgtctggatgatctcttctcctttggggagtctgtgcatagctgtgcagtcaaactcggttatgaggacaccgcgtcttgctcagtagcgaattctctcgtgacgttctactctgagtttggaatgccagaggctgcgaagaaggtcttcgccagcaatttgaacaggaatttggtatcatggaatgctatgatcaagggtctagtccagaatgaaagagtaaccgaggcccttgctgttttgaggcaaatgagattggagaaccagccagatgtcgccactttggtgaccatagtttcaggctgtgctgatcaaggcctactttctgaaggggaaacactccatggatacgtaatcagaaaaggacttcttcgtgaggagccttccatgggaaatagcttactcgatctgtatttgaaatgtgacgaaccatctaatgcaggcctgttgtttatgacaatgccaagaagggacttgatatcgtggaacacaatgatttctggttactcaagatatggcccactgagagaagaggctcagttaatgttcaaaggattactttctgaaggttcatcgtgcagcttggccactatgctagctgtcataccatcatgctccattccggaagaacttagctttgggaaagcacttcactctttcagcctgaagtgtggatttacatctagtggggtttcggctgttaatgctttgatacacatgtatatgagctgtggtgatccactggccgccttttcgcttattgaaagaataataccgaataacaaaggctggagagcattgcagttctatcagaagatggaggatttcgaacctaatgaaatatctgttgtcgcatcacttgttgatatgtattgcaagtgtgggagactggacattgctgtcagagtatttgaagcttctgccgaaaaatcgattgccgggtggaactccttgatatcagcttttggattccatggccatgggatgaaatctatagatcttttctggaagatgcatgattctggaatgaaagccacgaaaagcacatttattgctctactgtcagcttgcagtcactctggacttgttgatgaagggtggaagtattattgccttatgtcagaaaagtttgggatcacaccagccccagagcaccatgtctgcattgtagacatgcttgggcgggctggtcggctgcaggaagcgcacaagtttgtggagagcttgccgtctcaacaaacacacggaatttggggcgcactgttaaatgcttgcagtagcaggagtgaactcaagatgggcgaatccatcgcaaaacatttgctacatttggagcctggaaatagcggttattatgtaactgcagcaaacctttatgcatacaaagacatgtggagtggtgtggcccaagttaggagcgttttgcaagataaagggctggtgaagccccatggtcgtagcactgttggttaa

SEQ ID NO: 13460 - DNA, 579 bp, Zea mays
  Peptide Sequence Number=SeqID_56835
atgccggccggccgctcgtcgtacctagcgactatgggcagccggagcttctcctaccacaggctcaagaagctccccgtcgccgctccctctcctcctcccgccacgacggcccccgctagccgcggcctagagcatgaaggcgacccgcggcgcgccgccgccgccatcgaggactcgtaccggtcctactaccgcgcgctggtggcgaggggtaggcggcagcggtggcgggacggcggcggaaggcagcggcctcggcctcggcctcggcggcgcctgagggcctggggagccctggcgcgcgcgctacggcggagggcggcggccgccggggccctggtgcgcgcgtcggtcgccagggtggcgcggcggctcagggagggccggccctacgtcggggacctcttcgccgggaactacatgttcctgcaggtggcgccgtcaccgacgacgaccgcaccgccgcggggcgccgtggtgccctttgcggactactactacggctgcaaggccaaggccagggccagggcggccgggcagctgcaccctgctgctggggtgctctacaaggtgtag

SEQ ID NO: 13461 - DNA, 1338 bp, Zea mays
  Peptide Sequence Number=SeqID_56836
atggcggaggacgggggcaaggccgcggcggcgtctgcggccgcggcggaggcaggaggcggaggagccaaggagggcggcgaggagaggaccgtcaagctcttcgtgggccaggtgcccaagcacatggccgaggccgacctgctcgccttgttccgcgaggtagccgccgtcgacgaggtcaccgtcatcaaggacaaggccaccaaggtctcccgagggtgctgcttcgtcatatgcccctcaagggaggaagctgacaaggcggtgaatgcctaccacaacaagcaaacgctctctggggcatcaagtcctttgcaagtaaaatatgctgatggggagttggagaggcttgaacataagcttttcattggaatgcttccgaaaaatgttacagacactgagttgactgatttgttttccaaatatgggaatgtcacggatttgcaaattttgagaggttcacaacaaacaaacaaagctggctgtgccttcattaaatatcaaacaaaagatcaagcattggcagctattgaagctctaaacgggaagcacaaaatagagggttctagcgtgccattggttgtcaaatgggctgatacagaaaaggaaaggcaggctcggaaagcacaaaaagctcagtcacagctatctcatatacccaatgcaagtccaatgcagcagcactcttcagtatttggtgctttacagatgggatatatgcctcaatacaatggatttggttatcagccaccagggacatacggacttatgcagtaccctctatctcctatgcaaaatcaaggccccttccagaatatggttcaacctcttaaccaagggaactcgataagaggagtcaatcctgaagtgtctcccagttcagttcaaaggtcatttaatgcaatgcagctaggcagcccttatcctgctatgcctggtatgcagtatcctggatcatatcccggtggtcccatgggcaaccgtcatttgggaaattctcacaatccgattaaagctccaaattcgaatgccaattccactgtttcttctagtcccagcagcaatgctggtgggcaggttgaaggtcctcctggagccaacctatttatttatcatatcccacaagaatacggtgaccaggagctttccagcgccttccagagtttcggaagagtagtaagcgctaaggtgttcgtagataaagcaacgggcgtgagcaaatgcttcggttttgtgagctacgactctcctgcctccgcgcaggcagccatcaacaggatgaacggctaccagttaggcggtaaaaagctcaagccggctttcatcctagaataa

SEQ ID NO: 13462 - DNA, 264 bp, Zea mays
  Peptide Sequence Number=SeqID_56837
atgatcagacagcagataccagtgtcgcagcctattctctggtcaccactcaccactgctggatcaatcttacaggctgcagctcccaagggggcaatgcacacactagcagcttctactgattctgcaagaatcacaagattcaacaatgaaaatgaagctcaagctgatgcgctgaacttcggacagtcttcaggttcactaaaaaacaagaaagtgacttcagctttcagcatactgctgtacattcttgattcccattaa

SEQ ID NO: 13463 - DNA, 462 bp, Zea mays
  Peptide Sequence Number=SeqID_56838
atgtccatcccttccgaaggcgatgcttccggcgacggggagcctgaggagcctcctgtaggattcagtcagagactcggccagctgcctaggcaccggccaccggcgtccggatctcctgctctgctgctcgccaccacgggggctctccggcgttggctcgacgcggcagtgccccccggttactctgcctcctcgtccgaccccagcgccagccccaatatctcctccgcgatgccatctccgacaccctctcctgctcccgcgccatcaccgaccaagaatccagctccgggcatccctgcgtcaccgcctgcaccgagctccattggccagatgccgaccgccgtctgcatcgagctggcggggttcgggagcttcggatctggtttgtggatttccatccgcaagggctgtttggggttccgaggttgtgggtttctgctggaatatattttctaa

SEQ ID NO: 13464 - DNA, 369 bp, Zea mays
  Peptide Sequence Number=SeqID_56839
atgcagacggcggtcggcatctggccaatggagctcggtgcaggcggtgacgcagggatgcccggagctggattcttggtcggtgatggcgcgggagcaggagagggtgtcggagatggcatcgcggaggagatattggggctggcgctggggtcggacgaggaggcagagaggctcctcaggctccccgtcgccggaagcatcgccttcggaagggatggacatgaggagaattgcattcgccacatgagggcaagagagagagccttattcacagacacccggaccgggcggcaccacgccatgtcccaagatcagatccgaccggtgccgatgagtgggctcaaacccatcgttcgtctgaaatga

SEQ ID NO: 13465 - DNA, 714 bp, Zea mays
  Peptide Sequence Number=SeqID_56840
atgacgtacgccgagacggttgtacgacaacgacgtggcgtgcggctggcgtggaagccggcgtccactaccctcttggtgcacggttctgccataccccgcctccgtgattcgcgtctctgccgctgctcgtgggaggacgaaattctaggatgtctccccggtcggcccgccatcctcgccctcgccccgctcatcgaaggaagggcgccattccagggattacctatgcggcagccccgccatcctcgcccccacccgcccccaccatccacaagggcgataccatgcccccgctcctctcccctccgcgccatccttgccccgcgcgcgcccgcacaccccgcgcgcccttcccttgcccccgtcgtctcgcaagggtccgtcgtctccgcgttgcctcgcctcgcaaggtccccaccacgcgcagtcagggagcatggtgggtggggaagacagggaggagcagaggaggaggtgaagctcaacatcgacaacatgttcacgacgctcgagtccctcaagaagaagggcaacaagaacagggcggatgggccgtcctccagcaagaatcatggcgcagggcccgcactacagcagagcaggaactgcctcaaaggaggtcttctgggctcccgtgccgctcactactgtctcgcgtccttcaccgccgacgactggctcgacaaccggatctggggaccttcctcctga

SEQ ID NO: 13466 - DNA, 249 bp, Zea mays
  Peptide Sequence Number=SeqID_56841
atggagatcgacattggcatggagaagctgcgaaacccaccgcagcagaaccccacccagaggaaggcagacattatggagctccattctccattgaacactctagggcttactcctcttggcgaacctccttcaccaagagctgcacatgtagcaactgctgttggaaccatggtggtcattcagggtggaattggtcctgctggcttatccgctgaggaccttcatgttcttgatcttacacaataa

SEQ ID NO: 13467 - DNA, 201 bp, Zea mays
  Peptide Sequence Number=SeqID_56842
atgagatatgagctttcttatttcagacgtctggcaacagttcatctagggcgggtggcgaagggtcaggatttcctggtcggagccgcgaaaaatacgatccccgtcctggtcctggtcggtacgtggtcgtggttatggttatggttatggttatggttatggttatggttatggttatggttatggttatggttatga

SEQ ID NO: 13468 - DNA, 384 bp, Zea mays
  Peptide Sequence Number=SeqID_56843
atggaccaggaggaggaggaggaggagggaggttttaccgtttccatctggagccggcggtggtggcaggcgggcctaagattcggtccgagttgcgccggggacagtgacgggatgagtggccatcgcgcatggagcgggcgcggtttggtggcgggctggctcggggtcggggttggtgggggcgcgtccgcggatcccgccatcagagagggcagcgccatcgagggcgagggcagggggcgcgcgtttggtgtggggatgtcggatccggggagggagcagttcgcggcggagggagcagttcgcgggcggaatgcggggaggaaggaggaagacgcgcgcggcagcggacatcacggcgccgcaggagagggggcgtag

SEQ ID NO: 13469 - DNA, 525 bp, Zea mays
  Peptide Sequence Number=SeqID_56844
atggacgccacgatcggagagtcggcaccgtcggtggagagggcgttcgaggggcagccgcatcccgggttctgggggctggtgacgccgcgatccatggccgtcgcggtggtgtacgcgttcgtgttctccatggtgtcgatgcgcatctacatgatagtggggctcgtcggcgccttcaacatgccctcgaacatcctctgcttcgtcaccctccggggcctcgtgtccctgctgcggcgctgcgggatcgccgccgccccgttcaccaggcaggagaacgtcttcctccagaccagcgtcatcacatgcgtcaacgtggcggtcgcaagtggttttgcgacgtaccttgttgcaatgacgtctgatctggcgaaatctctgagtgagagtccagacaaggaagacgttgttgaggacgtgccgatggggagatacgggctactgattttcttcgctacgccctcggcgattcccgagagcagcgagttcatcgctgagacagcctgggcaccggacagtctg

SEQ ID NO: 13470 - DNA, 441 bp, Zea mays
  Peptide Sequence Number=SeqID_56845
atgggggggagggcgttcgccgttcgtggcgctggcagctgccgcgtgcctggctctctgacccgagtggctttggagccgctcccggcgccgccttccgccacggcagctggaagaggttcttccgccgacgagatagccggggccgcccacggaccaacctccaactctacggccttctgcccgcccttgcctcacgagtttgggcacgggcgagggcctcatggcagcagcatccgccctgaggtcatcgctgctgctgttcggccccccggagcagaagtcgtcgtcgtcgtcgctgctggagcgggcgacggagctttcgagcgtgaaggcccgaagaatcgcttcggcagaggagctttcgagcgtgaagacttgttcggtccgcggaatcgcttatccgaacgcgagttacttatcgcagaaggtgatgagtga

SEQ ID NO: 13471 - DNA, 597 bp, Zea mays
  Peptide Sequence Number=SeqID_56846
atgccaaatggaaatactcaggattatcaagctgtccattcttctattcatgggccactgcttcatttctgccagaatcctttgcatagtatgcaagcacctcaaatacaagtgccccatcaagagttcatcgataacaatgtggtgcatggtttaaatccttctgccacaggacttcctttacatccaagaatgctggctctcccattcaacgctgaacacacttttgggcatccaatgcacccaacatccagtattgttattagcgctaccgaagttttgtctcttgcccctcaaacactacaggttcatgtttgggatttttcagggcaggaaaacctgatattaatgaatgaatggaatggactacatgactacttccatgcagatcaagcggtagcatcagctgccatatccgatccatctatatgccatcttagaagttttaaagctccttgtttgcatgtaattcaaaatttactattagccattgttcctgaacagcccttgattttatttcttgaatgtacacctgattcgtctaatggaatcatggacaataggttgtgcagctgtgttggttatgagttacaatga

SEQ ID NO: 13472 - DNA, 2550 bp, Zea mays
  Peptide Sequence Number=SeqID_56847
atggcccttcggattgttgcccgctcgagtagtgggcgcgatctagttgaggaattcatagggtacgaggtgtggcctttggcacatggatgggcgctgggcaaagtatgccctcgcgagatgccctccctgggtggacggaaggtgcgaagtccgcgttttgctttggatttgcgagggcgggatccgacctcggttgtgcgtgaggcagaggacggggcggtgagaattgttgggcgctatgtgccaaagacggaggcccagcggagttgggatatacgtggatccaacgaccgcctgaatagggtcttcgagttgaattctttgctgtatggcggttaccctggggaggacgtcgtcgatcgccgcgggaaaaaaccagcggccgtgactgaggatgaccccgcgccggaagccgccctagccactaaaaagaggaagctaggtactgcggtgggagagccgggggtctccgatagctttgctatggagttgatgggaacatgcgcggcccccgggggaaggatgtcttcgcccgagctccgggagtcttcggcgcggatgctggagacgaaatattgctgctgttgtgtcggtagtgatgaacaaggatcgctaggaagctgcgcagaagcgccgggcggtcatcaggctcctgaagctaggccgaagagggcgcgggggactgcgaaggctactgcccccagcggtagccagccgacgctggcggcgaagccagccgcccctgggtccagcaaggtgccggagagcgtgaaggcggccggtgtcggcggaaccaagtctgccccggacggagctgcgaaggcccgggaattgccttcgccggggaaacgcgttgctgactttggcacaaatattagtgtggacgattatctcgttggatcgggcgaggggcaacttgttgttgttccgcctgcggtggcgaccatggtgtctgtcgcggtgcctggggtgaagggtagcgctctcagcactggcggcgagatttcggcggtcgctgtcgtcaaggacgaagcggccgacttcgccgaccgtgtggcgtcgggggcccttactgcagatgtgtctgccgaagtcgagagacttcgggcgcagcatgctgacgccgtccaggaaaagtcagctgcggatagcaagtaccgcaagctggcggagaaggtggtcgccctggagggcgagaggacggacatccggcgccagctggtggaggagaggagggaggccaaccaggccatcgccaaggcgcaggcggcgcaggcggaggccaaattggcgcgggtggaggggagtcttgccagccagcgcgccgaggaatgggaggtgcagttcaacgctttgcaggcccgcatggagagggccaaggcctcgacacgctcggaagttgagcgaacgtgcaaacagctcgtggactcataccgcgagctgggcgcgcggactgctgacttcgaagtgcccgaccgagaggcgggccttcgcttcctcgagtggctacaagaggaattgttggcactcccgaccatcgtggagggatttatgtcctttgcctccctcgtcacctgcgaaggggcgatgaacgcgctgtcccgcgaggggtgcagtcactatgaggtcttcgaccgatctgatgaagattttgggcgcgagatttataaagtcgaagaccctgtggtgaaggactccgcgggggctctcttcgatcggatgtggggcccctacggtcgggaggtggttagggagcggtctgaccgggcgagggatcagatggcgcgtgccgaggacgtggagaacttcggacctctgaacagtgcgcagcccgaagcggaggccaacccggttgtggccgaggttgaagtcgacccggcaccacccccggaaaccggtgaaggctcccttgctgcccctgcggctgctgtgtccggtggaggctcgtcgccagccactgcgccgatggtggagaatcccccgaaagcggcgacagagctggcagcggaggatcccccgatggcggcgacggagccggcagcggaggatcccacggcggcggctaggtcttcgcaggttcaggattttgggcctgcgcacgcaaccgctactgctaattttgtggcggcttcgaccgtggtcgctggaaatgaatcggatgagtctgcgtttaagttttctgattttgatgactctggaagttcggttgagtggacagaagagtcttcggatgaggacttggattactttgcgaccttggatgtggctgcggcggaggcttctccgcatgctatggatgctgaagttttgcctggtccgagtgctaggcgtaggcagcgaagggcggtggcgaagcgtagagtgagcgaagtggatggcggtcggcttcgtgtgggcagggctggcaagcgggaattgttgtcctcgccggttggggcgagtgtaggtgagggggagttacgaagtctttttgagggtgaggagcttaggttaatgctatttaactatagggagatgggaatcattctgaaggttgaacctatgtaa

SEQ ID NO: 13473 - DNA, 1125 bp, Zea mays
  Peptide Sequence Number=SeqID_56848
atggagatggcgagggaaataggcagcggcggtgtgcgggaagaggcagcgacgtcgtgcgaggaagaggtggtgtcgcgcgtgccctctgcctctctcaggcgggtgactgggatgagggatgtggctaagggagagatgcgactggagagggtgttaggtcaagaagtggtgaagcgtcggtttctcctacattctgggtacggtgccgtcgacgtcaatgtcgagagactcggcgacctgatttgtcctctcattttcctcgaatccggcaccgctgccgtcgacgcaagggcctcatcggggtcctggtccggcagcactgaagcaggcctgctcttggcggcgtccagcagtcggaggtgccggtggagactggagacgatgaacgggtgctcgagcagctgccccgccgtggaccggtcgtcggagcatcgcgtcaggctggcaccggcccaggaagtccttggcctccgcggacagccaccagggcacctccagtacggcgaggcgcaccgcggcgagcacgtcggcgacaacgccagcccacggcgcgcgaccagtgtccatctcgaggacggtgcactcctatatatattcctgaagaacgcgtgcgctgaacctgtagtcgatgacccgtatatatatctgcagactgcagtgcaggccgcaggatcaaccgacgtgcaaactgaacttccgtataagattagcgatgtcttgcacgagatcggtgagcagcctaagcaggcaggctcggcctggacgaaacagactagcaacaccacctcctggcggtttgtgttgtaccaccgtctggaacggcgcgcggtggtggttccctctgtttgcccaaaaggaaaccagcagtggatctgctcgctactagtctatatacgtcccttcgttgagcagagcagagcgagcatagcaagtcaagggaattttctcgtcttgcccaacaaatcatggtaccgagacattgacatgctagacagaaaaaggcccctggcccctgcagcatggatcgcagagctgctgaaccaccaagactactggaaagcaaccggtcggtacggcgcagctatatttaacatggccacatacacaagacaaactggctga

SEQ ID NO: 13474 - DNA, 234 bp, Zea mays
  Peptide Sequence Number=SeqID_56849
atgacattctgggagtctgacttggggttggcgcagagcaccgccaacaagatcggtgtgttggcctaccctgcttcagtgctgccggaccaggaccccgatgaggcccttgcgtcgacggcagcggtgccggattcgaggaaaatgagaggacaaatcaggtcgccgagtctctcgacattgacgtcgacggcaccgtacccagaatgtaggagaaaccgacgcttcacctga

SEQ ID NO: 13475 - DNA, 450 bp, Zea mays
  Peptide Sequence Number=SeqID_56850
atggcgtggagagtggcagagaatcctcatcgttgtactgacgcacattgcttttctgagaagccattttgccagtgcaaggatgaaacttggtcagagtgtttaccatatggattggcagtgaaaccaaaaaagaaggcgcactactgttcttccatattcatgtcaatgcaacaacagctatgcctggtgagtggagataagtggaggtggcactaccaattccttgatgtaccaggaatgtttggattgttgtattctgacattgtttggttcaacatattcaaggtacagcaggccagcagacaccaggcaatctatctagagaccaacaagatcatggacttcttcaagtttgacgtcggcaacgtggtcatggtgaccggcgggaggaacaccgggcatgtaggagtgatcaagaactgggagaagcacaagggcagcttcgag

SEQ ID NO: 13476 - DNA, 162 bp, Zea mays
  Peptide Sequence Number=SeqID_56851
atggggctcggtgtatgcggctcgctctgccaaggtggtgatgaggatgacagatttgattatgcttatggtactggttgtcagcaatgcaaccactactcaggtgaagatgaagtcgtggaggaggacttccaggagttccaagagtacgatgagttctag

SEQ ID NO: 13477 - DNA, 153 bp, Zea mays
  Peptide Sequence Number=SeqID_56852
atgtatggtttacaggtggtgatgaggatgatagatttgattatgcttatggtactggtgaagaagcagcaaatttttgttgcttctgttccaaggtggtgcccaaagaagaaaatcaagactgaagtcgcgggaggaagtgtcctcctttaa

SEQ ID NO: 13478 - DNA, 195 bp, Zea mays
  Peptide Sequence Number=SeqID_56853
gttttggaaaactttggcgtctgcaaggtgatagcatctgggcaacaggatttcaaggttggcgatcttgtgtgggggatgaccggatgggaggagtacactctcatccataacccggagtcatttctcaagatcaagcatcctgaattgcctctgtcctactacacaggcgttcttggtgagttcattgtttag

SEQ ID NO: 13479 - DNA, 324 bp, Zea mays
  Peptide Sequence Number=SeqID_56854
atggcgaatggcggggaaccgaactccgacgagcttatatcagccggatcactcaatgaccgaattaggggaaaatgggaaaattggagagttgtggtggctaatcggaggcaggagcgggtgctcaggcttggtgatgacctaacacagcataccgtgtcttcaatttatagcggcgctaagcggtggccagtgaatttggtttggtgtggtggcggtcagagaagaaaggagtcactggcgcacaagattagtggctgcaaccgtggcaagatcaccgacgatctctggataggtcagtacgagtcacggcggtgtggttaa

SEQ ID NO: 13480 - DNA, 213 bp, Zea mays
  Peptide Sequence Number=SeqID_56855
atggatgtttttatgattaggtaccttggagaggaccagcaaggacttgggaaaggccaacgtgttgagcaggagcagcaagggcggccacaacaggaaggagatcaagtccgactcggctgcgactccatcttgggttccaggaccaggataagccttcatggtgaggtcattcgtgtgtcatgggtgataaccaacggagccgtggtgtag

SEQ ID NO: 13481 - DNA, 93 bp, Zea mays
  Peptide Sequence Number=SeqID_56856
atggcgagagtagcgtgtaccctccgtggcaagaggctggatggtggtgcatctgtcctcgcggtggtgctaaagcaggaggaaaatcagtaa

SEQ ID NO: 13482 - DNA, 267 bp, Zea mays
  Peptide Sequence Number=SeqID_56857
atggcgactgagagatggcgcacggataataaaaagagtgaaaaagattctcatgatgcaaaagaagcgacgaaggcagctgagaaagctgcggaacttgaaaggcggatagctgagctatctcctcccccggagcccttcgagccaacggccgacccagaagcaaagagagaggaagaaatcactaaaatggccgaagctattttggataaagctatttctcaattgttaaacaaagttgtggaagttgttttaaaagaagaatag

SEQ ID NO: 13483 - DNA, 420 bp, Zea mays
  Peptide Sequence Number=SeqID_56858
atgcaggcagcatgctaccgcgccaagtgggcgcacccctccgacttccaacgcacccagcatggaggcccaggcccacgcgtcatgcaaccggcgcgccggttgctacgtgcgagcaactgcaccgccgctcgcaccactaccacgcctcctcgactgcgggaccagtaccgcgactcgaggcaaccctacggaccaggaaagggggataccccgaaaaggatccttctccgtgaaggaaacaggccccgagcctcactactgatcagaggttcgaaaggctggcccctcggaggggttcaacagccgcctcagagcgcgtgggctccacacccactactggtcagaggttcgaaggccggcccctcggaagggttcaacggccgcctcaggccactcgggctccgcgcccactactga

SEQ ID NO: 13484 - DNA, 207 bp, Zea mays
  Peptide Sequence Number=SeqID_56859
atggcggcagatttccttgccttcctccccttctctacggcgaagcagcttctgcggcacggtgcaagtgtggaggctctaatcttgttgttcgttgatttcttcaccggcctgttcaccttcaaccgacacctcttcttgatttttgggttcaccaggttcaacttctacttccacatggttgagctgcccccggttgatggataa

SEQ ID NO: 13485 - DNA, 234 bp, Zea mays
  Peptide Sequence Number=SeqID_56860
atggcgcaccaagcaagtagcctcccactggtccgggggaaggtggcctctcagactccaactcctgctgaggcgagggggaagagtcttgctgctcctactcctgctcctggcgttggcactcctgctcgtcgtgcaagcgacgatgcagtctctccaggtgactggactgacctggcaccgtgcgacgtagtggacgcttcgccaggcgagaaggcaaaaaggggatcatag

SEQ ID NO: 13486 - DNA, 873 bp, Zea mays
  Peptide Sequence Number=SeqID_56861
aggctaccagtccagagcgagcatccggccgcccgggtgccgcccgttcgctctcggcgccgcgcgcccagccgccacgccgccgcccgcccgtcagcgccgccgcgcgcccgtcagcgccgccgcgcgcccggccgcccggccccgccgtgcccgccctcgctcgtctccgtcgtgccccacaccgcccacatcgccgccgggcctcccatcgcgctcacaaacgccgccgccgccgccgccacctctcggagcgtcgtcgctgcctcctcgagcgccgccgccgcacccaagcgccgcctccgcccccgaccgcatctccgaaccaactacgacacccacaaacgtgattgtctcacacacactctttactcgtacacagccgcaataatgggtgatagacatgattggatgtatgaaggtttcaagaagggtgggtgtcacactagtgaatggaattgggaggacctgtcctttgacggcaagggacaccacactcaggttaaccttacgttgggttctctttgccgccttcactaccctggtatagtgaaggtgtcaaacggtgataccgaggatgagcttcgatatcggttgcctgacggagaggattacatggggcacgctgaacgtgtcttccaaaacaatgcaaagaagctggtgatggttccatggatggcgcccgtgcctgatgcgtactatgcttggtgtcgatattgggcttccgaaggcttccagaaagcgtcagcgcatcacagacaatgtcgaggaaccaatcctaaccacaagtttggcggtgacgacatgatacgaaaagctaaaagaatggaagctacgagtggccaaaagcctagtgacattgaggtctactag

SEQ ID NO: 13487 - DNA, 507 bp, Zea mays
  Peptide Sequence Number=SeqID_56862
atggccctgacttcgactagcgccatgaaccggtggatccctcagtggtgtacgcaagtggtggtggcaaagcgcatggacgatacgcactcttcgacggattcattgactcgtcgtcgctcatgctctcgtcgaccgaacgagcaggagttggagattatgaggatgcgggaagagatgagacaacaacgcgaatttatggaggcttgcaatgcacataaccaagcgatgtatcaattaatgcatcaacagggcatgacatcaaattttccaccgccaccacaatggagccaatttgcaaacacaccagttccaccaccacagttcaccacccctccgacacatatacctgcacctggagatagggttacgcccgaagcgggtggtagtgggtctgatcccgcagcagggactggatttgttgactcgctcttcgcgttccctcctcctggtggtggtggcggcagcgttcaaagctctaaccacccaagtggtggttatctctaa

SEQ ID NO: 13488 - DNA, 1026 bp, Zea mays
  Peptide Sequence Number=SeqID_56863
atggggatgatccgcaagattaatctaatgggtgtgcccctgcaggtcgaggatcttctctttaacattgacaggaaaaagaaaagaaagagaggatgcttcacatgcggggaacagggccacttcagggacaactatccaagtatgaccgaacccacaaaggggaggagcaaaggcaaggcgcttagaagtgtcacaacttgggatgactcttcaagcgaagatgaacctccaaggacacacagccaccgatcatcatcacgctcgtcatggtcatcacgcaagtgtcttatggcaagaggtaaaatgagtaatccatcctctagtgatgatagcagtagtgatgatggtgaagccttatcaaaaaagaatgaaaaacttaaggctaagttagctatctctcaagaagccattgaaaacttgatagggaaaatagaaattcttagcatacacactaatgagctaactactaagctagaaaacattggtagcacctcagaagcatctttaattgaaatacctgaaattattaagaaagatgcttctacttcttactttgatttaattgatgattctaacccctgcaaccaagttcttgttgagaatgttgttttagaaacatgttcgaatggggttgcaaaggagaatgagcaattaaggaaggctacaagtcttaccaatgcaagcgaagaccgggataagcaaaagcaaaagccatcaagcaaaatctctaacacctacatcaacaaggtgaacaaaaaggccgctacaccatatttaatcaagaagaaaaagaatggaaaggtgatagcaatcaaggccaacaagaaagtcaacaaaggaaaagggatcaaacacatctgggtgccaaagaaaattatttcaaccaagaaaagcaccaagaaggtttggatcccaagagggaagaagtccaaaggacttcagggaatttggagatttggcaaaattgggacgtatatcatgggatgcatcatattggatcaagtctattgccaagtgggttag

SEQ ID NO: 13489 - DNA, 1287 bp, Zea mays
  Peptide Sequence Number=SeqID_56864
atggaggacttgagtacaatgaccccgaccattgttattgagaaaatcacggcctttgagatgtcgcgaaaaatgtgtcagggagaggagccaacttcctcaaggccatatgcttttgcatgtgatgaaaggaagggtaaaaagaaggcttccactccaagttcctcaagtgaagtagaggaagaagaagaaaatgatgatgaaggaaataatcaaccatcaacatcatcctccgaagacgaaaaaacaatccgacgcgtcggaaaggtaatgaggatgatccgtaagattaatctaatgggtgtgcccctgcaggtagaagatcttctctttaacattgataggaaaaagaaaagaaagagaggatgcttcgcatgcggggagaagggccacttcagggacagctgtccaactatggtcgaacctaaaaagaagaggagcaaaggcaatgcgctaacaagtgtcaaaacttggatcgattcttcaagcgaagatgaacctccaaggacgcgcagccaccgatcctcatcacgctcatcacacaagtgccttattccaagaggtaaaatgagtattcaatcctctagtgatgaaagtagtagtgatgatgaaggtgaaggaaagccctccgtagatgagcttgcggaagccgttaaattttttcaagatgatgctaaaggtacttggaccaaggcattgaggaaagcaacacctcaaaagaagacattaagaagatcaagtaaagtccaagaagagaagaagtggcaccgaggagggaagatcactggactgtccggtgtgaagtctggactatccggcaagacagaacatcgtctcccgcccagagttggcctcgggcagacggaacagtgtctcctgtccgaggttggcctcgagcaagatggaacaacatctctcatccaaggcgcgatgaactatgtctctcatccgaggttggcctcaagcaagatggaacatcatcttccctccgaggttggcctcgggcgagatggaacaacatctcccattcgaggttggcctcgagcgatatggaacaacatctcctacctagagctggccttgagtgagacagaacgtctctatgctcataaggactcgagggatatatctctcccacaagcccctgagcttcagcaacttattcctccgagtggtcttggtgaggtgggcagcggcacccgagctgaagaggcggtgaccgagatgggcaatgactcagcctccgagccgatgaagcagctagtcgcgaggcgggtgatcggctag

SEQ ID NO: 13490 - DNA, 375 bp, Zea mays
  Peptide Sequence Number=SeqID_56865
atgggtggaacaaaggaggtaccccatactagctatgatgaagccgcggaggccgaccacggtggggagtggcttaacagcgaggctccaactccggtgatgatttgccgaacccatagccgatgtccttgccacttcctcggcacagtgcaagcgtggaggtcacggggcgccgggttcagcttctatacccagggagatcgagtccaggtcgcggttagcgtggagtttgttgtggcgctgtgtctgttaccgagacatcagggggagaagatggagctgacaatgcggggccacatggcgagtgggccgaggggaagagaaactcggctgcacggtggagaggaggaaaaggagaagccgggccggctatga

SEQ ID NO: 13491 - DNA, 825 bp, Zea mays
  Peptide Sequence Number=SeqID_56866
atggcgttggctggcctttggcacgacgcggggcacgcgaggtcgggcgcgggcgtgctctggcgcgcgcagaacgtgtcgaacacgtggaagtgtccatctgcccgtgttcaaacgcctgctgagatcgcaaacatgcgaatcttggcaaaaatccggcacagacctcttcctggcacctatggctatctcccatatgttaataagttacttaactttgtgccaaaggttcaggccgctagaatgcgtaacaccctacttcctatcagtgctgagtatttgagtatcgctggtgtacacaaattagagatgagccgtgggcagtggagtgtcgagctcatccagcctgattgcggctcgtgggcatgccttgcaaagcaagtcattgggaggctcacgaagcgggccatggagcatttttgtgctcccgcccgaggttggccttgggcgagacggaacaacatctcctgtccaaggttggcctcgggcgagacagaacaacatctccatccaaggttggcctcaggcgagacggaaatatgtctcctgtctgaggttggcctcggggcatctgttgtccgatggccttgggtgagacagaacaacatctctggtccaaggttggccccgggcgagatggaaaaacgtctcccgtccgaggttggtctcgggcaagagggaacatcatatcccatccgaggttggcctcaggggagatggaactatgtctcccgtctgaggttggcctcaggcgagatggaacaacatctctcattcaaggttggcttcgggcaagacagaacaacatctcttgtccgaggttga

SEQ ID NO: 13492 - DNA, 495 bp, Zea mays
  Peptide Sequence Number=SeqID_56867
atgacttcccacagatcctcagacgacggaaatgcactgtcccacactgacgggcttgcacgagagggctttccccgcattttgtgggaggtacttcagggggccagatacacgacacctcctcagtacgcggtgcagcagttcgagaagcaccgagtgccccgctgtagggacacgatcgaggcaattgctctgcacgggttgaccactttctgcggattccatcccttggagctgtctacccaccccattggcttgttccccgcagaaagggaggacgacccaatgtggaaggatcgggtggagcacgccaaggacatctgggctatctacccgggacagacggctcacttgacagtgcggtgcatgaatgccctgtaccgtctgcaagtgatgcgttgtgaggcgatgtcccatctgatggcattgttggaggcaacaaagatcaccctggacaacagagaggagcttgtggttgacttgtccactgagatg

SEQ ID NO: 13493 - DNA, 435 bp, Zea mays
  Peptide Sequence Number=SeqID_56868
atggtgtctccggtgagctgcaagcgggtaatccgagtggacgtccgtgccccgttcgttgggggtcggctaggggcccagaggcacgcccaaaagtacctgcggcaaccggcgcgccagttgcttgacgcgtgggcctgggcttccccgctggcgtgtcagaagtcggagaagcgcgtccacctggcgcggttgcatgccgcctgcatggctgcccgccccttccgcccgttggtctgggcaaaacccggttgcacccctccaccggtggtcacccaggatggcgacctccggcttgatggtgggggaaagcgagccgggctgcggcctctgcccctccctcagcctcaaggattttcatcaccaaggctggggaggggagagcgccgagttggggtcggcccctgcgcgggcggtggcccgctccttcactaa

SEQ ID NO: 13494 - DNA, 273 bp, Zea mays
  Peptide Sequence Number=SeqID_56869
atggagagtcatgatctccgggcagaaagggaatcacgacttgtgggtggcgatgtgaatggtggttttggtattgactctggtgatggtaagtggcattctttccgtttggaaaggatggctcgtcttagacacaccgcatggaagtctgtcagccccttcttgccctctcgtctcgctgagcgtccgcttcgccgtccagtgactggtcagtctagccacttggagaggctgcaccaccgcctgcacgaggagcaggaacgtcgatggtag

SEQ ID NO: 13495 - DNA, 171 bp, Zea mays
  Peptide Sequence Number=SeqID_56870
atggcgacggtggagctgatggaggaggatgacacatcaaggttgagtgagcttatcgcgctcgctgagaagtgtggtgaggctgaggctgaggaccagctattctcccaagctacagatgaagcagaagccaattattacaagagaaaggcggaaaagtatgatgcatga

SEQ ID NO: 13496 - DNA, 288 bp, Zea mays
  Peptide Sequence Number=SeqID_56871
atgtacgacaaactctggcggcgccgccgcttggacgcggtgcagagcggctgctccgcgttgtccatcgtcaagcagggggacctcatggtcgtcgccaacgtcggctactctcggcctagccaagagtcattagtactcggtatgtcgcgcacgttcgacgactactatatcgatgactgtggcatcatcttggcgccagaggtgacgcaggggaggaccgacaacaatgaccagttcgtcatcctcgccaccgttgaggtagcttttgtgccgacttgcctttaa

SEQ ID NO: 13497 - DNA, 153 bp, Zea mays
  Peptide Sequence Number=SeqID_56872
atggaagatctgataggtgggaccctcccgccagacttccacgagagggcgggcacaagtgtttccaggcagacgcgggggagagaagaaataggcccatggactggcgaaggtgttcctgggccgaggcaaacagtgctccaaaatatgtag

SEQ ID NO: 13498 - DNA, 477 bp, Zea mays
  Peptide Sequence Number=SeqID_56873
atgacgagaaaagcttggcgactgtcagttcgacctctggaagcagtcctacgtggcccatgcacccctgtgtacggcaagcttcagcgcagccgccgcttggacgcggtccagagcggctgcatcgcgctgtccatcgtcaaacaggggacctcatggtcgtcaccaataccaacgactctcgggttgttctgggcaccgcaaccgacgacgacgccatcacgccgtccagctcatcatccacctgaagcccaacctgccacgagtagcacatccggtggtgcaacgactagggtgtactacctcgctgatgagcctggggtgcactttatttggcagcccagccaagagtcatcggtactcaccatgtcgcgcacgttcgacgactactatatcaaggattgtggcgtcatctcggtgccggaggtgacgcagaggaggaccgacaacaatgaccactcgccatcgtcggggtag

SEQ ID NO: 13499 - DNA, 594 bp, Zea mays
  Peptide Sequence Number=SeqID_56874
atggacgccggcctcgcttccgcagtcaccatgctccggacctgcaccgatgtcgtgcacctcgcgcacgttctcgagcagtttcgccttgcctggtgcggcaagctcgttcgggacacccgcgccgtcgctccgtcaagggcctctgcttcgacctcttcatcattaggggtggaaacagagctttcaatgtatgctggaggtgagcgatgtgatcgatattatccatgcttgataaattatgacaatggtgatggccatgatatatggtcaggttctatccggacatccggagaactgggcaccggtgatcggatggcggcctccggcgctaagatctggcggtcacaacctagccgcgccgtcgacgaggttttcgcctgtgattccataattcgaggaagagccgtgctgctcgcagcaccggtaccgcccccgttggcgcggacgcctgccatcggccgcgagctgttgatgggggaaacaaaaataggaagggacatcggagacaatccctgccgcgttcatcctttattaacgagcagaaaccatggttcgggacttcaggtttcagtaaatcttgccagaaattaa

SEQ ID NO: 13500 - DNA, 513 bp, Zea mays
  Peptide Sequence Number=SeqID_56875
atggccgcgggcgaggtgtaccatggacggacgacaacgaggtggaggggcgacggctgctgcgtggtggccgactccgtgcctgggcgaccccagcacgctgcacctgggaatcccgcagccttagccaccagagcgtgtgggattgccgatgattgggaaggagaagaacagttggcggctcatttaggagtcctactccctgtggttgatcttccaattgaaccgtcagccattgcgaagccctgcacgcgcccgcccttctcgcaaaatggaatgggatcgatgcattgcggcgatggaagggcgcagattgcgggcttccatcgaaggtcgcgggggcgagaggatccgggggcggaggcgagaatggaggggcacgggcgcgagaatggcggcaacaatggcgagatgcagaggcgagaggatccatgggaggcgaggctgtgggcgcgacaatctcgggggcggagccacggtgaagttgtggacgcccacgttagagtcttataa

SEQ ID NO: 13501 - DNA, 819 bp, Zea mays
  Peptide Sequence Number=SeqID_56876
atgcaggcggcatgcaaccgcaccaagggggcgcaccctttcgacttcgacgcgtccagcatggaggcccaggcccacaagtcatgtaaccggcgcgtcggttactacgtgcgagaaactgcaccgccaattgcgccagtaccgcgccttctcgactgcggaaccggtgccacgactcgaggcaaccctgcgcatggcccaacagtgccaaccgagcacatcggtcacgggtcagtcagccgcaagagaaggcgcgacagtcgatatggccaaaagtgggtcggcagtaatggcggcggcaggcgggcggaagcagcggtcaagtcgtctgcaggctcacgtcccctcctgggacagcgagagaaccctctcccacggcgtgaagacgacgcgcccgtgttccgttcttcgaacggctcgcgcacgcacaacggctgcctcgcgaaccactcgtcccgtcgcattaactctgcggcagggcaggcgacacctttggcaggcgaagcggggaccgggaaaggggatactccgaaagggatccttctctgcgaaggaagcgggccccgagcccccctactgatcagaggttcgaaggctggcccctcggaagggttcgacagccgcctcagagcactcgggctccgcgcccactactggtcagaggttcgaaggctgccccctcgaaagggttcgatagccgcctcaggccaatcgggctccgcgcccactactgatcaggggttcgaaggctggccccccgaagggttcgacagccgcctcagaacacgcagagcgagggatgactctgggtacgtctga

SEQ ID NO: 13502 - DNA, 1041 bp, Zea mays
  Peptide Sequence Number=SeqID_56877
atggcgatggcagcagccaccggcacggtggtgctggtagacgcggccctggccccgtacgagcaccctgacctccggtggcttgtgcggaagcatgtcctcgccgtactccaggacttccccacgctgtcgccgtccgtcgacacctacaccagcgacagcggcgcgtccgccgtgctgctcaacgcgcggggcctcctcaccgtctcccccgccctgccaccggtccttctcaccctatggcttcccctggagtacccgtacctgccgccgctcgtctacgtcttccccgccgcgccgccggcttcgctcgcccgcgaccaccccttcgtggaccaccgcaccgggcgcgtccgccaaaccctgccctaccttgaggactgggccgtgccgcgctccagcgtcgccggactcgtgcggagcctcgttggtgccctgaggatgtgccacccgctgacgtcgcgcttcggctccgtcgtccacgccacggccacggccagagcgacgacgacgacgacgccgacgccggaggaggaggagcaggagcgcatgcacgcggcgctgctcgacgagctcgtctccaggctgggcagggacgcggccgccttccgcggccacgtggacgaggacatacatgccttgtcctccagccaaggcaacctccgagcgcgggccgacgccatggaccgcgccgtccgcgacctcgaaggcgagaggatgcggctggagcgcgccgtgacggccagccttagtcaccgcggcgagctgctgtcctggctgcacaagacgagctgcgcgcccgacgacgccggagcagcactactcctggcaccgcacggggcggcgggcggcgacgcgccaaggtggcttgagagcaaggcgtcggagctcgccatggacgacaccgtcgacgcccttggccgcgccctcgaggacggcgagcgcgtcatcggcttccacgagtacatcaagcgtgtcaaggaagctgaaaatgtcgcgataggtggtagcgcgttcttcactttattgattgtttgctag

SEQ ID NO: 13503 - DNA, 441 bp, Zea mays
  Peptide Sequence Number=SeqID_56878
atgacggtggcaggcgggcgggagcagcggtcacgtcgtcagccaagctcacgtcccattcgggggcagcaagagaaccccctctcacggcgtgaagatgacgcgcccgtgatccgttcctcgaacggctcgcgcacgcgcaacggccgccccgccaaccactcgccccatcgcattaactccgcggcgggcgccgtgataaccgcgccaaaaaagggaccgggaaagggggataccccgaaaaggatccttccccgtgaaggaaccgggctccgagcccccctactgatcagaggtttgaaggctggccccccgaggggttcaacagccgcctcagatcgcgtgggccctacacccactactggtcagaggttcgaaggccggccccccgaagggttccacggccgcctcaggctactcgggctccgcgcccattactga

SEQ ID NO: 13504 - DNA, 318 bp, Zea mays
  Peptide Sequence Number=SeqID_56879
atgtacgacaagctctggcgccgccaccgcttggacgcggtgcagagcggctgctccgcgctgtccatcgtcaagctgggggacctcatggtcgtcgccaacatcggtgactctcgggttgttctgggcactgcattcaacgacgaccccagccaagagtcatcagtactcggtatgtcgcgtgcgttcgatgactactatatcgaggactgtggcgtcatcttggcgccagaggtgacgcagaggaggaccgacaacaatgaccagttcgtcatcctcgccaccgttggggtagcttttgtgccggctttcctttaa

SEQ ID NO: 13505 - DNA, 675 bp, Zea mays
  Peptide Sequence Number=SeqID_56880
atggcgacgaccttttcatcatcttcttcttcacttgaagaagagctgcttgagtattcaatatcgtcttttgctccaaccattttacccgttgccattggtatgctcctcctctgctccctcctcgtcgtctgtcgtctcctcgcgctcgtcctccgctgcccgactccggcgtcgtccccacagtccgcaccagccgacccaaccaccgctcaagccttaacccaacatttatctgtatcccgtggcaaggagcatctgcgcgtcacatccgcgatcgcgcgctctacgtcgcctcccgccgccgccgcacggccgcgacggatgctcggccaccgcttccctaccgccctccgcctcccacatggtctgctgcagaggaggagcatcatggcccgccgcggcctgaccatcatggccggtggcgaggcggagggtccgctcgcgggtttcttcgactacatggagcggctgcgcaactacgagcgctcgggcgtgccgcgcggcgccggcaccgactccgacgacgggtttgacctcggacgcatgcgccggctcctccgccggctcggcgacccccacacccacttcccgactgagcatatcgccggcaccaaggggaaaggttctactgctgcattcctgtccaatatcatgagggcccaaggctacaat

SEQ ID NO: 13506 - DNA, 825 bp, Zea mays
  Peptide Sequence Number=SeqID_56881
atgtcttcgcactctcctcatgcatcgcgcccttccaccttccgagcccccggatggggagcgcccgtgttgctttcgtcttgtcgttgttggaggaacgcaacttcgcggaagttggtacctttcggccattgctcggcttcaaggattttcatcaggcagcccgactgtatcccctcgccggtggtcacccaagacggtgaccaccagtttgatggtggggagaagcaagccgggctgcgacctccgccccgccctcagcttcaaggatgttcatcatcagtgctggggaggggagtgcgccgagttggggcctatctccgcgcgggcagcggctcgctccttccctcagtgatcgggggggggggggggaagggcgttagccgttcgtggcgctggcagctgccacgtgtctggctctccgtcctgagcggcttcggcgctgcttccggtgccacctcccaccgaggcagccggaagaggtttctctatcgacgagatagtcggtgccacccgtggactgacctccggctctacggccttggtagcttgtcctcgcccctcgagtggggacgtgggcgagggccttgtggcaacagcgtctgccctgaggtcatcgctgctgctgtttggccgcccggagcggaggtcgttgtcgctgctgccagagcgggcggcggcgagccacctagggttttgtcgtcccgcaggccctccaatgtggggggttgttcgtacccacgggagtggaaccggagttctatttgtaatggcaccttgaatgtcgctgtctgttcattgtggctgtcggggcctgaacattga

SEQ ID NO: 13507 - DNA, 753 bp, Zea mays
  Peptide Sequence Number=SeqID_56882
atgaccgcgtcaaaaaggtacgccacgtcgttcaaattcatatccctttttctcttcccctttctctctcttgcaaccgggaccgggaaaggggatactccgaaagggatccttctccgcgaaggaagcgggccccgagccctcctactgatcagaggttcgaaggctggcccctcggaagggttcgacagccgcctcagagcactcgggctccgcgcccactactggtcagaggttcgaaggctggcccctcggaagggttcgacaaccgcctcaggccactcgggctccgcgcccactactgatcaggggttcgtaggctggcccccgaagggttcgacagccgcctcagaacacgcagagcgagggatgactctgggattccccaaagaggacggcgggttcattcaggcaaagtccggggactcttttctatcctatcacggcaccgaggcggcgccacagtgcttctgcggcggcgagcttgccggtgacggccaaaatggcccgctggcgactaatctccccgaccgagacaacctaaacagcgagagcacaatggtgaacacagtaatgtggcttaccgagcgcgcggaactatggcggaagcaggccacgacggggtgcggagagagattgggcgcgagcaccggcgaggaattcccggactgccccgcccgtggagtaactctgatgcggggcaacaccttcctcccgcgcagcgacgtttcaagggcaaagccagagctctga

SEQ ID NO: 13508 - DNA, 867 bp, Zea mays
  Peptide Sequence Number=SeqID_56883
atggcgtctcctgttgacgtggctggtctgcgccctaggttgggtgatgtggaagctcctccgaagccgaggtcgagtctgtcttccgtggccgaggtcgagtccgagcccctagttcgggcgaggcggagaccgtcggctgaggctagggcggagtccgagccctggggtcgggcggagcggagttcgtcgtcttccagggctgagcccaagtccgagccctgggtcgggcggagcggacctgagtccgagccctgggtcgggcggagcggagttcgccgtctttcggggcttagcccgagtccgagccctgggtcgggcggagcggagttcgccgtcttccgaggcttagcccgagtgcgagccctgggtcgggcgaagcggagcttcctatggtgcctgcggccggggcctgactgcctgtcagcctcactctgtcaagtggcaccgcagtcggagtggcgcaagcggcgctgtctttctgtcaggccgctttatgctgatgggggttaccagctgagaattaggagccttgagggtacccctaattatggtccccgacaccaaagtcagctcggtctgggtgcaccggacagtgtccggtggtgcaccggacagtgtctggtgcgccaggctggctcaggcgaacttgctgctctcgggaagaaactaacggcgtacggctataattcaccggactgtccggtgtgcaccggactgtccggtgagccaacggtaagccgggccaacgatcggctgcgcgatcagcgcgggacacgtggccgagccaacggtcgggagggggcaccggacagtgtccggtgcgccaacggctcccaggcgccaacggtcggcttcgccaaataa

SEQ ID NO: 13509 - DNA, 1062 bp, Zea mays
  Peptide Sequence Number=SeqID_56884
atgaaccgtccacgactcgagacgcagtacgccgtgaatggctgcggcggtgaacaagtgcgccgtgacagccagctgatgcggaaggtcttgtccttcggcggcgggatcctgcaatggcaaatggaagcgcctaaagaacacaacctcgacggcaacttgtctgcaacaatggagctcacgcccaacaatagtgcccacggtggcatttgcgctggcgccgcgggagagggcgagttgtgcgatggcgccggcggcagggaagtagtcaagggagaaggacggggaagagatcaaggaaagggcagtggctctgctattggaagtagccatcagaagggtggacgaagaaatgagaacagggtgcgctggcccctggccatcaataaaaaatggcatagaagggtatgggaatctgaatcaggaacagaacagaagctcccaaagacgaagagccagcaggacagacaaaatagttggcaatattttaagatgctcctctctgataaggagtcgcttttggatgatcttgagggagaaaattctgatcaaagtgattcagaccatgtcacactagcgataagtattgaggacacaggtgttgggataccattgcaagcacaagatcgtgtttttacaccatttatgcaggctgatagttcaacttcaaggaattatggtggtactggcattggtttaagcatcagcaagtgtctagctgaacttatgggtgggcagataagttttgtcagccgtccttttgttggaagcacattcactttctccgccacactgaagcgctcatacaaagatacttcagttgattcaagtaggagctttgctgttacaagatatcacctcaagaggttgggaataattgttcaagttgtgaacaatctgagtgcagtagcaaaagctttccctggacaaaatggagcaactgtttctagggaaaaggcaaccattctttttattgagagtgacttctggaggcctgagacagatgttcagttactgaaccatctacgcgagaacaagaaccgtcagttgtctgatgggtag

SEQ ID NO: 13510 - DNA, 57 bp, Zea mays
  Peptide Sequence Number=SeqID_56885
atggcgccgccggccctggtgaacgccaccgccggtgtctgcgattatgcttattaa

SEQ ID NO: 13511 - DNA, 441 bp, Zea mays
  Peptide Sequence Number=SeqID_56886
atgtcgactgagaaacgccacctagatcagatcgaactcctcagtgttaggcggctcctcttcgaccacctgatcttctcctgtggggggtgtgagacagcaagatttataggaagatccagtacagggttcctggctgacagccatcgcagcaaaatcaaccagggacctccccgcactgacctctcccctactgcccttgcccctttcggagaactcagggggctcggggtaaatctacagagacacagagaacagtccacaacggacggcgggttctatttccaaaaggtccagggtctcttatgcaattgtggcacggtgaagggtatcgcagaacatgggccgttcgattcacattcaagggctcagattagatttaatatataccgaaccgatgtgtcagttacatccgatggctcagagtataatgtgacgtga

SEQ ID NO: 13512 - DNA, 942 bp, Zea mays
  Peptide Sequence Number=SeqID_56887
atggcgaaggaggaaaaagtgttggcccagactaaagagcatgctcagcttgttagaagctttggtgttgaacagcttgttgtcgcagtcaacaagatggatgctgttgattatgcaaaagaaaggtttgatttcatcaagctacaacttggtagtttcctgcggtcatgcaacttcaaggactcagctattacctggattcctcttagtgctgtagaaaaccaaaatttgatcaaagctccttcagatgctcgtttgacctcctggtatcaagggttttgcctcttggatgctatagattttctgcagcttccttctcgggatgtttcaaagcccttgattattccaatctgtgatgttataaagtctcagtcaacaggacaattggcagcttatggaaaattggaaactggagccatccaaattggttctaaggtgttagttctaccttctgggcaagaggcgactgtgaaagccattgagcgggactctaattcatgcaccgtagcgagagctggtgataatgtggcaatttgtttacagggtattgatggaaaacaactaatacctggcggggttctttgtcaccctggtttccctgtgcctgtagctaaccacttggagctgaaggttctagtcctggacatcactactcctattcttgttggctctcaggtggagtttcacatacatcatgtgaaggaggctgcaagagtaacaaaaattgttgcattacttgacaagactggcaaaccaagtaaatcggcacctcgatttcttaaatccaagcagaattctgttatacaggtcacactagatggagctgtctgtgttcaggaattctccaagagccgagctcttgggagggcatacttgaggtcggctgggcgcaccattgctgttggcgttgttaatcggataattggccaagatcagaactag

SEQ ID NO: 13513 - DNA, 345 bp, Zea mays
  Peptide Sequence Number=SeqID_56888
atgggcgtgcctgacttctgcgcgcgttggcgcgcattcaatgcgctgcagctcaaggggggcacgtacaaggatactgaaccccgacatatgggcccaggggcaaaatggaaggaagtaactactgcctgtaacgccagggtgattttcgagcgccataatgtctgtagtgcatacagtattgatatcccgcgctgtttcctcggtaacgcgcgagtcatgatgagcatagtgtatgccgcagcatgggcgtactgtctgccaacggaatggacaggcacaccgtccgcaagatggcctggtcgtcgtccgtcagcagagtggacggggcacattaaatgctga

SEQ ID NO: 13514 - DNA, 288 bp, Zea mays
  Peptide Sequence Number=SeqID_56889
atggcgcaccggacagtccggtacgccaccggtgcgccaacggtgcgccaccggtgcgccaacggtcacttccaacggctagttctgacacagagccgttggactcatggcgcaccggacagtgaacagtccactgtccggtgcacaccggacagtccggcagcgctctcgggtttctgcgactgggaaggctctgctgtgaaccagcctggtcccacctggcagagggtgcaccggacagtccggtgcacaccggacagtccggtgccccaaagccagaaaccctaa

SEQ ID NO: 13515 - DNA, 1785 bp, Zea mays
  Peptide Sequence Number=SeqID_56890
atgcaatgtccggtgcaccggcagccgcacgcgcagatcccattttcctgtgcgctgtccggtggttcaccggacagctactgtgcgttgtccggtgtgcaccggacatgcactgtagactgtctggtgcgcccatattgcgttttaaaaaaacgcctccagcccgaagccgagccagaggcgctcagtttcctctctgtcctctggcgttcaaatcccctctccggcgatctcctcaccggcggcgatcctccagcgaccaagtgctcctctcctgccttttccccctctgtcgtcaggtcaggatgtcgtgcacgaagaatgtgtcgacgccagggggaggagatgatgaggaccctcctcgcccctttaggcaggtcaagggaaagaccgtgtatttggagcagcaggaaggccgcaagaagcgacgtctggacagagcagcccgagcagcggcagcagccgctgagcaggcagagcaaggagatcagctgcatatttcttcagatcagattgcctatcgagttcgttgtcatgcctctcgtcctcgctcctaccactccctccactgctaccactccaccacctactttgcctgctcccgtcactcctgtgccatccaccacctcagccatacccaccacctccactactccagcttccactgctcccgcttctgctcctcctatcccacctgctcgcttccgggagcatgatgagactgaggtgcgaccacttgctgtggatcacaggctctttgatcttcagcgtgctacagcggcacgggtacgtcggttcagaaacgtacctgtggagaattggttacctgcacagagagaccctgcagcggcagatccattcagcaccaggattcaggattctttttacagagcacagttgtcagttcagattgctaagcgaacgcaccagctttgggatcttcctgccttcctgctagccgccggtgccgactatgaggttcacctctcttatctgtctggtcttctccctcttttgaccaccagcggcagatatgttgaggaatgggtccaagttttctatgctactgtatggatcgaccctgatcaccactggatgagattccgatttgagcgagaggatgttatcattcatgctagtcagattcgtcaggtgtttggattccatgagtcatcgactcgtcttcacagcatgtgctatggcacctctgaccctcctcgtcgccctcatggtggagttgctcctggtacagctcacgtcgcagctttgttccgaccacccttctcagatgggtcgcgacgttcttcggcagatttcaccacagcggccagatttctatatcagctcatgagacagacgcttctgccacagatgggccacagggaggctgccactcatattcagctttggctccttggtgccctagtttctcacttagagtttgatgttgtggattttcttatttgtgagatcgaggacacagtactggatggtctacgtgctcgtcgtcagctgccttatgctcacaatatgtgtcacatctttgctcagctgattcggcccccacagttccaggtgattgatactcaggccgaggataccacttttcaccagtttgagactcaggacgcagcagtccatgatgatgatgatgatgatgatgactttggggttccacctccgcctccgcctcctatgcctccacgcactcatgatcatgaggctgggagttccagcggtgctgcccctcctgccattgaccctgctcttgcagcgatcctctag

SEQ ID NO: 13516 - DNA, 426 bp, Zea mays
  Peptide Sequence Number=SeqID_56891
atgactctcatgcttcagcacaccggtgtgccgattcccccagttcagtcagcaccgcctccacctcttcatgctcctgttgtgccagctattcagccaggaccccctcttccgacagttggtccttcctcctctccgcttcggccggtcaccttggttttcacgtcgccggtcattggctccgtcagctctcagccgccagtgccaccaactcctgttgttaccactgccgttgtagcggtgtctgtgacttctttggctccggcagctcctgcagcgcagcttccgtctgagtcagtaccagctccagcttctacagcagatcctggatccgagactgactctgacccacaactggcgttcgctctactgccacgaccgcaaccggatgcgcccctgccacctcctccctcttctgatgcgtag

SEQ ID NO: 13517 - DNA, 531 bp, Zea mays
  Peptide Sequence Number=SeqID_56892
atgtcgttgtctctctggctttttcacatctctcgttgttctctgttgcttccctttcttctctcccgtctgcttccaccatgggcaagaacaacaagcgcaagcgtgagccaactccttcatcggaggagtttggtgactcggagtactcagaggaggagttctcctctgagtctgaggggtcccggctcccatcccctgcgtgagtcgtctgacgactcagacgactcccaggggcttgcggcggaggtctggacgtacatccgggccgtcgagcgttccgggctcgagggctcggatgagtcggagtactcctcggatgaggaggactcggacggcggcggcgaggacgacgatgacgacgacgacgatgacgacggtggcgacggtgacggcgacggcagcggcaggggcagcggcggcggcagcaaggacgacggcggcggaagtaggggcagcgaccggggtggcagcagcaggggcagcaccagaggcggcagcggtggcggcagcaacagggccagtggctag

SEQ ID NO: 13518 - DNA, 606 bp, Zea mays
  Peptide Sequence Number=SeqID_56893
atgcggggcgccatcattactcgcatagcggagcgagccagatgggacgccggtcttgttccccgtagcctgagtcagcttggggtaggccctgggttgggcgaggtggaggctcctccgaggtcgaggtcgagtctgtcttccgaggccgaggtcgagtccaagcccctaggtcgggcgaggcggagaccgtcggctgaggccagggctgagtccgagccctggggtcaagcgaagcggagttcgtcgtcttccggggctaagcccgagtccgagccctggggtcgggtgaagcggagttcgtcatcttccggggctgagcccgagtccgagccctggggtcgggcgaagcggagttcgtcgtcttccggggctgagctcgagtccgagccctggggtcgggcgaagcggagttcgtcatcttccggggctgagcccgagtccgagccctggggtcgggcgaagcggagtttcctatggcgcctgaggccagacttggctgctgtcagcctcactctgtcgagtggcatagcagtcagagcggcgcaggcggcgctgtcctcttgtcagaagcttatgaagattcttcatcccaacatgggctag

SEQ ID NO: 13519 - DNA, 426 bp, Zea mays
  Peptide Sequence Number=SeqID_56894
atgactctgggtacgtccgatacatggccgaggctcgggctacgctcccgatgtaccctaggacattttcgagaccggcaggagcgattttgtaacggaatcccatcagagggaggcatcgagccctcggaccctatcaaacgggaccgggtccggcaaatcacctgcagggtgaggctgacagcagctgagtccagcctcaagcgcaacaggaagctctgcctcgcccgaccttgggcctcggcctcaggaggaggtctctgcctcgcccaaccccagggctcggcccccgcctcggcctcggaaggtggtctccgcttcgcccgaccccagggctcggcctcaacctcgacctcgggaggaatcgcgccctcgcccgacctcagcctcggcctcaggaggagtctccgcctcgcccgaccttag

SEQ ID NO: 13520 - DNA, 252 bp, Zea mays
  Peptide Sequence Number=SeqID_56895
atggcggcgaagtctagatacacacgccggcttccgctcagaagggaggtcgccatcaccgtcgccaacccagatggattcgcgtatatgcatctggctattgatgttgggttcgcgctggcaaacctccgtggtggggcatgtggacatcgccgcggtcggaccgacggggaggtgctaaataactcagaagttcataacccaataatcgtagctccgaatttagcgattctcgaatccacgatctcgtag

SEQ ID NO: 13521 - DNA, 879 bp, Zea mays
  Peptide Sequence Number=SeqID_56896
atggtgcagtgcaacgttgtcgacggcagcaacatatatatatatctctctctcttagttcaggggttacgactagaaatcctggtgcagcacaggctttcagaggagaaggcgactaggttcttatatcggaagcatcgatggtctagctggcgcacggctggcaagatccctacgagtttgttacgatgcaccagcgagtttgttacgaagagatttgaattcagcgctggttgttacgaacaggatgatgaagatgatgtcatcatgagtgttatagttccttacaaccagctaaaattccttaaagcattattcagggtttacactacccaccccattggcttgttcctcgccaaaagggaggacgacccaatgtggaaggatcgggtggagcatgccaaggacatctgggccatctactcaggtcagactgcgcacttgattgtacggtgcatgaatgctctgtaccgtctgcaagtgatgcgcgttgaggcgatgtcccatctgatggcattgttggaggcaacaaagatcaccctggacaacagagaggagctcatggttgatttgtccactgagatggtggaaaaggacttgcaggtggagcagctatccaatgatatccaagagttggaggaattagtggggaccagggagaacaccattgaggtcctcgaggataagcttattaacactcagcagcagctggctgaggctaatgagcacctggatatgcatcaccaggagatccaggatatggaggccaacgaggacgtcgacatcgaggaaggagatgagcctgcctccagcgtggacactgctggctctgggagaccaccttcccccgagtcgagtgttgcctcgttcgctcactag

SEQ ID NO: 13522 - DNA, 876 bp, Zea mays
  Peptide Sequence Number=SeqID_56897
atgttcggtgcaccgggctgggcctcgcggggaatctgccattgtgcggtcttgtctggtgtgcaccggactgtgattgtgcgctgtccgccagcagtccagctctctgatatctgtctctcccgcaccgtcaccgccttgccctcgccggcggtgaccaccgtcattcgtgcttcggtaatcttctccctttggaaggttttgcacccagaaatagccatttcaccctctaacccaaaccccacacaccaagtgctcgtgtgcctgcttgcccgcctacgagactcctctcctgcctggttcttctccctcgagacgtacccagatgtttctgccttccgtatagtagctgatgcagagtctgagagtcacattacatatctgccaggtctctactccttgctgacatttggtggccggtatgttgaggagtgggtccgagtcttctatgctacaatatggatcgaccctgaccatcagtggatgaggttccggttcgaccgtgaggatatcactctgcatacaactcagatccgggagttatttggattccctgagtcaacgacgaggcttcacaacttgttctatggtacctcagaccctcctcgttgtcctcatgatagagtagctcccggaaccgctcacgttgctactctcttccggcctccattctcagacggctctcggtgctcttctgtagacttcaccccagcgacgaagttcctttatgagctgatgaggtgcaccctactaccgaggatgggatacagaaaggctaccactcgtattcagctaagggtcctcggtgctctggtttctatcacacccggttttggaaggcaaaccgaatgcgaaccatgtacgtgccaggattag

SEQ ID NO: 13523 - DNA, 297 bp, Zea mays
  Peptide Sequence Number=SeqID_56898
atggaaaccaatgggcatctcgacctcgacacgggaggtgccataggttcaacacaaaccaataaaaagaacaagttaaggttcaaaaagaaaggagcaaaagaaaccgaaggctgccctggtctggcgcaccggactgtccggtgcactagggagatcaactctgaactcctcaccttcgggttttctccaggccactctgctataattcactggactgtccggtgtagcactagactgtctggtgtgccatgtggagcaacgactactgtgccaacggtcgtctgcaaaaggtga

SEQ ID NO: 13524 - DNA, 324 bp, Zea mays
  Peptide Sequence Number=SeqID_56899
atggggcacctaaatccgcagacccttggggaggctgtcttgaaggttaagactaagacgagtaggagcttacagaagtctgggagaggtaatcaggtccaaggagaagggccaaactgggttcttgttgctgggggttttttgcttagcgcgctttcagtcaagattgggtgcaaactaaagcagtggttcaatgggaagcagcaaaataatacttccaaagctaaaagaagacctgaagcatgcgagctgcactcagacctctaccggttcagtgaccaaactggctgttgctactctgtttcttttttcttttttctgtaa

SEQ ID NO: 13525 - DNA, 294 bp, Zea mays
  Peptide Sequence Number=SeqID_56900
atgtgcaaggttgtcgcaacgttccgtcggacgtttgcaattactttcgacgggagcttgacaagggacaatatagaagggaaagcaagaatactggaggaggtcgcattacatgctttaagagatgaggaggaacttaggaggcatgcttgcgcgagtagtggcacgtatgagagggtgatggctcctcccatgggggtgttcatggcatgtttggaagaacaccttttaggaaggagaaaccacgcatggtccgaccaaggattgataaggcctcgttttcgaaggcagtaa

SEQ ID NO: 13526 - DNA, 810 bp, Zea mays
  Peptide Sequence Number=SeqID_56901
atgcagtacaatggatcaagcagtctcattagctgcgagaagcagacgattcgaatcgagtttttatccttgcaagtgaccgcacttgtacccaccataaccggaatgggagaccacgtctcaggtcgcgtgaggggtaaagtctacgggcaggttcactcaggctctggtgctggatccgggggctacctcctgagcagctccttgctccggcacgaggacgtactctccgtcagcgaggctctggcggtcacaacagtgtacggctcgacggcgggggtggacggaatcgcccggtccacgtgcgcaggcgggtgctctcgtcggcggcgggtgtgccggccaaaccacggcgacctagttcaatcaaatggcacagtgagcttcacggggtggcatagaggctgtgtgcacaaggaatcgaagaatggagcagaggattacccggtctacgctcgccggcggtcgggtggagtccggcgaccgtggactggcctctccggcgaagcaaactccgattcctcgctcggggagcttcaccgagggggatcgggcagccgcggacacgccgtgcacgggcaaacgccggtgggtttgggctccgacgaggttgagcgcgtgcggaggggtacggtcaagagcgcgtcgaacacgtggccattgatttctgcctttgttcttgcgcctgatgagcagccaaattggcgccaagtcttgtctgtctgcactgttcaacccgagacaaaacaggcgccaactcgtgtcaaacggtcttggcttgggttcaaactcttccagggggttccttag

SEQ ID NO: 13527 - DNA, 378 bp, Zea mays
  Peptide Sequence Number=SeqID_56902
atggcccgcgcccgcgcctataaaacgcccagggaccttgaccgtacccctccgcacgcgctcaacctcgctggagcccaaacccaccggcgtttgcccgtgcacggcgtgtccgcggctgtccgatccccatgccaccgtagaccggccagcaaggcctttcccaaccccgtccagccctcggagaagactgtgcacacctcggtgaagctccccgagcgaggaatcggagttcgcttcgctagagaggccagtccacggtcgccggactccacccgaccgccggcgagcgtagaccgggtaatcctcagctccattcttcgattccttgtgcacacagcctctacgccaccccgtgaagctcactgtgccatttga

SEQ ID NO: 13528 - DNA, 189 bp, Zea mays
  Peptide Sequence Number=SeqID_56903
atggccatgatgggttcaacatcggaaaagatgtacctctgccaggtaccaaactttggactaataccagaaaggccaacacgcaatgggagtggagaaatggtgagagtagcatgtaccctccatggcaagaggctggacgatggtgtatctgtgctctcgattggcgtgaacccggtctggtcttaa

SEQ ID NO: 13529 - DNA, 594 bp, Zea mays
  Peptide Sequence Number=SeqID_56904
atgtccttgagagtcatttctttgacggggttgtccaaggtccgttggacaaagacaactgtaggtgggcctaataacttgggaggttccgtcacagctggcagcagtagcggcagcaacgatccaatcgtagacttggaagcccaagtggaacagcttcggacagagctacgtcaccgaaatagggtgtgggcacaagacggtcagcgtattgctgagttagcagctgacgtcagatgcttgcaagacgagcttgctgaacgggatttggcggtcgattgggccgtcaactcacgttcggttgcatggaaccgtgaagccaaagctcgtgctcatgtgacagagcttagtgcggccctcgataacttgcaggtgtactgcaatactttacatgaggaagtacatgtactgtatacacgactgcacccggacgtgcctgccgaccctgttgcaatgggagctggaccatcagggacatcaggtgaaggacctgatggggagttggacctttttaggcctcctccttccttgaacctggctgatgatcggtctcccgcatcaggaaataaagaaaccaaggacgacgaagactag

SEQ ID NO: 13530 - DNA, 513 bp, Zea mays
  Peptide Sequence Number=SeqID_56905
atgaccgcgtcaaaagagggaccgggagagggggataccccgaaaaggatccttctctgtgaaggaaccaggctccgagcctccctactgatcagaggttcgaaggctggcccctcgaagggttcaacagccgcctcagagcgcgtgggctctacacccactactggtcagaggttcgaaggccggcccctcggaagggttcaacgaccgcctcaggctactcgggctccacgcccactactgatcaggggttcgaaggctggccctcgaagggttcacagtcgcctcagacgcagagcgagggatgaccatgggtacgttcgatacataaccaaggctcgggctgcgctcccaagaggctcgggggctgctctcgcaaacccggctccggccaaatcgttgacagcgtcaacataccagcccgagaacttggaatccgatcgtgcacccgggctacggccagctcgcatgagggaacgaccagaccagccgaagcattacgcgaggcattaa

SEQ ID NO: 13531 - DNA, 1011 bp, Zea mays
  Peptide Sequence Number=SeqID_56906
atgtcttcgtgctcccttatgcatcgtgtctttccaccttccgagcctccggatgggggatgcctgcagcccttccgccttgtcgttggggaaacgcaactccgtgggagttggtacctttcagccatcgttcggcttcaaggattttcatcatgcagcccggctgcacccctccgccggtggtcacccaagacagtgacctccagtctgatggcgggggaaagcaagccaggctgcggcctccagtctgatggcctcaaggattttcatcaccagggctggggaggggagagtgccgagttgggctgccgcgtgcctggctctcggacccgagtggcttcggagccgctctcggcgccggcttccgccacggcagctggaagaggttcttccgccgacgagatagctggggccgcccacggaccgacctccaactctacggccttctgcccgtccttgcctcacgagtttgggcaagggcgggggcctcccggcagcagcattctccctgaggtcatcgctgctgctgttcggccccccggagcaaaagtcgtcgtcgctgctggagcggactcgcctgttggttgtctggaccgcttcaccaagtgtgagtcgcctcgtgcaaaggtgacgagtgagcatggacagaggcagagttggctcgaaaaagaagacttggtcggccggagcctggccgggtcgtccgttagcgggaccgacgccagaattgatctaccgaggcctcgggccgggctgatgtcctcggaggacagctggccgaggcctcggggtgaccagccgagccgcctgctcgggccggattctcggagaagaccctggcggcgatggcccgggtgtggtgatgacgtcgtccttcagagtggagatcctcggaccgcgtcgacgtccgaggctaggtcggacctcgtcgaaggtgcagccgacgccgagggtgctgctgctcccttcaaccgtcaagatccgagcctgcaagatcggattatcttgtag

SEQ ID NO: 13532 - DNA, 162 bp, Zea mays
  Peptide Sequence Number=SeqID_56907
atgtccagcttgcaaaggtttctcatgggagagtgcttctgcgacacagtgatctgcaatgatcttcctcagatgctgaatctctcgttcggattcaaacagatcacgattggcaacatccaattgagactgcagggagagccagagctgttcgagtactga

SEQ ID NO: 13533 - DNA, 1407 bp, Zea mays
  Peptide Sequence Number=SeqID_56908
atgcatcgcgtctttccaccttccgagcccccagatggggggcgcccgcagttcttccgccttgtcgtcgttggaggaacgcaacttcgcggaagttggtacctttcagccatcgttcggcttcaaggattttcatcaggcagcccggctgcatcccctcatcggtggtcgcccaagacggtgaccaccagttcgatggtggggagaagcgagccgggctgcgatcttggtccctccctcagcttcaaggatcttcatcatcctggctggggcggaggccgggctgagccggagctctacctcccgcgcgggttcgtgggtcaccttctccctcagcattcaagggagagggcgctcaccggcctagcgggagggtcggacttcgacaacgcggggctggtcggtggcgagcgtcgtcagcttcagcgcgttgggctcgctggctcagctggctctggctcggctcccggtgccccctcccgccgcgagagcggttgtcgtgccgcgcgcatcgaaggaccgcccaagacgttgcgcgctgctagggcggcgttcgtgttctggggctatcctgcctttgccccgatggcttccaccgtcggcgctgaggtggtggcggctgaagaagtcctcgtcgccgacgggatcaccgccaccatccgtgctctgggcctccggctctttggctttgatagcttgtcctcgcccctcgagtggagacgtgggcgagggcattgttgcagcggcgtccgccctgaggccatcgacgctgcagtttggccacctggagcagaggtcgttgtcgctgctgccggagcgagcggcggggaccctcggtcgctcttcgatgagccgaagctggaggcagcggtgttagcatggacagaggcaaagttggctcgaaaagaagacttcgtcggccggagcctggccgggccgcccactggcgggaccgacgccggagtcgagttgccgaagccacgaatcgggctggtgtcctcggaggacagctggctgaggcttcggggcggccggccgagccgtctgctcgggccggattcctggaggagaccctggcggcgatggcccaggcgcggtgctgacgtcgtccttcggagtggagatcctccgaccgcgttgccgtccgaggctcggtcggacttcgccgaaggcagagttgacgccgagggtgctgctgctccccttccgtcgatgtctgagcctgcaggatcggttcatcttgtaataattgtctgcgcgagcgagagttacttctcgcggaaggtgacgagtgagaaggtgataagtgaggtatccgtatcccggaggcgtaggagtccctcggctcggtcagccttggctgcttacgtgtactccgtcgttttcaggatcccactttcgaagtag

SEQ ID NO: 13534 - DNA, 708 bp, Zea mays
  Peptide Sequence Number=SeqID_56909
atggtcgcctcccaagggggtcaccctccttttaaaggcggctctccctacttgcgtccccagccgtcacgggctgagtcttctccaacacactccaaggtcctcccctacggcgcgggggctgggtcccacacgtcatgcaagccggctcagagcggaagaagccaaaccgccgtgcgcggtgcgtacaaccgcccagcggttacaagtgactctccacttttgcccagaccaacgggcgaaaggggcgggcaaccatgcaggcggcatgcaaccgcgccaagtgggcgctcttctccgactcccaacacgcccagcatggaggcccaggcccacgcgtcatgcaaccggcgcgccaaatgcttcgtgcatgcaactgcaccgccacttgcgccactaccgcgcctcctcgactgcggaaccaacaccgcgactcgaggcaacccagcgcgcgacccagcaacgccagcctggcgcgacgggaccgggaaagggggataccccgaaaaggatccttccccgagaaggaaccaggctctgagcccccctactgatcagaggttcgaaggctggcccctcggaagggttcgacagccgcctcagatcgcgtgggccctacacccactactggtcagaggttcgaaggctggcccctcggaagggttccacagccgcctcaggctactcgggctccgcgcccactactga

SEQ ID NO: 13535 - DNA, 180 bp, Zea mays
  Peptide Sequence Number=SeqID_56910
atggtgacctccagtttgatggtgggggaaagcgagccgggctacgacctctgcccctccctcagcctcaaggattttcatcaccagggctggggaggggaacccgagtggcttcggagccgctctcggcgccggcttccgccacggcagctggaagaggttcttccgccgacgagatag

SEQ ID NO: 13536 - DNA, 426 bp, Zea mays
  Peptide Sequence Number=SeqID_56911
atgcgggacttccaacagtatgagattacaaatagcttcactcaactgttgcaggagaccgactgctcgcctaccagtcgaggggccgactgccgatggtcccaacaactgcattcagcaacagcaatggtccaaaacaggactacaggagtaccctgtacccgtagcagattggcagtagtgtctgcgggctgcggcccctcctccacacgtgacgtgacacgttggtggggtcaccgtccggaacgtgccaaacagctacaggcatcagggctcggtcgcggtcggcgtcggcccgacggccccaagcagaacaaacaagggtcgcctactgccgaggcgtgccctcgtatatggcctgtcgccttctactggtcctcgtctggactcccactgctgcggaggcaaatgtatcagatgaagtga

SEQ ID NO: 13537 - DNA, 375 bp, Zea mays
  Peptide Sequence Number=SeqID_56912
atggagaagcggtacctctcgcgcttcagcatagattgccaccagaaggtcgtccgggagaatgaaataaactgcgattcactgtcagcttgttgcagcaactccccattcaacattgttctaatacacttttattccttagccctgctcctattacatctcaagggaaacctagatgggtacagacatcgaagtgatggtatgggagagctgggtgctctgagctatgtcattgatccctacgccaaagttggctcgagcggggatggcatagtggtgtcctctcacgagttgacctccaaagtgtcacactcggatttaagggcaaacccgggcgggtctcaaatgtgtgctaggatcaagtctcacacatga

SEQ ID NO: 13538 - DNA, 444 bp, Zea mays
  Peptide Sequence Number=SeqID_56913
atgacgcatttcttcagtggcctcatcaatcttcctctaaagatcggcgagacgaagcatcttttctttcttcttctgaacctgttgatggatggcttcgaggtccctgatttcttggtccaactcctcctcctaagtggctgcagtgcagcccttggccctgatgacttcttcggcggcatgacgaaggtcaaagcttgccaaaggtggtcaaaaggcacaggacgcaacctgggcaatattacattcatgtccctgacatttactattagccaaaagctttggaactggttcatccttcttccagatcgcgcctttcataccatctacaccttcatctcaaagccgaagcctcctgtgacagtatactatactggaaaacatgttagtcgtgtttttgaggaccttcagaagacgaaggcccccaacagtataggaatatga

SEQ ID NO: 13539 - DNA, 204 bp, Zea mays
  Peptide Sequence Number=SeqID_56914
atgggccgcttgggcctcgaagggagggatctgccccgagaggcggttgtaaggaagcacctgaagcttcggcaggcggcagcaacaagagcatgggggaggtacttggcgagcgaggcatggtgttccagtatggtcttcctggtgtttgagtacaagatgacagtaatcaactacttccactacccattggctttttgttaa

SEQ ID NO: 13540 - DNA, 573 bp, Zea mays
  Peptide Sequence Number=SeqID_56915
atggcgtcagctggcccttggcgcgacgcggggcacgcgaggtcgggcgcgggcgtgctctggcacgcgcagaacgcgtcgaacacgtggaggtgttcatctgcccgtgttcaaacgcttgctgagatcgcaaacccaagtctggcctcgggcgccataggaagctccgtctcgcccgaccctagggctcggccctcgtctcggcctcgaacgacgaactccgcttcgcccgaccccagtgctcggactcgacctcggcttccagaagacaacggactctgcctcgcccgaccccagggctcggactcggccttgggctccggaagacgacggactctgccttgcccgacccagggctcggactcggccttcggcttcggaagaacgaccaaattccgcctcacccgcccccagtgctcggactcagtccttgacctcaaacgacggcttcctcctccgccggacccggggcttggactcgacctcgacctcggaggagcctccgcctcgcccgacccagggctcggaccgaccacgtcacaggggggccatcattaccctacccctagctag

SEQ ID NO: 13541 - DNA, 339 bp, Zea mays
  Peptide Sequence Number=SeqID_56916
atgggtgcgggtcacacgcgggttgaaatagaaacacacacccacacccgcaaaacttcgagtcgggtgcgggttgcacccgcgggtcaaaatcttcacccgtacctgcacctgtcgggtttcgggtttcagcaatgctcagctttaaccatcatctttggtaagctttacacttcacatgagctcccacctttggtaccttcggacatatatcaaagagggagaacctcaaaagatatgaaggttggcagtgccgaagctgtgaagcaggaaagcttcggcatgttcgcagaaaagggaaccgacttaaagatgaaaaggccatttagacctcgatag

SEQ ID NO: 13542 - DNA, 426 bp, Zea mays
  Peptide Sequence Number=SeqID_56917
atggcgttaagacatgacctgcaaatggaagaggagaggaaggcctcaatatcgcatgggtcaaaggcgacaacagacaagggtatgagagaaaagatgaaggcattggagagccagtggtatgagtacaacaaagaatggagttacgtccaagcttacacgaggcaagatagagtggtgagaaggataaaggaaataacaaacaaaaacacaacaaaggatagagttaaaaactcgcaggtgacaaagaagaggatacacccaaaggggaaaataggtaaaatgtacaactctcagattgagatgggagagacaagatttttaaagggcaagtataaagataaacgtcaaagagttaaggcaaagactgacaaagtgagaaaacaagcaaagggtaagataggtaaggttcaacaaaatggttga

SEQ ID NO: 13543 - DNA, 270 bp, Zea mays
  Peptide Sequence Number=SeqID_56918
atgccggtttctctgatcgtgcagcaagcactaattggagacggttatggagagggaagagtggaggaaatgacacatggggtccacctgaatctcgcccccgagattcaagaagaagctagcaagaaaacaagatgcttgagaccgatcgatgcaattattgaggatctcttggagcagtgggttaggacccacacacacttctgctacaccactttgatcttgttggttgatgtttatcacattgtcttcattggggttagcgactaa

SEQ ID NO: 13544 - DNA, 111 bp, Zea mays
  Peptide Sequence Number=SeqID_56919
atggggtccaggcgcagtgcttgctctgctgaggctgggtgccgaggtaaagaagaaggcgtcgaggcggatctccaggagttccagggcttcggcgagttcgaggattag

SEQ ID NO: 13545 - DNA, 666 bp, Zea mays
  Peptide Sequence Number=SeqID_56920
atggctgaaaggtaccaactcccgcggagttgtgttccgccaacggcaaggcggaaagactgcgagcatcccccatccgggggcttggaaggtggaaagacacgatgcataagggagcgcgaagacatggtcgccttccaagggggtcaccctccttttaaaggcgactctccctacttgcgtccccagtcgtcggggactgaatcttctccaacacgctccaaggtcctcccctacggcgcgggggctgggtctcacacgtcatgcatgccggctcagagcagaagaagccaaaccaccgtgcgcggcggcgcctctggcaggagaagcgagcgacgcctcgccttcgccataatgaccgcgtcaaaaaagcagggaccgagaaagggggataccccgaaaaggatccttctccgtgaaggaaccaggctccgagcctccctactgatcagaggttcgaaggctggcccctcggaagggttcgacagccgcctcagatcgcgtgggctctacacccactactggtcagaggttcgaaggccggcccctcggaagggttcaacggccgcctcaggctactcgggctccgcgcccactactgatcaggggttcgaaggctggcccccgaagggttcacagctgcctcagacacagagcgagggatga

SEQ ID NO: 13546 - DNA, 438 bp, Zea mays
  Peptide Sequence Number=SeqID_56921
atggtgacctctagtttgatggcgggggaaagcaaaccgggccgcggcctctgcccctccctcagcctcaaggattttcatcaccagggctggggaggggactgccgcgtgcctggctctcggacccgagtggcttcggagccgctctcggcgctggcttccgccacggcagctggaagaggttcttccgccgacgagatagccgaggtcgcccatggaccgacctccaactctatggccttctgcccgtccttgcctcacgagtttgggcatgggcggcaaaatggttcgtgccgatcgcacgagggacagtggataagatttacaggttcgggccgcttagaaatgcgtaacaccctacgtcctggtgagtatgtgagcatggttacaagagggctctctggtttgaaggcacagagagttgatgtgggtggctaa

SEQ ID NO: 13547 - DNA, 441 bp, Zea mays
  Peptide Sequence Number=SeqID_56922
atgggcaagggtaacaaacgcaagcgtgagccgactcctccctcggaggacttcggcgactcggaatactcggaggaggagttctcctccgagtccgaggggtctccggctcccgtctctcccccggcgtcgtctgatgattcagacgactcccaggggcttgccgcggaagtctggacgtacatccgggccgtcgagcgctccgggctcgagggctcggatgagtcggagttctcctcggacgaggaggactcggacggtggcgaggacgaggatgacgacgacgacgacggcgacgacgacgacggtggcgacggcgacggtgacggcggcaagggcagcaccagaggcggcagcagcacgggcagcaccaggggcggtgacggcaacgacagcaccaagggcggcggcggtggcagcagcagcaaggccagtggctaa

SEQ ID NO: 13548 - DNA, 435 bp, Zea mays
  Peptide Sequence Number=SeqID_56923
atgaacaaaaacactggcattcaaagtgccattacaaacggaactccggttccccctccgcaggtacgaacaaccccactcgatagaggtgggcctgtggagcaacagaagactgacgagcggctcgccaccgcccgctctgactacgacgacaacgacccccgctccgggtggccgaactgcagcagtgcaggcctcagggggccatcagccctccggcagatccccactcaaatcctcccggacgagtggggcaccggcctccgcgtgaagatgccacgccggtgcaaaggcaggaccaccccagaacacgaacgccgccctagcagcgcgcgacatctggggtggacctcccgtgcacacggcgcggcagccgccctccggcaggaggggccgccgggagccaagccgacgagcccgacacgctggaggtga

SEQ ID NO: 13549 - DNA, 339 bp, Zea mays
  Peptide Sequence Number=SeqID_56924
atgtcggacgaccttgttgttcctgtccactttgaagttggccaagaactttgcttttgcttcttggatcagctactcctggcgctcctcgaacaggagttgttcttcagccggcaaggtctcccatgtagcggagtcgtcaaaaagtatgttgacgcctttttggagcgtcaaacactcaacaagaaccgtggcggtgccctctgcacaggggcggacggtccgcgcgcagaggccagacggtccgcggcctggtgcgaggcgcagtggtgctctctgcacaggggcggaatgtccgcgcgcaggggccagacggtccgcgacctggtgcgaggctag

SEQ ID NO: 13550 - DNA, 1557 bp, Zea mays
  Peptide Sequence Number=SeqID_56925
atgaccctcagtcctcctggcgccacggactgggtcatggattccgatgcttccagtcacatgactcccgacagtggatcttcattccaggagcgtgatcgccaggaggccattgaggtagtggcacatcgagtggtgcaggatgtgggaggggtgtacctgatgctcatcaagtacaactatgttgaatgggcaatgctaatgatggagctgatgctccaagcatgcgatttttgggaggctatagattcagacgatgtgaacaacttcgatggcaagatgaggccgtcctttggtctgtaccgtcatatattgtgtatcattgcgaagaagacaatgaagcaggacaggaacgcaatcaagacaatgtgcatggactctgatcatgccacaaggcaagattgtccaccaattgaggtccccaatgatccagtcgatgacgacaaggtcatagccaagtacttacgtgttgtgtcgtccaagttcgcacaaattgtgctctccatcgagacactcctcaacagcatgatgatgtcgatcatggagctggcacggatctcccccatcctagccgtcgcggaccgctgctgccgtgttgtcttccatgcgcgggtggcgcctcagccgccgtcgcggaccgccgtcgccacaccgtcttcatctctgcttcatctgtgtgcgggcctcgccgccgtcttccgtgtgcgggctgtgcccgggccacgcagccgtccgctttctctgtgtgcgggccgctccgccgtccgcttcttctgtgtgcaggccgcgccgccgtccgccatcttccctgcgtgggccgcgcccttgtcacctcgttgcgccgccttgggtcgtctgcgcgggccgcgggtcatcttcgctagcccgctgctcccgccggaaatctgcgcctgccgctgcctgccgcggatctacgccgtcgctgcttccgccggacttcggacactgcgtcggtcgctgccattgcgggcagagtcgcggaccttcgtcaactcttccaagtcgggctgctgggtttcaggtctcctgttctccctgattttcattgaattcaatatggcgacaaatgctattgtggtcaatatcactcttgatggtcaaaattatccggagtgggctttttgtgttgagactgcactccggggacatggattactcttccatttgactaatgtggcacccgttcttgctgatgatcgtcgcaatgctgctaatatcaaaacatggcagcttaatgatggtaaagtgatgtctgctatggtgaatagcgtcaaaccgtctatgattatgagtttgtctaaatttaaaactgctaaagccatctggtctcatttgaaggagcgttttgttcaggacagtggtgctctattacacactctcatgcagcagacacatgttattgagcaaaatgatatgagtattgatgagtactactcagcctttgatcgcctgatgagtgctttgacatctatggtgcctgctttgtcaagcgcctcgacgcccaacgtcgctggaccgcggctacgcagttcgtag

SEQ ID NO: 13551 - DNA, 279 bp, Zea mays
  Peptide Sequence Number=SeqID_56926
agctctggttgggtgagaaggagaagtggggaggaggccgtcgaggcgattggcgagaatggaggcctggacgtggactcccctagtttgagggcgacgtgggcgggggaggcggttggggaagaagggaggggtgtgctgctgtccggtgggcccgagcaggcagcaggcgcgacggctggaaccgcccacgctcgtggggcagcgccaagcggctcactcgtgcactacggcgcgcgcgctagagcgggccgcagccgcggctgggtcgcgcgctag

SEQ ID NO: 13552 - DNA, 690 bp, Zea mays
  Peptide Sequence Number=SeqID_56927
atggactgtcaacattctggatttagggagaataacatcacacttagtaatgaaggcaagagtgtgctaaaggaaaaaattgaaaacacaagcagtgtagaggtactatttgaatatcggcgaactgcagtgtggtgggacgctgagaacccgaacgtcaccggcaacgacacgctcgcggacgaagtgcaggtcgatctctacgttcttcgtgcgctgatgctgcacggggttggtggagaggtagaccgcgctgacgttgtcgcagtagacgagggtggcacgctggaggggtctgtggagatcgtggaggagctggcgcagccaggatgcctctgccacaccgttggccacgacacggtactcggcttcagcgctggagcgagagacgacgggctgccgcttggcggcccaagagacgaggttggcgtccaggaacacggcgtaaccggaggtggaccggcgcgtgtcgggacagccagcccagtcagcgtcggtgtataccacgagctccgacgtcggggatgggcggggttgacggggccgcgcgtggcgcaggcaggatcgacggtgtcgcgcgtggcgcaggcaggatcgacgtggccgcgcgtggcacaggcggggtcgtcggggccgcgcgtggcacggaaatgggcgcgagcggaggcgtcgtggtcgcacgaggtgtag

SEQ ID NO: 13553 - DNA, 150 bp, Zea mays
  Peptide Sequence Number=SeqID_56928
atgtcgaaaaatatggtaaccgatctggtgggtacaagtgcggtcattgtacgacggcagccggggtcagtggagcattgtacgccaaggcggtacctccttgatttggttgatggtgtgacttggccctcatccctgccaccgggatag

SEQ ID NO: 13554 - DNA, 603 bp, Zea mays
  Peptide Sequence Number=SeqID_56929
atgtcgcctgttccgttggctcttcgtcatagcgccctgagcttcagatccttctcctccacgctccctccaccgtctattcctcctcgctgtcgcccgtcggcccccaaccgaccggcctccctcccagccgccggctccagccaccggcccctctccctcccacccacggccgccagccgccggcctccctccctggcgcgccgccaggtgcacccgcccccgcccctgcgtcccgtcgtgcccaaagccgtgccaggcgctgccgccaggtgcacccgctcccgcccctgtgcgcccgtctcacccagcgccgcgaccccggcgctccgtcccaagccgcccgtcgccgccatggacgacaccaccactgccgccaccgaccccatcgcccccgttgcgatcagcagtgagctcgcccatggagggggcccctacatcgccggcctcgggccgctccccgccgttccctcgctgaccctgcaccgaggctccccgccgggctttcccaccctcgcttcacccacctggagccacgctgtcgcgccctccgcactccccaccaccgactccccgctcgtcgacaccctcgctacaatctag

SEQ ID NO: 13555 - DNA, 258 bp, Zea mays
  Peptide Sequence Number=SeqID_56930
atggcgaatgaggcgcccactcctgcctcggctctctacagcgctcctaccagcgaacagccgcctttgggggggacaggccacccgtcctccgtcgaccagggctcctacctgtcctcctcccgccgtcccggtttggccctcgaaggcctagtccccgttgaggagtccactaaggacgggtctctttcagccctttccctctctcaaccgatccccaagatcggcgagctcttcttcttctcaagggtcacttaa

SEQ ID NO: 13556 - DNA, 588 bp, Zea mays
  Peptide Sequence Number=SeqID_56931
atggttgcaccgcctccttctcctgcggcgaggaaggcgacgggacaaacccggatgctgctcttcccccatggggggaagacgtcgccgagtccgccaccgccgggcgggctgacgaccatcgttgtcgctgccgcgctgcggaggaaagagtaccatgtcgtagctgccgtcgatggacatgaactcgagactcccgaaacagagcagcgtcccgggctaaagaggttcctggagactacccatctggaacttggcaggaagatgttcgtcaacacgcagcaggcccctacctggcgcgccaactgtcggcgtttcgaccccagggggtccctggaccgacgtgtaaaattgtcactgcgtgccctagcccagatgggttggcgtgagatggaacacaaagggggaaaaccgcggctcgtgttatcctgcgctagagtggttgcgcttgcagtaggggttacaagcgttcgcgagggagagagggagtcccgcgtgaccacccttctgtatgagggccctggcccttccttttatagatgcaaggagagggtccaagtgtacaattggggtgtagcaatatgctaa

SEQ ID NO: 13557 - DNA, 519 bp, Zea mays
  Peptide Sequence Number=SeqID_56932
atgatgaccgcgtcaaaaaaggctggcccctcggaagggttcgacagtcgccccagagcacgcagagcgagggatgactctgggtacgtccgatacatggccgaggctcaggctacgctcccgaggagaaatctccgcctcgcccgaccccagggctcgaccctcgcctcggcctcggaaggagaagtctccgcctcgcctgaccccagggcccggcctcaacctcgacctcgggaggaatcgcttcctcgcccgaccccggcctcggcctcaggaggagtctccgcctcgctcgaccttgggctcggaccgaccacgccgcaggggctacgggggaacaagaccggcgtcccatccaggctcgccccagtaaaaagtaatgatggctccccgcgtgcgtccatgacgactggggctctcagccccttacggaagcagggagaagactctcaccacaggaatacactcggcaaagatttctttgccgagtgccaaacactcggcgaagggtggcgctag

SEQ ID NO: 13558 - DNA, 1551 bp, Zea mays
  Peptide Sequence Number=SeqID_56933
atgactccctccgctccggtcgcgtcgtcgagaggagtagccaagaaggaagggcgtgcacacccctacggttctgcctctgcttgccccgcttccgtcaatcacgcgcctcgcccaaccaccccatccgcatcgctcccacacccgtccgcccagatctggatcccgcccccctcatcggcgcctcctcccccgcgcgtccgagacccggatccgccgcttccccgtcaagctccccagtctctcctcaccttccttccctccccctccctgctcggtccgtatggcggcttgacggcgaatcggatcttcctcggcctcctctccctccgcccctctggtcgccttggagctcgccgcccggacctccagcaaccgcgcctcgcggcgcgagtttgccgcctttgtggaggttgtggccgccgtcgctcagatcgacctctgtttcacgccttcgtctccgctgccctcagcccccttccgctctcagatttcggtatctcccgcgcagatgcttcgcggcggcgacgaatcggatccggccgctcgccagggccttctgcggcgcgccggcctcgcgagcggatgcgggggccaacgggacgcccagcccgcaggtacttccttccctccccctccctgctcggtccgtatggtggcttgacggcgaatcggatcttcctcagcctcctctccctgcgcccctctggtcgccatggagctcgccgcccagacctccagccaccgcgcctcccgtcgcctaccgtcaagcgccgcgttgggcgctactcccaaaccctgtcgtccgcggatctccctaggggcatgaagaccatgatcacgggcctattcctcagcacgctctcgctcggcttcttcttcagcaccgacatcgtcagcgccgtgcacgctgtcaccacctcgggtggccggacgcccgggctcaccgacgacctcgaccagggcagcctccacaagttctactggttgttggctgccatcagcgctgtcgacctgctggccttcgtggcagtcgccagaggatacgtctacaaggagaagcgcctggctcaccgacgacctcgaccgcgggatccatggcgccgccctcgcccaaccccccctgccgtcatacttaatatcagctgtatttcaactttcaacggtgtcatattgtcttcaaggctggtgctacccatcttcaacgacgcggcctacatctacgaggcgcatgtccggcgctacttcaagatcagcagctacgtgagccccagctacagcgagcaccactgtcgggtgctgcagatgacgagcctcgacgcgtgcaaatccgtcgagcgcttcatcaacacgcacgggcccgacgcgctcgacaggatcatccgagctgtgagttctttcttcttcgtcgtcctagctatgcgccttgtttttttggtttccctgacggagaagcatctaaaactgatgggggtgaaggcgaagcaatgtgaattgtttggggcaaaaaccgaagcagcccgatgctctcctacccctcagttctgttga

SEQ ID NO: 13559 - DNA, 420 bp, Zea mays
  Peptide Sequence Number=SeqID_56934
atggagctcaagtcactatcacaaagaatcgaatgcgcgaagttggagtcttggagtcttagaatgtttcttacgactgttgcagctccgggccggttggcgcaccggacactgtccggtgcacaccggacagtccagtgccccctgccgaccgttggcgtgggccacgcgtcgcccgcggattgcgcgaccgaccgttggctcaccggacagtctggtgcactaccggacagtccgaccgaggtcctgaatcctgatttcgtgtttcatgtgagtcgatatggtgaggagatgtcctataatgcctatggtgccgaggtaacacagctcggcgccatagattatggcgccgaggtacgtgctgcgctggcacaacccggacatcgtggcgccgacgtggcaccgagctcggcgccatag

SEQ ID NO: 13560 - DNA, 276 bp, Zea mays
  Peptide Sequence Number=SeqID_56935
atgtcttggacgggctcggctcggctcgcccccattgtctcgggagcagcagttggtggtggcggcaactggcagagctcgagtggtcgatctagggcagggcatcaagggctggcgctgaacctgaaccaggttcttctcagctcttctcgcctgccgccatctgggttgccaccgggcccctcgctctcgtttttgaaacacaaggcgccgaattctcacagaagaggcgttggttcagaaaccgttgtccaagctcgacttgggtatatttga

SEQ ID NO: 13561 - DNA, 303 bp, Zea mays
  Peptide Sequence Number=SeqID_56936
atggtgggcggctgccatgggaggagaggggtggccaaccaagggaaaaaggggggagggtggtggccaagagaggggggtggagggaaaaggggtggccacctaggcttttgtgggagaaaagaaccgacgccccagatgacttctgcctttgcatccaacggcccacaaccctttcccacatctaggcaccgtagatcaacttttggtccaaaaatgtttttgggatattacacccttagagatgatggggttttataccctcagaggtgcttgttgctcatcaagggaagtgggaagtag

SEQ ID NO: 13562 - DNA, 513 bp, Zea mays
  Peptide Sequence Number=SeqID_56937
atgcaggcggcatgcaaccgcaccaagggggcgcaccctttagacttcgacacgtccagcatggaggcccaggcccacatgtcatgtaaccggcgtgccggttactacgtgcaagaaactgcaccgccactctcgctagtaccgcgccttctcgactgcggaaccagtgccgcgactcgaggcgaccctgcgcatgacccgacagtgccaaccgagcacatcggtcacgggacagtcagccgcgggagaaggcacgacggtcgatatggccagaaaatggaccggcaggaccgggaaaggggatactccgaaagggatccttctccgcgaaggaaacgggccctgagcccccctactgatcagaggttcgaagactggcccctcggaagggttcaacagccgcctcagagcactcgggctccgcgcccactactggttagaggttcgaaggctggcccctcggaagggttcaacatccgcctcaggccactcgggctccgcgcccactactga

SEQ ID NO: 13563 - DNA, 816 bp, Zea mays
  Peptide Sequence Number=SeqID_56938
atgcagcctcccgccaatatcgctattgtgacgtttggggagatgtggttccacgactcggtccctcatacagaacacatccccatgatgtccccaaacaatggggttacaagcgtccgcgtgggagagagcgagagactttacgcgtcgtcccgttcccccacgcagccaaccttctcgtacgagagccctggaccttccttttataggcgtaaggagagggcccagggtaatgatggcccgtcctgtgacgtggtcggtccgagccctgggtcgggcgaggcggaggctcctccgagatcgaggtcgagtctgtcttccgaggtcgaggtcgagtccgagccctgggtcgggcgaggcggagaccatcgtccgaggccaaggctgagtccgagccctgggctcgggcgaggcggagttcgtcgtcttccggagccgaggttgagtccgagccctggggtcgggctaggcggagttcgttgtcttccggagccgaggctgagtccgagccctggggtcgggcgaggcggagttcgtcgtcttccggagccgagacgggggccgagccctaggatcgggcgaggtggagttcgtcgtcttccggagccgaggctgagtccgagccctagggccatccttgcattaaatgctcctgcgatacggtcggtcggcgtggcgatctggccaaggttgcttctcggcgaagactgggcctcgggcgagccgaggctttgtgctgatgggggttaccagctgagattaggagtcttgggggtacccctaattatggtccccgacagtagccccgagccttga

SEQ ID NO: 13564 - DNA, 411 bp, Zea mays
  Peptide Sequence Number=SeqID_56939
atgccgcaatcaatccttgatatatttgttacaaatgatttgagaaaagggttttcacccttatcacctttgagtagggatgatcagggactccctggtttaggggagggcctaagggttatgaaggctagggagcaccgggaggataaggagggggaatgtcttgtccagtttggacatggcggtggcctgactccttccggtataaccgttaagaaaaaggagattgggtacgagttacgattgttcccaaccttgcctgtggctgttggaccgctgatttgcttcgctgcgtatatcggtctacttcagccccactctgatgatatgtcccgagttgtggaccaactcttaaagttgatcgccacctttttaggtttgtctcgtttaagcagatctggaatcatctga

SEQ ID NO: 13565 - DNA, 849 bp, Zea mays
  Peptide Sequence Number=SeqID_56940
atgcatcgcgtccttccaccttccgagcccccggatggggagcgcccgcagttcttccgccttgtcgtcgttggaggaacgcaacttcgcagaagttggaacctttcagccatcgttcggcttcaaggattttcatcaggcagcccggctgcatcccctcgccggtggtcacccaagacggtgaccaccagtttgatggtggggagaagcaagccaggctacgacctctgccccgccctcagcttcaaggatcttcatcatcctggttggggcggaggtcggactgagccggagctctacctccccgtgcggggggagagggcgctcaccggcctagtgggagggtcggacttcggcaacgcggggctggtcggcgacgagcgtcgtcagcttcagcgcgttgagctcgctggcttagctggctctggctcggctcccggtgccccctcccgccgcgagagcggtcgtcgtgcctcgcgcaccggaggaccgcccaagacgtcgcgcactgctagggcggcgttcgtgttcttgggctgtcctgcctttgccccagtatggcgcctctacacgaaggatccgagtggggatctgccggtgggcagatggcttccgtcgtcggtgctgaggtggtggcagctgaagaagtcctcgtcgccgacaggatcaccgccaccatccgcgctccgggcctccggctctttggctttgatagcttgtcctcgcccctcgagtggggacgtgggcgagggccttatggcagtagcatccgccctaaggtcatcgctgctgctgttcggccgctcggagcggaggtcgttgtcgctgctgctcttcgggcggcggtga

SEQ ID NO: 13566 - DNA, 270 bp, Zea mays
  Peptide Sequence Number=SeqID_56941
atggagaatcgtcccgggttggaaaggttgctggagactacccatctggagcttgacgggaagctgttcgtcaacacgcagcaggcccctacctggcgcgccaactatcggcgtttcgaccctgggggtcgctggaccgacgagtcgggtgcgcttgcagtagggggttacaagcgtccgcgtgggagagagcgagagactttacgcgtcgtcccgttcccccgcatggccaaccttcttgtacgagagccctggaccttccttttatag

SEQ ID NO: 13567 - DNA, 138 bp, Zea mays
  Peptide Sequence Number=SeqID_56942
atggcgacggtgggtgcgcagcaaaggggaactggggcggtggtggtgtgctgcaaaggggggcgtggggcggtggtagtgcgcatggaggcgggcacacgtgcggggggcacaacttattccaggcttcaagggtaa

SEQ ID NO: 13568 - DNA, 507 bp, Zea mays
  Peptide Sequence Number=SeqID_56943
atgtacctcactgcatacctgctcaccctggatgcacagtatgatttcttggctcggcaccaccgtcagatgatcgcccgagcagaagatgcagggaagcgcaaccatcagctccatgtggatctcaccacagctcaagcccgtgcaactgccttggaaagtcgtgaagttattgctgttgaagccctgaagcaagccaaggatgagcacgtccagaagttgatggaggcctacttggctatgaataagcaagagcaccctgagtcctcccaagatcccccgccagagttgtttgagcccctcaccatgaagaagattccaacaccgtcccgtgagatcaaagaagaagcagcaaacaccccaccagcaccgccgccctctaaggagcttcaagagccagtcccgcttgaagaagagttcaatcccgttctgccatatcagtcgccgccagaagaagtcatcaacatcagctccctcttaacccatccagaagatgtctcagattga

SEQ ID NO: 13569 - DNA, 69 bp, Zea mays
  Peptide Sequence Number=SeqID_56944
atgaccaaagacatgcaccagtccaagaagttactctcaggtctcgatggagttgtcatggaattctga

SEQ ID NO: 13570 - DNA, 255 bp, Zea mays
  Peptide Sequence Number=SeqID_56945
atggcgcacgtgctgaggtggtcgtcgccgctggtgaggctgcctggtgcagaggtggtcgcctccgctggcgagccgctcggtgcaggggtggtcgcctccgctgacgagccgcttggtgcagaggtggtcgccgccgctgaccaacaggccgggcttatgagggcggacctcaccgggttggcgtacacctatgtgttacctagttacaaaagggagaaaaattcgacccctcagacttgcttctatggatag

SEQ ID NO: 13571 - DNA, 1239 bp, Zea mays
  Peptide Sequence Number=SeqID_56946
atgaaggggcgcttaatcgtggggcggttgcatgccccttgcgcggtagctcgccttcctgaccgccggttgccccgaaaatggaggggcgcatggggtgcgccggtgttctctggagggatccgcatcaaggtcgtctcttccggcgacttcaccgtcggagagcgtgcgcccgtggtgcccagctgtagtcccccgccggtggtcatccagaaggatgactaccagccttgtggtggggagaagcaaaccgagctgcagcctccctcctgccctcagcttcaaggatgttcatcatctgtgctggggagagggcgacctgcttcttccctcagtgtccgggggagaagggtgttcgccgtctgtggcgctgtcagctgccgcgtgcctggcttttcggcctgggtggctctggcactgcctccagcgctgcatcctgccgctggggcggagcgtggctgcccatccaccgcacgagcgatggtggtgttgtgcgtgggtcggtcacatccacggtttctctcgcgcctccggctgcactgggaggttgtacaagacgtcgtacaccgcaggggcggcagcggcattcttgatggtcttgccttcactcccgcagcgaggacaggagcgaagacctcttcgtgcgcactggtgcagctgctgcccaccggtgcagaggtgatcaccgcccccggcggggctgatgtggtcgcttccgctgaggtggtcgacgtcgttggtggggctgtctggagccagcttccagcgtggctcttgctggtgtggagggcggtggagtatgcaggctcacagtacgggaccaggctgagcggctacatggtttccgaacccccaggagacaaggcgttggagcgtgcaggcccacggtacaggatcaggctgagcggctgcacgggctccggaccaccccaggagactagcccacggtacaggacctggctgagcggctacacgggctccagaccaccctatggaacggggtctcgttctccagagctggcccccaggctgtcggacctccctactttcgcatcaggggccctaaactggaagtctggctattcaattaggatgccgccatgtcagacagatggaaaccgtacaggtggaccaatagtccgggttcatggggcagaccccaccgggttgtcgtacaccttggacccgtgggggggtccagaagggcgtccggaggaaaggcgtgttttagcttcgtag

SEQ ID NO: 13572 - DNA, 324 bp, Zea mays
  Peptide Sequence Number=SeqID_56947
atgtggcaaggaaaggcaccatgcctcagtaaggccagacccccacaaagggtcaccgggcccctatatacatacaggtccggagcccccaggggcgtcaaggtcatccagcagacagcgcgcctgctgggtctgctggtgaacagtatgcctgtgctgagcggcgcattgtacacatcttctcttccgcaagaagcctcctcgatacgccagggcgaaatgcctaagaccctcctcatctcaggacttagggcgggtgcactccgccacccgaccagagatctactctccgacagtgtagtttgtggttgtgatcttagctga

SEQ ID NO: 13573 - DNA, 519 bp, Zea mays
  Peptide Sequence Number=SeqID_56948
atgacgcatttcttcaacagcctcatcgatcttcttctaaagatcggcgagacgaagcatcttctcccttttcctctggacatgttgaggaatagcttcgagggctccaagccagaccccttgggagaggtccggacccctctgagcggggtccaggccacccacggcgaggcgatgtgccgccttagcatttattgtgacctatccactcagctggcaggcggcgtccaggccatcctgcaggcagcgtgcctgtccagtccattgccaaacagacgcaagaagattgctccagcagcgaacattagtagctccaagtactacatctgttatgttcctgggcccacatgtcggggctcggtacccttcatgatggtgcaaatcgttgagcaccgcgtcgagacttcaacggacttcctggtgaaagaagaagttgtttcttccacgccacaggttcccaatcgcccagttccaggcactgtcgctatgcacgctgcacggcagcatactactgcgtag

SEQ ID NO: 13574 - DNA, 705 bp, Zea mays
  Peptide Sequence Number=SeqID_56949
atgctgaggcgacacatcgcccgtcagcagagtgggcaggcggcgcgtcctctccgcaataaatgcagagaccgcgcggcccagaggccttacgtcaggctccgcccgctggcttacgtcatgggcaacaagccacgtggcagcatcgggtctccgcctaagcggggagcgcaagcgcacaggttaaagcctggacatgtgttagtactggacccttgcttaggccagggtatcccctgtcctgggacctcgctgtgggtggcctggaccccgctcagaggggttcggacctctcccaaggggtccggcttggagccctggatcatactcggagatccgggtcgaggcgcagcactggcgcgagcgacggtgcgacttctctgcaccctggaatcggcgcccaaggaggatgactcgtgggtccaagtccttgtgccagggactgggctgttggttttggcggaggcgaagatgcgcactaccataggtggaggtgcgctcttcacgcgtcggttcgctttctccgcacacagaaaccggcgcgccaggtgcatgacatgtgggcctgggcccccatgccagaggttggaccgctggttgcagcgaagacgagggggcgcactaccgcggggcggtagcacgcttcttgtgcgacggttcgccttcttgaccgttggtcgcagcgaagttgaaggggcgcactaa

SEQ ID NO: 13575 - DNA, 226 bp, Zea mays
  Peptide Sequence Number=SeqID_56950
agctggatcctccggtaatcatgtggatgacccctcgaaaagggttgatcggcgaagtcctcttgcttcggtaggggtggtggtggtaatggttgatttggatgctgtggtggtggtggaggaggtagagctaggatttcttggttttgctcatgttgatcctagggaaatagatcttgccatgagaatcgctgaaaggatgttcctcaaaatgaagatgaggtga

SEQ ID NO: 13576 - DNA, 399 bp, Zea mays
  Peptide Sequence Number=SeqID_56951
atggggatggtagcgggctcgcacaaccgcaacgagttcgtcatgatccgccatgacggcgatgcgccgggcccggctaagcccacaaagagtgcgaatgggcaggtctgccagatttgtggtgactctataggtgtttcagccactggcgatgtctttgttgcctgcaatgagtgtgccttccctgtctgccacccatgctatgagtatgagcgcgaggggaaccaatgttgcccccagtgcaagactagatacaagagacaaaaatgttggtttcctggcaacttctttgagtgggactacaaggacaaggatggtgtcaagggcctgtgcgtcgtggacgccatctacaactgtacctcccagctcctcacctatgggagatcttctcccccataa

SEQ ID NO: 13577 - DNA, 381 bp, Zea mays
  Peptide Sequence Number=SeqID_56952
atggcgaggagatctggggaggagcgggcgagatcaaggcggtggcgctcgtgcccctccggtctcgctttgggctggttcgggggcggctgcagggttccacgggtcgcactaggtgggcgtgcggcatgcgtcgggcgggcgggattgcggcgtgcggacggtagggcgggcgggagggcggttcgccatggtcgcggcgggatttgcgggcttgcagtgtgcgggcgggaggacggttcgccttggtcgcggcggggtttgcaggtttgcggcgtgcgggtgggcgagcatagggaggcgggggcagtctacattcacaggatgcgaagagaattggaccaaggcaatgaggatgcaacacctcaaaagaagacataa

SEQ ID NO: 13578 - DNA, 240 bp, Zea mays
  Peptide Sequence Number=SeqID_56953
atggagcctggcggagggacagctgccggagcggttgagtccttgctgacgtcctcttgcttccgtaagggggctgagagccaccgttgtcacagagttgggcgatgtggaagctcctccgaagccgaggtcgagtccgagccccagggtcgggcgaggcggagttcgtcgtcttctagggctgagcccaagccgagccctgggtcgggcggagcggagttcgtcgtcttctggggctga

SEQ ID NO: 13579 - DNA, 453 bp, Zea mays
  Peptide Sequence Number=SeqID_56954
atgggggagaatctcgagaaaggcctcgcacagatgtacgaaaatggaaatttgcagaatggaattagggttcagatgtgtcaagttcaattcgtagaaatcaaggagaccgcggaaaaagggggagacgggaagagcaagaccacgaataagaaaaggaatgtaaacgacagattcatgggtatcctctgtcggaacggtgacgccgcgacaaatccgccaaaagtagagatcttttggaagcaaaaccccaacgtcaacaagatgaaggaggtcagattccaaaatgatggacatatggttaccaacgaatggcatctggctgttggggtcaataggcgggatgagcgcagcaacggtgctctgcctcttccgcttcggcgccatcacaatctttctggcggaacgagcaggatcgagatctcagggaagctgaggagtggtttgaggtga

SEQ ID NO: 13580 - DNA, 108 bp, Zea mays
  Peptide Sequence Number=SeqID_56955
atggccctcggctggtgcgacgtcaagcggacccgttggtcaggcaccgaatgccggagaggttggggatttcacatagtaatcaagttcataaaagtactaacatga

SEQ ID NO: 13581 - DNA, 114 bp, Zea mays
  Peptide Sequence Number=SeqID_56956
atgcccttcggcctcaaaaacacgggagcgacctaccaaagagccattcaaacatgcttagtgtcacacccagatttcaggggtccaaaacccgggcgcgaacataatcaccag

SEQ ID NO: 13582 - DNA, 468 bp, Zea mays
  Peptide Sequence Number=SeqID_56957
atgatcaaggagagcgagagcagacctcgagatggctggccacggagcacggagaattcatgctcgacgatgtctgagaaggtaacaccaggggtgttacaaccgccgtcatcaccttcaccgcccttgccgccgtcgtcgtcgccgtggccgctgtcatcgccgccgccaatgccctcatcgtcgctgtcgtcgccgctctgctccacggacgagccgaaggagttctcctcatttgaggagacctccgacccctcgagccttgcgcgctcaacggagcggatgtacgtccacacctcagcggccagcccctgggagtcgcccgagtcatcgaaagacgtcggggagaggcgagagccagcgatccctcagactcggaggaaacctcctcctccgagtactcagaatctccgaagtcctctgagggaggacattgttggcaacttgttctcaaatgcttcggattaa

SEQ ID NO: 13583 - DNA, 339 bp, Zea mays
  Peptide Sequence Number=SeqID_56958
atgactctgggtacattcgatacatggccgaggctcggtctatgctcccgaggtaccctaggacatttccgagaccagcaggagcgattctgtaacggaatcccatcagagggaggcatcgagccctcggaccctatcaaacgggaccgggtccggcaaatcacctgcagggtgaggctgacagcagccaagtctagcctcaggcgccataggaagctccgcctcccccgactccaaggctcggactcaacctcgaccccggaagacggtctccgcctcgcccgaccccaaggctccgactcaacctcgacctcggaagacggtctccgcctcgcctga

SEQ ID NO: 13584 - DNA, 624 bp, Zea mays
  Peptide Sequence Number=SeqID_56959
atggatgggatgttttcaaaaataaaacttgatggtggatccatcatggccacgatgggttcaacatcggaaaggatgtacctctgccaggtgaccaaacagcagacttctgctgtttttgcactaaagtggtgcccaaggatgaacctcaacagtaacgtggttgcagaaggacgtggaggggtttttgcctcccagggttgtaataataatacttatgcactcttatatcctggtgatgtactcataacactctttctatattttaatgaatggttgtccgaggtccgttggacaaggacaactgtaggtgggcctaatgacttgggaggttccggcacagctggtatcgaagcgaagcccatctcttcagatattatgaagaatttcaaaaagaattttcaaatccttatccgagaaaatttctttcttaccttatcattttctggaagtactcatcttgcaagaccaggaaccttcggactcgggatgaagatgtacacaatatggaaatcagggtcggaacgaaggtcgaaccagcgccgaagctgcgggcaagggagctttggctcgatagcagaaaaaggaaccgacttaaggaggaaaaggctatctagtccttga

SEQ ID NO: 13585 - DNA, 552 bp, Zea mays
  Peptide Sequence Number=SeqID_56960
atgggcgcaatacaggtcaaagctccgcccactcaagggacacgatctcgcctcgcccgagcccagcctcgggcaagaacagcagacccaggtggattcacgtctcgcccgagggtctcctcaagcaacgggcgcaccttcgactcgcccgaggcccagctcgggcaggctttgcggagaagcaaccttggccagatcgcctcgccaaccgaccgaaaacagcgtgcctgccctgctctgactgctgtgccacccgccagggtgaggctgacagcagccaagtctagcctcaggcgccataggaagctccgcctcgcccaaccccagggctcgaactcaacctcgaccccggaagacgatctccgcctcgcccgaccccagggctcggactcaacctcgacctcggaagacggtctccgcctcgcccgaccccagggctcggactcaacctcgaccccggaagacggtctccacctcgcccgaccccagggctcggactcagcctcgatctcggaggagtcaccgcctcgcccgaccttgggctcggactga

SEQ ID NO: 13586 - DNA, 237 bp, Zea mays
  Peptide Sequence Number=SeqID_56961
atggaggcgcggcagcgcacggcgctcggcggcctagccgctgagacggagccggatctcgaccagttcatggaggcataccatgaggtcctagtgaagctcagggaggagctgacgaggccgctgcaggaggcaatgaagttcatgcagaaaatggagccgcagctcagctcgctttccatccccagaagcaggaagaaaggcgagatcgatagcaccaacccgcaggagaggtag

SEQ ID NO: 13587 - DNA, 360 bp, Zea mays
  Peptide Sequence Number=SeqID_56962
atggcgactacggcagcagaaagcgggagagctcgaaggcgaaggggcgcagcagttgggagaaaatgtgaaagcgtaatcgctgcacgcgaggtgaatcccttttcaagaagactcccctgctcgcgccctgagacgccgcagaaaatcttgcccgacgcgcaccaaggcaaccctacctatgacatgggggcccgtgcccatgagtcatacaactggagccgccgacgacccccgccgcctgtgttcgtggccagggtagctccgaccacctccgacgccgacccgcacaccgacgtgaccgtcgtgacctcccggacgtcactgaccaccccgccggagctctactgccgccgataa

SEQ ID NO: 13588 - DNA, 132 bp, Zea mays
  Peptide Sequence Number=SeqID_56963
atgacgaccgacaggctgcttgagctactccacatggatttatttggcccgatcgcttacataagcatcggcgggagaaaaatcacaaacccaagagaccttaaagggattcttgagatgagctcaaaataa

SEQ ID NO: 13589 - DNA, 306 bp, Zea mays
  Peptide Sequence Number=SeqID_56964
atgtccggtggtgcaccggacactatccggtggcacaccggacagtccggtgcgccagaccagagagagtacttcctcgtgccggagcaaggagctgctcaggaggtagccccggatccagcaccagagtctgcaccagaggacctgcctgccactgctttggaaggcaagccccggaatcctgttgagatgaatactagttctctggaggacatggttgctggagtgacttggccgtccatcttgccaccgggttggactgtcgagtgggaccctacctcggctgaggaggagcatgaggagtga

SEQ ID NO: 13590 - DNA, 540 bp, Zea mays
  Peptide Sequence Number=SeqID_56965
atgaggctttcacaaaatacacttaatacgaagcaacccgctaaggtttctaaagacgatggtggagggcccctgggtgagaccccggttgaacttgaagttcaactggagttgagaaagctcaactcagctgaagttcagctcaactgcagctcaagaagctcaactcagctgaagttcagctcagctgcagttgaagaagttcagctgcttttgaacaagaacactctagcacgcttctccccctgcttcgtcgcgccatcaccaccggatctgtctccctccacgccagcgccgccagatccgtcccagtccgcttctcccccttctccgttgaccgacgtcctcctcctcccccaagtcggcgtcctcggtggccacgacgccgaccaccatattcgtgccctccccttctctgggcccacccagggctaccaccacgtggcgccggcctcctcccctcgttcccgtcggccgctggtccccagccgcccttcttcctgccgcgagcgctccccgctgcagcctcctcttccctag

SEQ ID NO: 13591 - DNA, 341 bp, Zea mays
  Peptide Sequence Number=SeqID_56966
atggcccgctttgccgaccccgccgtcgtctatcaccatcgcgagccgaccatacccgccgctcccaacgttctgacggcccgctccgagccgtcagtgtaccacccggtcgtcatccaccgcgaccccaggcacgtccacccgatggtgacatggtgcgccgctggcgttcttcgcctcgtcgaccggctgatcctggtagttgatacgatctacactccaccggacgcatccctgacagtgtccggtgctctaggggagagcgactctgaactcgccagcttcggatttccgctccgctataattcaccggacatgtccggtgcacaccgaactgtccg

SEQ ID NO: 13592 - DNA, 837 bp, Zea mays
  Peptide Sequence Number=SeqID_56967
atgcagccgggctgcctgatgaaaatccttgaagccgagcgatggctgaaaggtgccaacctccacgaagttgcgctcctccaacagcagcaagacgaaagcaacgcgggcgctccccatccgggggctcggaagggggtcgatccctttttaaaggtgactctccccactcgcgtcctcaggcatcgcggactaagtcttcaccaacgcgctccagggacctccccctacgacacgggggctaggtcccacacgtcatgtaagctggcccggacagaagaagccaaattgccgcacgcggagcgtgtaaccgcccagcggttacaagcactcctccatcttcgcctaaaccagcgggtgaaaaggcagaccgtcatgcaggcggcatgcaactgcaccacgaggatgcaccctttcgacttcaacgcatccagcatagaggcccaggcccacacgtcatgtaaccggtgtgccggttactacgtgcgaaaaactgcaccaccacttgcgccagtaccgtgccttctcgactgtggaatcggtgccgcgactcgaggcaaccctacgcatagcccaacagtgccaaccaagtgcatcggtcacggggaccgagaaaggggatattccgaaagggatccttctccgcgaaggaagcgggcctcgagccctcctactgatcagaggttcgaaggctggcccctcggaagggttcgacagccgcctcagagcactcgggctccgcgcccattactgatcagaggtttgaaggaacgtttcacccgtcttgcagacattacagaacatcagagatatagaaatgcggaagcgattacataa

SEQ ID NO: 13593 - DNA, 141 bp, Zea mays
  Peptide Sequence Number=SeqID_56968
atggccttgatggattcaacatcggaaaagatgtacctctgccaggtgaggaagcgacaaatttttgttgcttttgctccaaggtggttccaaaggaagaaaaacaagaatgaagtgcgggaggaaaggatcctccattag

SEQ ID NO: 13594 - DNA, 141 bp, Zea mays
  Peptide Sequence Number=SeqID_56969
atggccgtgatggattcaacatcggaaaagatgtacctctgccaggtgaggaagcgacaaatttttgttgcttttgctccaaggtggttccaaaggaagaaaaacaagaatgaagtgcgggaggaaaggatcctccattag

SEQ ID NO: 13595 - DNA, 117 bp, Zea mays
  Peptide Sequence Number=SeqID_56970
atgaggaggaggcggcgacaagtgtacctcaagagctatgcctttggcaccaagggggagggtggaggaggtaaatgcccgtacgttgtgacggtacacaattatatgttggaatag

SEQ ID NO: 13596 - DNA, 453 bp, Zea mays
  Peptide Sequence Number=SeqID_56971
atgtccgacttctctatacagactgtccggtgcccactggataggtactgttcactgtccgaggggagcggggccggcgggccaccagcaacctcctcctttttgctccacctggcttgccttgcctggtcctggtatatctactactacctctgttccttctccttcgccgctgcttccctcctcctcctcctcctgctgctgctcctcctcctcctcccccctgggacgtctaaaggaacaaacgaggagccctccaaggatatgcgccccgccgcttatacattaaccaaagacttgcctccaatcactcgtgtctacctcttcgagttgcgaggatgcctgcgaatgaccaccatcccaacggcctgctccaggagtcagcccctggactccagcatgatgatatggaaaaccagcagcagcaagtctgctgggagcgcttcctcctaa

SEQ ID NO: 13597 - DNA, 627 bp, Zea mays
  Peptide Sequence Number=SeqID_56972
atgacacttgacaccaccattttgtacccttgccaaggcgccttgctcctatggtggtgtaggcgcacgtccatgcggatgagcttgtcgggacaagagacgaggaaggtcgggagggtgaagagtgtgtgcgaggagatggcgagcatgagagcatgcataatgggggagagaaaggagacaaggactgtggtggtatcaatgttgggtgtagagtgcagttactgctgggcaagggtcgatattggtggcatcgcaaggtgtaggagcgagtcgagcaagagcatagagggccatgacgacaagggtttggctagacttgtctttgagaaagctaggttcgctcgaagtagtggtgcaagtgaacatggcaatgggtgtggcatcaacacatggggagagggtggactgggatggcatacgagtatgggaatgagaactcataacatgtttagggagctgagtgcacaacttaaaggtaatggtatcgggatgagaattcggaacaagggagttaagtttaatttgcataacgtggagaacacaaacgtccccgacgacaacgcgctcacggataaagtgaagttcgacctcaacatgcttcgcgttggtggtggaccaggttga

SEQ ID NO: 13598 - DNA, 3402 bp, Zea mays
  Peptide Sequence Number=SeqID_56973
atggagaatcgagtcaagatcatgctcaaactcctcggacaggaagccgattcctttggcaagagggccgagatgtactaccacaccaggccagaggtgataagccatgtggagcaagtctacagggcttacagagctctcgtcgaacgctatgaccacatatccaaggagctccataaggccaaccacaccatcgctactgcttgtccagaagaggtgcagtatgcaatgttagaagaggaggaccatgatttccccaaagcaatcacaccaatcaagacacacaagtccttggtccaagagattctcaacgcaaagagacaaggtccgtcagggtcaggatggaacaagccaccctcccatccacgcatgagcgccgaggaggcacaagaagagatcggcagacttcagaaatctatacttgttctgcaaaccgagaaagagtatgttaagagttcctatgagagtggtattgctcggtaccgggagatcgagaagcagattgcagatacacagaatgaaatctgccttattcaggatagatttgatgcacatgcagccatcggcgatgatgaagcccgtgccttgatgacaataacagctcttagatcctgtcagggaaccatagctgagcttgtacgtcattttgaggagttgatcaagcttgcagctgtggagttggaaaaaacaaagtctctacgagcacagctgtatgctatgatggatggcgacactgacacatgttcaagagaggcaagcagcacagacacgtcggtggtggcaagatcttacccagttaccaaggcaatacttgagttgcagcccatatatgagaaacttgacaagtttttttccagtgggtctgaatcctctgcggaggagatcgcagagaatgttgatgaacttgttgataaagtcatcaacttggagctcaagttcccaaaacagacagcacagatcaatcaactcatacaagagaatgaaaacctaaagaataaattggatgagttacaagacgagatggcacttcgtgatgaccaaagtgaattaaatgaacagatcaagcaattagaggatgagtttagcacagtccgagttcttgaaagatcaattcttgaggaagaagcctctgtcagcacaggcttttctgaagtttttagctgcataattaatatctcaaaggcacttggatcttttggccctgaagacctgcataatttgtcagctgcggtagaggatggtgcaatggttccaagagacgtgttcctggagcagtctgcagaagagagcaagggtggggacttcagagacatagaggcaccaactctaaggcatagtttgggccaagatagagaagatgtctcggaagtggttagtgataatggtaatgatggcatccatggctcaaggaatgctaatgaggaaataatccctgggagttgcttaatgcaacaagttaggtacaaattgcgtctacattttgatgaccatattgatccgcttttcagttcagaaaatgaaaacatagttcacgattcaggtgagggcaatgttgatagctcatcaggaaaagtatttcagagttcatcagaaactgagaacggaagtagaaacttccctaatggtgaaattatgagaggtgaatatccattgggaatagtcggacagactcatctcctccactcaggtagtatggatcatttagacaggaaatatgactctaatgaagcttctcagtcattaatggaagtcgctgagggaaatattgatgatggaaattctttttccagcagtagtgtaatccaggaggaaggacttggagatagtaaatcacaaaataccagtgggcagattagtccaattgcttcctcagacttgtacaggttaaaggaatacgattccgtagaagaatcctcatttccaaaagctacttgtttcagtggtgctgataagaagagcctgcacatggggcatgcagatgaagcaaaatctgttgaagaatcgccacaccaagttgatcaactaaatgggccacaaaatattgaaagttcgaacgaatgcaaccaagttggattgcttaaagaggatgattgcatttcattagttcatgttgataatgtccatgatatgaagaacatatattcctcagaagtgagggatgaaacttctatctgtgcgccagctggagattatgagcaagttccgacgaattcagagaggaagacttcacatggcagagagcttgcaagcgaagcaactacctcgaacaaccatggaggaaggagtcagggtgtaaagtctggtttgatgggggaggactttgtacctagctggcaagaatttcttcctgatgggcttgaaggtaaagaagcaatactactagctgattgtacttcagttctgcggaactacaaagaaacaaagaggaggcttagcgaactggaaaggagaaaccaggagcatcttgaagagacaaaggcagttatacgggagttaaggaatgcaaattccatgaagtatgttgagatacggtcactaagggatctcctggattcctcagaggtgcctccaagtaaagcaggtggtaactcaaacggattcttaagtttgagatcttttagagaaattgacagatcaattgccactttgggtagagatatttctgccgtggaggaaaacagttctagtaacatcgagacacctaacaacacgtcacttcataaaatgacgaggttcagaaacgacattgacgctttggtggaggaaaatttgcagttcctggtaaggtatagcatggcttgctatcgcatgcaggagtttgacagaaggtaccaggaggcacaggacgaaatggaagataataagtctagagaaccagatactccagcagagcccggacctgctgagaagaagttgagagagctccgaactgaactggatgtatggtttgagcagagcgcgcttctcgatcaagaagtgcagcttaaatctgcgtctctttgcagaatgcaagaggagatagcggaagccctgcgtggtagcctggagatggacagagccaggtttacaccatatgaagctgccaagtttcaaggcgaggtcctaaacatgcagcaatctaccagcaagattgagggcgagatgcaggcagcatcagaacacatgagggggcttcaagccaaagttagccatgctctggaggggctacgtgagagttttgagatttcatcccaacgcttgtcgcggccagagaccgaaagaagccacgagaaacaattcaagcattttccaagtcggacaagggtaccgttgcgaaacttcctgtttggaacaaagcgaaagaaaaaatcaatatttgcgtgcatcaatcccacattccagaaacaattcagcgatctgtga

SEQ ID NO: 13599 - DNA, 360 bp, Zea mays
  Peptide Sequence Number=SeqID_56974
atgccgactttagtccgaggatacctgtttacacattgtactgcagaaatactgttaaatcctgtttttgaggaccttcggacgccgaaggtccccaacaccagtgatcagcacctactttttttcgttcctctcatgttccagctgctgacctatggacgaagaattcctaccccagagctttttgcaagaatagatgttgttgatgcaagcattgtgaagcgtgttgcaaaccgcttcatctttgatcaggcggccaccacaggttcggtccagctggaggcaatggtggtgatagagatggtggtcacggagccaacaactcatggccggggggagcacgtcaaggcaccgccctag

SEQ ID NO: 13600 - DNA, 426 bp, Zea mays
  Peptide Sequence Number=SeqID_56975
atgacgaaggacttcgccatgactcctaaattaccaccatacaaagatatgttaggccatcaaacattcccaatatggggggctgtacagcggtggtcagggtgtcacctgcagctctggtgtcagtggggaagcttcgtcatagaggaactcttgaaagttgactggttcatgatgaagattgtcttagttgaagccctcgtaattctggtctctatagttgttctggtcctgcgcttcaatattgcacatttcttcagttgcttcgtcaatctttttctaaagttcataaagatgacacaccttctccctgcgcttctcaaattgttggtggattgcttcgaggttgttgatctcttgatcaagctcttggtcttatggttatgggcggatagccttcctttttttggtttcttgcctccctga

SEQ ID NO: 13601 - DNA, 157 bp, Zea mays
  Peptide Sequence Number=SeqID_56976
taagctccaacctgaagaagatcctatccctctgctcgtcgccggtggcccgtcgccgttgatcaccgcttgccgtgattcgtgcgccgtcgccatggataagcacaacccagtaaagatctcggcgtctgatccactcaagcttggctacggctaa

SEQ ID NO: 13602 - DNA, 2271 bp, Zea mays
  Peptide Sequence Number=SeqID_56977
atggcggcggccgccatgtgcccggggccgatgaaggcgacgtcgcagggggcgttccagggcgagaacccgctggactacgcgctgccgctggccatcctgcagatctgcctggtcgtcgtcgtcacccgcggcctcgcctacctgctccgcccgctgcgccagccccgcgtcatcgccgagatcatcggaggaatcctgctaggcccgtcggcgctggggcggagccacaggttcctgcacgccgtgttcccggcccagagcatgacggtgctggacacgctggccaacatcggcctgctcttcttcctcttcctcgtgggcctcgagctggacatctccgccatccgccgcaccggcaagaaggccctggccatcgcgctggccggcatcagcgcgccgttcgcgctcggcatcggcacgtcgttcgcgttccgcgccaccatcgtcaagggcacgccgcaggggcccttcctcgtcttcatgggcgtggcgctctccatcaccgcgttcccggtgctggcccgcatcctcgccgagctcaagctgctgaccacggacctcggccgcatggccatgtccgccgcagcggtcaacgacgtcgccgcctggatcctcctggcgctcgccatcgccctctcgggctccggctcgcccatcgtctcgctgtgggtgctgctcaccgccgctggatttgtcgttgctgtctcgctcttccttcgcccggtgctggcctggatggcgcgccgctcccccgagggcgagccggtcaaggaggtctacatctgcgccaccctcgccatcgtgctcgccgccggcttcgtcaccgacaccatcggcatccatgccctgttcggcgccttcatggtggggatcgtggtccccaaggacgggcctttcgccggcgtcctcatcgagaaggtggaggacctcatctcggggctcctcctcccgctctacttcgtctccagcgggctcaagaccgacgtggccaccatcaagggcgccaagtcctggggcctgctcgtgctcgtcatcgctaacgcgtgcctcggcaagatcggcggcacggtgatcacgtccctgctcgtcaagatccccgtccgcgaggccgtcacgctcggcttcctcatgaacaccaaggggctcgtggagctcatcgtcctcaacatcggccgcgaccgcaaggtgctgaacgacgaggcgttcgccatcctggtgctcatggcgctcttcaccaccttcatcacgacgcccatcgtgatggccatctacaagccggcgcggcgggcggtgccctacaagcgccgcacggtggagtgcgcggcgggcgacgcggacggcgagctgcgcgtgttggcctgcttccacaccaaccgccacatccccacgctgctgaacctggtggaggcgtccaggggcaccgcgcgccgccgcctcaccatgtacgcaatgcacctggtggagctctcggagcggtcgtcggccatcagcctggtacagcgcgcgcgccgcgacggcatgccctttttcagcggcggcaaggagcagcgggcggagcaggtggtggtggcgttcgaggcgttccagcagctgagctccgtgcgggtgcgcgccatgacggccatctcggacctggacaccatccaccgcgacgtcatcgacagcgccgccgacaagcgcgccgccatcgtggtgatgccgtaccaccgggcgctcggccacgacggctccttcgcgtcgctggggtcggcgtaccacgccgtcaacaagcgcgtgctccgcgaggcgccctgctcggtcgccatcctcgtggaccgcggcctcggcgggcacgcccagccgagccgaccgccgctgctggacgaggccgagagcgcggccgacgaggccgcggtggaggcgttcaaggccagggtcggggccgtgaaggacgggtcggtgcggttcgaggagccggaggcgtgcaccagggagcaggtgctggagaccatcgagtcgctgtccgggttcaacgtgttcgtggtggggcggatgccgccggtggcgccgctggtggagaggcccgacgagctgggccccgtcgggagctacctggtgtcgcccgagttcaggacgtcggcgtccgtgctggtgatcaagaggtacgacccggccacgaaccccaagagcaagaggttcgaccccaaggcggggccgccggtggcgacggaggaggacgtgctggacgaggagatggggatggggcgcgccaccgtggtgcccgtgtga

SEQ ID NO: 13603 - DNA, 705 bp, Zea mays
  Peptide Sequence Number=SeqID_56978
atggcggcgcaaggggcaggaagggcggtttcctcttctctggctaagtctctcgggttgcgaaaacctaagagggaggcaggaagcggggcaaagaaccgtcaccagaccctctcccagggaccgggaaagggggataccccgaaaaggatccttccccgtgaaggaaccaggctccgagcctgcctactgatcagaggttcgaaggctggcccccccgaagggttcgacagccgcctcagatcgcgtgggccctacacccactactggtcagagaggctcgggggctgctctcgcaaacccggctccggccgaaccgttgacagcgtcaacataccagcccgagaacttgggacccgaccgtacacccgggctacgaccagctcgcatgagggaacaaccagaccggctgaagcattgcgcgaggcattaagacctcgaaggagtgaaaccactcctccgaggcctcgggggctacacccggcgggtgcgctcgcgcgcacccaccggaacaaaatgcaaccgagaaaggctggtccccttgcaaaaaagtgcgacgaaagcctccaagcgagtgctaacactcccttcgaggctcgggggctactgtcggggaccataattaggggtaccctcaagactcctaattctcagctggtaacccccatcagcataacgctgctaaggcctgatgggtgcgattaa

SEQ ID NO: 13604 - DNA, 441 bp, Zea mays
  Peptide Sequence Number=SeqID_56979
atggcgccccgcatgctctgtgacgacggcggctctcagcccccttacggaagcaagaggacgaaggaccagggccctcttagagaaggttggtcgcgcggggacgaggacgagacaggcgctcgcttggaagccgctcgctccctcacccgcgtggacgcttgtaaccccctactgcaagcgcacccgacctgggcgtgggacgaacacgaaggccgcgggattcccacttctctcacgccggtctccggccgcctcgcttctccccccttcgcgctcgccctcgcgctcgccccatctgggctggggcacgcggcgacactcactcgtcggcccaagggaccccctggtctcgaaacgccgacaacatcaatcaccaaaaagggagagattgaaagggaaatagggtcaaaccttttcctaaatgattttggtggttaa

SEQ ID NO: 13605 - DNA, 1107 bp, Zea mays
  Peptide Sequence Number=SeqID_56980
atgaacaaaacaccggcattcaagatgccattacaaatggaactccggttccacctccgcaggtacgaacaaccccacacgattggggggcctgcggagcaacagaagaccaacgaacggctcgccgtcgcccgctccagcagcggcgacgacgacgacttctgctccggggggccgaacagcagcagcgatgacctcagggcggatgctgctgccatgaggctctcgcccatgccctcactcgagaggcaaggacaggcagaaggccgtagagttggaggtcagtccgtgggcggcaccgactatctcgtcggcggaggaacctcttccagctgtcgtggcggaaggcggcgccgggagcggctccgaagccactcgagtcagagagccaagcacgcggcagctgccagcgccacgaacggcgaacgcccttcccccccatcactgagggaaggagcaggccgccgcccacgcagggaccgaccccaactcggcacactcccctccccagcactgatgatgaaagtccttgaagctgagggaggggcagaggccacagcccgacttgcttttccccgccatcgaactagaggcggcgcctctggcaggagaggcgagcgacgcttcaccttcgccataatgaccgcgtcaaaaaagggaccgggaaagggggataccccgaaaaggatccttctccatgaaggaaacaggccccgagcctccctactgatcagaggttcaaaggctggcccctcggaggggttcaacagccgcctcagagcgcttgggttccacgcccactactggtcagaggttcgaaggccggcccctcggaagggttcaacggctgcctcaggccactcgggctccgcgcccactactgatcagggcgggaacgatcttgtaacggaatcccatcagagggaggcatcgagccctcggaccccgttgaaaggggaccgggtccggcagatcacccgcagcgccgcctgcgccgcaccgactgctgagccactcgacagagtgaggctgacagcagccaagtccggccctaggcgccatgggaaactccgctccgcccgaccccagggctcggactcgggataa

SEQ ID NO: 13606 - DNA, 103 bp, Zea mays
  Peptide Sequence Number=SeqID_56981
atggcgcccacggccatggtgcggctgcccggtgcgccccgcccgcccacggtgctcgcccccccggcgcgcgcgatgccgccccgccctcggtcccccgccc

SEQ ID NO: 13607 - DNA, 1839 bp, Zea mays
  Peptide Sequence Number=SeqID_56982
atgggcctctgcttcagcaagaagaagccaccggccaagccgggaaaggtcgccgccgcggtctccgacgacaaggccaagaagagtccggcgcagcagcccaagagagcggcggcggcggcggcgaacaaggctgcggtgtccgccaaggacgccgcggtgcccggggaggagaagaggaggcggtcgggatcgcaagggccggcggccgagaagcagctgccggtagtgctggtgccgtcggcgccggtgcgcacgtccagctgcaccaaggaggaggtggacgcgatcctcatccagtgcggccggctcagccggagctcgtccggggccggaagggcggcgtcgaccggcgacacggcagcgtgcggcggcgggcaccgcaggaggcgctcggggtccaagcgcagctacgacttcgaccaggacggcggcgcggacgaggagtgcgactgggagaggcaggggcgcgcggcgcccgtgtccagcagcaggccgtcgccgcaccgaggctcgccgcagcgcaagcggtcgggaagccgggagaggagcggcgccggcgccgggagccggagggccagccggtcgcccgggagacgcgctgatggcgctgctacctctgcgggatccggcggcggggaccgcgccaggcagcagccggggaagatggtgtccgtgcccgccagggagaaggggcgcgcgccgtcgcccgtggccgcgtctgggaagcggtgcgcgtctccgaggtcgagctctcccgcgaggatggcagcggggacggggaacgagaatgctggagcttgcggaccggcggcggggccggcgccggtgctcagccggagctcgtccaggaagaacgagcagtccccgtacaggcgctgccccatggccgagctcgacgacaacgctctccgtaacagcagcaaccacggtgccaggccgcacaagaaatctgctgagactgccgtcgccgcgacgcccaggaaggctacggggcgtgggaaggagccgacggcggtgaaagaaaagctggagatcacagaagcgtcagagacgagagcgcactcgtccaagacgtcgtcgaagacgaccacgacgcccacgctgagcgtcgtggccgagagcctgacccaaatgcccggtgcggcgcagccaggctgccgatcgcggcgggcttcgcgcgacttcgaccaaaaccccggctcgtacgccacacagctgctcgaagacatccacaactaccatcagcagtccacctccgccacgccggcgacgccgtccatctcgctcccggcgtgcgtcgccaaggcctgctccatcgtcgaggccgtggcggacctcaactcctcgtcgtcggagaaccgcgcctacgagcacgagcctggccactccgccgatgacaaaggctccgtcaacgcgccggtaggcagcggcagcgacggcttcgtcgagccgagcgccgccgcgcggaagcacctgctgccggcgcgggacgcccacgcggaaaccgagccccaggagtcggccgggagcaacagcgtctccggccacccgtggacgccctcctgggagcccacctcggccgagtccacggaccggacgtggagcaccggcgacgaggttgtcgagcagtccggcagtcacggcggccgctgcagcccgatgaacaggcaccaactgagcaagcagaggcagtgccagcccgagctcagtggccggtcccgcgccggctctggaaatgctaacggccagtaccgtgggcgcagcagcgctcatcgtgccagcggcagcgtggcgagcggacggtctggtgtccgagtcgtctcggcgaactcgtag

SEQ ID NO: 13608 - DNA, 81 bp, Zea mays
  Peptide Sequence Number=SeqID_56983
atggatctaggcgtctacctcggcgacaagatctacggcaccgaggtacttgtcgccgaggtaaaaactcacacttcgtga

SEQ ID NO: 13609 - DNA, 1926 bp, Zea mays
  Peptide Sequence Number=SeqID_56984
atgaagtcccgcatggcactagggttaccaagtccggagaaatcccaacaaaagtcgggctcgtcatcttcctcggaacccgagggcccgttgaatccaaaaggcacgagatgggaatcggtcggtacctcttggtcgacgggcggtgacgaagtcacgtcaggggcagactgcaccgtcgtctcaggtacgagggtgacgcccagcaagtcctctgcgagcgtgctggcgtcatccgtccgcttggagttggcgtgttgcggggaaacggcgctcgtcttcgtctcagacgcgaggtcgatgcccgacgtgtcccccgttggggcgccggtgccgtcgacttgctcgacagccgacgaggtgtcgcctcctgcttggccttgttgcctcgcctcctcctccgtcggcgggggaggcgacgggacaaacccaaatgttgttcttccgccacgtggggaagacgtcgtcgattccgccgccgtagggggttacaagcgtccgcgtgggagggagcgagaggcctgcgcgcgctgtcccgtcctccccgcgcggccaaccctcccgtacgagtgtcctgggccttccttttataggcgtaaggagagggcccagggtaatgatgcccccccccgtgacgtggtcggtccgagccctgggtcgggcgaggcggaggctcctccgaggtcgaggtcgagtctgtctttcgtggtcgaggtcgagtccgagccccgggtcgggcgaggcggagaccgtcggctgaggccagggctgagtccgagccctggggtcgggcaaggcggagttcgtcgtcttcgggggctgagcccgagtccgagccctagggtcgggcgaggcggagttcgtcgtcttccgggggccgaggccgagtccgagccctggggtcgggcgaggcggagttcgtcgtctttcggggccgaggccgagtccgagccctggggtcgggcgaggcagagcttcctatggcgcccgaggcctgacttggctgctgtcagcctcactctgtcgagtggcacaacagtcggagcggcgcaggcggcgctgtcctctcgtcaggcggccatcctcgcattaaatgcttctgcggtgcggtcggtcggtgtggcaatctggccaaggttgcttgttggcgaagactgggcctcgggcgagacctttgtgctgatggggttaccagctgagattaggagtcttggggatgctctgcaaactcgccaaaccctcagcgtttcccggggcccagacgaacagaggcaaaccgaggcatccatcacctcggcagaacgccagaacccatacgcaactcgcagtcgcagcgaccgtccgctcgctcccgcctttcgtttgccccgccgcctctatcctttcctcgactcctccgcatccaccacctgttcgacccagcaccggagagtccccacccacccaatggcgaccgccaccgcggccgtagcgccgccgtccacctccacctcctcggtcctcctgcgccgccggctcccttccccggcgcccgcgtccgcgtccgccgccttcccccggctccccggcccgcccccgcccccgccgcgccgcgcgcgcctgctcctcctccaggtcgcgctcaccagcgaggtggcctcggacgacgtggcggccgaggaggccgcggccgcgcccaagatcggcaggcgggtgcgcgtcacggcgccgctccgcgtccaccacgtcatcaaggcgcccgacctggacgtccagggcatggagggcgtcgtcaagcagtacgtcggcgtgtggaagggcaagcgcgtcaccgccaacctgcccttcaaggtcgaggtccagctcgccgtcgagggccagcccaagcccgtccggttcttcgtccacctccgtgaggacgagttcgagttcgtcgatggggagtga

SEQ ID NO: 13610 - DNA, 297 bp, Zea mays
  Peptide Sequence Number=SeqID_56985
atggcgactagctgtggcggctgtgtgcggtgtgcctgtgcggctgcgctgtgctgggcgagggcggcggatgtgcgacgggccgacgacagatgggttgaccgtggtgggctgcttgctggaccatgggccatgagtcgtgaatttggaatttgggctggactagttaatagtttcggtaaattccgaattttgaatttggtaaattccgacctaaaacggtttctagctggaaccaaagatgcggcccccagtggaataactggccgaatttttctactgggtaccgcactgtga

SEQ ID NO: 13611 - DNA, 735 bp, Zea mays
  Peptide Sequence Number=SeqID_56986
atgtccatatataagcaccaactcggattcgaaattcaaaatcagaaagcggacaacaatttgaaaaatgagtatcaggccgcggaccgtccgcccatggaccgcggaccgtccgcagcatcaggaaatggacatggttttggtggtctccgcaagaaacttgcaggtcgctttaaatccaagcgccctcgtggaaatgatgatgactatacaccaaccactgattcagaggcccaatcctcagctgggggcactgaatccatggatgctgaagattttcctcatgttcatcccgattatcccattgatacccaaggctggacttatcccaagcggagattttctatggctgagtactgttctagacggactgtgaaccagtatactctgccatctgatacaaatatccagttttttcacactcagctgcagtttgatgttttttggggcaccctggtggataccaattttcataagcatcaggtgattgattggtccttcttgctcggtcaatctgtcatggaggatttcaatgaaatggctgttaaacaatttctggctacctcagagattgatattgaagaagaatctatcacctggatgactggcttcaagcgctattctgcttcctttgctgactttgtcgctgcaaacagtctgaactatggcaccatttctgctgggctggatctttatactgaagataattttgaggatttttgtgcagttttatga

SEQ ID NO: 13612 - DNA, 636 bp, Zea mays
  Peptide Sequence Number=SeqID_56987
atgagtgagatttgtgtcaagctcttcaaggatggggtactagaaactgaggttcaggatgctgatgatccccgtctgtcaaagatgcggaaagaggtggtggctggggggaaggatactatggaggtggataatgacttcttcctcgtgcccgtcaagatctctgatcaccagttctacacaaaattagaggagaaacataaagctttggaagcagagaaggacgaggctgaggccaggaaaaagtgcacagttgagggatataacttagtttttcaagcctgtccatctccagcagatggtttagttgggaaagaatcttatgctcaggtacaaattggtaggcaaattctaggcaaaggagttgggttaacatgggaagaggccaagctccagaaattcgttggtgtattgctaccaaaatccgctattaagtttgagagatatctgatggatgagattctatcgatcaatgctgatgttagtgaagttgagtttgggaagaaggtgaaactaacacatccttgttgtcgtgctgattcaagatcaaggggtagtgatccggaaggtggctatggtttttgtaagtacgagactcaagatcttgttcaaggaaggtggctatggtacttttga

SEQ ID NO: 13613 - DNA, 111 bp, Zea mays
  Peptide Sequence Number=SeqID_56988
atgcgggggaaggcgaactgctgctccctggccagggtgcagctttccgtcttccactcgggcggcggtcgtgccgcgtgcgggccggccacgtccagaggtcactggtga

SEQ ID NO: 13614 - DNA, 801 bp, Zea mays
  Peptide Sequence Number=SeqID_56989
atgcggcagagcctcgaagcgagcatcaccactcccctcgaggctcgggggctactgtcgggtaccgaaattaggggtacctccaacactcctaatcacggctgggactcggcctcgcctcgcctgagcctggcctcggacggaacggtggtccaggacgagttcgcgcctcgcccgagggtctcctcaggccgaaaacagcgccacccgccctgctccggctgttgtgccaatcgcccgggcgaaaccgacaacggtcaagataagcctcgggcgcaacaggaagctccacctcgcccgaccctggggctcggcctcaacctctacctcgggaggagatctccgcctcgcccgaccccagggctcggcctcgacttcggcctcgggaagagtcacatcctcgcccgaccctgggcctcggccccagcctcggccttggaggagccgccgcctcgcccgacctcaggctcggatcaaccacgccacgggggaagcatcattaccctactcctagctagctcaggctacgaaggaacaagaccggtgtcccatccggcttaccccggtaaccggcgatggtggtttcctgcatgcaaccatgacgtcggtgatcctcaagccctctacgggagcaaggagacgtcagcaagatccatgcagcgccaacagctgtactgttacagggctcaaggcatttctccgacggccacgatgctacctctacaggactcgagacgtccccccgacggccacgttgttatctgtacagggctcagggcacctccctgccagccacgttag

SEQ ID NO: 13615 - DNA, 858 bp, Zea mays
  Peptide Sequence Number=SeqID_56990
atgcagccgggccgcctgatgaaaatccttgaagccgagcgatggctgaaaggtaccaacttccgcgaagttgcgttcctccaacgacagcaagacaaaagcgacgcgagtgttcctcatccgggggctcagaagccgtcgcggaccgagtcttctccaacacgctccaaggtcctcccctacgacacgggggctgggccccacgcgtcatgcaagctggcccaaggcggaagaagccaaaccgccacgcggggtgcgcgtaactgcccagcggttacaagcgcttctccactttcgcccagaccaacgggtgaaagagcggaccgccatgcaggcggcatgcaaccgcaccaaggggcgcaccctttcgacttcgacgcgtccagcatggaggcccaggcccacacgtcatgtaaccggcgcgccggttactacgtgcgagaaactgcaccgccactcgcgccagtaccgcgccttctcgactgcggaaccggtgccgcgactcgaggcgaccctacgcatgacccgacagtgccaaccgagcacatcggtcacgggtcagtcagccgcgggagaaggcgcgacggtcgatatggccagaaatgggccggcagtaatggcggtggcaggcgggcggaagcagcagtcaagccgtcagcaagctcatgtcccctcctgggacagcaagagagccctctcccacggcgtgaagacgacgcgcccgtgttctgttcctcgaacggctcgtgcacgcacaacggctgccccgcgaaccactcgtcccgtcgcattaactctgcggcaggacaggcggcacctttggcaggcgaagcaggcgacgcttcacctccgccataa

SEQ ID NO: 13616 - DNA, 471 bp, Zea mays
  Peptide Sequence Number=SeqID_56991
atggcgcatacaaggaaaacatcatgcaaatctactggaccttttggtgtgcctcgtcatcagctagcccccagatatgaagggagtagtagtggcagcaatgacccgattggagacctggaagccaagatatcagaacgctcttcggccattgattgggccgtcaactcgcattcgatcacttgggaccgcgaagcaaaagctcgagctcgtgtggcggagcttagtgcggccctcgacagcctgcaagtgtactgtaatgctttacatgtggaagtacatgtactgtatgctcgactgcacccagacgtgccttccgacgctgctgcaatgggagccagaccatcggggacagcaagtgaaggacctgatggggagttggacctttttaggccccttccttccatgaaccttgctgatgaacggtctcctggagcagaaaatgaagcaacaaaggatgacgaagactag

SEQ ID NO: 13617 - DNA, 381 bp, Zea mays
  Peptide Sequence Number=SeqID_56992
ggagggctcgacaagcaggggaggggctcggccagggtgcgggccgtggctccagcaaggcgaggcgcggctccggttagcaccaccagtgcaggaccgattgagttcacctcaatctggtcactaggcataggtccaacaagaatgtcggactactcgatcataaaggtcgaccaatctggcagggagcatggagagaaaactgtgggggacagatatccccgggcccaccagaaggataaaagacctcacgaaaggcccgtgggcccaatggttcgcgaggtcatcccttcgtgggcctgggagaaacgtccaataaggcggattgacgcaagactggatcgacgcaagcccagatggcccgatggattggagcagtga

SEQ ID NO: 13618 - DNA, 585 bp, Zea mays
  Peptide Sequence Number=SeqID_56993
atgccgccgcgcacgaggagaactgcgcgcaagcatattggaccgattggtgtgccatgtcatcagctggccccaagacatgatgatagtagtagtggaagtaacgatccgataggggatcttgaagcacaagtgaatcggctccaagcggaactctgccgcaggattgatatatgggccgcagatggtgatagaattaatgagatgagaagtgacatccgccacctacgagatcagctcgtggaccaagatttagcactcaactgggtagttcaatcttgttcgcttgcctgggccaaggaggcacgagctcaagctcgaatagcagagctcaactcggccattgatgacctacagacttattgcaatactttacatgaagaagttcatgtactgtattcgcaactgcaccccagtgaacctgcggatcctgtcgggacggaagccggaccctcgcatgtagcgggagaagcgcttggtggtgagttggacctttacaggccccctccctctatgaggttggtcgatgaatggtctcccacgcccgacgacgaggctgccaggagcaaccggaagcaggaatag

SEQ ID NO: 13619 - DNA, 870 bp, Zea mays
  Peptide Sequence Number=SeqID_56994
atgacttctcacggatcctcggacgaagggaatgcacaatcccacacggacggacttgcacgagagggtttcccccgtatcttgtgggaggtacttcagggagctggttacacgacgcctccccagtatgcggtgcagcagtttgagaagcaccgagtgccccgctgtagggtgaggatgaccctagagcctcatcccttacagccaggatggcgttcgttggattcagagtcttttggatacaggaccgaggatactatcgaggcgattgctcttcatggactaaccaccttctgtggtttccaccccttggagctatccactcaccccattggtttgttacccgcggagaaggaggacgacccaatgtggaaggaccgagtggagcacgccaaggatatatgggctatctacccaggtcagactactcacttgacggtgcggtgcatgaatgccctgtatcgtctgcaagtgatacgaggagaggcaatgtctcatctaatggcattgttggaggctaccaagatcaccttggataacagagaggaacttgtggtagacttgtccactgagatggtggaaaaagacttgcaagtggaacaattgtcaaatgagatccaagagcttgaggagctactgggaaccagggagaacaccatcgaggttctcgaggatcagcttatcaacactcagcagcaactcgcggaggctaaccaacacctggatatgcaccaccaggagatccaggacatggaggccaacgaggatgtcaacatcgagggaggagaggagcctgcctccagcttggatactgctggctcagggagaccaccttcccccgagtcaagcgttgccttgtttgctcactag

SEQ ID NO: 13620 - DNA, 1188 bp, Zea mays
  Peptide Sequence Number=SeqID_56995
atggctagacgcaggaggggtcgtggctggccttgccgtggcgacaacaagtgcaagtgtgccctgagtcccccctcggaggactttggggactcggagtactttgaggaggtatcctccgagtcagaccgctcgcccactctggcttctcccccatcatcatccgaggactcggatgattccatggggctttccaccgcgacccgggcgtactggcgctccatcgagcgtgccgggctcggtgggtcggatgagtcgggggtctcctcggatgaggcagactcctccgactcttccgaggagtggagcagcggtctatggaaaattatactttcctttcaggtggcatgcctggggcattgggagctggttcctgctgagctgctttctttgggcaatgattcacctagtggccttgttccccacaatggaaacatgtgcagcctcctccttgcgctagcgctgcctgattgttctagttggatgctggggcaggaaggcgaggtgcctgattgctctggcgctggatgcacgagagatgacaggcaattttctacaggttcgagccgcttggagaggtgtaataccctacttcctagtgtggatctttatgtgaggcaggagggatcgtggctggcctcgccgtggcgacaacaagcgcaagcgtgccccaagtacccctcggaggactttggggactcgaagtactttgaggaggtatcctccgagtcagaccgctcgcctgctctggcttctcccccggcgtcatccgaggactcggatgattccatgaggctttccaccgcggtccgggcgtactggcgctccatcgagcgtgccgagctcgatgggtcggacgagtcaggggtctcctcggatgaggcagactcctccgactcttccgaggagtggagcagcggtgacggtgacgacgaaggcgatgacagtggcgacgacagcggtgagggcgacagcggcgacaacagcgacgacggcgacaagggcggcagtgagggcgatgacggcaacgacagtggtgatgatgatgatggtggtgacagcggcagcaagggtgacggtagcaacgagggcagcaagggcgatggtggcgacgacagcagtaagggcgacggtggcgacgacgatagtggcaatggcaaggccagtggcatagcaccactggtctaa

SEQ ID NO: 13621 - DNA, 567 bp, Zea mays
  Peptide Sequence Number=SeqID_56996
atgctgaatagtcttcacagcgacgagagcgagtgggacgatggcgaggtccgagcgcgatggaaagatctgcatggccggcgcgatgctgaggaaaactcgaccaggccacggcgagccgatgttgtagcagggaccaatggcgaaccccgtgttgagtacaaggaacgacagcgtcgaggcgaaggttggagacgacagccgggtgaggcgagcccgcggcagctggcatgctcgacgaccacagacacagctggggagggagcaagggcgacgtgtctgctgatgacaaaaagggacgcgaggttgacaacggcacaggaccctaaaacgtccgagcttgaagactgggcgcctactgctgccgatgctacagcgggaagggagaagatgaagggaatgaaactcgacaccatggcatgcatgagagataggaagcaaggagagtgcgtgagtgttctagaggcccatctcgtgaagaagctaagaaatggctgggatttttcccagggagaagagcagcatgggaggataagggaagagaatggcggtgaggaatatctctag

SEQ ID NO: 13622 - DNA, 414 bp, Zea mays
  Peptide Sequence Number=SeqID_56997
atggtgggtacaagtgcggtcactacacggcagcagccggggtcagtggagcattgtatgccaaggcgaaggagcaacttagctaaggtacgcttcaggatatggttgatgatgaattcacccacccccgccagtggaggagacacttgtttcaactctgacttcctttctcatgatggctttccttccatcttgtgggaagtgcttaactccgccggttaccctacgccccctttgtacatggtgcagctgtacgaggagcatcgggtacctcgttgccgagtctggctaactttggaggctcatccccttcagtcgggttggggttctcttgactccgagacgattggattcaggacggacgacaccactgaagcagcagccatgaagactctgacaactttttgtggctaa

SEQ ID NO: 13623 - DNA, 376 bp, Zea mays
  Peptide Sequence Number=SeqID_56998
atgggcagcgagcagcgacaatgtggctgcgcaatacatcgagcgggtggcatgcaagcgacaccgagggaatccggggctgctgggggcttgctgttttgggggagggtagagtgtgagagggctgctggtcatggggaggagagtggcgaagctcgacgacgacgcaaggcgaagaacggtgctgctgcagcgcacggcttgctgcgcaggtcggcggtggagctcgctgcgcgacgagggagcaaggtagtagcagcgacgtccgacgacaatgcaagggaggagctcgctgcaggggggctgctcgccatgggtgcagagctagcagcaggggcgtcggcatggagcaaggagaggtcggcctgctggggag

SEQ ID NO: 13624 - DNA, 114 bp, Zea mays
  Peptide Sequence Number=SeqID_56999
atggcccagaccccaggataccgcttcccgcccgcgcaccctgatgccatggcccgcctgtcagtgcccaagtcctctggcaccgagcccgctcggttatgtttcaacacttag

SEQ ID NO: 13625 - DNA, 1326 bp, Zea mays
  Peptide Sequence Number=SeqID_57000
atgcagaccggctccgagcagaagaagccaaaccgccgcgtgtggggcacacaaccgcccagcggttacaagcgatcctccacctttgcccagaccaacgggcgagagaggcgggcagccatgcaggcggcatgcaaccgcgccaagtggacgcgcttctccgactcccagcgcgcccagcctggaggcccaggcccacgcgtcacgcaaccggcgcgccggatgctgcatgcaagcaactgcaccgccacttgcgccaccactgcacctctttggttgcggaaccaataccgcgactcgaggcgaccaggcacaagacccagcagcgccagcctgacgcgacgcagcaacgggcgacgcttcgccctcgccgaaacaaccgcaccaaaaaagggaccgagaaagggggatcccccgaaagggatccttccccgtgaaggaaccaggctccgagcctccttattgatcaggggttcgaaggctggcccccgaagggttcaacagccgcctcagatcgcgtgggccctacacccactactggtcagaggttcgaaggccggcccccgaagggttccacggccgcctcaggctactcgggctccgtgcccattactgatcaggggttcgaaggctggcccccgaagggttcacagtcgcctcagacgccgagcgagggatgaccagggaatcccatcagagggaggcatcgagccctcggaccccgtcgccaggggaccgggtccggcagatcacccgcagaggctcgggggctgctctcgcaaacccggctccggccgaaccgttgacagcgtcaacataccagcccgagaacttgggcctcgaccgtacacccgggctacggccagctcgcatgagggaacaaccagaccagccgaagcattacgcaaggcattaagacctcgaaggagtgaaatcactcctccgaggcctcgggggctacacccggcgggtgcgctcgcgcgcacccacctgaaccaaatgcaaccgagaaaggctggtccccttgcaaaaaagtgcggcgaaagcctccaagcgagtactaacactcccttcgaggctcgggggctactgtcggggaccataattaggggtaccctcaagacgcctaattctcagctgggatcggactcgggcaaagccccggaagacggcaaactccgctccgcccgacccagggctcggactcgggctaagccccggaagacggcgaactccgctctgcccgacccagggctcggactcgggctaagccccggaagacggcgaactccgctccgcccgacccagggctcggactcgggctaa

SEQ ID NO: 13626 - DNA, 243 bp, Zea mays
  Peptide Sequence Number=SeqID_57001
atgggagtgaggacaagaccatccaagaacgccggcgctaccactgtggcgtacggcgtcttgtatggtccccccagtatggccaacgggcaggagaaggggtggatgtgccggacccgcacatggcgcaaccatcgctcgtgcggtggacggacatccatgccccggccagagcggcaggaggcagcgtcggaggcggcaccgaagccgtctagcccaaagggccgagcacgttgcagctga

SEQ ID NO: 13627 - DNA, 456 bp, Zea mays
  Peptide Sequence Number=SeqID_57002
atggcccctgccgtcggtgccgaggcggaggcggctcgagaagtccccgtcaccgacgggatcaccgccaccatccacgcttcgggcctccgcagcgcccaccctgaggcctgcgctgccgcagctcgaccatccggagcgggggtcgttgtcgtcgtagtcatagcgggcggcggcgagccgctcgtcagtcttctgttgctccgcaggccttcccccatggagtggggttactcgcctgttgattatctgaaccgcttcaccaagcatgagtcgcctcgtgtcaaggtgacgagtgagcacgaacagaggcggagttggctcgaagatgagaacctggttggccggagcctagccgggttgtccgtcagcgggaccgacgccggagttgaccagccgaggcctcggatcgggctggcgcccttggaagatggttggccgaggccccaggggtaa

SEQ ID NO: 13628 - DNA, 156 bp, Zea mays
  Peptide Sequence Number=SeqID_57003
atgttcggattacaggtggtgatgagaatgatggttttgattatgattatggtaatggttgcctttggtgcaatctatgctcaggtaaagaagaaggagaacggtgtcgaggcggatctccaggagtttcaggacatcgaagagttcgaggattag

SEQ ID NO: 13629 - DNA, 738 bp, Zea mays
  Peptide Sequence Number=SeqID_57004
atgaagaatcaaatgctgcattggattgaagaagctaggtgtgatgaggacatcacttctatacatacaataaatggaccgataacacgatctcgtgcacgacagctaaatctccagttacgttctaccctagtcaattgtgtttcagagcttacgcttggggccattgatgttttgatgattagggataagcctccatggcgaggtcattcgtgtgtcatgggtgataatcaacgaagccgtggtgtagtgattgcgaggaaccgttcgctcggagccttggatcatcaacgtcgagatctccactcaatcaagttatcgtatctcacggaagattgggctgcgtctactatcaattggtatcagatttccaggttgcccgtgaggccagcaactaggacgagtacttggaacacttattcagcattgctatctattactgacttgtgggccatatatatatatttgtcagccttcccagaactccagctttctctcgagcagaacaggtactcctttgcaatcacacccacgctcgttggacaatcacaccggtcaccgtttgccgcctgcagtgctggaccaaagaatcaaatggacaaggacaaggggcctcagcttaatgatgatgagtgtgtctcccagatggaattgaaggtgatgatgcgcgcgatgactgaagcttttaaaaaataccaggactctatggcgacatcctatgagcagcttgatcgatga

SEQ ID NO: 13630 - DNA, 501 bp, Zea mays
  Peptide Sequence Number=SeqID_57005
atggacgtagatattgaaatagttgttgatgaggaggatgatgaggtacaaaatgataatgacttagtaatccttgaaggcaatgacattaatgacgaacttgcgtcttccgatggtttttggacaaatatggtcgacggtaattggctgagggggaggagggggaggaggagtaggacggcggacgaggcagagcaggcggcgcctcaggacgaccttgtccagcagcaggcgacacctcaggacgacgatgaccagcagcaggacaacgacgaccagcaacaggatgcctcaggttctggcgcctcaggtcttggatggttgtggattatgctgggggtcatcgtcgctcccccaatggcatccttggcctgctgtgcaggggaacacttccttggactggttgaaatttcttcagatgcgaggctggatacgaggctagggcggatgtggtggccaccacgagctgtaagaaagctcgtcatgggacatgcactatga

SEQ ID NO: 13631 - DNA, 174 bp, Zea mays
  Peptide Sequence Number=SeqID_57006
atggcgagagtagcgtgtacgctctgtggcaagaggctggacggtggtgtatttgtgctctcggtgaggaagcggcaaatttttgctgtttttgttcaaaggtggtgcccaaagaagaaaaccaggagtgaagcttcgggaggaaaggatcctccgttaaaaacttttgtttga

SEQ ID NO: 13632 - DNA, 420 bp, Zea mays
  Peptide Sequence Number=SeqID_57007
atgggcaagaacaacaagcgcaagcgtgaaccgactcctccatcggaggagtttggtgactcggaatactcggaggaggagttctcctccgagcccgaggggtctccggctcccgtctctcccccggcgtcgtctgatgactcggacgactcccaggggatagccacggaggtctggacgtacatccgagccgtcgagcgcgccgggctcgaaggctcggatgagtcggagtactcctcggatgaggaggactcggacggcggcgacgagggtgaagacgacgacgacgacgatgacgacgacgacggcgacgacagtggcaggggcggcggcgacggcagcagggacagcaccaagggcgacagcagcaggggcagcaccaagggcggcggcggcggcagggacagggccagtggctag

SEQ ID NO: 13633 - DNA, 405 bp, Zea mays
  Peptide Sequence Number=SeqID_57008
atggcgatatgcgacgctcagaactgcactagacttcatttagggagaatgcaccaagctgctatacccgacgggtacccgatatccgctcgatacccgatgggtacgagcatgggtacaaaactttacccgcttctgttcggattctactgtccaactcctaaggacacatctcctacttcggtagatccattggtaccgaatttcagagatgaggatgaggaaatatgccagtgtgaagatcagggtgccattgctaacacttcttctgacgatgaggatctggggattccgccaccacctcctgtgtcaccttgttcccatgatcacgaggctggtggctccggtgttgctccttcgactgctcgtctagcgattgaccctgctttggccgccatcctttag

SEQ ID NO: 13634 - DNA, 465 bp, Zea mays
  Peptide Sequence Number=SeqID_57009
atgagaagaggccgccaaattttaaaggatgtgatagaagactttgctagaggtgtaggggcgagctcggagtttgtcgcgcacactttgaatgtcaattgtgccaagtttgggaggcgagcatcaaggatcctcatcactggtggggaggatttgaaggtcaatctttgggctatagggaaacccggtgccctcctgagtctatcaggctttataagtccagttgagtcagtacgacctgactcttctgaagttacgataggtgctggtgcagcaagtggaacgataaaaaatattgaggaggcgaaagttgttcgaactttcactggacacagatcaagctgtgcatctcttgatttccatccttttggagaattcttagccactgggtcttcagatacaaacatgaaaatatgggatactcaacagaagagatgcatccacacatacaagggtcatacctag

SEQ ID NO: 13635 - DNA, 240 bp, Zea mays
  Peptide Sequence Number=SeqID_57010
atgaaggatgcaaagcccatcaagacgccgatgggaacaaatgggcatctgcacctcgacatgggagccccaaccactattccagctgttgctgtcgatgggcacaccagacagtccggtggtgcaccggacactgcactgttcactgtccgttgtagaatgtacttctcgaacctcacaagtccaagtgcattgatgcatatgttgagggggaggatattctacaactttgccctttga

SEQ ID NO: 13636 - DNA, 138 bp, Zea mays
  Peptide Sequence Number=SeqID_57011
atggggctcggtgtatgcggctcgctctgccaaggtggttatgagatcgatggttctggttatgactatggtaatggtaaagaaggcgtcgaggcggatctccaggagttccaggacgtcgacgagttcgaggactag

SEQ ID NO: 13637 - DNA, 675 bp, Zea mays
  Peptide Sequence Number=SeqID_57012
atgatggtcacccggtcagccatcaccgagcggaaggggtggcggcgcaaggggcagggagggcggtttcctcttctctggctaagtctctcgggttgcgaaaacctaagagggaggcaggaagcggagcaaagaaccgtcaccagaccctctcccgggtatataaagaccaaggcgagaccagtgcaaacgttccgcccggaccggacgcgggatttgaaaacgcaaagcgaaacagccgttccccggacggctcgcgcacgcgcaacggccgccccgcgaaccactcgccccgtcgcattaactccgcggcgggacaggcggcgcctctggcaggagaagcaggcgacgcttcgccttcgccataataaccgcgccaaaaaagggatcgggaaaggggataccccgaaatggatccttccccgtgaaggaaccaggctccgagcccccctactgatcagaggttcgaaggctggccccccggaagggttcgacagccgcctcaggtcgcgtgggccctacacccactactggtcagaggttcgaaggtcggcccctcggaagggttccacggccgcctcaggctacttgggctccacgcccattactgatcaggggttcgaaggctggcccccgaagggttcacagccgcctcagacgccgagcgagggatga

SEQ ID NO: 13638 - DNA, 57 bp, Zea mays
  Peptide Sequence Number=SeqID_57013
atgggatacaatgcaagtgactcggactccgatgcaaatgatgatgccaaccaatga

SEQ ID NO: 13639 - DNA, 405 bp, Zea mays
  Peptide Sequence Number=SeqID_57014
atgagggaggcacaggagatgggggcgattcttgctctggcaacgatggaagttcttgctccggcagcaagggcagcttcagctcctactcggctagcaggcgacaaggccaagaatgaggaaccaggttcccggatcgatggggtcatgaaatgggaacatggtgcccaccacaggggtccacacatgtggccaaggccaagagtggaggtgctaatttggtgcccaagggacgatttagtggccgaggcctatcgaggcaacggtggacaaggcagcacggaagcggcagaagaagacacaagagagagggcccgctatgcacgggggcctaccatcgccagtacgctgctcagcaagatcgggagctcaagagagatcaaagcccatttggaccaattctag

SEQ ID NO: 13640 - DNA, 492 bp, Zea mays
  Peptide Sequence Number=SeqID_57015
atgggcaagagcaagaagggtggtagttcttcgcatcactccagtgacaagcggaagcgtgagccgactcctccctcggaggacttcggcgactcggagtactcggaggaggagttctcctccgagtcagagggctcaccggtccatgcctctcccccggtgtcgtctgatgactcagacgactcccaggggatcgccgcagaggtgtggacctacatccgggtcgtcgagcgcgccgggctcgagggctcggatgagtcggagtactcctcgaacaaggagaactcctcgaactcgtccgaggaggcgacggcgatggcggtgacggcgacgacgacggaggcgatggtgacggcggcggtggtggcggcgaaggcggcggcaagggcggtgacagcagcagcaagggtggcagcagcgacggcggcgatggcagtaagggcagcaacaggggcagcaacaaggccagtggctagacgccactggttttaa

SEQ ID NO: 13641 - DNA, 273 bp, Zea mays
  Peptide Sequence Number=SeqID_57016
atggcgctggaacttcatggtgtgcacgacgatgtcccacatcattggtccgaggacgatcttctcgtcgttggccactcacgcgctgaaacggggacgagactagatgggcagcccggtcgcaaccgcctcgccaatgaagttgtgggtcgatccggtatcgaggaatgctctgttgtggcgccgagggacgcgcacatctacatcgtattgcagatggccccgctcgccaccgcatgcagggaaaagactggagtaggccttggcattcgg

SEQ ID NO: 13642 - DNA, 495 bp, Zea mays
  Peptide Sequence Number=SeqID_57017
atgggcgtcgcttgctcaccggccttggaagtgcagccttctcggggcttcggggacgccgccgcttgcccgcacaagggccccgctatcgctcgccctctggatcggggaaccgccgccactactccggatcgaggaacctccgccaccgcgcgtcgagccccgcgtgccgtacgtggcggtgcgggcgggctggcggtgctccgcgcctacccgttccgcgtgcccgccaggggcgtcctcccgctggcgtacgtggcgcgcgcgcagggcgccccgctgggcgacgccggcagcgccgccatggaggccgcgctccgcgacggcgtggtgccgttccgggtggatggggaggcccagacgcaatggaaggtcgcggggatcgtcggcgtcgaccagtggacgcgcctggcgtgccagctccgcttcttctggcccaacggcaccgtgctccccttcagatgcatctccaagtccaagttcttgttcttctga

SEQ ID NO: 13643 - DNA, 258 bp, Zea mays
  Peptide Sequence Number=SeqID_57018
atgaaccccaagagcatgcctcggggtactccgaagacgcacttctcgggattgagttttacgcctttcgccttgagacaccggaatgtcgtttcaaggtcgaaaaagacgtcggaggctttcctcgtcttgactacgttgtcatcgacggttggcaagccattcaggatggaatacctctttgatgaaccctgctgccatcagcttgtggatctcctcgcctatggctctacgcttttcttcgtcgaatcggcgtag

SEQ ID NO: 13644 - DNA, 681 bp, Zea mays
  Peptide Sequence Number=SeqID_57019
atgcaggcggcatgcaaccgcaccaagggagcacaccctttcgacttcgacgcatccaacatggaggcccaggcccacacgtcatgtaaccggcgcgccggttactgcgtgcgagaaactgcactgccactcgcgccactaccgcacctcctcgactgcggaaccggtaccgcgactcgagacagccctgcgcatgacccaacagtgccaaccgagcacatcggtcacgggacaggcggcacctttggcgggcgaagcaggcgacgcttcacctccgccataatgaccgcgtcaaaaaaggtacgccacgacattcgaattcgtatccctttccctttccacttcctctttctctctcttgccacaaggaccgggaaaggggataccccgaaagggatccttctccgcgaaggaagcgggccccgagcccccctactgatcagaggtttgaaggctggcccctcggaagggttcgacagccgcctcagagcactcgggctccgcgcccactactggtcagaggttcgaaggctggcccctcggaagggttcaacggccacctcaggccactcgggctccgcgcccactactgatcaggggttcgtaggctggcccccaaagggttcgacagccgcctcagacgcagagcgagggatgaccctgggtacgttcgatacataa

SEQ ID NO: 13645 - DNA, 531 bp, Zea mays
  Peptide Sequence Number=SeqID_57020
atggcgcctggtatacgtgcgcccccacatcatgacatatctcccctcctcgagaggcagctcgtcctcgagctgaaatgtcgggaacttggcgaggaatgggtcgacgtcctcccaagttgcagaagcagcgggctcgcctttccactgaaccagaacctggcgcacactgcatgtcatgcgcgtccgaaccgcacgtttcggctccgctgcaacgatgcggtacgcaccgtagtaccaatgcttcagcttgccgaagctggactgtggcagggatgcagcgctgtagtgtcaaagacggaggaggacccagttgcccaccttgtaggagacgtcgtgggagctttagtacgcggtgctgaagatatactccgcccacgacagccattggcatggctagtccccgatgaggcagagcagatacatgataatgacgtggtgcatacgttcatctacaactattctaaatcgactgtccggaataccgtagattattccggacgggagaagctttttggaaaaatagactaa

SEQ ID NO: 13646 - DNA, 2196 bp, Zea mays
  Peptide Sequence Number=SeqID_57021
atgagcgcgctccaggcctccctcctcctccgcccgctcttttcgccactgcccccacgccgccggcagctgctctcctccgcctccttctctttcccccgcggcgcccacgcgccccgcctccgcgcattggtccccggcgcgccgcagcccgacgccgccgagccgcccgcgattgcatcctcggcggcggcggcggcggcggcggaggctgagccggaggcggagcccacgacggcggcagctcagcccgtcgcgatgagcgcgaaggaggggctggaggacatggtggacaaggctagggcctgggccgtggcggtcgcggccgcggtgttagccgcggccaggaggttcgtcgactgggtgctgtcgagggactggatgggctggtggcctttctggagatccgagcaccggctgcagcgcttgatcgacgaggcggacgccaaccccaacgacgcggccaagcagagcgcgctcctgcacgagctcaacaagttaagccctgaagatgtcattaaaaggtttgaggagcgaagccatgctgtggatagcaggggggctgcagagtacctgcgggcacttattctcactaacactatagcagattaccttccagatgaacaatctgggaggtctgcaagcctgccagccctgttgcaagagttgaaacaacgtgtatctgggaatgaggacaaacctttcatgaaccctgggatatcagaaaagcaacctttacatgttgtaatggttgaccccaaatctacaggtagatcaacacgttttgctcaagaaatcttctcaacgatcttgtttacaattgctgttggcgtaatgtgggtgatgggtgctgctgcacttcaaaaatatattgggagcttaggtggaattggggcatctggtgctggttctagctcatcatattctccaaaagagatgaataaggatatgatgccagagaagaatgtcaagacatttaaagatgtcaaaggttgtgatgatgcaaaaaaggaacttgaggaagtagttgagtatctcaagaacccttcaaagttcactcgccttggtggaaagctacctaagggcatacttttgactggtgctccaggaactgggaagacactactagcaaaggccattgctggagaagctggcgtaccattcttttaccgagcaggttctgaatttgaggaaatgtttgttggtgttggtgctcggagagtgaggtcattgtttcaagctgcaaagaagaagggaataattgtgatggctgcaacaaacttgccagacattcttgatcctgcactcacaagacctggtagatttgataggcatattgttgtcccaagtccagatgtgcggggtcgccaagagattctggagctctatttgcaagataagccagtggcaaatgatgtagatatcaatgcaattgcccgaagtacaccaggctttaatggggctgacctagccaaccttgtaaacattgcagcgataaaggctgcggttgaaggtgcggataaattgaatgctgttcagttggagtttgccaaagatcgtattatcatgggaaccgagaggagatcaatgttcatatctgatgaatcgagaaaggcatgtttgtttttgttaacttacctttttggcaatggacatgctattgttgcactcaacacccagggtgctcaccccatacacaaggcaactatccttcctcgtgggtctgcccttggaatggtcacacaactcccctcacaggatgagacctctattagcaagaaacaactccttgcacgtcttgatgtttgcatgggtgggagggttgctgaagagctgatctttggggaagacaatgttacaactggggcaagaaatgaccttcacactgcaacggagcttgcccagtacatggtatcgaactgtgggatgagtgatgctatcggtcctgtgcatgtgaaagaacgaccaagcatagagatgcaatcaaggatagatgctgaggtggtgaagctcctaagagaggcttatgggcgggtcaagcgattgcttaggaagcatgagaagcaattacatgctctagcaaatgcgctgctggagcgtgaaacgcttactgcagatgagatcaacaaagtagttcacccttaccaagaagagccccatctttccttccaagacgaggagtttgccctcgcttaa

SEQ ID NO: 13647 - DNA, 1731 bp, Zea mays
  Peptide Sequence Number=SeqID_57022
atggtatctgagtctattgcaccaaccaaatatatttctcaaatcgagacgaaccattcaacagttacgttccaatctttcttcttaaaactccaccccttttgcccacaccggactaccggagacgcccacgtccgcgctgctggccaatgcggcccaattctacacggcttgaacctaggtagccacgagccctcagcccctcactccgtcacccaccagccgccgctacgtgacgaggtctcccgtgtgacacagactgccgtccttcgcctggcgagtggtgacctgcgacctccgtctccggctgccgtcctctgccatggtccgtggaccgtagtccggcagcagcagggctccagcctctgcccgaccgcttgcccgccaccggcgtctgctacctccgcatccggcctctgggcaccggtctcccgtctctgcccccggcgttcatcgtccggtctccgacaccaggccctcagctacagcagtacagcaccagttcccgcaacagcgaggtcatcgacgccgccatctaggacggctcttaaggtgttcgaccaaagtcccgcgccgtggcgcgccttcctcaaggcctactcccacggtcctttccccctggaagctctgcacctcttcaagcacgcgcgccagcacctggctgatgacacatttgtcttcacgttcgtgctcaaggcttgtgcgggtctggggtggcatcgagctggtgcacagctccatgcgctcgttgtccagaaggggttcgagttccatgcctatgtgcacaccgcccttatcaatgtgtatgtcatgtccaggtgcttggtggaagcacgcaaggtgttcgatgaaatgccagtgaagaatgtagtttcgtggaatgtgatgatcactggctttgctggatggggtgaggttgagtatgcgaggcttctgtttgatcagatgccctgcaggaatgttgtctcatggactgggctgattgatggatatacacgtgcttgtctttatgcagaggctcttactcttctccgccacatgatggcaggaggcattagcccgagtgagataactgttttagcagttattcctgcgatatctaatcttggagggatccttatgggtgagatgctgaatggctattgtgagaagaagggtatcatgtcagatgcccgggttgggaattcactcatagacttgtatgctaagattggctctgtgcaaaactcgctaaaggtgtttgatgaaatgctggatagaagaaatttggtgtcatggacatcaataatttctggttttgcaatgcatgggctgtcagttgaggcacttgagctgtttgcagagatgagaagagcagggattaagcccaacagaatcaccttcttgagtgtcatcaatgcctgcagtcatgggggtctggtagagcaagggttagcgtttttcaaaagcatggtttatgagtacaatatagatccagagatcaagcattttgggtgcatcatagacatgctaggtagggctggacgtttgtgtgaggctgagcaaataatagaagggttgcctatggaggttaatgtaactgtatggaggatactgttgggttgttgcatattgtccaatgtacttactgagcttggtaggttcagtgatgctgaacaagcacggaagttactggatcagaggaaaattgttaaggttcctgggcttgctttggttggcgagattcagtag

SEQ ID NO: 13648 - DNA, 618 bp, Zea mays
  Peptide Sequence Number=SeqID_57023
atgcaactctacgctcatctaagcctagaagataaggcggtcatgctcaaacttctaaaaagagcaagagagcaaagcgaaactcgtcaaatgctagaagatgttctctccatgaaaatgctacgctttgacgagttgactaaagaacatgaggagctaaagtgctctcatgttgatttggtccaaagcaaatcttcctttgagctagaatttacaggaacaaaagatgatacatatcaaaagctcaaagaagagaatgagaggctaaagatgagcttgacacaacttaaagggaagtgcattgctcaaccttctcaagataaccgtgatcacatggtgaagaagcttgagacgggaacaaccatggcatgcactaaatcccttaaagaaaatttcaaggacttgaggattgtcaagaggaaggaacaaaagaagaaaatcaatacctctgccaaaagcctcaaccatgcctccattcaaggtaacatccaaggcaacccaaaattgcaacttgtgctagaaagaaacagaaataacatcgaattacaaatgtaccttcagcttgacggagatgaaagtacaagcgtgacgcaaaagcgaatgtcaaaatcagcgtga

SEQ ID NO: 13649 - DNA, 1641 bp, Zea mays
  Peptide Sequence Number=SeqID_57024
atggcgcggcggtgcccgtgcaggctgctgctagccgtggcggcggcggccgtgctcgtggccgcggcagcgcaggcgcaggagacgtgctcggggaccgtccccgcgccgccgcgccgcggggcgcgggtgtccgtggccagcttcggcggcgcgggcgacggacggacgctcaacacggcggcgttcgcgcgcgccgtcgccagcatcgagcgccgcgccgcgccgggcggggcggagctctacgtgccgcccggggtgtggctcacggggcccttcaacctcacctcgcgcatgacgctcttcctcgcgcgcggcgccgtcatccgcgccacgcaggacacatcaagctggcctctgattgaaccgctgccctcatacgggagaggacgtgagctgcccggcggaagatacacaagtttaatccatggcaatgggcttcaggatgttgtcatcacaggcgagaatggaactattgatggtcaaggcagcgcgtggtgggatatgtggaagaacaggacactgctctacacaaggcctcaccttcttgagctgatgagctcttctgatatcattgtctccaatgtcgtctttcaggattcgccattctggaacatccatcctgtttattgcagcaatgttgtgatcagaaacgtgactatcctagctccacatgactcccccaacacggatggaattgatccagattccagcagcaacatctgcatcgaggattgctacatttctactggtgacgattccatcgccatcaagagtggctgggatgagtatggaatcgcctatggccgcgccagttctggcatcaccgtgcggcggatcacaggctcctccccgtttgctggcttcgcggtcggaagcgagacatcaggtggcgtggagaacgtccttgcagagcacttgaacttcttcaactcagggtttgggatccatgtcaagaccaacacaggcaggggcggcttcatcaggaacatcactgtctcggatgtgacgctggataacgtccggtacggcctgcggatcgttggcgatgtcggcaatcaccccgacgacagctacaaccggagtgcgctcccgatcgtcgacgcccttacggtaaagaatgtccagggccagaacgtcagggaggctgggctgatcaagggcatccccaactcggccttctcccggatctgcctgtcgaacgtcaagttcactggtggcgcacctgtccggccgtggaagtgcgaggctgtcagcggtggcgctctcgacgtgcagccgtcaccatgcacagaactgacttcaacgtcctacgaggagaagaagacgaccctgcgccatcgcagaccgtccggccccgagcgcataccgttcggtcacagcgcagagaaggcctttcctgcagcagggtcgctgaccgtccgtcctagtctcctagagacgcagacagtccacaccgccccagtgagcaccgccagacgacccgacgacccgtcgtggaccgccgcgtcgtacacctcgcagagccaaacccaagatattgctcatcacgagaagaccataagaccgtccggggtgcacgaccggaccgtccgcgactacctttatctgacatctgacgacgcattaaatgctatatag

SEQ ID NO: 13650 - DNA, 72 bp, Zea mays
  Peptide Sequence Number=SeqID_57025
atggataaggatgaaagggagagcgagcaacagtttggccttagcaggccaaagaagctcagcgacctgtaa

SEQ ID NO: 13651 - DNA, 423 bp, Zea mays
  Peptide Sequence Number=SeqID_57026
atgggagtatgggacacagatgggtttgcgttcttatcgctacggctacgggggatttacaaggtaagaatccaaaccacggtagaactgacgtggcagtacctcgacgccgtagatcttggcgccgaggtaggcgcccagatccatgtcccctacctcggtgccaagatctacggcgccgagaacttgtcgaaatttaagaagggtcctttgaccggaactgcctccgacccgctgcctttgccaactggtgttctagtgcctatgtgtttttgtggtgatccttgcaaggttgacaagtctgaggatcatgacacctatcgacagaagtattggatgtgtgctaactatgcatttgagtcaatgattgttcagcgccggatgaatttaatgactcctccaccgctctgtgattttgagtag

SEQ ID NO: 13652 - DNA, 92 bp, Zea mays
  Peptide Sequence Number=SeqID_57027
atgaatggacaaagtgcaaatcaggagcaaagccaagaggctgtttcggtctggagcaccggactgtccggtagtgcaccggacagtgtccg

SEQ ID NO: 13653 - DNA, 105 bp, Zea mays
  Peptide Sequence Number=SeqID_57028
atggcgtcggatacgccgtccctcgctcgcgtggacgccaacgctgaggtaaagatcgtcacgcacgcacgcacgaactatacgtgcgcgtcggggcagatctag

SEQ ID NO: 13654 - DNA, 1938 bp, Zea mays
  Peptide Sequence Number=SeqID_57029
atggcggcggcgaccgtcgctgccgcgggcacggcggcgccggcggcggccatgcacgccggcatccggcgctcgcgctccgagccgcacctccgctgcccgcgccgcgcgggcgccgcgctcaccaccagccgctccatcggcgtgttcccgttccagctcggcgcggcgccgctgcgcccgccgccgctgcccgacggcggcgccgacggctcccggctgctcaccgtcgccgacgacgacccgccggaggagcctgggccggaaatgccgcccgcccggaggcccgaggcgcactggctcggccgcctcctcgagctccgctcccgcttccacgacccgaccaagcgcgacgtactcgacgacgacgacgacgacctctaccgcctcgacgctgaccaccacgacggcgggtgcggcgtgagctacgacgacgaggaggaggatgccaggtgggaccgccactccttcgccaagctgctggcaagggccccgctcggagacgcgcggctgttcgcgcagctggccttcctctgcaacatggcttacgtcatccccgagatcaaggtcgaggagctgaagaagcactacgggttgcggttcgtgacgtcgtctctggagaagaaggcggaggccggcatcataagcgccaagctggacgcggactccacgcggccgcgcaccgcgccggcgtacgaggtggcctccggcccgcagccgcgccggcccatacgaccgcacctggcctacgaggtggccgcgtcggccgcgaactacgtccgcgcgcgcgcccgcggcctgctctcgttcggaacgccgcaggcgcagctgcaggccggccacggcaggctgtacaactcgggcgtggccgcgtacatggccgcgtcgacggtgacggcggtggtggccgccgaggacgaggcgcgccaggaggcggcgcgcgacctgcgctcgccgctgtcgtcgccgtgcgagtggttcgtgtgcgacgaggcggacgcgcggacgcggtgcctcgtcatccagggctccgactcgctggcgtcgtggcaggccaacctcctgttcgagcccaccgagttcgagggcacgggcgtgctggtgcaccggggcatctacgaggcggccaagggcatctacgagcaggtggtgccggaggtcgaggcgcacctgcggagggcgcgcgcggggcgcgcgccgcggctgcggctcacgggccactcgctcggcggcagcctcgcggtgctggtcagcctgatgctgctggcgcgcggcgtggtgacgcccgaggcgctgcacccggtggtcaccttcggggcgccgtccgtgttctgcggcgggaaccgcgtcctggaggcgctgggcgtcggcgaggcgcacgtccggtccgtggccatgcaccgtgacatcgtgcccagggccttctcgtgccgctacccgggccaggccatcgcgctgctcaagcgcctcaacggcgtgctccgcgcccacccgtgcctcaacacgcacaggtcgctgtacatgcccatgggcgccacgtacatccttcagcccgacagcagcgtgtcgccgcgccacccgttcctccccgagggcgcggcgctgttccgcctggactcggagcgctcgccgacggccctggtagccagcgcgctgcgcgcgttcctctactcgccgcacccgctcgagacactgagcgacctgtcggcctacggcgcggggggcgccatactccgggaccacgagtccagcaactacttcagggctctcagtgcgctggccagggcgccaccgcggcgccggaagcaaccggagatcgtgtggcagttgcccggcgtcgagcggctgcagcagtattggtggccggggatcgccggcaccgtcatccccgcaccggtggccgtcctcagcaacaaggagctggtgtccgaggcatag

SEQ ID NO: 13655 - DNA, 82 bp, Zea mays
  Peptide Sequence Number=SeqID_57030
atggcgtggggcaaggtggcaggaaggaaccctagagaggggttcattgcagattcgtgtcgtgaggatgggggtggatgca

SEQ ID NO: 13656 - DNA, 894 bp, Zea mays
  Peptide Sequence Number=SeqID_57031
atggcgaacatgctggtctcggagatgcggcttcctctctacctcgcccacctactcgccgcgcgccgccttgacaccgccaaggacgtgctgtcgctgccagaggtggagctcatggccattctcgacgccggccttcccaccgcacgcgctgccatcgcccacgtcagcgaggccgcctgcccgccctgccagacggcgctctcacttctggaggagcgcgtgaggttaggaggcggcggccggctggccaccatgctctgcgggttggacgaggcattgggcggaggaatccccacggggaagctcactgaggtcgttgggccctcggggatcggcaaaacgcagttctgcctgaagcttgcgttgttagcagcattgccggaatattatggaggtttagacggtcgagttgtgtatattgacacggaattcaagttctctccaaggaggatgattgagattggtcagaaaagctttcctcaaatatttcgacaagaaggcttggcgcagaaggttctcatcctccacattttaatacttggtgttgacaccttttcggaggcgccaatcactcaaaagaaccagcggcggtgctctctgatagaagttgtattggttcgattattgggggttcaatcggccgtagcccttcatctatataaagggggaggtctggatccgcttccaactgatttccgagttaatcccgcggttttaggtaacaaatcccgcgagaaactaggaaccctaactgactctgcgcacgcgcggaccgtccgcgccaccaccgcggacggtccggaccgcggaccgtccggcctccgggctggaccgtccgcacggtcattttgggttccaacatatgcccccctgccttttggtgaaggttga

SEQ ID NO: 13657 - DNA, 987 bp, Zea mays
  Peptide Sequence Number=SeqID_57032
atggggcagcaagagggccacagcaacccccaccccgacgaggcggcgctcccgacgaccaccgccgcaccgtcgccgtcgccgtcgccgtcgccgtcgccgtcctcgtccaggctctacacggcgtggctggtggcgtcgtggtacgcgtccaacatcggcgtgctgctgctcaacaagtacctgctctccgtgtacgggcttccgcttcccgctgctgctgaccgcgtgccacatcacgcctcgccccgcccccgcagcagctcctccccgcgctcccaccgccagctcgctcgcgtcgcgctcctcggcgccgtcttctgcgcgtccgtcgtcgccgggaacgtctcgctccgccacctccccgtctccttcaaccaggccgtcggcgccaccacgcctttcttcaccgcgctcctcgcctacgccgtcgccgcccgccgcgaggcctgcgccacctacgccgcgctcgtccccgtcgtcgccggcgtcgccatcgccaccgggggcgagccgagcttccacctcttcggattcgtcatgtgcgtggccgccacggtggggcgcgcgctcaagaccgtgctgcagggcatcctgctatcgtccgaggaggagaagatggactccatggacctcctccgctacatggcgccggtggccgtgctgctgctggtaccggcgacgctggccatggagcgggacgcgttcggcgtggtggcgggcctcgcgcgggaggaccccagcttcctctggctcctgctctgcaactcctgcctcgcctacttcgtcaacctcaccaacttcctcgtcacaaagcacaccagcccgctcactctccaggtcctcgggaacgccaaaggcgccgtcgccgtcgtcgtctccatcctcatcttcaggaaccccgtcacggtcgtgggcatgctgggctacggggtcacggtcgctggcgtcgtcttgtacggcgaggccaagaagaggagcaagtga

SEQ ID NO: 13658 - DNA, 63 bp, Zea mays
  Peptide Sequence Number=SeqID_57033
atggatcggacggcctctgctactgctagaaatggaaagcacgcagagatggtaaggaaataa

SEQ ID NO: 13659 - DNA, 690 bp, Zea mays
  Peptide Sequence Number=SeqID_57034
atgggtctttggagaaaacaaactacccaagctcaagaaactgagcaattcgacatcaggggaattgtaaatgagtttaagaatactatttgtgcatatcaacaccagaaagaaggaatggacattgaagtgtcccatgtaaaaagaaaagaaatccctttgtttgtttttcctggtggagtgcgtccttctcgtacttctagaacaacgcacaagaacagccgtgccattccaacacgtgatgtttcagctgatgatcaagtgggaaacctattgggcgttgccagttgtagtgatgctcaacatgtaccatgtaaaggcagttatatgaaacaaccagaaccagattttgctggaggctttcagttgccaggaagtatttctctgttgccccctagcttacccaataaaaatctattgagagtgaacatccagaacactatcaggaaaaaagatgtaaatgctgaaaataacttggagatcggttctgaaaataacttggaacaaatatgcagtctgaggccccaagaatctaataataatctgaagcgtaaagtcaatcaagagcttgagcatagcagggttggcgtaggcagacttgaggatagcatcactgtcggggatggggcgatctcaggagggaggggctgcaatgttttggctgacaatgggttgaagaacacagggtga

SEQ ID NO: 13660 - DNA, 258 bp, Zea mays
  Peptide Sequence Number=SeqID_57035
atggtcctcgtcgacatcccgtgcaagaaccatggctggattgaccggttgctcgccgtgggacaaatcccgccgtggtgcctcgggtcgccgtggactagggtgtctatgccttctaggccgttcgttgcgcctagtggtgtgtgggaggtgtcgctggagtgccatacgggcggggttccggcgaagatccaccattgtgagccttgcgtcgtcggtcagagtgacggggggaagaagatgggttcggcatcgtag

SEQ ID NO: 13661 - DNA, 1371 bp, Zea mays
  Peptide Sequence Number=SeqID_57036
atgagcagttcggagttgagttccctggtgcaccggacactgtccggtggcccactgggcagtccggtgcgccagaccagggcacacttcggttgtcttttgctctctttgtttgacccctttcttggtctttttatttgtataggtgtttgctatagctcaagtcctctaattcaaaagctatttttgaaaaccaaaaatcactttaacattatttggttgaccatgtctaccagtcggactggcagtcaggtcgtgtcggcgtttcgagacaggggggtccctaagccgacgagtgagtgtgctgcgtgccccagcccagatgggtcgagcgcgtgggcgagcgcgaaggggggagaggcaaggtggccggagtcgagcgtgagagaggtggaagtcccgcggccttcgtgttcgtcccgcgcccaggtcaggcagggcgacgtgggggttcctccgaagccgaggttgagtctgccttccgttgccgtggccgagcccgagccatggggtcgggcgaggcggaagtcgttcggccgaggccagggcggagtccgagccctggggtcgggcgaggcggagttttgtcgtcttccgggtcttagcccgagtccgagccctggggtcgggcggagcggagttcgccgtcttccgggtcttagcccgagtccgagccctggggtcgggcggagcggagttcgccgtcttccgggtcttagcccgagtccgagccctggggtcgggcggagcggagttcgccgtcttccgggtcttagcccgagtccgagccctggggtcgggcggagcggagttcgccgtcttccgggtcttagcccgagcccgagccctggggtcgggcggagcggagttcgccgtcttccgggtcttagcccgagtccgagccctggggtcgggcggagcggagttcgccgtggcgcctttggcaaggcctggctgcctgtcagactcactctgtcgagtggcactgcagtcggagtggcgcaggcggcgctgtccttctgtcagactggccagtggagcggtggagtgacggcggtcacttcggctctgccgggggcgcgtgtcaggataaaggtgtcaggccacctttgcgttaaatgcccctgcaatttggtcagtcggtgcggcgatttagtcaaggttgcttctgagcgaagccaaggcctcgggcgagccggtgatgtgtccgccataaaaagggggcctcgggcgagacggaagtctctcgagctttatgctgatgggggttaccagctgagaattaggcgtcttgagggtacccctaattatggtccccgacaggtcgccaggggtgtcagggggcggttcaaccggtcatggcttgtctga

SEQ ID NO: 13662 - DNA, 1803 bp, Zea mays
  Peptide Sequence Number=SeqID_57037
atgaggatcaggctcaagatgatgaagatgaagatcaagaggatgagccacctcaagaagaggtcaatgatcaagggggagataaaaataaagaagacaagaaagatgagtaagagatacagggtcaaagaccgccacacccaagagtccacaaagcaattcaacgagatcgccccgtcaactccatctgtggtgacattcataaggggggtggaggatgcactaagagatccggattgggtgccgacaatgcaagaggagctcaacaacttcacgaggaatgaggatggcaaacccatcaagacacccataggaaccaatgggcatctcgaccttgacacgggaggcgtgtcccgctacatggcgtcgccgccgcttcccggaaaggacgctgctttcgggtccgggaccacggtgcggcgcccggggaggctgcgcgtcatgcacccgcacgtggcggagcttctccgaagcccgcgccggcacgcgcgtccggcagcggcgccgcaggcgaaggcgcaggcgccggtccccgagcgcgcgaggtgttcgacgcggcggatgcgtcggcggttgcgcgggcgcggcgcaggctgcgccgcgccgtcctcgtcgcgtacttctgggacaggaccttcgcgtggaccgacgccgcggcgctgctcccgctccgcgccggcttcccgcgcctcgccgccgtggcccccgtcgccgccgccgtcgacgccgcgctggccgaggtcgcgcgcccgcgtgctcgccggcctctcgtgctgctgcggaggcggcggggacaacgaggccaccgccagcacgcaggcgatcgacaacgccggcgtccgtgccggcgcgcccggggcggcggtggacgcggccttcgccaggcgcgcgctccaggccgaggccctcctcgggtacctctccgcgctggccaccagcccgcgggccgggggcgacagagtggacctcgccgtcgccgcggcgcagctcggggcgctcggccggtggaagggctcggcgaggggccttcccgagtacacggtcgtccacggcatcgatgatgccgtcgtcgccgcccctgggagagccaaagccaagcggaggaggccgccgtcgaccggagttgatggtcctgctcctgccaaaaggagggtgagcaggaacactcacatcgctgcgacaaaagggaatgcagcctgtgacaccggcgactacgaagcgctggagctggaggatctcccgctgggcacaccggcccagcagacgcccacgcccacgaggatcgggaagctcatgagccgtgccgcgcagaacatgtcgctctcgccggtggtcctcagggtcagggccacggcggccaacggcagcaactgcgctcctccacctccgacggctgtactgccagcgccacacatggtaaggtgcgcggtagtggcagcacacgagcagcttcctccgacgcgcaaggacgacagtggtgaccacgaagcctgggctggggccgggctcgtgctcaacttcagcagcgcacacgccgtgccttccgcacgtcacctggccacggcctttagccggttcgggcctgtcaaggaggtccgggtagacaacactacagtggtcttcgacagtgatgcgcatgctgatgaggcgttctcgggcgccgccgagatcggctccatcagcgcgtccctcgtcagcttccgtgtcacttcttcgcttcctgccgcaccagatgatcctgctgcacaacctcagactcagagcatgccgtcggacacctcgcctgttgaagcgcttaggtag

SEQ ID NO: 13663 - DNA, 115 bp, Zea mays
  Peptide Sequence Number=SeqID_57038
atggccgccgctgggcccgggctctactccgacatcgggaagaaggcaagaggtctcctgtacaaggactaccacactgacggagttcacgctcaccacttacgcgcaacgagct

SEQ ID NO: 13664 - DNA, 222 bp, Zea mays
  Peptide Sequence Number=SeqID_57039
atggatgctaatcttgaacctgagctccagatgcagtttgagacaaaccatgaggtgtacgatatgatcgtggcgctcaaggatatgttccagactcaggctaggactgaaaggttcaatgtgtccaaagcctttctggaatgcgagctagcaaaagtgacagcagttgggccacactttctccaaaaaccctctttttttggaaaaagggcaaaaacataa

SEQ ID NO: 13665 - DNA, 384 bp, Zea mays
  Peptide Sequence Number=SeqID_57040
atgattgcgaggaatggtagggaaggagggaaacgtgggatgggggcgcgaccatcgcgcggtgatgagggcggctcgcgtggtgatgagggcggtggcatttttgggaagactgggctcccatcctccttcctctccctcgcgcggcatcactgtgacctctccctcacgtggaactggcggcggatctcgccttccggtttggtgggggcgcaaaggtggcaggtatcccgacggtggctcatgcggctggtggggcgcgcggagcgcgaagctagcgggggcgggctgcatttgggggagccggggaaggaagggcacccgacggcgagattggtggcgggcgggctcggggttggtgggggcgcgagcgagataccgtga

SEQ ID NO: 13666 - DNA, 489 bp, Zea mays
  Peptide Sequence Number=SeqID_57041
atgggagcccagcccgcgcatagcctcgtgcccccctccgcctccggtcgctggagcccagccagagggaatggtgaacggcgacggcgtggcagcaacggggaagctcgtggagctcccagcggcgccaagaaggggctccccaggaagggcaaggcttcttctgggaggacattaaacaccacacaaattcctcttgttgcgagccatccagatgtgtatgagccatgtgatgattcctttgcccttgttgatgcactactctcagataaagcacaactcttgacactacaaccaaggcacagtgaaagaatcaagaatcagcctagcttgattggtttaccgcagctcgtgacacggatccagaaaagggtgcgcaagaaaggcacaactcacttcaataaatccaaggatcagaatgctaatagttcctacggcacacatgatattgtgataggatcaacttggttggactacctcagctgctaa

SEQ ID NO: 13667 - DNA, 291 bp, Zea mays
  Peptide Sequence Number=SeqID_57042
atggactccacctcgcccgaccccagggctcggactcagcctcgacctcggaagatggtctccgcctcgcccgaccccagggctcagactcagcctcgacctcggaggaatcaccgcctcgcccgacctcgggctcggaccgaccacgccgtagggggtgggtatggaaaacccgttgggtacccaaaacccgcatgggtatgggtttgggcaaaattttatacccgtcatgggtatgggttttttagcgggcgtatttttttcttcgcgggtacgggtttgggcaagtaa

SEQ ID NO: 13668 - DNA, 609 bp, Zea mays
  Peptide Sequence Number=SeqID_57043
atgcaggcggcatgcaactgcgccaagggggcgcaccctttcgacttcgacgcgtccagcatggaggcccaggcccacacgtcatgtaaccggcacgccggttactacgtgagaaaaactgcaccgccacttgcgccagtaccgcgccttcttgactgcggaaccggtgccgcgactcgaggcaacccggcgcatggcccaacagtgcaacccgagcacatcgggactgggaaaggggatactccgaaagggatccttctccacgaaggaagcgggcctcgagccctcctactgatcagaggttcgaaggctggcccctcggaagggttcgacagccgcctcagagcactcaggctccacgcccactactggtcagaggttcaaaggctggcccctcggaagggttcgacagccgcctcaggccactcgggctccgcgcccactactgatcaggggttcgaaggctggcccctcgaagggttcgacagccgcctcagaacacgcagagcgagggatgactctgggtacgtccgatacatggtcgaggctcgggctacgctcccgagttaccctaggacatttccgagaccagcaggagcgattctgtaa

SEQ ID NO: 13669 - DNA, 453 bp, Zea mays
  Peptide Sequence Number=SeqID_57044
atggcgacacaggcgaaggatctccacctcgaaggaagatgtcagcaccgtgcctgggccgtcgccgctggggtctcctccaggaactcggcccgagcagacggctcgactggccgctccgtagcctcagccagctgtcccccgaggacatctgcccggctcatggcctcggcagcccgactccagggttggtcccgccagtggacgacctggccaggttccaaccgccgctgctacgcctcctcggcctgggaagtcccttgctcctgggccgatgaagttttctttctccagccgactccgcctctgtccacgctcacaccgctgcctccggctccgactcatcgcagagcagccgaggttttccttttaactgagcaagagaagcctcgagcggcaaggccgaccgagccgagggactcctacgcctccgagatacggatacctcactag

SEQ ID NO: 13670 - DNA, 975 bp, Zea mays
  Peptide Sequence Number=SeqID_57045
atggtgaccaccagttcgatggtggggagaagcaagccgggctgtgacctctgccccgccctcagcttcaaggatcttcatcatccttgctggggcaaagggcaagctgagccagagctctacctcccatacgggccggcgggccacctcctccttcagcaatcaggggagagggcgctcactggcctagcggaggcggtggacttcgacaacgcggggccgatcagccacaagcgtcgtcagctccagcatcctggttcgctggctcagctggctctggcacagcttccggtgccacctcccaccgctgggaggagcgtgggctatctgcccgccgtacgggcggctgttgcgtcgcgcgcaccgggggaccgcccaagacgtcgcgcgctgctagggcggcgttcgtgttcttgggttgtcctgcccttgctccggtacgacgcctccgcgcggaggtcggtgctcgcccgtccgggaggactcgagtggggatctgccggttggcgggtggacaccatcattggtgcggaggtggtggccgccggagaaggcctcgtcgccgacgagatcgtcggctccatctgcgctctgggcctccggctctttggctttgatagcttgtcctcgcccctcgagtggggacgtgggcgagggccttgttgcagcagcgtctgccccgaggtcatcgctgctgctgtttggccgcccggagcggaggtcgttgtcgctgctgccggagtgggcggcggcgagccacctgggattttgtcgtcccgcaggccctccaatgtggggggttgttcgtacctgtgggagtggaaccggagttccatttgtaatggcaccttgagtgccggtgtctgttcattgtggctgtcggggcctaaacatctaggtattttgggtgtaataccgtgtttcttccttatttcgggcaccaggactcgcatgtcggctagctggaccgcttaa

SEQ ID NO: 13671 - DNA, 270 bp, Zea mays
  Peptide Sequence Number=SeqID_57046
atggcccccaagcgagctagttcgaaggcagccccatccatcgacgaagcagcgaaggcagtgctgctggctaagaaaaaaggcaaggccctcgcggacaacactcccaagaggccttcgaagatgaagctgtcagcaaaagacagtgccaagagcaccccacccccgaaggcaccctacgcacctctgcgggccctgcgcatcaagaaccacaacctccaaaagcagaaagacatcctcgaggccaagcgccaacgtgtcaccacctag

SEQ ID NO: 13672 - DNA, 929 bp, Zea mays
  Peptide Sequence Number=SeqID_57047
gtcgccgtggccagtggggccggcgccgccaaggccgtcgtggctatgctcatgccgacggatgccggaggccgtcacgccgtgggaatccacaccgtgcgcgccatgaagggcctgcgcacccgcgtcgcgccgccggaccgcggtttcgcaccatggccctatctgcgcaagggtaccgcacccgcgcgccgggggctgcaaccgcacgcgcctgggaccgcgcgcccgtgccgccacaccggacagtcatgtcgccgggacgccatgccaccgagcccgcagatggccgcgccctcgctcaagcgtcgggtcgttgtgcctgcaccgctcccgtgccaccggaggtcgctgctaaggccgcgccgctgggggaactcgcgcccgcccacgccggagacgcttccatggcgcatgccaccgggccgttacagcacaccggggctccgtcgtcgcgccgcccgccatgcgcccgcgcagaagaagacgcgctccgcgccgccggggccgtggctagaggccgccgccaccggggccggggctggaagccgcgttcgccatggggccgaggccgggggccgcgcctgcgagccgccgggccacgacgagaatacgccggcacctgtccggagccgcgctccgcgcgtgccggagctggggacaagggccgccgcgcagccatggccgcccgccctggccgagggccgcctagctcgcgtgctggggcccacgcccgccctggccgatggccgcctggctcagagccgccagaggtcgcgcccgcatggggttgcgccgccaggggccgcgccctggccgccggttgccccggagggcgcaaccgaagctctgtgcgccggcgattcctcgtcggacttcaaccgggaccacatcacgtggttgtgggctgtctgcgcagcgagggcctg

SEQ ID NO: 13673 - DNA, 438 bp, Zea mays
  Peptide Sequence Number=SeqID_57048
atgggggcgctgtcggtgcttgagttcaacgccgggctgatggagcacggagatgcacacgcaaccgttagggaggtccagccgacgatgcccatgaacgagggagggatcaggtggcgctggatatgggcgtcggtgttgaagccgagcaagggtaaggggcagcactatgcagggagcgcgcgagaaaatgatcaggatattaagattactatcctcatcaacatcccgtgcttaagcccatatttacggtttacgtacagtaacacctggggtgttacacttcttcctgccctcctgctgctcaagataaaccgtctttcccttgaactgcctgaaggggcgaggatggtcctcgtcgactccacccctgacgatgagacgttcttcgtccgcaccatcctaaccagactgctgcacaatagagtgaaaagataa

SEQ ID NO: 13674 - DNA, 214 bp, Zea mays
  Peptide Sequence Number=SeqID_57049
ccccggggaatctttgttaaggctacgtagtgagaccctgcctactcaccttgggagtgttcaagggtccgtacaacctgaggcaaaaagggaatcacagctcatgggtaaagtggcaacgaggttgatggttcttggtaatgactctggtaatggagaagatgaagacgtggaaggagacttccaggagttccaagactacgacgagttctag

SEQ ID NO: 13675 - DNA, 693 bp, Zea mays
  Peptide Sequence Number=SeqID_57050
atggcgagagtagcgtgtacccttcgtggcaagaggctggacggtggtgtatttgtgctctcggtaagtttatgtaaccgcttccgcatttccgtatctccgatgatttgtaatgtctgcgtgacgggtgaaacgctcttgggaaagggacagaggactaacgcgcctctgcgcggcctgggcctaggagctgacctcctcggccccaccagctgtcctctgacgcttctagggggggctgggggccacggtaggaccggcacaaggggccggactggcaggctggggacccccagccggtacaccagggatctagatcccgcggagagggtccagacagtcggtctgacgaaccgccatgccgctatcgtcgagggtcggcagtgtggccaggaccgccgttcgcagccttggatcatcacagagcgccggggtgtcctgggggagtatcaaggattccgggacaaaggactcaccagtaatgcccttcaccaggagttccagctcctcctaggacaaatcggtacccagcccgcgctgcatcctgctgatatcatttgggccagtgaaccagcagcacaggcgcgacctcctctgcagcggcatgacccggcacttcaggaagtcgccgaccacatgcatggaggtcataccaccggttgccaaggtcttgatcatgtccagtacgggtag

SEQ ID NO: 13676 - DNA, 276 bp, Zea mays
  Peptide Sequence Number=SeqID_57051
atgacgacggtggttctgagccccctacgaaagcaaggagacgtcagcaaggaaggtccagggcctccatgcaggagggtcgcgcgggagaacgggctgacgaacaggctcaccctctctctcgcgaacgcttgtaacccctactacgagcgcatccccctggcgcaggataacacgagccgcgttttcccccttgtgttccgtctcgcgccaacccatgtgggctgggacacgcagcgacaattttactcgtcggtccaggtgaaagggaattag

SEQ ID NO: 13677 - DNA, 480 bp, Zea mays
  Peptide Sequence Number=SeqID_57052
atgagtcgcgaaggacaccaccgggacacgccggcaccgattgtggctcgtgcagggaagggacgacgcgtagagacggtgcataagttcatctacaactattctaagttgactgcccagaataccatagattattgcaaacaggagaagctttttggaaaacacctatgcatggaccgttcggggctcttgcaacggaccgttcgcgacactagggggaggctgccggaatggaatggaatggaaggaaggctggctggacctggaggaattgggtgggtcagagttcttcccgctccagtttccgatgctcgacagattaacgctagttcccagaggatgagcaaaccggcaggattaaacaaacgatgggggagagaaagagctgcattagtggtcatcgtgggggccaatagagtcgagaatactaaagcacctggggcctgggggatagaggaagaggccacagctgaaggctga

SEQ ID NO: 13678 - DNA, 297 bp, Zea mays
  Peptide Sequence Number=SeqID_57053
atgaccgttggtggaggctgtctgtcgtatggtgcaccggacagtccggtgcacaccggacatgtccggcgaccgttggcgcgaagtagccgttgccccgcagttgcaccggacagtccggtgtacaccggacatgtccggccacgtcgtttcagcttatttgaaactagagatgtcaatggagacccgatacccgccaacccgtggggaattcccctattagggtacgagtatgggatggaaagtgtccccatgggtatggttatgggacaaaatctccacccattggataaatga

SEQ ID NO: 13679 - DNA, 1458 bp, Zea mays
  Peptide Sequence Number=SeqID_57054
atggctgagcgggaggtcgtcgaaggcgggacgacgacgggaggcgggctgtggcggaggtatgcgccgcacgtccagatggtgctggcgcagctgtgctacacgctcatgtacttcatcaccgaggccgccttcaaccagggtctcaacccctacgtctacatcacctaccgccatctgctcgtcgccgtcctcatctggcccttcgcatactacctggagaaggggctgaggcctaaaatgacgctcatgctgttcgtggagatattcgtgctctcccttctcggggtgagcttaactctgaacatgtacttcacgagcctgaagtacacgtccccaacgttcgtcacttccgtggtgaacaccatcgcctcgatgacgttcgtcatcgccatcatcctcaggatggagatcgtggacgtgaagagcctacgcggggtcgccaaggtcgcagggaccgtggtgtcgttcgccggggtgaccaccatgactctgtacaaaggagcggccatcacgagcctctggaagtcgcctgttcagatcgccggcagcggcagcggcggcggaggcgtcgcccacgacagctgggtgaaagggtcagtcctcgcagtggccagctgcgtgtgctggtccatctggtacatcatgcaggcgtcgtctctgaagaggtaccccgcccagctctcgctgacggcgtggatgtgcacggtcgggggcatccagtcgaccgtgttcacgctgttcatgcagcacgagccggaggaatggcgcatcggcttcggcgtcaagttctggagcatcgtctactctggcctcgcctgcaacggcttcacggtgttcgtgcagctctggtgcaccgagaagaaaggccccgtcttcgtcaccatgttcaaccccctctccaccatcatggtcgccatcctggcctacttcatcttcggcgaaaacctatacgtcgggagcatcgtcggaggcggggttgtgattctgggcctctacatgctgctgtgggggaaggagaaagaccaggagcggggcacgggcaaagagcgggaacagctcgagacggactgcgagaagcaggcgaagaaggtcagcgactgtgtctacgaagcgcccaagacgacgaaagtcaccgatccggtctcgcctcatcagctattctccacgctcatctgcccgacgctctccctccaggcgctcgccggcgcgatgagggactgggcgccgtcgatcatcgccacggcgctgttcgcgctcctgtgcccgggcggcgtgctgcagatgcccggccggcaccgccccgtcgacctcatgaacatgaagaccagcttcccgtccacgccgtcatctacttcctgctgctcatgctcttcctcgtcatcctgcagcctcacctctacatctgacgtgagcgtgttccccaccccttcacacaagcttctagcatgtttctag

SEQ ID NO: 13680 - DNA, 303 bp, Zea mays
  Peptide Sequence Number=SeqID_57055
atggggcgcactccgaaattctctctgccgtcagggaacagatcgattcagttgatcgcctggccagacggcgacggattccattccacgcagtctcgcagagaccggcactacggcggcgatgatgcaaccacagtccacagcgaggagaagaacacagaagacattcagaaacgccaattgttcgatgacacactacgcctacctggaggccacccacacggccacacactagcctcgcagcccactagagatgttcgccactcactcgtcgtcgtcgtcgtcgtacctgaccccgactag

SEQ ID NO: 13681 - DNA, 447 bp, Zea mays
  Peptide Sequence Number=SeqID_57056
atggccaaaagtggaccggcagtaattgcagcagatcaggggttcgaaggctggcccatcggaagggttcgacagtcgccccagagcgcccgggctccgcgcccactactgatcaggggttcgaaggctggcccctcagaagggttcgacagccgccccagaacacgcagagtgagggatgactctgggtacgtccgttacatggccgaggctcaggctacgctcccgagagggaggcatcgagccctcggaccctatcgaatgggttcgggtctggcaaatcacctgcaggggctcgggggctgctctcgcaacctagctacggccaaactgttgacagcgtcaacaaaccagctcagaaactcggaactcgaccatgcacccgggctatggccaggccacatgagggaacaaccaggccggctgaggtatcacgaaaggcattaa

SEQ ID NO: 13682 - DNA, 647 bp, Zea mays
  Peptide Sequence Number=SeqID_57057
atgatccacgacttcgccatcaccgagaacttggtcgtggttcccgaccaccaggtggtgttcaagctgcaggagatgctgcgcgcggcatggtttggagttcatacggataccaagctcacaacacttcctcacaatcttctcaacaaacatccttcaattgaggggctccttctggggtcagacggctcagcactgaagtcgacaagagaacacatggaaaaacagttagttacatgcaagtcctccgatgacccctgccgactccatcttcaacgagtcggacgagcggctcgagggcgtgctgacgagatccggctggacgcgcgcacgggccggtcgatgtgccgcgccgtcctgcctccatcgtggcaggtgaacctggagatggacatggggctgccgagcggcgactcctcggaggacgactccgacgcggcgccgcacgagcacggcggcccatccgccgccccgccatcggggcacgagcgcgtgctcatcggggaggaccgcgggggcgaggcggttggagaggatccggtggttgatggacttccagcatgcctcacatggcgggcggggattgcggagggcagcggggattgcggcgggcgggcgggcgaatcgtggctgctggtggacgagcg

SEQ ID NO: 13683 - DNA, 507 bp, Zea mays
  Peptide Sequence Number=SeqID_57058
atggagtgtgagagattaagattgctcaaagtatgcttggatggctcctccatgcgcctaggggtcccttttatagccccaaggcagctaggagccgttggaagcaatccaaaaaggcaattcttgccttctgtcgggtggcgcaccggacagtccggtgcaccaccagacatccactgttcacagtccggtgcagattgttttccaaaattggcgcagccgaccgttgaggatttggagccgttggcgcaccggacactgtctggtgcacaccggacagtccgatgcccccatccgaccgttggctcggccacgcgtcacgtgcggattgcacggccgaccgttggtgcagtcgaccgttggctcaccggacagtccggtgtaccaccagacagtccagtgatttttagccgtacgctgttgactgtttcccgagagcggcgacttcgcccgcagacgaggcaccagacagtccggtgcaccaccggacagtccggtgatttatag

SEQ ID NO: 13684 - DNA, 177 bp, Zea mays
  Peptide Sequence Number=SeqID_57059
atgcggcttcatacccttagaggtggtgtggttttatactctaagaggtacttgattcatgttggaaatgagggaagtagcagcacgtccaccttcactctcataataacgctgccgaggcacagccatgatttaattagaaacttcttgtcaaaggatgtttatttttttaactag

SEQ ID NO: 13685 - DNA, 2319 bp, Zea mays
  Peptide Sequence Number=SeqID_57060
atggaagatgacagcaggagggtggatacgatgcagatggggagcaacctggatgggagcttgctgcggagatcatcatcatggtgggcatcgagaggaaacaatgcattctggtggccagcgagggaggacgacgacgaggaggcgctgagatgggcggccatagagaagctacccacctacgaccgcatgaggaaaggcatcctgacagcagtgggtgacggcatacaggaggtggacatccaagggctcaacatgcaggaaaggaaatgcctcatccagcgcctcatccgcatccccgaggaggacaacgagaggttccttctgaagctgtgtgaacggatggagagagttgggattcagaacccaacaatagaagtgcggtttgagcatttgaccattgacacagagatctatgttggcaaacagggagtcccaacatttaccaacttcttctccaacaaagtcagggatgctttgattgctttgcacattatctcaagtggtaagagacctatatgcatccttcatggcatcagtggaatcgtaagaccaaacagaatgtctttgttgctaggtgctcctggatctgggaaaacgagtctacttctggctttggcagggaaactcgactcaactctgaagatgtcaggaagggtgacttataatggacatgccatggatgaatttgtcccccaaagtacatcggcatacattgggcagcacgatgttcacataggtgaaatgacgatatgctcactgaactctcaagaagagaaaaacatgccaaaattaagccagatcctgacatttgatgtttacatgaaggccatctcccaggaaggacaagagaacttcatcactgattacgtcctcaaaattttgggtctggatatctgtgcagatataatggtcggagactctatgatcagaggtatctcaggaggacaaaagaagcgtgtcacaataggtgagatgcttgttgggccagctaatacactattcatggatgaaatctccaatggtctggacagcgccactgcctatcagatcgtcaactctctaaggcagtcggtccacatccttggtgccactgcactcatctcattgcttcagcctgcacctgaaatatatgagctatttgatgacattgttctccttgctgagggccagatcgtgtaccagggtcctcgagaaaatgtcctcgagttttttgaggccatgggtttcagatgtcctgataggaaaggtgttgcagatttcctgcaagaagttacatctaggaaggatcaataccagtactggtgtacaagagatgaaccatatcggtacatttcagtaaatgacttcgtagattccttcaaagcattccatgttggccatgcattgcagtcggagctcgagctgcccttcgatcgaaccaagaaccaccctgctgccctcacaacatcaaagtttggtatcagcaagatggagcttctcaaggcatgcttttgtagggagtggctgatgatgaagaggaactcatttgtttacatcatcaaaatagtgcagctcataatcctaggaaccattacaatgacggtcttcctgcacacaaaaatgcatcgacacagtgttgaagatggagtcatctttctaggtgcgatgttccttggattagtcacacatttgttcaatggttttgctgaggttgccatgagcattgcaaagctgccaatattttataagcaaagagataatctcttctatccatcatgggcatatgcattgcctacatggttgatcaagatcccaatatcattcttggaatgtgctgtttggactggcatgacttactatgtcatcggttttgatccaagcatcgaaaggttcttccgccattacctactgcttgtactgataagccagatggcatctggtcttttccggcttcttgctgcagtaggaagagagatggttgttgcagacacgtttggctcatttgctcagattgtcctgctgattcttggtggattcttgatagcaagaaataacatcaagaaatcatggatttggggttactggtcctcccctctgatgtatgcccagaatgccatagcggtgaatgagttccttggcaatagttggcaggtcgatagggcagaaaacaatgacacgcttggtgtccaaatcctaaaggcacgcggcatttttgtaggcccaaagtggtactggattggtgttggagcattgcttggatacatcatgatcttcaatttactctttgtactgttccttgactggcttggccgtgagtactctccagctcaaagatag

SEQ ID NO: 13686 - DNA, 72 bp, Zea mays
  Peptide Sequence Number=SeqID_57061
atggccaatcttcgaaaatacctacagaatgaagtggcacaacagaatatcggatggagggcgatcaagtag

SEQ ID NO: 13687 - DNA, 395 bp, Zea mays
  Peptide Sequence Number=SeqID_57062
atgacagcgtctagcacgctagccattctcctcctcctgggagttgtggcgagagcctttgcaaccttcggcaattctgcttctgccggtgggctcaagatttctggcagcattattgttttttctagctctggctttttggccgcctcttctttggcttcggctggctcggctaaaggcaccttcggcactacagccgattcttcggcgctcagaccggtaggagcagcttgttctgtctcggcaatggaagatgctcattcacctaacttcgacaatgtggccatttcaatatatcttggccgatgggtcaagaccttaattttcttgcccttcggcgcaacagagatgactgaggcggcagttttccttttcttcccctgccttcacgaggg

SEQ ID NO: 13688 - DNA, 1093 bp, Zea mays
  Peptide Sequence Number=SeqID_57063
caatctacaaaggggtggcgtcctggtgacgtcctcctgctcccgtaagggggctgagagccgccgtcgtcacagagtacgcgagagcgcatcattgcctatctggcgagctagcagatgggacgccggtctgttcctgcggcccgagtcagctcggggtagggtgatgatggcgcctcctgttgacgtggctggcctgcgccctaggttgggcgatgtggaggctcctccgaagccgaggtcgagtctgtcttccgtggccgaggccgagtccgagccctgggtcgggcggagcggagttcgccgtctttcgggacttagcccgagtccgagccctgggtcgggcggagcggagttcgccgtcttccgggacttagcccgagtccgagccctaggtcaggcggagcggagtttcctatggtgccttcggcagggcctgactgcctgtcagcctcactctgtcaagtggcaccgcagtcggcgtggcgctggcggcgctgtccttctgtcaggccggtcagtggagcggcgaagttacggcggtcacttcggctctgccggggggcgcgcggcctcgggcgagccggaaatgtgttcagtggcacagaggagcgcacgcgcgcgatttgcggccgacggcagggtcccacacgacagcgatccgcggaaacgcgtgatgcggcgtgagtatggacagcggggcccacaagtcggcgccaagaatagaagctgggctgcgcggaggttaagggttaatgggccgaattcaggttcgttggcccatccagagtacgcggggcgccatcattgcctatctggcggagctagccagatgggacgccggtcttgttccctgcggcccgagtcagctcggggtagggtgatgatggcgcctcctgttgacgtggctggcctgcgccctaggttgggcgatgtggaggctcctccgaagccgaggtcgagtctgtcttccgtggccgaggccgagtccgagcccctgggtcgggcgaggcggaggccgtcggctgaggccagggcggagtccgagccctggggtcgggtgaagcgaagttcgtcgtcttctggggcttag

SEQ ID NO: 13689 - DNA, 381 bp, Zea mays
  Peptide Sequence Number=SeqID_57064
atgaagcagacactgagagatggaatcattgctggaggatgtctccaggaggtcgtaggacaagggtttgtgacttgtcatggtgacgagcctagtcatgttcttgccaagtgcctttggggcgtgagattgacaacaaatccttttcgtcatttcgaatgtggggttggccttgttctatcgtcccttggtggctgggcccatgtttgggttcacctaggaatggggctacccttatggcccttgttaccttcacgggccttctatgggataacaagttgtgcagccttgggccatggatctaagctcttcttgactaagatgcttgaggcacgactaccggaggtgcctttggaggcgctcgggtccactggcgcctaa

SEQ ID NO: 13690 - DNA, 369 bp, Zea mays
  Peptide Sequence Number=SeqID_57065
atggccggaatgccaacagtgttccctggtacccgatcccctcgtatcccggatgcaaaacgaaattgggaaggtagcgaacttgggacatgtgttctcaccacgattccggtcgtctccaggtccgcccacgacgctctgcggatttgcaatggcggcgtcgaattcccggcgccacagtcggggattccgcccggcttcacgcccacaccgtctcggatacccgcgtcttcacccggttccgcacacgagtcagatcgacggtccgccgaggatgtccaagtcgcggcgctccctcaccgcactgcactccgacgatgtttttctcgccacgtcgaggtactacttatggcggcgcaggagggttga

SEQ ID NO: 13691 - DNA, 429 bp, Zea mays
  Peptide Sequence Number=SeqID_57066
atgcctggctctcggacgcgagtggctttggagccgctcgcggcactggcgtccgccacggcagctggaagaggttcttccgccgacgagatagccagggccgcccacggaccgacctccaactctacggctttctgcccgtccttgcctcacgagtttgggcatgggcgggggcctcttggcagcagcatccgccctgagtatctggacttttttgtcggtaacagggatgtttgtgcgagcgagagttgcttctcgcggaaggtgatgagtgaggatccacttttcgaagtagtcaaaaagcacgaaagacattctggcagaagagatcttttttcgaggaaaatttcaacgcagagggggttccccgcccttttagcccccgagggagggtcgggctttgccgaggcgaggccgacccttccttga

SEQ ID NO: 13692 - DNA, 402 bp, Zea mays
  Peptide Sequence Number=SeqID_57067
atggatgaatacatcccggctgataatgatttccaccaaagaagtgtcggcgtttcgagaccgggggtcccttgggccgacgatagggggttacaagcgtccacgcgggagagggaagcgagcggctccaagcgggcgcctgtctcgtcctcgtccccgcgcgaccaaccttctctaagagggccctgggtgatgatggcgcctcctgttgacgtgactggcctgcgccctaggttgggcgatgtggaggctcctccgaagccgaggtcgagtctgtctttcgtggccgaggccgagtccgagcccctgggtcgggcgaggcggaggccgtcggctgaggccagggcggagtccgagccctggggtcgggcgaagcgaagttcgtcgtcttctggggcttag

SEQ ID NO: 13693 - DNA, 1282 bp, Zea mays
  Peptide Sequence Number=SeqID_57068
ataagtaaggacaaaaaccccgagggaaaacacccgaggtacctcttcaaccgaggaattttctcgagagtctcccgtctcgggcataactccgtctcgcccgaggtcaccatcactccgtccgtctcgcccgagctgatctccgacagccccccacacgcgctcccctccaccgtccgccgcgcgtccccaccggcggccaccgccaccggcccacctccccggcgccccttacccttctttggcgcgatggtaactcgcggcggcggtagccagtcctacggcttcccgatctactgcgccgcctggctcccgctcgcccacatcatcaagcccgaccctcccgctgccgaggcggatgcggatgacccctcctcctccaccccctcgcttccgatggctgtcctcgggggcggtggcggggagggccggagcggggtgccgaacaagctcgtggtggcggccctcgccaccggggaagaggccgcgccggctctctcccccgatacggtggtcgaggtgaatagtgaggaggaggtgccgtacagaatggccgtccacccgcgtggcgatggcgtgttctgtgccttccccaacggctgcaggcatgcactctcgtacccttggatcatatctttggagcctgaaggagagggaccacagaggttggctttggagccggaccaggatgctttagcagagctgaaagatgtcggtttgcagttggccgtatccttcagtggagaaggttcaatacttgctattggtggtgaagatgggtatttaagagttttcaactggcctaccatggggtctgttctcacagaaatcgatactaaaacatcgattaaggatcttactatcagttccgacgagaagtttcttgctgtgaataggagcagtggcccatgtagagtgtgggatttgcagtcatctgaagttgtagccagtctgccaagagaaacaggggaaatatttggattctgcagattctctaataaggctgacaacagtcatgtcctatttataactgtgatggaaggtgacattaaggccataaacaaggcgctaggggttcatttgaggtttaatcaagatggaacaatagaaggaagcatcatcgtagttggctcaaaagacatgcggacacttgtaacagttaaaaaggctcatcttggtattgttactacgctgaccttctctcaggattcaagaacattgctgtcaacttccttcgactcttctgcaagggtgacatctgttgggtctccaaagagtaatg

SEQ ID NO: 13694 - DNA, 465 bp, Zea mays
  Peptide Sequence Number=SeqID_57069
atgcactgtagcgttgtcagccgaccgttgaactcgaccgtcgcgctggagaccgttgctccgcttggcacaccggacagtccggtgaattatagcggagtggcttcccaaattcctgaaggtggcaagtttggagttgctctccctggtgcaccggacactgtccggtggcacaccggacagtccgtgcaccacgtgccatcggaacaagacattggcacagcagccgaggggtctcctgcagcccttgaggtgtcgtcccaggtgtgggctgacatctccatagacttcatcgaggggctgcccaaggtggtggggcaagtccgttatcctcacggtagtggaccgcttctccaaatacgcccacttcatcgctctcggccacccctacaccgcatcttcagtcgcatgggtattcttcgattgcatcgtactcctacacgagttcccactgtccattgttaa

SEQ ID NO: 13695 - DNA, 1344 bp, Zea mays
  Peptide Sequence Number=SeqID_57070
atgactttagctattatgattagagaaacatggttgtcggggacaaagaaaaattcatgggctggcaaagagctctgcctctcaattaagaagaatggaattggcccagttttaaggaaaaccgggcccaaaacctacacagagcgcacagtagaaaaaccggcgaacgagctaacaaacaacctagacaacgacagtccccacacacagacacatctagagtcatcgttgccaagctcaaacacaagagacgagcagctccgacttcccaagacgagccacacactgtcaaagcaactcgacgacgcttacatccagacatcgacgcaaggaataagaccgcagcgcgccatcgttgccaagcctcagcacaccctcacgaggcagctccgattattcaccacgagcaaagatccacaacgccgaactccgagagcgagcagacgcctaaagcgacaaaagcccggacaccatcgagccaagcggagtgacaaagagcctccacaacacggacgaacacgcaaactggaggtcttctgggccgcgccttcaagaaggagaaacaacgtcgaaaagccgtcgccgcccgcctggtacaaaccaagcaaagtttcctccgaagacctagcagagcagtgtagatcgccagcaccaaggagaaagctgaagggtcagccacgccgatgtcaccccgccaagccgccgcgtgatgtcaccttctgccgtccaccgacgcaccaacccaccagccccaaccctcagagccccaacgccggtcgagcaccagcgagagaccccaagaaggccgaggcgagggttcccgcatggggcgagaggtccaaagacggcaccctcaatagggtaggggtggcgcccgcgggcgtcaccgctgtccgcccgcaagcgagcatggctttcgccggaggacctcccaccacacgccccaacgcacggagccaccccgaccctgcccacaccacaagccgaaacgagaggagagatgaatctagccggagaggctcaagatccggcccccagccccagacccaaccagagggccaccgacgcgccagctaccacaacagtcgcaaaggagcgccgcccgccaccccctccggctgggcccaagggcctggtcgagcagcggcagcacctcgcgccgcaccccccgccggccatccctggcagcagccgatgcgacgcgccataaccgctggcacacgcacaaccgcaaacgccgccggggccactactgtccacttgccgacgccacacaccaccggagccagatcctccgctcctcgccgacgcacggttgtcgccccgtccacagtagtagtctag

SEQ ID NO: 13696 - DNA, 222 bp, Zea mays
  Peptide Sequence Number=SeqID_57071
atggccaccgcctctgccgctccagcgtctgtggcgccgtcccctgcgccaaaggccaacaacagcaggaaggcggtggtgcctgggatgactgggtacgagctgctcaagcgtgtcaaggagtcgacggcgctcagggacatcctcgtcgtcatcatgtcgtcggagaataagcccacccgctgtctggaggagttcgacccgcgcctcgccgtaatttag

SEQ ID NO: 13697 - DNA, 1011 bp, Zea mays
  Peptide Sequence Number=SeqID_57072
atggcgtccacgccacggacgccggcgccggagcggtctccgccgcccgtgcccactcctcctccgcctctggaggacgagccgccgccgtatctggccgacgggtcgccgcgggaggaggccagcttctccagcgacgggagggaaggagcgccccccaagaacccgcagctctcgcccacgcaccacgctgcgccacgcctcgtgccgccgcccagcagcccagccaggcaagacgggcaagaacaagaagggagcgctaataaggccgccgcggccacggcggagccggcccgcgagccgctccgccagatggcgacgggcctcgcccggccactgtcgtcgcagacgtcgcccgccaccaccaactctcctactccgtcggcgtctccgacgccgtcgagtcccgcgcccgtggccaacaacagcaagaggagcggccagagcacgcccaagcgcgcggagacgaagctgccgctgtcgtcgccggccgtcgcggtgcacttcgacccagtcgaggaggccgtcacgtcgccgctgcgcctcggcaaggcgcgcctcgaccagcagcagcagcagcagcacgcggcgggggcggcggagagcggggcatccgtggtccccggtgtggcggcggccgtggccgcggtcgccgagcggagggagctgttgctggcgctgcgcctggccacggcggtgctcagcctcgcggccttctcggtgatcgccagtgcccggacgtccggatgggccggcgactactacgcccgccacctgcagtacagtcatttggggcaaaatccgccacctggtctcacccaggttctggcgtacctcctcatgtcggcgtcgtcggcggccgcgtcgcgcaacgacctgtgggtgtccaggttcggcacggacgccttcgtcaggaagatcaccggcgccctgtggctgtccttcgtcgcgttcctggtgctcgctctgaacgcggtcatctccacggctaatctcttcagcatggtctga

SEQ ID NO: 13698 - DNA, 4434 bp, Zea mays
  Peptide Sequence Number=SeqID_57073
atgtggtcacaggtcccaaaatcaatgcatttcttccttagtgctcacttagatgagaagaatgtaaggcaaattatacggctgcttttatcgaaatttggcagacgtcaacctgttcgatcagacaatgagtgggctaacatgtggcgtgatttaaaactcttccaagaaaaggcatttccttttcttgattcagaatatatgctggccgaatttatcagagggctattgaaagctggtaaattttcgctagccaggaattatcttggaggaaccagtgcagtttctttatccacagagaaggctgaaaatcttgtgatacaagctgcaagggagtatttcttctcggcttcaactttatctgggaatgaaatttggaaagccagggaatgcctaaatttgttacctaatagcaaaaatgttcaagcagaaactgatataattgatgctcttactgttagacttccttatctaggggtgactatccttcctcttcagttcaggcaggtaaaggatcctatggatatcatccgcatggtgataacatgtcaagcaggtgcataccttcattttgaagagatcattgatgtcgctaaacttctgggattaagaagtgaagaggaagtagcggatgtggaggaggctattgccagagaagctgtggtaaatggtgatcttcaacttgcccttgatatctgtttaaatttaacaaaaaagagtcatggtgcagtgtgggatttatgtgctgcaattgctagaggccctccacttgacaatttggatactggtacccgtgaaaagctattgggtttcgctctcagccattgtgatgacgattctgttggggaattgttgaatgcttggaaggagcttcatgctcagggtacttttgagaaattaatgattacaaccgcaacaaatcctcccaatttcttgattgatggatcttcaatcacaccacttcctgtacaaagtgtgcaagacatacttgacctgagagatgacaatggccatgatagacgtagcgaccttgtgggaattgttaaagacatgctgtcaaaagtttgcttggacttttctaatggagacacacataattgggagtctatgttggaagaaaaccggaaattgttgtgctttggagcactggtattaccatggcttttgaaattgttcagtaatgaagcatgtgatggtgaaataatggatcatctcactaggagatgtcgattttcaacaaaagtaaaagcagcaaccagtatcatatattggttagttataaatggtttggcccccaatgataatataatcatgattcttgcaaagtctataatggagcctcccattgatgaagagtttgatgtacttggctgctcggttcttttgaatctcatggaccctttcaatggagtgaaaataatagaggaagagctaaaaagacgagaatcttatcaagaaattagcagcataatgagtgtaggaatgttatatagttccctcaataattctaagaaagagtgctccactcctgaacagaggagaaacctgttgcttcacaaatttcatgagaagttcacctcagccgataccgatgatttagaccaggttgatatggcaaatacaaccttctggagagaatggaaatcaaagttagaagaggataaacaactggctgatcaagcgcggatgctcaagcagatattacctgatatagacacatctcgattcttgtctggtgatgttaattatatcaaaatagtagtttactcctttgttaattctgtaaagatggagaaaaaacacatactcaaggaagcagtgcggatagctgaggcatatgggttgcaacgaactgaggtgcttttacgatttctcgcctgcagtcttgtgtctgaatactgggataacaatgatattctgaacgaaatttctgaattccgggaggatattgtcagctcagctaagggtgtgatcgatatgatatattcagatgtctatctggagatagatgggtataataaacaacgtctttcttacatttacggcattctttcagcatgtcattcatatctgaagaggaccaatgagatagaattgagatacccagtgcatgtgcatacccataagcttgaaccatttcagtactataaggtacttgaggaagagtgcaagaaagtctgcttcattgatggcttgaactttaaaaacattgctggactggataatctgaactttgagcatttcaatgacgaagtatgcaagaatatccatgcctccaccgtcactgctatagccgatatggtacagtctcttgtgagtatgtatgttgatgtactggccaagggactcatatcacaacaaggtgtttacaagcactatgttctggggttgctggcatcacttgaaggccgcagtgaagcacaatcgaacaacacagattatgaaaagttgcaggcttccctatgcgaatttgagttgaactatgatagttgcagggagtacatccaagctcttccagccacagatatttcatatattgtaagaaggtattgcaccctttgctttccatctaacttagcacgaagccatccacaggaaccttcatggaggaaacctcttgccacgctactagaattttggtctaaagttgttgatgacataccgggggattcaattgatgcttgctcatatggaagaacagactacttaaattcaaataggttatctctgtgcatgagagctttcaggcagctattaataattgatgagatagcactgcaccaaggttgggatgccatttccatgtatgtaaaagattgccttagaaatggaaagatgatggaaacaccatgcttttgtcgagctatgattctatcaggctgcagttttgaatctgtagttgaagtatactttggaggacaaggacagttagggagtgagaatgcagatccaagcaattatttggacctcttagaactttataatgctgctacagaaaagtgtttgtcggatttgagtgaggaatcttgcgaatatcgaatattgcttcataatttgctgtcatctttgagccggtcaacgggaaaacatgctggtgctctagaaatggtcagatctggtgtttgggggaagttaatccgctattcggaagacatgcagctagagagccaattacgagtctatgcactacagctgatgcaatgtatcacaggaagaaaccttaaatctcttccaaatgaaatggtgtgtcaggttgagccatgggaatcatggtatgagcatggagcgggtgctgccatagctgatgagagtatcaactcctctagcagcatcacagggactcttgtcgcacttagatctactcagatggtcgctgcagttctgcctgacgctaatatcactccagaaaacctagcaactcttgactctgcagtatcttgttttttaaaattgtcagaacgtgcttctggtgtgagcgttgctgtttttgaagcagtgctagaagagtgggagcaattgttctcccccaaagaagagcatgttgcacctcatgaatcaccaaaagaaacaagtgactggagtgatggatgggatgatggctgggaggcgctaccggaagagttggagagtccaaagaataaacaagagggtgtgttgttatctgtgcatcccctccacagttgctggatggagattatcagaaaacgtgttgaacttggtgagctgcacaaggtacttgaacttctagaccgagcatctttgaaacacagcgtgttcctagaggaagaagaagcacacagcttggttgaacttgtatctgctctggactgcttcatggcccttaaaactgtgttgctactcccatatgaatctctgagactgcagtgcctgcagatggtggaggtgaaaatgagggaaggaatcgtgtccacctcatcaaatgctgatgatcaggagctccttgccttggttctttcctctggaactatgcagaagatcatcacagaagaggcatactctaaatttttctcttacatatgccatcttgtcgggcaccttgcaaggtcattccagactgatctcctcgtacaatggaacgaagcaacatctaagatcaacagatctttactgttcgctagagttctgtttccatgttttgtatctgaactggtcctcggagggcagtatcttctggctgggttcgtcatctcgagatggatgcacacacatccatctctgggcctgatggatatcaccgagaccagtgtgcgatgcttccttcaaggccaggttgcccaacttgatgaggtgggagggagcgatgctgctctcactgacggtgaagtttgtgtaaggcacacaatctccaccctacagccgaaacttgtttctcttctgcagtctgcattagctctttcgaacaaagagttgtag

SEQ ID NO: 13699 - DNA, 393 bp, Zea mays
  Peptide Sequence Number=SeqID_57074
atgtatgatgttgaggatgagcgtctcctcagtgataggatggccaaggtcccagaggccctccaccatgcgcttgaagcaacgacagtagtcgacgacggacatatcaccctgggagaaagcttggaactcctggtcggtatagagagcgtgggtggtgcggtttccaaggaattgggattcaatggcgacccagatcacgcgggtggaggcgccgcgctcggaggcggtgccgacgaggtcgttggagatggcgccaagaaggcaggtgcagacgcaccgttcatccgcacccaggaaggagatgctggggtgacggtttcggagagggcatgcagttccaacgagtacttgttgaggacgtcgaggaatgactcctttgagcgggcgtag

SEQ ID NO: 13700 - DNA, 466 bp, Zea mays
  Peptide Sequence Number=SeqID_57075
atgcacatcggtgctcggaatgaagagtattatgatggtggtgcagagtccggcctcggcggtgctccgggtccgggcgccggcggggcgagcgtcgctgcggcctcgacggtgaatgatacagccacccagtcgggcgtcggtggtgctccggcttggctgcgctgtgccgatgcgtgctgcggcggcggccccaggctcatcaagaacgccgccgccctcttcgccgcagccgtcagccccctccactcttgtgaacagagcacaaacgcgcgcgcttgtagaatgcccgcctttcccgtccgcgcctccgcttcgtccagcgtcgtcggtagcctcaccggtacccgccgccccaggctcatcaagaacaccaccgtcatcttcgccaccgccccctccaccctcgtgggatgggacaataagtcggcacggacactcatgtatgaccttgctgggcgcgagg

SEQ ID NO: 13701 - DNA, 132 bp, Zea mays
  Peptide Sequence Number=SeqID_57076
atgcccccgccaccaacgccgcgcgccatcaccgccgtcggaagccacctcctcgcgcgccgcaaccgcctcccggccacgccacgcgtaccatcgtcgcccccacgcgagagaagatactcgtcttcctag

SEQ ID NO: 13702 - DNA, 783 bp, Zea mays
  Peptide Sequence Number=SeqID_57077
atggagcacaagaggccggttgtccgccgccaggagcccaccgtcgcaaggacggaggacgacgtggcttccggcgacgaggaatccgacgtcgagttcgagttccccttcgtgagccaggagtccggcgcgggcgcgggcgccgcggcggccgacgagctcttcgcggacggccgcatccgcgcgtcctacccggtgtttggccgagtcctagacgaggccgcggcgccggcgccgagggcgccgctggggcggctgttccagctggagcgggcgcggacctcgtccgtcgcgtccaggtcgtcgtcctcgtcctcgtcttcgtcgacggcggcggacgcggacgcgggcgtcgacggcgcgtcgccggacagctactgcctctggacgcccgggtcgtcgccggcgtcctcgccctcgcggccgccgcggaagagcgggtccacgggctccgtcgcgcggtggcgccgcatcggcgagctcgtcgtcggccgcagccacagcgacgggaaggagaggttcctcttcctctccgcgccgccgtccccggccagggacagggaccactccacggactccaaggcgaagcagccttccagagcaagtaaatccgcagccgccgagctcgacacggtccccgcggggcgccggatgtcctacggcggcggcggcggcgccaaggcgtccaccggcggccggcgcacgttcctgccgtaccggcaggacctcgtggggctgttcgccagcgcgcacgggctcagccggagcaccctgccgttctga

SEQ ID NO: 13703 - DNA, 609 bp, Zea mays
  Peptide Sequence Number=SeqID_57078
atggcgctctcccccctcctccttgcggaaaggcaacgcaggggcaggctcgggggctgctctcgcaaacccggctccgaccgaaccgttgacagcgtcaacataccagcccgagaacttgggacccgaccgtacacccgggctacggccagctcgcatgagggaacgaccagaccagctgaagcattacgcgaggcattaagacctcagaggagtcaaaccactcctccgaggcctcgggggctacacccggcgggtgcgctcgtgcgcacccaccggaacaaaacgcaaccgagaaaggctggtccccttgcaaaaaagtgcgacgaaagcctccaagcgagtgctaacactcccttcgaggctcgggggctactgtcggggaccataattaggggtaccctcaaggctcctaattctcagctggcagtcaggaccggccgcaggcaccataggaagctccgcttcgcccgacccagggctcggactcgggctaagccccggaagacggcgaactccgctccgcccgacccagggctcggactcgagctaagccccggaagacggcgaactccgctccgcccgacccagggctcggactcgagctaa

SEQ ID NO: 13704 - DNA, 822 bp, Zea mays
  Peptide Sequence Number=SeqID_57079
atgaacgcgctctcccgcgaagggtgccggcacttcgaggccttcgaccaggtggatgaagattttgagcgagacatctataaggtcgaagaccccgtagtgaaggagtccgccggggccctttacgaccggatgtggggtctgtacggtcgtgaggtggtcagggagcgcgccgaggctgcgagggctcaggcggagcgcggcgagcgggtggacgacttcggggctctggacagcgcgctgccagacctggggtcgaccctcgcggaggctgtgactggggtcgccctggagccaaccccggagaccgcagcgatcgcgacggctgccctcccatccgctgcgactggcggaggcggcgctgacgcccccgcagccgctgcgccgagtgctgaaggttccgcggcggaggcggcggaaactgcagcggaggccgcggcggagcctacggcggagccaacggcggaggcttccgcagcgccagggccttcacaggagtcgtcggaggaggacttggattattttgcggccttggacgtggctgcggcggaggtgtcgccccatgccgcggacgcgccggacgtgccaggccctagcaccgggcgccgccgacgaagggcggttgcaaaacgtagggttagcacggaggagggggctcggcttcgtgtgagtaaggttggtcggcaggaactgttgtctttgccggccgccgcgagcaccggggaaggggaactgcgaagtctttttgcgggtgaggagcttaggataatgttatttaattatagggagatggggattattcctaaggtggagccgatgtag

SEQ ID NO: 13705 - DNA, 738 bp, Zea mays
  Peptide Sequence Number=SeqID_57080
atggggcctgaccctcgtagcaccaaatcatctcctcgtcctcctctagtccttattatgagtacagttttacatttaataggatataaaataatatttctaaaacagattgaagcatcaaaggggtcggacgagggccagcttgctatagttgcgcctgccgcggcgatcgcgacggctgcgcaagcgccgaaggcgaggggcgagatccttggcgccggaggcgaggtgccagccctcgcgttggtcagggacgaggcgggcgcggcgacccgccggctgaagggagtgacggaggcgctgagtcaggcgacggaggtgctgagtcaggtggctgatttcaccagccgtactgcgtcgggggcccttacggcggctttgtctgccgaagtcgagagacttcggacgcaacacgctgacgctgtccgtgagaaatcggcctccgacagcaagtgccgcaatctgacagacaaggtggccgccctggagagggagaaagttgacctccggcgccaactggcggcggagaggagggaagccaacgaggccatcgccaaggaacaggctgcgcaggcggatgccaagctggcgcgggcggagggcaatcttgccaaggagctcgccgaacaactgcaagggcggctcaccgccctggagagccgcgcgaaggaggccgaggccgcgatgcgtgcggaggcccgaacggacgcgcacgcagcttatggatacatatcgtga

SEQ ID NO: 13706 - DNA, 210 bp, Zea mays
  Peptide Sequence Number=SeqID_57081
atggaccgcgcttggctattgccaccacctgcacgccccgcttgtgacgcaagaaaggtggatcacctattcaggccgagagccatcctcgtcccaaaatcctcactgcagtcgacgaccacctcccatctacaccaggaccaagaggctcatgctgcagaggcaatttgccgatacaagaagagccaagaagagcagttggatgagtag

SEQ ID NO: 13707 - DNA, 1263 bp, Zea mays
  Peptide Sequence Number=SeqID_57082
atggtggggtggtcctgcacttgcgatgggatgcaggccgatggtggtcctgtgcgctggatggcgacaaggggattgtgttgcgattccttccatggcggcgaggcgtggattgtgtttggggcgcggaagatatgggtggggcatccgtggtgcatgggaataatgattaggcggggtggtcctgcgcgtcgtcggctatgggattcctccgccgcaggggtagcggcgcccctcgggtctcgtctgctccgcctcgtcgcgactcgagccaccactaccccttcttctcccactacttccacctcggccatatccaccgcgtcaccagcggggcattcccgcaaggacctgtcaggtagggacggcgccccgtcgaagcccaccaagccccgggtgttcttcctcgacgtcaatcctctatgcttccgcggctcccaacgcaacctcggggccttcgcgcgctggctggcgctcttcttcgcgcacgtcagcctccgtgaccctgtcgttgttttggacggcgatggagggaacgagtactggaggcgggtgctgccttcgtacaaatcgcatagggctcgcggcgttggcactggcgctgacacgcgcgtcgtcaacgttctctgcgaatgcaatgtcccggttgtaagagtcgatggatatgaggctgatgatgtggtggctaccttgacagaacaggttctacagaaaggttacagagttttcaaagcctcaccagataaagacttcaagcagctaatgtctgatgacgtacagttagcagtcatgcccattcctgagattggccgatggtcttttagagggcccgttatggccaatccgcctgcttcggatgtgcagtccgtgctccactgctccacctgcttgcaaattcggctgcttgcaaagcctgacgcccggcagttgcaaagtgggatatcaaagtctcctagagggtgcttcatgggtgatgaagcagatggtgttccaggaatccagcacttggttctgggatttggcagaaagactgcacttaaactactgcaaaaacatggttcattagaaaacttgctaaacacagctgcaattagaactgtcggcaaaggttatgcccaagatgctctcactaagcacgcagattacttacgggatgtaaatgttcagtttgatgatagttggctatccacgaggaacacaagcaatgacacctatgttctagcggacttcattcttaaacttaatggcgaaggcagaagctaa

SEQ ID NO: 13708 - DNA, 324 bp, Zea mays
  Peptide Sequence Number=SeqID_57083
atggcatccaacggcggggatgacgagcgcctccaggcggctccctggccggtgtctttggacgcggggggattcaaggtcctctcgcttgctgaccgggtttttcgattcacggtttcttccaaggatgttgggttccacatttacaactctagatgcattgtccgtccggaattcaaagccttcttcaacttgtggaactctggtggaccaaattggaattatgaactcagattattccttcaagaggagaatgccaactggtggtttgttaagggcaggaaaaaatctcgttcgctgatatggttaggcgtccgccgttga

SEQ ID NO: 13709 - DNA, 804 bp, Zea mays
  Peptide Sequence Number=SeqID_57084
atgaaccatgttggcaaaggaaacgtggacagatggctccatatgctcatggataaccaacaagaagatcatgctgcgtaccattcttcagacgaacatgataatgacgaggagaatgcttcggatgagcagcgaacgcagagccgggttgacgaagagagctgcaggaatgggataactgaatattttgatgagatcgtcgaggtcgaggacgagattgtttctgaccagggagcagaaagagggaggaacagctttggaattaaagacagagaggaaaagaagatttggttccataggactgacagcacctggggtttccggtcactgccatcatcaccctccatgatcctgggaatgagaaaagcactaagtttccgcgcccagcagcctgtgcagctgcgcctcgacgctagagcccaagacgtcgcccacgaacctgtacacctgagcgaagcacaggtcgtccggagacagggggaactgaacagtctcgacgtcgacgcccgggaccgaggcaccattgtcagcgcactagatgattggttctgggctaatttgaagcaagatttaagtctcatgaaaggagctaatttgaagcaggatcttgtttccatcattttttgtgctatcaatacaattcaagtggcgttcagcgtcaactgctggtcagaaaaaagagaaggcagtacgacgcttgtctcctcccccagcgccccgcggaggcgcgagcacagccacgagaaggtgaggcccgagtccctgaggttcagcgccactgcgccgaagccagcgccgccatga

SEQ ID NO: 13710 - DNA, 224 bp, Zea mays
  Peptide Sequence Number=SeqID_57085
acgcacgaggacctcgcgtcctccgtgagatcgcgccttcagtggaggcgaaacctgggggcggctgcgatgtcgttcgggcccgcagtgctgccttcgcagcctcgtcagccttcggggcccgttacaatgggccggaccgcacgtgggcctctgagctggacgaagccgcactgtgggatgccttcgtcgccggtcttcgtctggtgccgatcaagcgaagg

SEQ ID NO: 13711 - DNA, 408 bp, Zea mays
  Peptide Sequence Number=SeqID_57086
atggatgaacaaagtggcaaatcaagagcaaaggaaacagaaagaagaaggaaaagagaagagtggactggtgtacagcccaagagggctcgtttcgggtctgggggcaccgggacttgtcccgggtgggtgcacccggacagtgtcccggaaggagatcgggcaccggacagtgtccggtgtgcaccggactgtctggtgcgcccgatgacagaaggcaagatcagccttccagaattgctctcaacggctcctagctgccttggggctataaaagggacccctaggcgcatggaggagtacaccaagcaacctaaaagcattcttgatcatccacactcagtctttgcgcattcgtttgtcattctcagtgattcgagctccgttctagtgagaactttgagatag

SEQ ID NO: 13712 - DNA, 267 bp, Zea mays
  Peptide Sequence Number=SeqID_57087
atggtcgtcgtcgtggctacggcgggcgtggtggtggccaacagccccctggaagggatgtggccatatggtcgccctccgcctcagccggccttcaccgtctttccacagtacggcggatctttcggcagcgctcccgacggcggcgtctacggcaccggctacactgcgcccccaccgtatgtctatgggggagctgtgccctcaccgtcgacattccaggggccgtcggcgccctatcaggcggctgcacaggcgccctggtga

SEQ ID NO: 13713 - DNA, 219 bp, Zea mays
  Peptide Sequence Number=SeqID_57088
atggccatgatgggttcaacatcggaaaagctgtacctctgccaggtaccaaactttgggtttgaaatgataaagctgagaccaggtggactaataccagaaaggccaacacgcaatgggagtggagagatggcgagagtagcatgtaccctccatggcaagaggctggacggtgatgtatctgtgctctcggttggcgtgaacccggtctggtcttaa

SEQ ID NO: 13714 - DNA, 564 bp, Zea mays
  Peptide Sequence Number=SeqID_57089
atgagggtggagtgggacgcccttagcttaataattagaggaactgaggagccttggccgtacccctccgcacgcactcaagcctcaccggagctcagttcgccgccgtttgcccatacgcgacgtgcccgcggccacccgagcccctgccaccgtagaccggccaacccagccactcccaaccccgtccagccctcggagaagactgtgcacgtctccgtgaagctccctgagcgaggaatcgggctctgcttcaccggagaggccggcccaaggtcaccggacttcaaccgaccgtcggcaaccgtggaccgaggtacaccgtgcacctcccttcgattccttgcacggttagactccttggacctccacgaagctccctatgcccttggattgaactatgccgccgtggataggccggagcacacgccgccgacgagctcgcccgcctgctcacgtggaccgggcgattccggccatccccgacgacgagccgtacctcgacatgatcgtcggaccctccccgagccaaccctacccttcgtcggaactccctcgccgccg

SEQ ID NO: 13715 - DNA, 409 bp, Zea mays
  Peptide Sequence Number=SeqID_57090
agtcaacaacgagaccggaatatcagagacgcctagttcctaccctctgcataccgcaccccggatagctcaaccgcccgagccaaagcgagtccttcacgcgccgcggctcggccctccccggcgagcccctcaccgctactcgccctccccgtcccccggcgagcccctgcccccggcgagcccacgcgcgctggcggtcgcgcctcggccccacgtgccgatggccgcgccccggtccccgcgccgcgccctcggtcatgccctcggctgcgccctcgcacgcccctgcccaagcccgtgccccggcctcgcgccccgcgcgcctgcacggttcgcgtgccctcggcacgcgcagcgtgctctcgtgcgtgcgaccgtagtcatgcttcgtttaaccctcgtttaa

SEQ ID NO: 13716 - DNA, 615 bp, Zea mays
  Peptide Sequence Number=SeqID_57091
atgcaagatgccgcacggcaagcgcaatcgcactactgctcggttctcggtggggtagccgacggtctcaacctaaagtattacccccgtcgtccatctggcagcacaggaggcgtgattgtctcacctgttggtgaggacaatcctaggttgagcagcacagtcaacctagccgtcgtgctaaacacggagctggaccatgcactagacgagctgagtagggctcgtgttgagatcgcccagctatgggctgagcacgtggagcgtcgtcacctggatgatggctcccccgctcccgtcgggactcagcacccgtaccgctcacctcgagtgtggatatcccctgcatttttggtttacctgttatatgttaatgaagttagttatctagttaggaagcctttcattccactttcctctttatctgagaagctatgttggtctgtgttggagatcagtgaagatgttcatctgttcagtgttgtggaagaattctatgctctcttcttatgctgcaagatcagttctgatgtgtggttgcattctgcagatgtcagaaaacaggcgcagaggaggaaggcatgctcaacaggagcaggcagcaccgcaggatga

SEQ ID NO: 13717 - DNA, 693 bp, Zea mays
  Peptide Sequence Number=SeqID_57092
atggcgccatcacgacgtccagctcatcatccacctgaagcccaacctgccactggtaatctctactactacataagacgctattgtagacgtccacaactatttggtgcacggttctgccaatccgtcatcaacgcgcacgccaaggttgtcgcggatcccccaccctcctccccatctgctccccgccatcaacgcgcacgcgccgcgccgcgccgcggatcccccaccctcctccccctctgcacgccgccatcaacgcctacagtcgcgtcacgccgcggatcccccactctccgttcctcgactgcggtccccgttgcaagtccaacccgttcccccaattcaacaccagcctttgcgcatcgcaacatcgatatcgggaagaggaaactcgaaagcccggcgagcggtatggcaaccggcgaggagcacgtggcggcgccggtggtcaaggagacgtcggagaagaagcaggccagcacaaccgcccgcaccctcaggctagacgaagaagcgtctgtgctcgtcgagcttgatgccccacagtccaagcgtatctggccaaagccggtggcattgctgccagccaaagcggcaaatgagaatatgcagagcagtgtgaggcatccgaggatgcctgacgaggctgggtgtgccatctggttgttggtgtctcaaaagggcctctaa

SEQ ID NO: 13718 - DNA, 564 bp, Zea mays
  Peptide Sequence Number=SeqID_57093
atggggaagcctgtcccatcactcctcatgctcctcctcagccgaggcggggtcccactcgatagtccaacccagtggcaagatggacggccaagtcactccagcaaccatgtcctccaaagaacctgtaaaaattatgccacaagcaaggctgagtatactaatactcagctagacttacccgtgaccgcacttgtacccaccataaccggaatgggagaccatgtctcaggtcgcgtgaggggcaaagtctactgccaggttcaatcaggatggagcagagattttaccccggtctacgttcacccggcggtcgagcgaagtccggcgacccgtggactggctttttccagcgaagcaaagttcgattccaagttcggggagcttcaccgagtcatgtacagtctcttccaagggtcgggcgtggctgggaagggctctgttggccggtctacggtggcaggggctcgggtggccgcgggcaccccgtgcgcggggcaaacgccggtggttttgggctccggtgaggtcgagcgtgcgcggaggagtacgggcgacacctga

SEQ ID NO: 13719 - DNA, 1098 bp, Zea mays
  Peptide Sequence Number=SeqID_57094
atggcgacagcaggcgggcggaagcagcagtcaaatcgtctgcaggctcacgtcccctcttggagcagtaggggagccctctcccacggcgtgaagacaacgcgcccgtgttccgtccctcgaacggctcacgcaacggctgccccgcgaaccacacgtcccgtcgcattaacttcgcggcagggcaggcggcacctttggcaggcgaagcgggcgacgcttcacctccgccatgatgaccgtgtcaaaaaagggaccgggaaaggggatattccgaaagggatccttctccgcgaaagaagcgggccccgagccctcctactgatcaggggttcgaaggctggcccctcagaagggttttcgacagccgcctcagagcaccctggctccgcgcccactactgatcagaggctggcccctcggaagggttcaacagccgcctcagagcactcgggctccgcgcccactactgatcaggggttcgaaggctggcacctcgaagggttcgacagtcgccccagagcatgcacagcgagggatgactctaggtacgtcggatacatggccgaggctcgggctacgctcccgagaggctcgagggctgctctcgcaaacctggctacggccaaaccattgacagcgtcaacagaccagcctgagaactcccagaccgaccaaggcatcacaaaatgcattaagacctcggaggagtcaaaccactcctccgaggcctcgggggctacacccggcaagagcattcaatgcaaggatcgcctgacaccttatcctgacgcacgttcctcagttggtagggacgaagcgcaaccagaggtctccgcctcgcccgacctaggggctcggcccccgcctcggcctcagaagatggtctccgcctcgcccgaccctagggatcgacctcgacctcggaaggtagtctccacatcgcccgacccccggggcccggcctcaacctcgacctcgggcggaattgcatcctcgcccaaccccggctcagcctcaggaggactctccgcctcgcccgaccttgggctcggaccgaccacgccacaggggggatcatcattaacctacccctag

SEQ ID NO: 13720 - DNA, 315 bp, Zea mays
  Peptide Sequence Number=SeqID_57095
atggagcagagatttacccggtctacgttcaccggcagtccgacgaagtccggcgaccgtggactggcttctccggcgaagcaaagtccgattccttactcggggagcttcactgagtcattagtgcatagatgtgccatagccatggtaactgttgggaccatgcttcgtcgccgaaggtgctgcggaaagaaacagcttcggctgaagctgcttgaacatgatgacgaagacaccgtttgcaaagcttcgaaactacagcaaactacagcatatccgaagctgaagggtcgaaccgacttaaagatagaatga

SEQ ID NO: 13721 - DNA, 630 bp, Zea mays
  Peptide Sequence Number=SeqID_57096
atggctctggtgcggaagtttggtaaaccagacatctttcttaccatgacatgtaaccccaactggaatgagataaggagggagcttcttcctaggcaacatcggaaggactcatacccgatttacagacgtcgtgatgatgggcgcaaggaaaaggttcgagggtgcgaattggacaatagatgggttgtcccttacaacccttacctccttcgtctcttcaactgtcacatcaatgttgaggcatgcaggatcatcaaggctgttaaatacctgttcaagtacatatacaaaggccatgatcgcgcgtctgttgttatgagagatgcgagcaaggcagatgatgatggagatgagatcaagcagtacagagatgcaaggtgggtgactcctctagaagcgttatggaggatatacgactttgagcttagtcagaactctccacctgtgatgcaactgcaactctatcttccaaacatgcacaaggtgtcgtttcatgaacggcaaatggtcgagcgagtcatcaaccgtccaggtgccgataggtcaatactcacggcatattttgaagcgaataggctacatgagggggctcgtggcatcctgtatcgtgacttccctgagtggtag

SEQ ID NO: 13722 - DNA, 432 bp, Zea mays
  Peptide Sequence Number=SeqID_57097
atgacttcttgccacaatactggtgtactgaacatgctgcagtcaatgggaaaggatataatgacattccatcttcctcttatcatcgacgcgtatgacgatgcaattgatactgctagggaggtttatgaggaggaaagtatcgaaccggcagcgggagatgtggctctcaaagactctcttaacgaggaacagagagccgcctatgataagattctatctgtcattggcacttatgagggcggattgttctttgtggatggatctggtggcactgggaagacctatctatatcgagtgctcctcacgatgctacgtagccaaggcaagattgcagtggcaacagctacatccggtgttgcggcttccacaatgcttggaggaagaactgcccattcacgcttcaagatacctctctgtcggggaccataa

SEQ ID NO: 13723 - DNA, 93 bp, Zea mays
  Peptide Sequence Number=SeqID_57098
atgccgcttgaactactccacatggacctattcggcccgatagcttacataagcatcagcgggagaaaaatcacaaatcccaagagaccttaa

SEQ ID NO: 13724 - DNA, 489 bp, Zea mays
  Peptide Sequence Number=SeqID_57099
atgcaggtggcgtgcaaccgcaccacggggacgcaccccctcgacttcgacacatccagcatggaggcccaggcccacacgtcatgtaaccggcacgccggttactacgtgcgagaaactgcaccgccacttgcgccaatgtcgcgccttctcgactgcggagccggtgccgtgactcgaggcaaccctgtgcatggcccaacaatgccaaccgagcacatcggtcatgggcgagcgggagcagcagtcaaatcgtctgcaggctcacgtcccctcctggagcagcaggggagccctctcccacggcgtgaagacgacgcgcccgtgttccgtccatcgaacggctcgtgcaacgaccgccccgcgaaccacccgtcccgtcgcattaactccgcggcagggcaagcgacacctttgggactgggaaaggggatatttcgaaagggatccttctccacgaaggaagcgggccccgagccctcctactga

SEQ ID NO: 13725 - DNA, 786 bp, Zea mays
  Peptide Sequence Number=SeqID_57100
atggtgaccaccagttcgatggtggggagaagcaagccaggctgcgacctctgccccgccctcagcttcaaggatcttcatcatccttgctggggaggagggcgaggcgagccggggcctgccttcgcgtgggctggcgacccgctttgtcctccggcatctgggggtggaaaccatcctccggctctgcggaggaggcgtcctccagccatgcgggggaaggcgaactgctgctgctcggccagggtgcagcattccgtcctccgtccgggcgactgtggctggctgcacaggagggtcgcacaacacgtcatacgccgtgagggcggtactcgtgttctgggacggtcccattctcgtttttgcggcgaggacaggagtgaggacctgctggtgcgctttgggagaaggtttctccgccgacgagatcatcggcgccacctgcggtcggacgtgaggctcttcgggcttggcgggttgtcctcgcccctcgtgtggggacatgggcgagggacctccagcagcagcgtttgccctgaggccgtcgctgtagctgtcttgccgttcgagatggaggtagttgtcgctgctggtgcagcggtcggcggcgagccacctggaaaccctcggctgctctgcgatgagccggagccggaggcagcggtgtcagcgtggacaaaggcggagtcggctcgagaagaagctttgtcggcctgggagcacgtggcctccctggccgaggaggtgcagcagcggcggctggagcttggccaggtcgtccgctag

SEQ ID NO: 13726 - DNA, 123 bp, Zea mays
  Peptide Sequence Number=SeqID_57101
atgctgagcttcctatggcgcctgtggctggccttggctgctgtcagcctcgctctgtcgagcggcacagcagtcggagcggcgcaggcggcgctgtcctcttgtcaggccgctttgtgctga

SEQ ID NO: 13727 - DNA, 1056 bp, Zea mays
  Peptide Sequence Number=SeqID_57102
atgccgctcctcttccccgccacgccgccgctaccgctgtgccgcgccgcgcgcgtctcacgccgcgccacggcctccgtggcgtccgcggccaggagctcgtcgtcgtcctcggcctcgttcgacgcggccgccttcgaggccgagcggctgcgcctggacgccgcggcgcgggccgggatggagtccaccgccgcggcagcggaggccggcccgcgggcctggaagtgggcgatacggaagcgggtgtgggacgcgctcgaggctgagggcatcgcgcgggacccgcgccccgtccaccaccgcatccccaacttcgacggcgcccccgccgccgcagacgcgttagagtgttatgtggaaccctgcattgcatttgaccaatccgatcaggcacctgagtgtttggtctgcatgcttcataaggtggtgcactggtgctggtgcatgttggggaggcttgacatatttcagaagtcccattgtgtaaaggtcaatcctgacacacctcagaagcaagttcggttcttaacattgtcaggtgataaaaagctgttgactccgcaacctcggctaaggacaggatttttctcagttatggactctcagatgatacctgttgggtgcattcctgaagcatgcacttctgttggtgcagctaaatatgggaggccaattggtttagatgaaagccttaaggtggatttgattgtgattgggtcagtggcagttgatccaagttcaggagcacggttagggaagggagagggatttgcagagctggaatatggaatgcttcgctatatgggagctatagatgattcaaccatgatagtaactactggttgccatgggctgagccagcccacaggtgatgacagcagcaactgcgacttctgctgccatgcctgccttgtgggcatgccaggaggcaccgtagggctgttggaactggaccaccaacacacggcgcgcctgccggattgtccgcacacatggcacacccgctgtcatgggcatcatagggagcgagacgcaacagccaggctaggataa

SEQ ID NO: 13728 - DNA, 552 bp, Zea mays
  Peptide Sequence Number=SeqID_57103
atggcggtggcaggcgggcagaagcagcggtcacgtcgtcagccaagctcacgtcacctcgtgggacagcgagagaaccctctctcacggcgtgaagacgacgcgcccgtgttccgttcctcgaacggcccgcgcacgcgcaacggctgccccgtgaaccactcgccccgtcgcattaactccgcggcgggacaggtggcgccctcaggcaggagaagcgagcgacgcttcgccttcgccataatgaccgcgtcaaaaaagggaccgggaaagggggataccccgaaaaggatccttctctatgaaggaaacaggccccgagcctccctactgatcagaggttcaaaggctggcccctcggaggggttcaacagccgcctcaaagcgcttgggttccgcgcccactactggtcagaggttcgaaggccggcccctcggaagggttcaacagccgcctcaggccactcgggctctgcgcccactactgatcaggggttcgtaggctggccctcgaagggttcacagccgcctcagacacagagcgagggatga

SEQ ID NO: 13729 - DNA, 714 bp, Zea mays
  Peptide Sequence Number=SeqID_57104
atggcaggggcacgcgacacctctggcaggcgaagcaggcgccgtttcgcctccgtcattgtgaccgcctcaaaaaaggttgcgccctgcggggttcggcaaccgccccagagcactcaggctccgagccctttactgatcagggggtcgaaggctggcccctcggaagggttcgacagccgccccaaagcatgcagagtcagggatgacgctggtgggcacacccccggctcgcccgaggccaagctcgggcaacctttgtcatacaacaacctcgaccaaatcgccttgccaccgaccgtatcgcatgaaaacaacactattcaccctgttccgactactgtaccaaccactagggtaaaactaacgacagtaagtcacgacctcccccgagttcagcctcaggcgcaacagggagctttgcctcgctcgaccccaggcctcggcctcgggagaaggtctccgcctcgcccaaccccaggcctcagcctcagcctcggcctcgggaggagtcacaacctcgcccgacctcagcctcggcctcgggagaaggtctccgcctcgcccgaccccaggcctcagcctcagcctcgggaggagtcacaacctcgcccgacctcagcctcggcctcaggagaagtcaccgcctcgctcgacctcgacctcggaccgactacgccacaggggatacatcattaccctacccctagctag

SEQ ID NO: 13730 - DNA, 507 bp, Zea mays
  Peptide Sequence Number=SeqID_57105
atgaccttgctgcgctacgccaacctcttcaaaggtccgctgtctgaccttgttatcaaggctctggtggcacacagtggcctcaacagaccagccatgtcggggcagataaaaccaaggcttgatggatgtcagggcctttggctgttgttcaccgtgggaagtcagagctgttctttgctgcttgtgatcagctcggcaatgaggacatgcgtgcatgacaagcagttagttgatgacattccagtggagaagctgctagttcatgatgtgccagttgacattatctgcacccctactcaggtcatcttcacgaagactacgatcccaaagccacaagggatttactgggaaaagttatctccagaaaaattgggccaaatccgaattctaagagagctgaagcaacgtatagagcaagagacaggaactatgcttccttgtggaccttcggagaagctaccgccaacagctcagagaaagcagaggtggcagcggcgacgatga

SEQ ID NO: 13731 - DNA, 363 bp, Zea mays
  Peptide Sequence Number=SeqID_57106
atgcagagcttacaacgaaaagtcaacgctgattccgtcgaaataaaaggcgaagaagctcctaagggaggcttacagcgaaaagtcaacgctgattccgccgaaataaaaggcgaagaagctcctaagggaggcttacagcgaaaagtcagcgctgatacaccgaaaaataagcgcttcagcttcggcttggttaacctgtatgaacgcagcagcggtgccccgagaagctaccagggcacaaaagtcgtcgtgtccagcaataacatcatcgaggtcatcaatctcaccttcgatgtgttcgaaggctcctggcagatcttcagccgaaggaataaatttttcactactggccccgactga

SEQ ID NO: 13732 - DNA, 507 bp, Zea mays
  Peptide Sequence Number=SeqID_57107
atggcctcccgcggactccagacgctgagggctatcggcggctgctcacttgggcagctaatcatcttatgcctctcgcccatcctccgagcgatctacggcacgccatcaatagtcggcgggacgcgcagagctccatcaatgcttcgtgcgaacgatgacatgagaacgagatccggcgccgagaagagtatgatcgggatcaaggcatccctgcacgaagtcaggccaccagggttgagtcagcaatggcttcaattggtggcacaacccggggatggtcgaggcagcacatcggcaactcccctccccgggaccgacaccacaatcgtcgacaggaggtcacgtgtggagtatctgcgatcactccgcgtctcagggccattcagtggcccccaaacttcaaagtctccaacgtcgacaagtacgagcctaagcaagacccaggaggctggttggctgtctataccactgctgcccgggccgctggggcaaccgaagatgtga

SEQ ID NO: 13733 - DNA, 198 bp, Zea mays
  Peptide Sequence Number=SeqID_57108
atgggggaccggcgagaaccttgccccaagccccgggaaagcttccttggggagagttccggcaacaagaaaaaggaggattttttgtgggcggggtcaaattcccaccggagtggcgacaagaagaagaagatgaagaaagtggaaccatccgtgggggatgaagactatgattcggacgaggtagcccaaatctag

SEQ ID NO: 13734 - DNA, 583 bp, Zea mays
  Peptide Sequence Number=SeqID_57109
atgtcgccgagcattccggcgtcagttccttcgtcggcgagcttctcgctgaggaggttcttccccagacacggttggctcgtcgtcggagatgggggacgattccactcttcccccgatgaagaggacgtcggggaggtagtcttcgcccggggtgctggaggttgcgctttttcctgctctgttccagcttttttggagatttttgaggaaggcttcttctccggccgtatctgccccggcgtctcacagttgagtgacagccctaggtgccaggaagaggtctacgccggacttttgcaaagattcgcacgtttgcgacctctggcgacatttgaacactggaagaaacaaaccgccacgtgttcgacgccgtctgccgcgccagagcacgcccgcgcgcgcgcccgcgccgcgcccaagccaagccagtgccctgccattcccaaccccgtccagccctcggagaagactgtgcacgtctccgtgaagctccccgagcgaggaatcaggctctgcttcaccggagaggccggcccaaggtcaccagacttcaaccgaccgctggcaaccgtggaccgag

SEQ ID NO: 13735 - DNA, 84 bp, Zea mays
  Peptide Sequence Number=SeqID_57110
atggtgcttgcggtcgtggtgctgctgggcgccgtggccgtccttgtggtggtgctgctgctgcagccccgcgtgtcttattaa

SEQ ID NO: 13736 - DNA, 684 bp, Zea mays
  Peptide Sequence Number=SeqID_57111
atgcagcagttggggtattttgggaatggagttggacgagttccaggggcggaagagattcctaagccggagggtgagatagttgtgttcgaggcattttttactgtcggcatttggttacctgcgcatcgttttgtggtggagagtgttgcagaggtggcggaggatgatagtgccgaaggggcccttcgttgtgctgcccgcgtgtgtagcgggcgcgatttagttgaggaattcatcagttatggagtgtggcccttggcgcatggctgggcgttgggcgaagtatgccctcgccagatgccctccctgggcgagcagcaagtgcgaagtccggccttcgcgttggatctacgtggccgggatccaaccgcattcgtgcgtgaagtggaagacggagctgtgcggattgtggggcattatgtgtcgaggacggaggctctgtggagttgggatatccgtggatccaacattcgcctgaatagggtcttcgagttgaatcgtttgccatacgacggctatcccggggatgacgctgccatggccatcgaccgccgcgggaagaaaccagtggccgtgactgaggaaggcccttcgcaggaggctgccccagccactaagaagagaaaaataggtactgcagtgggggactgggggtctctgatagttttgctgtggagttga

SEQ ID NO: 13737 - DNA, 504 bp, Zea mays
  Peptide Sequence Number=SeqID_57112
atggctgtcggagaagtgcttgagccctgcgtacgcgataacgtggccgtcggagaagtgcctgagccctgtagaagcacagctggcggtgcggctgggatcctgctgacgtctccttgctttcgtaggaggctgagaaccaccgacgtcatggacgcacgcggggaaccatcattacctgttatcggggcgagccagatgggacgccgtagtcggagcggggcgagcgacgctattttcctgtcagatcggtcagtgaaggggcgaagtgaccgcggtcacttcggccttgatgactgcggtgcgcgtgtcaggataaggtgccaggcgatcttcacattgaatgcgcatgcgatacggtcggttggtaagacgatttggccaaggttgcttcacgacgaagcctgcccgagctgggcttcgggcgagctgagggtgcgcccactatctgaggaggccctcgggcgaggcgtgaatttgtccaaaactactgtttctgcctga

SEQ ID NO: 13738 - DNA, 336 bp, Zea mays
  Peptide Sequence Number=SeqID_57113
atgaagtttggatctaagcaaggcgtcgatgctcggagaggaaaccaaccgatgcggagacgaaccgcctcggcggactgggatttctggccgcttcggcttcctaggcgaacggggttgactgctcaggaacaggacgtgctcctcgacgtcgtcgtcgccgccgacctccaccggctccgaatcggccttgtgccgacagatccgctgccgcctcgcccgatgtcgtccgagttccagagagccgttgagaggaacgtgaaggcgccgatttttgggccgttggctgtggtggccggttcggcggctctggattcggctggcttccggcgatag

SEQ ID NO: 13739 - DNA, 1290 bp, Zea mays
  Peptide Sequence Number=SeqID_57114
atggcatcctcgacagaagaaaacatgaaggctttgctcaaagtccttgtagactgtgccgaggatgccacaaaatcactgggtggtttagtagatcatgctttagaccacatgcatgatgaagagatccaagatgccttagaggcaaaagtgcaagcatttccagaaattgttaagtacgatggggatgacataagtgttgaacctacatctctgtcgacccctccaactgttactgaaccatctgttgatgaagaggagttctactgcccgatgtcagtgatgagtggtacttcagcgattctgataggtctacacaatggacccagcaaacaatgccacatcttcgcagccgatgtcaaatacctcagtgcccagcaatatccccctccaccccctttatggcctacgggcttcatgcagcaggcaccaatggattgcaacgtgatggcaaacctgaattttcctaatcctggtcaaggtccaacaacaatgtgggctcccattcagactggaaattctacttcccaatctaccatgattcctgcctcacaatctgcagtctattggaatcattacatgaactttgtcaggaatcctcttggttcagttgaagtaaatccttttcctgagtactatcctccttcaaatactagtacaccattgcagggttccaatactataccttcattacctgtaaacctagactcagatgctgaacatagtgttcatgacatcaatagtccaaaaaagaatgcagctcctgttcagaaacaaaagaagtcgaaggaacaaaactttactggtcctgaagaccttctcctttgcactacatggttgcaaattagcagtgaccctattgtgcacactagacaaaggagggaggggctttgggctcgaattgaaaaaaggtacaacgaacaaagggggcagctcccttgtagactaaacagagcacttagcagcagatgtgacaagattagagcagatgtgagtaagttctctggctactacgcaagagttctacgagagaaacaaagtggcttaactgatgacgacaaggaaaacggccccgtggtcgtgattacagtaaatcagagaaagaaaggagcatcttcgtcatctacagaatacttaagccgtttgcaagaaatgactgaaaaacaaattcagaggtcaattgaaaagggtgaaaagaaagaaaagtgctcaaaagaagacagggaaatagagaaaaagaggttggaattggaagcacaaaagaacattataaatttgttggaaccataa

SEQ ID NO: 13740 - DNA, 402 bp, Zea mays
  Peptide Sequence Number=SeqID_57115
atgacgtcgtgtaacacagttcaacgctatgacccatggcgccgagcgcgggagggagagcaacttggcacagcaggtcccggcgcgagccacgtccacgaccactgcagcaccggcaccagcgagtcagcgaccccagtccgccctcctatgagtctatgccccgatccgagcgcggggaataggaaaacacacgctgacctatatcacagacctcggcgccaagatctatggtgccgaggtctgccacgtgagccgccagctgaatccatctacgccagttctgtggcgccgagacgtgttacctcggcgccacgactcatggcgccgagcaaagggtccaaatttgggaattgttcctgcagggatctaaatgtgaaatttcttcgtaaaaggggctaa

SEQ ID NO: 13741 - DNA, 1566 bp, Zea mays
  Peptide Sequence Number=SeqID_57116
atgggtgcggctcgtccgcggcgctggaagctgccgttccaccgcaccgtcagcgccgtgggcggcgggggcggcgcgccgtgctcgccctcgtcaaggtcgtcctcctcgcccgcgcggtccgaggcgtgggcggccgaggcggtgccggaggagttcctgtgcccgatctccggcgcgctcatggcggaccccgtcatactgccgtcggggaagaccttcgagcgggcctgcctccaggcctgcgcggagctcgcgtttctgcctccgggagtcgaggccggggacgcggacactgtcatccctaactccgcgctcaaggcggccatctgcacttggtgcgcgcgctccggacgggaggtgccggcgccgccgtccgccgaggcggcgcggcaggccgtgcagcgcgctatgcctccggcggctgccaagtccgtgaggacgaccaccacaaggcgcgcggtggtgatggccgcgagcacatcaaactcgtccacgtcgtcgtacgggtcggcctcggagatcaccgcggcggaggacgaggccaaggccaaggaagaggcgccgcggaggaggacggtcaaggaagcggaggtggagccggcggcggcgccgccggctgacccgctggaggacgatgtggtgggcaaggtgatggacgcggacgacgacggcgtggtcgctgcggcgatgggcgcgctgcgggaggccacgcgcgagggcgaggagcggcggcgcgcgctatgcacgccgcgccttctcggcgcgctgcgccgcgtgctgctgctcccacgccacgcggccgcccgggtggacgcggtggccgcactggtcaacctctccctagagcccgccaacaaggtgcgcatcgtgcgcgcgggggcagtgccggcgctcgtcgaggtgctccggtcgggcgcgtcggcgcccgaggcgcgggagcacgcggcgggggcgctcttcgggctggccctcaacgaggacaaccgggccgccatcggcgtgctgggcgcggtaccaccgctcctcgacctgctcacgtcgcccacccacgcgccccgcgcgcgccgcgacgccgggatggcgctctaccacctcaccctcgcggccgtcaaccagtccaagggccgcaacgcgctgatggacgcgggcggcgtggcgtccgtctccggcatcctcctctcgccttctcacgacaccaccaacggcggcggtggcaccgcggacctggaggagtggtgcctgtcggcgatgtacgcgatgagccgaggcagcctccggttccgcggcctggcgctcgcgtccggcgcggaccgggcgctccggcgcgtggtggccgacgagggcggcggcgtccggcgcgagattgctcggaagaccctccgcgccatgcggagcgacctcgacgaggacggcggcgagtacaacgacctgaccggaagcagcgcggagtgcggcgacggtgaggactgcggcgggagcatcgtgtcggacgggctcatgtcgttccggcgccggcagcgcgagctcggcgtctcgtcgtgcggcaacaccgccgagttctga

SEQ ID NO: 13742 - DNA, 1350 bp, Zea mays
  Peptide Sequence Number=SeqID_57117
atggcgctgcaccacctccgcctcgcgccgctcgcgctccttcgcgccgcaagcctcccgcccctcgcctcctcccgtatcgccgcgcgcggccaccgccgcgttctcctctttgcgccgccgtcgtggccgtggcgccttctgtcgcccggtgcgaggccgcgcgcgcttgccaccgctgcggcagaggccgacgatgctacctcgggctcgggcaacgaattcttcgcagagagcacgtcgtgggcttcactcggcgtatccgaacgcctcgcgtccgccctttgcagtgccgggctctcgaggccttcccttgtccaggcaacctgtataccacatgttctcatggcaaatgatgtaattgtcgcagcagagactggtagtggcaaaacccatggttaccttgtacctttgattgaaaagctgtgctcaaaatcttctaccaccaaagatgacaattgtcaggacaccaccccaggagcacatgacatggtgttggtcctttgtcccaatgtcatgctctgcgagcaagttgttcgcatggctaattcattacttgacgagtctggcaaaccacttaaaagagctgctgctgtttgtgggccaaatggctggccagctgttcatccagatattcttgtagccaccccagctgctctattaaactatctatttgactatgacccggaaaagaggcgaagagagagattcatgcgtaatgtgtttgatgaagcagacatgctactctgtggaagttttgagaaccaggtcattcgtctcatcaatatgttgagatttgatgaaaagctactttctagagcacaggattctggaaaggatatatcacttgggagtgatgatgaatatcatgaggattcaaagtttgagactgctgaatttggtagttctgacaaggaaattgaagacaatattgtggaagatagacttgtcaagttggagaatagtcacgttggagcacacaaggactggaggagagttagaaaaatatacagacgcagcaagcagtatgtctttgttgctgccacccttcctcagagtgggaaaaaaactgctggtggtgtgctacaacgtatgtttccggatgctgtatgggttagtggcacttatctgcaccgtcacaaccccagcttcgccgatgccagctggagtcccagccgtctctccgtagcaataaaatataagccggtcgtctgcgtgcccatctcgctatcgcttggacgccatcaccaaccgagggtctcgccgagctccgccgtgtccggggtgcagaagccgccgcacgatgactcaggtggggaagatgagctcctgtcgtttgatccactttga

SEQ ID NO: 13743 - DNA, 1086 bp, Zea mays
  Peptide Sequence Number=SeqID_57118
atggatctctcgcggcccgcatcgtcagacctctcgctcgggctgcactcgcatgcccacgcccacgctcgcgtgcacgcggcagccgcgccgctgcgcctgttcgacgacgcgaagccggagcgcctcgtggccggtgaggccgacgcggagagggacgacggggacgggggcgaccagcacttctccctcctcgggcactccctctgcgtcaagcgcccgcgccgcgccgtcaacggcggtgggggtgggggcggagagacgtcatcctgctcgtccacgtccccggcgctgcgccccgccaagcggcaggcggcgggggaagatagcggcgcggatctggagacccgccgcgccgcggtccgctcctggggcaaccagtcgctggcggaggccgacccggatgtgcactcgctgatggagcaggagctggcccgccaggtgcggggcatcgagctcatagcgtcggagaacttcgtctgccgcgcggtgctcgatgcgctcggcagccacctcaccaacaagtactctgagggggccccgggtgctcgctactacggcgggaatcagcacatcgatgccatcgagcggctctgccatgagcgcgccctcactgccttcggtctcgaccctgcctgctggggcgtcaacgtgcagccgtactcgtgcacgtctgccaatttggctgtctacactggtcttcttcaacccaaggaccgcatcatggggctggagccaccgtcgggcggccatgttagccatggttactacacgcccagtggcaagaaggtgtcaggtgcctctattttcttcgagagcatgtcgtacaaggtgaacccacagactgggtatattgattacgacaagctcgaggagagagcaatggatttccacccgaaaattctcatatgtggtgggagctcttaccccagagagtgggactttgctcggatgagattggttgctgataagtgtggtgcagtgcttctttgcgatatggcacatatcagtgggcttgttgcagcaaagttagttcattgtatcctgcttaacaatgtgcacaagagtaattggagtacctcttag

SEQ ID NO: 13744 - DNA, 246 bp, Zea mays
  Peptide Sequence Number=SeqID_57119
atggcccctctgtcaggtgccaaagttttgaaatggtttaaaatgggaccagacgttgatgaaagtgcattcatcccttttgatgtgactcaagaatggcttgatagggtgaagatagcaaggaaagggcttcgaggaactaagcgaaggaatcgtcgtactatcaagggggatccaaaaagaaggttggtgtgggtactaaagctcaaaaaatcccatgatccaaaacttccattttacccttag

SEQ ID NO: 13745 - DNA, 249 bp, Zea mays
  Peptide Sequence Number=SeqID_57120
atggcgcaggcgcgcagcttgggcctcggggacggcggacggcgcaggtgcgtagggcgcagctcggggatggccgacggggacgtgggacgccgcaggccggacgcacagcttgggggcttagccgcgcagctcggggcgggcgggaccacggggcagcgccagcgggttgtgcgcctacgctgcgggcgggcggtggctggggcggggtggggcgctggcggctgggaactgggaagtgggaattag

SEQ ID NO: 13746 - DNA, 1332 bp, Zea mays
  Peptide Sequence Number=SeqID_57121
gacgcaggccgcgcagccgcgcagggcgcgtcgcgcactctcgccgtctcgcgctggagctcgtaagagcaggccggcagggcgcaggcgcgccgccgagcaggggcggctctgtcgagcaggggcgactccgccgagcaggggcgcagaggcggctctggtgaccgtcgcgctcgcgcaaggacgcagggcgcagccgtcaggggctacttcggtcgcgccgtcgcggtcgcgctggagctgggggcctcctggccgcctgggagggctgagacggcggctggacggggacgggacacggccacacgggacgggagcaagaggactcggcattttagggtttctgggaaatgggccgcgccttaggcccatccgccgtggacaagtgcgccgtcggcctgccgctgccgaggccgtggaggcagccatttcgggccttttcgtgcctgttaacgggccatttcgggtctgcttaaacgggtcgggctcgtgcccgcccgtgggcctcgacatcggcccaagcacggcccgatacatcgggccggggcggcccggcccggcccgaaatgatttcgtgccgtgccgtgcttgggccgtgctttttttcgtgcttcgtgtcagtccattaagcccggcccaaatcacgaagacgaagctctggtacatggcgagcagcgcggaggagcgcttcctgaggcagctgagcgcgagcaacggcggcgacgaaggggtctgcggcggccagcagctgggccacaaggagtactgcgcggagaggaggggctcccggcggtggtccaggaagcgggccgccgccgcgaggggctactgcggcgggtacgacgactacgacgtgaagcagcaggcggaggccgcctctgccgccgcgaggaagcgggtgatagtggtggtggacgacacctcgggctccaagcacgccatgatgtgggcgctcacccacgtcgccagcaagggggacttcctgacgctgctccacgtcctgctgccgcactccgcctccggcggcggctgtagcaggggcgaggaggcctcctccctcgccaactcgctcggcacgctctgcaaggcgtccaggccagaggtggaggttgaagccctggtgatccaaggccccaagctgggcaccgtgctcagccaggtgaagaagctggaggcctccgtgctggtgctcggccagggcaggccgtctccctgctaccgctggctaagctgtttcttgcggagcagcagcgaggagttcgtggagcagtgcatcgaccaggcggagtgcctgacgctggcggtgaggaagcagagcaaggccgtcggcgg

SEQ ID NO: 13747 - DNA, 601 bp, Zea mays
  Peptide Sequence Number=SeqID_57122
atggcgcaccggacagtccgatgcgccaccggtgcgccaacggctgcgctctcgggtttctacgactgggaacactctgctgaggaccaggctggccccacccggcagagggtgccaaaggttcacaacaagccaattaaaaagaccatcgttgggttcaaaattgagagcaaaagacatcccgaaaggctccctggtctggcgcaccggactgtccggtggcgcaccggacagtgtccggtgcaccaggagacttcgcccagaactcctcagcctcgggaaattctcggagccggcgcgcaaaaattcaccggactaaccgaacggctgctccgctataattcaccggacatgtccggtgtacaccggactgtccggtgcgactgcggagcaacggctacttcgcgccaacggtcacctgcaggcgcattcaatgcgcgccagaagcgtgcagaagtcaggcacgcccatactggcgcaccggacattgaacagtacatgtccggtgtgcaccggacatccaggcgggcccagaagtcagaactccaacggtcaaattccaacggcattggtgacgtggctggcgcaccggacatgtccg

SEQ ID NO: 13748 - DNA, 417 bp, Zea mays
  Peptide Sequence Number=SeqID_57123
atggtgcggtctggagctgcttctccgcctccagtggtccagccacctggatgcaggactacactggggacaaggcctttggaaagaagggagatgggtgttactggctgccaggcatctggggcagcttcacagcccagttgtttgctactgatgcttgagtggacctttgtggcattcttcttattgtttgggagttatctccgttttgtctaccggtggggaagtatcagtgcaaaccatgtgggatttagcaattctgactcatcggagaatcatatgggtccaggccatcagcgaaatatgtctgactgcgacatggatgcaacattttactggatagggatggcatctatagctactattactgtactgttaccgactatcttgggcataactgcattgttcacaaagtaa

SEQ ID NO: 13749 - DNA, 174 bp, Zea mays
  Peptide Sequence Number=SeqID_57124
atggagagtcatgatctccgggcagaatgggaatcacggcttgtggatggctatgagatcgatggttttggttatgactatggtgctggttgtcagcattgcaaccactgctcaggcgaagatgaagctgtggaaggagacttccaggagttccaagactacgacgagttctag

SEQ ID NO: 13750 - DNA, 474 bp, Zea mays
  Peptide Sequence Number=SeqID_57125
atggctagatacataggttgggcacggggcaagagcaggagaaggcaatgcgatcgggccacaaattcacagtacgatgacaaccgagaatcagcggcacggcagggccatgaatgggagcatattgcggccgtgcttgtcggagaggcggggcgcaaggtgaagccggcgccggcgacgcaggaagcgctccgttgcgtccgcgtgcggaactggcaggggactatgtggcagctggaaacaatgttactccgtagcaggaggggagggagcgagagaagcaatcggaagaaggatactgaagaggtagcgctcccaccaatcgagcatgtagaggccgatggtgacattgtagaggtggatcttgcgcccgatccagttcatcctcttccccgcgacgtccggcgccgcagctcacctcgcccagatccgaaaggagcggcgcctctgatgctctatgactacgagggttga

SEQ ID NO: 13751 - DNA, 1530 bp, Zea mays
  Peptide Sequence Number=SeqID_57126
atggacgcagcagaacatcacgtggaggagaccaaggaggaggaagcagcgcaggtgatggagacgacgacggcgcactctcggttcgggaggatctgcgtcttctgcggaagcagccaggggaagaagaagagctaccaggacgctgccgtcgagctcggcgaggagctgaatttcctgttcttcgcaaatcctcagtttcagttacctccacctcatggcaacaatgttattatggctgcagataaaatacgatatgtctcgaggaacatcgatctggtctacggtgggggaagtgtcgggctaatgggcctggtctctcgagcggtctacaatggagggaggcacgtcatgggggtgattcccaagaccctcatgccgagagagataacaggtgagacggttggggaggtgaaggctgtggcaggagggtatggaacccttgaggagctgctggaagtgatcacctgggcgcagcttggcattcacgacaagccggttggcctgctaaacgtgaacggatactacaactccctgctgtccttcatcgacaaggccgtagaggaagagttcatcagcccgactgctcgccacatcgtcgtcctggcaccgacgccaaaggaactgcttgacaagctagaggagtattccccgcggcacgagaagctaggtcgtgccgaagacgaggtgggagacggagcagctgatgagcaactgcaagagctgcgaggcacgcacaagaaaagagtgagaccgaaggctcaccgaaccgtggcggggatagctgttggcgagccattgccttcgcttgcatccccaggaactccccctcgctttattcacaaccacaaccacctcccaactaaccttgtgctccaacgtggcttatttgtattcggagtggctttaggtcgcgatggttctctcgtgatgcagtctggctgggttgactgttgcccggttcagctgaaaatgcatgggttgctgctgaaaacccatgtgtctggatatggtgggatgtctgtccctgtggtctggaaactaccaggtgacccagaactgatggccccaactcgtgtcaagtccgtcaaggctctgttccggcaaagtgatcggaaagaaatatgctgcggtggttctgttccagcacaaggaaccaagagcggtggcaagagcctggagaagaggaaggatcagggaacgggggaagaggttgctgccacagctcaggtctcaactggtttccagatcggtgtgatcgggtcacttgcactctctgttgcatcttcagtttccattgtcctctgcaacaaagctctcatcagcacacttggttttccattcgctacaacattaacaagctggcatctgatggtgaccttctgcaccctccatgtggcacagcgcttacgtttcttcgagcccaaggcaattgatggacagacagtcatactctttgggttgctgaatggcacgtcaattggtcttctcaatctgagtttaggattcaactccattggattctaccag

SEQ ID NO: 13752 - DNA, 354 bp, Zea mays
  Peptide Sequence Number=SeqID_57127
atgaggaaaaaacacggctccgtgccgaaattacatacatgttcgggcctcaacagccacaatgaacaaaaacactggcattcgaagtgccattacaaacggaactccggttccccctccgcaggtacgaacgaccccacttcatggggaaggcctgcggagcgacagaagactgacgagcggctcgccgccgcccgctccgactacgacgacaaccacccccgccccaggcggcgaagcggcttcggcagcagcttcgaggcagatgtcacgacaggggggctctcgcccgcggaggacgagaaccagccattcaggccgggagacggagacccagggctaccggcgccctag

SEQ ID NO: 13753 - DNA, 633 bp, Zea mays
  Peptide Sequence Number=SeqID_57128
atgaacaactggagcgcccgcatgttcgagtacaccggcaactacagttcgtttgaagtacagcgcgccacccgtctggcgcagcaacaagcgatgtacgaaagccagcaggaacgcgtagcgcatctgcaaagttatatcgaccgtttccgtgccaaagccaccaaagcgaagcaggcccagagccgcattaagatgctcgagcgtatggagctaattgcccccgcgcacgtcgacaacccgttccgctttagcttccgcgcgccggaaagcctgccaaatccgttactgaagatggaaaaagtcagcgcgggctatggcgatcgcattattctcgactcgattaaactgaacctggtgcccggctcgcgtattggtctgttaggccgcaatggcgcgggtaaatcgacattaatcaaactgttagccggtgaacttgcgccagtcagcggtgaaattggtctggcgaaagggatcaaactcggctacttcgcccagcatcaacttgaatacctgcgcgccgacgaatcacctattcaacatctggcacgtttagcgccgcaggagctggaacattttctgcgtgactacctcggcggctttggttccagggcgataacgaatcaagcttga

SEQ ID NO: 13754 - DNA, 162 bp, Zea mays
  Peptide Sequence Number=SeqID_57129
atgtcgcggcggtcgttgattctgttaccggctcgagctcgtgtgggaggcaatgctgacaattgggacccacacgatgcaaatgaggcacataaacttgaggagctctctctattattctttgtatacaactttgagtattacaaatcctaccccccttaa

SEQ ID NO: 13755 - DNA, 378 bp, Zea mays
  Peptide Sequence Number=SeqID_57130
atggcggtggcggatctcagcatggcttgcttcgacggtcgaaggaagggccgtatatatacacccgagagtccgagccaagcggggcaaatccaaccgaaatcttgtgatcgaatcccccctaacaaaccccgctctgctatccttctcatctgcaggaagaaggctgggcgccagccgcaatgtccaagcgggatctacggcgccggcgatgggagtttgttgcagtccgccggtcttgaggagaaggagaagatggcaactgaaatccgtgcaggaacaagaaacagtcggcgagatttcaggcaggagatcgacgttctgttgcggcgtccaaaacagagggaacagggaaatgtcccgctaggcggaggatag

SEQ ID NO: 13756 - DNA, 378 bp, Zea mays
  Peptide Sequence Number=SeqID_57131
atggcggcggcggatctcagcatggcttgcttcgacggtcgaaggaagggccgtatatatacacccgagagtccgagccaagcggggcaaatccaaccaaaatcttgtgatcgaatcccccctaacaaaccccgctctgctatccttctcatctgcaggaagaaggctgggcgccagccgcaatgtccgagcgggatctacggcgccggcgatgggagtttgttgcagtccgccggtcttgaggagaaggagaagatggcaactgaaatccgtgcaggaacaagaaacagtcggcgagatttcaggcgggagatcgacgttctgttgcggcgtccaaaacagagggaacagggaaatgtcccgctgggcggaggatag

SEQ ID NO: 13757 - DNA, 1419 bp, Zea mays
  Peptide Sequence Number=SeqID_57132
atggagccagctgggagagcacgcatggctaatgcaggctatggtccggctagaaaaggatttcaggtgttacatctccaggagtccggctcgagcagacggctcggccggtcaccccgaggcctcggccagctgtcccccgaaaacatcagcccggcccgaggcctcggcaactcagttctggcgtcggtcccgccagtggacgacccggccaggctctggccgaccaagtcttcttttcgagccaactctgcctctgtccctgctgacgccgctacccctggcttcggctcatcgaagagcggccgaggggttcctttaactaagcaagagaagcctcggacagcaaggccgaccgagccgagggactcctactcctccgggatacggatacctcactcgtcacctttgcacgggggcggacgcggccaccggaaggctctcgttcgcgtccccgctcaagggatgcgaaccagacatcaaagccaaagagccggaggccggcccgtaggcggctctaacggcctcgacggcggggaagcctcccccggctaccaccacgtcagcaccgacgatggcgtccgcctctccaccaacgccgcatcggcgaacgcgggccgctccaaagcgcaccggcaggtcctcgctcccgtcctcgccacaaaaacgaggaagagggtggaatgttgcatcctagttgggcagcaacagttcgccttccccggcatggctggaggacgcctcctccgcagagctgggggatggtttccaccaccagaagctggaagaggaggtggccagctgacccgtgcgggaggtagagccccggctcgcctcgctctccgccccagcaaggatgccgtcgtgggcagagtcttctccaacacgctccgagttcctccccctgcggcgcaggggctgggtcccacgcgtcatgcagactggcccagggcagaagaagccaaaccgccgcgcacggtgcatgcaaccgcccagcggttacaggcattcctccactttcgcctagaccagcgggtgaaagggcgggcagccatgcaggcagcatgcaaccgcgccaagtgggcgcacccctccgacttccaacgcacccagcatggaggcccaggcccacgcgtcatgcaaccggcgcgccggttgctacgtgcgagcaactgcaccgccgctcgcaccactaccacgcctcctcgactgcgggaccagtaccgcgactcgaggcaaccctacgccccgagcctcactactgatcagaggttcgaaggctggcccctcggaggggttcaacagccgcctcagagcgcgtgggcaccgcacccactactggtcagaggttcgaaggccggcccctcgaaagggttcaacggccgcctcaggccactcgggctccgcgcccactactga

SEQ ID NO: 13758 - DNA, 645 bp, Zea mays
  Peptide Sequence Number=SeqID_57133
atgtatgtatctcaactatgctttcatcttacatttttgggtattacactggggtcgggcgaagcggagttcgtcgtcttccggggccgagcccgagtccgagccctagggtcgagcgaagcggagttcgtcgtcttccggggccgagcccgagtccgagccctgcggtcggacgaagcagagtttcctatggcgcctgaggccgaacctggctgctgtcagccttactctgtcgagtggcacagcagtcggagcggcgcaggcggcgctgtcctcttgtcagaccggtcagtggagcggcgaagtgactgcggtcgcttcggctctgttgactggagggcgcgcgtcaggataaaggtgtcagaccacctttgcattaaatgcccctgcgatttggtcggtcggcgtggcgatttggccaagctttgtgctgatgggggttaccagctgagatttaggagccttgagggggaccagcctatctcggttgcgttttgttccggtgggttcgcgcgagcgcacccgccgggtgtagcccctgaggcctcggaggagtggtttgactcctccaagggcgccgaacatggtgtctccggggagctgctggcgggtaatccgagtggacgcccatgccccatttgttag

SEQ ID NO: 13759 - DNA, 905 bp, Zea mays
  Peptide Sequence Number=SeqID_57134
atggcgcctacggcggcagaagagcgcggagaactcaagagcgaaagggcgctgcgagtgatgaggatggctaccacactcgggggaatcccctttttaaagaaggattcccccactgacgccccgagacaccgcagaagatctcgcccgacgcgcgccaaggtgacccagcctctgacacgggggcccgggcccacgagtcatactccttgggcgtcggcctccgtgtgcggaaaggagaagtcgaactgccgctcgcgccagtaccgcgccttctcggggcccccgccgaaggcagagaaaaaccgccacgtggccggaggaaaagacgatataacccaggatatcgactgtgggtttggacccccatgggaaagtgccggacccctgtgtgtacggaccggacccccggggtccgggccactcacagcaaggtcccagggtcctggcgcaaaggatacccaggccttgatcaagagacccgatgctgccacgcggcctactgcccgtgacgtaagccagctggtggagcctgacgtaaggcctctaggccgtgcggtctctgcatttattgcagagaagacgcgccgccctgttaccccgctgacaggcgatgtgccgcctcagcatttaatgtgccctgtccactctactgacgggcagcggccaggccatccagcagacggcgtgcctgtccgtttcgttggtaggcagtacgcccatgctgccgcatgtgctgcactcatcatgacacgtacgtcaccaggcaagcttccccagcacgccaatactacacaagccgcggatatcagggcgcaaggagattgcacctggcccagcattagtggctccgggtgttccattcgttatgttcttgggcccacatgttggggctcaacatcctt

SEQ ID NO: 13760 - DNA, 96 bp, Zea mays
  Peptide Sequence Number=SeqID_57135
atggctgggaaaaagacactaaatggcagagaatattattacaaaattttagaaattggaatggttcaatttggaccaaaaatggaatttctatga

SEQ ID NO: 13761 - DNA, 435 bp, Zea mays
  Peptide Sequence Number=SeqID_57136
atgggcaagagcaacaaacgcaagcgcgagccgactcctccatcggaggacttcagcgactcggaatactcggaggaggagttctcctccgagtccgaggggtctccggctcccgtctctcccccggcgtcgtctgacgattcagacgactcccagggtcttgccgcggaggtctggacttatatccgggccgtcgagcgctctgggctcgagggctcagatgagtcggagtactcctcggacgaggaggactcttccgaggagggcggtggcggcgatggcggagacgacgacgacgacgacggaggcgacggtgacgacggcgacgatgacggtgacggcggcagcaggggcggcaagggcggcaacggcggcagcagctggggcagcaacggcggcggcagcagcaagggcagcaacaaggccagtggctag

SEQ ID NO: 13762 - DNA, 687 bp, Zea mays
  Peptide Sequence Number=SeqID_57137
atgggtacccgggaaactcatgggcttgacaacatcgatccagcgtttctgaggtacaagaacacagagaaaagttatggtgatatatacctgtatattgatgaatggtgtgatgctaattggcaggtcatggcggcgagaagccccaacgtgaggctacaaaggctatcgacaggaagaaccagagctgctccagttgttgcccagatatcaaaggaagccggttatcttacagttggtgttgtcacctatccattcagtttcgagggccagaccactgtccgctgttcaagggtctttgaacccgtgtccaggttcacggaactccttgagaatctgaacctgtttcccccagtcagcttacactggctcctgctccttgaggtatcgcctgaggctggcctcggcggtgcgttggtacccacttcaattttttcccgcgctgaactcgctgacatggaaggtgaatcatctattgttgcttcaccatttcctgtaccaagttcatccaaagggcatgaaatggaaatgactaagaagactgctgctgttgtgcctgaaatgactagcagcagtagtatgcccaatttagctgttgcaaaagatggaaataccaaggttttgcctttcgaatttcgagctcttgaagtgtgccttgagtcagcctgcagatctttggaagaggaa

SEQ ID NO: 13763 - DNA, 342 bp, Zea mays
  Peptide Sequence Number=SeqID_57138
atggggatgtcagtgcaggtgatgcctctcagtggggtgtacagggagggccccctgtgctacctattcgccgtcgacggcttccgcttcctcctcgactgtggatggacaaccaagctcaattcttgtcctaacgaggagagtcttgcaacctccattttaaccaaacaggatatcgatatccaatcagtcccccaccatgcatatctaggatgttgtgattccaaacctgccaaggtgaagagatgtaataatctgaaaacttgcagtgggatgcgcacattcttccctattggagaagccataaggccgaccgtagaagtggttcttttctcaccgtga

SEQ ID NO: 13764 - DNA, 1230 bp, Zea mays
  Peptide Sequence Number=SeqID_57139
atggcggtcagggagcatgggggtggggagatgggagcagcggaggaagcatggcgtcctctaggaagaagcacagccgcagccgccctcaggctatggacgatgacatcgacagctcctgctccaccccgttcgccagcgcgccgtccagccccggacgtccccacgccatcggcggcggaagcggaggcggaggctacttcttcagcgcgccggccagccccaatccaccacctcctctcgacctcgtgctcgggcctccgcgactcccagcaccgggtgggcgtgggtgcgtggggcgacgcggagttcgagttcggcaggcctggtgggcccatgatctccgccgacgagctcttccacaacggccagatccggccgctcaccctgcccccgctcccggatctcgaccccgggagcgatgacgacgaggactgcgaccgcgcgccgacgcgcggccacgacctcacgccccgaagcgcgtccgtgcaccgccgcgcgcggtccatgtctccgctccgcagcgcgtcgccgcggctcaagctgatcaatgcgctcgtcccggcgccggatctcagccccgccctcgacgcgaccggggaggctgcgccgccggtcaccgcctcgccccgctcagaatcaaggggagaggctcgtgattttgccagggtccggaatacctgctttgagcagtttcaaagcatcagcagcggaagagttgccccatggcttgagactggtgatgcagtggcaagtatgtactcagaatcaaggggagaggctcgtgattttgccagggtccagaatacctgctttgagcaggctagacaggcttacttggttggcaacaaggctcttgcgaaggagcttagcatgaaggggcaggcctacaatgtgcaaatgaaagcggctcatgagaaagctagagaagctatttaccgacaaaggaatcctgtttcttcccaacgtgggggtgaccacctgattgatttacatggcctgcatgtgaacgaagcaatccacatcctgaagggtgagctcaccgccttgaagagcgtggggagggcagcaggggagaggatgcaagtcatggtttgcattggaacaggccaccacaccaagggctctcgcactgcgaggttgcccatcgctgtggagcagttcctgttggataaaggcctccagtacatgcagcctcaggcgggtctgctccgagtgatggtgtactaa

SEQ ID NO: 13765 - DNA, 378 bp, Zea mays
  Peptide Sequence Number=SeqID_57140
atggagacttctcctgagaccgaggtcgggtctgcacatgggcacgacagttggccgagactgagcttgggcgaggcggagtttcctatcgaggccgacttcgagcgagtttcgtcgtccttcgttgattgcagcgtcattggcggagcaggtgtgagggatccggaagagatggccaagtcgaagaaccacacggcgcacaaccagtcgtacaaggcgcacaagaacggcatcaagaagcccaagcgccaccggcagacctccaccaaggggatggaccccaagttcctgaggaacctgaggtattcaaggaagggcaacaagaagagtgcttgtcgataccgctgctgcttaggtgctcgcgaaacagttacatga

SEQ ID NO: 13766 - DNA, 1914 bp, Zea mays
  Peptide Sequence Number=SeqID_57141
atggacaaggatcgccaaggagctgcacagaagcgccaggcggtcgtcaggcttcatgaagctaggccgaagaggcagcggggggctgcgaaggttacggcccccggcggaggtcagccgccgttggcggcgaagtcggccgtccctgcatccggcagggcgccggaggctgcggctgccgccggtggttccaaggctgcgaaggccgcatcggcgtccggcagggtgccggaggctgtgaagtcggcccgagggttgccgccgccgggcaagcgcgtcgccgacttcgccaccgacattagtgtggacgactatcttgttggccaacttgtcgttgttccgcccgccgcggcgaccacggcaactgccgtaatgccaaaggcgaagggtggtgctcttagtgccggcggcgagatcccggcacttgctgctgtgagggacgttgcgggcgctgtaacccgccggctggaggagatgaaggaggcactaagtcaggcggctgacttcgccggcccgtgcggcgtccgggggcccttacggccgttgtgtctgccgaagtcgagagacttcggacgcaacatgcagacgccgtccgggaaaaatcggcctccgacaggggagaagactgacctccgacgccaattggtggaggagaggagggaggccaatgaggccctcgccaaggcgcaggctgcactggcggaggccaatttggcgcgggcggagggcagtcttgccagggagcgcgccgcgcagttagaggagcggctcaacgccctgcagggccgtgtggagaggaccgaggccgcgacgcgcacggaggctgagcggacgcgcaaacagcttgtggattcataccatgagctgggcgcgcggaccggtgacttcgaagtgccggaccgagagcccggacttcgttgcctggagtgggtacaggaggagttgcaggcactccccactatcgtggaggggtttatgtcgtatgcctccctggtcacctgcgagggggcgatgaacgcgctctctcgcgaagggtgccggcacttcgaggtcttcgaccaagccgatgaggattttgagcgagatatctacaaggttgaggaccctatagtgaaggagtccgccggaaccatctacgaccggatgtggggcccgcacggtcgagaggtggtcagggagcaggcggagacggcgagggctcaggcggcgcgtggcgagagggtggacgatttcagggcgttgaacagcgcgctgcctgacccggtgtcgaacccggcggaggccgtgtccgaggtcgccctggagccgcccccggagactgtcgaaggcgttcctgatgcccccgcagccgctgcagctggcgaaggcccgagggttgaagatcctgcgacggtggcggtggaggcgacggcggaggctcccgcgacggctgggtcctcgcaggttcaagattttgggcctgcgcacgcaaccgccactgctaaatttttggcggcttcgaccgtggatgatgttaataaatcggatgggtctacatctaagttttctgattttggtgactccgggagctcggttgagtggactgaggggtcgtcggataaggacttggactactttgcggccttggatgcggcagcggcggaggcgtcaccgcgcgctgcggatgcagcagatgtgcctggtccgagtactgggcgtaggcggcgaagggcggttgcgaagcgtagagtgagtggggcggacggcggtcgacttcgtgtgagtagggccggccggcaggaactgttgtccttgccggccgccgtgggtacgggtgagggggaattgcggagtctttttgcgggtgaggagcttaggataatgctattcaactatagggagatgggaattattccgaaggctgagccgatgtag

SEQ ID NO: 13767 - DNA, 1611 bp, Zea mays
  Peptide Sequence Number=SeqID_57142
atggaggatgataaggctaaagcagtagcggaagtaatgaagactttgcgtgttgacaaattgacagtagacttattctgtgctatactctgtttgtgtgaatggaaagtcgaggcagctgcagaatattttaatttttgtaggggcaaaccacaaatcccggaaaaatctctgaagcagaaatttgtttttcagtttgactttgtaaagggacaactacaacgcttcttccctgaagattatgattctgagaaaatcaagaagaacaatattgagtcacctaatttgtctgatcaaccactacaacgtgaccttatagtggcgccggtgaaacgaaggctagttgatgaatttaaatcttgtgacttgtctcaccgacagaagagaaaagttaagttgcagggaaactcactgcaaactcagacaccaagaagatcaccacgattggtaaacgtgaacaatacttgtaataagaacaaaaaagtgtcgaaaggaagagccaaagtgctgaaaacaccaccagatgcaacagatcaggtgaaggatagagcacataaatcatgtttgcttgatgagaaactagataatgccttgaaagctgttcatgaagaagcgacaggttccttatctcaggatctcaggaaactggattccccacggtgtgaggttggcttaagtaaagagcatggacatgatcaaggagatactggaaaaatgttggatgaagtcagtgatgtagaaaacagtaaagaacatgtgggaagcgatgctatggggaattctgaatcatatatgagtacatactgtgtagagccattgccaaccaactctaggttgacagcatattcaagaataaatgagctatcatttacatggaagcactcacaacatgccagttcccttgagaaagttttacttgacattcaaagagataacttcgtgaacaccattgcacgcatccagaaaatcgtccgggatgatccttcagatgtgcttagtgcagatgtaattgaagccactgtacagatagaaattcttaaatggggtttatgccttcaggacaagtgcgcccacaagatagtaaatacaatgttggattatgctaaaaaggtcaaggggagacacaatttcaatactgagatgaggaaggaagagttctctgcaaagctgcaggatctcctgaagtggcagcttaaagaactagaatttaaatacacttccttggaatcagattacaagaaagcaatggctgatgctagcaattttttctcgacatttgaagagcacaggaaaaagttgcatgccattaaggacggtatcaaggacctgcagcaggcctgtatgactaaggacgatgaaatgcaaaaattggcacttcaagtcgctgagcatgcgaccgcatatcagaagtctataatggaaaaggttagggtcaagatggctctgaagagccatgagcagactcttggttacataaaagagcagctagcctctgcggaatctggatcaattgatgtaggggcattggttaagatagagatggataatatgagtagggagattgaactctccaagcaaaatcttctaaatatcaacttcaagaaagagtaa

SEQ ID NO: 13768 - DNA, 843 bp, Zea mays
  Peptide Sequence Number=SeqID_57143
atggctgaaagaaactgcaccgccactcgcgccactactgtgcctcctcgactgtggaaccagtaccgcgactcgaggcaaccctgcgcaggacccaacagtgccaaccaagcacatcggtcacagggaccaggaaaggggataccccgaaagggatccttctccgcgaaggaaacgggccccgagccccctactgatcagaggttcgaaggctggcccctcggaggggttcaacagccgcctcagagcactcgggctccgcgcccactactggtcagaggttcaaagggccgggcccctcggaagggttcaacggccgcctcaggccactcgggctccgtgcccactactgatcaggggttcgtaggctggccctcgaaagggttcgacagccgcctcagacgcagagcgagggatgaccctgggtacgttcgatacataaccaaggctcgggctacgctcccgaggtaccctaggacatttccgagaccaacgggaacgatttttgtaacggaatcccatcagagggaggcatcgagccctcggaccccgtcaaaaggggaccgggtctggcaaatcacccgcaggctcgggggctgcttgaaagggaaatgtgcccttgggccatttctaagtattttggtgattgagtgccaatgcaagtgcttttgtgttgatatatgcaatgtggtggacaaagtgcaaatcatgtcaaaaggaaaagaacaattggaaacatcttggcccgagcagccaagactctgctcagtctgggagcaccggactgtccggtgcgccaggctggctcgagcgaactggccgctctcgggaattcatcggtga

SEQ ID NO: 13769 - DNA, 159 bp, Zea mays
  Peptide Sequence Number=SeqID_57144
atgcagcaagcaagtgagaaagattttaaaacatcaagggaggtggcaaatgcatcggggcttgccttcgttcacagggtatcaaagctatacctctgccttgacaaagattggtttccgaatgatgcgattgcaattaccggaatccgtgaacagtaa

SEQ ID NO: 13770 - DNA, 1206 bp, Zea mays
  Peptide Sequence Number=SeqID_57145
atggcgcacatggagctccgcttgaccgatgcgttggctggccgtggtggcgagcacaggatggaggacgcggtgtcagggctgcgatcttccaactccgccacctccttcgtcgccgcgccggtgtacgacgacgacgtgttcagctcttcggcgacctcggtgtgccctgacgatgtgttcagctcttcagcagctcccacaggcttcgatggagagcctattttcgacgaggagcccgataactccatcaccgagtctgtcgacgtctcgtgccacgaccatctcttcctcctcgacaccgcctgggactgctcgcagcagcacaacgccagcatcctaggacggcgccagcatctcagtcgcagcgcgcggctgcagcgccgaccgctacagcacctgaccgtcgaccccgtcagcgccgtccatggcagcgacgactctgagttgtcccacagtgaggtcgacagggtccttgcgaccgtcgtgctctccaacccgcgcgagaaggtccatgacgggctcgtcggcgtgacggagttcgcgcatcgtcctctcgccgtctacgacagctacgtcgagcacgacctctacagcttcatcccgctgctcttctacaccgagcaagccaaagaggagcaggtacccgtcgacacgcccaccaggtgttcgatgagagtcctcaactgcagaacctttcctcgacaagggcttcaaggacatccgtccagcctggtgtgtccactcgtgcgtcgccacgatggcaggttccacctctggttcgaaccctccgtgctggtcgcaccgcacaccaggggccgcgctgagcagatgacgctttcctacgacgctgatgccgaagctgacgactactacaatgcgcccgatgtcgagatcatggtgtccaacttcggctccacctccaccctcagctacctcgagcctgatctcatgctacccacgcggtacaggaacattctagcgggcatgctggagaaggccgtctacgaggaaggccatgacctgttcggtgtgctgtatgaatcccgcccgctgcagtggcgcgcggtgcacgtgcaacgcctcggcacgctctccacgccgtggggcaactctatgcaggagatgctcgagaacatatttgattgtctctactgcgtgttcagagtcctagagaataaggagagcctctactgcttggtctag

SEQ ID NO: 13771 - DNA, 213 bp, Zea mays
  Peptide Sequence Number=SeqID_57146
atggcggatgatacagaagagtggatggtaagaatcgatggtatggatgtgagggagatgggcattatcaagtttcaaggatttacaactcttattagtcaagagcttgcaatgttttcaggcaatgtcagggacaacatttcttttggtaaaccagaagctgatgaagatgatattgtcaaagctgcaaacacacatgagttcatctcgtaa

SEQ ID NO: 13772 - DNA, 774 bp, Zea mays
  Peptide Sequence Number=SeqID_57147
atggatgggaatgctaccgcgctcgcctccccctcggccggtagcttcccagacaagcgcgcgcgatcggaatactccgtggagcgagctccaggcgattcaaccgcgaccgcaacgccgccggagaaggtagccgtggttccgcgcacggcaccgaatcctttctattggtccgggcggcgagcatcagaggtcgttgtggccgcggatccgccggcttgcttcgtggagcggccaccccgccgatccgtgcgaaggcgccgctgccggtcgtctctgtccgccggtgctgcgtctgctgggaggaggtcaacgggagttcgtcgattcgccgagagatctacgctcacccgatctgcgtcattagagcttgaaggtccaagtggtcatttcagtgtatccaccaaccttcagccaaggagcaacaacttgaggattgcaatcaagatgagaagccatgatgccaaattgctgcaaaacttggtcctcaatcttgcttcctcagtggaaagtggtgctttcaatattaggacgtttttagaagaggctttccgtcatttgggtgacgagcattaccttctcaatgctctacttgctattcgtaaggaggtagacatgatggagcaggatgcactggagagcaaagcacggtctgacccagagaaggagaggatggaggaacaaattcaccttgctgagcctgcaaagacagcgcctagacaattcactttcaccccccccccttcctcaccagaattgtacgaaccttgctga

SEQ ID NO: 13773 - DNA, 189 bp, Zea mays
  Peptide Sequence Number=SeqID_57148
atggcgcacccgccccaaatcaatccctcacacggcggcacggtaatggtgggtcatgggtggaaaggagggagggcgaaagcactccgcgcccttatagcccaggagagggtcgaccgagcacttgcacaggcagtgagggatgaagaggtagaagacctcaccggcctggagagctcggtggcctga

SEQ ID NO: 13774 - DNA, 384 bp, Zea mays
  Peptide Sequence Number=SeqID_57149
atgaagctgtggaaggagacttccaggagttccaagactacgacgagttctaggcgtgggttagcggcaacccccagtcggctgcctgtgaaggccgcggttatctacgtttcttttccgcactttgatttattgcgaccgttggagtcgaccgttgcgctcgctagccgttgttccgctggcacaccggacagtccggtgaattctagcagagcggctctccagaatcccgaaggtgaagagtttgagtcgatcacccctggtgcaccggacagtccgataaagagcgaggtagagatgcaaactctcgtggatgacgccggtatcgtggatgacgccagtatttttaccgaggtatccggaaccacgcaaggtcccgactaa

SEQ ID NO: 13775 - DNA, 1581 bp, Zea mays
  Peptide Sequence Number=SeqID_57150
atgtcgcctaaattccctccatacctcacctcatcgcttgcagagccgagaccagataatacagttcacttcagggagaaaacagaaacaaataaacgcagacaagagggcgaccaatctggcggagctgctggagcttgctgcagtgaccgcatggcgggagaccaagacgcgtcgagtggtgacgcggttctgagcctgcagttcagggcagctggaggagagccagcgctccgctacaagagacagcgcgtgcaggcggaggatggtcgacgcgggcatagcagcggcgtttgtgggggagaggatgggattcctggcgacggcaacgacaagggggaagaggatggcactggggctctagcagttgctgttactcatcattgtcgacaccgacgacaaaaaataaaaggaaaaaaaaagctttggatgacagtggtgacgccgtctctctccgagaagaagggcgcgagggaaaggatggaggcgacggtcgacctcaagtacgagccgctgttcccgaacggcggcgtgtcatcggcgaccaagaagacgaggctcagggtggcggccggcggagagacgtgggtgtaccgcgagtgcctcaagaaccacgcggcgagcctgggaggtcacgccctggacgggtgcggcgaattcatgccgtcgccggaggccgaccgggcggacccgagttcgctcaggtgcgccgcgtgcggatgccaccgcaacttccaccgccggctcgtcgagctgccactgccaccgcctctcctcgccttgccgccaccactggcgccggcgccggctgtcgcgtcgcacgtaatgcgtgacagccgccgcacgatgcgcggcgaggaggcgcgcctgccggccgcattcgacgacgaggcggaggagtcggacgcgagctcggatttctacgaggaccgcccgctgtcgccgatgccggcgcaggcggcaattgtgtcgcccggctaccgccaggccacgacgcacacgctcctcgcgctgatcatcggcgcgccgagcccccaaacccccgcagcggcgccgcggccgcccccgcccacctccgtgggcccgatgccggcgcccgcgactgctcccggtgccgccgccgccgcggcggcggcggcgaggaagcggtcccgcacgaagttcagcccggagcagaagcagaggatgcaggctctgtcgtcgcgactgggttggcggctgcagaagtgcgacgaggcggcggtggaccagtgctgccaggagatcggcgtcagcaagggcgtcttcaaggtctggatgcacaacaacaagcacaacttcgtgggcggccacagcgcgcgccgcagcgcctcagcctcagcctctgctgccgcggccaacccggccatgcagcaaaggtccgacgccgccgctgtctacccttcctcccacggcgatggcgccccagcagcagccgtcgttgcccacccatccgctccaccgcccgtgcctgtccactctaacttcaacatcgaaggcaccgccgccgatgacttccgcgtccaaccgtcgacggcgagtggcggctcgccgcagtcctag

SEQ ID NO: 13776 - DNA, 438 bp, Zea mays
  Peptide Sequence Number=SeqID_57151
atggtgtcgcccaagactgccaagaagcaccacgcgcacctcaacaaccccttcccgcgcgccgtaccgacggccgccatccgcgacgacggcgacgcggccctgcgcctatcgttcccgtcgacctccaagctcgcccacgcgcatgacttccccgtggggacccgtttctgcctccgctgggacccgtcccgcggcggcgaggatcacgcatggtcgggggcggctgcacgcatccggcgggggtgggggcgggagcgggagcacatggctgttgggcgagggcggctgcgcgcatggcggcgggtgcggatgcgggagcgagagcgaggcaatcggacggttgggatggaggcggggttgatccggcaatcggacggtcaggatggaggtgggggcatggttgtgcctagtctacactattgccttaagtattag

SEQ ID NO: 13777 - DNA, 1899 bp, Zea mays
  Peptide Sequence Number=SeqID_57152
atggaagtcggcaagctgcgcgtaggtggagtcgaggcgggggcattggtcgcgccagcgcccacactgaccgcccccgcctcgaaaaaccatgcgcccgcctccgcccgcccgcacgccggaaacctcgccgcagaaaaccgcccgccctaccgcccgcccgcaaatccttccgcgaaccgccctaccacccgcctcaatcccgccttgttttcctgctatagctccatcctccgcaaaaggacctcggggacgacgtcgggcgccggtggcaggccgggctcacgggcgcacgaggcgccgccgggcggcctagtgctggtatccaaggatctggacaacatccacgagatcgcgctgcgtgagtacaccgagctggtgatcgacgagacggaggtgtcggaggccgcgcttgtgcggaacgtgttgtacgcgtaccagggcgtgtctgatcgtgagccatggcggaatccatcgtgtccggcgccgccgccccgccgccggggttgccgcccagttaaagaacgccagggcgacctaccagttggaccgctgcttctggaggaccatgaggataatatcatcatccatgtggacagcgaaccgacgaagagcacccctgagatcggcgttgtcagccttggtggacttgagaaccatcagtacttcattgacgattccgctgtgaaggacaacttggcgaaatggttaaggcaaacccaccgaaggcaggaaggaacccctttgcggcattgcgtcgaacggcatgcaaagctcaacttgttcaccgtggtgcatgcggctgcgagaagaatacaggagatggtgccggcatcatggtcgctctaccacatgacttcttcaaagaggtcgcaaaggatgctgggttttgagctacccccaccaggcgagtatgctgttggaatgttttttatgccaacagatgaaaagcgtcgtgagaaaggcaaagctgagtttaagaaggttgcagaatcactgggacatgtaatactcgggtggcgtctggttccgactaacaactcagacttgggtgaatctgcactcgagactgagccagtcattgagcaggttttcattaccaagagctcaagatcagatgctgagtttgagcaacagctatatatccttaggagactctcaatcacctctgttcgagcctctctgaacattaagcgtggtggagagagggatttctacatgactattgtttacaagggccagcttaaaccgtcccagcttaaggggtactactatgcaaacctaggtcatgaaaacttcatgagttatatggctctgagtccagctgcagttctgctatggccgactgctatgcccgactcatcaggatgtgacctccgattaggtggtgggaaggaaatggcggcggtgggcatgctgctcggcggcgaggacatgcataggttcccggtgcgctccccgcggatggactgcggcgacctcatccgcagtcccgtcgcgcgacagatcgtgtccaactacttcagcatgtttgggccggtgcaggacgtgcgcatcccataccagcagaagcgcatgttcggcttcgccaccttcgtgtatgccgagacggtgaaggccatactgagcaagggcaacccgcacttcatgtgcgacgcgcgcgtgctcgtcaagccctacaaggagaagggcaaggtccccggtaggttcaggaagctgctgcacgcgcaccatggcggagccgagttcgtcggttgcgcgtcgcccaccggattgctggattccagggacccctacgccctcctgcttctttcaggtgcccaggccgtgtcgggttcgctcatgggcttagctctcggccacggctcgaaacgtaattgcttaaacgtgctaggctaa

SEQ ID NO: 13778 - DNA, 900 bp, Zea mays
  Peptide Sequence Number=SeqID_57153
atggcgggtccggctgtattgctgggctacggcgtcgccgggatcatcgctttcctgattatgcgccagcttggcgaaatggtggttgaggagccggtatccggttcatttgcccactttgcctataaatactggggaccgtttgcgggcttcctctctggctggaactactgggtaatgttcgtgctggtgggaatggcagagctgaccgctgcgggcatctatatgcagtactggttcccggatgttccaacgtggatttgggctgccgccttctttattatcatcaacgccgttaacctggtgaacgtgcgcttatatggcgaaaccgagttctggtttgcgttgattaaagtgctggcaatcatcggtatgatcggctttggcctgtggctgctgttttctggtcacggcggcgagaaagccagtatcgacaacctctggcgctacggtggtttcttcgccaccggctggaatgggctgattttgtcgctggcgggtaatgcgccgaagtttttgactcgcgtcagccgtcgcggtgtgccgattaactcgctgatgctttccggagcgatcacttcgctggtggtgttaatcaactatctgctgccgcaaaaagcgtttggtctgctgatggcgctggtggtagcaacgctgctgttgaactggattatgatctgtctggcgcatctgcgttttcgtgcagcgatgcgacgtcaggggcgtgaaacacagtttaaggcgctgctctatccgttcggcaactatctctgcattgccttcctcggcatgattttgctgctgatgtgcacgatggatgatatgcgcttgtcagcgatcctgctgccggtgtggattgtattcctgtttatggcatttaaaacgctgcgtcggaaataa

SEQ ID NO: 13779 - DNA, 315 bp, Zea mays
  Peptide Sequence Number=SeqID_57154
atgctgggcgtgttgggagtcggagaagcgcgcccacttggcgcggttgcatgccgcctgcatggttgcccgcccctttcgcccgttggtctgggcaaaagtggagagtcgcttgtaaccgctgggcggttcttcaaggatgttcatcatcctcgctggggtggaggccaggctgagccggagctctacctcccgcgcgggttcgtgggtcaccctctcctgcggcgttcgagggagagggcgctcgctggccctgcgggcgggtcggacttcgacaacgcggggccggtcgacggcaggcgtcgtcagccctag

SEQ ID NO: 13780 - DNA, 1746 bp, Zea mays
  Peptide Sequence Number=SeqID_57155
atggatccggtcggacctccgctacctacagtgcctgccctccagctacagagacgccgccatggagagactcgcagttgccgagttccagcagaggggaatggtgcccaacagctacgagatggcggcttccaccctgctgtgcggcgaggacagcagcagcatcctagacctcgaagcggggcccaggaggaggaggaggtgctgctggcgcggagcaggacgcgcggggagcccagcgtggtcttccccgtgccgtccgaggactgcgtcgccggtttcgtggaggtggaggcggcgcacatgccgtgggaggactacgccgagaggctgcgcggtgggggcacggatctccgcgtccggacggacgccatcgactggatttggaaggtggggcgctctcctcggtcaatgcagtcttcgctgatctctcgagtctgtgttcccatcccatccatccgggctatgaatctgacagttttgcctctcgacaggttcacgcgtactaaggaaggcaagtcttggacgacgcaactgctgtctgtggcgtgcttgtccctggctgccaagatggaggagacctacgttcctccgtctctggacctgcagctggtgctacccatcttcaacggcgcggcctacatctacgaggcgcacgtccggcgctacttcaagatcagcagctacgtgagccccagctacagcgagcaccaccgccgggtgctacagatgacgagcctcgacgcgtgcagtttcagttgtgttaatttggagctgccgcaggagcatgtcgtcacggcgctttcagtggagagctactacaggccagacgcgccgcgcaggccactgccccgccaagaggaggattttgaggtcgacttcgaggagttcggggtgaaggccggcgactcggagctcgactctgcagatgaggcaatgaccttcgccgccccaggagtgcactcgccagaggttacaactggctcttcccaatctccagagctatccttgtctgtcaccccattcttggctgcaatagcagttcctcttgaagacaaaacttcaacggtggattttgtttgggcaatccccctctccctcctattcttaggtgatttgcagccacctcgtagaaggtgtctgtatacgatggcatcagtgatgctcatcttttcagcaaaagctgctgatattcaccagataatccctcttgtgaaagctgcaggaccagataaaatgtcatctaacagtgagatggtttatggttttgaggaagatgaaaatgatgcactggcctttctttcagccataagcgagtacgacacggagctaatagaaaccgtgatgtgccacttcagggagaagtttgaaaatttaccagagaaatttaatggggtagaacaacttcttcaagagttttccctggatgatttgtttcctcttgttgctccactgttcatggagacgccacactcttgttcgatgtatgcagaaaaggccgaacaatgttttgacgagtattgccgttgtaacctgttgtttttgtctgctcatctcctgtccacaggatactacaagtttcctttgcagcgctacatggccctcgtggatctccaggaagggaacgagaggcttttctacaagctgctcattgacaacattgaggagccgttggtgaggcctgccaaaagcagcataaagcttgagaccatttgtttagtctatgctgatcagttcgactgctaa

SEQ ID NO: 13781 - DNA, 1005 bp, Zea mays
  Peptide Sequence Number=SeqID_57156
atggcgctgggcgctgggcgctggggggctgttgcgtgggcacgccgccggtcctggctgctgcctgctgcctgctcatccgacccagacacccaggccggctgcgtattgtcgggaaccataattagggtacccccaagactcctaatctcagctgataacccctatcagcacaaagctgcaaaggaaaatagcgccgcctgccctgctccgactgctgtgccactcgccagagtgaggccgacagcagctaagtccagcctcgggcgccataggaagctccgcctcgcccgaccccagggctcgacccccgtctcggcctcggaagacggtctccgcctcgcccgaccccagggctcggactcagcctcgacttcggaagacggactccgcctcgcccgaccccagggctcggactcggcctcaacttcggaagacggactccgcctcgcccgaccccagggctcggactcggcctcgacttcggaagacggactccgcctcgcccgaccccaggactcggactcagcctcgactctggaagacggtctccgccttgcccgacctcagggctcggactcagcctcgacctcggaggagccaccacctcgcccgacctcgggctcggaccgaccacatcacaggggggccatcattaccctacccctagctagctcagactacggggaacaagaccggcgtcccatatggctcgccccggtaaaacaagtaatgatggcaccccgcgtgctccatgacgacggcggctctcagccccttacggaagcaaggagacgtcagcaaggatccgatagcccgacagctgtgcttccacagggctcaagcgctcctccgacggccacgacatcacatgaacagggcgccaaaaacctctccgacagccacgacggcatgtacatagggctctggctctcctttgctagacacgttagcacattgctacatcccccattgtacacctgggccctgtccttacatctataa

SEQ ID NO: 13782 - DNA, 975 bp, Zea mays
  Peptide Sequence Number=SeqID_57157
atgccgccgcccaaccttccttgcaccctacgtcgagttcatcctccccgacgcaacctcgcccccgcctctggcctaggcacaggatcagacgatgcggcagaggctgcggagcgcgcgcctgtgccgacggcggaggcgaagaagcgggcgtcctccgtcgcgctgtccaagcaggagatcgtggacgacttcgtggcgatccgtgggacacgcccccccgcgtcggcccaagaagcgacctcgcacggtgcagcgacaactcgatttgctgtacctgggattgtgcttagtagatgtggcacccagctcctacaagatcgaggagaggtgattgttgctttggtggagctttcgatggacgacagactccaggaagatgttggccttctgcttctccatcaccgtcgttatcatgcagcctactggaatgccacagcgggacaggaatatgaggatgagcaggcgcaagatgactgcaagtggcaccggatcccgatgttcggcgactggaacctgcgggatgacatgcccgtcacccaatacttgcaagcagggaccttcttcatcattgtgccaccggcagagaaggacagcgacgaggatctcttcaaggagctagctcaggcttatgaggtcctcagtgatcctaaaaatcaagagttctatgatgcactgggtgaacccagaatcaatggcaagtggcaacagagaccagatcaaaaccctgggatccagcgttggcagcggctgcaacaaactcaagcagcaagcacttggtacaccacgtccacggggaccatttcactgtccactggacacacacagggcgcccctgacgcctccgcgcgccggaccgcacccccgccacgactcctctctgatcctgccaggtggtccctggctaaggacagcctgctcggcccacgagggcaccctgggcagcatttactctatggcttcattggccgttag

SEQ ID NO: 13783 - DNA, 240 bp, Zea mays
  Peptide Sequence Number=SeqID_57158
atgtcagatcaatccatagctccagttagaatgatgacaaatgaagccagcttcagaggccacagcacacctcagagtcttcgggacagcagcaaagctcctttaggccgccagctccaaggggcagaggcgccaggggcttcggaggaagatatggggatcagcctaggaaaatctattgcttattctgtggtgaggacaagggtcatactacaagaatgtgccaaatcactattctga

SEQ ID NO: 13784 - DNA, 483 bp, Zea mays
  Peptide Sequence Number=SeqID_57159
atgggcaagagcaagagaggtggcagctcttcgcatcactcgggcgacaaacgcaagcgtgagccgactcctccctcggaggacttcagcgactcagaatactcggaggagaagttctcctccgagtctaagggctctccggctcctgcctctcccccggcgtcgtctgatgattcagacgactcccaggggatcgccgtggaggtatggacctacatccgggtcgttgagcgtgccaggctcgagggctcggatgagtcggagtactcctcggatgaggagaattcccccgactcgtccgagggcagcggcggcgacgacgacggaggcgacagtgatagcggcggcggcagcggcaagggcggtgacgacagcggcaagggtggcagcggtgacagcggcggcggcagcaagggcagcagcaagggcagcaacaaggccagtggctacatgccactggttttagatgttagagtagattag

SEQ ID NO: 13785 - DNA, 807 bp, Zea mays
  Peptide Sequence Number=SeqID_57160
atgggggggaagacgtcgccaagtccgccgccgccgggcgagctgacggtcgtcgttgtcgctgccgcgctacggaggaaggagtaccatgtcgtagctgccgtcgagggacatgaactcgagactcccgaaacggagcagcgtcccgggctgaagaggttgctggagactacccatctggaactcgacgggaagttgttcgtcaacacgcagcaggcccctacctggcgcgccaactatcggcgtttcgaccccggggggtccctggaccgacgagtaaaattgtcgttgcgtgccccagcccagatgggttggcgcgagatggaacacaaaggggggaaaaccgcgactcatgttatcctgcgccagacccaaggtcgggcaaggcggagactcctcctgaggccgaggccggggtcgggtgaggacgcgattccgcctgaggtcgaggttgaggccgggccctggggtcgggcgaggcggagaccaccgtccgaggtcgaggttgaggctgagctctggggtcgggcgaggcagagaccaccttccgaggccgaggctggggccgagccctggggtctggcgaggcggagacttcctcctgaggccgaggcccaaggtcgggcgaggcggagcttcctgtggcgcctgaggctggactcagctgctgtcagcctcaccctggcaggtggcacagcagtcggagaggggcgagtggcgttgttttcctgtcaggtcagtcagtgggagggcgaagtgactgcggtcacttcgaccttgccgactgaggcacgcatgttaggataa

SEQ ID NO: 13786 - DNA, 1821 bp, Zea mays
  Peptide Sequence Number=SeqID_57161
atggaccgcgatgaggagatgggccacggggaccggtccctgctattcgtcggcgacgaggacgacgacattggcacctacagggacggcggcttcatggaaacctcctccgacgagggatctttctccgacccgagcgacggcgaagcccgcggcgggcgccgcggcggtgacggcagcaagagcgcgtggccgcagagttacaggttcgtcaaccaatcgcctcgccctcgccctcacttgcgcgtgtacgatggttgcacgcgcagccaatgccggtcgcgtcgcgattattcggaactgacggcggcgctttcgtcgtctcgcaggcagtcgatcgatatgctgagcgtggtgccgtcgccgacggtgagcatgctgatggcagcgagcccgaacctcaccagatttggcagctccttcctcaaggccgggagctccttcttcctccggaagggcgacgactcggtgctgccgctcgccaggccgctgctgccgccttcgctcccgcagctgtcgcagtcgtcgctgcggccgcagccacccatgaggcagtccacggacatcctcgcccagccgccgcggcctccggctgggcacgaggcccagttgcccgacaggccgtccagtgcgtgcctgagaccagattatatcgagcttcctccgcctgctagcaagtgcagcaggaaccaatcaatcatcaatgggttcaacgtgctgtgcggcgttgggatactcagcacatcttatggaatcaaggaagggggatggtcaagcctccttctgctccccttgttgggtggcagctcttgctacacaggcttgcttctaaagagatgcatagacagttcgcccaacattgggacatacccagacattgggcaagctgctttcggtgttgctggtcgaatctttgtatcggttgttctttacttggagctttatgcaagctgtgtggagtacatcacgctgctaggagacagcatgtcatcagtgtttccctcagcacatttagcttttgccggcatcgacatgaatgcacacactctctttgcgatcacaacggcattggcaattctcccaacagtctgtctcaggaacctcagtctcctctcgtatctttctgtcatcgtctgcctattctgggttggcattggagaaggaatcgggtttcacttttccggtgctctagtgaacgtgacccaccttccagtggcgcttggcctgtatggattctgctactcgggacactcggttttcccaaacatatactcgtccatgaaggagcgctcgcagtttccgtttgtgctcctgttctgcttcacggtggtgacagtcgcctatgctggaatcgccgtctcagggtttctcatgtttggcgagtccaccatgtcacagttcaccctgaacttgccacagcagtacatcccatcgaaaattgccatctggatgacgattgtgaatccgtacacaaagtatgcattgacaatgactccggtcgccttgtctatagaggaagccctgccaaagaagatgcagaattacctggttggaatgtctgttaggacatgcctcgtcctctccactgttgtggtggctctgctttttccttatttcgggctggtgatggcattgcttggatctgtcttcacaatgcttgtggctctgatactcccatgcgcgtgctacctctccatcaagaagggcgcagtgccattgtgggagatcatcctgtgcatagtcatcataatgatcggcgccgtatgtgcaagcgtgggatcatacacctcagtcagccagatgattagcagcaccagatag

SEQ ID NO: 13787 - DNA, 489 bp, Zea mays
  Peptide Sequence Number=SeqID_57162
atggcggtggtcgaggggacgaagaagaagtccactgaccgaaccgaaccactgttcgacggagcagatgacgcgatagccatcttcctggcgctgcggtcgccagagctggaggtgctaggcctcaccactaccttcggcaacgtccacaccgccctcgccacgcgcaacgcgctccacctgctggaggctgttggcaggactgacatccccgtggcagagggatcccatctaacgatcaagaaagccaccaagctgaggatcgcaagcttcgtccacggtacagacggcctgggaaaccaggacttccctcgaccagctaccaagcctgtagatcagtctgctgctgtctttctggttgagcagacaaatctgtaccctggtcaagttaccgttgtcacccttggcccacttaccaaccttgctctgattgtgtggattgtttcctacacgttgctctgcttctcgtttcttctggggttcaactga

SEQ ID NO: 13788 - DNA, 66 bp, Zea mays
  Peptide Sequence Number=SeqID_57163
atggccaaccctcctcaggctcggttgattgaactagaccacgctgatctaccaagaacaccatag

SEQ ID NO: 13789 - DNA, 339 bp, Zea mays
  Peptide Sequence Number=SeqID_57164
atggggaagcctgtcccatcactcctcatgctcctcctcaaccgagcaatcaacaaattttgccaagtcatcacatttccacttgttactcaatgtagcagcatggatcaagcagtctcattagctgcgagaagcagacgattcgaatcgagtttcaaccttgcaagggctcaccgccttggtgtacaatgcctcactaaccccgactaccgtcgtgcagtgaccgcacttgtacccaccataaccggaatgggagaccacgtctcaggtcgcgtgaggggtaaagtctgcgggcaggatttagtaaccattatgcttagtgaagaaaaactaagttag

SEQ ID NO: 13790 - DNA, 213 bp, Zea mays
  Peptide Sequence Number=SeqID_57165
atgtcaaatccaaagcaaccatttacctttagcacatttatctatgtttttgaagccaggagtgtggactcaagtgatgctgaaaaccctgggcttgatgatgtagatgctgctaacatgcacatggagattggtagacgcatatacggagagaggttgataacaagtgatcgtgatgttgacatggaacaaaggcaactgattcccaggtaa

SEQ ID NO: 13791 - DNA, 1299 bp, Zea mays
  Peptide Sequence Number=SeqID_57166
atggcgagcgacggcgaccacggcggcgcgctgcagaagccgctcttgccgaaggcgcccaggagcgggggctggttccggaaaggtacgagcacggcgcgcctcggcgccgccgctgccggcacctcgtccaaggccgcagcgctgcggccgccgcaccacgtgcccgcgctactctgcacgctcgtcgtcgcgctcggcaccgtccagttcggcttcaccagcgggtactcgtcgccggcgcaggacggcgtcacgcgggacctcgacctctccatctccgagttctcggtgttcggctcgctgtccaacgtgggcgccatggtcggggcgatcgccagcggccagatggccaagtacgttggccgcagagggtcactgatgattgcggcggttccgaacgtcatgggctggctcgcgatctccctggcaaggatgacagcatcggctttgatggccgtcaatgtctgctctgctctgcaggacacttcgtttctgtacgtggggaggttgctggaaggattcggtgtcggcgtcatctcctacgtggtgccggtatacgtagcagagatatctcctcagaacatgagaggagctcttggcgccgtgaacccgttgtctgcaacctttggtgtcgtgtttgccgatgtgcttggcttgttttttccttggaggcttcttgcgttaataggaaccttgccctgcctactgttgatacctggactgttcttcattccggaatctccaagatggctgatagctgtagcatcggcaaacaaaagtggtgcaatgagctttcaagagttgaaccagaagaaataccgcacgcccctaattgtaggtagcatcttcaaagctgcagtgccggttaaccttgttttgactatttcttcttttgggatgaccctaagccttcttgtggttgctgttgtattttacatcaaggacaatatttcacatgactctgacttgggtaacaccttaagtatggtgtccttggttggtgtcttggcttatgtcactgcctactcctttggtatgggtgccattccatggatcataatggctgagatccttccagttagcatcaagagtgtggcaggaagctttgcgaccctagccaactggttgacatcctttggaataacaatgacagcaaatttgcttctgtcctggagtgctgcaggtacatttgccttctacatgatggtgagtgctttcactctcgtctttgtcatcctttgggtgccggagacaaagggaagaactctcgaggagatacaatggtccttccagtga

SEQ ID NO: 13792 - DNA, 423 bp, Zea mays
  Peptide Sequence Number=SeqID_57167
atggacgcgattaaggtcaaggctcagttcactcaagggacacgatctcgcctcgcccgagtccagcctcgggcaaaggcaaccgaccccggaggattcacgtcttgcccgagggccccctcaagcaacggacacaccttcggctcgcctgaggcccagtcttcgcagagaagcaaccttggccagatcgccacgccaaccgaccggctcggacacagcctcggcctcggaagatggacttcgcctcgcctgaccccagggctcggactcaaccacgacttagaagacggcgaactccgcctcgcccgaccccaggactcggactcagcctcggctccggaagacgatggactccgcctcgcccgaccccagagctcggactcgatctcgacctcggaggagcctccgccttgcccgacctag

SEQ ID NO: 13793 - DNA, 729 bp, Zea mays
  Peptide Sequence Number=SeqID_57168
atgtggcagccggagagatcttggcaccctgctggtgtgaagtcgtggctgtcggaggagcaacggagcctggcggagggacagctgtcggagcgattgagtccttgctggcgtccccctgcttccgtaagggagctgagagccgtcgtcgtcacagggctagcggggcgccatcattgcctatctggcggagctagccagatgggacaccggtcttgttctctgcggcccgagtcggctcggggtagggtgatgatggcgcttcctgttgacgtggcgggcctgtgccctaggtcgggcgacgtggtggttcctccgaagccgaggtcgagtctgtcttccgtggccgaggccgagcccgagcccctgggtcgggcgaggcggaggtcgttcggcagaggccaaggcggagtccgagccctggggtcgggcggagcggagttcccgaggccgagcccgagcccctgggtcgggcgaggtggaggtcgttcgatggaggccaaggcggagtccgagccctggggtcgggcggagcggagttcgtcgtcttctggtgccgagcctgagtccgagccctgggtcgggcggagcggagttcgccgtcttccggggctgagcccgagtccgagccctgggtcgggcggagcggagttcgccgtcttccggggcttagcccgagtccgagccctgggtcgggcggagcggagttcgccgtcttctggggcttag

SEQ ID NO: 13794 - DNA, 1041 bp, Zea mays
  Peptide Sequence Number=SeqID_57169
atgtcttctcgctcccttatgcatcgtgtctttccaccttccaagcccccggatgggggatacccgccgtcttttcgcctcatcgttggaggaacgcaactccgtgggagttggtaccttttagccatcgttcggcttcaaggattttcatcatgcagcccggctgcacccctccgccggcggtcacccaagatggtgacctccagcttgatggtgggggaaagcgagccgggctgcggcctctccccctccctcagcctcaaggattttcatcaccaaggctggggaggggactgcagcgtgcccggctttcggacgcgagtggcttcggagccgttcgcggcaccggcgtctgccacggcggctggaagaggttcttccgccgacgtgatagccaaggctagccacgggccgacctccaactctacggccttctgcccgtccttgcctcacaagttttggcatgggcgggggcctcctggcagcagcatccgccctgaggtcagtgctgccgctgttcggccccccggagcagaagtcgtcgtcgtcgccgctgctggagcaggtgacggcgcgccgttcgttggtcttctgttgctccgcaggccttcccccatggagtggggttgttcgtacctgcggagggggaaccggagttccgtttgtaatggcactttgaatgccaactcgcctgttgattgtctgaaccgcttcaccaagcatgagtcgccccgtgccaaggtgacgagtgagaccccttggccgctcttcgatgagccgaggccaggggtagcgatatcagcgcgaacagaggcggaccgaggcctcggaccgggctggcgcccttggaagatggtcggccgaggcccctggggtaaccggccgagccgcctgctcgggccgggttcccggagaagtccctggaccgcgtcgccgtccgaggctgggtcggacctcgccgaaggtgccgccgatgccgagggtgctagagcccccttccagcgtgaagacccgatcctacaggatcagattgtcttgtag

SEQ ID NO: 13795 - DNA, 546 bp, Zea mays
  Peptide Sequence Number=SeqID_57170
atggcgagcgacggcgaccacggcggcgcgctgcagaagccgctgctgccgaaggcggccaggggcgggggctggttccggaaaggtacgagcacggcgcacccgtccggcctcagcgccgccgctgccggcacctcgtccaaggccgccgcgctgcggccgacccaccacgtgcccgcgctgctctgcacgctggtcgtcgcgctcggccccatccagttcggcttcaccaccgggtactcctcgccagcgcaggacggcgtcacccgggaccttaacctctccatctccgagttctcggcgttcggctcgctgtccaacgtgggcgccatggtcggggcgatcgccagcggccagatggccaagtacgtcggccgcagagggtcactgatgattgcggcggttccgaacattatgggctggctcgcaatctccctggccagagacacttcgtttctgtacatggggaggctgctggaaggattcggtgtcggtgtcatttcctatgtgaagatcaattggagagcgtgggcggctggtggttaa

SEQ ID NO: 13796 - DNA, 600 bp, Zea mays
  Peptide Sequence Number=SeqID_57171
atggcccaagggcacatttccctttcaaatgaccgggtctctttcaaccctttccctctctcaaatggtcacctagaccgaatgagcttttctcctcaatcaaatgggtcacttagaccacacaaggaccaccacaacttggtgtctcttgctttgattacaaaggtgttgagaacaagaaatggggaagaagaaaagcgatccaagaacaagagctcaaagaacacaagcaaagactctctctctctctctagtcactatttgcttggagtgaaaatgggacttggagaggctttgattctatttgatttgtgtcttgtattgattgcactagctcttgtattgaatgtgaagtctgaaaacttggatgtcttgaagtgtggtggttggggggggaaaatgtgccctgggccatttctaagtattttggtgattgagtgccaacgcaagtgcttttgtgttaatctatgcaaagtggtggacaaagtgcaaatcaagtcaaaagttgctaatccctcccttaccccgttcttctttgtgaacttcaagtgtaagggcgagagactccaagttgtggagattcctcgcgaacgggattaa

SEQ ID NO: 13797 - DNA, 549 bp, Zea mays
  Peptide Sequence Number=SeqID_57172
atggccataattgtgaagatttggagccaatccgcgcttgaacttgaccactctctgcgcagcctcgtgctcaacgccgtgcccaggcgccagagcacgcactggcgctcgcccgcgcacaccccgagcgcgtgtcagagccacccctcgaccgtgctcgcccgcgcccttaaagaccacccccggacgcgcctcacctcactcctcgcataccccactgaccagaccctgtccttagctccggtgagctctgcgccgcccgcccgagccacccgagcgccagccaccgcgaccagccattttcagagaccccctagcctcacccgagcctctggaaagcttccccgagaagccgtgaagcttgtccaagcaaggattgaggccctgcctcaccgggacagcaagatcaccgtcgccagacttcggccgccaaccaccgcacgtagactgagctatcaggttaaccttacaaggtttaaaaactcgattcgaatcgtctgcttctcgcagctaatgagactgcttgaccccttgtactgcattgagtaa

SEQ ID NO: 13798 - DNA, 510 bp, Zea mays
  Peptide Sequence Number=SeqID_57173
atgtggaaagatcgagtagagcatgccaaggatgtgtgggctctatacctagggcagactgctcacctcacggtgcgatgcatgaatgccctataccacctgcaagcggtgcgaggagaggcaatgtctcagctaatgggcttggtggaggctaccaagatcaccctggataacagggaggaacttgtggtagacctatccactgagatggtggaaaaggacctctgggtggagcagatggccacccagatccaagaacttgaggagctagtaggagccagggagaacaccatcgaggttctcgaggatcaactcataaacactcagcagcaacttgaggaagctaaccagcacttggatatgcaccatcaggggattcaggacatggaggtcgacgaggatgttgacatcgagggaggagtggagctggagcctgcatccagcctggacactgctggctcagggagacccccttccctcgagtcaagcgctgcctcgtttgctcattag

SEQ ID NO: 13799 - DNA, 147 bp, Zea mays
  Peptide Sequence Number=SeqID_57174
atggaggccaagtcacaccatcaaccaagtcaaggaggcctcaccgccttggcatacaatgctccactgaccccggccgccgccgtgcagtggccgcacttgtacccaccatatctagaatgggagacccagtctcaggtcgcgtga

SEQ ID NO: 13800 - DNA, 336 bp, Zea mays
  Peptide Sequence Number=SeqID_57175
atgtcccaactgatgggcttggtggagtctaccaagatcaccctggataaccgggaggaccttgtgatccaagagcttgaggagcaagtaggagccagggagaacaccatcgaggttatcaaggatcagctcctgaacactcagcagcaacttgaggaagccaaccaacacctggatatgcaccatcaggaaatccaagacatggaggccaaaggggccgacgaggatgttgacatcgagggaggagaggagccggagcccgcatccagcttggacactgctggctcagggagaccaccttcccccgagtctagcgttgcctcgtttgcccattag

SEQ ID NO: 13801 - DNA, 255 bp, Zea mays
  Peptide Sequence Number=SeqID_57176
atggaaattttgggagaactagataatgtacaactaaaaccttctaagaatcccatgaaacctaaagatgtaattaaatattgtaagttcattcaaaatcccaaaaatgaagactgtaatctcgctgacggggagtacatcctcgttccggagcatggagttgctcaggagatagcccaggagccagcaccagagcctgccatcgaggatctacctgccccagctttggaaggcaagccccgatcttatgcataa

SEQ ID NO: 13802 - DNA, 456 bp, Zea mays
  Peptide Sequence Number=SeqID_57177
atggctcactggagagcccagtccacgcgcgggggcgggcggccgaagtccggcgagggtgatctcgggcttccggtgaagttctgccaggcccgagggcttggaaagcttcacgagccaatggcagagctaaccgaagcgctggcgcgacttggacgcgactggagagagctggccacggcggccgaggctctgaaagcttggcgggcggtggcgcggcgtgctcggggcaatttccggctagggacatggagttgtagtgtcaccaaggtgccaatgttagaatgtctggtcccgaggtcaaactgcgccaaaaccgtgtcaaatgaatttggtttgagttcaaacttttccagggcgtgttcaagggaatttggcacaactttgatatttggatctcctggttttgagtttcgaaaaacggagaacgcagttgatccttggaaagaggtctga

SEQ ID NO: 13803 - DNA, 822 bp, Zea mays
  Peptide Sequence Number=SeqID_57178
atggctcgtcttagacacacagcacggaagtcagtcattcctttcttgccctcttgtctcacggagcattcgcttcatcgcctggtgactaatcaatctagccatttggagaggttgcaccaccgcctacacgaggagcaggagcgtcgacgacaagagctggagcagcagggctcttcttactcacctcagcagaaggtagagtccatgaggcgctgctctcctgtgcccccgctggaggcgcaccttgcaccaccactaggcatcccggccgctggattagctaaaggaggagaccccgatgatggcgacgacggcaatagcagctcgagccatagcatcgacctttcggagtcgtgggacatacaaagaccactgataggcgacttgcttggtgtgccatcggaggatagtctccagggtgtggaggtctgctcgatgcattattctatctctaagcgggactcggctgaggcgaccatgcaagataccgcacgacgtgcgctttcacactactgctcagtgctcggtggggtggccgatggtcttgacccgaggaagtcagtgaagatgtttatctgttcagtgttatggaggaattctatactcttttcttatgctgcaagatttgcaagatcagttctcatatgtgattgcattccacagatgtcagacaacaggcgcagaggaggaaggcatgctcagcaggagcagcaggcactgcaagatgaggcacctcagcagcagttgccaccactacccccgatgacaatagagcagatgtttctgatgcagacccatgcaatccaagcgattggttag

SEQ ID NO: 13804 - DNA, 921 bp, Zea mays
  Peptide Sequence Number=SeqID_57179
atgaagccgtggaagaagactttcaggagttccaagattacgacgacttctaggcgtgggttagcggcaacccccagtcggctgcctatgaaggccgcgtttatctacatttcattttcgcactttgattattgtaaagactatgtggatgtctcagacatggctcatcttagacacactgcgcggaagtctgtcatccccttcttaccctctcgtctcgcggagcgtccgcttcgccgtcacgagatagagtctgtgaggagctgctcccccgtgctcccgctggaggcgccccctgcaccaccactgagcgccctagcccctggattagctgctggaggagacccgaacgacgaaggtggcgacaacagctcgagccacgacaccgacttttctgctgaccaggagccgaaaggatgggttgctcgacccataactcgcgacgctgctcgcgggtgtcacttccatgatgcgctcgacaccctgctacgtcgggcacttgaccagcgtacttggtctatcgagtatcgctgtgtggtcttccagcacagtcgcggggtctacccggaccgctgggaggcgacctgcttggtgcgccgtccagagaacagtctctggggtgctgaggtctgctcagagcactattccatctctgagcgggactcaactgaggcggccatgcaagatgccacacggcgtgcgctttcgcactactgctcagtgctcggcggggtagccgacggtctcaacctgaagtattacccccgtcgtccatctggcagcacaggaggcatgattgtctcacctgttggtgaggacaatcctaggttgagcggcacagtaaacctagccatcgtgctaaacacggagctggaccatgcgctagacgagctgagtagggctcgtgctgagatcgcttag

SEQ ID NO: 13805 - DNA, 402 bp, Zea mays
  Peptide Sequence Number=SeqID_57180
atggcgggcggaagagagctcgccggagctaaggagggtcgtctggccggcgaagttctaaagaagatagtgtcatatagaggaacacagttcacctctcattttttgcagcacctgcaggaagctttgggcacgcatttgaagttcagttcagcttatcacccgcggatcctacggcactgtatggaaggagttgtagaactccactgctctgggatcaacttggggaaagctaaagaagtgtttgtgagtactagaggagaagttgctagtggaaggactggaagtccaagaagacctggcatatgtggagaagccaacgcagattctggagacaacaaacagagtcacccggagaaataccatcagaatgtgcaaagtcagatggggtcaccactctga

SEQ ID NO: 13806 - DNA, 432 bp, Zea mays
  Peptide Sequence Number=SeqID_57181
atgaggaccaagctcaagatgatgaaaatgaagatcaagaggatgagccacctcaagaggaggacaatgattaagggggagatgataatgatcaagagaaggaagatgatcaagaaatacagggtcaaagaccgccacacccaagagtccaccaagagattcaaagagatcaccccggtggaagatgcattaagagattcggattgggtgttggcaatgcaagaggaactcaacaacttcacgaggaatgaggatgccaagcccatcaagacatccatgggaaccaatgggcatctcgacctcgacacgggagataaatccgtagatcaaaagaaacgatttaaatattctgagtgtaaggtggtcccaccatacgacgggtacgcgtggtctggtgattcgccttctcgcgcactatggtccaccgtttag

SEQ ID NO: 13807 - DNA, 1479 bp, Zea mays
  Peptide Sequence Number=SeqID_57182
atggtgaggaagaaaagaactggccctggagagagttctggggagtcttctggagcgcctggtcatggctcctcacagcgtcctcaggcaacacaacagggtacccgtggtggagggcaacaccagggccgtggtggatatctgggccctggagtgccgccttcacagcacccaggtggtggcccacctgagtatcatcaaccgcttgactaccagggacgtggtggatatcagggccgtggtggaccaccttcacagcatcctggtggtgggacaccccctgggtctcaaccgcgtggctaccaggggcacggtggataccagggccgtggcgggccaccttcacagtatcctggtggtgggacaccccctgggtctcaaccacgtgactaccacggacgtggtggtccgcgtcccagagggggaatgccacagtcataccgtggcgggcatgtgggaggtagtgttgtaccaagtgttccttcaggtccatctaggccagttcccgagctgcaccaagccccagatgtccaacatcaagcccctgtggtggcaacaccatcttcgccaggagctggctcgtcctcgcagcctgggaaggctgaggtgagcgctggacaagtccagcaacagttccagcagcttgcgattcgtaaccaaagcttagccagccaagctggtcagatggcaccagcgtcaagcaaatctgttaggttcccattgcgccctggcaagggtacgcatgggtccaggtgcattgtgaaggcaaatcatttctttgctgagctgcctaataaagaccttcaccaatacgatgtatcaataacacctgaggttacttcacgcggcgtcaatcgtgctgtcatggcagagctagtaaaactttacagacactcccatttggatgggcgtctgcctgcatatgatggaaggaagagtctttatacagctggagcgttgccatttgcttcgaagacattcgaaattactctgcaagatgaggaagacagtcttggtggaggccaaaggcgccagagggtatttcgggtgaccatcaaatttgctgctcgcgctgatctccaccatctggctatgtttcttgctgggaggcagccagatgcccctcaagaggctcttcaagtacttgacatcgtgctacgtgaaatgcctactgccaagtattgtcctgttggtagatcattttattctcccaagttagggagacctcagcaacttggtgaagatatgtcctctactgcattttttgaggccctccctgtaattgattttgtttctcagcttcttaatagagatatctcagttagaccattgtctgattctgatcgcgtgaagattaaaaaagccctacgaggtgtgaaagtggaggtcacacaccgtggaaacatgcgtaggaaatatcggatatctggccttactccacaagcaacaagggagttatcgtatgtgcatgtttcttag

SEQ ID NO: 13808 - DNA, 225 bp, Zea mays
  Peptide Sequence Number=SeqID_57183
atgaagtattatttgaggttggtattgtatctgaaggtattgttgacgcagggaagtgttatagaacctattgtggttgttcgaggaaatgagatgatatcgctggtcattggtgagaatgaagttgttattatgcttgtgatatacaagtatgcctatgttgttttcaccatgtttttcatggttgagttttattacaataatattgtcacactcgccttataa

SEQ ID NO: 13809 - DNA, 483 bp, Zea mays
  Peptide Sequence Number=SeqID_57184
atgcacccttggtcggggcgcatcaagggctgggagaaggcgctagcgtccggttttcccaacgcgacgaccacccgcccgtggagaatgtcgatggaaagaggatccgaggacatccacgagccctccaagtcagcctccggcgtcatctcccaaagcggcaaccgccgctccgccaagggaagcaccctccggcggtggatggcggcaatcactcccgcggcggatcgcccgcataaagcggctcgccggcacaccgaatccccgctcgtggaaggagacgaagctcacgacgcaccccggcggcggggacagagcggctccagatcctccagatcacccgccgtgaccgtggagaaaggccatggatcgcgcagcgagatgatggtcacccggtcggccatcaccaagcgaaaggggtggcggtggaaaggactggggaccgggaaagggggataccccgaaaatgatccttctccgtga

SEQ ID NO: 13810 - DNA, 668 bp, Zea mays
  Peptide Sequence Number=SeqID_57185
tggagggggccgcggcgtgggacggttccttgaagtgggcgcggcgtggggaggcggctcggcgtggctcggtgcggcgatggcgcgcggcgagggcacgcggcacggcgagggcaagcggcgagggcgctcgacgcggctgctcggagtgggcgcggcgtggggaggcggctcggtgtggcgcggcagcgggcgcgcggcgcggcggcggctcggcgggcgcgcgacgaggcggtggatcgacgggcgcgcggcgagggcgggtgagagaagcaaggtgaatgtgtgtcttcctggggaggagacaacaccgaagccgggaaaagatgaagttgttgtttataagagtttcttcaaagcgggacttcgacatcccatgccgtatgaagccaagggggtcgtatcgacgctgatgcgctgtgcaagacaaaagaatggttctatgctgaagttgactccgaacaacacgaagattgtaaggcagcttatcagttcagctgcttctcagaatacactaaaagcagccaacaagcagaagctgcttttcaccagcttatcagataagctgctttttcaacaagcagcagctgttccaaacagggccaatgtcagggctagagagaaaaggaagagagctgcaaagaatgaggtcgaagagccatcttcag

SEQ ID NO: 13811 - DNA, 396 bp, Zea mays
  Peptide Sequence Number=SeqID_57186
atggggacagtggccaggacaagctctagcgtcgcatccacattggactggtgttgggtggacgcaggcacctccaggcacttggacgcctccaccaccccaaggatcgcagccagtctccggatgggtgccaccggtctcccagccaccggcgggctctcagccatttcaagcgtggatggctccgccaccgacggggtgggtgccaccacctcaggggtggccagcacaacagtatatgtggaattgtggatgcatccacagcctcctcatcaccatggatcacagggttcagcgtcacatgctcagggatcggagggtgctgtcaacgtccaagacttcttcgtccatggttctggaggcagtggccaaaactcccacagcccgcaggagtga

SEQ ID NO: 13812 - DNA, 1323 bp, Zea mays
  Peptide Sequence Number=SeqID_57187
atggcgagaaccttgttgtggctcgcgctcttgtgcgccgccttggcgttttgcacccgtgcagcaggcctccggctcgagctcacccacgtcgacgccaagcagaactgcagcaccgaggagcgcatgcgccgcgccacggagcgcacccaccgccggctggcgtccatgggcgaggcgagcgcgcccgtccactgggccgagtcgcagtacatcgcggagtacctcatcggcgacccgccgcagcaggcggaggccatcatcgacaccggcagcaacctcatctggacgcagtgctcgacctgccagccggccggctgcttcagccagaacctctccttctacgacccgtcccggtcgcgcacggccaggcccgtggcgtgcaacgacaccgcgtgcgcgctcggctccgagacccggtgcgcgcgcgacaacaaggcgtgcgccgtgctcaccgcctacggcgccggggtcatcggcggggtcctcggcaccgaggcgttcacgttccagccgcagtcggagaacgtgagcctcgccttcgggtgcatcgccgcgaccaggctcacgccgggctccctggacggcgcgtccggcatcatcgggctgggcaggggcaacctgtcgctggtgtcccagctcggagacaacaagttctcgtactgcctcacgccctacttcagccaaagcacgaacacgagccgcctgttcgtcggcgcgtccgccggcctgagcagcgggggcgcgccggccacgtccgtgccgttcctcaagaaccctgacgtcgacccgttcagcacgttctactaccttcccctcactggcatcacggtgggggatgccaagctcgccgtccccgaggccgcgtttgacctccggcaggtcgcgacggggctgtgggcgggtacgctcatcgactcgggctccccgttcacgagcctcgtcgacgtggcgtaccaggcactgagagatgagctcgttcagcagctgggcgccagcatcgtgccgccgccggccggggcggaagggctcgacctgtgcgcggccgtggcgcatggggacgtcgggaagctggtacccccgctggtcctgcattttggaagcggcggcggggacgtcgcggtgccgccagagaattactgggggcccgtggacgatagcacggcgtgcatggtggtgttcagctcgggcgggccaaacagcacgctgcccatgaacgagaccaccatcatcggcaactacatgcagcaggacatgcacctgctctatgacctcgaaaaaggcatgctctccttccagccggcggactgcagctccatgtga

SEQ ID NO: 13813 - DNA, 849 bp, Zea mays
  Peptide Sequence Number=SeqID_57188
atggcctgtatcaggtgcactgcacgtaagtctgtgaacccccttttgccttctcacctggcggagcgtccactgcgtccaatggtgccaggtcagtctagtcacttggagagactacatcgacgcctacacgaggagcaagagcgccgacaccaggagcaggagcagcaggactctccccctcacctcagcaggaggtggagtctgagaggctgccttcccctacacctcagccagagatgccccccgcaccaccacagggcatctcggctgctggaggacaccctgacggagacggagacgatcatgacgtcggtggcagttcgagccatggcacggagctctcggaggagccagagtcagagggatggatcactagacccatcactcgtgacgccgctcgcggaggccttctcagagcactattttattactgagagggatactgccgaggtagccatgcaagatgcagcacgacaggcactttctcagtattgctcgttgttcagcggggtagctgatggcctcgacctgaagtactaccctcgtcgttcgaccggcagtgctggaggtgtgattgcctcaccagttggtgagggcaatcctaggctgaacaacatggtcaacctgactgtcgtgctcaacacagagttggaccacgcccttgacgagttgggcaaggtttgggcagaggttgcggaattgcgtgctgagtgcgtagcacgccactatctgaatggtggttctcccgcccctgtcgagattcagcacctttaccgttcactgccccatggtcgcttcgactatggtaccccagactacaggacccagatagatttggatccctag

SEQ ID NO: 13814 - DNA, 273 bp, Zea mays
  Peptide Sequence Number=SeqID_57189
atggatgataagaagaagcaacttaagacagagtttcttgacccgttgatgatatcccaagctctctacaaagaagttgttcggagacatggagaagaatacaaagacttggatgatgatgaatttgagaaagccgtcaaacagaatcaaagaaagaaaatgaaggttcctaaatccaagatcaatgttgaatggttagaaagagatatggtttccgtcggcgtggctaaggttgtggtgcaccacaagcggttcctggaaccgcctgtgtag

SEQ ID NO: 13815 - DNA, 1002 bp, Zea mays
  Peptide Sequence Number=SeqID_57190
atggtgaccaccagttcgatggtggggagaagcaatccgggctgcggcctctgcctcgccctcagcttcaaggatcttcatcatccttgctggggaggagggcggggcgagccggggctctacctcccgcatgggccggcaggccgcctcttccttcggcattcaggggggatggcgctcactggccttgcggagggggcgaacttcgacaacgcggggccagtcgaccgcaagcgtcgtcacctccagcgtgcctggctcgctggctcagctggctcagtcgcggcctccgacgctgcctccttccgcttgatccgggcgtggccgtccgcccaccgtacgggcggctgctgcgccgtgcgcaccggcggaccgtccaagacatcgcacgccgctagggcggcgttcgtgttcttggattgtcttgtcctcactccgtcacgacgcctccgcgcggaggtcgatgcctgccccgccgacgcgcaggtggccgctatcgtcggtgctgaggtggtggtcgctaggggaggtttcttcgccgacgagaccgttggcgccacccgcggacagacctctggctctttggctttgatagcttgtcctcgcccctcgagtggggacgtgggcgagggccttgtcacagcagcgtctgcccaaaggtcatcgctgctgctgtctagccgcctggagcggaggtcgttgtcgctgctggtgcaatggtcggcggcgagccacccggagtttgtcatcccgcaggccctccgatgtggaggttgttcatacccgcgggagtggaaccggagttccatttgtaatggcaccttgagtaccggttttaagaaccctcggctgctctgcgatgagccggagccggaggcagcgacgtcggcgtggacagaggcggagttggctcaaaaagaggcttcgtcggcccaggagcaagtggcttcccaggccgaggaggtgcagcagcggctggagcttggccaggtcatccgctag

SEQ ID NO: 13816 - DNA, 474 bp, Zea mays
  Peptide Sequence Number=SeqID_57191
atgacgacggtggttctcagcccctacggaagcaaggagacgtcagcaaggtcccagcagccccgacagctgtgcttctacagggctcaagcgctcctcctccgacggccacgataccgcgtacacagggctctagcacctctccgacagccacgttggtatgtacacagggctcaggcacctctctgccggacacggacccctaggggtcgaaacgccgacacagctgcctctattgaggttgttgatgtgccagatggtcaaggtgaagatggatcaggaaaccgccatgggagaggggtgcttgcagggggcggaggtggcgtagggccgccaggtttccatgggggcacgccgtgggcacttgccatgcagggggcgggctcggctggcctgctggccgccgcgccaagtcgtgcccagcccgtcggctgggcactggccgccggctcgctggccaccgcaccattgtaa

SEQ ID NO: 13817 - DNA, 714 bp, Zea mays
  Peptide Sequence Number=SeqID_57192
atgggtcggcgcgagacggagcgcgaaggggggaagaagccggagggagacaggcgtaaaaggggaaacccgcggccttcgtgtttgtcccgcgtccaggtcgggcgtaaggagaggatccagggtaatgatggcgcctcctgtgacgtggtcggtccgagccctaggttgggcgaggtggaggctcctccgaggtcgaggtcgagtctgtcttccgaggccgaggtcgagtccgagcccctgggtcgggcgaggcggagaccgtcggctgaggccagggctgagttcgagccctggggtcgggcgatgcggagttcgtcgtcttccggggctgagcccgagtccgagccctggggtcgggcgaagcggagttcgtcgtctttcggggctgagcccgagtccgagccctggggtcgggcgaagcggagttcgtcgtcttccggggctgagcccgagtccgagccctggggtcgggcgaagcggagttcgtcgtcttccggggctgagcccgagtccgagccctggggtcgggcgatgcggagtttcatatggcgcctgaggccggacttggctgctgtcagcctcactctgtcgagtggcacagcagtcggagcggcgcaggcggcgctgtcctcttgtcaggccggtcagtggagcggcgaagtgactgcggccacttcggctctatcgactgaagggcgcgcgtcaggataa

SEQ ID NO: 13818 - DNA, 684 bp, Zea mays
  Peptide Sequence Number=SeqID_57193
atgcctccccaatacacggtgcagctgttcaagaagcaccgggtgccccgctgtagggtgaggatgaccctggaacctcatcccttacagccaggctggcgttcgttggacaccgagtctttcggataccgggctgaggatactatcgaggccattgctctccatgggctgactaccttctgtggttttcaccccttggagctatctactcatcccattggcttgttccccgcggataaggaggacgacccaatgtggaaggaccgagtggagcatgccaaggatatatgggctctttacccagggcaaacggctcacttgacggctaccaagatcaccttagacaacagagaggaacttgtggtagacctatccacggagatggtggaaaaggacctgcaggtggaacagatgtccaacgagatccaggagcttgaggagctagtgggaaccagggagaacaccattgaggttctcgaggatcagctaatcaacactcagcagcaacttgcggaagccaaccaacatttggatatgcaccaccaggagatccaggacatggaggccaatgaggatgtcgacatcgagggaggagagaagccggagcctgcatccagcttggacactgctcgctcagggagaccaccttcccccgagtcgagcgtagcctcgtttgctcactag

SEQ ID NO: 13819 - DNA, 498 bp, Zea mays
  Peptide Sequence Number=SeqID_57194
atgtcggggggactaagaaacaaaagtgcttctaagcttgaaatagttgaggttgcctcgacttcatcttttggtctagatgttgatcctagggcaatagaccttgccatgagaatcaccaaaaggatgttcctcaaaatgaaggaagatgaggcgaaaacaggatttaagaagaaaatgatagatggagaccaaacgatgaatccacctcttcacaagagtgacaatgaaagcagaagtgaggatgaggaggagcatgaaagtgatagtgaagatgaggatgatcttcaacaattcttcgctcaactaagcaagaaaaatcggatgagcttcctcaaactcatgaaaagagcagaagaacaaaaagaaatgcttcataagcaagaagatttcctaatcagaaaaattgaagacttagagaagttgaccaaagagcatgagaagctaaagtgctctcatgatgatttggtccaaaggcacgggacacagcccgagtaa

SEQ ID NO: 13820 - DNA, 717 bp, Zea mays
  Peptide Sequence Number=SeqID_57195
atgcagtcagcatgcaaccgcgccaagtgggcacaccccttcgactccaatgcgcccagcatggagacccaggcccacacgtcatgcaaccggcgcgccggttgctacgtgcgagcaaccgcaccgcccctcgcgccactaccgtgcctcctcgactgcggaaccagtaccgcgactcgaggcaaccctgcatatgacccaacagtgctagccaggcgcatcagtcatgggtcagtcagctgcaggagaaggcgcgacggtcaatacggccaaaaatgggccggcagtaatggcagtggcaggcgggcggaagcagcggtcacgtcgtcagccaagctcacgtcccctcatgggacaacaagagaaccctctcccacggagaagcgggcgacgcttcgccttcgccataatgaccgcgtcaaaaaagggaccgggaaaggggataccctgaaagggatccttatccgcgaaggaagcgggccccgagcccccctactgatcagaggttctaaggttggcccctcggaggggttcaacagccgcctcagagcgctcgagctcctcgcccactactggtcagaggttcaaaggccggcccctcggaagggttcaacgaccgcctcaggccacttgggctccgcgcccactactgatcaggggttcgaaggctggccctcgaagggttcacagccgcctcagacgcagagcgagggatga

SEQ ID NO: 13821 - DNA, 351 bp, Zea mays
  Peptide Sequence Number=SeqID_57196
atggaaaaagagtcacttgacatggttgagagctcagttcgagtcatcgagacacatgttgacatcattcgcagtctagtgactgatggggttgtggatactagtgaaccggaatcagtgtacacacttaagaccactttgtttcaaattggagatgtatgcgacatgcttgagaagtgtgctctgtccatcaaaaagtatgctgactccaagagggctaaaattattcaagatgatgaagctgcagatgatttggaggaactcccaagcccagatctccttactcaagccgacatattggaaaaatattttggaattgagtatgatagcgaccagtcaaggggttgttga

SEQ ID NO: 13822 - DNA, 1461 bp, Zea mays
  Peptide Sequence Number=SeqID_57197
atggaggccgcggaggagcggccaagaagacgccctgccggcctcggcgtcctcgccctactctgctcgtcgttgcttcttaacgtgctcttcctcgcgtactactacttcctctcgccgccgtcccagcttgccgatggtggcagctgcgggctgagctgggcgctgcgggcggccagggatgccgaggcgttggccgccacggacagctgctccggccacgggcaggtgttcttggacggcgtcgtcggcgaggacgggcggcctgggtgcgagtgcaatcgctgcttcgacgggccgcactgctcgatccgaacacccaactgcactgccgatgctaccagcggggacccgttgttcctggagccctactggaagcggcacgcggcggccagcgccgtgctagtgcccggatggcatcgtctgagctacgccaccaccgacggcctcttccaatccgtcgagctcgagaaccacatccggcggctgcacagggccgtcggcaacgcagtcgtggacggcaagcgcttggtgttcggcgccggctccacgcagctcatcaacgcgctggtgcacgcgctctccccggacgccaacgccgccgccgcctcgccaccggcccgcgtggtcgccaccgcgccgtattacccgccgtacagaacacagacagcgatgttcgacgggcgtgagtacagatgggaaggaaccacggcggctgcatgggccaacgcgtcacgaaactcctccagcttcatcgagttcgtcacgtcgccgaacaaccccgacgccctgctccgcgcgcccgttctgcgcggctccgcggtgatcgccgaccacgcgtactactggcctcacttcacgcacatcgcggcaccggccgacgaggacgtcatgctgttcaccatgtccaagccatctgggcatgccggcagcagactcggatgggcgctgatcagggacgagaaggtggccaagagggcgtacgagtacgtgcagagcagcatcatgggcgcgtcccgggacacccagctgcgcatgctggagatcgtgaaggtcatgctggccaacctgcacggcgaggaggacatcttcgcctttgggcacgacgtgatgcgaaccagatggcgcaggctgagcgccgtcgtgtcgcggtcccgacgcatctcgctgcagaggatcaacccccagtactgcacgtacttcaaccgggtcagagagccatcgcctgcttatgcatgggtcaagtgcgagagggaggaagacgacgactgctacgaggcgctgctcaaggccaggatcatcacgcgttccggcgctggctacgacgctagcagccggtacacgagggtgagcctcctcaagtcggatgacgactttgaagtcctcgtggagagggttacggatcttgtcaacgccgagaactacgacgacgatgtgcctcgaggatcgagctccatgtaa

SEQ ID NO: 13823 - DNA, 1722 bp, Zea mays
  Peptide Sequence Number=SeqID_57198
atgccgcgcacgaagaatgtgtcggcgccagggggaggcgatgatgaggatcctcgtcgccccttcaggcaggtcaagggcaagactgtttacttggagcagcaggaaagccgcaagaagcggccaatacccactccatccattacgcagcttccactgctcttcctctcccggttccggtttcagcttctcctgtcccttccacctgattccggggagcgcgatgagatgaagtttctccttagggtttggaatcttgttctgtttgaccttcagcgtgctacaccagcacatgtacgtaggttaaaatacgtacccgtggagtcttggctaccagctcagagagaccctgcagcaggtgatcttttcagcacacgtattcaggagtcgtttttcagagctcagatgtctgctcaaatagctctgcgagtgcaccggcttttggatcttccatcctttctgcttgcagccggtgctgactctgaggcgcatctcacctatctgcctggccttcagacccttctgactatcagcggcagatacgttgaggagtgggtacgagtcttttacgcctctgtttggattaacccggatcatcactggatgaggttccgctttgagcgagaggatgtcacaattactgccagtcagatccgccagctatttggattccccgagtcgacgactcgccttcacagtctctgctacggcacttctgaccctcctcgtcgccctcacggcggtgtggctcctggtacagctcacgtcgcggctctgttccgcccgcccttcacagatgggtcgcgacgttcaccggcagactttactacagcagccaagtacttatacgagctcatcagacggactcttctgcccaggatgggatacagggaggctaccactcatattcagctttggctccttggtgccctggtctcccactctgagtttgacgttgtggacttcctgatttgtgagatcgaggacaccgttctagatgggattcgtgctcgtcggcagttgccttatgctcactacttgtgccacatctttgcgcagctggttcagccccctcgatttcagagcacccttgaggcctcacgcctcgtttttggatcctaccgtcctgcgcctgagactcctgtgccagcttctgcttctgtgtttgactctcaggtcgaggatgcagctcttcgacagcttgacactcagggtacagcagctgatgatgatgatgatgatgatgatgattttggggttcctcctccgcctccgcctcctatgcctccacgctcacatgatcatgaggctgggagtctatggaccctgctcttacttcgattctggccaacctggcggccgagcaggcccggttatccgagaggatgctctcgatgtttcagaacatgcaggacaggcaggatgcccttcagcagcagctacttcaggatcgggctgagactagggcattcatggctcttatgcttcagtattctgccgccagtgccaccagcatctgctgttaccactaccgctgtggcagtatctgtgaccgcttctgttccagtagctcctgcagcgcggcctcagtccgagtcagtaccagctccagcttctatcgcagatcctggatccgagactgactctgaccctccgccggcgttcgctctgctgcctcgaccggatgcgccccagccgcctcctcctgcttcagatgtttag

SEQ ID NO: 13824 - DNA, 378 bp, Zea mays
  Peptide Sequence Number=SeqID_57199
atgactacctggaaagctcacacgagaggtgacgatccaggcaggacgggagacggcacacggtcaatcaaggtcactgaaatgacagaagaggcgaagaaaaggagatttgggcactcggttcggaaacgatcgctcgaaacggggaatttggtgaaattgaagcctggaaactcggattggcgtgaaatttggcaagtaggttactggaagtgttgtgaagaatttgaggaaattcacaaaaggtggaaaagggtgaacacagacatagttagagagcagtggaaggagggagagatggatggactgctcaccgagagggagaggacgagcccaggcacacgatcgctggagcacggtggtcgccggagaggggag

SEQ ID NO: 13825 - DNA, 753 bp, Zea mays
  Peptide Sequence Number=SeqID_57200
atggggggagaagcgggcattgcccgtggcgtccggcagctgcagcgtgcctggtcttcagccgcgagtggcttcggggccacttgcggcgccggcgtctgccacggcagctggaagaggttcttccaccggcgcggcggccgggaccggccacgggctgacctccaacttctacggccttctgcccgtccttgcctcacgagttttggcacgggcgggggcctcctggcagcggcatccaccctgaggtcagcgttgccgctgttcggccccccagagcagaagtcgtcgccgtcgccgctgctggagcagccggttgaccgaggccccaggggtaaccggttgagccgcctgctcgggccggattcccggaggagtccctggaccgcggcgccgcccgaggctgggtcgggctttgctgaagacgtcatcgatgccgagggtgctacggctcccttcagcgtgaagacccgagcctgcaggatcagatcatcttgtagcgtgtgctttctgcggccgccgaggccagaagaacacaccctcgccgcgcttgcgaagctgcgtcttttttcctcttgtttcgagcgtctggactctgtcggtaacagggatgtttgtgtgagcgagagctgcttttcgcggaagggacgagtgaggtatccgtatcccggaggcgtgggaatccctcggctcggtcggccttgcggcttacgcatactttcactcgtccatgaggccctgtccccgacttag

SEQ ID NO: 13826 - DNA, 1500 bp, Zea mays
  Peptide Sequence Number=SeqID_57201
atggctcgtgtcttgagagtgtttccttacggacggaatattgctgctgttgtgtcggtagtgatgaacaaggatcaccaagatgctgcgcagaagcgtcgggcggtcgtcaggctccctgaggctaggccgaagagagtgcgggggagtgcgaaggctgccgtccccggcggtagccagccttcgctggctgcgaagccggccgcgcatggatctagcaagttgccggagagcacgaaggcggccggcgctggcggaaccaagtccgccctggaaggagctgcgaaggtccgggagcagccttcgccggggaaacgcgttgctgacttcggcacaaacattagcgtggacgactatctcgttgggtcgggcgaagggcaacttgttgccgtctcgcctgcggtggcaaccacggcgtctaccgcggtttttggggtgaagggtggcgctttcagcgctggcggcgaggcggccgacttcgccgatcgcgtggcatcgggtgcccttacggcagacgtggctgccgaagtcgagagactttgggcgcagcacgcggacgccgttcgggaaaagtcggctgcggagagcaaaagccgcaggctggcggagaaggtggccgccctggagggcgagaggacggacctccggcgccagctggtggaggaaaggagggaggccaaccaagccatcaccaaggcgcagacggcacaggcggaggccaaattggcgagggcggaggagagtctcgccagccagcgcgccaaggaatgggaggcgcagttcaatgctctgcaggcccgcatggagaggaccgaggcctctacgcgcgcggaagttgagcggacgcgcaaacaactcgtggactcatatcgcgagctgggtgcgcggactgctgacttcgaggtgcccgaccgagaggcgagccttcgcttcctcgagtggctgcaagaggaattgttagcgctcccgaccatcgtggagggcttcatgtcctttgcctccctcgtcacctgcgagggggccatgaatgcgttgtcccgcgaggggtgcagtcactatgagggcttcgaccgatccgatgaagacttcgggcgcgagatttttaaggtcgaagaccctgtagtgaaggacgccgcgggggccctgttcgaccggatgtggggcccccacggtcgggaggcggttagggaatgggctgactgggcgagggatcagatggcgcgtgctgaggacgtggaggacttcggacatctgaacagcgcgctgcccgaagcggaggttaacccggtgttggccgaggctgaggtcgacccggagccgctcctggaaaccagtgaaggttcccacgctgcccctgtgtctactgtatctggtggaggctcgcctccagccactatgctgatggcggaggatccccccgaaggcggcgacggagccagcatcgaaggatcccgtggcggcggctgggtcttcgtaggtggcttagtgggtgtggggtag

SEQ ID NO: 13827 - DNA, 595 bp, Zea mays
  Peptide Sequence Number=SeqID_57202
atggcgcctcttgtcgatgtggtcggtccgtgccctaggttgggcgaggtggaggctcccccgaggtcgaggtcgagtctgtcttccaaggtcggggtcgagtccgagcccccaggtcggacaaggcggagaccgtcggctgaggccagtgctgagtccgagccctggggtcgggcgaagcggagttcgtcgtcttccggggctgagcccgagtccgagccctggggtcgggcggagcggagtccgtcgtcttccggggctgagcccgagtccgagccctggggtcgggcgaagcggagttcgttgtcttccggggctgagcccgagtccgagccctggggtcgggcggaccggagttcgccgtcttccggggctgagcccgagtccgagccctggggtcgggtggagcggagttcgccgtcttccggggctgagcccgagtccgagccctggggcggcgctgtcctcttgtcagaccggtcagtggagcggcgaagtgactgcggtcacttcggctctgtcgactggaaggcgtgcgtcaggataaagctttgtgctgatgtgggttaccagctgagatttaggagtcttgagg

SEQ ID NO: 13828 - DNA, 309 bp, Zea mays
  Peptide Sequence Number=SeqID_57203
atgccgccgtggataggtcggagcacacgccgccgacgagctcgcccgcctgctcacgtggaccgggcgattccggccatccccgacgacgagccgtacctcgacgtgatcgctagaccctccccgagccaaccctacccttcgccggacctccctcgccgccggtaccctcggactaaagtcggcattgcagtagaccggaataatacgaaggttgatcagagccgaaggtgcgagcaggaaagcttcggcgtaacagcaaagagtggaaccgacttaaagatgaaaaggctattcagacctcgatag

SEQ ID NO: 13829 - DNA, 222 bp, Zea mays
  Peptide Sequence Number=SeqID_57204
atggggaagcctgtcccatcactcctcatgctcctcctcggccgagtgaccgcacttgtacccaccataaccggaatgggagaccacgtctcaggtcgcgtgaggagtaaagtttgctgccaggttcaatcaggtatccgcacgttaatccttattccaattttccgactcgtagactacgcatccccatggatccgtgtccacagaccaacatcagtatga

SEQ ID NO: 13830 - DNA, 339 bp, Zea mays
  Peptide Sequence Number=SeqID_57205
atgggggaaaagagatcagagaagaaggggggcagcagtggcgtcggatggaggcacaagagaagaaggggactctaccgttggactccggcaccagagaagaaggggagggtagcagcaccgtcggatgcctgcaccgaagaagaaggggagggcagcagcgccgtcggacgccagcaccgaagaagaaggggagggcagccgtcgggcaccggcaccaaagaaggagagggcagtcgtcggacaccgacaccggagaaggggatggtagttgtcggccgctggacgtccagagatcaggaactcgtgatcccctaccgcccttatgcatctgactaa

SEQ ID NO: 13831 - DNA, 846 bp, Zea mays
  Peptide Sequence Number=SeqID_57206
atgcctcataatatctgcgaagaagggctacgctccgataccagctgtgatggaacctcccaaggcagtgaccaagtcttcataaccgcgaagggtttcaaggagggtaatcaagatcaaggaagcaagcaagtgagaaagattttaaaaacatcaagggaggtggcaaatgcaccggggcttgccttcgttaacagcccagtggcccaacacaaagggagaaagcgcccgcgcgcacgctggcgatcttgtggaaagattacagaaaggcccttccccttctatttcttctcccgatacgtcctcgacgacggcagtgcacggaggagctccggcgagccactgcaccggccgattggaggcgatgaccggcggcacccgagcggcggacaccaaatccaagctaccccgagtaattcccccaagttaattgcacaaatcgtgaactactgtggtctggccacgcgcccaacggtggtgaccgtgaattttgggcgctaccgcgcggcggtcggaagtgaagaagaacacgggtgcagtgaatacgtgttccacgacgtggcagtaactccggtgatcgacgggaagctagagggagtcacggcgatgcggtggcgaggttgggacacgcggcgcaaggccggacgacggctatcaccggcgttcttatcggcttctaccgtggtgacacagtacggtggccggagttctttaacggttgaagcttatccacggcggcgtacaccggtgttacccacttaccccgagaacaacgtggaccggctgccgcacgaatcacggcggcaatcggtcgccggcggtgaagttgccgcgctggtggcctga

SEQ ID NO: 13832 - DNA, 2283 bp, Zea mays
  Peptide Sequence Number=SeqID_57207
atggacttcggcgacgacgtcatggacggcggctccgacgcgcagcgccgcaagaagagataccaccgccacactccgcgccagattcagcagctcgaggcgtacgtgcaccctgctggccggcaggcctgcgccgatttccccctcccttccgtccttatctactggctggtttggatgttcaaggagtgcccgcacccggacgagaaccagcggatgcagctgagcagggagctggggctggagccccggcagatcaagttctggttccagaaccgccggacgcagatgaaggcgcagcacgagcgccaggacaactgtttcctgcgcgcggagaacgacaagatccggtgcgagaacatcgccatgcaggaggcgctccggaacgtcatctgccccacctgcggcggcccgcccgtcgccgacgaccattttgacgagcagaagctgcgcatggagaacgcgcgactcaaagaagaggcaagccgtttcgcgttcaccattgcgcttgcgcccggtccggcctctctcgacgggcccgccattttaccgcgctctagtttcacattcacaagcggcgaccttgaccgggtgtccagcctgacgtccaagtacctggggcggcccatcacgcagctgccgtcggcgcaggcgctgtccatgtcgtcgctggacctgtccgtcggcgggctcggcggcccgtcgctggacctcgacctcctcagcggcggctcctcggggtatcccccgttccacctcctcccgatggcggtgtcggagatggagcggcccatgatggccgagatggcgacgcgcgccatggacgagctcatcaggatggcgcaggccggcgagcacctgtgggtcaagacgggcggccgcgaggtgctcaatgtcgacacgtacgacagcatcttcgccaagcccgacggctcgttccgcggcccggacgtgcacgtcgagggctcccgcgagacggggctcgtcttcatgagcgccatcggcctcgtcgacatgttcatggactcgagcaagtggacggagctcttccctgccatcgtgtccaaagcgcgcacggtcgacgtcctcgtgaacggcatgggcgggcggagcgagtctttgcttctgatgtacgaggagctgcacgtgatgtcgccggtcgtcccgacgcgcgagttctgcttcctccgctactgcaggcagatcgagcacgggctatgggcgatcgcggacatctcggtggaccagcagcagcgcgacgcgaggttcggcgcgcccccgtcgcgctcgtgccgcctcccgtcgggatgcctcatcgccgacatggccgacggctcgtccaaggtgacctgggtcgagcacatggagatcgaggatcgggttcccatccacctgctctaccgcgacctcgtcctcagcggggcggcgttcggcgcgcaccgttggctcgccgcgctgcagagggcgtgcgagcggtgcgcgtgcctcgccacggccggcattatgccgcaccgggacattgcagcggcaggagatatatctcatcgagagctgcttgcagtgacgccggaagggaagcggagcatgatgaagctgtcgcagcggatggtgaacagcttctgcgcgagccttagcgcgtcgcagctccaccggtggacgacgctgtcggggcccaacgacgtgggcgtccgcgtcatggtgcaccgcagcacggacccggggcagcccagcggcgtggtgctcagcgcggccacgtccatctggctgccggtcccgtgcgaccgggcgtttgcctttgtccgcgacgagcatacgcgctcccagtgggacgtgctgtcgcacggcaacccggtgcaggaggtgtcgcgcatccccaacggctctcaccctggaaactgcatctccttgctgagaggcctgaacgcgagccagaacagcatgctgatcctgcaggagagctgcaccgacgcgtcaggctcgctggtggtgtacgcgccgatcgacatcccggcggccaacgtggtgatgagcggcgaggacccgtccgcgatcccgctcctgccgtccggcttctccatcctgcccgacgggcggcccggcgcgtcgtcgtcgagggccggccaggcgccgtcggcggggtcgctggtgacggtggcgttccagatcctggtgagcagcctgccgtcggcgaagctgaacgccgagtcggtggcgacggtcaacagcctcatcagcaccactgtggagcaaattaaggcggccttgaattgcgccagccattga

SEQ ID NO: 13833 - DNA, 1113 bp, Zea mays
  Peptide Sequence Number=SeqID_57208
atgggcgtgagagaggtggaaatgccgcggccttcgtgttcgtcccgcgcccaggtcggggtaatggtggcgcctcctgttgacgtggccggtccgcgccctaggttgggcgatgtggaggctcctccgaggtcgagtccgtcttccgtggtcgaggccgagtccgagcccctaggtcgggcgaggcggaggccgttggttgaggccagggcggaatttgagtcctggggtcgggcgaagcggagttcgtcgtcttctggggctgagcccaagtccgagccctgggtcgggcggagcggagttcgccatcttctggggctgagcccaagtccgagccctgggtcgggcggagcggagttcgtcgtcttccggggcttagcccgagtccgagccctgggtcgggcggagcggaggcctcgggcgagccgggaacgtgttcgccgctggaggggggcctcgggcgaggcggagatcctccgggggcctttgcagctttatgctgatgggggttaccagctgagaattaggagccttgagggtacccctaattatggtccccgacactcggcaaaggagctaacctgcgcctcatcccctttccccctgatacgacgcctcctctcccccttctgggcagcgacgccgtggggagccgccgccgcgcgctccgctcctccctgcacctcatccccttcccctgctccccctcacacgacgtgcggcggtgcgagggccggccctggcaccagcgcccccggtgcttggagcagtgcagggaggaggagcgggagaagcggcaagagcggagcaggcacgaggccgacgacccgcagcggcgagggctcgtcggaggatgagcgcgagcgcgagcaggagaaggaggagaagcagaaggaccggcagtcgggtcccctgagggtgctccagccgttcgacgaggtgtccaggctcctccgcggcatccaggactatcgcgtggtggtcctggaggcgaacccgcgctcgttcgtggtgcccagccacaccgacgcgcactgcatctgctacatggcggaagtggattatagaaaagctgatttggagatgaaatcccagctgcataagtttttttaa

SEQ ID NO: 13834 - DNA, 969 bp, Zea mays
  Peptide Sequence Number=SeqID_57209
atgacgtgtgggacccagcccccgcgccgtacggggaggaccttggagcgtgttggagaagactcagcccacgacggctggggacgcaacccggctgcacccctccgtcggcggtcacccaagacggtgacctccagttcgatggcgggggagagcgaaccgggccgcggcctctgcccctccctcagcctcaaggattttcatcaccagggctggggaggggactgcagcgtgcccggctctctgagccgagcggcttcggagccgctcccggtgccgccttccgccatggcagctggaagaggttccgccgccgacgagcttgccggcgccacccgcggaccgacctccaactctacggccttctgcccgtccttgcctcacgagtttgggcacgggcgggggcctcctggcagcagcatccgccctgacgtcatcgctgctgctgttcggccccccggagcagaagtcttcatcgtcgctgctgctggggcgggcgacggcgagccgttcgtcggtcttctgttgctccgcaggccccccccccagtcgtgtggggttgttcgtacctgcggagactcgcctgttggttgtctgaaccgcttcaccaagcgtgagtcgccccgtgtaaaggtgacgagtgagagcggagacccttggaccgcgtcgccgtccgaggctaggtcagacctcgccgaaggtgttgtcgacgccgaggttgagaaggctcgaagaatcgctccgacagaagagcttccgaacgtgaagacttgttcggtccgcggaatcacttatccgaacgtgagttacttgtggcagaaggtgatgagcgagccgaagcaccaggtcgcccacctggaggtctcgggaccggacccctcgggcgtggtagcgtcgcatggactgctggccctcgtcctcggggaaccgtattccaggtctgtgggcaagatggcctcggccccatag

SEQ ID NO: 13835 - DNA, 1272 bp, Zea mays
  Peptide Sequence Number=SeqID_57210
atggaggcccagacccacgcgtcatgcaaccggcgcgccgaatgcttcgtgcaggcaactgcaccgccacctgcgccaccaccacgcctcctcgactgcggaatcaataccgtgactcgaggcgacccagcgcacgacccagcggctccagcctggcgcgacgacaacgcgcccgtgttccgttcctcgaacggctcgcgcacgcgcaacggctgccctgcgaaccactcgccccgtcacattaactccgcggcaggacaggcgggaccgggaaagggggataccccgaaaaggacccttccccgtgaaggaaccaggctccgagcctccctactgatcagaggttcgaaggctggcccctcggaagggttcaatagccgcctcagagcacgtgggctccacacccactactggtcagaggttcgaaggccagcccctcggaagggttcaacggccgcctcaggctactcgggctccgcgcccactactgatcagggcgggaacgatcttgtaatggaatcccatcagagggaggcatcgagccctcggaccccgtcgccaggggaccgggtccggcagatcacccgcagctcaccggagacaccatgttcggcgcccaccgagggcaacatggcgctctcccccctcctccttgcggaaaggcgacgcaggggcgtatgtaaaaaagtcgagtatgtccgtgatcgccctctcgccctacgcagaggctcgggggctgctctcgagtatgtccgtgatcgccctctcgccctacccaaaccgttgacagcgtcaacataccagcccgagaacttgggacccgaccggatcagtccattcgagggactcgatcacgcctcgcccgagcctagcctcggacaagggcagccgaccccggaggatctccgcctcgcccgaggcccccctccagcggcgaacacgttcccggctcgcccgaggccctgtcttcgccaagaagcaaccccgaccaaatcgcaggggcatttaatgcaaaggtggcctgacacctttatcctgacgcgcgcccctcagctgacagagtcgaaggctcggactcgggctaagccccggaagacggcgaactccgctccgcccgacccagggcttggacttggctcagccccggaagatggcgaactccgctccgccgacccagggctcgacttgggctcacccacagacgacgaacttcgctccgccgacccagactcaaatctgccctgcctcagcaacgctccgctcgccgactag

SEQ ID NO: 13836 - DNA, 537 bp, Zea mays
  Peptide Sequence Number=SeqID_57211
atggccccgcctcctcctccgttggcgggggagagaacggagcgagctcgaatgttgctcttccaccacgcggggaagatgtcgtcgattccgccgccggcgggcgggttgtcagccgccattgtcgttgtcgcgcggcggtggaagaagtatcatgtcgtagctgccgtcgaaggacatgaactcaagagtcctgaaacgaagcaccgtcccgggccggagaggttgctggagactgcccatctggagcttgacggggagctgttcgtcagcacgcagcaggcccctacctggcgcgccaaatgtcggcgtttcgagacagggggggtcccaaagccgacgagtgagtgtgctgtgtgccccagcccagatgggtcgagcgcgtgggcgagcgcgaaggggggagaggcgaggtggccggagccgagcgtgagagaggtggaagtcccgcggccttcgtgttcgtcccgcgcccaggtcgggattaggatccaggtgtacaatgagggggttgtagcacatcgctacgttgtctag

SEQ ID NO: 13837 - DNA, 825 bp, Zea mays
  Peptide Sequence Number=SeqID_57212
atggcgcttcctgttgacgtggcgggtctgtgccctaggcagggtgacgtgggggctcctccgaagccgaggttgagtctgtcttctgttgccgaggccgagtccgagccatggggtcgggcgaggcggaggtcgttcggccgaggccagggcggagtccgagccctggggtcgggcgaggcggagtttcgtcgtcttccgggtcttagcccgagtccgagccctggggtcgggcgaggcggaggtcgttcggccgaggccagggcggagtccgagccctggggtcgggcgaggcggagtttcgtcgtcttccgggtcttagcccgagtccgagccctggggtcgggcggagcggagttcgccgtcttccgggtcttagcccgagtccgagccctggggtcgggcggagcggagttcgccgtcttccaggtcttagcccgagtccgagccctggggtcgggcggagcggagttcgccgtcttccgggtcttagcccgagtccgagccctggggtcgggcggagcggagttcgccatctttcgggtcttagcccgagtccgagccctggggtcgggcggagcggagctcgccgtcttccgggtcttagcccgagtccgagccctggggtcgggcggagcggagttcgccgtcttccgggtcttagcccgagtccgagccctggggtcgggcggagcggagttcgccgtggcgcctttggcaaggcctgactgtctgtcagactcactctgtcgagtggcaccgcagtcggagtggcgcaggcggcgctgtccttctgtcagactggtcagtggagcggtggagtga

SEQ ID NO: 13838 - DNA, 417 bp, Zea mays
  Peptide Sequence Number=SeqID_57213
atgctgccgacctggcgtgaggctgactggtcggataaggacatttctatcgcacctgcaaatacaggtgccaaaggttcacacttagccaataaaaggaccaagtattgggttcaaacaaaggagcaagggccaaccgaaggcaccctggactggtgcaccggactgtccggtgcaccaccggacatgtccggtgcaccagggaagaccgacttcaaactctttaccttcgggaaattccagaggcaactccgctataattcaccggactgtccggtgtacaccggacatgtccggtgctccaaggaagagcggcctcctgaactcgccagcctcgggaattcatttgggctgctccgctataattcaccggactgtccggtgtacaccggactgtccggtgtaacagcggggtaa

SEQ ID NO: 13839 - DNA, 222 bp, Zea mays
  Peptide Sequence Number=SeqID_57214
caactggcgtgccggttgcttgacgcgtgggcctgggcttccaagctggcgtgtcagaagtcggagaagcgcgtccacctggcgcggttgcatgccgcctgcatggctgcccgccccttccgcccgttggtctgggcaaaagtgggggcccccgagtcgcaggggagggccttggagcgtgttggagaagactcagcccgcggcgtctgggggcgcacgtag

SEQ ID NO: 13840 - DNA, 1121 bp, Zea mays
  Peptide Sequence Number=SeqID_57215
atggaaccctcgtcgccggccaccacggccaccttccctgctgccgtagaagaacatgagacgtaccctcccatggtgtcatcctctctattcccacttttccccttcgccgcctccacctcctctgctccccccgccgaatcccaatggctttcaaaccctagcttctccttcgatgcctcctccctgaacatcccggctaccacctcatcgtcgctcccgtcgccgcagagccactcgtccgatgaggacacgccgctgcaggccgctcctgcgaaatacgagctggtgccttcttcgccgtcctccgacgaggagagggggtcgcggaggaagagaagtgggaggaggaaacggaagcgcgagaaggagcgctatgatggggcagcgacatcgcggaaggctgggattcgtgcctgggctggattggagacgaagccagccaaggattactatgtcgacgcgaagggcgaccatgataacctggcttttggatccctctacaggtctgatcatgaagacaaagttgctagcactcagccacaaaaggctgctcgtttacaaactaccgaaaggaaaattagcatattggagaaagctgtggagctcaatccagatagtgaggaattattgctttgccttctgaagtcatatggcaagagggacaacactgagactctattgactaaatgggagcaaatacttacgaagcacccagatagctctacgttgtggaaacagtatctgcttctgtgccaaggggaattctccagattcaaagtttctgaaattcggaagtcctacgtgtatgctgtacaggctctatctgcagcttgcaccaagttatgtaggcaggataataaaagcatggattccaaatcttcatccttagttcaactagaagtggggttggtggatatatttgttaatctgtgccgatttgagtggcagacaggacatcgggaactagcaactgggctatttcaggcgcagatggagtttagcttatttgcccctcctttgtatctgacaacaagcagtaagcaaaggctctttgaacacttctggaacagtggtggtgccagaattggggaagatggagctcttggatggtctgaatg

SEQ ID NO: 13841 - DNA, 342 bp, Zea mays
  Peptide Sequence Number=SeqID_57216
atgaggatggtatggaacgcccttgaccaagtaattaggaaagtcttatgtttggtgttggtttttgtcatgggggatggaggcatctgttatgctcttatattctcgctcaggggtctagacgaagtaatgatgacagatgaggttatctccgacataatgatccttatgaatcacacgtcgagggatactggaacgtctacgcctatgacgtgcagcctcaatggagacggtaagaagggtggcaagtataagtgtgttgtcgtcactatcactcgaatcagaatcatcgtccctacgcaaaggcgacataacgcacaaaggcttgttagcttgagttga

SEQ ID NO: 13842 - DNA, 69 bp, Zea mays
  Peptide Sequence Number=SeqID_57217
atggggtgttcatttgaaccgtgccaaaagacaggggactcgaaagctattgaccaattgtcaggctga

SEQ ID NO: 13843 - DNA, 159 bp, Zea mays
  Peptide Sequence Number=SeqID_57218
atgtccggtgcgccagccacgtcaccaaagccgttgcaattcgaccgttggagttctgacttctgggcccgcctaggcgaccgttggcgcgaagtagccgttgccccacagttgcaccggacagtctggtgtacaccggacatgtccggtgaattatag

SEQ ID NO: 13844 - DNA, 240 bp, Zea mays
  Peptide Sequence Number=SeqID_57219
atggaattactcagcaagtcttacccgactaaagaaaagactctcaagggtatgctggttatatgggagtcaagggtttcaaggaagcaagcaagtgagaaagattttaaaacatcaagggaggtggcaaatgcatcggggcttgccttcgttcacagggtatcaaagctatacctctgccttgacaaagattggtttccgaatgatgcgattgcaattaccggaatccgtgaacagtaa

SEQ ID NO: 13845 - DNA, 498 bp, Zea mays
  Peptide Sequence Number=SeqID_57220
atggcggactccaaggccacctcggcggtcaccctccgcactcgcaagttcatgaccaaccgcctgctggcccgcaaacaatttgtgcttgaggttatccaccccggccgcgccaacgtctccaaggcggagttgaaggagaggcttgccaagatgtacgaggtgaaggaccccaacaccatcttcgtcttcaagttccgcacccacttcggtggaggcaagtccactggcttcggcctcatctacgataacctcgagtctgccaagaagttcgagcccaaataccgcctcatcaggaatggtcttgctactaaggttgagaagtcccgcaagcaaatgaaagagcggaagaacagggccaagaagatccgtggtgtcaagaagttgtgtcatttgcaagccaatccattttgtcatgcagttgtcatttgctcacctctgatccatatcagctttgatcgtgctgcatttgcgccagtgaacagtgattgctcatga

SEQ ID NO: 13846 - DNA, 564 bp, Zea mays
  Peptide Sequence Number=SeqID_57221
atgaagataatggaggggagaataaaaggggcgcttctcaccaggcgctcgggccgcgtccgttcgggacgccggtcgccgcggatacagcggtcgggctgggagcgggggcgccggggctggggtggtgggagcgctcgacaggagacggggctgcctaccgccggggcggggaacggggacagggccgcgccgccgcggggctccggggcaagggcgccgccgccgatccgcgtgatattggagctcgccggtcgccgctatggcgctatcgctgggcaggcgggcggagtcgcgagtcgcgacctcctcgtgcagtgcccgtgctgtcctcgcgccgttagaaacttgccaccgtcttcctcttctaccgtcgcccgtgaaggtcccgtattccattctctctgtgccctggccgtcgtcttcctcgccccaactctgctcgccctagccgtcgtgttcctcgagctgctgtctttgtctccgcgcactgggccctgtccttctccggatctcgcccttccctgcgtcgccggttcctgcgccagtggtccattgcgctga

SEQ ID NO: 13847 - DNA, 585 bp, Zea mays
  Peptide Sequence Number=SeqID_57222
atgtcttcgcgctcccttatgcatcgtgtctttccaccttccgagcccccggatggggaacacccgcaatcctttcgccttgttgttggaggaacgcaacttcgtggaagttggtacctttcagccatcgttcggcttcaaggattttcatcatgcagcccggccgcatcccctcgccggcggtcacccaagacggtgaccgccagtccctgggtggggagaagcaagccgggctgcgatcttggtcccgccctccgcttcaaggatgttcatcatccttgctggggcggaggccgggctgagccggagctctacctcccgcgcgggttcgtggatcagcctctccttcagcattcaagggagagggcgctcacaagccctgcgagaggggcggacttcgacaacgtggggctagtcgacggcgggtgtcgtcagcttcagcgcgttgggctcgccggcttggctcccggtgccccctcccgccgcaagggcggttgtcgcgccgtgcgcacgggaggaccgcccaagacgtcgcacgctgctagggcggcgttcgtgttctggggctgtcctgttctagggtga

SEQ ID NO: 13848 - DNA, 633 bp, Zea mays
  Peptide Sequence Number=SeqID_57223
atggattctgccgccgagcattgtgcccagaagttgtccttggcggctgttgcagcccgtgacacactgaaagcttctgctgccgcgagtattgttgctggtgattattgcgccacattttcgttaggtaacgatgtggtttctactctggatgttcttgaatccgctgtggctggggaaaatagtgctttgcgatcttacaaacaggcgactgcagccatcgattgtgctaaggagacagtggccaaatattctgaggtgaaccaaaaacttgcgcaagcactcagatatgccatgtctcaaatgagtgatacagctaagaaacttcaagaagctgcctctttgtgctacacagatgaagatgttgtagacggtttcaagctaactcaagtagctcgttcaatggacgagatagctgaaatgcttgaagtaactgcaattgactgccaggtctcgatgatggatccaacaagtatgttagaagctggctatgctagtgaagatactgcggtgtgggaggacgtattccgtgaccgagaaataatgaatcaaccattacaagctgagacacttgctgagcattgtgctaagtgggggcttaattacaatgagatctgggatagatcagtgtaa

SEQ ID NO: 13849 - DNA, 510 bp, Zea mays
  Peptide Sequence Number=SeqID_57224
atggagggcggatggtggtggtgccgcccattgcagtggctggtgactgtcgcagcttctacctgtaaggtacgaattagtcaattcttctatatgcaagtggaagtacacgtacgacactcatcgtctcgcatcattgctagcccagacaacattgaggtgatgcgacacatcagcatccaagtgaccgtggagagcatgggacatgggttagtacgaattagtcaattcttctatatgcaagtggaagtacacgtacgacactcatcgtcccgcaggattgctagcccagacaacattgaggtgatgcgacacatcaacatccaagtgaccgtggagagcatgggacatgggttaggctgtctgcagccgcgtccccccctcgtgttccccgggccgccccctcccctcgatctagcggctacagaagccctctacggccgcaacgacaccctgtacaaagcctcccacgcagcagatgtgaacagcaacacgctgcagccagcgtga

SEQ ID NO: 13850 - DNA, 729 bp, Zea mays
  Peptide Sequence Number=SeqID_57225
atggcgagctcgccctcaactccctaccacggtgctcgcccaggctcgccggcgtccatggcctacaacctctactcctggtctacgacctcaccggatctccgccttcgtgctgcgcccatggattcggtcgtgcgagtgaggctgacagcagctaagtccagcctcgggcgccataggaagctccgcctcgcccgaccccagggctcggactcaacctcgacgctggacgatagactccgcctcgcccgaccccagggctcggacacagcctcggcctcggaagacggtctccgcctcgcccaacccagggctcgggctcaacctcgacgctggacgacggactccgcctcgcccgaccccagggcttggacacagccttggcctcggaagacggtctccgcctcgcccgacctagggctcaaactcaacctcgacctcggaagatggactcgacctcgacctcggaggagcctccgcctcgcccgacctagggctcggaccgaccacgtcacaaggggggccatcattaccctacccctagctagctcaggctacggggaacaagaccggtgtaccatctggctcgccccggtgcgatgtgtggtgaagtctaggtttgagtatgtaggtttgcaaaacctgattcaacaaaatgagcaattgtatggttcaggaaacacaccttctggtggagtggctttgccgttcatcctagtccagacctga

SEQ ID NO: 13851 - DNA, 1284 bp, Zea mays
  Peptide Sequence Number=SeqID_57226
atgcaggcatgcccagagcagaagaagccaaaccgccacgcgcggtgcatgcaactgcccagcggttacaagcgctcctccactttcgcccggaccgacgggcccacacgtcacgcaaccggcgcgccagttgctacgtgcgagcaactgcaccgccactcgcaccactaccgcgtctcctcgactgcggaactagtaccgcgactcaaggcaaccctgcgtatgacccaacagtgccagccaggcgcatcggtcacgggccagtcagccgcgggagaaggcgcgacggtcgatgcggccaaaaatgggtcggcagtaatggcggtggcaggcgggcagaagcagcggtcacgtcgtcagccaagctcacgtcaccttgtgggacagcgagagaaccctctctcacggcgtgaagatgacacgcccgtgctccgttcctcgaacggctcgcgcacgcgcaacggctgccccgcgaaccacctgccccgtcgcattaactccgcggcgggacaggcgggaccgggaaagggggataccccgaaaaggatccttctccgtgaaggaaacaggccccgagcctccctactgatcaggggttcaaaggctggcccctcggaggggtttaacagccgcctcagagcgcttgggctccgcgcccactactggtcagaggttcgaaggccggcccctcggaagggttcaacggccgcctcaggccactcgggctccgcgcccactactgatcaggggaacgatcttgtaacggaatcccatcagagggaagcatcgagccctcggaccccgtcgaaaggggaccgggtccggcagatcacccgcagaggctcgggggctgctctcgcaaacccggctccgaccaaaccgttgacaacgtcaacataccagcccgagaacttgggacccgaccgtgcacccgggctacggccagctcgcatgagggaacaaccagaccagccgaagcgcgagacattaagacctcggaggagtcaaaccactcctccgaggcctcgggtgctacacccggcgggtgcgctcgcgcacacccaccggaacaaaacgcaaccgagaaaggctggtccccttgcaaaaaagtgcgacaaaagcctccaagcgagtattaacactcccttcgaggctcgggggctactatcggggaccataattaggggtaccctcaaggctcctaaatctcagctgcctcgggcaagggcagccgaccccggaggatctatgtctcgcccgaggaccccctccatcaacgaatag

SEQ ID NO: 13852 - DNA, 810 bp, Zea mays
  Peptide Sequence Number=SeqID_57227
atgggtcggcgcgagacggagcgcgaaggggggaaggagccggagggagacgggcgtgagaggtggaatcctgcggccttcgtgtttgtcccgcgccctggtcggggtaatgatggcgcctcttgtgatgtggtcggtccgagccctgggttgggcgaggtggaggctcctccgaggtcgaggtcgagtctgtctttcgaggccgaggtcgagtccgagcccctgggtcgggcgaggcggagactgtcggctgaggccagggctgagtccgagccctggggtcgggtgaagcgaagttcatcgtcttccggggctgagcccgagtccgagccctggggtcgggcgaagcggagttcgtcgtcttccggggctgagcccgagtccgagccctggggtcgggcgaagcggagttcgtcgtcttccggggctgagcccgagtccgaggcccggggtcaggcgaagcggagttcgtcgtcttccggggctgagcccgagtccgagccctggggtcgggcgaagcggagttcgtcatcttccggggctgagcccgagtccgagccctggggtcgggcgaagcggagttcctcgtcttctggggctgagcccgagtccgagccctggggtcgggcgaagcggagtttcctatggcgcctgaggccagacttggctgctgtcagcctcactctgtcgagtggcatagcagtcaaagcggcgcaggcggcgctgtcctcttgtcaggtcggtcagtggagcggcgaagtgactacggtcactttggctctgtcaactggaggacgcgcgtcaggataa

SEQ ID NO: 13853 - DNA, 237 bp, Zea mays
  Peptide Sequence Number=SeqID_57228
atgcaggaatcccttgcaggaccgccatcgcagcaaaatcctcccgagggcctccctacactgaccactgcccttgcccctttcgggggtctcgggcgtaagaactccaagacacagagcacagtcgctagggacggcgggtttgttttccctaaaatagagggttctatttgcaaagtcggcgatccgaaggggtatcagtggttttcggccgttggatctccgcgcgacggctaa

SEQ ID NO: 13854 - DNA, 702 bp, Zea mays
  Peptide Sequence Number=SeqID_57229
atgggcgattctgacttctgcgcgcgcagagggcgcattaaatgcgcggcagagagccgttggcgcggagacgaccgttgcttcggagtcgcaccggacagtccggtgtacaccggacagtccggcgagttcctgaggccgacctcccttggcgcaccggacactgtccggtgtacaccggacagtccggtgaattatagccgagtcgccctggaaattcccgaaggtggcgagtttgagtctgagtcccctggtgcaccggacaggtactgttcactgtccggtggcacaccggacagtccgagagaccgtcccgtttggatggccaggatgcgttccttggaagggcagctgctgcttgaggacgaccccacagtcgtgtacctcactgcatacctgctcaccctggatgcccagtatgatttcttggctcggcaccaccgtcagatgattgcccaagtagaagatgcagagaagctcaaccgtaagctccatgtggatctcaccacagctcaagcccgtgtagctgccttggaaagtcgtgaagtcattgctgtcgaagccctgaagcaagccaaggatgagcacgtccagaagttgatggaggcctacttggtaacccgcaaccaacgtagagccttgcggatccaagagcctgcttcatccaacccagttcaacccatgagagttgaagatccctag

SEQ ID NO: 13855 - DNA, 1215 bp, Zea mays
  Peptide Sequence Number=SeqID_57230
atgccgagcgtcggcgtgaagatctacagcgtcttcttcaagctcttgctccgccaccgcctccagtcgctggcctccgcggggggcctcgacaacgcggccttcggggtctcctgccgccccgacgaggccaccgcgccgcccaacccggccttctccgccgccgccgacggcgtcgcctccaaggacctccacatcgaccccaactcctcgctctccgtccgcatcttcctcccgacgcccccgcccccgcacgcgcacccgcgccgcgccagcgaccccaccccgaccgcccccgccgctggcgcgccgtaccgaggctacctcccgcacgccgtagcctcgccgcgcgccgccgcgtcggcgcgccggaggctgcccatcgtcgtgcagttccacggcggcggcttcgtcaccgggagcaacaccgccgcggccaacgacgccttctgcaggagggtcgccaagctctgtgatgccattgtcgtcgccgtgggatacaggcttgcgccagagagcagatacccggccgcgtttgaggacggggtcaaggtgctcaagtggattaccaaacaggcaaatctcgccatgatgaccaaggtcaggggtggtgtggacaccttcggtgcgtccactgttgagccgtggattgctgcacatggtgatccagctagatgtgttctacttggtgcaagctgtggtgcaaatattgctgattatgtcactcggaaggtggtcgaagatgggaaaccatttgacccagttaaggttgttgcacaagtcctgatgtatccctttttcatagggagtgttccaacacactcggaaataaggcttgcgaactcatacttctatgacaagtccacatgtttacttgcttggagattatttttgtcagataaagagttcaacctagaccaccctgctgccaaccctctggcgcctggcagaggaggccctccactgaagtgcatgccgccgaccttaacggttattgccgagcatgactggatgagggatcgagcaattgcttactctgaggaactccgcaaggttaatgttgactcgccggttcttgactacaaggatacagttcacgagtttgcaaccctggacgtattcctaaaaacaccacaggcgcaggcctgtgccgaggacattgccatatggatgaagaaatatatatccctcagagggcatgagttctcatattag

SEQ ID NO: 13856 - DNA, 1857 bp, Zea mays
  Peptide Sequence Number=SeqID_57231
atggcggcctccccagcggccgccgctaccttccttcaccatcacctcccctttcccagtcgccccaagacacttctcagaccacgcctccaccgcctcgccgcgtccatcaacccctcgtccaccgacgagacccccgccgcggacccaccggtcatcccctcgatcagcatcaagaacactgagcccgaggaggtcgcccgccgccgcagttgggtggagcacggatgggctccgtgggaggaaatcatgacgccggaggtcgcctttgcgcgccacagcctcaacgagggcgaggaggtgccgcttcagtcgccggagtccctcgaggctttccggatgctcacgccttcctaccggaagaaggtggaggctgagccaggatacctggagcgcctcttcgcgacgcgcgacacgcccgagcctctcgagacgacgtgggccggccggctcccgctgcggctcgtgccgccgcgggactggccgccgcctggctgggaggtggacccggacgagctggagttcataagggaggcgcacagggcggcctctgagaggctggacatggaggcggcggctgcggcaggggtgaccaacgtggagaagctggaggatgcgccacaggatctggcgctagagaggtacaaaatgttcctgaagcagtacaaggaatgggtggaggcaaaccgagataggttggagcaggagtcctaccagtttgatcaggattacttccctggcagacgaaaaagaggtaaggactacagtgaggatatgatatgttacgggcaagtaacgactgttcacctctaccagggagcctttgtgaacattggttgtgtccatgaggggtgggtaccgataaaaggaaatgactggtactggatccgacatcacatcaagcctggcatgaaagtctacgtggagattctggccaaacgagacccttaccgcttccgcttcccacttgagatgcgatttgtatatcctaacattgatcacctaatatttaatagattcgacttcccaccaatatttcaccgtaaggaggatactaacctagagcagttgtggctttgggaatggcataatgcagagcagatgattttagactacgaggaacaaaatccagataaattcaagaatacaacatatgagtccacagttgatgcaccctcaatcgatgaagaaaaaagagttgaatacaccgaaggatatttcaaagaaacactgctaaaaaagaaagttgtgaatattagcatcaaagaacttgatctggatgctgcccgtgctgaacgccagtcggtacagctgataaaaaggctgaaaaaggaagccgaggagagaggggaggaatacaaggttaggaagctccgacgaaacaaagaaatggatgagtatgatctgatgcaatggcgtcgttcatttgaagagagggaagcgcttatcagagacatctgctgccggaaagcgcttgatcttcctatcgaagagcccgggcgatacgacgtggacgagacagaggtgtacgggaaggattactatgacccagagaagccaatgtaccggtacgactactggggcgagcccaagaacacggagaagacgaagctggagcgggacgtggagcgccacaaccagcaggtggtcggcgacgcgaagaagtggtgcgagatgtcgtacgacgactacgtccgcaagaagctgcggttggaagcggctgaggcgagggaaaggcggaggaaggcggccgaggcgcaagaggacgagcaggagtacgatgacggcatggacctggacctgaagaagatgaccgatccacgcgccccgcacaaccggttttacatcacgaaatga

SEQ ID NO: 13857 - DNA, 1122 bp, Zea mays
  Peptide Sequence Number=SeqID_57232
atgccgctggcgctcgcgcaactgcaggacttgcgggaccgcatctccgaccgcctccgcccatggagccgctccgcgcagttctgggtccgcgccgcggacatctacaccagctacaaggtgtgccagctgcgcgcggggttcgtgaaggacgaggacgagctagagaccatgtgggagcggcagcacgagctcggcgcggagaagatgtactccctctgctccgagctcggcggtctcttcctcaaggctgctcaaattctgggaaaacctgacctggcaccgatggcttgggtgaagagacttgttacgctgtgtgatcaagccccatccacgccatttgatgtggttagagatgttgtggagaaacagttggggaagaacttcgatgacatgtttgaattcttcgatgtcgagcctgttgggtctgcttctattgcacaggtgcatcgagcaaggcttaaattatcaaagacagacgttgctgtcaagaagcatgacctcaactttgatctattctctgccaccaaagagatggaaaaacagatatgttatgagtttgactttgtgcgtgaagcaagagcaatggaaagaatacgagaatttctacgtgtcactaataagaaacctccggttatggtgcctcgtgtgattcctgggatggttagcagagaagttttgataatggaatttatcaaggggaccccaataatgaatcttggcaatgaaatggctaaaaggggcatagatcctggtggtaagattgcagcaatggcaaagcagagagcagcaaagttatcaaactgcgtctggtgcagtgttgtgagttctctgattcaccagcttgatcgcaaagtgggcaatgagcaggatgtgggggactggggggctccactgcgagagacgaccagctgtctagcaccttctatgagccaccagccacataaaaaacttgcattttcctggatcccagaatttccaaatcctctcccagggcctaaagagggcagcaccatgaaacattccattgcatacacatttgtcaaagtagtgggcagagctaggcccctttgttggggtcagcggtcagccgaccccgatgatttttggctaaatcaatag

SEQ ID NO: 13858 - DNA, 639 bp, Zea mays
  Peptide Sequence Number=SeqID_57233
atgactcagcttcttttgaataaggaagccctgaccaggtgtgcagaccgcaccggagccctgggcttattgtacctacctgtgtttacgctaaattataatacgagttatgctgatcggcggcggcggttccctcgggcgtgcgaggaggcgcccgtgagcaggagagccccggccgccgcggcgctctccagccagcggattggcggtcgtggagggggcgcgaggaggagcctcagcgtccgcgtcggtacagcttcaggaggcaccgccccgcgtgtcgtacgtggcggtgcgggcgggctggcggtgctctgcgcctacccgtttcgcgtgcccgccaggggcgtcctcccgctggcgtacgtggcgcgcgcgcagggcgccccgctggcgtacgtggcgcgcgcgcagggcgccccgctgggcgacgccggcagcgccgccatggaggccgcgctccgcgacggcgtggtgccgttccgggtggatggggaggcccggacgcgatggaaggtcgcggggatcatcagcgtcgaccagtggacgcgcctggcgtgccagctccgcttcttctggcccaacggcaccgtgctccccttcagatgcatctccaagtccaagttcttgttcttctga

SEQ ID NO: 13859 - DNA, 447 bp, Zea mays
  Peptide Sequence Number=SeqID_57234
atggcagacggcgtgaccgaaggtgggtcagcaacgactacgtcagcaagtacccggaagcagcgcgccagtcactattcaggctttggccccacctgcaggctcgtaccctcccctgaggtgggctcgagggccactgtcggtaccccgaaactagggcaccccctgctactatacaaaggcgaggaacccacgtggctatcccttagtcgtgtggcagaagggctatgcgggggcccaagcgtggctcgccctaggcacgggcggctgctcagggcccacgacaacacccgactccgccacgtggatggccccaaggacgccacgtggccagaagaggtggtatactccaggataccatcagtgggtccagacctccaggagaaagcgccggacccctgtacgcacaacccggacatccgagtacggtccaggatcctcaagtaa

SEQ ID NO: 13860 - DNA, 2175 bp, Zea mays
  Peptide Sequence Number=SeqID_57235
atggcgctccctgttgacgtggcgggcccgcgcccgaggccgggcgacgtgggggctcctccgaagctggggtcgaatctgtcttccgttgccgaggccgagtccgagcccctaggtcgggcgaggcggaagtcgttcggcagaggccagggcggagtccgagccctggggtcgggcgaggcggagttcgtcgtcttccggggccgagcccgagtccgagccctggggtcgggcggagcggagttcgccgtcttccgggtcttagcccgagtccgagccctggggtcgggcggagcggagttcgccgtcttccgggtcttagcccgagtccgagccctggggtcgggcggagcggagttcgccgtcttccgggtcttagcccgagtccgagccctggggtcgggcggagcggagttcgccgtcttccgggtcttagcccgagtccgagccctggggtcgggcggagcggagttcgccgtcttccgggtcttagcccgagtccgagccctggggtcgggcggagcggagttccctatggcgcccctggcgaggcctgactgcctgtcagactcactctttcgagtggcaccgcagtcggagtggcgcaggcggcgctgtccttttgtcagaccgctttatgctaatgggggttaccagctgagaattaggcgtcttgagggtacccctaattatggtccccgacagcagggaaaccactcgagtggatcccttgcccggctcgagaccaatccgccaaaaatgatcggtaccattaactacgcctggcgccgagctatgacaaaggcaacggttcgcctcccactcatggccaacgagccccttgggtataggtgtccacagccgcacggttgccatcgcacgactcctccacccgcgattcccctccccgcgcccgcagcccccgccgccgtcctcgcggccgcagccgagcacagccgccacgcccgcaaatcacgcgactcccgcttccatgtcctcgtgtcctccattgcagtcgcatacatggcgtcaccccttccatcgatggcagccagccgcgcccgcaaatcacacgactcccccttccatggtgtcgcccccttccatccatggcaggtccgcgcccctgcgccccaaatcgcgcggatggaaggtacgcgcctcctctccccattgctcagtgtaggcaatccccaaatccgcgcgtccacgccacctcctactctacactcctcgttccatgtcacgcgcacctactcccgcaccagagaacccaccgcaaaccggcctcgtcccgagatggcggtggcgctacgcttcccatgggtcgcgagggagtctctctctggacgcgcccgtcgccgcctccaagctcgggagggagcggcgcccggcccccgcgagcgcgaacctggggccgcaatgcttgaggcgaggaggggcctagcggttcgctgccagacgaggtccaccgcagtgcccttcctcaggacggaggaggcctccgcggctgcggcgggggcaaggaatgcccaggcggggttcaccttcgtgttagccacatcagtgaatcagctgaagatggtgaagctggagaagtgccaggcgggctacgccaagacattcgccgatctggatcctctgcccaaccacgactacgacacctgttttcgtcgccgtcaagtcatggtgaatccggatactcaaatcattctggatgagatgtcccgacgatttgcggagcaggatgccaagtgggatcgtcgcaccgccgatcaggaaagtcgctgggaagccgtcttatcgagccacacggctgctcaggacgcgcgcgttcgtactctggagcaagccacgggagcgttggaagaatggaagatgagtatcgaaggtgtggtggacgacctacgcatggaggttggcaaagtagccaaacactgcgagcgcacgctggtggagaagccggctacgctcgcgggcgtcctcgcgccttctccaacgcctgccgtgcgtctatctgctggatctccagccgtctcgccccatgggctccgcctcgactcaagtacacgggagaatggttttgggtccgtcacgacccttctccattccccggcaaaggagctgacgagtgtcgcggatctacttggccagttttctgtcaggaattgttag

SEQ ID NO: 13861 - DNA, 429 bp, Zea mays
  Peptide Sequence Number=SeqID_57236
atggtgaagctggagaagtgccaagcgggctacgccaagacagccggagagaaggcagtgagctgcggtggaggaggggcgtccgaaatccctgagctcgctgtcatcagggagctgaatcttaggaagcggtctgtggacgtgaggcggatcaacccgaaggtgcctaaggaggaggctgtcaccatctccggtcgactcgtccagatcctctccgaccatgggcccctcaccatcggcaacacctggaacaacaccaaggtacccaatcaaccagtcagtcaagcagagtggcaaaagccggggagcgatgcaggcgtcggagcagcaacaacggaggactctgctggtgtagatgagaaggaaacacacaaagagcatcaaaagcaagttcaacgatcttatgtcaacccatccacctctgaatga

SEQ ID NO: 13862 - DNA, 423 bp, Zea mays
  Peptide Sequence Number=SeqID_57237
atggctgcgcggcggagcaggggctgggcgcgcggcgcggcggcgttcgcggccgtggcgctggcggtgggcgcggggcggaggtacgggtgggacggtgcctccgcggtggcggcgttccgcgaggcccagggcgcgctggggcactgggcggcgccggcctacgtggccgcgcacgcgctcacgcttgcgctctgtccgccttacgccatcttcttcgagggcggcgccgcgctcatcttcggcttcctgccaggcgtcgcatgcgtcttctccgccaaggtcctcggggcctcgctctccttctggatcggcaggagacgagatctgggaacgctctacactcacgcgatcaggatctgggagaaaaaaaagttcgcgcaactgcttttgcgtgatactgatttagaggggcggcagtga

SEQ ID NO: 13863 - DNA, 2913 bp, Zea mays
  Peptide Sequence Number=SeqID_57238
atgcataaccccaggccgggcggcggggacatcgtcgagatgtcgtcgtccgccaccgccgaggggcgggtgatcccgcacagcggcccgctgagcaagaagtcgggcgcccggaagagcgcgcggttcgcggagtccgtgtcggcgccgctgtccgcgccgccgccgcgcgcctccgccaacaacaacaacaacaacgacgacgacgactacgtggagatcaccctcgacgtgcgcgacgactcggtggcggtgcacagcgtcaagcccgcccacggcggcggcgccggcgccggcgccggcgcgggcggcgacgacccggacgtgacgctgctggcgcgcacgctcgagagccggcgctcctcgtcctacggccactccgtcatccggaacgcctcgtcgcggatcaagcaggtgtcgcaggagctccgccgcatcgcctccatcaaccgccgcggcgccgcggggccccggatcgaccgctccaagtccgccgccgcgcacgcgctcaaggggctcaagttcatcagcaaggccgagggcgccgccggatgggaggccgtcgagaggcgcttcgacaagctcgccgagaacggcctcctccaccggtccaagttcggccagtgcatcgggatgaaggagccggagttcgccggcgagctgttcgacgcgctgtcgcggcgccgcaacatctccggcgacagcatcagcaaggcggagctgctcgagttctgggaccaaatctccgacaccagcttcgacggccggctgcagacgttcttcgacatggtggacaaggacgccgacggaaggatcaccgaggaggaggtcaaagagatcatcacgctgagcgcgtcggcgaacaagctttcgaagatcacggatcaggcggaggagtacgcccggctgatcatggaggagctggacccgggcaacctgggctacatcgagctgtacaacctggagatgctgctcctgcaggcgccgagccagtcggtgcgcatcggcacgaccaacagccggaacctgagccagatgctgagccagagcctccgtccgacggcggagccgaaccctctccggcggtggtaccggcgcgcgcagtacttcctggaggacaactggcggcgcgtgtgggtgatgcttctgtggctgtgcatctgcgcggggctgttcgcctggaagttcatccagtaccggcagcgctacgtgttccaggtgatggggtactgcgtgtgcgtggccaagggcggcgcggagacgctcaagttcaacatggcgctgatcctgctcccggtgtgccggaacaccatcacctggatccgcaaccgcaccgccggcgtggggcgcgtggtgcccttcgacgacaacctcaacttccacaaggtggtggcggtgggcatcgcggtcggggccgggctgcacatcatctcccacctgacgtgcgacttcccgcggctgctccacgccacggacgccgagtacgcgccgctggggcagtacttcggggtgccccgcccgcccaactactggtggttcgtgcgcggcacggaggggtggacggggctggtgatgctggtgctcatggccgtggcgttcaccctggcgacgccgtggttccggcggggccgcatcgcgctgcctggcccgctgcggcggctgacggggttcaacgcgttctggtactcgcaccactgcttcgtggtggtgtacgcgctgctgatcgtgcacgggcactacctgtacctgacgcacaagtggtacaagaagtcgacgtggatgtacctggccgtgcccatggtgctgtacgcgtgcgagcgcctcaccagggcgctgcgctccagcgtcaggcccgtcaggatcctcaaggtggccgtgtacccgggcaacgtcctctcgctccacttctccaagccgcagggcttccgctacaagagcgggcagtacatcttcgtcaactgcgccgccgtgtcgccgttccagtggcacccgttctccatcacgtcggccccgcaggacgactacgtgagcgtccacatcaggacgctgggcgactggacccgcgagctcaagaacgtcttctcaagggtgtgccggccgccgacggagggcaagagcgggctgctccgcgccgagtacgaccgcgacggcagcgccgtggccaacccgagtttggccgttgggcatgatgagctcggcgaaccaaccacaaccaacggcggtgaccgctggccggtgatattcccggcggcggatcggaacacgagctgcgactgttggtcctgcttccccaaggtgctgatcgacgggccgtacggcgcgccggcgcaggactacaagcagtacgacatcgtgctgctggtggggctaggcatcggcgccacgcccatgatctccatcatcaaggacatcatcaacaacatgaggcagctggacggcggcggcgacctggaggcctcggacgcgtcggcgtcgtcgtcgtcgatggcctcgttccgcacccggcgtgcctacttctactgggtgacccgggagcaggggtccttcgagtggttccgcggcgtgatggacgaggtggcggagacggacaggaagggcgtcatcgagctgcacaactactgcaccagcgtgtacgaggaaggggacgcccggtccgcgctcatcgccatgctccagtcgctcaaccacgccaagcacggcgtcgacgtggtgtccggcacccgcgtcaagacccacttcgccaggcctaactggcgcaacgtctacaagcgcatcgcgctcaaccaccagaaccagcgcgtcggagtgttctactgcggcgccccggtgctgaccaaggagctgcgcgagctggcgcaggacttctcgcggaagaccaacaccaagttcgagttccacaaggagaacttctag

SEQ ID NO: 13864 - DNA, 120 bp, Zea mays
  Peptide Sequence Number=SeqID_57239
atggcctccgtcgacgccgacacctgcccctcaaccctgggatgccctgctgttgcacctctgtgttccagttatggggctgctggttgcagaaggtttgatcctgcaattttggtttag

SEQ ID NO: 13865 - DNA, 90 bp, Zea mays
  Peptide Sequence Number=SeqID_57240
atggcgctttcgacgcaaacaggacctaagcccatgggctgccaagtaaggccttgtcgacagatacggtggtcgttgagcggtgagccc

SEQ ID NO: 13866 - DNA, 1341 bp, Zea mays
  Peptide Sequence Number=SeqID_57241
atgtgggggcggcactactggggcggcggccggcgcccaagctgggcgcccggagggaacggagccggcaccggcggcgtggtggtgatgttcgcgtggctgtccagccaggagcggcacgtgcgggcgtacgtggagctgtacgcggcgcacgggtgggcgtgcctcgtctgccactccgacttcctcaccctgtttttccctgagaaggctgccatgctcgccgacagggtgattggggagcttgtcaaggtgctgaagattacacctgtacctgttgtgtttgcgtcgttttcgggagggccaaaagggtgcacatacaaggttcttcaggatgagtaccagctcgtacgagattgtctatgcggacaaatgtatgattcaagccctgtggattttgtcagtgacttgggcactcgcttcctcctcgatccaagtgtcctgaagatgtctgaacctcctcgtgtcttgtcatggatgactaagggcattgcctcaggtcttgatgttcttttcataaacaaatttgaagaacaacgtaaagattattgggaaacactatactcatcggtgcattttggtccaatactaatactctgctcagaggatgatcaacttgctacatattcagttgttcaaaattttggccagcatctgctagagcttggtggtgatgtgagcctaattaaatggcatagttctccgcatgtcggccactacaagcatcatcctgaggaatacagagctgctgtgacggagctcctaaagaaagcctcgacgctctacgcgagcagacgacaactcaacggacacgccgtgggcacaagcgagcacaccgacgcgcccgcgcctgcatccacctccaagtccaacccacacagagatgccgcgagctctgtcggtcgtagcaggctgattcaagcaccggccgatccagccggccagtttccttccataccgagctccatggagtgtcacgagagcagcagccaaggtccgccgcagccggagctgttgagcatgccgggcgtggagagctcgggcctgcgttgtggggtgctggggcaggcgctgtacggtgtctgtgttccgaaggacgtagaagaaggctgggacctcgcgccgccttccgcgtcgtcggatgggatggggaggcgcgtccgtgctgctgccgcgccgcctcgccgtggttgtggcatggcatgggtgcggggtgcctgcacgatgaacttcgccaagaatgacgtttctgtcagagcattagttgctgctagtaggcaggtctggtttgagagagcttcaattcaaaatctgcaccttggattttcagcttcgtcgtaa

SEQ ID NO: 13867 - DNA, 870 bp, Zea mays
  Peptide Sequence Number=SeqID_57242
cttcggctcccggcagtaccgcaactcctcttccaccaaactccagaggcatccaacagcaggcgaggaaagcaagacacgcccacccacccgctccggcagccagcggctatgcagcagcagatgcccatgccgccggcgcccgctgccgccgcggcggcggcgcccccggcggccggcatcactaccgagcagatccagaaggtacgagccgccccgccccgccccgccccgcgcctacctgctaggatttggacgccgtgcttggttaggtccgccggccgccttagctcgtttcgccaagaaacggacgggtacttctcctcgggtggctggctcctgcgcgcgccgtgcctcctccttgctttgtcgggctcgtatcaagctcaacttcaaaagaacctcttgtacctggctgcgattgctgatgcccaaccccagcctccgcaaaaccctgcaggtcgccctcagatgatgcagcctggtatagtgcctggtgcggggcattacatgtcacaagtaccaatgttccctccaagaaccccattaaccccacagcagatgcaggagcagcagcaacaacaacagtttcagcagcagcagcagcaagtgcaggctcttacatttcctggacagatggtcatgagaccaggcaccatcaacggtatgcagcagcagcagcctatgcaggctgaccctgcccgggcagcagcggagctgcagcaggcagcacctatcccagctgacgggcgaggaagcaagcaggacaccgcgggtggggcgagctcagagccttctgccaatgagagccacaagagcgccaccggagcagataccgaggcaggtggcgacgtggccgagaaatcctaa

SEQ ID NO: 13868 - DNA, 396 bp, Zea mays
  Peptide Sequence Number=SeqID_57243
gtcggcaacggcctgaccgacgaccgcaccgacatgacgggcatgttcgagtacttgtggcaccacggcctcacctccgacgagaccctggtgagcgctggaggcgtgcccggggacctccctgatccacccctcgccggcgtgcaaggaggtgtgggacgtggccaccagggagcaaggcaaacatcgacggctacagcatctacacgccgcgcgccgtgcgagaagggaaccccgtacgcgtacgagcgcatcttcgaaaaaggagccgccgcctacatgaacctacccgacgtgcagaaggccatgcatgccaacgccagcggcttcaaagaatacccatggcactatgcagacaccgtatcttatgagcaaggagccctgctgctcccatga

SEQ ID NO: 13869 - DNA, 315 bp, Zea mays
  Peptide Sequence Number=SeqID_57244
atgggttcgcccagcaggaattgctggaacacgaagagcgcctgctccgggcggtggtgcagcgggacctcgtgcccggcgccgcggacggtgaccaagcaggctcagcccttcgtcgtactccatgctccagccgccaacctcggtcgccacgacgatgtaccaggggtaccaactggtctttacgggaaggcccagggcagggcggcgagagagctgctagcgcctggtcgcgctcagcggcaccgcagtgtccgtgtcaccactgtgcaattgcatgcagacgaaaagaagaagaaaaaacatgtgttttag

SEQ ID NO: 13870 - DNA, 342 bp, Zea mays
  Peptide Sequence Number=SeqID_57245
atggggagcgatgcggggagccagggagggagcgagtcacaacgaaagagcgatggggagcagcgggagagagggcgggcggacgacaccaggttcgaccggagattcgtatggtccaagagcgcggagacgacgatgggaatgaagactcgccgtttttcatggaggtcgtcgccctgtggaagctatcacccaagagagttctggagacatcgtgtcgtgtgtactgtgtggagtggaggcaatgaaacgactcgaagtcgacgatgtgttcgcgtgtccattgattgcagagcgatgtttcgaaaagcagcagggtcacgtggttgcagcgcacaatag

SEQ ID NO: 13871 - DNA, 459 bp, Zea mays
  Peptide Sequence Number=SeqID_57246
atgatgatgatgattgatgatggcgagacccgatccacgctctcgtcatgggacaagcaatttgattgttttgacccgcctaactcaacacctgattcaaattcggctggtgccgaccctgatggacgacgcacacgcactcgaaactccgacagtctgacacatccccgccgccgctgcacctgccttgcaaaatcttgcggcggggtgcggcaggcagcacgcagccaaggaacaactggacaccgacacgagatagtcagaagaggctggccacaacctcttgctctcgcgtccgtcctaggcgccgcgctgctgtgcctgggcgccgcggccgccgcctcgccgcccaccatgccggccgccggcaggttcgccatggaaggaatggccgtcgaccaagggatagcccacttcctcgtcctcgcggcggtcttcgccgtgtgcctcttccgctga

SEQ ID NO: 13872 - DNA, 282 bp, Zea mays
  Peptide Sequence Number=SeqID_57247
atgtctttcgtgcttcttgactacttcgaaagtgggatcctgaaaacgacggagtacacacggctcggccggccgccccgaagcctcagccagctgtcccccaaggacatcagcccggctcgtggcctcggcaactcgactccggcgtcggtcccgccagtggacggcccggccaggctccggccgatgaagtcttcttttcgagccaactccgcctctgttcgtgctgacaccgctacctccggcttcggctcatcaaagagtggtcgagggttcctttaa

SEQ ID NO: 13873 - DNA, 84 bp, Zea mays
  Peptide Sequence Number=SeqID_57248
atgtctgaacctgctcacgaccatgttaacgacattgacttcgactacaaggagtatgcgaggcagagattcgagcagtactag

SEQ ID NO: 13874 - DNA, 516 bp, Zea mays
  Peptide Sequence Number=SeqID_57249
atggcgccttctgttgacgtggctggcctgcgccctaggttgggcgatgtggaggctcctccgaagccgaggtcgagtctgtcttccgtggccgagtccgagtccctgggtcgggcgaggcggaggccgtcagctgaggccagggcggagtccgagccctggggtcgggcgaagcggagttcgtcgtcttctggggctgagcccgagtccgagccctgggtcgggcggagcggagttcgtcgtcttctggggctgagcccgagtccgagccctgggtcgggcggagcggagttcgcagtcttccgggacttagcccgagtccgagccctgtgtcgggcgaagcgaagcttcctatggtgccttcggcggggcctgactgtatgtcagtctcactctgtcaagtggcactgcagtcggagtggcgcaggcggcgctgtccttctgtcaggccggtcagtggagcggcgaagtgacggcggtcacttcggctctgccggggggcgcgcgtcaggataa

SEQ ID NO: 13875 - DNA, 342 bp, Zea mays
  Peptide Sequence Number=SeqID_57250
atggcgttgtttggccataatgtggatgctgctgtcaacatcgacgcggtggagccacagccaacaccgaccatggccgggacagtgacggggtcttcgagccccgctgccactggtagtggtagcactgttcgtgacacccgatccaggaagaggctacccacttccagagtatggtctgactttgatgaggtaactggtgtagacgacaaagaatctacatttagtcttgctggcagggtgctcgaggagcgacgacgacgactaacaacatatatggttgagattgtgtgtaagactattatgtgtgtaagtgtaattgctgtcatattatgtgtgtaa

SEQ ID NO: 13876 - DNA, 2589 bp, Zea mays
  Peptide Sequence Number=SeqID_57251
atggctgggcgctgggcgaagtatgccctcgcgagatgccttcccggggatcccgccgcattcgtgcgaagtccagccttcgcgttggatttgcatggtctggatcccgccgcattcgtgcgcgaagcggaagacggtgcggcgaggatcatggggcgctatgtgccgaagacagagggtgtgcggagctgggatatccatggggccaacgatagattgaatcgggtcttcgaattgaacggcttgccatacggtggttatcccggggaagacaccgtcgaccaccgcgggaaagggctagtggccgtgactgaagaagacccctcgcaggaggccgccccagccgctaagaagaggaaattaggtactgcagtgggggaactgggggtttccgatagttttgctatggagttgatggggacgtgtgcagccctcgggggaaggatgtcttcgcccgagctccacgagtcttcggcgcgaatgctggaggttaccgggggtcgatggcccaagaatgttctgatcccccgcgtggctggcgaagacttctttttgtctcgcatggcccatgacttgaaggtgtttccttacggacggaatattgctgctattgtgatggcagtgatgaacaaggaccgtcaagacgctgcgcagaagcgtcgggcggtcatcaggatcgcagatcctaggcgtgaggcgaagagggcgcgggggagcacaaaggctgccgcctccggtagtagccagccgatgccggctgcgaaaccggcagcgctcggatccagcaaggcgtcggcgagcgtgaagactgccgcctctggcggaaccaagcctcccccgggcggatccgcgaaaggacgggaactgccttcgccggagagacttgttggtcacttcggcacggacatcagtgtcgaggattattttgttgggtcgggtgaagggcagttggttgttgtcccgccttcggcggcaaccgtgttgccaacggcggtggctgcggcgaagggtgccgcgcaagacccgtgggccgctttctgcgcgagcggcgagattccgtcagctgctgccgccaaggacgtggcgggctccatgtcccagcggctaagggaggcgtcgcagcagctgtcgcagcagttgaagcaagcggtcgacttcgccgaccgtgtggtgtcgggtgtcctgactgcggacgtggctgccgaagtcgagagacttcgggcgcagcacacggatgccgtccgggagaagtcggcggcggaaagcaagaaccacaggctggcggagaaagtggccgccttggaggccgagaagacggacctctggcgccagctggtggaggagaggagggaggcgaaccaggccatcgctgaggcgcaggctgcgcaagcggaggccaaggtggcgcgggcggagagcagtctcgcccatcaacgcgctgaagagctggaggcaaggttcaacgccttgcgcggccgcgtggacaaggccgaggcctctacgcgctcggaagttgagcggacacacgcacagttcgtggactcataccgcgagctgggtgtgcggactgctgacttcaaagagctggtggtgctcccgaccattgtggagggtttcatgtccttcgcctccctcgtcacctgcgagggggccatgaatgcgttgtcccgcgagggctgcaggcactacgaggtctttgaccaatcagacgagaactttgaacgcgagatcttcaaggccgacgaccctgtggtgaagcagtcagcgggggcacttttcgataggatgtggggtccgcatggtcgggaggcggtcagggagcgattcgaccgggcgagagagcagatggagcgtgccgagtacgtcgaggactttggaagtctggccggcgcgccgcccaaggctgcggaggtcaatccggtgctgccctcggatgctggtgaaggcccctcggctgtgcccgtgcctactgtggctggcgaagaccctgtgtcggcccctgcgccgacagccgaaggttccttgaaggtggtggctgagccggcagtcgaagaccctacggccgcggccgggccttcgcaggttcagggttttgggcctgcgcacgcaaccgctactgacaatgctaattttgtggcttcgaccgtggttgctaaagacgtttctgatgattccgtgtctaagttttttgagtctgatgattctgggagttcgattgtgtggacagaggggtcttcggatgaggacttggactattttgcagcattggatgtggctgcggcggagacttctctgcgtgtgatgggtgatgaggatattccgggtgcgagtgctgggcgtaggcggcgaagggcggtggtgaagcggagagtgagtgagttgtcgcgaagtgataggcgtcatcatggtgaagtggaggatggtcgtcttcgtgtggacgggactgccaaacgggaattgttgtcttcgccggctggggtgagtgtaggtgagggtgagctgcgaaatctttttgagggtgaggaattgaggataatgttgtttaactacagggagatgggtatcatcccgaaggttgagccattgtaa

SEQ ID NO: 13877 - DNA, 573 bp, Zea mays
  Peptide Sequence Number=SeqID_57252
atggcacccaagagagctagttcgaaggcagtcccatccatcgatgaagcggcgaaggcggcgctcctggctgagaaaaaaggcaaggccctcgcagacaacacccaccaagaagcctccgaagatgaagctctcagcaagagacagcgccaagaacaccccactcccgaaggcacctcacgcacctgtagctccagagggcaaccacaagcaccacccccaggcttcgctccactagagggcgaagacgcagcagaggatggcgaagtcatcggcatctcagccgaagaacagctacagctacgggccctgcgcatcaagaacagcaacctccaaaaacagagagacattctcgaggccaagcgccaacgtgtcaccgcgcaagctaaggtgcgccagatgatacgagatgaggagcagagagctcgggaactcgagcaagagattgcgctcatgcagagcgaaggccaccatgatctacaacacgacccgcccctccgacagcacgcgccagccgaagacttattcataccccagcgtgggcccttcatcccgcatgccgcaactttctaa

SEQ ID NO: 13878 - DNA, 740 bp, Zea mays
  Peptide Sequence Number=SeqID_57253
atgtcgccctcaccggcctggtggtcacacgtgccactaaccttcgatgccagagatgttgatctgcgcagcgcaccccacatcgacgccatgcttactcaagccttcgaacaacccctatacggcttcggcggcaagggcactttccctgtgggcaagatagaactacccctgtcattcggcgtagcacccaatgcgcaaagcgaacaggtcacctttgacattgaaaggaggattaggattgaaagagacccgactctttgtgggcgcctcaacgaggaagtagggcaccttggtgatgttgatcctagggcaatagatcttgccatgagaatcgctgaaaggatgttcctcaaaatgaaggaagatgagaagaacaaaattaaagaagaaaatgatcgatggagaccaaacgatgaatccacctcttcacaaggttcgtctttcaaatccacttctcatatgtgctttattgctaatgggagtgacagtgaaagcgaaagtgaggatgaggaggagcaagaaagtgatagtgaagatgaggatgatcttcaacaattcttcgctcagctaagcaagaaacatcagatgagcttgctcaaactcatgaaaagagcggaagaacaaaaagaaatgcttcataagcaagaagacttcctcatcagaaaaatcgaagacttagagaagttgaccaaagagcatgagaagctaaagtgctctcatgatgatttggtccaaag

SEQ ID NO: 13879 - DNA, 549 bp, Zea mays
  Peptide Sequence Number=SeqID_57254
atggcgtcgatgtggggtgcgctgcgcagatcaacatctctggcatcgaagtcttcctgctttagtgctgggggtgattttggtggtgtgggttcgggtgatgtggaggcggaggcgggggtggaaggatttgtacttcctggtgatgctgatatgcgtggttggccccggcctcgtgtgccattgtcgcggccctggggggatattcctgacggcgaggggcctcgccagcggggtgctggttggctatgttgtgcacctactgctgactgcggctgtcccgtttggagtctagctgcgaaggccttgtccaggttcggctggactacggaaggtccttgggctttctctgagactcgacctttcgttgatggagctcttcggatctggcgtatttctcgaacagctgatagagctcttagagatttttggagtgatagctcggccaaggcatcggtatcgggtcggtatccttggaagttgagtagaaacatgtctcggagtcctttccaggagtcgatggacaatgggggcaacctggtgtactag

SEQ ID NO: 13880 - DNA, 543 bp, Zea mays
  Peptide Sequence Number=SeqID_57255
atggcacccaaaagagctaactcgaaggtggccccatccatcgacgaagcagcgaaggcagcactgctagctgagaaaaagggcaaggccctcgcctacaacacccaccaaggagctggcgaagacgaagcacatagtaagagacaacgcaacgatcaacacactccagaaggcacccttcgcacctgcagctccgaagggcagccacaagtgccacccccaggcttcgcaccaccagagggcgaggatgcagcagaggacggcgaggtcctcgacgtctccgcagaagaacagctacagctacgggccctgcgcctcaaaaactgcaacctccagaagcagaaggaaatcctcgaggccaagcgccaatgtgtctctgcgcaggccaaggtgcgccaaatgatacgagatgaggagcagagggctcaagagcttgagcaggagattgcgctcttgcagcacgaaggccaacatgatctacagcacggcccgcccctccagcagcgcgcgccggtcggagacctattcgtccctcagcactga

SEQ ID NO: 13881 - DNA, 324 bp, Zea mays
  Peptide Sequence Number=SeqID_57256
atggaggaacttgatccatactttgaaatgtttgattccatatatttagctggccacaaacctacaccaaaggaactggataatctacgtatgaaagggatgaacggagaagaaggcgatcagtcagaaaatagagaatttactatatctaaggatttagggctcaatgaagtagctagtcttaccatagatttgatggcagaagaaccaggtccttctagggcaaggactcataagtcacagagaattcttgaaaaacaacaaagacttgaaataattaagcagcgcattgctgaagcagattctgatgctgatgatttttga

SEQ ID NO: 13882 - DNA, 465 bp, Zea mays
  Peptide Sequence Number=SeqID_57257
atggaactaggactctgcttgaaagcagatgtaatacttttgctttttgtttcagtccgggtggccaagttgcgtgtccggacccccttgggtcgcggctctaggacagatgggaaccgtgcgggtgggttagataaaaggtattatctgaaaagctgcaagggtccttcccagctgggggagagttgcggaacccttcttggtttggtacttactgtaagactaggtcccgaccctgggtccccatctgtgtttgacgagggagccctcgtctttggctatggccattcccgcatgaacctgtcggaagtctggatctgtggggaatccagaagggtttccgggggaaggcaggctccagcctcgcagaccggggagcacggggtccctctgggggtccgtctagttgtctccaccagagtaggagcctctggtgaagacatccttcaggtccccctcaggtga

SEQ ID NO: 13883 - DNA, 6660 bp, Zea mays
  Peptide Sequence Number=SeqID_57258
atggtgagagaggagcgcgcgccccggaggggagccaggaagacctaccgtgccggggcgtcagggcggcggcgcgacccgctcgcggcggcgtggcggcggcatggcccggtcccggtcccggtgacggcgcggtggcgtcgtgggctcccggcgtgtggcgacgtgggctcccggattaagttcgacggtgtctacaagcccgacaaacttaacttaagaacgtgtgcacgttggccctttgcttttcccgagggcgacgagttcaccgcggatgactcaccggacagtctggtgcaccaccggacggtccgaagctgtgccctccgtctccctctcgagctctcgcactcctccgtcgtcctccaaaccctaggccagaccagagctgaagtcgagcggaagtccaaggtgagttctctctcccctaatccgcccgacgccacctctctcttcccacctcaccgtggcccgatccgcgcaggcaccgccgcgaccccccatcctccgcacgacctggatctgacgcgcctccccctgccgccgtccgcctcacacctcctcgcggcggccgccgtgctcgggctcctaggcggcctcctactctacatgcttccccggaagcggggggtcgacgccggcgaggtccaggatttgcacaacaaggccccccgcgccgccccagcccaggacaaggacagggaggaggttgcggagatggccggcagggcgcccgagatcgatgaggacctccatagccgccagctcgccgtctatgggcgcgagaccatgaagcgcctcttcggctccaatgtcctcgtctctggactccagggactaggcgctgagatcgcaaaaaaccttgtccttgcgggtgtcaagtctgtaaccttacatgatgatggcaaagtcgagctatgggacttgtcaagcaatttcttcctctcagagaaggatattgggcaaaaccgtgctcatgcttgtgttccaaagctacaggagcttaacaatgctgtcatcatctctaccgtaactggtgatttgaccaaggaacaactttctaactttcaggctgtggtctttactgatatcagcatagaaaaagcagttgagtatgatgaatactgtcatagccaccagccgccaattgctttcattaagtccgaagtttgtggcctttttggcagtgttttctgtgactttggtcctgagttcactgttttggatgtcgatggcgaggaaccacatacaggaattgtggcatcaatcagcaacgacaatccagcacttgtttcttgtgtggatgatgaacgtctggagttccaggatggtgatctagttgttttctccgaagtgcatggaatgaccgaactcaatgatggaaaaccaagaaagattaagaatgcaaggccttattcttttactctagaagaagacaccacctcatatggcacttactttagaggtggtattgtcacacaggtgaagccaccaaaggttcttaaattcaaaaccttgaaggatgcaatcaaggagccaggagaatttctcatgagtgatttctccaagtttgaccggccacctcttctacatttggccttccaagctttggacaaatttaggtctgagttggcacgatttcctattgctgggtcagatgatgatgcacagaagctgatagaccttgctattagtattaacgaaactcttggtgatagtaagcttgaagaaattgacaagaagctcctgcagcatttcgccagtggttccagggctgttttgaatcctatggctgcaatgtttggcggtattgtaggccaggaggttgttaaagcatgctcagggaaattccatccactttaccagttcttctactttgattctgtcgaatctctgccagttgaaccgttggagcctagtgatttgaagccagagaacagtagacatgatgcacaaattagtgtctttggggctcagcttcaaaagaaactggagcagtcaaaaatcttcatggttggttctggggctcttggatgtgaatttttgaagaaccttgcgttaatgggtatttcttgcagtcaaaatgggaagctgactgtgacagatgatgatgttatagagaaaagcaatctcagtcgccagtttctcttccgtgactggaacattggacagcccaagtccacagttgctgcaactgccgctatggcaattaatcccgagcttcatgtggaggcccttcagaatagagcaagtcctgagactgaaaatgtgtttaatgatgccttttgggagagcttggatgctgttgttaatgcattggacaatgtcactgcaagaatgtacattgactctagatgtgtatatttccagaagccacttcttgaatcaggtactctgggtgccaagtgcaacacacagatggtcattcctcacttaacagaaaactatggggcatccagagatccaccagaaaagcaggcacctatgtgcactgtacattcatttcctcacaatattgatcactgcctgacatgggccagatctgagtttgagggtctacttgagaagactcccactgaagtaaatgcttttctgtcgaaccctggtggatatgcaaccacagcaagaactgctggtgatgcacaggctagagaccaacttgagcgagttattgaatgccttgagacagacaagtgtgagacattccaagattgtattacctgggcccggttgaagtttgaggattatttctccaaccgtgtaaagcagctgacattcacttttcctgaagacgcaatgactagctctggtgctcctttctggtctgctcctaagcggttcccgcgaccactggagttctcatcttctgactcaagtcaccttaacttcttgttggctgcttctatattaagggcagagacatttggaatacccatacctggttgggcgaaaaacccaaagaaactagctgaagctgtggacaaggtcattgttccggatttccatccaaaagagggtgttaagatagagacagatgagaaggctactagcctatcctctgcgtctgttgatgatgctgccgtcattgaagagcttattgcaaagctgcaagcaatttctaaaacattgtcaccaggattccgtatgaaccctatacagtttgagaaggatgatgataccaatttccatatggacttgattgctggttttgctaacatgcgggccaggaactacagcatccctgaagttgacaagttgaaggcgaagttcatagcgggaagaatcatcccggccatcgccacctcaactgcgatggccaccggccttgtctgcctggagctttacaaggtccttgctggtgggcacaaggttgaagactaccggaacacatttgcgaacctcgcaatccccctcttctccatggcggagcctgtgccgcccaagaccatgaagcaccaagacatgtcctggaccgtgtgggaccggtggaccgtaactggcaacatgacgctgagggagctcctggagtggctgaaggagaaggggttgaacgcgtacagcatatcctgcgggacctcgctgctgtacaactccatgttcccgagacacaaggagcggctggacaagaaggtggtggatgtggccagggaggtggccaaggtggaggtgccttcctaccgccgccatctggacgttgtggtggcctgtgaggatgacgatgacaatgacgtcgacatcccgcttgtgtctatttacttccgcgacgactgggcgaacgctgcctcgcttcgtcacctcttcgccggcggcgacgatcacccaccaggctcaaaggactcgcaaaattatgataacaataatcaaagagtccatcctcaaccaatcgacgataacatgaatcagaacggggactcaatggacactgtgatcgggaggatattcaacaacatatcctctttaaaatccgcctacattcagctgcaggaagcccacaccccatatgaccctgacaagatccaggaagctgataaacttgtcatagaggagcttacgaggctttcagaactcaagcacgcttacagagaaaaacatcctaagccaatagctgcatcccctcaagattcacgcttgctttctgaaatacaagagcagcagaacttgttgaagacctacgaggtcatggtaaagaagttccagtcccagatccagtccagagacactgagataacccatctacagcagcaaattgatgaagctaaacttcggaaatcaaagctagagaagaaactgaaacagaggggcctacttaacagggagtcggaggaatctgacgaagaagagaactacttttccattgaattgacaccaagtttgtttacatctgccgttgataatgcctaccagtcgatacatgacttctcgaagcctttgatcaacatgatgaaggctgcaggttgggatcttgatggggctgctagtgcgatcgagcctggtgtggtttacacaagaagggctcacaagaagtttgcttttgaatcctatatttgccaaagaatgttcagtgggttccaagaagaaagcttttctatcaaggattctaacatcagtgtttccaatgaggctttcttccaccaattcctcgcggtgcgagccatggatcctctggatgtcctgagccagaaccctgattcagtattcggaaagttctgcagaagcaagtacctatcgcttgtgcatcaaaaaatggaaggttctttcttcggcaacgtggatcagaggaactacgtcatgagcggcggccatccaaggacacctttctaccaggcattcctaaagctagcaaagtccatatggttgctgcacaggttggcgcactccttcgatccaaaggcaaaggtgtttcaagtgaaaaagggaagtgaattttcggatatccacatggagagcgtcgtgaaggacatcatcctagaagatgtcgcggagaggccgaaagttggcctgatggtgacgcctggtttcctgatcgggaccagtatcatacagtcccgtgtgtacctttcagaagagaagcaaagcaacagaccacgccccagtgagagctcagtttcccctcttcagtctttgctctcaactgctgccatggcaaacgcatccgacagcgatattccatccgtcactcacgacctcgacgaggatgaagaattcgacgacgacgacctcgatgacgaagacgacgatggcggcgaacccctcgcgtcctcatccgaggcggctcgcctagaggccgtgctccggcgtctcaccgcggacgaggtccggatccgggtgcaccaggtcacgatccggggctgcgcccgcacgcgccgcgccgcggtcgaggcggcggtcggcccggacgtgtcgcgcgccgccaccgtgcgggacctcgtgcgcgccgccgccgccgctggtgaccggctccgttgcctcggcgccttcgacacagtctcgatcaccctcgacgcggcgccgcccgggatccctggcagcgccgtcgtcgtcctcattgatgttgcggaggcccgcggccgcgctgccggtgatttcggcgtcttcgccaacacacagagtagatcatgctcacttgaaggttcagtgaagttgaagaacctatttggatactgtgagacctgggatgcatcaggcgctcttgaattagataagacagcagaactaagtgccggagtccaaatgcctaggatcggagcaataccaactcccttgatggctagaatatcgtttgtatctgacgactggttaaagtcctcactgaaagaacacttgatgggcgtttctgtcggcttgctctccaccataaaccacaacattgcttacaatttgacatggagaaagttaactgatccaacacgcatgtcatccaattctgtacaagaggaattaggacatagccttttgtcctctattaagtacgcgtacaaggttgaccgaagggactcaagcataagacctgcacgcggatatgcttttatgtcgacttctcaagttggagggcttgcaccagggagcaaatattcacgttttcttaggcaggaatttgatcttcgagtggctttgcctctgggtgtgctgaatggtgctctcaacgccggagtggctgcgggagtcatccatccattggaaaggggatctgcaggatctgtctcaccacttgtagaaagatttaacttgggtggtaatagggctctcgtgtgccgcttgggtggaccatcttcactattaggcttcaaaacaagagggctacgggcagcaacagagtccagaacacaagaccccaacactcctggcaatggcacttccccttcccctgagctaaatggtcttggaggtgaagtagcggtgacagccttcgccgacctgtcatttgatctgcctctgaagccgctcagggagctgggaatccatggtcatgcttttgtctgtgctggaaatcttggtagattaacggagtgtgatctgcggaagttccctgttactgaattcctgcagacgttcagaagttgtgcaggatggggcgtagttgtgccgaccagactgttccgcgtagagcttgatcatgacggggggaagacaggcatacagttgaacttctcatcctcctaa

SEQ ID NO: 13884 - DNA, 771 bp, Zea mays
  Peptide Sequence Number=SeqID_57259
atgatatctgcagcctgtgtagcttcggcgtgcagcggaagctcccctgtacaagtgatgatgagcacagtggctcatttaatgctgaggcgacacatcacctgccagtggagtggacaggcggcgcgccttacccgcattaaatgcagaggccgcgtggcccagaggccttacgtcaggctccgcccgccgatttatgtcacgggtagtaggccacgtggcagcatcgggtctccgcctgagcggggagtgggagcgcacgcggtatggtccggacacgtgtcagcaccggacccccgcatgacttcgattaaggcctgggtattctctgctttggaatcccgggacctactacgagtggcccggacccctctgaggggtccgagacccgtcccagtggtctggtttgtacctgtggaggtcttgaacctcacccggaggtccgggctgttcatccaggggcccgacactttcccgtgggggtccggacccactgctgccaccttggagtatatcgtctcctctagccacgtggcggccccagagtcgcccacgtggaggggtcaggtgctgtttaccgtgcgactggagatagccgcgcgggcaccgtgtcttcatactgtagtaaggggggaagcttctcgtataagggatggtgagaacagtgcgccgcacggcacgggcgcactgtttgacaacagactggacaggcgcgccgtctgcagggtgaccctgacgccgtctaccagcgaagtggacaggacgcattaa

SEQ ID NO: 13885 - DNA, 5073 bp, Zea mays
  Peptide Sequence Number=SeqID_57260
atggcggcggccaacgcccccatcgccatgcgcgaggcgctcacgctcaccagcctgggcatcgcgccgcagtttgtcacgtttacccatgtcaccatggagtcggagaagtacatctgcgtccgcgagacctcgccgcagaacagcgtcgtcatcatcgacatggccatgcctatgcagccgctccgccgccctatcaccgccgactccgccctcatgaaccccgacgccaggatcctcgcgctcaaagcccaaatacctggaacaacacaggatcaccttcaaatatttaacatcgaggctaagactaagatcaagtctcaccaaatgcccgaacaggttgtattttggaagtggatcactcccaaattgttgggtttagtgacacaaacatctgtttaccactggtcgattgaaggtgattctgagcccaccaagatgtttgataggacagctaacttggcaaacaatcaaatcatcaactatcgatgtgacccagcggagaagtggcttgtgcttattggaattgcaccgggagccccagagcgtagccaggcgcttgaagcccatgcagcatcttttgcaacatttaaggttgttggtaatgagaacccatcaacccttatttgttttgcctcaaagacaactaatgctggacagatcacttcaaagttgcatgttattgaactgggtgcccagccagggaaacctggcttttctaagaaacaagcggaccttttcttcccaccagatttccaggatgattttcccgtagctatgcaggtttcacaaaagtatgggcttatctatgtaattacaaagcttggccttttgtttgtatatgacttggaaactgctgctgcagtttacagaaatagaatcagtccagaccctatattcttgacagcagaatcttcctctactggtggattttatgccatcaacagaagagggcaggttttacatgccacggttaatgatgcaactgttgtaccatttgttagcggccagctgaacaaccttgagcttgctgttaatcttgccaagagagcaaatcttcctggtgcagagaacttggttgtgcaaaggttccaggaactgtttgcgcaaacaaaatacaaggaagcagctgagctggctgcagagtctccgcagggcctcttgaggactcctgaaactgttgcgaaatttcagagtgttcctgtgcaagctgggcaaacacccccactcttgcagtactttggcacattgctaactcgagggaagctcaatgcctttgagtctcttgagctatctcgacttgttgtcaatcagaacaaaaagaaccttctggaaaactggttggctgaagacaaactggagtgcagtgaagaactaggagatcttgtcaagactgtggacaatgatcttgcactgaaaatatacatcaaggccagggcaacccctaaagttgttgctgcttttgctgaaaggagggagtttgacaaaatacttatatattcaaagcaggttggatacaccccagattatctcttcctcctgcaaaccattttgcggacagatccacagggagctgtcaactttgcattgatgatgtcacaaatggagggaggttgtccagtagactacaacactatcactgatctcttccttcagagaaatatgatacgggaggctacagcttttctgctggatgttctgaagccaaacttgccggatcatgcttttcttcaaaccaaggttttggagatcaacttagtgacttacccaaatgttgcagatgccattcttgcgaatggtatgttcagtcattatgaccgtcctcgtattgctcagctctgtgaaaaggctggattatacttgcgtgccctccagcattattcagagttgcctgatatcaagcgtgtcattgtaaatactcatgccattgagccccaggcacttgttgagttctttggcaccctttcaagggagtgggcactagagtgcatgaaggaccttctactggtaaatctgaggggaaatcttcagattgttgtgcaggctgcgaaagaatattctgaacaactaggagttgatgcttgcataaaattatttgaacaattcaaatcttatgagggcctctactttttcttgggatcctatttgagctccagtgaggatccagatatccatttcaaatacatagaagcagctgcaagaactggacagatcaaagaagttgagcgtgtaaccagagagtctaatttctatgatgcggagaagacaaagaactttttgatggaagcaaagctacctgatgcccgcccactgattaatgtttgtgaccgctttggatttgttccagatctgactcactatctatatacaaacaatatgcttcggtatattgagggctatgtacaaaaagtcaatcctggtaatgctcccttggtagttgggcaacttctggatgatgaatgcccggaagatttcatcaagggtttgattctctctgttcgttctctgcttcctgttgagccactagttgatgaatgcgagaagaggaaccgcctacggttgcttactcaattcttggagcatctagtgagtgaaggtagccaagatgtgcatgtccacaatgctcttgggaaaatcatcatcgacagcaacaataaccctgagcatttccttactaccaacccattttatgactctcgtgttgtgggcaaatactgtgaaaagcgagatcctacacttgctgttgttgcttatagacgtgggcaatgtgacgacgagcttattaatgtcactaacaaaaactcattgttcaagctacaagctagatatgtggttgagagaatggatggtgatctgtgggataaagttcttcagcctgagaatgaatatagaaggcaactcattgaccaagtggtttcgaccgcattgcctgaaagcaagagccccgagcaagtctctgctgctgttaaggcattcatgactgctgaccttcctcacgaattgattgagcttcttgaaaagattgttcttcagaattctgcattcagtggaaacttcaacctgcagaacctactcatcctgaccgccatcaaggcggatccatccagagtcatggactatgttaacagactagacaattttgatgggcctgctgttggtgaagttgctgtcgaggcacagctgtacgaggaggcttttgctatatttaagaagttcaacttaaatgtgcaggctgttgatgttctcttggataacatccgaagcatagacagggctgaggagtttgccttccgtgttgaagaagatgctgtttggagccaggttgctaaagcccagttacgtgaaggtctggtcagtgaagcaattgagtccttcattcgtgcagatgatgcagcacacttccttgatgtcatccgtgcggctgaggaagccaatgtgtacaatgatttagtgaagtaccttctgatggtaaggcaaaaggcacgggaacctaaagtcgacggagaactcatctttgcatacgctaagattgacagactcagtgacattgaagaattcatacttatgccaaatgttgccaaccttcaaaatgttggtgaccgtctatatgatgaagaactatatgaagctgcaaagatcatatatgctttcatctcaaactgggctaagctggctgttaccctggttaagctgaagcagtaccaaggtgctgtggatgctgctcgcaaggctaacagtgctaaaacatggaaggaggtctgctttgcttgtgttgacgcggaggagttccgtcttgcacaaatatgtggtctcaatattattgttcaggttgacgacctggaagaagtcagtgagtactaccagaacagaggatgcttcagtgaacttattgctctcatggagagtggtcttggacttgaacgtgcacacatgggcatcttcacagaattgggagttctatatgctagataccgctctgagaagcttatggagcacatcaaacttttctccacccggctcaacattcctaagcttattcgagcttgtgacgaacagcagcactggaaagaacttacctacctgtacatacagtatgatgaatttgacaatgctgccaccacaattatgaaccactctccagatgcatgggatcacatgcagttcaaggatgtctgcgttaaagttgcaattgtcgagctatattacaaggcagttcacttttatctgcaagagcatcctgatctcatcaatgatatgctaaacgtgcttgcacttcgtttagatcacaccatagttgtagacataatgcgcaaggctggtcagttgcatcttgtgaaaccatatatggttgcagttcagagtaacaatgtatctgccgtgaatgaagccttgaatgagctttatgtcgaagaggaggactacgagagactccgtgaatcagttgacatgcatgacaactttgaccagattggtcttgcccagaagcttgagaagcatgaattgctggagatgaggaggatcgccgcctacatttacaagaaggctggcaggtggaagcagtcgattgctctatcgaagaaagacaacatgtacaaggactgcatggagacatgctcacaatctggcgaccgtgaactgtcagaggacttgctcgtgtatttcattgagcagggtaagaaagaatgttttgcttcttgcctcttcatttgctacgacctgatccggccagatgtggctcttgagcttgcatggatgaacaacatggtggactttgccttcccgtacctgttgcagttcattcgtgaatacactagcaaggtggatgatttagtgaaggacaagatcgagtcgcagaaggaagaaagagccaaggagaaggaggagaaagaccttgtggctcagcagaacatgtatgcgcagctgcttcctctcgctttgccggcgccgccaatgcctggcatgggtggtcctccacctccgatgggtggaatgggcatgcctcccatgggcgggatgggtatgccgccgatgggccctggtccgatgccagcattcggaatgggaggctactga

SEQ ID NO: 13886 - DNA, 1302 bp, Zea mays
  Peptide Sequence Number=SeqID_57261
atggccgtctcaatgcgtgcgccattgcgaagaggtcctcgcccccgtcctcctacggggggcaacagcgaggccattaaagccaaagagttggaggctcggcggcaggtggcattgatggtctcgccagcagaggcaaccacctctgcactgggcagcctcaccagcggcggcgaccacctcagcaccgacgacagcggccacctctacaccggtggcttaccggcgacggcggccgcctcagcgcacgcgaagaggtcctcgctcccgtcctcctacgggagtgaggacaagaccatccaagaacgcggtcgccacccccactgcgtacgacgccttccacgccccgaccaagcggcaggagacagcgtcggaggcggcaccgaggccatccaagccaaggagccagacacgcggcagatgacggtgcctgcagccggccggccccacgtagccgaagttcgcctcctccgcaaggctaccgggctgcatgatgaaaaaccttggagccgaacgatggcagaagagcgccaacctgaaagggaaatgatcacctattcacccccccccccctctaggtgctctcacaacccccgcgaggtcgcgctcctccaacaacagcaagaagaagacaagatcggtagcaccaccgcgcaggaaatgaagagcgcgagctccccggcgcggtcacgaagacgaaccgccgcacaaggagcgtgcaaccgccccacggttatgcgccccttcatcttcgtcaaaaccagtggtcgagaaggcgaactgccacgcaggaagcgtacacccgacccgcggttgtgcgccccctcagcttcgctgcgaccggtggtccaacatgggggcctagacccacatgtcatgcaaccggcgcaccggttactgagtgtgaaaaaaccacaccgccgctcgcgccaataccacatctcctcggggccgtcacggaagactgaaaagataagttttcagaaccagtgcagcgactcgaggcaccccgcgcatggccctatagtgacattgagtacgaaggtcatgggccagtcaaccgcgggaacaggcatggcagtcggcgtgaccataggcgggccggtagtaattgcatcaacaagcgcgcaggagcagcaagccaatcaccaatcagactttggacccacctgcaggctcgtctcctcccctgaggcgggctcgggggccactgtcgacccggactcccaagaaggcatgtcgggtccctcagatgggtctcaggtccctccgagaaaggtccggaccacaacaaggtcctag

SEQ ID NO: 13887 - DNA, 1728 bp, Zea mays
  Peptide Sequence Number=SeqID_57262
atggccactggtgaggccgtggagcttggagggtgtcgcaacaactccctagctgctgacaacgctcctggagtcgccctcgacggagtccgggatgtctgtgcagttgtatgttgctgtgcggcgtgcacagcagcagtgcccgacacagggcagttgggaaccagtggggaagcttctcgtataagggatggtgagcacaatgcgccgataagggatggtgagcacaatgcgccgcacgacacgggcgcactgtttgacaatagattggacatgcgcgccgtctacagggcggcgcgtcctttccgcaataaatgcagaaaccgcacggctttagaggccttacgtcaggctccgctcgtcggcttatgtcacgggccacaagccacgcggcagcagcgggtctccgcctcaacggggagcgcaggggaaggcctggacacgtgccagcaccggacccctactcatgccagggttccccctgtcccaggaccttgctgcggtccggacctttctcggagggacctggggccatccgagggacccgacatgccttcttgggagtccgggtctgtaatcgaggatccgggttgtgcgtacaggggtccggtgttcctccgtggaggtccggagccaatgatgcaccctggggacgcttcatgggcctgggcccccgtgccagagactgggctgtcggtttggacggaggtgaagaggcgcactaccgcaggcggtggcgtgctcctcatgcggcagttcgccttctccgcacacggaggccgacacccaaggagtatgactcgtgggcccgggccccacgtcagaggctgggccgctgctttcggcggagatgaagaggtgcactaccgcaggcggtggcgtgctcctcccgcggcggttcgccttctccgcacacggaggccgacgcccaaggagtatgactcgtgggcctgggctcccgtgccaacacccaaggagcatgactcgtgggcccgggcccccgcgccagaggctgggtctccctggcgcgcgtcgggcgagatcttctgcgacatctcggggcgtcagtgggggaatctttctttaaaaagggactcccccgagcgtggtagccattctcgtcactcgcaacgccctttcgccctcgagttctccgcgctcttctgccgccatgaccttgctagaccctcccgagtgcttccagtccgaggtggcactcgacttggtgcgcaacctgctcggatggggtgcgccgacgttcgccggaaggatccgtgtcggcacctctcctcacggcgaccttgccgccggggagttcgtgcttttcgtctccaacctcccgagcgggttggcgctgccgatctcgtctttctttgtgctgctgctggaggggctcagccttcaacctcagcactttacgccctgtttcatccttcaggcggccatcatcgcctacctctgcaagatgtccatgggggcgacacttcttcccgcttcttcctccagcattcgaaggaaaggatgttcaccagccttgtgaaggtgggaagcgagctgagctacggctccatctttcatgcctccatctctttggctttgatggcttcggtgccgcctccaatggttaccgccggcctggctgctgaagacgccgctcggggggtcgtacaagatgtcgcgaagatggcagccgcgcgcttccagcgcgaccctactgatgtcgagtag

SEQ ID NO: 13888 - DNA, 804 bp, Zea mays
  Peptide Sequence Number=SeqID_57263
atggtcgggagaggaggtggcatccaaagcgcagcgagtggagaggatctagtttggcccctgagtaggttggcttccatgtgccccggatcccggtcctcgcccaccctgtgccctggatctcgatcctcgcccaccctctccatagaaggggatcccgtgtatcgcaagcagaccgtggtcgggagaggaggcggtatccgaagcatgacgaggactcctgtttctgtcagaggctatggggatttacgcatgaagggtcaaatcaatggtgctcagggggattctggtgcagatcaactaaatactactattgatgacagtgaagaagttcttagcttggaatcaactgctggattagaatcattgtgcatctataaactccgagaacacattgggggttcaagcttccattttgtgagtgaatttaagcaagaagcctttattgagaataacaattgtggttcatttaatacaagcaatgcttgtccatgctttgttgcgttgcagagactgtggaattgtgagttctaccgatacttgttctacttgggcaaaattaggacaattcagttggagtacactgatgctaaagaaagcctcctgcaagttgctcgtaaggcaccaacaacagcccatggttttcggatccagtgcaacaaatgggttatcatagagaggctgctgcttggtgagattccagagaggactgttttcatgcagaaaggaataaatgcattcaaccatataatgattaaatatgatctttatggcatgtcattctctattgtttctaatttatag

SEQ ID NO: 13889 - DNA, 315 bp, Zea mays
  Peptide Sequence Number=SeqID_57264
atggagagggtgggcgaggaccgagattcggggcacaaggaagccgacctacccaggggccaaacgggatcctctccactcaccgtgtttcggatgtcgcctcctctcccgaccacgatccggggcaagagtgctggggtgcagcggaggcgatctccttccatagagagcgtgggcgaggaccgagagccccgacaatttggggcgagaaggcgaggattgcgggagacagagtggggcgaggagaggcaggcgggggcgtggcgtgcttcaccagaatttgatgtggacgcccactctcatcatatagagtag

SEQ ID NO: 13890 - DNA, 639 bp, Zea mays
  Peptide Sequence Number=SeqID_57265
atggccactgagaaccactcggagagctaccccagcggcccgatgtgccactgtgaccactcttgcgaccgtagccctgaccgtgatcgcgacccccctagagccaatagggtgctaaagagctccaaagggtggtggggtcgaagtgcggtgaagaagaatccccccggagtcagagggggcagcctgaggcacgctgtagagcatcgtggcaggagcggtggtcgcagtggtagagaggcgaagctcctcgagaaagagaccgccctgagcaagctggcggaaagcagtctcaaggtacaaaatttgagtctggtggttgccgaggaactgagcctcaagggcaccctagatctagtgagcagtatcgtccggcactcgaatggtgtcctgaagttcggccgtgagggtgccatggatccaagaaggcaccacctcatccttcaagagccaatcgtccgtcgggtcagtgacccaggagaggacgtggtcggcgagggcatagcgggggagggtctacaggacctggtcacgccatcgagggtactgagtggagtccggcgcgagaacgtcggtgactgtttcccatatgctagtgaaggccgccacctgagcatgaagagaggcatgaagcgttga

SEQ ID NO: 13891 - DNA, 99 bp, Zea mays
  Peptide Sequence Number=SeqID_57266
atggcggtgtatgggacccgtacaaccccatggttgatgggtaacatgacttgtgggtacagggtacaacctctacagagtgtaaaactggtatactag

SEQ ID NO: 13892 - DNA, 726 bp, Zea mays
  Peptide Sequence Number=SeqID_57267
atggtcggccggccaccgccccctccctcctccgccgctgccggtgccccattcccccttctccctctctcctaccgggcgacgctcgccatgcccctggcggccatgtatggccctgcacgcgccacccccgctgtcggtgcgtcgctggggcacgtcttcattgccgtcgccgcgccttctccacctggcacgcctccttccgcccacgccaccgctggatccgaacgcgtcaaccttccctcacgtcttcgtctctgccgccgcaccttcttggcccgacacacctcctccgcctgcgccactattggatccggccacgccagccttccctccccccacccgacccgcgtcggtcgcccctctatccgccggatctgtgccgacctcatacgcccccctggtggtcgtccctggccccgacgggtctcggctggcccctgctgtttccctgcctgccgccacattcctctctcccggcttcccttccagcgcgctcttcctaccggatgccaccctgcttcgctcccagctgttggcgccgggtttccccatgtcctgctcggaatgacggttagggcccacgtgcgtgactgcccaccaccaatgactgtctatagccagctgtccgccatcacctcatccctgcgcgctccttcggatgacgctgcagccatcctcaccgccacccgggcagccattatggcggcttgccagcgggcctag

SEQ ID NO: 13893 - DNA, 267 bp, Zea mays
  Peptide Sequence Number=SeqID_57268
atgctgggtctcctccagcagctgggatgccctgaggtggtgcaggaggcatctttggctgaggtgcaggggaaggcggcctctcagactccacctcccactgaggcgagggggaagagtcctactgctcctgctcctgctcctggcgtcggcactcctgctcctcgtgcaagcgatgatgcagtctctctaactggctggactgacctgacaccgtgcgacgcagtggacgctccgccaggcgagaaggcaaaaaaggaatcatag

SEQ ID NO: 13894 - DNA, 318 bp, Zea mays
  Peptide Sequence Number=SeqID_57269
atgcaggcggcatgcaaccgcgccaagtgggcgcgcttcttcgactcccaacgcgcccagcctggaggcccaggcccacgcgtcatgcaaccggggctgggaaagggggataccctgaaaaggatccttccccgtgaaggaaccaggctccgagcctccctactgatcagaggttcgaaggatggccccccgaagggttcgacagccgcctcagatcgcgtgggccctacacccactactggtcagaggttcgaaggccggcccctcgaagggttctacggccgcctcaggctactcgggctccacgcccattactga

SEQ ID NO: 13895 - DNA, 957 bp, Zea mays
  Peptide Sequence Number=SeqID_57270
atgtccgaggacgacctaccgtaccaggtgcgcgtgaccgccgacggggacctccgcaccgtcgggcgctacgacttcgaagggcagctcgggtgcgccagcatgatcgcgcaccccaagctggacccggcctccggcgacctcttcgcgctcagctacgacgtcatccggcggccctacctgaggtacttctacttccggcccgacggcaccaagtccgacgacgtggagatcccgctggagcagccgaccatgatccacgacttcgccatcacggagcggttcgtggtggtgcccgaccaccaggtggtgttcaagctcggcgagatgctccgcggcgggtcccccgtggtgctggaccagggcaagacgtcccgcttcggcgtgctgcccaagtacgcgcgcgacgcgtcggagatggtgtgggtggacgtgccggactgcttctgcttccacctgtggaacgcgtgggaggagcccggcacgggggagagcgtgctgaccgagatccggctggacacgcgcacgggcgcgtccacgcgccgcgccgtgctgcctccgtcggcgcaggtgaacctggaggtcgggatggtgaaccgcaacatggtggggcggaggacgcggtacgcgtacctggccgtggcggagccgtggcccaaggtgtccgggttcgccaaggtggacctggacacgggcgacctcgtccggttcgactacggcgacggccgcttcggcggggagccctgcttcgtgcccaccgagggcgcgccggcgcgcggcgaggacgacggctacatcctgtccctcgtccgcgacgagcgggcgggcacgtcggagctcctggtagtgaacgccgccgacatgcggctggaggccacggtccagctaccctcccgcgtgccctatggcttccacggcaccttcatcggcgaacgggagctagaggcccaggcctga

SEQ ID NO: 13896 - DNA, 105 bp, Zea mays
  Peptide Sequence Number=SeqID_57271
atgggtgatacgctcttgggcaagtctgtccttgatggccctgtgatgcttggagatgatgaacctgttctattaactcacttattttgtgcgacttccctgtga

SEQ ID NO: 13897 - DNA, 915 bp, Zea mays
  Peptide Sequence Number=SeqID_57272
atggaggcagaagtaaagacgatagtacccgatgacgtccttggcaaggccgaggcaaggcgccagcacgacacggctgagatcaccggccggcttcacactatcgatggccacatgcaaatgggccatgcctccgactaccatgagcttgctctaacggtagcctgccgttctgcccctctcggttctgcctctactatctccgacgagtgggtccccgtgcgtcaagtgcgttcagtgtctcttgcccacgtcctactcacaggatcgctcgagactcgagagaaccgcctcccgactgctactgctgctacctcccctttctgcatgccttcgctcccctcttctccttcgtttagggtttgccgccgccactgcccgatccgaggcagatgtcaccaacaacagccatggcgctgttgtcccaggccccgtctaactcaggtacatgccctccttgtctccctcctctccttcctgccggaccacccgctctgtgaccacctcgtcaccgtcgttttcgccttcgcttctagcctcaccgtgcccatctccagggaccatgaggacctgcacctcgccgcctcatatacgtgctcctcgtcaccgccaaccgccccaaccacgtgtccgactacgccgcgtgtgctcgcttgcgacgcctgcgcaccctcgatgccacgctaccaggtctccttgctgaggtcctcgggcacctctacgcgctcgccggccaggcaatcctacctcctcctgctcgcctccgctacacgccacgctgtgcgcctcgggaggctcgcctcgagcgcttccatcctggcggtagcaggcctgcccatccccttcatcataccttctcacctgctcttgtctcccgctgcccttggcgccaccatcgaaatgtcagggacataa

SEQ ID NO: 13898 - DNA, 324 bp, Zea mays
  Peptide Sequence Number=SeqID_57273
atgaggatcataaaacaagaaagctacaaaaatgtggtctcagctgaggatgactcgatggggttgaggatgcaccagtattaccaagaggatgcacatgttgagccattcggtcggccatgtttcttcactccgtccggaggtggagacgaggtgacaactgcgctgacattggtgaggcggacccaaacacccccgtcgtctagatcaaagaacttcgacgcaagcggcgcgggcttcaggaggaggactgacctgggagaggtcaggcggaggcagagcagcagcgtgggggcggagaaggtgacaaaagcaaggaggtag

SEQ ID NO: 13899 - DNA, 351 bp, Zea mays
  Peptide Sequence Number=SeqID_57274
atgttgttggagtctagcgcctcatcgagcaatccacctacacggaggcgcgaccagcacaccaaggtggagggccggggcggtagatccacatttggaggcgggcgggcgtgggatgggcgacatgctgaaggcggcagcggtggcggtgtgggaggtgggagcgagggagcaagttgcctccacggagccgcgaccggcacaccaaggtggagggtcgggggtcgcagatccacattggacctctgcttattccatctagggggaggggttcgcagcggggcgaacatcacgggggcacttcgtgggggaggctatcgcggtggaggtggtgaggcatcgagtgagtga

SEQ ID NO: 13900 - DNA, 375 bp, Zea mays
  Peptide Sequence Number=SeqID_57275
atggcgtcgatgtggggtgcattgcgcaggtcgacgtctcgggcgtcgaagtggtccctcttctgtcgcttcgtgtcgaagtcgacgctggacccccccagtgatcatgtgggagtgggggaggtacgatttgtacctcctggtggtgttggtatgcgtggtgaggtggatgcggagcggggccgtggtttcttcgccgtggaacaagcagtaaaatctgcgcggctgctgcgcccgtcctcggccccgaccacgagttccgttgccacggccctggggggaatactcttggcggcgaggggcctcaccagcagggtgctggttggcgatgttgtgcacctgctgctgattgcggccgtcccgaccggagtctga

SEQ ID NO: 13901 - DNA, 498 bp, Zea mays
  Peptide Sequence Number=SeqID_57276
atgacgctcatcatcaagagcttccgccaaatcctcaagcaaaggagggggaagtactacaaaccccgcttcaagaaagggacgaagggtgggactcgccggtcgtttcgcatccgttggtgcagcgggattggcgaaggcatcgagcgaagggtagcgtctttgccttcgccccaacatttgccctctgagagaccagttcgactaagtcatctggtgtcgaagatgtcactagatggtggagacgctgcccttgctcgaagtggttccccgggggtttttgatgtgaccgttgacggacacggcactgttggactacggaccgcccgccgccgccaacggtacgtagccatgccgtcctcttcctcttctgctgccgctacaccgacggctggcgcatcgtccgaggacacattgagcaacatggcggcgaaggagttgcatcctggtgacactgtggagtttggcgtgtcgtggatgtcctcggtccgcgtgtaa

SEQ ID NO: 13902 - DNA, 1647 bp, Zea mays
  Peptide Sequence Number=SeqID_57277
atgccctctcggggcggaatgttggtgcgaagtcctgccttcgcgctggatttgcatggccgggatcccgccgcattcgtgcgtgaagcggaagacggcgcagcgaggatcatggggcgctacgtgccgaagacagagggtctacggagctgggatatccgtgggtccaatgacaggttgaatcgggtcttcgaattgaaccgcttgccatacggtggttaccctggggaagacaccgccgaccgccgcgggaagaaaccgatgggcggtactgaggaagggccttcgccggaggctgcccctgccactaagaagagaaaattaggtactatagtggggggaaagggagtgtctgataattttgctgtggagttgatggggacatgtgcggcccccgggggaaggatgtctttgcccgagctccgggagtcttcagcgcgaatgctggagaatattgctgctgttgtgtcgacagtgatgaacaaggatcgtcaggatgctgcacagaagcgtcgggcggttatcaggctccccgatattaggcatgaggcgaagagagcgcgggggagtgtgatggctgctgcccccggcggaagccagccggcgccggctgcgaaaccggtcgtgcccggatccagcaaggtgccggagagcgcgaagacagtcgtcgctggcggaaccaagcctaccccgggcgaggctgcgaaggtgcgggagctgccttcgccggggaaacgtgttgccgacttcggcacgaacattagcgtggaggactattttgttgggtcgggcgaggggcaattggttgttgtcccgcctgcggtggcaaccacggtgtcaactgcggtggttggggtgaagggtggcgctttctgcgcgagcagcgagattccgtcagctgctgccgtcaaggacgtggcgggctctatgtcccatcggctgagggaggcgtcgcagcagctgtcgcagcagctaagtgaagcggccgacttcgccgaccgcgtggtgtcgggtgcccttactgcagatgtggctgtcgaagtcgagagacttcgggcgcagcacgtggatgccgtccgggagaagtcagctgcggagagcaaaaaccgcaggctggcagagaaggtggccgccttggaggccgagaagacggacctccggcgccagctggtggaggaaaggagggaggcaaaccaggccatcgccgaggcgcaggctacgcaggcggaggccaaagtggccagggcggagggaagtctcgccagccaacgcgccgaggagtgggaggtgaggttcaacgctctgcgcggccgcgtggacaaggacgaggcctctacgcgctcggaggttgagcggacgctcgcacagcttgtggactcgtaccgcgagctgggtgcgtggactgctgacttagaggtgcccgaccgggaggcgggccttctcttcctcaaatggttgcaggaggagttgctggtactcccgaccatcgtggagggtttcatgtcctttgcctccctcgtcacctgcgagggggccatgaatgcgctgtctcgcgagggctgcagacactacgaggtcttcgaccgatcagacgagagctttgaacgcgagatcttcaaggccgaagaccctgttgtgaagcagtaa

SEQ ID NO: 13903 - DNA, 175 bp, Zea mays
  Peptide Sequence Number=SeqID_57278
ccgtgctcacggttatgagcggccaagggagctccagagattagtgatacttgatcagagacattgtggtacagatggttatgagattgatggttccggttatgattatggtattggagaagatgaagctgtggaaggagacttccaggagttccaagattacgacgagttctag

SEQ ID NO: 13904 - DNA, 363 bp, Zea mays
  Peptide Sequence Number=SeqID_57279
atggcagtgacgatcacgatgcgggatcaccggcggcgatacactaaatctggcgatcttcgtcagaagaaaaaatgtctcagaaaaaaggttgttgcggagacgaagctgactgacgaggcgaagctgtttgaggagaagaaggctgtagatccttatattgctggatttgttaagtcaatggcgaaaacaaacacagagaaaatactaaagagatactggaaggtttatctgaagatacgggtgacagcgatagctatgatgtggaaagtggggacgaagattctgaggatcggccctggcggccaagtcattcaatcttcgaaaaatcgaccatcaaacaaagtcatcttgagaacatga

SEQ ID NO: 13905 - DNA, 1152 bp, Zea mays
  Peptide Sequence Number=SeqID_57280
atgtctacgtctcgtatagcttgtggcttgaggattttcccttatgggcagaatattgctgctgttgtgtcggcagtgatgaacaaggatcgccaggatgctgcgcagaagcgccaggcggtgaccaggctccccgatcctaggcgtgaggcgaagagagcgcgagggagcgcgaaggctgctgctcccggctgtagccaaccggcgccggctgtaaaactggccgcgcccggatccagcaaggtgtcagagagcgcgaaggcagtcgtcgctggcggaaccaagcctgccccgggcgaggctgcgaaggcgcgagagctgccttcgccggggaagcgtgtcgttgacttcggcacgaacattagcgtggatgactattttgttgggtcgggcgaggggcaattggttgttgtcccgcctgcggtgacaaccacggcgtcaactgcggtggctggggtgaagggtggcgctttctgcgtgagcggcgagattccgtcggccgctgctgtcaaggacgtggcgggctccatgtcccgccggctgagggaggcgtcgcagcagctgtcgcagcagctatcgcagcagctaagtgaggcggccgacttcgccgaccgcgtggcgtcgggtccccttactgcagatgtggctgccgaagtcgagagacttcgggcgcagcacgcggatgccgtccgggagaagtcagctgcggagagcaaaaaccgcaggctggcggagaaggtggccgccttggaggccgagaagacggacctccggtgccagctggtggaggaaaggagggaggcgaaccaggccatcgccgaggagcaggctgcgcaggcggaggccaaagtggcgcgggcggagggaagtctcgccagccaacgcgccgaggagtgggaggtgaggttcaacgctctgtgcggccacgtggacaaggccgaggcctcggcacgctccatctgcagcaacagcacgttcactcagcaaaaaccacacatacccacacgcaacaaaccacagaaaaataataaccttcacctactctctcgcccggtcggatcgctccctgacagcctcccgaccatgcgcccccccacatcctatcaaaaagtgcccccgctgattgcttcactacagggtcttcggccttga

SEQ ID NO: 13906 - DNA, 981 bp, Zea mays
  Peptide Sequence Number=SeqID_57281
atggaggtcggttgccaaaccagcttttgccagaatgaagatggtttccccaagttgttgagagcatgcacagtctgcctcggaatcaggagccaaccagagaatgatggtcgtgaattcgtcgagcatggcacagagaagtgtgtcgtgactgtatacattggatccagtctgcaccatgtggaatggagtgtcactgctgcagggcgcagattcaaagacacctgccaagtcgtcgctcgcaaggcattgagggccctgtgtcagatctatgaagaagaagtggccgacaccccgctcagattctttccaccctttcagagaaaccgtccagtttggatggccaggatgcgtgcattagaaggtcagcagctgcttgaggacgaccccacagtcgtgttcctcactgcatacctgctcaccctggatgcacagtatgatttcttggctcggcaccaccgtcagatgattgcccgagcagaagatgcagagaagcgcaaccccctgaagcaagccaaggatgagcatgtccagaagttgatggaggcctacttggtaacccataaccaacgtagagccctgcggatccaagagtccgcttcatccaacccagttcaacccatgagaactgaagatccccagattcgtgaaggtcacccggtctctatcagaggagagaagaagtcttgggaactaccggaaggagccatcgtcttggaaggaattccagtcttccctcaggctatgaataagcaagagcaccccgagtcctcccaagatcccccactagagttgtttgagcccctcaccatgaagaagattctagcaccgtcccgtgagatcaaagaagaagctacaagcaccccaccagcactgccgccctctgaggagctgaaagggaaatgtgcccttgggccatttctaagtattttggtgattgagtgccaacacaagtactcaaatgtgaatctatgcccatga

SEQ ID NO: 13907 - DNA, 318 bp, Zea mays
  Peptide Sequence Number=SeqID_57282
atggcgcagaaggttacccagtccacgtgctccggagggttcacgaactccggcgagcgcgattactttgttccggtggggctggtcctcggctcaagctcgggcaagcttcacggccttctggggaagctatccgagggcttggatcgagcggaggtgggcaggaaagggttggccacggtgattgcccttgggcggctctggcgggtcgcggggaggtcgccggagctgcgggcgagcttgggagagttaggcgtgtggccgggatgggccctaattaaccgaaaaataccagggctacggtgcaaatattcctaa

SEQ ID NO: 13908 - DNA, 360 bp, Zea mays
  Peptide Sequence Number=SeqID_57283
atggttcagggttttgggcctgcgcacgcaaccgctactgacaatgctaatgttgtggcggcttcgaccgtggttgctgaaaatgcttcggatgattccgagtcttcggatgaggacttggattattttgcggccttggatgtggctgcggcggaggcttctccgcgtgtgatggatgctgaagttcttcctggtccgagtgctgggcataggcggcgaagggcggtggcgaagcgtagagtgagtgaggtggagagtggtcgtcttcgcgtggacggggctggcaagcgggaattgttgtcctcaccggttggggcgagtgtgggtgagggggagttgcgaaatctttttgagggttag

SEQ ID NO: 13909 - DNA, 159 bp, Zea mays
  Peptide Sequence Number=SeqID_57284
atggggaagcatgtcccatcactcctcatgctcctcctcagccgagtgaccgcacttgtacccaccataaccggaatgggagaccatgtctcaggtcgcgtgaggggtaaagtctgctgccaggttcaatcaggatttagtaaccattatgcttactga

SEQ ID NO: 13910 - DNA, 882 bp, Zea mays
  Peptide Sequence Number=SeqID_57285
atgtcccgcgcgttcgacaactactatatcaagggttgtggcatcatctcgacgccggaggtgacgcagaggaggaccggcagcaatgaccagttcgtcatcctcgccaccgtcggggtgtgggacgtgctccccaacgacaagaccatgcaaatcgtggcatatattgaagtctgcatgaatagtgtattatacagtctcatgcgcacgccagtaagccattggggagggcagtatgggggagtcagggtggacgaggacggcaaggtaaagcatagagaggaagagcacatgtgtcacgacggtgggcgggacgacggcctagagcacaaagcgatgcagcacgaagaagtcttcaaggcgacgtcgaaaccgacttcaactacatctttcgcggttgcgctttgtcaacgaccaccgagtggcgaggaggatcatccgacggtctatgttgtgcgggcggttgatccaaccgtgggtaggctagttgttaagttaggctcaagccaccgcataaagaaatcaaacatgggtaccccgctaccaaaaagtttggtctatgcctcctttcttttgcccgacgtccagcaccagcggttgtgccccaaatctccagcaccagcggttgtgccccaaatctccagcaccagcggctgccctagaagtgcaaaactccagcaccgacagttgcgccccatatctctagcaccggcgactgctcacttgcgcccccagctgtcctgctccattcaacggcgcatacgctcctctgcctgctttgctactcacctgctccagtccagatatcggttgcgcccctctgcctgcttggctgatcgcctgctccagtccagataccaacggctactccagcatcattga

SEQ ID NO: 13911 - DNA, 378 bp, Zea mays
  Peptide Sequence Number=SeqID_57286
atggagaactcaaacatcaccaagagcaacacgctcgcggacaaagtgaaagtcaatctcaatgtgcttggtacgctggtgttggattggattagaagatatgtagactgcgctgatgttgtcgcaatacaccagggtggtcttgggcagggggagtgcaactcagtcaggagctggcgaatccaggcagcctcagcgactgcattggcgacagcgcggtattcggcttctacactcaagctggaaacagtgttttgccgcttggaggaccaggagactagattgtccccaaggaagactgcatatccagacgtaggtctgcgagtatccgaacagccagcccaatctgcatctgagcagaccaccagttcaaactga

SEQ ID NO: 13912 - DNA, 291 bp, Zea mays
  Peptide Sequence Number=SeqID_57287
atggccaggagaggcgagggacgcctcaccgtagagggagcccacagggggcgcaaggagtggcgtgccttctccagctccttgctttgctccaacggcgtcgagggttatgttgtgtaccttgtccgtgtgagacgtggtggcaggaagaggcctttgcccaagtgtattgtctatggcaagccaaagcaccagggtatcacccaactcaagttccagaggtacaagaggtatgtcgctgaggagagagctatacgcaagcttggtggactgagggttcttatgtcatga

SEQ ID NO: 13913 - DNA, 282 bp, Zea mays
  Peptide Sequence Number=SeqID_57288
atgacttgtggccatgatacaatacagcaagttgacatgctgccccaactgcaggagaggcttgtcgttgctatcccatcactgcatgccaaaaaggatatccaggttaagtgtactagcggaatgggaatggtcaagacgagccagatgttgaccatcctagctacgtatccagtcaaggacaaccaaaacaatcatggctcctcttggcgtctgcagcctgcagtgcggggctccattatcctgctgctctggccattcttttcctccagccctctttag

SEQ ID NO: 13914 - DNA, 474 bp, Zea mays
  Peptide Sequence Number=SeqID_57289
atgcaaatcaaggaacaagggaataaaactctaaaagtagtgttcttcttatgtgattggttcgacagcaataatgggattagacaaagtcaatatggcataattgaagaagaggaggaggtgcagcgccacgaggaagatgttgcagccacagatgacggggtgcaggaccatgaggaggaggtcgcgggcatagatgctggggtgcaggaccatgaggaggtccaggaggatgacgagaccatcaaggctcttgcatttcggcataggggcactcgaaagggccaatttgtcctccctctgttagtgtctgcacaatcagaagcttggagacactatcgtgtggaacctgaggctcaggagcatgcagaccgagtattagagaaaaatgcaaagaatgtgtgtaaggatgcattttccaatgcccgtctacaggttgtgaacgcgtacatgaagcgtcgagggcattcataa

SEQ ID NO: 13915 - DNA, 1066 bp, Zea mays
  Peptide Sequence Number=SeqID_57290
gctcaagtcttggatccgcaatgttgtagcagaaggtaatggcactgaaggcaaccagcttaagcctaggattgatgatgaaacggctgatgctgtaaaggcttctgcttcggctgtttctgctattgccaaaacaaaccaacaactgcttgcttcaaaggatgaagaaaagaagatactagtgacgttgacacaagctctagattcccaagccaaggagttaaaatccttgaccgattcaatcggtcataccagggaacccataaatattaccagggatgataggttttctcagtaccgcccactggaagaccatgcccctactgttataaggaatggggcaattaacagttcatggagagcctctcagcaaactaacatgtatggtgtgtcaaatggcgactttggttccgtgaggtcttcatttgcgccagcacctgctgaacctacagctggatcattttcaagatcctatggcgagccgatgtccactgcacaacgaagcgataggtcttctggcagtaagccatgggagatgcattcgtattcacaacagaggcctggttatggatccaactcccagttgagtgatgatggatcatactctgatgcccaggacagctatgctccttcctatcaccagaatggaaaggcccctgattttcaagcggatgaacctaggcctttgacttacaacactggggttgaggaaagaccgccaccgcagcgccgctgggtgccccctcagcctccaggtgttgcgatgccagaagcagcagctgccatacgtcaaccaaaggcccttccaaagcagccctccagcgatgcctctgaggcagctggtgagatgcaggtgaatggttcaagtgcatcggatgctgtgactgaggttcctgttaatggtgctactgcaagcgatgctggacgcaggtctgccaagaatgagaatgaatccattcaggtgttctccaggggctatttcctgcgtttgccagggatgagaatgaatggcggcgtcaaaggtgggataccaccagcaaaggaacattaccctgacagaggatga

SEQ ID NO: 13916 - DNA, 339 bp, Zea mays
  Peptide Sequence Number=SeqID_57291
atgggagaaaccttgtccccgtcgaggtctcatctccctagaactgttgtctctgcctcgcccgagcccgtctcgagcaaggaagacaaccccaaggcagagctcagccgaagcccgcaggggacaggagcattcaatgtgcacacctaccccacgcagtgttgcaggtgggctcgggtatgtgaccggaccttggccttggctctcagcagaaattgggtgggcataagtcaacagcaagtacaagacccatgctccaggccataccgtctattggggctcggctacgcctcctcaccatacgcggccaactccggtactcctagcatccctccttga

SEQ ID NO: 13917 - DNA, 216 bp, Zea mays
  Peptide Sequence Number=SeqID_57292
atgaggatcaaactcaagataatgaaaatgaagatcaagaagagccacctcaagaggaggacaacgatcaagggggagatgccaataatcaagacaaggaagatgatgaggccatatagggtggaagacgcattaagagactcggattgggtgttggcaatgcaagaggaactcaacgacttcacaaggaatgaggtgctcaaaggttcacaataa

SEQ ID NO: 13918 - DNA, 1881 bp, Zea mays
  Peptide Sequence Number=SeqID_57293
atggccaccgcggaccggacccggactttcatgaaggacgtcaaacgcgtcatcatcaaggtgggcactgcagtcgtcacgaggggtgatgatgggcgactggctgtgggccggttggggtgtctttgtgagcaggtaaaagagctgaatgtcttaggatacgaggtgatccttgtgacctcaggtgctgttggtgtggggaagcagaggctcaagtacaggaagcttgtcaatagcagctttgctgatctgcaaaagccacagatggagctggatggaaaggcttgcgctgctgttggtcagagtggcctcatggctctttatgatatgctatttacccaacttgatgtgtcctcctcgcaacttcttgtgacagatagtgattttgagaatccaaactttcgggagaggctctgtgaaactgttgagtcactattagaccttaaagttgtaccaatatttaatgaaaatgatgccatcagcactagaaaggctccatatgaggattcatctggtatattctgggataatgacagtttagctggtcttttggctattgaacttaaagcagatctccttgttctactaagtgatgtagatggtctatacagcggtccaccaagcgaaccgggatcaaagatcattcatacctacattaaagataaacattacagtggaataacttttggggataagtcacgtgtaggtagaggaggaatgacagctaaagtgaaggctgcttttgtggcttcgaacagtggcacacctgttgttattacaagtggatttgcatctcagagcattgttagagttctccaaggagagaagattggtactctcttccataaggatgcaagtctgtgggagccatccaaggatgttagtgctcgtgagatggctgttgctgcaagagaatgttcaaggcgtctgcagaatttatcatcggatgaacgcaagaaaatattgttagacattgcagatgctttggaacaaaatgaggatctaattagaactgaaaatgaagctgatgtatctgcagcacaagatgctggatatcagaaatctttggttgatagattgacattgaagccagaaaagatagcaagccttgcgaaatccatacgcactcttgcaaatatggaagacccaatcaaccagatactcaaaagaacagaggtgactgcttataaactcttaacaaaggaaaagctgacatattttataccaaagacaaatgttacatctgcaagagtactgtttcaggttgctgaagacttagtgctcgaaaaaacatcttgccctctgggtgtgctgttgattgtttttgagtccaggcctgatgccttagtccagattgcgtctttagcagttcgaagtggcaatggtcttctcctgaaaggtggaaaagaagccatgagatcgaacacagtattacataaggttataactggcgcaattcctgacaacgtgggtcaaaaacttattggccttgttacaagtagagatgaaatcgctgatttactaaagcttgatgatgtcattgatcttgtcattccaagaggcagcaataagctggtttcgcaaatcaaagcatcaactaagatacctgtcctcggtcatgcggatggtatttgtcatgtatacattgacaaatcagctgacatgaatatggcaaaacgaatagtgatggatgccaaaactgattacccagcagcctgcaatgctatggtagttgtcctggagcagcctgactgcctagaggatgacagtgcaatgcttgtcaagcatgggcgggagacattgcttgttcataaagaccttataaaggctccaggtcttgatgatatactcctatcactcaaaacagaagatgtggaataa

SEQ ID NO: 13919 - DNA, 567 bp, Zea mays
  Peptide Sequence Number=SeqID_57294
atggaaagtgcatccagaagtgtgatgtttgtattctctttaactggcactgttgtcaacttgttgttggttggtgttatcattggaaaagctggagaaactattaggtatatccaacttcaatcaggagcaaagattcaagtcacaagagaccatgaagctgaacctggtgcactgacaaggcaagttgagctttctggcaaacttgagcggataagcaaagctgaacagttgatcaaagaagttctggcagaggccgatgctgggtcatccggtgctggatctggaggccggaaatacaatgcaacacagccagatttcatgggtgaacttatatcttgcctcaatgagcgttctgggtatagtgaacaacaagatgaaattcccaatgataatgcactgtccttccagatagatagctatcatggatctggaatggtttcattggctgacctatatgaggcagagtgggtgattctattgcaggaggaggagggagtgattctcctggaggtggaggaggatgaagtggtgaagacttcaagccaactccaagtgccatgttga

SEQ ID NO: 13920 - DNA, 189 bp, Zea mays
  Peptide Sequence Number=SeqID_57295
atggcgcacccgacattccggtgcacaccggacagtccggtggcccctgccacatcatcactgccgttggatctgaccgttggagcttctgacttgtgggcccctcctgggtgtccggtgcacaccggacaggtatatcgtgcattgccacggggcgggggagggggtggagcggcgcctagactgtaa

SEQ ID NO: 13921 - DNA, 1269 bp, Zea mays
  Peptide Sequence Number=SeqID_57296
atgcaggcggcatgcgaccgcgccaagtgggcgcaccccttcgactccaacgcgcccagcatggaggcccaggcccacacgtcatgcaaccgacgcgccggttgctacgtgcgagcaactgcaccgccactcgtgccactatcgtgcctcctcgactgcggaaccagtactgcgactcgaggcaaccctacgtatgacccaacagtgccagctaggcgcatcggtcatgggtcagtcagctgcgagagaaggcgcgacggtcaatacggccaaaaatgggccgacagtaatggcggtggcaggcgggcggaagcagcggtcacgtcgacaggcggcacctttggcaggaaaagcgggcgacgcttcgccttcgccataatgaccgcgtcaaaaaagggaccgggaaagggggataccccgaaaaggatccttctccgcgaaggaaacgggccccgagcccccctactgatcagaggttcgaaggctggcccctcggaggggttcaacagccgcctcagagcgctcgggctccacgcccgctactggtcagaggttcgaaggctggcccctcggaagggttcaacggccgcctcaggccactcgggctccgtgcccactactgatcaggggttcgtaggctggcccccaaaggccgaccccgggggattcacgtctcgcccgagggccccctcaagcaacggacacaccttcggctcgcccgaggcccagtctttgccaagaagcaaccttggcccgatcgccacgccgaccgaccgcatcgcaggagcatttaatgcaaagctgacagcagccaagtccggcctcgagcgccataggaagctccgcctcgcccgaccccagggctcggactcgggctcagccccggaagacgacgaactccgcctcgcccgaccccagggctcggactcgggctcagccccggaagacgacgaacttcgcctcgcccgacctcagggctcggactcgggctcagccccggaagacgacgaactccgcctcgcccgaccccagggctcggactcgggctcagcctcggaagacgacgaactccgcctcgcccgaccccagggctcggactcagccctggcctcagccgacagtctccgcctcgcccgacccaggggctcggactcaacctcggcctcggaagacagactcgacctcgacctcggaggagcctccgcctcacccaacccagggctcggaccgaccacgtcacaggaggggccatcattaccctacccctag

SEQ ID NO: 13922 - DNA, 459 bp, Zea mays
  Peptide Sequence Number=SeqID_57297
atgggcaagagcaagaaaggtagcggttcttcacaccattctggcgacaaacgcaagcgcgagccgactcctccctcagaggattttggcgactcagagtactcggaggaggagttctcctccgggtccgagggatctccggctcccatctctcccctggcgtcgtctgatgattcagacgactcccaggggattgccgcggaggtctggacctacatccggaccgtcgagcgcgccgggctcaagggctcggatgagtcggagtactcctcggacgaggaggactcctcggactcgtccgaggagggcagcggcggcgatggtgatgatgacggcgatgacggaggcgacggccatggcggcggtgacgacgacaggggtggtgacggcggcagcaagggcggcaacggcggcggcagcaagggcagcagcaagggcagcaacaaggccagtggctag

SEQ ID NO: 13923 - DNA, 273 bp, Zea mays
  Peptide Sequence Number=SeqID_57298
atgaagaaaatagacgaggaggtccaacgaaaaaaagatcaggtgctcaaggtggcggataaatggttcctctcgcacttcagggtggattgccaccagaagaccgtccaagaaagggaaatagacgccgattacatgtcatccgtgctgcaacagctccccacaataggtgatgccaggtcggaccgtccggagcaacagaagtcacctgtgatccgcctagtgcggaaggccgacataaatataatcggccacccaagccccaagaactaa

SEQ ID NO: 13924 - DNA, 381 bp, Zea mays
  Peptide Sequence Number=SeqID_57299
atgacgacagagcgtggtggtggagtgaggggtggccggcggcggagtcgggcgcgtggaagagaagggcggacgggtggaagagagaacaacgggagagaaaaggagcacatatattttacttccgagctcgacggcaagatctatggcgccgagctcggggacatatcgacaacacgctgcagcctgagccttgggacagagcctgggatagaggatgagaggagtgcgctgggagcgggctgggaggaggactgtgcgtctgcgcgcactgcggtgctgggcctgggagcttgggaggagccggaatggagcctggaggaggacgccgtcggcggtcgacccgtcggccgcctgggagctactgagctagggacctag

SEQ ID NO: 13925 - DNA, 783 bp, Zea mays
  Peptide Sequence Number=SeqID_57300
atggatgtggatgttagagttgatattgagaatgggtctaatgagaatgaagtgcaagccccaattatagatgatggcaatgctcgcagcgatgaccaagttgctggtgaaccttctgatggtgctaatgctgctgctacccctcttgttggaaagaagaagaaattcatgggtgtagagaatcgtgcggtcaaacagcgaaccactactcctgtgagcaagcttaagacatccaagtcagtaggatcaaacaaggatagagctattgttttagtgccatcatttgcaaaagctgtgcaaagcgcaaatgcaagtgcaagtcaaagcgcaaatgcaagtgcaagcactccaagtggtagccaatgcgcaaatgcaagtgcaactgctcaaggaagtatttggagacaaatgaagaataaagaaaatgatgtcaagattggaaaaaaaactcacttcatggggtttgggggtcacttcacaagtattgctcagcacaagtactttgtgaaattcatcaaatcattaagaccatcatttcctatgaagaaggtgtcagagttggatttgtacatgagtgaggacctagtgaagtctgcatttagctctggtggacgcattgttgatgcattccgttcaaggctcaaaccagaaattattgaggcattggtttgttgtaaagattggaagattgcttcagagaaagatttggagaatgaaattaaaaccttaactgaagctatggatggagttgacttggaggatgattttgcaattgggacttga

SEQ ID NO: 13926 - DNA, 255 bp, Zea mays
  Peptide Sequence Number=SeqID_57301
atggacaatatatgggcgtgccctttccagctgttagggatcggagcagctagcgctaccgttcgtcgtagtacagtccgtttccttgctggacaaactgcagctacacaagccagcgatgcagatctttctgaagcggttgaggttgagagacgcagtgggaaggttctgacgtacgttcaggactacgactacggcgggtccaaccccaaacatgacccacgcaggaagccagggagcggacaccctccatag

SEQ ID NO: 13927 - DNA, 396 bp, Zea mays
  Peptide Sequence Number=SeqID_57302
atgacgctcgaggacgagctcttcgtcggcgaggggggaaatgttgtagatacctttgtgggccggcagtatgctaggcgccataaaggaaaacggaaacgtaacgaagacaccaagagctcgacgcctgctgacacaccggcagaagccacatacaacatgctgaaacggaagggacttggttccaagatcaatgagggagctgttggcgaattatacaagactaaagatgaagttgagagcgcgagtaggaaagaagagatggagttcgacgcactgtttgggccggacaacgctgatggcgagacggtcgatgatggtggttacggctatgggggctgcggcgatggtggcgcggaagcctacaatggcattgatgacgattttgatttctag

SEQ ID NO: 13928 - DNA, 882 bp, Zea mays
  Peptide Sequence Number=SeqID_57303
atgacggatgcagagaaggaggtagcaacagaaagagaaaggactcgccgcttcgatgcgatcgtgaagattgtgctgtcaccgacgaggacgcaacgaagcacttcgtgtgtccgaacattgattatagccagaggcgaaggaaaagcaaaaaatgagtgggcggaagagttgaagtttgatccagtactctgcaaatgtggtattgaagctaagtatggattagttccttccgagcttggtgttggctatttttgtggacatatggtagattacgatgaggagacgaggaaatgtggttgggagagttacgacgacaaaggagaggacatgcgtaggttcgtgaaatcggtgagttttgacagcccgatgcgtgcagagcagaggagattgaaggcagcaaatgagaagagagcatatgatgcaagggaatgggaggcggctagagccgagaaacagatgttggataatcttgctgatcgtctcaagagaaagattggatgtgtcgtaaactatattacagatgaggcacgtgcaagatacgttgagaaaaaaatgacgacggtggagctgatggaggaggaggaggacgacacatcaaggttgagtgagcttatcgctctcactgatagaagattacatggggaagaggaggacgacacatcaaggttgagtgagctcatcacactagctgaggcaggattacatgctcaagaggaggaggacgagtttatgtctcaggccgccgaagaggtagaggccgcttattacaagcagaagtgtgatgaggctgaggatgaggatcagctattctcccaagctgcagatgaagcagaagccaattattacaagagaactgcgaaaaactgtgatgtaggataa

SEQ ID NO: 13929 - DNA, 258 bp, Zea mays
  Peptide Sequence Number=SeqID_57304
atgaagaagagggtatcacgtcgccttcgtcgtgcagcagctcgttgtggatgctggtccctagccagcattgacgtgcagctgcatgtgcctcctatacagccggacgttcacctccacattcctatagttggaccttctgcaactggacagagctcctcgcgatcgacgtgggatatgtttgcagacgtggacgacgacgatgacgacgacgacaacgacgattccgcaggtcaggaagtgattggaccatcctag

SEQ ID NO: 13930 - DNA, 399 bp, Zea mays
  Peptide Sequence Number=SeqID_57305
atggacagggctacctccccgttcgagggcgactcgccaatgttgcagtcgcaggccccgccgtcaagtccaccgagcggggcgcacgactccatggacagggccacctcgccgaggagcggctccgccacaggccgatccgacgccgcagccgtaggcccccgccgccaagtgctcctctgcccgatcccggagatggcactgtcggccaagggcaaggaggtctgccacaggtcctgtgacgtcctcgacatcaacgccgatgagtggggcaacgagaataggagcatgaccaccgagctcagggagcagcagtaccggctcaggaaggcactggaagaccgggtgcaagtcagtagggagaccgccaagatgtggcgatgggacaagctccatcag

SEQ ID NO: 13931 - DNA, 699 bp, Zea mays
  Peptide Sequence Number=SeqID_57306
atggtgaagcgccgcgccgaggtcgtctccaggctcaagtcgctcgaggaggccgcagccccgctcgtcgccttcctccagaacccgcggctcgtgcaggagttcaggctcgtcgtctccaggctcaggtatgtggagaatggctcactttccaatattatcaagccaaacaaattcggacctattcctgaatctttggtggctctttacattgctcagtttttatatgaccaggtgttggaaggtcttgtttatctgcatgaacaaggtgtcattcatagagatatcaagggcgcaaatatactgagtaccaaagagcctttgaagtttgaactacattttcatataactgacaccattattgggtgctttgaagcaggatgtgactatattacagttttaggtgttgacttcatgtcagaaaatgttcgggcagtaattgatcaagcaggatttaataagtctcatatggaggctttgagggctgaacctgttgctgaaggtgagatgccagcatccagtgtgcgccttgtgtccaaggtaaagaaaaggttgggacatgtcctttgcataaaacgtgtggaaataaatccgagaccaggcagcgtttggtttcacccaaattctaggaacccagatattctcaagagatttttgcattggataatgcggcaactcacaaaggaattcggacagtaa

SEQ ID NO: 13932 - DNA, 1239 bp, Zea mays
  Peptide Sequence Number=SeqID_57307
atgacgacggcggctctcagctccttacggaagcaaggagacgtcagcaaggatccgacagctccgacagctgtacttccacagggctcaagcactcctccgacggccacgacatcacatgaacagggcgccaaaacctctccgactaccacgacggcatggctctcgtacgagaaggttggccgcgcgggagaacgggccgccgcacagtctctctcgctctcgctctctcccacgcggacgcttgtaaccccctactgcaagcacacccgacctgggcgcaggacaacacgaaggccgcggggaccccccgggtcgaaacgccgacaacgaggcaataagcaaggcggcaaggaaacaaagcaagagaaattagggtacgaagaaaaggaacggacgacgacgacagagtcaaggaggagaaaggaactcctgccaccaggccgagggaaaaagcaagacaccggcgaagggattccatatatgttggtagaaagtatcggcatgggcgatagggtggaaggacgggagaacagcgatccgacgctgttggaaacccacccgcgacgcggtggacgtggcggactcggaataagcacgaaggaagacacgggaaggcacagatttgtgggattttggaatccggtgaacaatccctacctgccgatgtcgatgccccaggcatcggcagacccgtctaacacattcccgacaacgttcgtccaggccgacaccaactccttcaagcaggtggtccagatcctcaccggcacgccggagaccgccgaggccgcggcgtcgagcggggcccaggcgccgcctccagcccagcagaagccagcgctcacgcccccggggcccaagaagccggctttcaagctctacgagcggcggagcagcatgaggagcctcaagatgctctgccccctgctcccggccttcgccgccggcgactccgtggaaggcttctccccgcgcgggttctcgcctcgcgggatcgagctgctgtcgcccagcatgctggacttcccgtcgctagcactcgggagccccgtcacgccgctgccgccgctgccgggctcccaggaggctgcggccgccgaggaccgcgccatcgccgagaaggggttctacctccacccgtccccgcgtggcaatgccggcgccggcagcgacctacagccgcctcccagactgctcccgctcttccccgtgcagtcgccgaccgcccggccgtga

SEQ ID NO: 13933 - DNA, 810 bp, Zea mays
  Peptide Sequence Number=SeqID_57308
atgccgatctgcgcgccgtcgtccgactcctcggcctcggcctcgtcgggcttgggcgcccgcgtctgggtgctccacgggctagcgctcggcgcggcggccgcggccgctgccgttgcgtacctgtaccggcggccgaccgggttccgcagccgcgcggtggggatcatacccgcgcgcttcgcctccacgcgcttcgagggcaagccgctcgttcccatcctcggcaagcccatgatccagagaacatgggaaagagttatgctagcttcttcgttggaccatgttggatctgaacgctgctgtgaggcactaaagaagcttgataagcactatgatattgttgtcaatattcaaggagatgagcctctcattgaaccagagataatagatggtgtagttatgtcactgcagcgagctcctgatgcagtcttcagcacagctgttacttcactgaaaccagaagatgcattcgatacaaacagggtgaagtgtgttgtggataatctgggctacgcaatatacttttcaagagggctgattccattcaataaatcagggaacgccaatccaaaatatccatatcttcttcatcttggaatcgcgggctttgattcaaaatttttgaagatatatccagaacttccaccaacaccattacaaatggaagaggacctagagcaactaaaagttcttgaaaatggctataggatgaaggtgatcaaagtggaccatgatgcccatggtgtggatgcacccgaggacgttgagaaaatcgaagcactgatgcgaacgagaaacattcagtag

SEQ ID NO: 13934 - DNA, 1557 bp, Zea mays
  Peptide Sequence Number=SeqID_57309
atggcgtccccggcccggcccgtcgccgcgtccgtctccggcgccttcggcctctcgcccgaccccaagcgctgctccttcgaccaggcgctccggcacaaggatttccaggagaacaggctgttgatgtcatttgttaatttccatgagcaagagaagatctctaaagaaatcgtaacacacgctatagaaagctgcatgaagaaacaagcagataacctgttgaattcactggacgttatcagcggtaggttgtcacagttggagttatactgctatagactggaaaggtccattggagaattacgaagtgacgtgatggattatcataacgaagcaaatctgaacttccggtgcgttgaaaagcaagtgaaagaggttcagaaatctgtgcaggctgttcaggaaaagcaggagcttgctgaaactcagaaagaaatgaccaaacttcagatagtacatgaggattctgcacaaaagagtgaaggtactgctccatcagttttcatgaatagggaaaatgaggttgcccttgtgccattgcaccaagtaaatgctgttcagtcacctcctgtgcaattccaaagttgcagtggccttattctacagcaactgatgccagtccaagaccagcagcgctcgaaccaaaccgctgtgtactgtatgcgaggccaaagccatctggagcacagacaggcccaaatgttcgaagctgctggtcaatctctgcagacacacactcggaaaactcagccaccgacagtagttgaggtatctcaggtaaccagtcaggcaccagagttctaccctcatccgcagcaccaatggcaacatcagaccggccagcaggttttctcacaggcaaggcaaccacaaccacatgtactacagcagcagtacagcaacatccagcaaggtccagcacagatggttcagctgcaaacgtcctctccacatgctcatagtacaccacaggtcacagtagtatatcctccatacgggcctcatcagtctgcctgtggtaatgctgaggcacgcagtgggggcatagttgtgccaccttcatactctacaatttcttcatcccaccggaagcatcatgaagctgctcctgtttatgtacaaagcaacacagtttctgttccactggcggagcagcatcagcagcttcattcactcggcaatggctcatttgtacctcagccaagcaaagttagtccatgcggtctagcgtcatatacggtacaagggaatgcacagacctatagccctgcttatggaagcccttccagcaatcctgctactattgttgctgtccttaatcaacaagcacatggcagttctcccatggtgcttcatcacttgggaccccagtcagtgctgaaccatccgatagacattgctgaaaaggttactcggatgggttactcgaaggatcaggttgagggtcttgcactccgtatggtggctgcaggccagcctgcagaccataaccccctgcatgataggttgagctctgttagccatggtgtagctcctcatgcatggtctggatag

SEQ ID NO: 13935 - DNA, 393 bp, Zea mays
  Peptide Sequence Number=SeqID_57310
atggcgcctttggcaaggcctgactgcctgtcagtctcactctgtcaagtggcactgcagtcggagtggcgcaggcggcgctgtccttctgtcagaccactttatgctgatgggggttaccagctgagaattaggcgtcttgagggtacccctaattatggtccccgacaaatacaggttactgttcctgccctaaaatttggtaacaagttaccccatttacatgtaggcaagagcaagtctctaatcttttttaacgcaggctacatcagtgagacattgcagctcatacgagtcttgaaagacgtcctgattccgatgaaagctcgaggcaagaggaggtctctaatcacttctaaagtaggctacatcactgagacattgcagccataa

SEQ ID NO: 13936 - DNA, 351 bp, Zea mays
  Peptide Sequence Number=SeqID_57311
atggacgcgatcacgcattcgatcgccatcccactcgctccctatataaagagcgttgtgatcgtcaggggcagttcagacttctgctgggagatgaggaggccccgccgcgttcacctgctggcctgccttgtcgtgctcgccgtgatcctaacctcggggcctttcgtggaaacgtcaatggcgcgcatgatgatccgcggcgtagacccgccgcgcgagctgctaccggcgctggccgtggtcgtagctgctgaggctgatgacgggcgccggagcgcggtgaaggcgacggcggagggccgaggcaagagagaagttccaggcggggctgatccgcagcaccactga

SEQ ID NO: 13937 - DNA, 357 bp, Zea mays
  Peptide Sequence Number=SeqID_57312
atggaggccaagtcacaccatcaaccaatcatcctatggagtacctgcaaaaattatgccacaagcaaggctgagtatactaatactcagctagacttacccgtggccgcacttgtacccaccatatctagaatgggagacccagtctcaggtcgcgtgagggataaagtccgcgcctggcttcattcaggtatccgcatgttaatccttattcaaattttgtctcatagacaacacatccccatggatccgtgtccacagaccatcatcattctattatcaaaatggatacaaccaattcctgacctcacgcgagtgctagaacaatcactcgacttctaccgagatcctgattaa

SEQ ID NO: 13938 - DNA, 432 bp, Zea mays
  Peptide Sequence Number=SeqID_57313
atggcacttgacccctgttcttctctgccccacgacgcccagcctttctacaggagcaggcgccctctgcatctccctggcgcaggaaatccccaagtgcaggcgcccaggactcccatggccgctagcctctccatgcaaccgagctcccttacttcccagccatggacgagcctccgccaccgtcgaaccagcatggacccgatctgcgctgtgcagcagcgccggtccacagcagtagcctcgacatcccctctacgtcacgccctcggcgtgctcgatgtaatgccacagcaagcagcagcagtgacgcccttcgctgtgtcaagctcgccaagtcgggcctcacgccgtcgctctgcgcagcgtttctgcgttgtcgtcaaaacccatggtgagaccccgttgtcccgcgtttctcatgttcaataa

SEQ ID NO: 13939 - DNA, 261 bp, Zea mays
  Peptide Sequence Number=SeqID_57314
atgagaaagacactagaaaataatgaacagtggatgaacatatttttcctagttcacttaagtaatgaagaacctaggaaaaataaaaagagccctagtccagaacaaattcaagattgcaacctcgctgatggagagtacgtgctcatccctgagcaaggagctatccacgaggaagatcaggagccagctcccgagcctgccatcgaggatctccccgcagccccagcaattgaaggcaagcctcggttttatgcataa

SEQ ID NO: 13940 - DNA, 216 bp, Zea mays
  Peptide Sequence Number=SeqID_57315
atggcacttgacccctgctcttctctgccccacgacacccagcctttctacaggagcaagcgccctctgcatctccctagcgcaggaaatccccaagtgcaggcgcccaggactcccatggccgctagcctctccatgcaaccgagctcccttacttcccagccatggactagcctccggaaaattatgcgatgcgttgttgatgcgaaaaactaa

SEQ ID NO: 13941 - DNA, 339 bp, Zea mays
  Peptide Sequence Number=SeqID_57316
atggctcagccgccatgcaatccggcggctgtttctccaacttccgcccgcggagaaaaccgaatcaccgattggcgctccccagggacctcgccggcgaccgtcgagacgcctagcacagcccatccgcggctgcccggcgtggtcggctcggtagcccgcccgcggctgctcgcgcgccctaccttcggcgtgcccggcgcggctgactcggtgcggacccctggcctgcgcgtggtggcaatgagattgatggttcttggtattgactctggtaatggagaagatgaagtcgtggaaggagacttccaggtgttccaagactacgacgagttctag

SEQ ID NO: 13942 - DNA, 573 bp, Zea mays
  Peptide Sequence Number=SeqID_57317
atggcggcgcgaagggcaggaagggcggttctctcttctctggctagatctctcgggttgcgaaaacctaaggggcaggcaggaagcggagcaaagaaccgtcaccggaccctctccggggtatataaagaccaaggcgaagacggttccaacgttccgcccggaccggacgcaggattcaaaaacgcgaagcgaaacagccgctcctcgaacggctcgcgcacgcgcaacggcaaccccgccaactactcgccccgtcgcattaactccgcgactggacaggcggcacttctggcaggagcaacgggcgacgcttcgccttcgccgaaacaaccgcgccggaaaagggaccgggaaagggggataccccgaaagggatccttccccgtgaaggaaccaggctccgagcctcccttactgatcagaggttcgaaggctagccccccgaagggttcaacatccgcctcagatcgcgtgggcccgacacccactactggtcagaggttcgaaggccggccccccgaagggtcccacggccgcctcaggctactcgggctccgcgcccattactaa

SEQ ID NO: 13943 - DNA, 771 bp, Zea mays
  Peptide Sequence Number=SeqID_57318
atggcgcgggggctgggtcccacgcgtcatacaagctggcccagggcagaagaagccaaaccgccgtgcgcggcgggcaggagcagcggtcacgtcgtcagccaagctcacgtcacctcgtgggacagcgagagaaccctctctcacggcgtgaagacggcgcgcccgtgttccgttcctcgaacggctcgcgcacgcgcaacggccgccccgcgaaccactcgccccgtcaaattaactccgcggcgggacaggcggcgcctctggcgggggaagcaagcgacgcttcgccttcgccataatgaccgcgtcaaaaagaggccccgagcctccctactgataagaggttcaaaggctggcccctcggaggggtttaacagccgcctcagagcgcgtgggctccacacccactactggtcagaggttcgaaggccggcccctcggaagggttcaacggccgcctcaggccactcgggctccgcgcccactactgatcagggcaacggacacaccttcggctcgcccgaggctcagtcttcaccaagaagcaaccttggccaaatcgccgcgccaaccgaccaaatcacaggagcatttaatgcaaagcgccgcctacgccgcaccgactgctgtgccactcgacagagtgaggctgacaggcagccaggcccggcctcaggcgccataggaaactccgcttcgcccgaccccagggctcggactcgggctcagcccctgaagacgacggactccgctcctgagagcacctag

SEQ ID NO: 13944 - DNA, 960 bp, Zea mays
  Peptide Sequence Number=SeqID_57319
atgagcccccaaaagtgttggaatgcattatttgaagtgcctactgccacatgtccaagccacataggtttcaaggctgaaccttacagtggagggaattgtttgacagtcaaaggatctcttcagcagaacattattttctcagaacagctttttaatggaggacttgccatggaagatggacctgttcatctattttattcgataagagccaatgcaagttctgctttagggttgtccctggatctgtcttctagaaacaagcagggtacttcaaaaattctggttgcagaggacatagcaacattcaccagaaagaaacaaaatcacaagtatggatcatatgttaaagccgataaggtggagctacacgctccagataaccacggttgggtcctttacaaagcaactgtttcttccagtgctgggcacacattaactggtatcaacattgtctgcacattgaaatttactggcgaaatcagtccagaatcagaagatggtagcatcttggtagaagatgtcgatggaacttcactgtatcaggcatcactaggccacctcagtattcgaaatactgacaaaaacacagagttccctccagcagaatcttggataactgaaggagattacatctcgtggtcaaaatgctctaacggatctgaactcgtgaatctgaaaatcagctggaagctgaagaaccctgatcaaccacaaccaccattcagcaagtacaatatctatgtggagaagttaacggcagattcagacttgaaagttcccagtcccaaaagctatcttggagttgctagtgtcgatgccttctatgtgtcgggcttagaggtctccaacgaagtcaccggtctgaaattctttatccaagcgtttgcacacgatggaagctggcaagaacttgaggaatgtccaaagttctttttattccctgttcactctgaatga

SEQ ID NO: 13945 - DNA, 207 bp, Zea mays
  Peptide Sequence Number=SeqID_57320
atggcgcctgaggctggactcggctgttgtcagcctcaccctggcgggtggcacaacagtcggagcagggcaggcggcgctgttttcctgtcaggttccgagttctcaggctggtatgttgacgctgtcaacggtttggtcggagccgggttttgcgagagcaacccccgagcctctgcacagagcgagaggacgatcaagggctga

SEQ ID NO: 13946 - DNA, 318 bp, Zea mays
  Peptide Sequence Number=SeqID_57321
atgaagtcaggatcagacaaattcatcaacgagattatcaagtaccactttaggacacacaattctcaatcttgtccggtggaacgcgcggtagcggcggcggaagccgggatcggagacgacgtggcaccaggacttgcacacgagggatgcgcggacgaggcacgccggctgtcctgccgggacgcgcaggaggatctcgccgacgaggtcgtccaccagctccggcgccgctgttgtgccccgtggccactgaggatctccgatggcgtgagttctccagtctcgcttattacatactctgcacttaggcactga

SEQ ID NO: 13947 - DNA, 654 bp, Zea mays
  Peptide Sequence Number=SeqID_57322
atgcaggcggcatgcaactgcaccatggggacacacccttttgacttcaacgcatccagcgtggaggcccaggcccacacgtcatgtaaccggcgcgccggttactgcgtgcgaaaaactccaccgccacttgcgctagtaccgcgccttctcgactgcggaaccggtgccgcgactcgaggcaaccctgcgcacagcccaacagtgccaaccaagcgcatcggtcacgggtcagtcagccgcgggagaaggcgcgacggtcgatatggccagaagtgggccgacagtaatggcggcagcaggcaggcggaggcagcagtcaaatcggaccgggaaaggggatactacaaaagggatccttctctgcgaaggaagcgggccccgagccctcctactgatcaggggctggcccctcggaagggttcgacagctgcctcaggccacttaggctccacgcccactactgatcaggggttcgaaggctggccccccgaagggttcgacagcctcctcagaacacgcagagcgagggatgactctgggtacgtccgatacatggccgaggctcgggctatgctcccgaggtcaaagctccgtccactccaggggtacgatctcgcctcgcccgagcccagcctcgggcaagaacgatag

SEQ ID NO: 13948 - DNA, 630 bp, Zea mays
  Peptide Sequence Number=SeqID_57323
atgtcctgtagactgtccgacgacagttggcgcgaagtagtcgttgctccgctggcaacaccggacagtccggtgaattatagcggagtggctcccagaatttccgaagagcagtccttggagaggcgggagacggacctcaccaggcgagagacggatctcaccttcagggaagaaatgctcacccgacgaagcgagatgctggtcgagcacgagcttgaagttgaggaaaaggagaggaagctggagaagcagatccgccagttcaatgcagcgcaggcggtgccgggtccccaggtggtggaggccaccagaaaggcccttgaagacctccaagcagagcaccgtgccggggtccagcgcattgccgcgtgggtcggcgaggcaagcactgcactggtgccgctagggatcctcggtgcccgcctggaggtagagggcagcaagctctgtcgggcggtggttgaatacgtcctgacgtgcttctggagtcacgaccccgccatatccttggcgccggtgatcgatggtccggtagccaccacaaaagacgctgctcgggagagcgtacaagatgtcgtggagatggtggccgcgcgcttccagcgtgatcctgccgacgccgagtag

SEQ ID NO: 13949 - DNA, 63 bp, Zea mays
  Peptide Sequence Number=SeqID_57324
atgtaccgtcaagatgaggagcatgaaggatgcagtgatgagttcgtgagagaaagaaattaa

SEQ ID NO: 13950 - DNA, 960 bp, Zea mays
  Peptide Sequence Number=SeqID_57325
atgcagtgggcgggtctgagatcgcaggcgccggttcccacggcggcgtggacggggccgaggccaagaaccgcgaggtgcccgcagggtagattccccacagcgcgccgggcgctggtggcgtcggcagcggcctcggacgctaattcgagctcgaattcgccggggaaggacgaggagggggaggaggtggtgcgaagggagaaggaggagaaggcggtcgcgtcgcttctgatgagaagccagaagtacgccatgctaaagcagcagctcgccgtggccgcccaatttgaggcaaaggctgaaatgaaattttgcaatatcagcattggccgaaatttggtctcttcgttgacctgtaccttgggattggtcttgcaggattacaaggaagcagcgaggttgagggactcgctgaggtccttcgaggagaaggagcctgtgttgtgcctccgccggttgatgaagaaggccattgaggaggagaggtttgaggatgctgctaaatacagagatgaattaaagattttggctccacactccctcctcaaatgttctagtgatgcaactactttggggataagagttcaagtcaggagcgtctatattgaaagccggagccagccattgaaagggcaattcttttttgcttatagaattagaattacgaatagttctcagcgccctgttcagcttctcaaaaggcactggattgttacagatggaaatggaaggacagaaaacatttggggagttggagtagtgggagaacaacctgtcatattcccgaagactggttttgagtactcttctgcatgcccattgagcactccaaatgggagaatggaaggtgactttgagatgaagcacatcgacaaggctggatcatcaacattcaatgttgcaattgcgccattctctctgtcaattcttggtgacgataatgatgttctgctatga

SEQ ID NO: 13951 - DNA, 115 bp, Zea mays
  Peptide Sequence Number=SeqID_57326
agatacttggacaaatggctatgagatcgatggttttggttatgactatggtgctggcgaagatgaagttgtggaaggagacttccaggagttccaagactacgacgagttctag

SEQ ID NO: 13952 - DNA, 231 bp, Zea mays
  Peptide Sequence Number=SeqID_57327
atggtcggcgagacaagtccggcgatgacgagacactctatgccgtcgggccgagccgtgctgcgcgacgctgggcatcgagcagagaccgagctggagctaggcgtgacacggaaggacagacggccatctgggcagcgcgcaggcgcacgcaacgagtggagcaggagccagggacaccacagcagggaggagcaggaaggttgggcgaccaagcacgaatcaagctga

SEQ ID NO: 13953 - DNA, 1305 bp, Zea mays
  Peptide Sequence Number=SeqID_57328
atgccgccgttcgctggccgcgtgtactctggggtcgtcgtgctggccgcctccctcgtcttctcctcaggccctcccgcgctctccctgccttctgcacgcgcgcagctcgccccagatcctcccagccatgacgcgcgcttccctgtgccccgcgttccttctctgcactgcttcctctgctccatcttcaagcacgccgcgctccaaatcgcctgctgttcctcttccccagccatggccgcgcctggctcgccggcgttcaggccgcggcttcctcctccaactccggtcggccaagagcctagctgcccccttgcttctctccctccatttcccagcagcgccctgtccctgtcgaagcccttctatggcgcgcgtggatttctcctcctccatccccagctagcctgcgagctcctccctcctccctgcatccatggatctcggcgcccatctccatggctcgccctgcgtccagccgccgcgcccggttccgagtccctttcctggccgagttccctgctccatctctgccctctgccggcgctccagctcctccatccatggccatgcctgctgctcgtcggtgctcgccgcgggagacggcgcttggtcgcccaaccttcctgctcctccctgctgtcgtgtccctggctcctgctccactcgttgcgtgcgcctgcgcgctgcccagatggccgtctgtccttccgtgtcacgcctagctccagctcggtctctgctcgatgcccagcgtcgcgcagcacggctcggcccgacggcatagagtcgctgcgtcgttgtcgctctgacttccgtgtcctcgcgcggtatgcggcggtagtgttcacatccgcggcatcagcatccccatcgccgttgaactcccagacatgttcctctctgttcgcttgtcctcagttccggtctgatctcgcgcgcgtgattttgaaactctgcgcgttcgtcgtgtcgcgatgtgtgccgatattctctaccgcttccctcgcgcggctctttggagataatctcctcaccggctgtcgctcccaatcttcagctcatcgactcaccgtcgtgtttcttgttttccctcgtcggtcggcctcgccgtggctaagtatgtccgccgtgttatgtgcttcggtctttggtcgctgcctcttgctcaccatcccctattcgatctcgtcgtcaagcttcgcctcagccttagctcgttggtcacgctcgtcagatgtgcgaccgaggacttcagctgaaggccgtcgtcaggcaactaccaagtcgagttgtgatgtg

SEQ ID NO: 13954 - DNA, 81 bp, Zea mays
  Peptide Sequence Number=SeqID_57329
atggcgggcgaaaaagagctcgccggagctaaggaggggcgtttggccggtgaaggttttgctgactggatcaagagatag

SEQ ID NO: 13955 - DNA, 468 bp, Zea mays
  Peptide Sequence Number=SeqID_57330
atggcgcgcgcgatcagttcgcggctcgggagcgcggcatccggccgacccgataggcgcgcgggcacactccggtgcgtggccatggccatgccccggcggcgggagggcgagatcgccgtgctagagagcttgggggctaggcggacgatgcagatggcggggaggtctacgacaggcttaggccctatcgcaggaagttgcttgcgtccatggctagctctcgtgaccctcggttgtccgcctcgccgtcgtcgacgtcgtgcccttcatgttccctgtcgagaaggttcaacctcctctgatctccatcctgcccctggcaagctcgtcactgccattccgagcgtgggcgctggggctcgactcctgagtcgtactcatcttcctcaacacctcgcctacgcccaccaggtgttcgacagagtgccatctgtccgtcttgcaggctggtacgagcatcgctga

SEQ ID NO: 13956 - DNA, 264 bp, Zea mays
  Peptide Sequence Number=SeqID_57331
atggattctcaggcgccaacaaactcagatagtgaccaaggaagtgtggaggacttcatcctctctgttggatctggaggtggcactgtgcttggttgtgtactgtgttcctctctgttgttgtgcttgggtacctgtgtggtgccgtgcactctgtctggcctctgtccaccgtggcctggtgcttggtttccctgctgcgcggtgttcctcttctcaggctggtgccgtggatgtctccctcggctccggcagcggctctag

SEQ ID NO: 13957 - DNA, 561 bp, Zea mays
  Peptide Sequence Number=SeqID_57332
atggcgccccgcatactctgtgacaacggcggctttttagcccccttatggaagcaaaaggacgtcagcaaggactcaacagctctgacagttgtccctccgccaggctccatcgctcctccgacggccacgacatcacaccagcagggtgccaaaatctctccggctgccacgacggcatcactctgctacaccccccattgtacacctggatcctctcattacgcctataaaaggaaggaccagggccctcttagagagggttggccgcgcggggacgaggacaagacaggcgctcgcgtgaggccgctcgctccctctcccgcgtggacgcttgtaaccacctactgcaagcgcaccctacctggacgcgggacgaacacgaaggccgcgggattcccacctctctcacgccggtctccggctacctcgcttccccccttcgcgctcggcctcgcgctcgacccatctgggctggggcacgcggcgacattcactcgtcggcctagggaccccccggtctcgaaacgccgacagtcatgcctacaacacttcatataa

SEQ ID NO: 13958 - DNA, 429 bp, Zea mays
  Peptide Sequence Number=SeqID_57333
atggcgcctcctgttgtcgtggctggtctgcgccctaggttgggcgacgtggaagctcctccgaagccgaggtcgagtctgccttccgtggccgaggtcgagtccgagcccctggttcgggcgaggcggagatcgccggctgatgccggggcggagtccaagccctggggtcgggcgaagcggagttcgtcgtcttctagggccgagcccgagtccgagccctgggtcgggcggagcggagattgccggctgatgccggggcggagtccgagccctagggtcgggcgaagcggagttcgtcgtcttctggggccgagcctgagtccgagccctgggtcgggcggagcggagttcgccgtcttccggggcttagcccgagtccgagccctgggtcgggcggagcggagttcgccgtcttctggggcttag

SEQ ID NO: 13959 - DNA, 486 bp, Zea mays
  Peptide Sequence Number=SeqID_57334
atgaacgtatgtgagctcactcttgctgtctcacacccccccacaggtcaagaacaggctcgggtcttaacgctggaagggagcagcagcaccctcggcatcgacaacaccttcggcgagggtcttctccgggaatccggcccgagcaggcggctcggccggtcaccctggggcctcggccagctgtcctccaaggatgtcagcccgacccgaggcctcggctggtcaatcccggcgtcggtcccgctaacggacggcccggccaggccccggccgaccaggtcttctcaccgagccaactctgcctccgttcgcgctgacaccgctacccctggcctcggctcatcgaagagcggccgaggggttcctttgactgagcaagagaaacctcgggcaacaaggctgaccgagccgagggactcctacgcctccaggatacggatacctcactcgacacctttacatggggcgactcacgcttggtga

SEQ ID NO: 13960 - DNA, 330 bp, Zea mays
  Peptide Sequence Number=SeqID_57335
atgacgcatctcctcagcggcttcgtcaatcttcttctgaagagttgggctggtggccttcctttttggctcctagcctctcgcagagagagtgcatcctggtttgtgtccagtggttgcagggcagaccctggcaccgttgccttctttggtggcatgtcgaaggtggatgctttaccgaaggtaccttcggcttgccagaaggaccttcggaagaggaaggcccccaacagacaggaaattcgcaacaaacaggtggcagaagtcggcccagtcattgatgcaatggcagggaagatggcaaagccattggagcgcatcctatcatag

SEQ ID NO: 13961 - DNA, 276 bp, Zea mays
  Peptide Sequence Number=SeqID_57336
atgggcaagagcaagaaaagtgggagttcttcacaccattccagcgataagcagaaacgtgagccgactcctccctcggaggacttcggtgactcggagtactcggaggaggagttctcctccgagtcagagggctcgccgggcggcggtgacagcgatggcgagggcgagggcgacggcggaggcggcggtgatggtaacggcgacggtggcggcaagggtggcagcggcgatggcggggacgacagcaagggcagcagcaaggccagtggctag

SEQ ID NO: 13962 - DNA, 549 bp, Zea mays
  Peptide Sequence Number=SeqID_57337
atgtcttcgcgctcccttatgcatcgtgtctttccaccttccaagcccccggatgggggatatccgccgtctttccgcttcgtcgttggaggaacgcaactccgcgggagttggtacctttcagccatcattcggcttcaaggattttcatcagccagcccggccgtacccctctgccggcggtcacccgagacggtgaccaccagcccctgggtggggagaagcaagccgggctgcgatcttggtcccaccctcagcttcaaggatgttcatcatcctcgctggggtggaggccgggctgagctggagctctacgtcccgcgcgggttcgtgggtcggcctctccttcggcgttcgagggagagggcgctcactggccctgcgggcaggtcggacttcgacaacgcggggctggtcgacggcgggcgtcgtcagcctcagcgcgtcgggctcgtcggcttagctcccggtgccccctcctgccagaaggcggctgccgaggggaactccacgcggaggtcagtgccccactcgcccgggaggatctaa

SEQ ID NO: 13963 - DNA, 225 bp, Zea mays
  Peptide Sequence Number=SeqID_57338
atggcgtcgtcgtggtcctgcggggagcgctgccgctcggtggggttgaggaccggcgcgagtgtggatcgttggatgcagttcgggcggtcccgattagatcgtcgcgtaccgcttcgcggggttcctcgtggccgtcagatgatttttactgtatattttatttacatgtctgatgtgatgttaatttatgctatactatgtttggtatttacttacacttag

SEQ ID NO: 13964 - DNA, 576 bp, Zea mays
  Peptide Sequence Number=SeqID_57339
atggaggcaagaagagcttcgaggtaccaagtgcacgggagaaggtcaaagaggctgaggaacccaaagccaaggccaagactcagctctgtctggcacaccggactgtccggtggtgcaccggacagtgtccggtgcgccaggctgaactctggtgaacaggccgctctcgggagaagtctggcgacgtacggctataattcaccggactgtccggtggtgcaccggactgtccgtgtccggtgcgccaacggctccaagaccgcaacggtcgactgcgccaattttggaaggaaatcgggcaccggacagtgtccgatgggaccccccggggtcgaaacgccgacacatatgctccgcagcagagtcatcatcatggaggaaattgtatttcaagtggtcccaaatgtcagagttccattgtcacactcggttttggaagctaaaccgaatgcgaaccataggaaataccagaatccacagttagaaacatcattaacccacaacggcggtcaaaataaccttattgctttaggggaccccgagatcaagcccctcaacatgatgggcccttag

SEQ ID NO: 13965 - DNA, 513 bp, Zea mays
  Peptide Sequence Number=SeqID_57340
atgggcgcaattcaggtcaaggctccgtccactcaagggacacgatctcgcctcgcccgagcccagcctcgggcaggaacggtagaccaaggcagattcacgcctcgcccgagggtctcctcaagcaacgggcgcaccttcgactcgcccgaggcccagctcgggaaggcttcgcggagaagaaaccttggccagatcgccacaccaaaccgaccgtatcgcaggagcattcaatgcaaggatcgcctgacaccttatcctgacgcacgctctccagtcgacaaggccgaagaaaacaacgccgcctgcgctgctccgactgctgtgccacctgccagggtgaggctgacagcagccaagtccagcctcgggcgccataggaagctccgcctcgcccgaccccagggctcggactccacctcgacctcggaagacggtctccgcctcgcccgaccccagggctcggactcaacctcgactccggaagacggtctccgcctcgcccgaccctag

SEQ ID NO: 13966 - DNA, 497 bp, Zea mays
  Peptide Sequence Number=SeqID_57341
gaacaaacgatgattcatatcaaaagctcaaggaagaaaatgagaggctgaagatgagcttgacacaactaaaagggaagtgcattgctcaaccttctcaagataaccgtgaccacatggtgaagaagcttgagacgagaacaaccgtggcatgcactaaaacccttgaggaaaatgtcaaggatttaaggattgccaagaggaagaagcaaaagatgaaattcaatgcatcctccaaaagcctcaaccacgcctctacaaaagcagctgataggagaatgccctcgcgtgcgtgggctaacaaggtggtgggaccaaagggggccaagattggagaagctagcggggagttgtatgtggatgactacttgattgaagatgtgggcatgttcgacactcagacggtgctgtcggctggcggggctgggtctgggcagatggtggcggtaccggtaaagccagttgaagagaggacccatgcaaagactgtgatgtga

SEQ ID NO: 13967 - DNA, 423 bp, Zea mays
  Peptide Sequence Number=SeqID_57342
atgcaccgcgccgtgcctataaagcagcccaaggcgtcggttgtacctccccgcacgctctcagtcctgcccgagccaaagttcaccggacttcgcctcgagcacgccgtgccaccgccggccaagccacccgagcctcggccaccgcagccagctccctccagtcacttccaagccatgccagtcacctcgtggatgcaaatatttttcctagtctacttaagtaatagagaacctaggaaaaataaaaggaaccttagtccagagcagattcatgattgcaatctcgctgacggagagtacgtgctcatccctgagcaaggagctgtccacgaggaagaccaggagcaagctcctgagactgccatcgaggatctcctcgcagccccagcatttgaaggaaagccccagttttatgcataa

SEQ ID NO: 13968 - DNA, 336 bp, Zea mays
  Peptide Sequence Number=SeqID_57343
atggccgcgcgcgggcagatgcgcggtcggctggtggctcgggtcggcctcggatgggtgcgcgtgggcgtcgcgcggctggccggatcttcacgtcggggcacaggggcgtcgagccggcttggggcacgcgcggtgcagggtgctcggcggctcggctgctgcgcgagacgcgcctgggtggggtcgcggcctggctctgagcttgaaccgcctgtgattgggagcaccagcttcgtgaccgaaggtgctacatcttggtcgttgtacaaagccattgccacaatcagtggaagtgagttctgtggcagaaccgcccgaattattctagcttaa

SEQ ID NO: 13969 - DNA, 477 bp, Zea mays
  Peptide Sequence Number=SeqID_57344
atggactggcttctccagcgaggcaaagtccgattccttgctcggggagcttcaccggggcatgcacagtctcttccgagggtcgggcgtggctgggaagggctctgcaggccggtctacggtggcgggggatcgggtggccgtgggcacgctgtctgcaaggcaaacaccggtgatctctggctccgtgctccacttgtccaaaaggggtttgaattagggcttgggcaattctccccattatatgtgcataacaagccaagctatggtaggtacaagtgcggtcactgcacggcggcagccgaggtcagtggagcattgtatgccaaggcggtgaggcctggacacgaacgaggaatcgatgtggacggtacgattcaggatatggttgatggtgtgacttggcctaccaccctgccaccgggttggacggtcgagtgggatgttgctccgacaggagaggagcacgaggagtag

SEQ ID NO: 13970 - DNA, 264 bp, Zea mays
  Peptide Sequence Number=SeqID_57345
atgaagctttccaagccctcggacctggcagaacttcaccggaaggcgaagatcgacctcaccggacttcagccgcccgcctgcgcgtgtagactgggcactccgataggccggactcctcgccgccgacgagctcccccacctgcgcacgcggaccggccaactctgaccatccccgacggcggcccgcacatcgccgtgaccctcagaacctcctctacaccctcggccacctcaccggagcaatctcgctaccgagtttaa

SEQ ID NO: 13971 - DNA, 1485 bp, Zea mays
  Peptide Sequence Number=SeqID_57346
atgaacaaaagaccggcattcaaggtgccattacaaatggaactccggttccacctccgcagcaacgacaatgacccccgctccgggtggccgaactgcagcagcgatggcctcagggcggacgctactgcaactttgcccttgcccacgccgacgctcgaggggcgaggacaagggctgtcagccctccgacagatccccactcggatcctcccggacgaccggagcaccgacctccgagcgggggcgccgtaccggtgcaaaggcaggaccgccctagaacacgaacgccgccctagcagcgcgcgacgtcttgggcggtcctcccttacgcgcggcgcgacaaccgccttcacggcaagagggggcaccgggagccaagccagcgagcccaacgcgctgaggctgacgacgcccgccgtcgaccagccccgcgttgtcgaagtctgcccctctcacagggccagtgagcgccctctccctcgaacgctgaaggagaggctgacccacgaacccgcgcgggaggtagagctccagctcagcccggcctccaccccagcgaggatgatgaacatccttgaagctgagggcgggaccaagatcgcagcccggcttgcttctccccacccaggggctggtggtcaccgtctcggaaggactgcgggtaacccccatccgggggctcggaagccgtcgtgggttgagtcttctccaacacgctccaaggtcctccccctatggcgcgggggctgggtcccacgcgtcatgcaagctggcccagagcagaagaagccaaaccgccgcgcgcggtgcatgcaatcgcccagcggttacgagcattcctccgctttcgcccagaccagcgggccaaagggcgggcagccatgcaggcggcatgcaaccgcgccaagtgggcgcgcccctccgacttccaacgcacccagcatgggggcccacgcccacgcgtcatgcaaccggcgcgccggtcgctacgtgcaagcaactgcaccgccactcgtaccactgccacgcctcctcgactgcggaaccagtaccgcgactcgaggcaaccctgcgtacgacccagcagtgccagccaggcgcgacggtcaatacggccaaaaatgggccggcagtaatggcggtggcaggcgggcgggagcagcggtcacgtcgtcagccaagcttacgtcccatcctggggcaggaccgggaaagggggataccccgaaaaggacccttctccgtgaaggaaacaggatccgagcctccctactgatcagaggttcgaaggctggcccctcggaggggtttaacagccgcctcagagcgcgtgggctccacacccactactggtcagaggttcgaaggccggcccctcggaacggttcaacggccgcctcaggccactcgggctccgcgcccactactgatcaggggttcgaaggctggtcctcgaagggttcacaaccgcctcagacatag

SEQ ID NO: 13972 - DNA, 249 bp, Zea mays
  Peptide Sequence Number=SeqID_57347
atgggcgcgattaaggtcaaggctcagtccactcaagggacacgatcttgcctcgcccgagcccagcctcgggcaaaggcagccgaccccgaaggattcacgtcccgcccgagggtcccctcaaacaacgggcgcaccttcgactcgcccgaggcccagctcaggcaggcttcgcggagaagcaaccttggccagatcgccatgccgaccgaccgtatcgcaggagcatttaatgcaaggatcgactga

SEQ ID NO: 13973 - DNA, 453 bp, Zea mays
  Peptide Sequence Number=SeqID_57348
atgggaagctccgcctcgcccgacctagggctcggactcagcctcggcctcggaagacggtcttcgcctcgcccgacccagggctcggactcagcctcgaccccggaagatggacaccgcctcgcccgaccccagggctcggactcagcctcggcctcggaagacggtctccacctcgcccgacccagggctcagactcagcctcgaccccggaagatggactccgcctcgcccgaccctagggctcggactcagcctcggcctcggaagacggtctccgcctcgcccgacccagggctcggactcagcctcgaccccggaagacgaactctgcctcgcccgaccccagggcccagactcgacctcgacctcagaggagcctccgcctcgcccgacctcgggctcggacccgccacgtcacaggaagtccatcattaccctacccctagctag

SEQ ID NO: 13974 - DNA, 696 bp, Zea mays
  Peptide Sequence Number=SeqID_57349
atggcacctcctgttgacgtggtcggtccgcaccctaggttgggcgatgtggaggctcctccgaagtcgaggtcgagtctatcttctgtggccgaggtcgagtatgagcccctgggtcgggcgaggcggagaccgtcggctgaggccagggctaagtccgagccctggggtcgagcgaagcggagttcgtcgtcttccggggctgagcccgagtccgagccctggggtcgggtggatcggagttcgtcgtcttccggggctgagcccaagtccgagccctggggtcgggcggatcggagttcgccgtcttctggggatgagctcaagtccaagccctgggtcgggcggagcggagttcaccgtcttccggggctgagcccaaggtcgggcggagcggagttcgccgtcttccgggctgagcccgagtccgagctgtgggtcgggcggagcggagtttcctatggccggtcagtggagcggcgaagtgactgcggtcactttggctctgtcgaccggaggacgtgcgtcaggataaagctttgtgctgatgggggttaccagctgagaattaggagtcttgaggatgatgatgaggataatgctggtttctattgtgattatgattatgattatggtaaagaaggtgtcgaggcggatctccaagagttccaggacttcgacgagttcgaggattag

SEQ ID NO: 13975 - DNA, 1485 bp, Zea mays
  Peptide Sequence Number=SeqID_57350
atgccgtcttcttcttcatccgctgcgaacacaccgctgggcaaatcgtcgtctgaggaaaccatgagcgatctggcggcggtggagctgcacccgggccacacggtggagttcggcgtttcgcggatctcctcgaagaggaaagttggagacgagattgcacagtttgggtcatgcacctttacgccgaggactagcaagacttcggcggaggttgtggagctcgttccttgcgcccgcaacaagtggggcaattggatcggggatcctttccacgaggcgaagaaggcgcggggagccgtgaagtctgccaccccgggcagtagtaagccattgccggctacgaaaccgaccgcccccaggcctagcaacgcttcggctggtgcgaaggctgctgcttctggcacgggcaagccaccctcaggcgggcccgcgaaggggcgaaggctgccttcgccagcgcgtacgggcgaggcggcggcgcgtgttgccgacttcgacacggacatctgtgtcggggattattttgttgggtcggatggggggcaactagctgttgtcctacctccagtggcggccacttcgccaacggcggtggttggggcgaagggtgccacgcgggactcgtgggccaccttttgcacaagcggcgagattctgtcggccgctgccgctaaggacgtggcaggctccatgtcccagcaactgaggcaagcgtcgcagcagctgaagcatgcggccgacttcgccgacctcgtcgcgttgggtgcctttactgtggagtttgctgccgaggtcgagaatctccgggcgcagcatgtggatgctatgcgggacaagtcggctgcggaaagcataagccgcaggctgtcggagaaggtggccgccatggaggccgggagggcagatctccggcgccagctggcggaggagaggagagaggcgaacaaggccattgctgacgtgcaggctacgcattacgaggtctttgaccagtcggacgaaaactttgaacttgaaatcttcaaggtcgaggaccctgtgctgaagcagtcggtgagggcgctcttcgataggatgtggggtccgcacggccgagagacggtccgggagcggtccgaccgggcaatagatcaaatggcacatgccgaaagcgtcgaggactttggttttctagacggcgcgctgcccgaggccgtggaggttccgacgtttgggcctgcgcaagcaaccactactgaaaatactgattttgcggtggagacttcagctgtagtgcccgccgatgatagtgtgcctggctctatgtctgaatgttttgagtccgacgcggagacttcaccgcgtgtggagggtgctgaggatcttcatgttgcgagtaataggtgtaggcggcgaagggtggtgggaagacagtgtgtgggtgaattttcgcggagtgcaggcgctgtcgcatggggatggagcgtggccgacttcgagtag

SEQ ID NO: 13976 - DNA, 258 bp, Zea mays
  Peptide Sequence Number=SeqID_57351
atgcctctaatactactgctggtgttggcgctgatgctggtgcttgtgtccttaaggacctgctggaacatgacatcgacggaaattattgctgaattcttcctaggtaatggcttcggggtcggcatgggtggtgagggggcatctctgtctgaggcattggggagggctgcctcccagactccacctcctactgaggcgaggggaagagtcatgctgctcctgctcctggcgtcggcgctcctgctcctcgtgtag

SEQ ID NO: 13977 - DNA, 486 bp, Zea mays
  Peptide Sequence Number=SeqID_57352
atgtcgccccgcacaaggctaacggcacgcaagtcaactggaccaatcggtgtgccccggcatcaactggcccctcgacatgaaaacagtagcagcgggagcaatgacccaataggagatcttgaagcccgagatcagcttgctgatcgggacttagcacttgactgggcagtacagtcccgtttgctggcatgtgctaaggaagctagggctcaggcccgaatcaaggaacttagctcaactgtcgacgacctgcaggtcttttgcaatacgttgcatgaagaagtccatgtactgtactcgcaattacaccctagtgcacctgcacaccctgctgaggcggaagccgaaccctcccacgttgcgggacgcgcgctgggtggggagttagacctttttaagccccctccttccatgaggttggttgacgtctggactcccacacctgacgatgaggccgccaagagtaatgggaagcaggactaa

SEQ ID NO: 13978 - DNA, 57 bp, Zea mays
  Peptide Sequence Number=SeqID_57353
atgtcactacaagaaaacgttgaaggagtgtcgtggcgtatggccacctatctctaa

SEQ ID NO: 13979 - DNA, 328 bp, Zea mays
  Peptide Sequence Number=SeqID_57354
atgaggctcaagttgataaaggagatgatcaagcaaatgagccacctcaagatgacggcaatgatcaagggggagatgcaaatgagcaagacaaggaggatgaagaacaaagaccgccacacccaagagtccaccaagcaatccaatgagatcaccccgttgacaccatcctcggcgacatacataaggggggtagaggaagcattacaagattcggattgggtggtggcgatgcaagaggagctcaacaacttcactaggaatgaggatgtcaaacccatcaagacacccatgggaataaatgggcatctcgacctcgacacggaag

SEQ ID NO: 13980 - DNA, 1152 bp, Zea mays
  Peptide Sequence Number=SeqID_57355
atgactaccagccttgtggtggagagaagcgagacgggctacggcctccccctgccctcagcttcaaggatgttcatcatccgcgctggggaggagggcaagccgagtgggagctttgccttccgcgtgggctggcggtccgcttcttccttcagcattcaggggagaagggcgttcgccggctttgcggaggaggcaaactccgggtacgcggggctggccgtctgtggcaccgtcagctgccgtgtgtctggctccccggcctgggtggctctggtgctgccttcggtgctgcctcctgccgctggggcggagcgtggctgcccgtccaccgcacgggcgacggtcgcgctgtgcgcgggttggccacatccatggcttctcccgcgccaccggtcacaccgggaggtcgtacaaaacgtcccgctacccatcggtgcaaaggtggtcgctgccactggtggggctgatgtggtcgcctccactggaggacgggggcaaggatctatccgcagtagcgctcaccctgaggtgatcgctgctgctggcgagccgctcggagcagaggtcgttgtcgctgctggtgcagaggtggtcgccgtcgctggtggggctgtccggaaccagcttccagcgcgactcttgctgggcggtggagtatgcaggctcacggtacgggaccaggctgagcggctacatggtttccggaccccccctaggagacaagtgcctgttcttcagagccggacctccaggcttgatgtgctgaggttggataccagcgtttctaaaaaggttgtcaacaatcctcgggaggcaaactcgccgggatctggatctggcggtggagcgtgcaggcccactgtacgggaagctgcacgggctccggaccaccctaggagactaatgcccacggtacaggacctggctgagcggctacacgggctccagaccaccctatggaacggggtcccgttctctagagccggcccccaggctgtcggacctccctactttcgtatcaggggccctaacctgcaagcctggctgttcaattcggatgtcgccatgtcagacagacggaaatcgtacggcccggacccatgggggtacggaagggcctccggaagaaggcgtgcttcagcttcgtag

SEQ ID NO: 13981 - DNA, 1221 bp, Zea mays
  Peptide Sequence Number=SeqID_57356
atgaagggatgcttaatcgtggggcggctgcatgccccttgcagggcggttcgccttcctggtcgctggttgccccgggaatggaggggcgcatggggtgcgccggtgttttctggagggatccgcgtcaaggctgtctcttccggcgacttcatcgtcggagagcgtgcgctcgtggtggtggtgtcgccgatcttgtcttcttcctgctgccgttggaggggtgcaaccccatgggggttggcatccttccaccaccattcggcttcaaggattttcatcacgcagcctggctgcagtcccccaccggtggtcatccagaaggatgactaccagccttgtggtggggagaagcaaaccgggctacggcctccctcctgccctcagcttcaaggatgttcatcatccgtgctggggaggagggtgcgccgagttgggacccgcctccgcgtgggcagcggcccgcttcttccctcagtgttcggaggagaagggcgttcgccgtctgtggcgctgtcagctaccgcgtgtctggcttcccggcctgggcggctccggtgccacctccggcgccgcctcctattgctggggcggagcgtggctgcccgtccaccatacgggcgacggtcacgccgtgcgcgggttggccacacccacggcttctcctgcggcaccagccgtactgggaggtcgtacaagacatcgtacaccgtgcgggtgggggcggcgttcttggatggtcttgtcctcactcccatagtgaggacgggagtgaagacctcttcgtgcgcgctggtgcgaccgccgttcgctggtacggtacgggtgtgcaggtggccgctgtcgtctgtgctgaggtggtcgccgccgctggtgaggctccccaccgcagaggtggttgcctccatcggcgagacccggcgcacatgctgggatgattgccgctgctggcaagttgtcgatgcagaggcgaccgtcgtcgtcggtgctgatgcggttgcctctgctggggagccgctcggagttggatatcccatggcccttctggtgtggaggcccatggcacagggcctggctgagcggctacatggcttccggaccccccaggagacaagtgtctgttcttcaaagccggacctccagggtggtggagtgtgcaggctcacagtacgggaccaggctgggcggctgcgcgggctccggaccaccctaggagactaa

SEQ ID NO: 13982 - DNA, 324 bp, Zea mays
  Peptide Sequence Number=SeqID_57357
atggaaacaccctcacttctcacttgcagctggactgtgactctgaaatggttttgttcttgtgtaccaagtgccaggggtcctcctctacttaaactctcgcaaagggaagctgaaggagaagggtcatgtgctggtgcatgggtgtttgagctggaggaggccgtgcccgtgcggcagatggtcacggaagggctcggggtggccaagcaccacgacacgctgagcgcgtccatgcggcacctgttccggatgagcagggacggcgactggatcgtcgtcgctcacgccgctggttttcacatggtcagcaacgagctccgg

SEQ ID NO: 13983 - DNA, 372 bp, Zea mays
  Peptide Sequence Number=SeqID_57358
atgggcaagaacaacaagcgcaagcgtgagccaacttctccatcggaggagtttggtgacttggagtactcagaggaggagttctcctctgagtctgaggggtctcaggctcccacgtacatccgggccgtcgagtgctccgggctcgagggctcgaatgagtcggagtactcctcggatgaggaggactcggacgacgacgacgacggcgacgacgacgacgatggcgacggtgacggtgacggcagcggcagcggcggcggcagcaagggcggtgacggcggcggcagcaggggcagcaaccggggcggcagcagcaggggcagtaccaggggcggcagcggcggcggcagcaacagggccagtggctag

SEQ ID NO: 13984 - DNA, 189 bp, Zea mays
  Peptide Sequence Number=SeqID_57359
atggccgacaatgagttctgcacgcgcgcagatgtgccctgctccactcgctcatcatgctgtgcaccagtgcgccttggaatctgtcaaagtgtgaacgacaggtgcatgcaggcatgcagtcaaagtaaagaaggtgtcgaggcggatctccaggagttccaggacttccacgagttcgaggattag

SEQ ID NO: 13985 - DNA, 282 bp, Zea mays
  Peptide Sequence Number=SeqID_57360
atgggccattccaactgcgggccgtactggcgccaagctcggcgcaccaccagcacggagttctcctccgtggaacgagtgcagcacttcgctgatgtccacgagcaggaggcgcgggccatggcacgccgcctttgtcgtgtggcacatgcttctgggggacgcgctcttgtagacgtcaagtcgcgactgttggagatgctaatgaacggcttactggacatgctcttcaagaggacaacctctcggagttggaggcgggtaactgaagaccgccagtga

SEQ ID NO: 13986 - DNA, 273 bp, Zea mays
  Peptide Sequence Number=SeqID_57361
atggcagagcgcaaaatcccacccccaacacgaccaaaccccacgagaaaagtaaccgagacccgcagatctaggagtagacgcgtctggagccccaacgtcgcgcctggatctgaatccacgcgcaggaaccaatcgacaggcgcggcagagcacaggaggagaaaaagggatatgatcctcggtctctgggtccgctggtcagcgagcacactggagaaagggcaaccctgcggcacagagcctggggtcgggcgtggcggaaccggatag

SEQ ID NO: 13987 - DNA, 126 bp, Zea mays
  Peptide Sequence Number=SeqID_57362
ggaggcgcgctgacagagaggcgcgcggcggcacggggacagggaggcgctcggcggcgcggggacagggaggcgctcggcggcggtgggaagagggtggcgcttcggccggcggtgggggagagg

SEQ ID NO: 13988 - DNA, 57 bp, Zea mays
  Peptide Sequence Number=SeqID_57363
atggccgcggaagccaagacgccgtccctcgctgaggatgaaagccatcaaggctga

SEQ ID NO: 13989 - DNA, 615 bp, Zea mays
  Peptide Sequence Number=SeqID_57364
atgaccgcgtcaaaaaagggaccaggaaagggggataccccgaaaaggatccttccccgtgaaggaaccaggctccgagcctccctactgatcagaggttcgaaggctggcccctcggaagggttcgacagccgcctcagatcgcgtgggctctacacccactactggtcagaggttcgaaggccagcccctcggaagggttcaacagccgcctcaggctactcgggctccgcgcccactactgatcaggagttcgaaggctggcccccgaaggggatcggtccatacgagggactcgatcacgcctcgcccgagcctggcctcggacaagggcagccgaccccggaggatctccgtctcgcccgaggcccccctccagcggcgaacgtgttcccggctcgcccgaggccctgtcttcgccaagaagcaaccctgaccaaatcgccgcaccgaccgaccaagtcgcaggagcgtttaatgcaaaggtggcctgacacctttatcctgacgcgcgccccccagagccgaagtgaccgccgtcacttcgccgctcccctgaccggcctgacagaaagacagcgccgcctgcgccgctccgactgcggtgccacttga

SEQ ID NO: 13990 - DNA, 564 bp, Zea mays
  Peptide Sequence Number=SeqID_57365
atgacctccaacccccgggtggggagaagcaagccgggctacgatcttggtcccaccctcagctccaaggatgttcatcatccttgctggggtggaggccgggctgagccggagctctacctcccgcacgggttggccgaccacctcctcttccagcttctggtggatgcaacattccgtcctcttcctcgcttgcgtggcgaggacaggagtgaggacctgccggagtccctcggctcggtcgaccttgttgtccgaggcttctctagcttagttaaaggaacccctcggccgctctccgacgagccgaggccaggggggacaactggccgaggcctcgggggtggccaaccgactcgcctgcctgagccggattcttggagaagaccctggcggcgacggcccgggcttggtgatgacgccgtccttcagagtggggatcttcggaccgcgtcgccgtccgaggctaggtcgggcctcgccgaaggtgttgccgacgctgagggtgctgctgctcccttcagccgtcaagatccgagcctgcaggatcggatcgtcttgtag

SEQ ID NO: 13991 - DNA, 456 bp, Zea mays
  Peptide Sequence Number=SeqID_57366
atgcaggtggcgtgcaaccgcaccatgggggcacacccctttggcttcgttgcgtccagcatggaggcccaggcccacacgtcatgtaaccgactcgccggttactacgtgcaagaaactgcaccgccacttgcgccaatgccgcgccttctcgaccgcggaaccggtgtcgcgactcgaggcaaacctgcgcatggcccaacagtgccaatcgagcacaacgatcacggggaccgggaaaggggatatttcgaaagggatccttctccgcgaaggaagcgggccccgagccctcctactgatcaagggttcgaaggctggcccctcggaagggttcgacagccgccccagagcactcgggcttcaagctcattactgatcaggggttcaaaggctggcccctcggaagggttcgacagccgccccagagcactcaggctccgttcccactactga

SEQ ID NO: 13992 - DNA, 441 bp, Zea mays
  Peptide Sequence Number=SeqID_57367
atgggcaagagtaacaaacgcaagcgtgagccgactcctccgtcggaggacttcggcgactcggaatactcggaggaggagttctcctccgagtccgagggatctccggctcccgtctctcccccggcgtcgtctgatgattcagacgactcccaggggattgccgcggaagtctggacgtacatccgggccgtcgagcgctccgggctcgagggctcggatgagtctgagttctcctcggatgaggaggactcggacggcggcgaggacgaagatgacgacgacgacgacggcgatgacgacgacggtggcgacggtgacggtgacggcagcggcagcggcgggggcagcggtggcaagggcagcaccaaaggcggtagcagcaagggcagcaccaggggcggcggcggcaagggcagcagcagcaaggccagtggctaa

SEQ ID NO: 13993 - DNA, 429 bp, Zea mays
  Peptide Sequence Number=SeqID_57368
atggctgggaaaaatttactgttccctgggctgcgcgcaataattcagagaaatacaagggcttctgcgcaagaattcctaagacccatagcactactcctgtggatcgcgggtgctccgatttcgccgcgcggctttggcggccaggtcccgggaagaacatcccgacagaagggtcccacgcgacagcaagagccttggggcttgcgacggagcgagtggatgaccgggcggtgtggaatcgtggttcgcgaggatctcgcgcggcgcacagaccatgccgccccaccggcgcaaagctcggcggaggacgcgagtcgtgctgttgaggacgagcgtggcaaggggctgacggctatggcccacagccagagtcacgtgcaggatgatggcggctggcgcatgtggaaaaagaaggttttggtttaa

SEQ ID NO: 13994 - DNA, 458 bp, Zea mays
  Peptide Sequence Number=SeqID_57369
gttctagtgctggtaaggctttgccatcccccttggttgaagaggccaccgtgagtcaggttcctaaagaagttgcagcagcatcgaccggcactgatgctgctgcttctggggatatcttggttgcaccagctttggatcttctaggcgttttgaatcagaagcggatagatgacctgaaggctgctaacgatgcgccttgtgttaaggacgcatgtgccctcagacacctagtttatccccagaatattcccataaagcagggttacaggctgcaattacaagccttcgtcaaagtgccgaatggagcgaagggtgtccctgcccgctttgtctctgtcagaccagcgaccgcggcggaggcctcgagcgaagggtggcgtctttgccttcgccccaacatttgccctccgagggaccagttcgacagagtcacctggtgccgaagacgtcgctag

SEQ ID NO: 13995 - DNA, 615 bp, Zea mays
  Peptide Sequence Number=SeqID_57370
atgtcctatcgctcgaaaacttttctgccagaacgactttcgtgccgtttcgactgcttcgatagcagaaccctaaaaacgacgagagtacacgtaagcagcaaggccgaccgagccgagggactcctacgcatccgggatacggatacctcactcatcaccttccgcgaaaagttcagacatcggcagagggagcagcagcaccctcggcgtcgtttccaccctcggcggaacctggcccagcctcggacggcgacacgggcggagggatctccaccccgaaggaggacgccaacaccgcgcttgggccctcatggtcaggttctccgcaagggttccggcccgagcggacgcctcggctggccgctccgtagcctcagccagctgtcccccgaggacctcagcccggctcacggcctcggcagcatgactctggggttggtcccgctagcggacgacctggccaagctccagccgccgctgccgcacctcctcggccaggaagccacgtgctcccgggccgacgaagcctcttttcgagccgactctgcctctgtccacgccgacactcctgcctccggcttcagctcatcgcagagcggccgaaggttctaa

SEQ ID NO: 13996 - DNA, 657 bp, Zea mays
  Peptide Sequence Number=SeqID_57371
atgcaggaggcgtgcaaccgcaccacggttatgcaccctttcggcttcatcgcatccggtggggaccagaaaaggggatacttcgaaagggattcttctccgcgaaggaagcgggccccgagccctcctactgatcaggggttcgaaggctggcacctcggaagggttcgacagcctccccagagcactcgggctccaagctcattactaatcaggggttcgaaggctggcccctcggaagggtccgacagccgccccagaacgcgcagagtgagggatgactctgggtacgtccgttacatggccgaggctcgggctacgctcccgagtcacttcgcccttccactgaccgatctgacaggaaaacagcgccgctcaccccgctccgactgctgtgccagccacccgggcgaggctgacaacaacaagttcagcctcgggcacgacaggaagctccgcctcgcccaaccttgggcctcggcctcgggaggaggtctctgcctcgcccgaccccaagactcggcctcagcctcggcctcgggaggaatcacgtcctcgcccgatcccggcctcggcctcaggagaagtctctgcctcgcccgaccttgggctcggaccgaccgcgccacaggggatacatcattaccctacccctag

SEQ ID NO: 13997 - DNA, 1464 bp, Zea mays
  Peptide Sequence Number=SeqID_57372
atgacctccgccgtcctcgccggccgggatgaggtccaccacggacacccgcaccaccgccactggggcggcgcccgcgcccccctcatgcccaagccatcctccaatcctaaccctaggcgctaccgcccgggaccaaaccctatcgtcagtggctcgccgccggcgccgcgggccggttcggctgtcgcggctgagcccttgccgtcgcccttaaggcacgtgaaattcaggccgtcggaactgacacccgccgaggcccgtcatctccgcgagcggctcaccggcgagcttggccgcgtccgcgctttcgtctcccgcatcgactcgtggcaggacgggcgtcgccggggcccggagcccgagccggagcctcccgcgcgccgctcttccccgccgccggcgctggtggaggcgatgcggaggcgatgtgcggatatcctgacgcggctgcggagatcgaagaaaagcgtgtggttcaattcccccgtcgacgtggagggcctcaagctgcacgactaccgcgccatcattcggagccccatggatctcggcaccgtcaagcaaaacctcaccgctggccggtacccctcgcacgaggcgttcgctggcgacgtccggctgaccttcaacaacgcgctgcggtacaaccctcccgaccaccacgtgcacaggtacgccggcgacctcctcgccacgtttgaggggatgtacaaggaggcggtctcgtggttcgagcagcagcgccagcagctcgagccgccaatgcagcttgatctgctgccaccaccaccaccaccgcaactcccagtttctgtgccagtgcaagcgcccctgaggatgtggggtgggaggaggcccaagcccaaggctaggcagccaaacaagagggagatggatgaggaggagaagcagaagctgagggtggagattgagaacctgcctgaggacaaggtgctgaatgtgctgcagattgtgcagaagaggaacagagatccagcattgtcgggggaggttgtggagcttgatttcgatgagctggatatcgagaccctatgggagcttgatcgatttgtggtcaattggaggaaagctctaaagaagagccagcggaattctaggatgaatggtgatgctgctgtgatgaatgcagatgccatcgatgcgacaattgttccggatgatgatgacagggtcgaggttgctgtcaatccgtctgtggtggttgaaattggagagtcggagactgacgttccagagaagaatgaagtggaggctgagatgggtgacgagtatgtggatatcggtgatgagatgctgacgatgaattaccagtcggtggagatccagagggattccctggccgccagcagctcaagcggaccaggaagtggctcgtcttcatcaactgattcggacttggaccctgaatctgatggggataatgcaagcgccccgcactag

SEQ ID NO: 13998 - DNA, 834 bp, Zea mays
  Peptide Sequence Number=SeqID_57373
atgcatcgcgtccttccaccttccgagcccccagatggggagcgcccgcgtcgttttcgtcttgtcgtcgttggaggaacacaacttcgcggaagttggtacctttcggccatcgctcggcttcaaggattttcatcaggcagcccggctgcatcccctcgccggtggtcacccaagacggtgaccaccagtttgaaggtggggagaagcaagccgggctgcgacctctgccccgccctcatcttcaaggatgttcatcatccttgctggggcggagggcgagctgagccggagctctacctcccgcacgggtcggggggccacctagggttttgtcgccccgcaggccctccaatatggggggttgagtccctcggctcggtcggccttgccgcccgaggcttctcttgcttggttaaagaaacccttggccgctctgcgatgagccggagccggaggcagcagtgtcagcatggacagaggcggagttggctcgaaaagaggcttcgtcggccggagcctggccgggctgtccactggctggaccagcgccagagttgggttgccgaggccatgagccgggctgatgtcctcgagggacagctggctgaggctacagagcggccggtcgagctgtctgctcgggccgggttcccggatgagaccctagcggcgatggcccaggcgtggtgccgacaggttccttcgagtggagatcctccgaccgtgttgccgtccgaggccgggtcggattccgccgaaggtggagtcgacgccgagggtgctgctgctcccccactaatgtctgatcctacaggaacagtttatctgtag

SEQ ID NO: 13999 - DNA, 1023 bp, Zea mays
  Peptide Sequence Number=SeqID_57374
atgcaggcggcatgcgaccgcaccaagggggcgcaccctttcggcttcgacgcgtccagcatgggggcccaggcccacacgtcatgtaaccggcgcgccagttactatgtgcgagaaactgcaccgccacttgcaccagtaccgcgccttctcgactgcggaaccggtgccgcgactcgaggcaaccccgcgcctggcccaatagtgccaaccgagcacatcggtcacggaggttcgaaggctggcccctcggaagggttcgacagccgcctcagagcactcgggctccgcgccctcctactgatcagaggttcgaaggctggcccctcggaagggttcgacagccgcctcagagcactcgggctccgcgcccactactggtcagaggttcgaaggctggcccctcggaggggttcgacagccgcctcagaccactcgggctccgcgcccactactgatcaggggttcgaaggctggcccccgaagggttcgacagccgcctcagagcatgcagagcgagggatgactctgggtacgtccgatacatggccgaggctcgtgctacgctcccgaggtaccctaggacatttccaagaccagcaggaacgattctgtaatggaatcccatcagagggaggcgtcgagccctcggaccctatcaaacgggaccgggtccggcaaatcacctgcaggaaaacagcgccgcctgcccctactccgactgctgtgccactcgacagagtgaggctgacagcagctaagtccagcctcgggcgccataggaagctccgcctcgcccgaccccagggctcaggctcaacctcgacgccggacgacagactccgcctcgcccgaccccagggctcggactcagcctcgacctcagaagacggactccgcctcgcccgacgccagggctcggactctacctcgaccttggacgacagtctccgcctcgcccgaccccagggctcggactcaacctcgacctcggacgacgatctccgcctcgcccgaccctag

SEQ ID NO: 14000 - DNA, 294 bp, Zea mays
  Peptide Sequence Number=SeqID_57375
atgcccggattcacgccctgctcgcccagatccgaccgcgactttgatttcccaatcgacgtaggagcggtgggctcgcacaaccgcaacgagctcatcatgatccgccatgacggcgatgtgcggggcccggataagcccacaaagagtgcgaatgggcaggtctgccagatttgtggtgactctataggggactacaaggacaaggatggtgtcaagggcctgtgtgtcgtgggcgccatcaacaactgtacctcccagctccccacctatgggagatcttctcccccataa

SEQ ID NO: 14001 - DNA, 132 bp, Zea mays
  Peptide Sequence Number=SeqID_57376
atggcggtggcgcccgtgcccctccggtctcgctttgggctggttcgggggcggctgcagggttccacgggtcgcgctaggtgggcgtgcggcatgcgtcaggcgtgcgggattgcggcgtgcgggcgctaa

SEQ ID NO: 14002 - DNA, 355 bp, Zea mays
  Peptide Sequence Number=SeqID_57377
atgggggcattggtcgaggccccggtacccccaatgaggacctggatggtccgccatgtcaagccgggcgccccccccccactccccccgcgcgcgcccccatggccggctcggccgctcggccgccccgcgccctgccccgcgcccctgcgcgcccagcggctcggccgccccgcccccctgctcggccggctcggccgccccctgcgctgcccgccctcgccagcccggccgcccgccgccggctcagccgccccggctcggccgcccctgcgcgccccgcctagggccggttcaaccgcccctagggccggtggcaatgagattgatggttctggttatgattatggtattg

SEQ ID NO: 14003 - DNA, 1815 bp, Zea mays
  Peptide Sequence Number=SeqID_57378
atggccacggcggcgctggcgctcctcgtcctcgcgctgccggcgtccctcgccgtgacgtctacgtacgtgcggccgccgccgagggccacgctgtcgctgctccaggacgccggcagcgacggccagacgccgcagcagcacgtttggttggattggattaccgtactaggcatctgtcgtatgggtccacacagcgtgcacgacgtgtcagcacgcgtgccggtgcacatatcactggtagggccagacaaggtgcgagtgtcgtggatcaccgcggccgacgcgccggcgactgtcgactacggcacggcctccggccagtacccattctccgcgacggggaacactacgtcctactcctacgtgctctaccactcgggcagcatccacgacgccgtcatcgggccgctgcagcccagcacaacctactactaccgctgcagcggcagcgcctcgcgggacctctccttccggacgccaccggccgtgctgcccttccgcttcgtcgtcgtcggggacctaggccagaccgggtggacggagtccaccctcaagcacgtcgccgccgccgactacgacgcgctcctcctcccgggcgacctgtcgtacgccgacttcgtgcagccccggtgggactcgtacggccgcctcgtggagccgctggcgagcgcgcggccctggatggtgacgcagggcaaccacgaggtcgagcgcctgccgctgctggagccgcggcccttcaaggcgtacaacgcgcggtggcgcatgccctacgactatgccgccgacggcacaccgccgtcggacgacaacctcttctactccttcgacgtggccggcggcgccgtgcacgtcctcatgctgggctcctacgccgactacgccgcggggagcgcgcagctccgctggctccgcgccgacctcgcggcgctccgccgccgcggcaccccgccggccttcgtgctggcgctccaacaaggtgcaccagggggagggcgacgccatgcgggacgccatggaggcgctgctgtaccacggcgcgtcgacgcggtgttcgcgggccacgtccacgcgtacgagcggttccaccgcgtctacgccggcaaggaggatccctgcggccccgtctacgtcaccatcggcgacggcggcaaccgggaggggctagccgacaagttcatcgacccacagccgtcgatctcggtgttccgggaggccagcttcggccacggccgactcgaggtggtcaacaccacgcacgcgctctggacgtggcaccgcaacgacgatgaccaacccgtggttgccgaccaaaagcgctctcgcaccgcacggctgctcgggcgtggcgcggtgacgggctgtctgctgctctggtcctccgggctccgcagttcgcacctcagctcgtccggtgaccggcggtccggctcggcctcggtgggcggcggctccaggcaactaggcgagctagcgatgtggcgaggtgccgagcagtcgaggtgcgggcgtgcgggcgcggcggccagtggcggtgctccggggcgtcgagccgtcgggtcggggcatggggccgtgggcgcctcgtgcctgggcggtggcgcagaagcgcgatgccggcgtctctggcagctggaccaggggaacaccagcctgtgcctggagaacctgctcatcatgcaggagaacgaccggctgcggaggaaggcgcagcagctggaccaggagaacaaggccctcctcgccgagctcaagcagcgcgaacaaggcacttccgcttccgcgtccaccaacctgaagcagcccaagtga

SEQ ID NO: 14004 - DNA, 693 bp, Zea mays
  Peptide Sequence Number=SeqID_57379
atgggcggcgagaagatgtccaccaccggcgctggcgatgacatcctgcctataacatttgtgcataagccagcagcgtctgcaatcgccccatacacagagggtgtctctgttactcctccggcggcattgagggcacctggacatatcgaagagcacacaaaaacagcagacgtgccggacaatattgatataagattgatacctaaagtcggtatgacatttagtaacgtggacgagacgtataatttttatagtcaatatgcatacgaggtaggatttccgttgaagaaatatagggagcggaagaattgtaaatggttgaactgttcaatggaaggaaagaatgctgaaagggtagctggaaatccaaggatacgtaacacatgttcgaaacgaacacagtgcaaggctgggatgaaacttaaaaaaatctacgatgatgctaaagagaatgttatttccgttcggattgatctggtaaactatgagcataatcatgaatttttgaagaaagatacagaaaaagggcaattgcaatgcaacaaaacacatgatcgtgaatatatggagttccttagtgcgatgcaagaaagcaggattccacaacattgcattatggattttgttacagaaatgcatggtggcccagaaaacgttccaataaccgtgcaggacatgagtaacctgtaa

SEQ ID NO: 14005 - DNA, 468 bp, Zea mays
  Peptide Sequence Number=SeqID_57380
atgtctactccagtttctcagcaggatacgcagtttacagacacacagggtaaacatggtgacggtggcaagaacatgccgaccaatacaaacgtcactcctaaagcaacaccacacatagatcctgacgcgccgatatttgatgcgactccgcaaatcaagatctgggagcagttggcgcaccggacatgtccggtgcacaccggacagtccggtgcccccttccgaccgttggcccggccacgtgtcgcgcgcagattccgcgaccgaccgttggcccggccgaccgttggctcaccggacagtccggtgaattttagccgtacgccgttggcgaattcccgagagcggccacttcgctcgaggcagcctggcgcaccggacactgtccggtgcaccaccggacagtccggtgctcccagactcagcggattcttggctgctcgagccaagacattttcaatttga

SEQ ID NO: 14006 - DNA, 699 bp, Zea mays
  Peptide Sequence Number=SeqID_57381
atgcgtgcattggaagggcagcagctgcttgaggacgaccccacagtcgtgtacctcactgcatacctgctcaccctggatgcgcagtatgatttattggctcggcaccaccgtcagatgattgcccgagcagaagatgcagagaagctcaaccgtaagctgcatgtggatctcacctcagcccaagcccgtgtagctgccttggaaagtcgtgaagccattgttgttgaagccctaaagcaagccaaggatgagcacgtccagaagttgatgaaggcctacttggtaacccataaccaacttcaactcaggagagctgaagatccccagattcttgaaggtcacccggtctctatcagaggagagaagaaggcttgggaactctcggaaggagccatagtcttggaaggaattccagtcttccctcaggctatggataagaaagagcaccccgagtcctcccaagatcctccgccagagttgtttgagccccttaccatgaagaagattctagcaccatcccttaaagtcaaggaaaaagctgcaagcaccccgccagcaacgccaccctctgaggaactacaagagccagtcccacgggaagaagagttcgaccccgtgctgccatctcagtcgctaccagaagaagtcatcaacatcagctctctcttgacccatccaggagatatatcagattga

SEQ ID NO: 14007 - DNA, 2193 bp, Zea mays
  Peptide Sequence Number=SeqID_57382
atggaagcagcagctgatgcctttccctgggcagcgcagtgcgcgggcatggccctcctcgcctcctcgctctgcgtggtggcgctggccctggtgcttctgctcctccgccgctggccgtggtgcagctgccacgtctgccgggcgtacctgacggggtcgtgggcgcgggacttcaccaacttgggcgactggtacgcgcacctcctccgcgagtcggccacgggcaccgtccacgtccacgtgctaggctgcaccgtcacggccaacccggccaacgtggagtacatgctcaagaccaacttcgacaacttccccaagggcaagaccttcgcggcgctcctcggggacctcctcggacgcggcatcttcaacgtggacggccacgcctggcgccaccagcgcaagatggccagcctggagctcggcagcgtcaccgtgcgctcctacgcgttcgggatcatcgcgcaggaggtggaggcccggctcctgccgttggtcgctagcgccgccgacgccggcgcggtggtcgacctgcaggacgtgttccgccgcttcgccttcgacaccatctgcaagatctccttcggcctcgacccgggctgcctggagccggagatgcccatgtccgagctcgccgacgcgctcgacaccgctacgcgcctcagcgccacgcgcggcgccgccgcggcgccgctgctgtggagggccaagcgcctgctcaacgtcggctcggagagggagctcagggcggctatcaaactcgtcgacgagctcgcggccgccgtcatccgggagcgccgcaagctgggcgtcgccgccagtggccacgacctcctgtcccgcttcatggcctcagccggggccgacgacgacgacaggtacctgcgcgacatcgtcgtcagcttcctcctcgcggggcgcgacaccgtgtcctccgcgctcacgacgctcttcatgctcctgtccgagaacccgggcgtggcggccgccatgcgcgccgaggccggcgacggtggcccggcgccgccgctcacctacgagcacctcaagcgcatgcactacacccacgcggtgctgtacgagaacatgcggctgttcccgccggtgcagttcgactccaagttctgcgtggggccagacgtgctccccgacggcacctacgtgccgggcggcacgcgcgcgggccttcgcgtgtgcctcggcaaggagctcgccgtcaccgagatgaaggcggtcgcggtggccgtcgtgagggcgttcgacgtccacgtcgtcggggacagtggcagcgccgcctgcaagccgaagttcgtgtcggggctcaccgcgtccatcagcggcgggctcccgccgcccgatcccgccgcccaggccctgctcctgccccggaggttggaggcgcgagggcgatggtgctcctgcagcaccagctgcttcaacagcaacggcggcagctcgaggaggaggatgaggttcggcggggtggcggcgttcccggcagcgatgggccacggccaacaggtggactacggggaggacgccggcgggctcggggacagcgacgcgggcgggtcggagcccgaaccaccgctagagcggacgcgcggggggtccggcggcggcagcaagcggagccgcgctgctgaggtgcacaacccgcactccctctgctcccagccgctagaacgcccgcccgaaatccggattctctccgccgccactgccgccgctatggacgcctccttcaccttatcctactcccaccactgccccaacctcctatccgcgctcgatctgcccagcggtgaagcggggaccacatcttcggccctgacccgtcatcccagcggtgctccacgctcggctgcaaccgtcgcgcacgcgcccgccactccccgtctctgcgccgctcccccgtctccaccgttccccgtctccccctccaagcaagcacccgctccagatctccaactcgtgtgtcgattcccagtgagcgagacccctcgcgtgtgcaactgcaggagatggacgatgaagcgttggatcaaggagatggaggaggatggccgccacggccgccacttccaggttagcactgcacctccccctcccttccttccaccagattctatatctcttgatcccgacaccagttttcttggatctattagcgagttcatcgactcatga

SEQ ID NO: 14008 - DNA, 267 bp, Zea mays
  Peptide Sequence Number=SeqID_57383
atggtgtcgagtgtgcataagaagcaacaaaataggagctacacgaagtttcacgaaaaaacactcgataaactcaccgatcaacctggaaatctgataccaattaatgtagctgaggtgcccgatctttcggcgagaggagataattccgatttggcggaagatgacccttgcgatccgactacgacgagcaagcccgaggcgccaatgcaatcgctgaaccaactccctgtggttaccgaccttgctgatgcaagatcggcctga

SEQ ID NO: 14009 - DNA, 396 bp, Zea mays
  Peptide Sequence Number=SeqID_57384
atgcccttccaccttccgagcccccagatggggtgcacctgtgttgccttcttcttgctgctgttggaggagcgcgacctcgtgggggttggcgctctccagtcaccgctcggcttcaaggattttcatcacgcagccggctgcagtcccccgtcggcggtcacccaggatgatgaccgcaggcctcgtggtggggaagagcgagccgggccgtggcctcccccctaccctcagcttcaagggcgttcatcatccgtgctggggaggagggtgcgccgaatcggggcctacctccgcgtgggcatcggcccgctccttcccttagtgatcgggggagaagggcgtccgccgtccgtggtgctggcagttgccgcgtgtcttggctccccggcctga

SEQ ID NO: 14010 - DNA, 1620 bp, Zea mays
  Peptide Sequence Number=SeqID_57385
atggaccgaaggtccatgacacctggtatcagctccaggttatcctcaccaccaccagccgcccatccctcaccaccaccagtcgccgcgccatcagccaccgcaacgccctcccacccgccctctccaactccagatgcattcactcggctcaaagagagttttggccgtctcgcagagaagtgggatcagttcgttgtgatgttccaccgctacaaggaaagacagagaaggaactccaagcagcggtgcagcttcaggcggcagcgcgagggttcctggcacgccgccagctctcaagcgcctagggctgctaccctagaaccaagcctgcagcagaggggtataacctcgccagagaagacagctatccccatggaccgaaggtccatgacacctggtatcagctccaggttatcctcaccaccaccagccgcccatccctcaccaccaccagtcgccgcgccatcagccaccgcaacgctctcccacccgccctctccaactctagatgcattcactcgactcgaagagagttttggtcgtctcgcagagaagtgggatcagttcgttgtgatgttccaccgctacaaggagaagacagagaaggaactccaagcagcggtgcggcttcaggcggcagcgcgagggttcctggcacgccgccaggtacagtcccttcgtggggagaagcaccttgctgtggcctccagggccaccccacggccgtcatcacatgagcaggccatggtgcgcctgcaagccgcagtgcgcggcttccatgttaggcgggcggtgcggaagctgcacttgctgatcagctcatcgctgcaccaactcgcagcctgcgcgtccaaccaccaggtctcgtctatactttttgaaccccctgcagaagtcgagatctgggtatgcagcccccctgcacggccaaagagggtcgtctccctcattcgggcaactgccttggtgctggacagacccaagggttggttcctccttcacctttcatccaacgtgaagtccgcagttcagctctttccttgggatccaggaggacaggaggacatagctgcagttcaaatttatattttagttccacaattattttgtattttcgtcttaaataataaaggtaagccgagatgtaaaaggcttaaccttaagtcgtgtcaggtagccaggaatttggggaagactttgcgtgctttccaaccaaccattagagagctacaggatgtatcaagggagttcaggagcactcttgaacgagaaatcggaattgatgaggtttcccaatcaacgaactataggcccacaaccatgaataacaaccaacaacctgctgccgacccaaatgtcaagcctgaaccagcaccttatactagcgaggaactaatgaaagtaactgaagaacaaattgctgcatcagctgctgctgcttggaatccacaacagcctgccacgtcgcaacagcaagaagaagcgcccactactccaagaagtgaggacgctcctacatcaggaggaagcgatggtcctgctgctccagctcgtgctgtgagtgactctgatccaaaccaagtgaataagtcacagaaggcggaaggagagagatga

SEQ ID NO: 14011 - DNA, 87 bp, Zea mays
  Peptide Sequence Number=SeqID_57386
atggcgggtggaattgagctcgccggagctaaggagaggtggctggccggtgaggagcgtgttcaagggaatttggcacaactttga

SEQ ID NO: 14012 - DNA, 282 bp, Zea mays
  Peptide Sequence Number=SeqID_57387
atggaggcactcccgaataatgaccaacaaccctttgaggacctcgtaatgtgcgatgagaagggggtcatgcggcaatggaacgaacaacgcgacaaggaggaggcggaactgctgcataaactcttcgaacggcgcaaagaggcggcggaaaagtacctgtacacttcacggtttgaatattctttggccaccagagagcctgaaagatgtagagcaggaggtggtggcattaatatgacacctagcacacatctaggacatcactgggaggaaagctga

SEQ ID NO: 14013 - DNA, 618 bp, Zea mays
  Peptide Sequence Number=SeqID_57388
atgggccgatttttagcagatctagacacccttgttcccagcggagtcgccaaaaactgtgttggcaccgatccggtcgccaaacacgggaacagaccgcctggcgaggctctttgtggaggcgcggatgcggcgcctcctcctttgcacaatttcggacggtccgcgcctggggctggacggtccgcgatagcgcagagggtcttctccacgaagaaccctagaactcgcctcgggactgatctcgtcgagggggagagttttaaggggttgctccaggaaaacaacactattcaccctattccgactactgtgccaaccaccagggtaaagctaacgacagtatgtcacgaccttccccatgttcagcctcgggcgcaacagggagctccacctcgcccgacctcagtcctcggcctcagcctaggcctcaggagaaggtctccgcctcgcccgacctcaggcctcggcctctgtctcggcctcaggagaaggtctccgccttgcccgacctcgggcctcggcctcagcctcggcctcaggagaagtctccacctcgcccgacctcggcctcggaccgactacgccataggagatacatcattaccctacccctag

SEQ ID NO: 14014 - DNA, 1732 bp, Zea mays
  Peptide Sequence Number=SeqID_57389
cactcaggtcaggatggtgcgcacgaagaatgtgtcagcaccagggggaggagacgacgaggaccctccttgccccttcaggcaggtcaagggcaagacattttacctcaagcagcagaaatgccgcaagaagcggcccggtgtggattccgaggtgcatctctcctatctgccgggacttctttctctactgactacgagtggaagatacattgaggagtgggtccaagtattttatgcttcaatgtggatcgactcggaccatcagtggacgaggttccgttttgagcgagaggatgtcactttacatgtcagccagattcgccagctgtttggatttccagagtcatcgactcaccttcacagtctgtgctatggtacatcagatcctcctcgacgccctcacggcggagtcgctcctgccactgctcacgtcgcggccctgttcataccgcttttcccagatgggtcgcaacgctctccagcagacttcacccctgtagcaaagtatctctatcagctgtcgtatgtgcactacctctactacatcttcgcgcagctgatcaggtcgcctcagttccagggcaccctcgaggcctcacgcctccagtttggatcatatcgtccagcccctgaggacccagtgccagtaccagattcgcccgtccccagccacctcggccgcgcccgttccttgctcgccaagccctccactgcttgtcaacctccattcctgcgcatgaacaaaagctccaaggctgaggatgaggcattctgccagttcgagacccagggcacagctgttgctgctgctgatgatgatgatgatgatgacgacgacgactttgggatcccgccaccaccccatgtgcctcctcgctcacatgatcacgaggcagggagttccagtgctgcccctcctgccattgaccctgctctggctacgatactccagtcccttacacagcagcaggctcatctggcagccgagcaggctcgacaggcaaaggtccagcagcagatgtctgagcggatgctatctatgtttcagacgattcaggaccatcaggacactctgcagcagcgacttttagcagacagggctgagcatcaggctttcatgactcacattcttcagcatacggtgttcagctcccacctgttcagtctgcccctcctccagctcttcaggcagcggttgtgccagcgattcaggcgggacccccactaccttcttttggtccttctccctctcctcttcggctggccactctggatttctcgtcgccgatcatcggatccatcagtgcttagccaccagtgccaccaccgcctgctgttaccactgctgctatcgcgcggagccgtggcagaggttgtacgacggcgaggaatcggtggagccacggggcacaatcccatccagggcagccatgaacagcaccctagcaaccacacgaagccccatggcccgaggactagctccgacagcgcgcacaactggatcgaccgtgtcgtcactccctcccatggcccgaggactagctacaacagcgcgcacagctcgaagttcatggcgtggcgcggacgcaagttagttggattagggcgagaaatccgcaccggcgacctccccaggcgaattttgcggcatcggttcaaacaaccagaggatggggataaccctgacgggctgaccccaccaggcggtgaccccaggaggcgaagctag

SEQ ID NO: 14015 - DNA, 408 bp, Zea mays
  Peptide Sequence Number=SeqID_57390
atgggagagcaggagattcgaactgttgattgggaatctaaccgagctgctcacctgcagattggaattggatcgatggatggaccgcggacgcccgcacgccgattggatctcctcctccttgggcggctgctaactgggttgggatgggacaggagccttcctcgccacagccgccgtgccgtgctgctcctcttctccgagacgctgggaaccccgattggagacgtctggaagacgagaggcggagagccactgttcgagtcggtgtcggggctggtgtcgaacgaatacaggaaggaggcgcatgctcctacgccctctgctgagaatggggtggcgcggaggtggatgcatgagggtagagagaaaaagaaattgaatggcgaacaaggtggtggcaactga

SEQ ID NO: 14016 - DNA, 1467 bp, Zea mays
  Peptide Sequence Number=SeqID_57391
atgtgcacaccatcgttttcgccgtcgtcggacgtcccgttcgtcctcccggccttcgccatggctgggaagacactcacattctctcgtccttctcggataacgcctggtgcggctagtgacctgacacttttgcccctcttaaccacttttgcccctcttaaccaaaagagccggcatctcaaaaccgacggcgctctcttctctatcctctgtgtcccctccaccaaaaccgacggtgacgtcgctctcctccaccggtgctcggcgctctccctccaccagcggcggtccaccgacgctcggcgagctccaccggtgggcgctggtcagatccgctcggcagtcatcaacctggcacatcgggtagctcgcgcctccgttggcagtcccaccgccgcccggccctcccccagcgcccccggtgatccggatcgcactcgcttgctcggtctaacgaccggctcctgccccgccgcagccgaagctcccagcgtcctcctgcaggccgagctgaaggttcagcgcgccggtggagttcgacgacgaaactccgtcacgtcatacctctccgcctctcgtcttccagacgtctccaatcggggttcccagcgtctcggagaagaggagcagcacggcacggcggctgtggcgaggaaggctcctgtcccatcccaacccagggaaattcacggcctgctgctacagagcatggccgctgagcacactgtggcgaggtctgctctggtcacctctggcgatcctcctccctcgcccatcgcctccgccgatcaattcccttcgctggcactcagagatcggcgtcctcctcccgtcttcccacgcttgcggaggcacttcctgaaagttggaacgacatatcagaaatgggttcagttgcaggctctggaccgttccttcctttttccaggcgagcaggttcctatactggcgtgcctgtcagcttctaagcaagatctacaggttatatccccctttagaattgctgcagtaatgtctaagaatggaacttctatgcaaaactttacaaataaatctagccctgtcagtgcaaatggtcatgataatggagcagctggagaaagtggctatcaggatgttgaactcaatggtgaagcatctccttcaggacatgatattttggagactcaatctctccttcagatggaggatcataagcagcagatcgaacatgtgttgcgaagatttagagaatcaaatttttttgtccggattgcggaatcagtggaacctctatggtccaagaaaagtgtaacttcaactacgatggcagatgaacgatcagataaccagggaaatagtaagagctcaaggagtaatgtttataataccatttctgataaaggggtttttgatggtaacacatctgggggagttgctcgagatgttgtcaagtgttattctctgcaaaatggagacatagtg

SEQ ID NO: 14017 - DNA, 177 bp, Zea mays
  Peptide Sequence Number=SeqID_57392
atggagaagtgcaaaccaatcaaggcacccatgcctatcaatggacatctcgacctagatgagagaggcccgatatcatgtttagtgtctgtatgtgtgctagatttcaatcaaatcctaagaaagctcatcttcgcgctgttaaaagaattcttaggtatcttaagcacaccctaa

SEQ ID NO: 14018 - DNA, 321 bp, Zea mays
  Peptide Sequence Number=SeqID_57393
atggctgcttggggcgcggcgagggctgggcaggcgcggcgcgctgggctacacgacagggagagcgcgcgcaggcggctgggcgagcggcttgcaggcggcggcgctagggtttgggatgctgtgctgtgcgcgctgtggccgccacgggaggtcgcggctgggcgggagagacggggcgccggcgctgggtgggtcgcgcggccgcgcgcgggggtgggccggggggtggtggctgggccacggccaggggagcgggctagctgggctggcgtggcgcgctggtgggccgcgaagagctggccgcggaaggctgggtag

SEQ ID NO: 14019 - DNA, 366 bp, Zea mays
  Peptide Sequence Number=SeqID_57394
atgaactactacccggtgtccaagtgccacttcgacctcagtgacacggtgttcggcaggctggccaagcccggcctcaacgacaagctccgcccctctggcatcatcgacatcgagttcactaggattcatcgtcgacattgggggttcgagtctagtttggttgcgcggaggcatgttatatggcgacctccagatttatgttgccgatgtgactgtgatccatttccgaacctcaaggaattgaagatcgagcatggtgaccaagtgatccggttcttcgagttctacgagattgaagaccctgagcatctgtttggtgaaggcaagtgttctctgacccattatgtcccatttactttataa

SEQ ID NO: 14020 - DNA, 387 bp, Zea mays
  Peptide Sequence Number=SeqID_57395
atgaggatcgggcttaagatgatgaaaatgaagatcaacaagatgagccacctcaagaggaggacaatgatcaagggggagatgaagagaatgaagataaggaagatgatcaagaaatacagggtcaaagaccgccacacccaagagtccaccaagcaattcaatgagatcaccccgtcaactccatccttggtgacattcataaggggggttggcaggcaaatcgtgaatgtcccatcatttatggtgagagtggagtttgagaagcacatcgacttctcactctcaagcccgttcggtggaggccctccaggcagggtgaagaggaagaaccagaagaaggcaagtggcggcgggggtggcgatggtgacgaggacgaggaatga

SEQ ID NO: 14021 - DNA, 297 bp, Zea mays
  Peptide Sequence Number=SeqID_57396
atgcagagcatcattgatcaccttcaaagacttcatagctttcttgaccgccctactctccaaatcctacagcttgaattcagtaccagcacctgtcacccaccgacttctatggggggagcagcatcacaagctctgccagcaatattcctggaaggcctagtatccgtcggagttgctccccccatagaagtcaagctctttattgaattcagagcactgttcatagtcatcagaaatatcgcgctgaagatcacgattcaccccgccggcgataagaacgccaccgcggcgtga

SEQ ID NO: 14022 - DNA, 327 bp, Zea mays
  Peptide Sequence Number=SeqID_57397
atgtcctgcttcaaagtgcagcttctaaagactcagatcattgtctgcttggggatcggttccaacttcagattgtccttttcaaaccttggatttgaagctaaaggcaactgccaggggtctccatgcttggagtgccaagcagcccctagtttggcacaggtgcttaggcaagcagaggaggagtgtgatttatgggtggctgctggagacaagggtatctccctactgttggcagccactcaggtgctaaatggggtggagtaccgggtgaagcaagtgcaagaaatgcaattgaattgtgataaagctggttacaattgttaa

SEQ ID NO: 14023 - DNA, 426 bp, Zea mays
  Peptide Sequence Number=SeqID_57398
atggaccttgacgcgactgcagaggaggaggagcgccgatttgaggaccacaatgaggcagaggatgctaggttcttcattggtttcgatgacacccatggagattctattgagatcgatattgtcgtcggctccggaataggtactggcacaggctctatgagcccaccagattcagtccctaatcctgatgccggtggtagcaattcaaactcgaactcgaagaaaaggtctaaggactggaatgactttgatgtattgactaagattgtgattgtggttaaagctggtctggatcctattagaacttatcttgatgattttagaaccgctatatcatttttaaatgcttccaaccaacatatagctgcatgcaaaaggtattgtatgagtatatttggtgcaatagcttgtaatctggtgtaa

SEQ ID NO: 14024 - DNA, 1815 bp, Zea mays
  Peptide Sequence Number=SeqID_57399
atgctcccctcgtccggcagcggctggggccgcggccgcggccgccacctattgctcagcagggccctagctctcgctgcactgctcgcgctcgcctccgcctccgagtccgaccacaagtacaaaactgaagagccagttaagctttgggtgaataaagttggcccttacaataatcctcaagaaacctacaactattacagccttccattttgtcaaccgtctgagaaccccacacataaatggggtggtcttggagaggtccttggtggaaatgagctgattgatagtcagcttgaaataaagttcttaaaaaacgtggagaagggcttcatttgtacacttgagcttgatgctaaaaaggtccagcagtttgctgatgccattgaaagctcatattggttcgaattttttataggttttgttggggagtctgacaagaacagtgaaaacaagcattacctttacacacacaagaacatccttgttaaatacaatgataacaggataattcatgtaaatctcacccaagagtctcctaagcttcttgaagatggcaagaaactggaaatgacatattcagtgaagtgggtagcaacagatgtgtcatttgcacgccgttttgaagtgtacctggactatcctttctttgaacaccagattcactggttctccattttcaactctttcatgatggttattttcctaactggtttggtttcgatgatattgatgcggactttgagaaatgattatgccaagtatgctcgtgaagatgatgatctagagtccctggagagagatgttaatgaggaatcaggatggaagcttgtccatggtgacgtatttcggcctccccgaagtttgatgtttctttctgcacttgttggtatcggcacccaattggcagctcttatcctacttgtgattgttttggccattgttggcatgctatacattgggatcttaataaccaagttcccggatcgaggaatgggaacatggcgaggggctatcatcacaaccttcattgtgtgctatgctcttacatcgtttatttctggatatgttagtggtggtctttactcaaggagcggtggcaaaaactggattaaagcgatggttcttacagcatccctctttccgttcttgtgtttttcaattggtttcgcactgaatacaattgctattttctaccgctcattagcagcaataccatttggcacaatggttgtcatgtttgtactttgggctttcatatcttttccgttggtgcttttgggaactgttgttggtagaaactggagtggtgctcctaacaacccctgccgagtaaagactattccacggcctattcctgagaagaagtggtaccttacaccttctgtcatctcattgatgggtggcctgcttccctttggcagtatcttcattgagatgtacttcgtgttcacatcattctggaactataaggtgtattatgtctatggtttcatgttgctggtcttcgtcatccttctaatagtcaccatctgcgtcaccattgtgggtacttatttcttgctgaacgccgagaactatcactggcaatggacgtcgttttcctctgcagcgtcaaccgctttgtatgtgtatctgtactccatctactactaccatgtgaagacaaagatgtcaggcttcttccagacaagtttctactttggttacacactgatgttctgccttggtctaggcatactttgtggtgctattgggtatctagggtcaaccctttttgtaaggagaatctacagaaatatcaaatgtgattaa

SEQ ID NO: 14025 - DNA, 699 bp, Zea mays
  Peptide Sequence Number=SeqID_57400
atggcgaggcactccgtccccacacacatcaaccatccccatcgattccctggcaacagaaaggggctcaccgccttggcgtacaatgcctcactgaccccgactgccgtcgtgcagctctggtgctggatctggggctacctcctgagcagctccttgctccggcacgaggacgtactctccgtcagcaagggagactctggcggtcacagcgaggtgcggcttgacggcggggatggccggaatcgcccggtccacgagcgcaggcgggtgttctcgtcggcggcgagtgtaccggccaaaccacggcgatctggttcaatccaagggcacggtgagcttcacgggagggttggatggggctggggcaagctggactggccggtctacggcggcagtggctcgggtggccgcggacacgtcgcgcgcgggcaaacggcggtgaactggactccggtgaggctcgagcgtgctcggaagagtgtaaccgacgcctgggagggctttataggcgcgggcgcgggacagggcgtcggctggccgctggcgcgacgcggggcgcgcgcgggcgtgctctggcaagctcagggcgcgtcaaacacgtggagcttacaatctgcccgtgttccacagctcacccaagtcgcaaacgtgcgaatcttggcaaaaatccggcgtgggtctactcctggcacctag

SEQ ID NO: 14026 - DNA, 149 bp, Zea mays
  Peptide Sequence Number=SeqID_57401
ctagtgcttttggcaaaccaaacccctcagctaaacagctgcatggtctcgaggatatggttgatggtgtgacttggcctaccaccctgccaccgggttggacggtcgagtgggatgctgctccgacaggagaggagcacgaggagtag

SEQ ID NO: 14027 - DNA, 132 bp, Zea mays
  Peptide Sequence Number=SeqID_57402
atggatgagtacatccgggctaacaacgacttccgccaaagaagggaggaagcttacagattctcggaaatgactaggggcttcggaatttatgaagctcaaaaattgccgaagctcaaaagtcgttcctaa

SEQ ID NO: 14028 - DNA, 372 bp, Zea mays
  Peptide Sequence Number=SeqID_57403
atgccgtctacgctgacatgctggggccactggccaatccctaagcgagtgcgccgacaacctgggcccgcttgcaagcctgccaccgctgcatgtgctcattgcgtctcgcatacaggtggggcccccacatcatccctaacagaccgcccgcaccggctgggatcgttgctcgtgggcgcggcaacctccgcaacggcctcatcccgggtccgtggccttgaccggggtataaggagctacacaccgcacttccctgccctatcccatcatcctctcctaatgccgtgcaagttgttcgccatcactggacgcgtctcgcggatccgccggtcatcggtgctggagcatctgcgcgcctatctctggtga

SEQ ID NO: 14029 - DNA, 150 bp, Zea mays
  Peptide Sequence Number=SeqID_57404
atggcgaggtgtatggggtctgatcaactccgtggaaaatgggtaacacgatttatgggtaaagatgtgcaacctctgcagagtgtaaaactgctcaagggaggcacatacaaggatgctgagccacgacatgtgggcccaggagcataa

SEQ ID NO: 14030 - DNA, 1266 bp, Zea mays
  Peptide Sequence Number=SeqID_57405
atgccgaccctcgacgagagcgacatggcggttcgccagaccggtggccgggacccccaccacgggatccagatttttgatgcaccggctggaggcccccaaccagccggcgtggctcctagtgcccccgtcgtggctcccagtgcccccgccgcggccccccaccccttggacgagggcaaaggggctgcaagcagttccttcgcccaaggtggcactggggggtcggaggaagagaggcgacgccggctgcgccgcaccgacgggtcatttgtttcggaccccccagaagcgtcagaggactgctggggcaccagcggcagcagcaacaacaatagcaacaacagcagtagcagcaacagcaacggcagcaacagcaggggacgtcccgcttctagggtcactggaaggtctagggccccaaggcttcctcccccatctgctcccaaggtcgcgcctccttcgctggatagcatgcccgccggcgggtctggctctcagcaggaagcatctgctgggagtggcaccggcgaaccgccaacagctaccgcagcctcaacgatggcgatgccgtcgagtacaccgtcggtagcagcagaggaggtcccagctacgcccacccccgccatggagggtgatgcggggggcgcgtccagctctatcccgccgcccactccgaaggagacggaggtggtttttgggcggcggctccagtccggcgccgagccagaggcagctccagttcccctcctccaggtgctgtctcgtgcccatcaggctcttcacgagaccgaggcggcgatccaacaggaatgggaggcgctagaatctgagcaccagcgcctcagcgactggcgcacccagctggaggagcgcaccaaggcggcgtcccaccagtttgcctttgagcggtccgaacttgcacgggaccgcaaagactacaaaaaggacctccagaaggtgtatgccctggagctggaggtgagccgcaaggagaagatgttggccaagagggaggaggccttgaaccagagggaggctcttatgacagagctccgggccaagctgaaagccttggaccagaccctagaggcccagcgaacccagcaggtggaggccatagagaagataaaaaaatgggagcaggagctggaggacaaggccagcgacatcgccctcgccgaggagaacctcaaggcgaaggatgcgtccctggacaggcgggtgacggatctcgccaggcgagaggcagacctcgccttctag

SEQ ID NO: 14031 - DNA, 162 bp, Zea mays
  Peptide Sequence Number=SeqID_57406
atgcaggaggcgtgcaaccgcaccacggttgttcaccctttcggcttcatcgcatccggtggggaccgggaaaggggatacctcaaaagggatccttctccgcgaaggaagcgggccccaagccctcctactgatcaggggttcgaaggctggcccctctaa

SEQ ID NO: 14032 - DNA, 852 bp, Zea mays
  Peptide Sequence Number=SeqID_57407
atgatgaccaccagctttgtggtggggagaagcaagctgggctgcggcctctgccccgccctcagcttcaaggatgttcatcatccaggctggggaggggggcgcaccgagtcggggttctacctcccgcatgggccggcaggccgcctcttccttcagctttcaggggatagggcgctcaccggccttgcggagggggcgaacttcgacaacgcgggaccggtcagctgcaagcatcgtcagctccagcgtgcctggctcgctggctcagctggctctgtcgcggcctccgacgctgcctcctgccgcttgatccgggcgtggccgtccgtccaccacacgggcgactgttgcgccgtgcgcaccagaggatcgtccaagacgtcgtacgccgcatgggcggcgttcgtgttcttggattgtcttgtcctcactccggcacgacgccttcgcgcggaggtggtcgctgtcgtcggtgctgaggtggtggtcgccagaggaggtttctccgccgacgagaccgttggcgccacccgcgggcagacctccggctctttgtctttgatggcttgtcctcgcccctcgagtggggacccacccaaggcggaggtcgttgtcgctgctgatggagcggtcgccggcaagctacccagagttttgttatcccgcaggccctctggtgtagagaaccttcggccgctctgcgatgagctgaagccggaggcagcggtgtcggcgtggatagaggcggagtcggctcgaaaagaggcttcgtcggcccgagggcacgtggcttccctggccgaagaggtgcggcagcggcggctggagcttggccaggtcgtccgctag

SEQ ID NO: 14033 - DNA, 114 bp, Zea mays
  Peptide Sequence Number=SeqID_57408
atggcggcacccagggttcttataccaagactgagtccgattcttggggagaatcgtttaacggagcgcgcagacgagttttgcagcatggttcctacgggtgttcacatgtga

SEQ ID NO: 14034 - DNA, 411 bp, Zea mays
  Peptide Sequence Number=SeqID_57409
atgaaaattgctccaagagcacgacaagtatatccttgcccatcaagtagactaggtttatttctcgacatatcaatgcaaaaatacttgttttcatggtgggttgtgtacaatgcgaacccccgtgaatgtctctacactcctggtgaggatgaatatcgatttgtgtaccttgagcaggttgatgaggatgtcgtcaaagtcgaagaagtcagtgaaggtgttgttcaagagcctgtttcagggcacttcttcgagcagcagcagacgtcgagagctattgagcgctgcacatggagacagggagcgttattttacagcgggttggtgtattacccgagtccagactccagagcattgagtgacagtcaccttctcctttgctctgctctatcggcgcagtctggttga

SEQ ID NO: 14035 - DNA, 819 bp, Zea mays
  Peptide Sequence Number=SeqID_57410
atgggacagaggacacttgccttcaccaaactgctgatcagggacttcctctgcaacttcctcgggaaacacagactgctcgttgtctacgtaaagcgaaggggtatcaggctcctacggccgtcggatctcaagcgaacggccaggattagatcctgcgggcgggcgcgcgagcgcgcggcggcctgggcgactgacaggcgggaccgggcgggcagcgcggggcgcgggcaggctgacaggcggggcccaactggcagggagacgggggccgcccgatctgggatgaacggcggggatcggggtgacctgagtggccgggaaggttggggagggcacggggagtcctctggtggggtctgggtcggggcagaggcaccggaggggggcggttcacggcggagcggctcggcggcgggattactctactccggcgaggaattacacgcggcagagagcaaaacaaaggtcgataggggcgggagaggtcccttacctcaaggcgggctccggggactcctcggcggcggcaatggcgcgacggtggtccgaggcgacgacgtcggggcggagctcaccggggcaaagggcacggtggagctccaacggcgacggggaaccgagctcgggatggcgggggttatggcggcggcgctctgcgtgcgcgcagcgaggggggaagagggtctactggagcgcaaatgggggagggggagagggcgagtggggctcggggctcaagtggccaggggcgggtcagttgcgagctccacgcgcgacgtgggcgcggggaaggcgggcgcgcgcagctcggcggcg

SEQ ID NO: 14036 - DNA, 249 bp, Zea mays
  Peptide Sequence Number=SeqID_57411
atggccctgctctccacagtggaaacatgctctgcttccaccctgaactggtgctgcttgactgctctggtggttcgctggggtaggaagacgagtcggggttgccataagactggtgtccacgccgaggtgagcggtacgggtgctgagtcccgacgggagcggggagccatcatccaagtgacgacgctccgcgcgctcagcccgcagctgggcgatctcagcgcgagccctactcagctcgtctag

SEQ ID NO: 14037 - DNA, 252 bp, Zea mays
  Peptide Sequence Number=SeqID_57412
atgcctcatcttctcgctccctctctggttccctctgcccatgctcaccagagcttccctcgcgcagccagaaagccaccgtcgttgaccaaagaccttaccgtgtccctgctgccattcaagggtcccggagtcttctctcgagacaacgagcagcccgtggttcctgagtgtgttgccgaagatcttcctgagcaacaacctggtgaaggcaagtgtcctctgacctattatgtcctacatactttatga

SEQ ID NO: 14038 - DNA, 852 bp, Zea mays
  Peptide Sequence Number=SeqID_57413
atggatgtggcatctgtgatgtacattgcctacatattgaggaaccaaaatattgaagtctcaccatctggcaatccacctccaaaaccatgggaacgtgcaggaaattcatctggcccagtgccttttaagccgccctctggtggtagcaccagtgatgttgttgaagcttctgggacagcaaaacatggagaagttgtttctgctgctggaaacaatgttgcctccaatgtaaacagcacaatttcaatgcctgtgcccccaaggccttggcagcagcaaggctatgaaaactcttatgggggttatggctccaatatgtatagctcttacggcggatatagtggaccctatggaaataacatgtactcaggttatggaggaggttatggcggtatgtatggaggttctggaatgtatggtggaccaatgtatagcggtggaatgggaggaccctatggtggttatggtatgggcatgagtccctataatcagggaccgaattcatttgggccacctaccccaccccctggtttctgggtgtccttcctacgagtgatgcatggtgttgtgaatttctgtgggagggttagcttccttgttagccagaacactcaggcatttcacatgttcattactgcacttttgcagttatgtgatcgggctggaatgctttatggtgagcttgcaagatttgttctacgtttgctggggatcaaaagaaaaccaaagaagagcggtgttaagggcccaggagctccatcatcggagggacgaggccagcagcttgttgaggcgccgaaagttaactcgtgggacagcgtgtggactgagaatggcaagggaaattaa

SEQ ID NO: 14039 - DNA, 174 bp, Zea mays
  Peptide Sequence Number=SeqID_57414
atgaatcagcttgattcgttcttgatcagagatactttggtacaggtggttatgagaaaaaggagattcggttatgactatggtgctggttgtcagcattgcaaccactgctcaggcgaagatgaagctgtggaaggagacttccaggagttccaagactacgacgagttctag

SEQ ID NO: 14040 - DNA, 423 bp, Zea mays
  Peptide Sequence Number=SeqID_57415
atggtgacgatgagtaccgagtctagcgacgctccggtcatcttcctgtgggagattgctcatgttatttctgttgatgtgctgcatgctctgggaacctacgttcgacctctatatgacacaaggcgggtgtctgagccccctcgtgcttgttactatatcattcacatgcatatcagagtgttggatgcaggagataggcgtttcaggactctatcatctcatgagtctttgacgtcgctatccacctacgctgcttcggtcagcaatgctgcttggagagctctgtggtccctaagccacacctacggctgtagctgcacgacacgacgtacaggcaccttcccctacgtccccgtggagaaagccagacaagtgttgttccaggtgaagctggagaagatcgccttaccacccttgtag

SEQ ID NO: 14041 - DNA, 95 bp, Zea mays
  Peptide Sequence Number=SeqID_57416
atggcgatcggtgatgtgcgaccacaggaacaacaggagcaagatcagccatcttcctccacaatggtgcttcctttgactcagacggtgaatag

SEQ ID NO: 14042 - DNA, 915 bp, Zea mays
  Peptide Sequence Number=SeqID_57417
atgtcgcgtgcgttcgacgactactatatcgaggattgtggcgtcatcttggcgccggaggtgacacagaggaggatcgacaacagtgaccagttcgtcatcctcgccaccgtcagggacctctctgcgaaagcgggagggcctgacagcctgggggccgactctaaagagcaggagcccgttccgtggggtggtctggagcctgtgtggccgcttagcctggtcccgtacctgaaagcctgcacactccaccactccgtgatgggtaccctagtatttggagctataagtcctgttggtctggcaacctggggtccagaactagagaatggacacttgtctcctagggaggtccggagccgtgtagccgctcagcctggttccgtaccgtgggcctgcacgctccaccactctgcgacgggtggcgggtcctacgggtatgctggtctgcagcctcaacaaatcgagcctacatcccagggggccaagtataaactaccagacgccagtggagtcgagttggaagttcgcggccgctgtccttgcggaatcctccaagatagcgtgacagcggtgatggccgcctcaatgcgcgtgccattgcgaagaggtcctcgcccccgttctcctacggggggcaacaacgaggccattaaagccaaagagttggaggctcggccgcaggtggcgctggtagtctcgccagcggaggcaaccatgtctgcaccgggcagcctcaccagcggcagcgaccacctctgcaacgggcagcccccgccagcggaggcgaccacctctgcaacggacagccaccgccagcggaggcgaccacctctgcaccggtggcttaccggcgacggtggatgcctcagcgcgtgcagaaaggtcctcgcccccgacctcctgtgggggtga

SEQ ID NO: 14043 - DNA, 699 bp, Zea mays
  Peptide Sequence Number=SeqID_57418
atggccgccgcggacccgccgccgcgcggggaggccgcgcccgcgctgaagcggagcgccagcatcgaccggataccggcggacgcgcgccgcatcctgcaccgcctcgccggggacctctggggcggcgacgtggaccccggcgcgctggccgtgtcccagctcaggggcgccatgaccaacgaggtcttccggatcacctggcccggcggcgaggccgagggcaacggcccgcgcaaggtgctcgtgcgcatctacggccggggcgtcgaggtcttcttcgaccgcgccgacgaggtccgcaccttcgagtgcatgtcgcgccacggccaggggccccgcctcctgggccgcttcgccaacggccgcgtcgaggagttcatcaacgccagggactatgaatatgcgagttttaacccagtcgcattcgacattgctaatcacttctacactggggagcagagaagattcgttgaggcataccttagctctgcaggtaaaaagccaacggatggggaagttgaagaactgctagggttgatagcaaagtacactcttgcgagccatctcttctggggcctgtggggaataatctcggcgcacgtgaacgaaaatatcgacttcgcgtacaaggagtatgcaaggcagcgcttggatcagtactggcaaacaaaacctcgaattcttggacccaagtga

SEQ ID NO: 14044 - DNA, 138 bp, Zea mays
  Peptide Sequence Number=SeqID_57419
atgggagagtgccagacccctggatatacagtccggaccttcgaggggtgtgagacagcaagagtgagctcacaaacgttcatcgctcaacaagttgtggggaataacgtgcatgaactcgccaaaggtgggaggtaa

SEQ ID NO: 14045 - DNA, 141 bp, Zea mays
  Peptide Sequence Number=SeqID_57420
atggaggaggatatggaggtcaccgaagaggaagaaaggggagttgtggactctgatgtggagggtttcaacattgctttagcagacctagatccagttcaagaaagggtgaaaattttccacattccactacaaagttga

SEQ ID NO: 14046 - DNA, 471 bp, Zea mays
  Peptide Sequence Number=SeqID_57421
atgaagcctagatctaccgatagcacgcctctagaggtcgtgtcaccgtcatcagtgttgaccgggaaccttgactggaagagggatatccacgatgaagctgtcaataagaggcgttgcaccaccaagaagccatactttaggtcaactgtgggtgcttccttggaagttatccagaagaataaagctgagaagccagatgtctgcggtgttgaggattactcggtgaatgtcgagcatgtccttaagactaacttcaccaattaccccaaggtaaatatgtcgaactcagtgatgttcagtcttgctcgatgttgtgctaaaggggacatgtacagatcctacatggacttgctccttggtgaggacatcttcaacaccgacgacgagctttggaggaagcagaggaagacgacgattttcaagttcacctctaagaccttgaggttgtccgtaggacagaggtggtga

SEQ ID NO: 14047 - DNA, 204 bp, Zea mays
  Peptide Sequence Number=SeqID_57422
atggggtcgtttcagaagcctctgtccaagacaaaggaactcactggtgtatcagatggtgattttgtttcttatgtaaatgaatggtgcatagatggggctacgcttaactggagctggtacaggacaactccaaacattatcagagccatacacagaactctaaaccaaggctccaatgagcagcagttacctctagcatag

SEQ ID NO: 14048 - DNA, 720 bp, Zea mays
  Peptide Sequence Number=SeqID_57423
atggcggaagagcgccaacccccacggggttgcgcccccctaacagcagtaagaggaaaacaagatcaccggcaccaccacgagtgcaagctctccgacggccacgtgaagaatggcacccaaccccaccacattgggcaggtccaagggtgccacgtggcaaggaaaggcggtgcatctcagtcttcaccgttgggtccggacctccgaaggacaccggacccctatacatacaagctcagggcccccaagaaggcacgccaggtcccttgggaaggctccagtccccctctaagtaaggtccgtgcattagcaaggtcccgggacgggaaggaccctggcattaggggcaggggtccggtgctggcacgtgtccaggccttgccctgcgcttcctgctactggcgcaaggcttgtgatataagccaacgggccaagattgacgtaaagcccacgaagccgtgcagcctctacatttattgccgaaaggacgcgccgcctgccaccacgctaataggtgatgtgtcctcccagcatttaatacgtcctgtccaatccgatggcaggcggcgtcagggccatccagcaggcggcgcgcctgactggtctgttggcaaacagtgcgcctgtgccgagcagcgcactatactcatcatcccttctacaagaagcctcccctgcacactgaggatacggagatctcgggtgtcagggcactag

SEQ ID NO: 14049 - DNA, 609 bp, Zea mays
  Peptide Sequence Number=SeqID_57424
atgtcttcttcctccctcatgcgtcgtgtctttccatcttccaagcctccggatggggggtacccaccgtctttccgcctcctcgttggaggaacgcaactccgtgggagttggtacctttcagccatcgttcggcttcaaggattttcatcacgcagcccggttgcttccctccgctggtggtcacccgagacggtgaccaccagcttctgggtggggaggagcaatccgggctgcgatcttggtcccaccctcagcttcaaggatgttcatcatcctcgctggggtgggtgccgggctgagccggcgctctacctcccgcgcgggttcgcgggtcatcctctcccgcggcgttcgagggagagggcgctcactggccccgcgggcgaggccgatgccccactcgtctgggaggatttgagtggggatctgctgggggggctggtggcccccgccatcagcgccgaggcggaggcggctcgagaagtccccgtcaccgacgggatcaccgccaccatccgcgccccaggcctccggttcttcgtacttgtcctcgcccctcgagcgtcggtgtgggcgagggcaagatcgcagcagcgcccaccctga

SEQ ID NO: 14050 - DNA, 207 bp, Zea mays
  Peptide Sequence Number=SeqID_57425
atggccgggctgagcttcccaccggtcgtcctgtgcgccaacggccagcacagacacgcgtggcctgaggccacagccggccttgctacaggcaccggcgggcgagccagagatgcagccaggcctgaccaacctctgccggcccagccggagccgacctccgtcctccccaagcggtggtggcagccctgcgtacatgcagtttga

SEQ ID NO: 14051 - DNA, 573 bp, Zea mays
  Peptide Sequence Number=SeqID_57426
atggttcgtgccagatgcacgaggaacaatagacaatgtttacaggttcgggccgcttggagatgcgtaacactctacgtcctgattatcctttctgcttgtaaaaatcggcatgatgccatccgcattatgctttggaggtcagcattatgtcatcaatattatgcttcagagtactcagaggaggagttctcctctgagtctgaggggtctccggctcccatccctctgcgtgagtcgtctgacgactcagacgactcccaggggcttgcggcggaggtctggacgtacatccgggccgtcgagcgctctgggctcgagggctcggatgagtcggagtactcctcggatgaggaggactcggacggtggcggcgaggacgaggacagcgacgacgacgacgacgacgaaggcggtggcggcggtgacggtgacggcagcggcaggggcggcagcagcggcagcaaggatggtgacggcagcgacagcaggggcggcagcggcggtggcggcaacagcagggacagcaataggggcggcagcggcggcggcggcaacagggccagtggctag

SEQ ID NO: 14052 - DNA, 297 bp, Zea mays
  Peptide Sequence Number=SeqID_57427
atggtgggaccattttcttgctatgcagccagaggaccgagaggtggaatggagagagttcaaggcagctttcagggggcaccatataccagcaggcattatggaccgaaagctcaacgagtttctggcactcactcagggaaaccggacggtgttacatatgccggatatcacgcagacacggacgagaagaagagggacaagttcaggagggggctcagcactaagctccgtgaccatctcaacacagtcagggccaacagttataacgagttagtcaacatggccatctcctag

SEQ ID NO: 14053 - DNA, 432 bp, Zea mays
  Peptide Sequence Number=SeqID_57428
atgtggaaggaccgagtggagcatgccaaggacatctgggctatctacccaggtcagactgctcacttaacggtgcggtgcatgaacgccctgtatcatctgcaagtgatgcgtggagaggcaatgtcccatctgatggcattgttggaggcgacaaagatcactttggataacatggaggagcttgtggttgacttgtccactgagatggtggaaaaggacttacagatggccgggagagcgcgtcgtggtcaaaatgagcgcgttcctccaccaccgccaccgcctcctactctgcaggagctgatggctcagcataatgagatcttaagacagctagctcagcgtcagcaaccacctcagcactatggtggtggtgatcatcagcgtcaccccgcggcagccacctaccaggagttcctcagtacctag

SEQ ID NO: 14054 - DNA, 841 bp, Zea mays
  Peptide Sequence Number=SeqID_57429
gccactgcacggcggtgggttcaccggagccctcgaatccggccaattcgagcgccaaactccaattcgcccgaccctcgcgagattcgagacatcccgaacccaattcacccctcaatttcaatcgctacacaacgcagacccccggtccacggtgcttcgcgatatagggcggccgacggtgcttcggtgtgaaattccgggggcacacgccgaggtttccgcgcggcgctacttccactgccttctaacaactccagagaagggggtcggtgctaaccttgatgctccggctgtcgcagaggcccgatcccacggcgctgcggaagcggtacatgacggcgagcaattcccaatgcgccatccaggaattcgcggtaggggaaagaagcaagggtctggcgcccccccccattggttccgctcacgggtcgagccaccagcatcggcgaggacggtcatggcgcagattgacatggcgacgaagcacacccatcgaagagggcgtgcggctatggcctgggtcccagggggctgtggggtcggttttatacccaggcggtgcccggagtccgagcgggtgcgagcagcaagatccgcggaggtggttgagctcgcgcccacggagtccgcggcggcggactcacgcactgtgcgcgcgatgcgcgggctgttgcgcggaagaaggagacctgacgacgcggggcccgcgcgtcagccagtaagagcagagagcaccgctgggttccgtggcgcactggatgagaggctgccgacatggggcccacacgcggggatgctcgtcggcggcgaggagaccggcctggtcacggcgagatag

SEQ ID NO: 14055 - DNA, 288 bp, Zea mays
  Peptide Sequence Number=SeqID_57430
atggcgggcggaattgagctcgccggagctaaggagagggggttggccggtgaagataagcgcggggtgaagctagggacagggagttgtagcgtcaccaaggtgccagtgtcagaatgtctggtcccaaggttaaactgcgccaaaaccgtgtcaaatgaatttggtttgagttcaaacttttctaggacgtgttcaaggggatttggcacaactttgatatttggatctcctagctttgagtttcgaaaaacagagaacgtagttgatctttggaaagaggtctga

SEQ ID NO: 14056 - DNA, 465 bp, Zea mays
  Peptide Sequence Number=SeqID_57431
atgccggcatggttcccagtctgccggcgtggctcccagcgcccccgccagagctttccgtgcctctgccatggcctcccgccccttggacaagggcaaaggggctgcaagcagctcctccgccccagtcagcgccggggtgtcggaggaagagaggcaacgccggtcgcgccgcgccgatggatcgtttgtttggacccccccattggggccgagaaggctagctcccagaagcttcagaggactgctggtggggccgaggagaccggctcccaggcccagggcacgcagaggcgcattagtccgccgccatcgggtccgccgccaccacaaccaccaccgccatcggtcccgccaccgccaacagcacctggtgatgatctcccccaggggcaccaccaccagcagcaacaacaacagcagcaacagcaaaagcagcggtcgcccaacttccagggtcgctag

SEQ ID NO: 14057 - DNA, 357 bp, Zea mays
  Peptide Sequence Number=SeqID_57432
atggccgaagctctggcggcaatggcgggcggaattgagctcgctggagctaaggagagggggctggccggtgaagatgagcgcggggtgaagacgtgttcaaggggatttggcacaactttgatatttggatctcctagctttgagtttcgaaaaacagagaacgcagttgatctttggaaagagctcaaggggggcacgtacaaggatactgagccccaacatgtgggcccaggggcaaaatggagggaatacactatagaagtatctcatgccagcaacgcctgggcaatctccaggcaccgtaatgtccatagcccatacaatattgatatgtcacggctgcttccttggtaa

SEQ ID NO: 14058 - DNA, 876 bp, Zea mays
  Peptide Sequence Number=SeqID_57433
atgccgtcgagtacaccgtcggcagcggcagaggaggccccagctacgcccgcccccgccatcgaggtcgacgcggggggtgcgtccagctccaacctgtcgcccactccggaggagactgaggtgatttttgggtggcggctccggtccggcgccgagccagaagcggcaccgattcccctcccccaggtgctgtctcgcgcccatcaggccctccaagagactgaggcggcgatcctgcgggagtgggaggcgcttgaggccgaacaccagcgcctcaacgactggcgtacccagctggaggagcgcacaaaggcagcgtcccgccaattcgcctccgagcggtccaagcttgagtgggaccacaaggactacaagaaggacctccagaaggtgtacgcccgggagctggaggtggcccagaaggagaagaggctggccaagaaggaggagcacttggaccagagggaggaggtcgtcacggagctccaggccaaactgaatgccttcaacaaattcctggaggagcagtgggtccaggaggaaatgttcgaaaggcaggagaagctattggccgatcatgagctcgaggcagaggagaaggagcgggcactggaggagcgagtctgccagttcgagcgcatcgccgcatgggccggcgaggcgagcacgactctgatgccgctagggatgagtcccatcctggtgtcgcggctgccgacgtccatctccgctgtgctcccggtgctggactccgccgccgaccgcctccgacgcctcgaccaggccgacaccgaagacaccgcccgggagggcgtacaagatactgtggaggtggtggccgagcgcttccagcgggatcctgtcgatgattag

SEQ ID NO: 14059 - DNA, 534 bp, Zea mays
  Peptide Sequence Number=SeqID_57434
atggcccagcctatgacatgggggcctaggcccacaagtcatactccttgggcgctggttcctgagtgcagaaagagcgaaccgccgctcgcgccagtactgcgcctcctcggggccgccgcagaagacagagaagacatggcagttggcatgaccagaggtggattgacggtgattacatcagcaaacgcatggaagcggcgcgccaatcgccaatcaagctttagccccacctgcaggctcgtatcctcccctgaggtggacccgggggccattgtcagtaccctgaaacagggggcgctcacagcaggttcccgggattctgagacaaagaatacccaggccttaatcaaggccaggcgggggtccggagccgacacgtgtccggaccatgccgtgtacgcttctactccccgctcaggtggagacccgatgctaccacgtggcctactgcccgtgacccgcgacatatcaatatcgtatgggctacggacattacggcgcctggagattgcccaggcgttgttggcatga

SEQ ID NO: 14060 - DNA, 853 bp, Zea mays
  Peptide Sequence Number=SeqID_57435
cgtgctacagcggcccgggtacgtcggttcaaacacgtactcatggagtctcggctacctgctcagagggaccctgcagcggcagatctattcagcaccaggatacaggaagtcgttctttcgagatcagatatatgttgaggaatgggtacgagtgttctatgcttcagtatggatcgacccagatcaccagtggatgaggttctgctttgagcgagaggatgttactattcatgctagccagattcgccagctgtttgaatttaccgagtcgtcgactcgccttcatagcttgtgctatggcacttctgatcctcctcgacgccctcacggcggagtcgctccagctacagctcacgtcgtggccctgttccgaccgcccttcacagatgggtcgcgatgctctccagcatatttcactctagcggccaagtacctatatcagctcatgagacggacgctactgccccggatgggttatagggaggctaccactcacatccagctctggctacttggtgccctgatctcctattcagagttcgatgtggttgatttccttatatgtgagatcgaggacacgggcacaacagttcctgatgatgatgatgatgattttgggatcccgcctccgcctcctgtgcctcctcgctcacatgatcatgaggccgggagttcccgtgctgcccctactgcccttcctaccgtcgaccctgctctggctgcgatcctccagtctcttacgcagcagcaggctcttatagcatccgagcaggctcgacaggcagccgagcaggctcgacagacagcggtccagcagcagatgtccgagaggatgctttccctattttag

SEQ ID NO: 14061 - DNA, 750 bp, Zea mays
  Peptide Sequence Number=SeqID_57436
atggagctccgattggaatcagcacacaaaggaggggatggtgctcttgcccgcgcggacacgacagcggcgttaccgtttgagagaatgagggagagtatggagttcctggaagtgggtcatgccgacgacatctggtgggagggatttgtgctccacctggagtcgttttcgaatgggcagaagacatcggcgtttgagtggagtggggagaggaagacgctccgagcgataggcagcaccggcacaacaacaaggtttacagggaggatggggaagaagccctcgaagcatcgagacttgtcgtgtggcgtgaagacatcggtgtttgagtggagtggggagaggaagacgttccgagcgacatgcagcatcggcacgacaacatggtttaaggagggacaggggaagaagctctcgaagtttcgtgacttgtcgtgtggcatggtgatgtggcccaaggagacaccggatatgcatcagcacctaatatatagaattgctagtgaacttggaacttactggttagttattgatggcaactcagccacttcgaacgaacagaagacgtcgacgtttgagtggagtggggagaggaagacgctccgagcgataggcagcaccggcacgacgatagggtttaaggaggggagggggaagaagctctcgaagcatcgcgacttgtcatgtggcgtgaggatgagggagagtatggagttcctggaagtgggccatgccgttggcgtctag

SEQ ID NO: 14062 - DNA, 75 bp, Zea mays
  Peptide Sequence Number=SeqID_57437
atgggtttcccaaagcttgaggctgacttctgccgctaccgacaacggcatatcgtcgagcatgctattaagtaa

SEQ ID NO: 14063 - DNA, 513 bp, Zea mays
  Peptide Sequence Number=SeqID_57438
atggcaccccacctgaggactctacctaaaatctcggggcgagattcctttaagggggagggctgtaacaccccagaagaacacctccacgtgttcgacgcgttctgggcgcgccagagcacgcccgcgcccgaccccgcgtgccccgcgcagtcaagccgtgcccgcgtctctgctcgcgctcgcacctataaatcaccctcacgtgtcgactgtactcctccgcgcacgctcaacctcaccggagcccgaaaccatcggcgtttgccccacgcacggcgtgcccgcggccacccgagcccctgccaccatagaccggccaacagagcctttcccagctacgcccgacccttggaagagactgtgcacgcctcggtgaagctccccgagcaaggaatcggactttgcttcgccggagaagccagtccacggtcgtcgtacttcgcccgaccgtcggtgaacgtagaccggcctctacgtcaccccgtggagctcatcgtgccatttgattga

SEQ ID NO: 14064 - DNA, 987 bp, Zea mays
  Peptide Sequence Number=SeqID_57439
atggcgacctccggcttgatggtgggagaaagcgagccgggctgcggcctctgcccctccctcagccttaaggattttcatcaccaaggctggggaggggagagtgccgagttgggcgtgcccggtcttcagccgcgagtggcttcggggccgctcgcggcgccggcatccgccacggcagctggaagaggttcttccgccggcgcggtggccggggccggccacgagctgacctccaacttctcggccttctgcccgtccttgcctcacaagttttggcatgggcgggggcctcctggcagcggcatccaccctgaggtcagtgctgccgctgttcggccccccggagcagaagtcgtcgtcgtcgccgctgccggagcaggtgacggcgtgtcgttcgtcggccttccgttgctccgcaggtcttccccctcggagtggggttgttcgcacctgcggagggggaaccggagttccgtttgtaatggcacttcgaatgccagcgttttttgtttattgtggctgtcggggcctgaacatgaatccctcggcccgttcggccttgttgtctggggctcctctagcttagctaaagagacccctcggccgcccttcgatgggccgaggccagggccgacgccaaagtcgatcagccgaggcctcgggtcgggctggcgcccttggaagccggtcggccgaggtcccaggggtaaccggccgagccgcctgctcgggtcggattcccggaggagtccctggaccgcgtcgccgtccgaggctgggtcggactttgctgaagacgtcgtcgatgccgagggtgctatggctcccttcagcgtgaagacccgagcctgcaggatcagatcgtcttgtagcaaggtgatgagtgaggtatccgtatcccggaggcgtaggagtccctcggctcggtcagccttggctgcttacgtgtactccgtcgtttccaggatccgctttccgaagtag

SEQ ID NO: 14065 - DNA, 720 bp, Zea mays
  Peptide Sequence Number=SeqID_57440
atgcaggcagcatgcaaccgcaccgagggggcgcaccctttcgacttcgacgcgtccagcatggaggcccaggcccacacgtcatgtaactggcgcgccagttactacgtgcgagaaactgcaccgctactcgcgctagtaccgcgcctcctcgactacggaaccggtgccgcaactcgaggcgaccctgcacatgacccgacagtgccaaccgagcacatcggtcacgggtcagtcagccgcgggagaaggcgcgacggtcgatacggccagaaatgggccggcagtaatggcggtggaaggcgggcagaagcagcagtcaagtcgtcagcaagctcacgccccctcctgggacagcgagagaaccctctcccacggcgtgaagacgatgcgcccatgttccgttcctcgaacggctcacgcacgcacaacggctgccccgcgaaccactcatcccgtcgcgttaactctgggcaggacaggcgacacctttgggaccgggaaaggggatactccgaaagggatccttctccgcgaaggaagcgggccccaagcccccctactgatcagaggttcgaaggctggcccctcagaagggttcaacagccgcctcagagcactcgggctccgcgcccactactggtcagaggttcgaaggctggcccctcggaagggttcaacggccgcctcaggccactcaggctccgcgcccactactga

SEQ ID NO: 14066 - DNA, 333 bp, Zea mays
  Peptide Sequence Number=SeqID_57441
atgatcccttcggttgagaatgcagtgaacaagcttcagctttggtcgaagtttttggaagcacaacaatgcaatagcagtaaatgctgtgagttgtccgaggtccgttggacaagaacaactgtaggtgggcctaatgacttgggaggttccgtcacaacgacaaccgaaaatccgtgcctgtcccctgtagattgttccatcctcgagatagagcgtagcatcgccgccactgtcctcgactatttcaagaaggtctacggccacgtcgagcccctcctcaagtggtccaacatggacctcgagcgggagacgcagtcatgccttgcctaa

SEQ ID NO: 14067 - DNA, 234 bp, Zea mays
  Peptide Sequence Number=SeqID_57442
atggttgaaaattttggcagcaaaacagtgcaaatagcagtaaatgctgtggtaacttcacacctactcgtctgtttatatagtgtcgcagactgtaatcttgccgacggagagtacatcctcgtgccggagcaaggagctgctcaggaggtagccccagatccagcacccgagccagcaccagaggacctgcctgccactgctttggaaggaaagccccggttttatgcataa

SEQ ID NO: 14068 - DNA, 365 bp, Zea mays
  Peptide Sequence Number=SeqID_57443
attcaccatgtcgtccagagtttgaaggtagcgctgaaaatgagttcattgagagaaatcagttgcagaagtcagaacctaacaacgacctgggcttggacatcggtggtgccatcaccagagtattggttggtacaaggccacttctatttctcattataaccaacatcaccattgtcttcacattgttgatggagaacaaagaccccaatgtgaaaagcaggcccgtcggcgccaacctgggttctgccgatagcttagggcagatgctagagatcggtttgctgctacagaaagccctaggtgctctgctgattgactgcagcgtttgcgctgttattatgatctgctttcttggattctga

SEQ ID NO: 14069 - DNA, 879 bp, Zea mays
  Peptide Sequence Number=SeqID_57444
atggcggttggcctgcccccggggtaccgcttctacccgacggaagaggagctgatatgcttctacctccgcaacaagctggacaacctccgcgacgacatcgaacgcgttatccccgtcgtggacgtctactccgtcgacccctgccagctcccagggattcacgagctgctgtgcgacggcggcgccggcgccggtgagggggagccgtggttctacttctgcccgcggcaggagcgggaggcgcggggcgggcggcccagccggacgacgccgtcggggtactggaaggccgcgggcacgcccggggccgtctactccgccgaccgccgcgccatcggggtgaagaagaccatggtgttctattacggccgcgcgccgtcggggaccaagaccaagtggaagatgaacgagtacagggcgttccagttcgaaacccccggccctggcctcggcctcgccgccgctggagtcgcagctgacgggtcgtcgtcttcgagcgcccaccacgccgccgatggacccgcaccaccaccaaacgttggcccgcagctgaggggcgagtttagcctgtgtcgactctacaccaaatctgggagcctgagacagtttgaccggcggccgctcgcagctacgggaggtgtcgtcgtccctggcgaggacccggcgggtccattcacggcagtggccgcgtcgccgccggacgatgatgatggctccggcagctccatgcaacagcagcagcagcagctgacggggggaggtgccaacaacgatccatacggtgacggcgtggtgacggagagggaagacgcccacgatcctttcggtgacgacgtggccatgttggatgcccttttatactggcctggagactag

SEQ ID NO: 14070 - DNA, 2268 bp, Zea mays
  Peptide Sequence Number=SeqID_57445
atggcggcgtctctgcgggcctcgtcctccctccgctcgcgcctcctctcgttctcctcggggtgttctctgtgtccgtggcgtctcctcctctcctcacctgtccactcggacgccccccaccagaccgaaaccctcgctttcgacgagatccagctgtcgccggagaagccggctaccgccactgccttcgtcctgcacggcctcctcggttccggccgcaactggcgctccttctctcgcgccctcgtctccgaactccgtaaccgctccccttcagacgagtggaggatggttctcgtggacttgaggaaccatggcagatcggctgggatcaaggggctcggcccaccccacaacatatctactgccgccaaggacctcgctgatttagtgaaggcccgtggttggccatggccggatgttgttgtgggtcactccatgggtggaaaagtcgctctagatttcgcggagagctgctctcgcgaacagctctgggtccttgattctgtccctggacaagtagaaacagagaacagtgatggtgaagttgaacagttgttacgtgccaccaggtgggttgtcgaccacatgctcagccttggattttcgaagtctctttcagaatggatcggcagtaacttgaagaaggacaacgatcatgtgacctgggctttcaatcttcaggctgccatagacatgtttagttcttatagggaaagggactattggtcggtgctggaacacccacctaaggatttggagattgcaatagtgcaagcagagcacagtgatcgatgggtccctgatgacgttcaaaggctaaaagcattagccgggagagagtccaagcctgatgtaggaaaagtgtcacttcacgttctccctaactctggccactgggttcatgtggacaatccgaaagggctactcgagatcatggagctccggggcttccaggctatcacctactaccaggccatcatcaacaactcgctcgttgacctctacgtccagtgcggcacggtggagttcgcacgccatgcgtttgaccggatgccggagcggcaccttgcgtcctggaacgccatggccctcgcgctcgccaaccatggccgcggcaaggactcgctcgatttgttcaaccggatgacgcgggtggagaatgtggtgccaaatgccatcacgttcgtcgcggggttcagcgcctgcaaccacggtggactggccatggcggcgatgggcgcgaccgcttcgccactcccttccctattccccacagggcagcgacacactctactcaagcatcgccttcacccgcagcctcggggacctcgccgccgaggccgtcagggtcatcgtcgagccgagctatgggtgcacgttggggacgacgactcggaccactactgctggcagcagcatgtggacatgaccacgtcacgacgagcgtccgaggttgacgcggaccacccgggctccgaggtcgcagccgtcatggctgccgcgaccgccgtgttccactgggccggggacgcgcactacgcgcacctactgctccaccatgcgcagcagctattcgacttcgccaacacctaccggggacgctacgacgccgcgctgcaggtgctcggtctacaccccgaccacgggctcgttaactccttccacgccatcaggctgctgctctccaccgagtattacatctccacgatgctcacctatgtggcccgtgtcagcctcatggtgacggtggcaagccaacctgcatctatttcaattgatgctcaagggatgtttgatgaaatgcagcaaagtgatacctctgttgccatcgcacatactgccttcaacagtttcttcaacacggaggagctagataggtggctagaaagctgcgatgaacagggtgaattagttggagtcaacaagatccatgtgaagcctcagttctttgatgtgggcaaggactgtaactgggcgaggggcatccggagaaccgagatccagctcgctgatggcaagaactgtgagctacataggtgctggacagatatcttggatgctataagcaaggctcaacatttgatttacatcactggctggttgactatattggtgagggatgatagcaattctgtcgacctgcttacgaaggagggcttgctgactacccatgatgtggagattgcaaaaggagagcaggaaatcatgaatgaagtacttccagcagagagccgtattgcagtgcctgttgatgctcggtaa

SEQ ID NO: 14071 - DNA, 831 bp, Zea mays
  Peptide Sequence Number=SeqID_57446
atgccccaggtggacctggagagcctggtgtgcggcgtgtcgggcgccggcgccggcgctggtgacaggaaggtgtcgtgcgagacggtcatcgcggggggcagcggggacgcctcgccgccgccggacccggacttgccgcccgagtcgataaccatccccatcggcgacgacgcggcgttctcggagctgaacccgatatacgagcgggacgactccaccaagggcagcaccaaccccaagttcgcggccgccgccgccgtggccaaccccgtcgcggccaagacgcggtccaactccacgcgcgtcgcgggcgccccgccgccccccgcggccggcaccacgttcttcggcctcccggcgaggatccgcccgaccttcacccggcgccgcccgtcgcagggccggatcttgcacggcaagcgcgcgggcggcggcggcggcggcggcggcgaggtggagccgcggtcgcccaaggtgtcctgcattggcaaggtcctgtccgaccgggagcggcacggacggcgccggcgcgggtggtggtacggcgtggccgccatgttccggtgcgacggctgcgcccgtgtgcccggcggcgcgtccaggaagaaggtggcgctggaggacgatgccgggcggcggcggcagcagcagcagcagccgggcggcattgcgggaatgcggaggttcaagtccgggagaagagccgcatcgtggggagacgaggcgctggccgcggcggcgacgggggccgacccggacgagggggaggaggaggaggaacccgacagcaaggacgctgtgcagtggtcccggcggccggtaacttag

SEQ ID NO: 14072 - DNA, 864 bp, Zea mays
  Peptide Sequence Number=SeqID_57447
atggcactggccatggccacggtgctgatggcactgggcggggtagccgccacagcgcgcgccggcggcggcatcgccatctactggggccagaacggcaacgaggggacgctggcgcagacctgcgccacgggcaactacagacgccgggcgctgaacctggcgggccactgcgacccggcgagcggcgggtgcacgggcgtgggcgcggacgtcaaggcgtgccagcgcatgggcgtcaaggtcctgctctccatcggcgggggcgtcggcagctacggcctctcgtcccgggccgacgcccggagcgtcgcggcgtacctctgggacaactacctcggcggcggcgggtccgagtccaggcccctcggcgacgccgtcctcgacggcgtcgacttcgacatcgagagcggcgggggcatgtactgggacgacctggcccggttcctcaagtcctactcccggcgcgggcgcgggcgcgcgcggaggcccgtgtacctgtcggcggcgccgcagtgcccgttcccggacgcgtcgctgggcaccgcgctcgccacggggctgttcgactacgtgtgggtgcagttctacaacaacccgccgtgccagtacagcgcgagcgccggcgtgggcagcctggcgcaagcgtgggcgcagtggacgtccatcagggcggggcgggtgttcctcggcctccccgccgcgccccaggccgctggcagcgggttcgtgccggcgagcgacctcgtggcgcaggtgctgccggtggtcaagaactccaccaagtacgggggcatcatgctctggtcgaggtactacgacgggctcacggggtacagcgacgcggtcaagtcctacgtgtga

SEQ ID NO: 14073 - DNA, 1017 bp, Zea mays
  Peptide Sequence Number=SeqID_57448
ggtaatgatggcgcctcttgtgacgtggtcggtccgagcccacggttgggcgaggtggaggctccttcgaggtcgaggtcgagtctgtcttccaaggctgaggtcgagtccgagcccctgggtcgggcgaggcagagaccatcggctgaagccggggctgagtccgagccctggggtcgggcgaagcggagttcgtcgtcttccggggctgagcctgagtccgagccctggggtcgggcgatgcggagtttgtcatcttccggggctgagcccgagtccgagccctggggtcgggcgaagtggagttcgtcgtcttccggggctgagcccgagtccgagccctggggtcgggcgatgcggagttcgtcgtcttctggggctgagcccgagtccgagccctgggtcgggcgaagcggagtccgtcatcttctggggctgagcccgagtctgagccctgggtcgggcgaggcggagcttcctatggcgctcgaggccagacttggctgctgtcagcctcactctgtcgagtggcacagcagtcggagcggcacaggcggcactgtctttttgtcaggccggtcagtggagcggcgaaatgactacgatcacttcggctctgtcgactggagggcgtgcgtcaggataaagccaaggttgcttcttggtgaagactgggcctcgggcgagccgaaggtgtgtccgttgctggaggagggccttgggcgagacctttgtgctgatgggggttaccagctgagatttaggagtcttgaggacttcgatatatgtcacgatttgcatggtctcatcattgaagagcacgtgccacacctgccggtattagttccctcgtatattgtcagtcatcaggttgagcttcaggtggatgatgagctggacgtcgtgacggcgccgttgtcggatgcggtgcccagaacaacccgagagtcgctggcgttgacgatgaccatgaggtccccctgtttgaagatggacagcgcggtgcagccgctctag

SEQ ID NO: 14074 - DNA, 243 bp, Zea mays
  Peptide Sequence Number=SeqID_57449
atgggctccgaccgcgccgagctcgcgcgcctctgcagcgcccgcaactggtccaaggccatccgcctcctcgactccatcctggcccgatccccctcctccatccacgacctctgcaaccgggccttctgctactcccagctcgagctccacaagcacgtcgtcaaggattgcgaccgcgcactgctgctcgaccccgccctgctgcaggcctacatcctcaaaggttcgcttcggctataa

SEQ ID NO: 14075 - DNA, 1053 bp, Zea mays
  Peptide Sequence Number=SeqID_57450
atggccgggttggctgctattgagattgctcagaaagtgtccaaggcttggcgctttctaaggaatccgaagaacatcgcaaagttagttaggaaaagggataaacttaacatgagccagaacaggggaggttattgtagcactagcactttggctggatctccaacttccagcccaaatgaagacagggtctcctccgggatctctctttcctggcaggatgtctataacattgctgttaagtggagacaaatttctgaaccttgtgatccagttgtttgggtcaataagctaagtgaagagttcaattctggatttggttctcataccccaatgcttcttggtcaagcaaaagttattcgctactatccatattaccaaagagtcttggaaactgcgaagactataatgcttgacttgaagtatgtcaataatgcagaggaccgtgcaatttttcttacagatattgacaagttgaaaaagatagaaattgcatcgtcatgctcagatttgtaccatgtagttggtgagacctactgggttgctacaagatgtgatagtatggcgtttcggggaggcaagacaggatttgactttgcaattcgaacaccttgcacgccatcgagatgggaggagtatgatgaagaaatgactgcagcctgggaggctatttgtgaggcatattgtaatgacacaaaccccacacgagaccctggtgtgcttgatgctgtgaaggacgcgatattgcggatgacatattactggtacaattttatgcctctttcgagaggctcggctgttgttggctacgtagtgttgctcggtttattcctggcagcaaacatggatattactgccagcattccacccggtgtccaagttgattgggaggcgatcctgtctccagatcccggcacatttgttgacgccgtgaagccctggttgtacccatccacaaaaataagcaggtgcctgaaagattacacggacgtcagctgcgcgttcagcacgacaggttcggttgtagcggccctaacatctgttgacccatag

SEQ ID NO: 14076 - DNA, 840 bp, Zea mays
  Peptide Sequence Number=SeqID_57451
atgtggagacttggagacgtgcgctatccgggcgagtcgtcgggctcgcgcgggggtgaaaaatccgagcgcgctgtagtcccgtcgctggcgacttcgattcatctcggcgagggggcctcgcggcgcggctcgtcggcggagccgggcaagctgggctcgaagcggccgtgctcgagcgggtccggcggcggaccgctctcggtggttggaggcaaggaggtggcccacgaggagacagagatccaagggtccggtgcaaccgtcggttttcgtcgccgtcgaaccgccatcgccaagaagctgagaagatccacggcgccgacgaaggaaggtgcgcagaaacgcaagcgcatctcgtcgccgccatcttcatcgtcttccactagctccggtgctccacatccgaagagaaaaagatctagggtttatggttacgccaacacacattccatgcttgtagggttcattgaccagttgaccatggattcgaagaacgcaaagctccgaagagcactcgctcatttaatcagagtagtggaggagcgttgtgccgacatcgtcgatgtcgtccacggtgccttccaaccagttagcggaccagtcttgaatgaaatgaatcgtgcattagttcagatcgaggacctcgccaacgaccttgatcagcttgcactggaaaaagactgggagatggagcacatgacccctacaccaattgctgaatcatcacaaacagaggatgagcttctgattgattatgattcagagttaaacaatgacgatatcgtcggctacgacgacggccgtgactactccaccgacgacacctatccctactag

SEQ ID NO: 14077 - DNA, 1367 bp, Zea mays
  Peptide Sequence Number=SeqID_57452
gcaaggcactgtcttcattagataaaaaagaggatgctctagctgcttggaagcaaggatatgaaattgctgtccgtgacacaacagacttgaaacaattgcttgatctggaagaattggtttcttctgttaaaatttgcgggacaacccagtctgcggaccatgtcatggatgcatcaacttgtgataccaaagttgttatctcagaagatcgtgttgctgacacgtcgttcgctgcaactacaatggctgatacaaaaactgttgtctgtgaagaggccattggcagttccaaagtttcatcaaatggtgataccaagttgacgaattataataaaaaagcggaccataataaagtctctagcagttcagtgaaagacatcacagggactcaagctcccaagaaggcaccgaagctagataagaaaaacaaagcaaaagctgtgaaagaaataaatggccgagctgaaggtgtaactggcagagctagtactgatgaaagtgaaactatttcactggatcaagcactctttgctacaaaaatttcaaagtcatcaaaatctataagcttggatttccgactttcaagaggcattgcacaggtaaatgaaggaagatatgaccaggcgatatccatttttgatcagatattgcgggaaactcctacgtatcctgaagcactgattggaaggggcacagcttatgcatttcaaagagaattggattctgctatttctgatttcaccaaggctatacaatctagcccatcggctggggaggcatggaagcgacggggacaagctcgtgctgctttaggagagttcaaggaggccattgaagacttgactaaagcattggaatttgaaccaaattctcctgatattttacatgaaagaggaattgtgaacttcaaattcaaggactacaactctgcactcgaagatctttcgacatgtgtgaagcatgacaagaagaacagctccgctcacacttatttacgacccgctcgcggacaaagtgcaggtcgatctccacgtgcttcgtgctctgatgctgcacgggattggtggagaggtagaccgcctgacgttgtcgcagtagacgaggctgacatgctggatggggctgttgagctcgtggagaagctggcgcagccaggaggcctctgccatgccgttagccacaacgcgttactcggcctctgcgctggagcgggagacgatgggctgtcgcttggcgacccaggagacgaggttggcgcccaagaacacgacataaccggaagtggaccggcgcgtgtcgggacaaccatcccagtcagcgtcggtgtagatcacgagctcggacggctgggagggtcggagtag

SEQ ID NO: 14078 - DNA, 366 bp, Zea mays
  Peptide Sequence Number=SeqID_57453
atggatggggacgctactgcgctcgcctccccctcggccggtaccttcccagacaagcacccgcggtcggaaaactccgtccagcgagctccaggcgattctatcgccacttcaacgccgccggagaaggaagctgtggatccgcgcacggccgcgattcctttctactggtctgtgcgaaggcgccgccgccggtcgtctctgtccgccggatcggcgtctgctgggcggaggtcaatgggggttcgtcgattcgccgacagatctgcgctcacccgatctgcgtcattagagcttcaagtgccaaggtacgtcactcgctgctccaagttccagagctccgattcaatccgtgtcccaacataa

SEQ ID NO: 14079 - DNA, 417 bp, Zea mays
  Peptide Sequence Number=SeqID_57454
atgacgtggctaaacgtcaccgaaagctgcgcatggcacgatcgccgccacctccgcaagcaccacctcgcggcgagcgggggccagctagtagacaatctaggcgatggcgtcgagggactcgagcctgccggcgcgggcgaccgtggcgccagtgaggcagagcgcgcgcgacaggagggccggaggggagcgaatcgaggtagtggctggctggcgacggaggtagaggagaagcagtacggaagagagaggctgagacaaagcggaatcgaacgtcaactcataggaaatttagatgaaggtttgagatccggagtggctatagagactggccacgtgttcgcacccgcgagtgtctcagtacaccggatgaccggaaacgcggaggaggctggaaactccagcgggttttaa

SEQ ID NO: 14080 - DNA, 924 bp, Zea mays
  Peptide Sequence Number=SeqID_57455
atggcgaagcagactgagagctacgagctgcacaaactgcggccccaggtggatgacctgttcaaggagttcgacgccctggtcgacagacctctggatgagagggaggacctggctgcaatcttcaaggtcctcgaagagatcagggacaagatcaagatcaaacacggtggcaagaaagtagacgacgacgagctccttccgcggagcaagaggggggacctggccaacctgctccccctcatcaggactgcactggagctacgcagcaagccgccgccgccgcctgtgcagcaggacgccacgggcggtgcccacgacagcaagccgaccggctgcatcccctgcaagccccggccgtcgcagcagcacaaggaagaaaaagaaggcagcaaggaagtcgtgtcactcaagctgctgctccggctgacccagaacgtgctggagccggagcagtactacgagtggacgaccagctacgtggacgaggagaggatctacgggtgggacaaggaggccggcgaggtgatcgacgccctcgtggccgccgccgacggctcgggggcgcggatgttccgggccgcgggcatcgcgggcatccacggcagcggcaagacggcgctggcgcggaaggtgttcgtgcacgacaaggccaaggacaacttcgcgctccgcctgtgggtgtgcgtcggcccgccggactcggaggaccgcttcaacctcctctaccggatgctcgacaacctcggcctcgacaccgacaaggtcgaggaggtcgtcgacaagtccagcgtcgtcagagacgccaggggcagaacggaggcggagctccggaagggccgcagccagacctgccgagcagaagaagggcggagggcagactcgatttacgacgaattcattcttcgaaggatctgtctggcc

SEQ ID NO: 14081 - DNA, 1650 bp, Zea mays
  Peptide Sequence Number=SeqID_57456
atggcggacacagtgcagtaccgcctggagcggatgaccgacgaactggacgacctggagcgccggggcctcttcacgcgcggcgagctagctgacgtcgtccgcaaacgccgcgacttcgagtaccgcctccgccgccactccccgctccgccaggactttctcgactacatcgcctacgagctccgcctcgactccctccgcaacctccgcaagcgcgccatcatacgcgccgccgccgaagacgacgacgacgagcctcagcacgacgctcgcagcagcgacgacgagggaggccggaggaagaggaagaaggataaatccaagaagaagtggaagaagtccgtctccgacgtcgcgggcgtcctccgcgtcctcgacatctaccggatggccaccgtcaggttcaagggcgatctcgacctctggttccggtacctcgagttctgccgcgacaagcgacacggcaggatgaagcagatgtctcgttctggactatacactgacatttctgctatgctcacaagaagatcggggaaacctgaaaccttttctatgcctataatgtgctatattccagctacacatctagttctggcacaagccattcgcttccatcccaaggttcctgggctttggatctatgcagcagcatgggaattcgatcagaacctgaacgttgccgcggcacgtgcactgatgcagagcggtctcaggtcttgccctcagtcagaggatatgtggatcgagtatcttcgcatggagcttacctaccttaacaagctcaaggctcgaaaggttgctcttggagaggatgtcaagacgctgcaaaagaaagacaacgatgcgagccagtggaaagaggaaaacaaggaactgttcatgccactgaatgaacaggtcaaagatcctaaggagccaggctcggctggagatgccctggaggagaaggaagacctgttttggcgtcaagggttgttaatcattcagaccatatatcatggtgccgtggaagctcttccgtcaagcttaaccttgcggaagaaattcttggagatactaaacagtgttgacttggcacattctgatgagttaaaactggaggtcctggatgaccttaagagagatttctctcatagcgaggactactgggattggtttgctaggcttcagcttagcaacttgaacagttccagtaattcgaatagaaaggatgctatatcaaacaagttgaacagatcaattcaggtgtatgacgaagctatcaggaagctaccaaattccaaaatgtactcattgtatgcaaagttttggatggatgttatatatactgacagagaagattcagtcacattattccaggattctgaatttgatgcttcagagttcacttcatccatactgaaagtttatgaaaatgcagaatcatgtggatgtcttactgaggatcttgcttgccaatacatatcactttacttgaaactagaaagactggaggaagctaagactctcgcagaaaagctttgtgatggtcctctttcaaatgctgcaaattttgtggagcctgagatttactatggagataaattcaattgcaactgctcctggcagttcttccttgagcaaggagaacctgagctctctgcttga

SEQ ID NO: 14082 - DNA, 510 bp, Zea mays
  Peptide Sequence Number=SeqID_57457
atggacgctgccggcgcgcgtccatcgacaccgtcggccgctgctgccgcagtcgtcggggcctccgtcgcggacgagccccgggacgcgcgggtggtgcgggagctcctgcgctcgatgggtctcggtgagggcgagtacgagccccgcgtcgtgcaccaattcctggacctggcctaccgatacgtcggagacgtgctaggggacgcccaagtctacgccgaccacgccgggaaggctcagatcgacgccgacgacgtccgcctcgccatccaggccaaggtcaatttctctttctcccagccgccgtcgcgcgagagcaatattgtagcctctggtggtcttggtggtgaggttttcatttgggaccttgatgctgctcttgctcctgtagccaaatctgtggatgcaaaagaggatgaggttcctaatggaaactccgggcctgctttgacaacactgtgcagcataaattctagttcttattatgttgataagagatttctttaa

SEQ ID NO: 14083 - DNA, 3027 bp, Zea mays
  Peptide Sequence Number=SeqID_57458
atgtacaagagggcaccacagaagctgaaaagcaagttctacaggatgacaattagacctgctatgttatatggtccatttggaggcccaggataccacaatcaagaacgtgagaagcactttgaacatcttacacctaatatgagcaaaacacgaaatggatctgcattttctcaggatgaaattaactcacacagagagcattttcgtaatgaactgaccccagattcagttgcttcaaagaagccaaaagtaaggaagaaagaaattaacaattctgtttcaacttctccccacagcattcctaataatcaagaagttattgctaccttctgtgaggcggtggaggatttctgtggaaaagctgaaattcctgacgatggtgatggtggtgactggttgtcaatcccacttgacgatgttaaggttcttgtgaatgaaaattacatctgtttcgatccaaaaggatattgcatgaggttcctatggatacagttacaaggtttgtcgatagatgtgaaggaaaattctgacgcctttgatgctgaacctctggttttctctgctttggagtccagtcatgctgcgttggcaattatgacccaccatgatatgccaaagcaactgtatcgggaagaacttattgagcgtattatcgatttctcaaggcatcagatcacagattgtatggcagcaagtaacccaacctttcgagctctctacaaaccagctggaaatgttgcaaatgatggagatgatgatgaaggtgatttggaaaatggacaagttagcaaaaggagacgtactgctactaatttgagcatgagaaaatcttcaaacagagtttctgcttctgtttattctgctgtgcagaaactatgcttgatattgggttttcttaaggaactgctcacaacagtgcgcttgtcagatagttgtattctgcaattagcgaaaacatgctttactacattcttggtggataatatgcagctattacaattgaaagcgattggggttatttgcacggtgttttcatcatacacacagcacaggagttacttggttgatgaaacacttcaccttcttcgtaagttgcagttttccaagaatgccgttagaacctaccatctagcagatgaagaccaaaagcaaatccagatgataacagcactgttagttcacttggttcagtttagtgctattgttcctgatagcttaaagggaacagttgattggaccactatcgttgatgcctctagtgatgctgattattatccaattcaatgccatgaagcggcaacagaggcttgttgtcgtttttggactgatgtccttcaacgttttactgctgctaaatctcaagatatgtcggaaaccaaagggataatagacaatcttgttcaggatttcctaacgatactaaacttgccggagtatccagctgctgcttctattcttgaggttctctgcgtgttgctgcttcagaatgctggattgaaatctaaggacattaatgctcggtgctttgctattgatcttcttggtggtattgcatcaagattaaagcgtgattctgtcgtctgtagtgaagaaaagctttggatattgcaagatttcactgataaaggcagtgacggctcaatttttttgaaaaacaagtgttgcgtttgtcttggtggaagaggcataaatatagcctgtaatgaatgtggaagatgtttccattcagattgtatgggggctggtagtcaggataacttacagcgtgatagtgtctgccccttgtgtttttgcaaacaacagctcaatgtgctacagtcgtactgccagtcacaaattaaagaaaatggcaaaaaaactgctgcctctgccagtaagaaatctgctaaaccaactgaggtgtcagcagtggaaattgttcaacaaatactactgagttatctccaagaagctggttcacaagatgatgggaacctgtttactcgatggttctatctgtgcatctggaacaaagatgaccaacattctcaggagaagatcatttactatcttgctagattaaaatccaaggagattctgcgagattctggcaatggtctggcaatttccagagattcagcaaagaaaatttgcttggcacttggtcagaagaactcattttgtaggggttttgataaaattcttgcccttcttttggctagtttgagagaaaattctcctgtaataagagcaaaagcattacgtgcggtcagctgtatagttgaagctgatcctgaggtcttgggtgacaaacgtgtccaatatgctgttgaagggagattttgtgattcagctatttctgttcgtgaagctgcccttgaacttgttgggaggcatattgcttcacatcctgatgtgggcctgaagtatatagaaaaagttgctgagcggataaaggacactggagtcagcgttcgcaagcgtgcaatcaaaattataagggatctttgtgcttcaaatccgaacacggacacaactcatgcctttgtggagataatttctcgtgttaatgatgaggagtccagtgtacaggatcttgtatgtaaaacattttatgaactatggtttgaagaaccaactgggagtcataagcacttggttgctgatggaagttcagttccaatggagatagctaaaaagactgagcaaattgttgacatgttgaggaagatgcccaatcaccaacccctgattaccatcataaaacgtaacttgactcttgatttcctccctcagtcaaccaaggctgcagggattaactcatccatggtggcatcaattcggaagcgttgtgaattgatatgcaaacgcttattagaaagaatattgcaggttgaggagggagctgctaatgagatggaaatccacacactaccttatattgttgccttgcaagcattctgtattgttgatcccacactctgcattccagtaactgatccttctaagtttgttgtgacactgcaaccataccttaatattcag

SEQ ID NO: 14084 - DNA, 591 bp, Zea mays
  Peptide Sequence Number=SeqID_57459
atgtcccgcgccgcggtgacaggatccgagaacacccctgcggacgcatccaggattcaaggcctccccctcccttcccctgccctcaccccctcggcgatgcccggattcatggtggcgcaggcgctggaggcgtccacagggggcgacactcgattcggggaggccatgcccccctcggtcgcaccccctctctccccctcgccgcctcctgcctcctccccctcgaccgcatctacctccctccgtggcctcgctaccaaggtcgagatcgtcgagatcgacctcaccgaggaagacactagctccttggcccacgactccccctcgtccacatcgattgaggtggtcgggattcggcgcctggaggaggccatccacggtgtcatcgatcacgactccccctcgtccacatcgattgaggtggtcgggattcggcgcctggaggaggccatccacggtgtcatcccagaaggctgcttcggtctggagcaccggactgtccggtggtgcactggacagtgtccggtgcgccaggctgcctcggccgaagaggccgctcttaggaatttgctgacggcgtacggctaa

SEQ ID NO: 14085 - DNA, 1923 bp, Zea mays
  Peptide Sequence Number=SeqID_57460
atggaagagcaccaagtcaagccatcggatctgccacccactagtttgcacaaccaggattcagccgcaactcctgttaccagtgctgaccctgctcgtcctgctgcttcaaatgattctcccagtcaggttgccagtgcagctcctgctgctgtttctgcacctaccgctgctcctgcagaagatgctgcagggcgtgaggcgtcagcatctgtgttctctgcgtctggtttatcctcctgggctaagaacctaaaaattcctcagccttcaccagcggcacagcaagatgagggtgctgaaggaagcacctccccaacaacaggacagcctggtgtttttggttctttaacgaaaggcattgtggattcctctaagaatgctgtaaaggcagtgcaagtcaaggctcgccacatggtctcacagaataaaagacgataccaggaaggaggatttgatttagacatgacatatattactgagaacataattgctatgggttttcctgctggtgatttgagttcagggctttttggatattttgagggaaataatactccattccagggtttctaccgcaaccacatggaggaagtcatcaggttctttgaaatgcaccataaggggaagtataaggtgtacaatctttgttctgaaaggctatatgatgcatctctttttgaaggaaaggtggcctgctttccttttgatgatcataactgccccccgatacaacttgtcatatcattctgccatagtgcctactcatggttgaaggaggatatagaaaatgtggtggttgtccattgcaaagctggtaaggcaaggacaggattgatgatctcgagtcttctactatttctaaagttctttcctactgctgaggagtccattgaatactataaccagaaaagatgtgtagatggaaaagggctgattctaccaagtcagattagatatgtgaagtattttgagcgcatcttaacttacttcaatggtgaaaatcagccacccaggaggtgtatgcttagggggtttcgtcttcatagatgcccctattggattaggccatcaattacagtctctaaccacaatggtgttcttttttctacaaagaagcatccaagaacaaaagaactaatgccagaagatttctggtttagtgcaccaaagaaggggattatggtttttgcattgccgggagaacctggcttagccgaggtagctggtgatttcaagatccagtttcatgatcgacagggagatttttactgctggctaaacacaacaatgatggagaacagggtaaccttgaacccaactgatcttgatgattttgacaagagaaaactgccctcacctggattccagattgaggttgtcctggtagattacgatggctcgcaaccagcaaaaccaaaaccaggcgctggacctgctgctgataaatctcatgctgattcctcggctagcacggttgcaaaagaaaatagtgctgcacctgaagaatccaacaagggaactggaagcaataatgatagagatgaagtcttctctgacagcgacggggaggatggatcttctaacggaaggaaggagaagactgccggcggtggtcaaagcagtgtaaatgctgctaaaccatcccagacaggcaacatggaggaggcggcggcatctgctgctgctagcagactggacaaagtggctataagcagcgaacagggaaccacaaaggcacctgatggtacatctctcaaaactgaagtcagcagcaaggccagctccaccacagcaccacctcctccagctgctgactcttccagcatgagcgaattcaaggcgattgccgcagatgcctcggtgttctcgttcggagatgaagatgattatgaaaccttggaaattaacaacggaaactaa

SEQ ID NO: 14086 - DNA, 369 bp, Zea mays
  Peptide Sequence Number=SeqID_57461
atgaccgggatcacgacatccctgtgcggagtcaggccaccagaactgagtcggcaacggcttcgactggtggcacgacccggggacggtcgaggcaccacgacaacaactcccctcctcaggacagacatcatcatcgatgacaggaggacacgtgtggagtatcgacgctcactccatgccccagggccattcaatggccccttaacttcaaagtctccaacgtcaacaagtacgagcctaagcaggatctgggaggctggttggccgtctacaccaccgcggctcgagccgctgggggcaaccgaagatgtgatgaccgcatacttgcctattgtccttgggcaagatgcactgcaatggctgtga

SEQ ID NO: 14087 - DNA, 456 bp, Zea mays
  Peptide Sequence Number=SeqID_57462
atggcctggcttgatattcttcaatcgaactttcctatcacgccattttattgtttcagcctgatatttattgatgttctctatagcctgaagtctggtcccttctatagtgtattttgttatttgagaatcagtttcgtccttgctgaagctgtggttcttattgatcctgttcttgcttcttctggtgttattgcttcgtcaccgaacaagagcttgaagggagtaaaacctgttgaccttgagatggtagtgttgtggctccacaccactttgatcaactcatctggccacttttctctaggctggttgaagattaacttcattattcctgtcattataattccatttgctctctctactagcccatttgattctggatgccttactgatgcaaaatgtattcttgtaccaattcggtcacaaaaaactttgaacgtttcagcaatgaattga

SEQ ID NO: 14088 - DNA, 339 bp, Zea mays
  Peptide Sequence Number=SeqID_57463
atgtcgatagcgcatggcgaccacgtaacgaaggagcacagtgaggtagagttgaggctgtcgcccaattcgtgcgacttgcttctgacagagcaacttcatgccactggttctttgatttttgtacaacaacatagaaacgatcttcgtgatcaggccgatctcgcatcagcaaggtcggtaaccacagggagttggttcagcgattgcattggcgcctcgggcttgcttgtcgtagtcggatcgcaagggtcatcttccgccaaatcggaattatctctactcgccgaaagatcgggcacctcagctacatcaattggtatcagatttccaggttga

SEQ ID NO: 14089 - DNA, 936 bp, Zea mays
  Peptide Sequence Number=SeqID_57464
atggcgagagtagcgtgtaccctccgtggcaagaggctggacggtggtgtatctgtgctctcggttggcgtgaacccggatccactatcagtaagcatttctgcaaacagagtctttgattctttgaatagccttaccttgactccctcaagccagcatatccttgagagtcttttcttttatcgggtgaggaaacaacagacttttgctgtttttgttcaaaggtggtacccaaggaagagccccagcagtgaagtcacgggaggatgttggcctcccactttaaaaacaataaacttgtgtgcgggagggtgttttgcctcccggaatctactaataaatcttcccatcttatggagacatggcgcgtacaagcaaaactgcacgcaagtctactggaccttttggcgtgcctcgccatcagctagccccagacatgaagggagtagtagtggcaacactaacccgattggagacttggaggccaaggtggaaccacttcggtcagagctacgtcaccagaatagggcatgggcgcaggacagccaacgcatagctgaattgtcagctgacgtcagccgcttgcaatatgagatatcagaacgggattcggccattgattgggccgtcaactcgcattcgatcgcttgggaccgcgaagcaaaagctcgagctcgtgtggcagagcttagtgcggccctcgacagcttgcgagtgtactgtaatactttacatgaagaagtacatgtactgtatgctcgactgcacctggacgtgccttccgccgctgctgcaatggcagccggaccttcaggaacagcaaatgaaggacctgatgaggagttggacctttttcggccccctccttccatgaaccttcctgatgaacggtctcctgcagcaggaaatgaagcaactaaggatgacgaagactag

SEQ ID NO: 14090 - DNA, 486 bp, Zea mays
  Peptide Sequence Number=SeqID_57465
atgagacaaaccgacgacaacaggggaatggtggtgacaacttgctcgctcaatggaatgatgttatcaagttcttatacgttcttaccaagccacagtggtgaactgcaatcaacaggtggaaccggtgaaagattggatgagcgattgcctggagaaacagaaaccttctcgtcgagcaaaggacggatggaactagcagaatggcagtaccgtaaatattgtactagcgatttcaaaaaggaactagtaggaatcacagaccgaaggagaaaaaaaacactcgataaactcaccgatcaacctggaaatctgataccaattgatatagctgaggtgcccgatctttcggcgagtagagataattccaatttggcggaagatgacccttgcgatccgactacgacgagcaagcccgaggcgccaatgcaatcgctgaaccaactccctgtggttaccgaccttgctgatgcgagatcggcctga

SEQ ID NO: 14091 - DNA, 261 bp, Zea mays
  Peptide Sequence Number=SeqID_57466
atggaggtcgactatggggagtggaaagcaaaaatgagcgggacagggggtttggtcgggggacgcggacggggcgcggcgctggtcggcatggcaggggcgcggggtggccgggccggtcgcggcaacctggggacgcggcggggcctgggcgtgggtggagctgggcgtggggctcgggtcggttgctcgggcgcgtggggaagggcatcgtgtgcaggggcgcggtcggctggtggctccatgggcgcggtcgggtga

SEQ ID NO: 14092 - DNA, 396 bp, Zea mays
  Peptide Sequence Number=SeqID_57467
atggccaatgccggcaggaagctcccctacgtcttcctgctgctggtggcccttgcagctggcgtgttgagcgtcgtcgtcctgcagaaggtgagggagcagcgcgtctttgctcggcgtctccaggaacgtgaccgccagcttgtcaccctgcggatccttctccagaaagaaaaggcatttaacaaagagatgaagaggaaggtggaagaaatgaaagcaacaacatcttcacttagaactcagaagactgaccagaaaaccaaactcaagggactggaaacaacagttgcagatcttaagaagactcaaaaagatctggaagtagctctcgctgaaaaagataaccgcattaatctaatggaagaggcagccacaaaccttgagaaagtctaa

SEQ ID NO: 14093 - DNA, 282 bp, Zea mays
  Peptide Sequence Number=SeqID_57468
atgccggagaggtgtgctggcagactatatctgtcttcgttcacggacagtaaggacaagaggccagaccacccgtataagaaaattgagtttgggcaggaacaatgtgtttttgtgaccttacactacggactgtccggagtttttagccagacggcactaggtggtacaccaggcaagcgtcatcgacttgttactcttggaggttgccgcctcctagacggcttggctgttgtcttcgtcgagctctccgtgaagattgtggaggagccgcgggattga

SEQ ID NO: 14094 - DNA, 277 bp, Zea mays
  Peptide Sequence Number=SeqID_57469
gcgcctaggggtcccttttatagccccaagggagctaggagccgttgagctccatttggaggtcattgttgccttctgtccgctggctcaccggactgtccgaccatccggtgtggggcaccgtgatgcggacatcaacaccaacacgagcacatctacaccagcagcaccttctccagcccaggcgccaccccttccacctgggccagtgactcgggcccgtgcaagagaattgaactacatcatgttgttaaagaacgaaggcccggaagaatag

SEQ ID NO: 14095 - DNA, 417 bp, Zea mays
  Peptide Sequence Number=SeqID_57470
atggaactagcagaatggcagtaccgtaaatattgtactagcgaggcgaaaaaggcactagtaggaatcacaggccgtgtttggctggcctcagaatggtgtcaacaatctcctgtaaaaatttcagattttttgaacaaccgagcgaaaagttatgcccagtttaaggaaggagaaaaacaaggaaacggtgttgactcggagaaaaaaacactcaataaactcaccgatcaacctggaaatctgataccacttgatatagttgaggtgcccgatctttcggcgagtggagataattccgatttggcggaagatggcccttgcgattcgactacgacgagcaagcccgaggcgccaatgcaatcgctgaaccaactccctgtggttaccgaccttgctgatgccggatcagcctga

SEQ ID NO: 14096 - DNA, 1944 bp, Zea mays
  Peptide Sequence Number=SeqID_57471
atgccatcctcttcttcttccgccgacgccacgccgccggccgccgcctcgtttgaggagacgttgagtagcgtgatggtggaggagttgcgcgccggcgactctgttgattttggtgtgtcacggatgacgtcagcccgcgttgaagatatgcagcggttgggctactttggcggcggagtcgctcgtgctccggggacggaggaagtccccgagccggagggcgagttggttgttttcgaggcgttcttcgtcgccggtctccgcttgcctgcgcatcgggtcttcgaattaaatcaattgccgtacgacggctaccctggtcaagacgaagcggaccgccgtgggaagaagccggcggtggagactggaggcgaccctgcgctggcggccgccccctcctcaaaaaagagaaaattagtgatggacaaggatctccaaggggcggcgcaaaaatgccaggcgactgtcagggttcacgaagctcggccgaaaaggcagcggggaacggcgaaggctgcggcctccggcggaggcaaaccgctgttgccggcgaaggcgggcgcctctgcacctagcaaggcgccggaggcgacggtgggcgccggaggctccaaactgacgaaggtggtgccgctggccagcggagtggcggaggctgcgaaggtggctcggacgttgccactgccgggcaaacgcgttgccgacttcggcaccgagattaatgtggatgattatcttggggggtcgggcgagggccagcttgctcttgctgtgcctggcgcggcgattgtgacagctgcgctagcgccgaaggcaaggggtgagacccttggcgtcggaggcgaggtgccggccctcgcgctggtcagggacgaggcaggtgcggcgacccgccggctgaaaggagtgacggaggcgctgagtcaggcgacggaggcactgagtcagctttgtctgccgaaagtcgagagacttcggacgcaacatgctgacgctgtccgtgagaagtcggcctccgacagcaagtgccgtaaactggcggacaaggtggccgccctggagaaggagaaggctgacctccggcgccagctggcgggggagaggagggaggccaacgaagccatcgccaaagagcaggctgcgcaggcggaaggcaatattgccaaagagctcgccggtcagctgcagcagcggcttactgccctggagagctgcgcgaagggggccgaggccgcgacgcgggcggaggccgaacggacgcgcactcagctggtggctacatatcgcgagctgggtgtgcggactggtgacttcgaggtgtcggagcgcgagcccgggcttcactgtctcgaatgggtgcaggaggagctgcaggagctccccactatcttggaggggttaatgtcgttcgcctccctggtcacctgcgaggcggcgatgaacgcactctctcgcgaagggtgccggcactttgaggccctcgaccaggcagatgaggattttgggcgagatatctttgaggttgaagaccccgtggtgaaggaatccgccggggccctctatgaccggatgtggggttcgtacggtcgtgaggtggtcagggagcgggccgaggctgcgagggctcatgcggagcgcggcgagcgggtggacgacttcggggcactgaacagcgcgttgcctgacccggagatgacccctgcggaggccgcgactggagtcgccctgggaccgaccccggggactgcggaagacgcaccaggcgcccccgcatctgctgcggccggcgaagacctgcccccaaaggtggccgaaggcgcgcctgatgcccccgcggctgctgtgccgagcgttgaagatcccgcggcggtggaggcggaggcagcggcggaggccttggcggaggctcccgcagcggcagggccttcgcaggtggcgtag

SEQ ID NO: 14097 - DNA, 261 bp, Zea mays
  Peptide Sequence Number=SeqID_57472
atggacgagggttgcactcaacccctttcaagtgatccaaagatccacttgaataccacggtgttttcttctttcactatatcccgtttgcgaggaatctccacaacttggagcctctcgcccttacaaatgatgatcacaaagaagcacggatacgacgagcagcctgtggttcctgagtgtgttgccgaagatcttcctgagccacaacctggtgaaggcaagtgtcctctgaccttttatgtcctacttacttcataa

SEQ ID NO: 14098 - DNA, 414 bp, Zea mays
  Peptide Sequence Number=SeqID_57473
atgggcaagagcaagaaaggtggtggctcttcacatcactcgggcgacaagcgcaagcgcgagccgactcctccctcggaggacttcggcgactcggagtactcggaggaggagttctcctccgagttcgagggctctctggctcctgcctctcccccggcgtcgtctgatgattcagacgactcccaggggatcgccgcggaggtatggacttacatctggcccatcgagcgcgccgggctcgagggctcggatgagtcagagtactcctcggacgaggagaattcctccgactcgtccgaggagggcagcggcggcgacggcggtgacgacgacagcggcaagggtggcagcggcgacggcagcggcggcagcaagggcagcagcaaggacaacaacaaggccagtggctag

SEQ ID NO: 14099 - DNA, 306 bp, Zea mays
  Peptide Sequence Number=SeqID_57474
atgctcccaggcgtgcgagatatggatgaggaagttttcgcgagggagatacgcaaggcggataaatccctggccccaggcgtggttggtggcgaggccgtgcggtgcggagccctatcgttggatcgagggcagaccgagcttgaggaagtccctgtgccagcgccagcgatatgcgcaggaacgcaggatgtggagtttgtgcggctaacttgcatgcttatgtcacacatgtgtcatgatgatctcatttgcggcaagagaataaagaaaaagaaaatggacgttgacatgggctgcaagtag

SEQ ID NO: 14100 - DNA, 174 bp, Zea mays
  Peptide Sequence Number=SeqID_57475
atggagagtcatgatctccgggcagaatgggaatcatggcttgtgggtggttatgagattgatggttttggctatgactatggtgctggttgtcagcattgcaaccactgctcaggcgaagatgaagctgtggaaggagacttccaggagttccaagactacgacgagttctag

SEQ ID NO: 14101 - DNA, 597 bp, Zea mays
  Peptide Sequence Number=SeqID_57476
atggctgaaaggtaccaactcccacggagttgcgttcctccaacgatgaggcgaaaagacggcgagtatcccccatccgggggcttggaaggtggaaagacacgatgcataagggagcgcgaagacatggtctacttccaagggggtcaccctccttttaaaggcgactatccctacttgcgtccccagccgtcacgggctgagtcttctccgacacgctccaaggccctcccctgcggcgcgggggctgggtcccacacgtcatgcaaaccggctcagagcagaagaagccaaaccgccgcgagcggcggcgcctctggcaggagaagcgagcgacgcttcgccttcaccataataaccgcgtcagtaaagggaccgggaaagggggataccccggaaaggatccttccccgtgaaggaaccaggctccgagcctccctactgatcagaggttcgaaggctggccccccaaagggttcgacatctgcctcatatcgcgtgggccctacacccactactggtcagaggttcgaaggccggccccccgaagggttccacggccgcctcaggctactcgggctccgcgcccattactga

SEQ ID NO: 14102 - DNA, 576 bp, Zea mays
  Peptide Sequence Number=SeqID_57477
atggagcctggcggagggacagctgtcggagcggttgggtccttgctgacgtcctcttgcttccgtaaggggctgagagccgccgtcgtcacagagcatgcggggcgccatcattgcctatttggcggagctagccagatgggacgtcggtctggttccctgcgacccgagtcagctcggggttggggcgatgtagaggctcctccgaagccgaggtcgagtctatcttccgtggccgaggccgagtccgagcccctgggtcgggcgaggcggaggtcgtcggatgaggccagggcggagtccgagccctggggtcagtcgaagcggagttcgtcgtcttctggggctgagcccgagtccgagccctgggtcgggcggagcggagttcgccgtcttccgggtcttagcccgagtcagagccctggggtcgggcggagcggagttcgccgtcttccgggacttagcccgagtccgagccctgcgtcgggcggagcggagtttgccgtcttctgggacttagcccgagtccgagccctgggtcgggcggagcggagttcgccgtcttccggggcttag

SEQ ID NO: 14103 - DNA, 1047 bp, Zea mays
  Peptide Sequence Number=SeqID_57478
atggaggttcgctgccaaaccaggttttgccagaatgaagatggtttccccaagttgctgagagcatgcacagttcgcctcggaatcaggagccagccagagtatgatggtcgtgaattcgtcgagcatggcacagagaagtgtgtcgtgactgtatacattggatccagtccacaccatgtggaatggagtgtcactgctactgggcacagattcaaagacacctgccaagtcgtcgctcgcaaggcattgagggccctgtgtcagatctatgaagaagaagtggccgacaacccactcagattctttccgccctttcagagagaccgtcccgcttggatggccaggatgcgtgcattggaggagcagcagctgcttgaggacgaccccacagtcgtgtacctcactgcatacctgctcacccttgatacacagtatgatttcttggctcggcaccaccgtcagatgattgcccgagcagaagatgcagagaagcgcaaccgtcagctacatagtcgtgaagtcattgttgttgaagccctgaagcaagccaaggatgagcacgtccagaagttgatggaggcctacttggtaacccataaccaacgtagagccctacggatccaagagcccgcttcatccaacctagttcaacccataagagctgaagatccccagattcttgaaggtcacccggtctctatcataggagagaagaaggcttgggaactaccagaaggagccatagtcttggaaggaattccagtctcccctaaggctatggataagaaagagcaccctgaatcctcccaagatcccctgccaaaattgtttgagcccctcacaatggagaagattctagcaccgtcccgtgagatcaaagaagaagctgcaagcaccccgccagcaccgccgccctcagaggagctacaagagccagtcccgcttgaagaagagttcgaccctgtcctgccatctcagtcgccgccagaagaagtcatcaacatcagctccctgttgacccatccaggagatatctcagattga

SEQ ID NO: 14104 - DNA, 255 bp, Zea mays
  Peptide Sequence Number=SeqID_57479
atggccgacgaaattataaagaaaaatgaaaaagaatcccattatgcccgagaagaagctaagcaagttgaagaggctaccgagcgcccaaggcgtatagctgaactttcaccactacccgagccatatgacccccaggccaatcccgttatgaaagaggctctggatgtgatgagtgttgccaataccatcgtcgacgaagtcgtcgataaactgccgaatgaggccgccgagaaaattctcaaagaagactag

SEQ ID NO: 14105 - DNA, 731 bp, Zea mays
  Peptide Sequence Number=SeqID_57480
gttctctggaggacatggttgctggagtgacttggtcgtccatcttgccaccgggatggactgtcgagtgggacccttcctcggctgaggaggagcatgaggagtggactgaggatactatggaggcaattgctcttcacggactgaccaccttctgcggattccaccccttggagctgcccactcaccccattggtttgttccccgcggagaaggagaacgacccaatgtggaaggaccaagtggagcatgccaaggatatctgggctatctacccaggccagattgctcacttaacggtgcggtgcatgaatgccctgtatcgtctgcaagtgatgcatggagaggcaatgtcccatctgatggcattgttggaggcgacgaagatcactttggataacagagaggaacttgtggttgacttgtccactgagatggtggaaaaacacctacaagtggaacaattgtcaaatgagatccaagagcttgaggagctagtgggaacgagggagaacaccatcgaggttctcgaggatcagcttatcaacactcagcagcaactcacagaggctaaccagcatctggatatgcaccaccaggagatccaggacatggaggccaacgaggatgtcgacatcgagggaggagaggagcctgcctccagtttggacactgctggctcagggagaccaccttcccccgagtcgagcgttgcctcgtttgttcactag

SEQ ID NO: 14106 - DNA, 75 bp, Zea mays
  Peptide Sequence Number=SeqID_57481
atggcggctgcgacagatctagtcactggcggacactggtgcggcgtgactgcgcgaggtagaaagatgcaatga

SEQ ID NO: 14107 - DNA, 601 bp, Zea mays
  Peptide Sequence Number=SeqID_57482
tcctacactgacgggcttgcacgagagggtttccctcgtatcttctgagagggctgaggatactatggaggcaattgctcttcatggactgaccaccttctgcggattccaccccttggagctgtccactcaccccattggtttgttccccgcggagaaggaggacgacccaatgtgcaaggaccgagtggagcatgccaaggatatctgggctatctacccagggcagactgctcacttgacggtgcggtgcatgaatgccctgtatcatctgcaagtgatgcgtggagaggcaatgtcccatctgatggcattgttggaggctaccaaaattaccttagataatagagaggaacttgtggtagacttgtccactaagatggtggaaaaagacttacaagtggagcaactgtcaaatgagatccaagagcttgaggagttagtaggaaccagggagaacaccatcgaggagatccaggacatggaggccaacgaggatgtcgacatcgagggaggagaggagcctgcctccagcttggacactgctggctcagggagaccaccttcccccgagtcaagtgttgcctcgtttgcccactag

SEQ ID NO: 14108 - DNA, 1803 bp, Zea mays
  Peptide Sequence Number=SeqID_57483
atggttgctctcgggcggcactggcgggtcgcggggaggtcgccggagctaatggctggctcgggcaagtccggcgaggtacggaggagggttttgggagatccccacttagatgtgcatgatgagctagggcatgacatccaagtgatgaacaaggatcgccaggatgctgcgcagaagcgtcgggcggtcatcaggctcctcgatgctaggccgaagaggccgcgggggactgcgaaggctaccgtccccggcggtagccagccgacgctggctgcaaaggcagtcgcccctgggtccagcaaggtgccggagagcgcgaaggcggtcggcgcctgcggaaccaagtctgccccggacggagcggcgaaggtccgggaactgccttcgccggggaaacgcgttgccgactttggcacaaatattagcgtggacgactatctcgttgggtcgggcgaggggcaacttgttgttgtcccgcctgcggtggccaccacggcgtctaccgcggcgtttggggtgaagggtggcgctttcagcgctggcggcgagatttcggcggcctctgccatcaaggacgaagcgggcactatgtcccgccggctgagggaggcatcacagcagctgtcgcagcagctgtcgcagcagctaagtcaagtggccgccctggagggcgagaggacggacctccggcgccagctggtggaggaaaggagggaggccaaccaggccatcgccaaggcgcaggcggaggccaaattggcgtgggcggaggggagtctcgccagccaacgtgccgaggaatgggagctgcggttcaatgctctgcacgcccgtgtggagagggtcgaggcctctacgtgctcggaagttgagcggacgcgcaaacaactcgtggactcataccgcgagctgggtgcgcggactgctgacttcgaggtgcctgaccgagaggcgggccttcgctttctcgagtggctgcaagaggaattactggcgctcccaaccatcatggagggattcatgtcctttgcctccctcgtcacctgcgaaggggccttgaatgcgttgtcccgcgaggggtgcagtcactatgggggcttcgaccggtctgatgaagaatttggccgcaaaatttttaaggtcgaagaccctgtggtgaaggattctgtggggggcctcttcgatcggatgtggggttcttatggccgggaggcggtcagggagcggtctgatcgggcaagagagcagatggcgaatgccgaggaagtcgaagacctcagaggtctaaacagtgtgccgcctgaggctgcggagggcggaccggtgctgcccgcggatgctggtgaaggcccatccgacgtgcccgtgcctgctgatgccgacgaagaccttgtgtcggcccctgtgccgacagtcgaaggcgcccaggagttttttgagtctgatgattctgggagttcggtggtgtggactgaagagtcttcggatgaggacttcgattattttgcggcattggatgtggctgcggcggaggcttcgccgtgtgtgatgggtgttgaggttcccgttccgagcgccgggcgtaggcagcgaagggcggtggcgaagtgtagagtgagtgaggtggagggtggtcgtcttcgtgtggacagggccggtaggcgggaattgttgtcatcgccagttggggcgagtgtaggtgagggggagatgcgaagtttgtttgagggtgaggagctgaggataatgatgtttaactatagggagatgggtatcatcccgaaggttgaaccattgtaa

SEQ ID NO: 14109 - DNA, 225 bp, Zea mays
  Peptide Sequence Number=SeqID_57484
atgggacgacctcgtcacaggccttcatccagcgacgcgattgacgaaggcgaggctggcgaaggcatcgagcgaagggtggcgtcttcgccttcgccccaacatttgccctctgagggaccagttcgactaagtcatctggtgccgaaggcgtcgctagatggtggagacgctgccctcgctcaaagtggttccgcgggggtttttgacatgaccgttgattga

SEQ ID NO: 14110 - DNA, 1374 bp, Zea mays
  Peptide Sequence Number=SeqID_57485
atggcggcggttgggatgaagggtacttcgcaggacccatggtccaacttctgcgcggccgcctttgccgaccatgttgcgtcgggtgccctgacttcggagtttgctgccgaaatcgagcgcctccgggcacaacatatggatgctgctcgggagaagtcagctgcggaaaacaaaagctgcaggctaacagagaggttggcggttgtggagaccgagaagggggatctgaggtgtaagttggtggaggagaggagggacacgaacagagcttgtgctgatgtgcaggctgcacaagccgaggccaaacttgcgcaggcagaggctagtctcgcccgccaacgcgctgaggagctggaggcgaggctcagcatcctacgcaaccgcctggacaaaacccaggcctcaacgcgcgcggaggtcgagcggacgcatacgcagttcatggacgcgtaccgggagctaggtgcgtggaccgccgccttcgaagcacccggccaagaggaggagttggaggtgctcccgacaattgtgaagggcctcatgtcctttgcctccctcgtcacctgcgagggggtcgtgaatgctttgtcccgcgaggggtgtgggcacttcgaggtcttcgaccagtcggacaaaggcttcgagagtgaaatcttccaggtcgaggactcggtgctgaagccgttgacggggggcgctcttcgatgggatgtggggccctcacggcccgagagacggtctgggagagatgcgcatgacgaagatgttgaggaccttggtgatctagacagcacgctgcccgaagcatcggggttggagctggcgccgccatcagtgcggggcaagggcccctcggttccgacatttgggcctacacaagcaaccgctgttggcgatactaattttgtggcggcctcaaccgtagtgcctgccgatgataatttatttggctctgtatctgagtgttttgagtctgaaggcgaatctgggagttcgttttcctggacggaggagtccttggatgaaggcctggattattttgctgcgttagacgtggctgcagcggagtcttcgccgcgtgtggagggtactggggatcttcctagtgcgagtactgggtataggcggcgaagggtggtgtcgaaacatagtgtgggtgatttttcgcgaagtggtaggcactgtcgtatggggatggagcgtggccgtctccgagtagaccgggttggtaaacgagaattgttgtcctcgccgattggggcgagcataggcgaggaggatcttcggaatctttttgagggtgaggagttgaggttaatgatgttcaattccagggagatgggtatcatcccgaaggttgagccgatgtaa

SEQ ID NO: 14111 - DNA, 411 bp, Zea mays
  Peptide Sequence Number=SeqID_57486
atgtccgtgtcgaagtcggcaccacccgtcgccgccacatcagtgtgcacaggctacggcggccttcactccttcgtgggctcggctgagggtggcttgcctgcgccagaagcaacagccctcgcacccgccgaagacttgctgggcccggggacggccggcttcgcagccggcggtggtttgcttctgcgaggggcggcagacttcacgcctccccgcgccttctttgcctcacggaaagagtccccgaccctagttgtggcggaactgcccgaattattccgacttaagtgcctaagtcccgccttagaggctagaccacacttaaatgggaataacccatcaatccctcggatccagtccgacgaggccactgacagtatcaagtaccacaatctcactcgatggtga

SEQ ID NO: 14112 - DNA, 168 bp, Zea mays
  Peptide Sequence Number=SeqID_57487
atggcgcggagcggcggcgggcgcgcagggagaaagaaggagaaaggagaaagaagaaagaagaaaggagaaagaaggaagccgcgggcgagaaaattcagatttgaactgcaggtcactcgaaacttggaaaaccgtgaatgcaaaaatgatatccatgctacatag

SEQ ID NO: 14113 - DNA, 942 bp, Zea mays
  Peptide Sequence Number=SeqID_57488
atgggctgtccacatggctcgacatcccatcgaactggcaaggcgcgaagcgcggcgtcgaccactagcacgatttttgacggcgtcgcggatggggctgcgcagcgagcacgagagcgacgacatgcgacgaggggagtggagatcgaacgggagtgctgctgcagcgcgcggcttgctgcgcattttgccgaacagccggcgggcaccacgacgaacagcgaggaagggggctcactgttggttttccatggaagaaaatggggcgcgctggatagagagagctgggcgcagggaacagcaaggggcgtccatggagggggtagatccggccatggcatgctcctgctcgcagctctgcgcagaatcgcgaccacggggaagaagagcagaggagccgagctgctgggcgccgaccatggagagaaaaacaacaggggagtgaagaagggcaaagggcacggagggaggtggaggcgccatgggagggggcgagcagagctgctgctcggccatgggaaagaggggagctcacagggggtcgcttgcagggagatgtggcgtgcgcgaggagcaggaaggaggagggcgccgcgccatggctggccgagggaggaagctgagctgggcgtctgttcttccctgcgcgatggcgaggccgagctgggagagggaagccgctgctccacgctattggggaagaagggtgtcgctgcagggatgccgagcgtcgggagcagagggccggccatgggagagaggccagcgccctgggaggaagggagccgagctccctgcgtgttggggaagaaggccccctgctgcgcgtgggggaagaaaccagggagaaaaatgttgtggcggttgaaggaaatggaggggtgggagtgcaaaacagccaaggacaagggagagggatccatatttatagagaaaccctag

SEQ ID NO: 14114 - DNA, 453 bp, Zea mays
  Peptide Sequence Number=SeqID_57489
atggcccgcgcccgcgcctataaagcacccagggacttcgaccgtacccctccgcacgcgctcgacctcaccggagcccaaaaccaccggcgtttgctcgtgcacggcgtgcccacggccgcccgattcccccgccaccgtagactaaccaatagaacctttcccaaccccgtccgaccctcggagaagactgtgcacacctcgatgaagctccccgaacgaggaatcagaggtagagtttgccatttattttacattgtgcttaaagttaaagaaaataggaaaggaatttgggagaaaatcaagctccaacttggtctgtcagacaagccttttactgaatctggtgcactgttcaccgtcttcagaaaatatcgcgtggtggataaggacctggaccccgccggtgataaggatgtcacggcggtcgggatggactggaggccgcggtaa

SEQ ID NO: 14115 - DNA, 684 bp, Zea mays
  Peptide Sequence Number=SeqID_57490
atggggatgatccgcaagattaatctaatgggtgtgcccctgcaggtcgaagatcttctctttaacattgacaggaaaaagcaaaggaagagaggatgcttcgcatgtggggagaagggccacttcagcgacaactgtccaaatatggctgaacccaaaaaggagaggagcaaaggcaaggcgctaacaagtgccagaacttgggatgattcttcaagtgaagatgaacctccaaggacgcgcaaccaccggtcctcatcacgctcatcacggtcatcacacaaatgccttatggcaagaggtaaaatgagcattccattctctagtgatgatagtagtagtgatgatgatggtgagggaaagccctccatagatgagcttgcggaagccgtcaaattcttccaggatgtttgcactaagcaaaaagctcaacttaagactttgaaaaataagttgattagctctcaaaatgattataaaagtttgaccgaaaattttgaaacttttgcaaacttaaataaaacatgttcggatgaggttgcaaaggaaaatgagcaattaaggcaagaagtggctcgtcttggcaaggctttgtatgacaagaaaggcaaagccaaacaaatccgacctccacaggataacaccactgcgggagtgaacaagcctaggagggagaaactgtga

SEQ ID NO: 14116 - DNA, 765 bp, Zea mays
  Peptide Sequence Number=SeqID_57491
atgtcccatctgatggcactgttagaggcaactaagatcaccctggataacagagaggagcttgtggttgacttgtccactgagatggtggaaaaggacttacaggtggagcagctgtcaaatgagatccaagagctggaggaattagtggggaccagggaaaacaccatcgaggttcttgaggaccagcttatcaacacccagcagcagcttgccgaggctaatgagcacctggatatgcatcaccaggagatccaggacatggaggccaacaaggatgtcgacatcgagggaggagagagcctgcctccagcttggacactgctgactcagggagaccaccttcccctgagtcgaatggtcgggagagcgcgtcgtggtcaaaatgagcgcgttcctccactgccgccaccgcctcccactctgcaggagctaatggctcagccgaatgagatcttgaggcagctagctcagcgccagccaccacctcagcactatggtggtggagatcatcagcgtcaccccgcggcagccacctaccaggagttcctcagtacccagccaccatcgttcaccagggcagaggacccactagatgcggatgtatggttgagaatagtggaatccaaattcctgctactccatggagtttgctcagaggtcactaaagtcaggttcatcacccagcagcttcgcggatccttttttgacttggtgggaccattttcttgctatgcagccagagaccgaggacgaatcttctag

SEQ ID NO: 14117 - DNA, 138 bp, Zea mays
  Peptide Sequence Number=SeqID_57492
atggctcttctttgctttggcaaaaagagaaggagctcttcttgcccatatgggagtggaagcttcagtgttggcaatccgagtgagattgaacctgcttcttcaactcaagaacactttcttcttttcaataggtag

SEQ ID NO: 14118 - DNA, 546 bp, Zea mays
  Peptide Sequence Number=SeqID_57493
atgtcgactcatcacatcctggggttgaagaaggtcccaagggttcggttgttcgccgatgaaagtggtaccgccgggcagctaagttggtatggaagaattgctgcgccgcgggaaatccttctctatacaagttctcatacgaggtttttgaacagaacttcgataggcgagaggtgtaagcaccgcgagtctagtgaagatgtttcagttccgttctctaaagatagagtttccttggaaaaaccaaggccagttgagatcaatctctttcaccaaaagagcggaaaggaaaaaactttttcgtcaatgatcacgactttcttaaaccttcctccctttgataaaggtttgattaaaggatatctaagtaagatagacgagagctatttgactcaactatctgagtttgccaaccacaatagagtggaagcggcaaaagtgggccacgtggccctgcatgagctatccttctcatggttgaggggggttaaaatgagggtgaagaccttccctatacaacagaagggtccaatttgtttgtag

SEQ ID NO: 14119 - DNA, 225 bp, Zea mays
  Peptide Sequence Number=SeqID_57494
atggcttcctatgttgccaagttccaaatggatgcattggctaaggggtggccaagatgtccgaatggaaacacatttccactggtggttgataatctagatggtgtgcgagttgacacaagcgatttatcctggttcgagcaatgcaaggccctacttccagctaagggggatggagcttatattactcgcaccgaggtgcttgaagtagggattacaagctga

SEQ ID NO: 14120 - DNA, 135 bp, Zea mays
  Peptide Sequence Number=SeqID_57495
atgggcgggggcctcctggcagcagcatccaccctgaggtcagtgctgccgctgttcggccccccggagcagaagtcgtcgtcgtcgccacttctggagcagagccgtgtttttttcctcattttcgagcactaa

SEQ ID NO: 14121 - DNA, 174 bp, Zea mays
  Peptide Sequence Number=SeqID_57496
atggggagtagctctctccgggcagaaaaggaatcacggcttgtgggtggcaatgagactgatggttttggttatgactatggtactggttgtcagcattgcaaccactgctcaggcgaagatgaagctgtggaaggagacttccaggagttccaagactacgacgagttctag

SEQ ID NO: 14122 - DNA, 513 bp, Zea mays
  Peptide Sequence Number=SeqID_57497
atgtccggcttcgggcgccataggaagctccgcctcgcccgaccccagggctcggcccccgtctcggctccggaagacgacgaactccgcctcacccgaccccagggctcggactcggcctcggctccggaagacgacggactccgcctcgcccgacccagggctcggactcggcctcggccccggaagacgacggactccgcctcgcccgacccaaggctcggactcggcctcggccccgaaagacgacgaactccgcctcgcccgaccccagggctcggactcggcctcggccccggaagacgacgaactccgcctcgcccgaccccagggctcggattcagccttggcctcagacgatggtctccgtctcgcccaacccggggctcggactcgacctcgacctcgaaagacagactcgacctcgacctcggagaagcctccgcctcgcccgacccagggctcggaccgaccacgtcacaggggggccatcattatcctagccctagctag

SEQ ID NO: 14123 - DNA, 336 bp, Zea mays
  Peptide Sequence Number=SeqID_57498
atggcccgcgcccgcgcctatataacgcccagtgaccttgaccgtacccctccgcacgcgctcaacctcaccggagctcaactcaccgtcacgagtgagcacacctcagtgaagctccccgagcgaggaatcgaagcctgcttcgccggagaggccagtccacggtcgccggagttcacaaccccgccggagtgcgtggaccggccttgcttgtggcataattttacaggttctctggaggacatggttgctggagtgacttggccgtccatcttgccaccgggttggactgtcgagtgggaccccgcctcggctgaggaggagcatgaggagtga

SEQ ID NO: 14124 - DNA, 678 bp, Zea mays
  Peptide Sequence Number=SeqID_57499
atgcagaggatgggagaggcgactcgcgcgacgttggagagggagtgcaggggcaggggcatggaagcgctgaccggatctggctgccgccgtgacctgcctctcctcccgctcgctggccgccgccgatcggttggccgtgcccggcgtggaggaggacaacgcagggacgacaggggaatcggacgcagcgaccaaggttttcgagggagggtgtgggggcagatagggcgaggtggaggaggttttcgggggaatcagacgcagcgaccaaggttttcggcgcacagtgggcaaggtggagggcgctatggcggtcgggctccgggagcattgatggcggcgggcgacagagggggcgctgatggcggtcgtcgaggtacacggacgcgcgtgggtttgggagcaagccgcgcgtggggcgggggcacggtcatgcctgtggacgccctcactgtgctcttaagaccactgtcggggaccataattaggggtaccccaagactcctaatctcagctgccgaccccgaaggattcacgcctcgcctgaggaccccctcaagcaacggacacaccttcggctcgcccgaggctcagtcttcgccaagaagcaaccttggccaggtcgccacaccaaccgaccgtatcgcagaagcatttaatgcaaagatggcctga

SEQ ID NO: 14125 - DNA, 111 bp, Zea mays
  Peptide Sequence Number=SeqID_57500
atggctcggtccggtgatcccctagtttggaaggcagctaatcagattgtgcagagattaggtgtttcgcgtagtcataagccagatgagagaggagaggtgatgatgtga

SEQ ID NO: 14126 - DNA, 423 bp, Zea mays
  Peptide Sequence Number=SeqID_57501
atgcgctataccgatgccgacgtgcacagggacggtttcgagtggggttgcgtctatcgtgctctagctgcccccgcgtccaccgccacctcctccatctcgcgcctccgtttctgttctctagttgcccccgcgtccaccgccacctcctccatctcgcgcctccggtccttgtcggcctcgtattatttttccttcgtttctgcagtttctgttctccaattagcatattccgacagcaccagtgagccttcacttctagccagcaccagtggctctattccgacagggcataatggattctttttgttatgggattgcctcagtgagattgtttttaatgcccaagagattgtcatatctggatattgtatgcatatgacactcgacgtgctccaagatcttcccctgacagacctgtaa

SEQ ID NO: 14127 - DNA, 189 bp, Zea mays
  Peptide Sequence Number=SeqID_57502
atggcaggcgagaaggtggcctctaaactcgccttggtgatggcctctaatgttcctgggatgatagaggaggctttggttaacgagagcagacttttgactaaggcggcggggccaagtgccgtagacgttctggcgatccggctgaggggggaagaactcgacttgccttcttcacagaaatcttga

SEQ ID NO: 14128 - DNA, 427 bp, Zea mays
  Peptide Sequence Number=SeqID_57503
atggacgccggccgcctcccccctggcgcggaccccgccgccgccgtcgctcccaacgcggctccagccgccgctgctgcgcctggcgcggccctggccgcaggggcccccagccgggccgccgtcacgcctggcgcaggcctggccgcaggagccacccacttggccttcactgccgcccctctgtgcgcggccggttccctgcacgctggcctcgcgtccctcacggccatcggacctccaccgcccggtctcactgccccccgcagcgatcgcaccggtggctcccacccgtacatcgacggcctcggggcccctccgcgattttttttcccaatgggtcctgcgctgtatccttcacaccattatttcccaacaatgcccggaaaaccgacaagaacaatcccctctttagacgacgacaatg

SEQ ID NO: 14129 - DNA, 384 bp, Zea mays
  Peptide Sequence Number=SeqID_57504
atggccaccatcttacaagccaccacagcttcctatgtacgatgggcattcgaatccgaagcaattattcatgagttacgaagcaaccatatcctcatatggtggcaacacggctgtcatggcgaagtctttcgtcatggcagtcaggagtatagctcagacgtggtatttttcccttcgctcggaaacgatcacatcatggcaaaagctgaaggacatgctgaagagaagggaggaggcctacaagtatcggagatgactaggggcttcggaggaaggctccaccctagacatgtcagaacaatccataatcccaactcaaacgatgatagggcaaaccacactcaaggcaaccaacaaagcttccaatcctcaggaatgtaa

SEQ ID NO: 14130 - DNA, 798 bp, Zea mays
  Peptide Sequence Number=SeqID_57505
atgggacgccggtcttgttccctgcggcccgagtcagctcagggtagggtgatgatggcacctcctgttgacgtggctggtctgcgccctaggttgggcgatgtggaagctcctccgaagccgaggtcgagtctgtcttccggggtcgaggtcgagtctgagcccctgggtggggcgaggcggaggccaccggctgaggccagggcggagtccgagccctggggtcgggcggagcggagttcgccgtcttctggagctgagcccaagtccgagccctggatcgggcggggcggagttcgccgtcttccgggacttagcccgagtccgagccctgggtcgggcggagcggagttcgccgtcttccgggctgggtcgggcggagcggagttcgccgtcttccgggacttagcccgagtccgagccctgggtcgggcggagcggagcttcctatggtgccttcggccgggcctgactgcctgtcagtctcactctgtcaagtggcaccgcagtcggagtggcgcaggcggcgctgtccttctgtcaggtcggtcagtggagcggcgaagtgacggcggtcacttcggctctgccggctggggggcgcgcgtcaggataaaggtgttaggccacctttgcattaaatgctcctgcgatttggtcggtcggtgcggcgatttggttagggttgcttcttggcgaaggcaaggcctcgggcgagccgtaaatatgttcgccgctggagggggcctcgggcgagacggaaatcctccggggtcggctgcgcttgtccgaggctag

SEQ ID NO: 14131 - DNA, 1113 bp, Zea mays
  Peptide Sequence Number=SeqID_57506
atgtatgattcgattttaattaagaaaagaaataatgatgatgctttatcttgtgtttctccacttaaaattgaaaatgacatgcttaagagtcaagtagatttgctaaatcttgagaaacttgctcttagtaaaaaatatgatatgttgtcttactctcatggtcaatctttgattgagcaacaagttgtaggatcaaaagaaaagtttcttgggaacaataaaacaagacaattgagaagaagacaccatgctcaacctcctcaggatatccacggacgcgtagtgaagaagcttgagaagggagaaatcatagcaagcgtcaaactccacaagaaggaagttcctaaatcaataaataaagaaatcaacatgaacaaggaaaaagcacaaaagggaagaggaaaaaggagatgcttcaagtgcaaggaaccagaccacttcattgtgtcttgtccacacaaagacaaggatgaaaggatgaggagatgctttggatgcaatgataaggaccatgtgatcacttcatgctcgctcatgaagaatcaaagatgtgcattccccacgatgaccctcaccaaaaacaagaatgaacagcaagcatcataccaagctaagcgacatttctggacggtgtcacacccggtttcagaagggaaaccgaaatgcgaaccatacaaacggttgaggctacagggacgttggcgggacaccaagctaggcagctcggccacgctggggtgcgagggctggctatgccgggacgagcagagtcgcgctgagggcgggcaaagcacgccaggacggacacagccgcgccgagggcaagcactgacgcttttcaaattggtagctgaaggtaccacagcttggttgccttgcgaagccattgtcgtggtcgtggaagttgggtacagtgcctcatggctaaagagggcaaaaagaaggtacatcaaagtgacactcctaagtacttccaatgatgaatatgaatctattgataattatgtggacctatcattgcttttcgaaggccttagctttagtcaaattgagaaaattaatgaattggtcaaatccattaacgagaaggatgaactcttagaaagctaa

SEQ ID NO: 14132 - DNA, 153 bp, Zea mays
  Peptide Sequence Number=SeqID_57507
atggagcccgcagcatcatgcctaattgacagcccgggcccctcgtgcctcattccaacggaccttgcacagccacagccttacaaacgagaacacgaagataattacaaggttaccttcggccttacaaatgagaacacgaagtggtgttag

SEQ ID NO: 14133 - DNA, 804 bp, Zea mays
  Peptide Sequence Number=SeqID_57508
atggcttcccacggatcctcagacgacggaaatgcactatcccacactgacgggcttgcacgtgagggctttccccgcattttgtgggaggtacttcagggggccggatacacgacgcctcctcagtacgcggtgcagcagttcgagaagcaccgagtgccccattgtagggtgaggatgactctggagcctcatcccctacagccaggctggcgttcattggactctgagtcttttggataccgggctgaggacacgatcgaggcgattgctctgcacgggttgaccactttctgcggattccatcccttggagctgactacccaccccattggcttgttccccgggtggagcatgccaaggacatctgggccatctacccaggcgacaaagatcactttggacaacagagaggagcttgtggttgatttgtccactgagatggtggaaaaggacttgcaggtggagcagctatccaatgatatccaagagttggaggaattagtggggaccagggagaacaccatcgaggttctcgaggatcagcccattaacactcagcagcagctggctgaggctaatgagcacctggatatgcatcaccaagagatccaggacatggaggccaacgaggacgtcgacattgagggaggggaggagcctgcctccagcgtggacactgctggctcagggagaccaccttcccccgagtcgagtgttgcctcatggccgggagacagcgtcgtggccagaatgagcgcgttcctccaccgccgccaccgcctcccactctgcaggagctaa

SEQ ID NO: 14134 - DNA, 645 bp, Zea mays
  Peptide Sequence Number=SeqID_57509
atggcccacgcccgcgcctataaagcccgctcaggcgtcgaccacactcttcctcgcacgctcaaacctcaccggagctcagctcaccgccgtttgcccgtgcgcggcgtatccgcggccacccgagcccctgccgccgtagaccggccagcccaaccttttcccaaccccgtccgaccctcgaagacgactgagcacacctcagtgaagctccccgagcgaggaatcgaagtctgcttcgccggagaggccagtccacggccgccggagttcccaaccccaccggagtgcgtggaccggagcctccccgagccaaccccgcccctcgccggacctatctcgccgccgactttgcccctcacgcgacctgagacgtggtctccccattccggttatggtgggtacaagtgcggtcactgcacgacggcagtcggggtcagtgaggcattgtacgccaaggcggtgagccctgatctgctgacggggaatcgatggggacggttgatgtgtgtggggacggagtgcccctacaagtcgtgttctctggaggacatggttgctggagtgacttggccgtccatcttgccaccgggatggactgtcgagtgggaccctacctcggctgaggaggagcatgaggagtga

SEQ ID NO: 14135 - DNA, 1394 bp, Zea mays
  Peptide Sequence Number=SeqID_57510
gtggtgatgaggatgatgattatgattatgcttatggtaatggtgaagatgaagtcatggaggaggacttccaggagttccaagagtacgatgagttctatgtgtgggttagcggcaaacccccagtcggctgcctgtgggctttcttctccatgggcgttggccaagatcaccccatggcgctcggcttcctggaacgcagcagcatgccagcgcagggccttcccatggtgccaccccccgcagctcacctccctgtgccctctctcccatggtgcctctgctctttcctgcccggccaggagacgcccaggccaggagcgcctagagctcgcccctgctttgctccggttgctcgtcttcctcggggccgtcagcctcctccaacgccagccaccaatccaccatctccagccggcgtcctgctcctccatgggctcagcccctcccctccaggccggttcccccgcttccctcagaccccagcagcgagcagcgcaagtcctgctgtcccatggtggatcctagcccttctctggtccggccatggtgggagcagcagccccaagtttggaccttgcccctgctcgcccaggggtcttcctttccccaaaccagcaggccgggcgcccctctccgagctcgccccttcgctgctccttcccatgaccagtgcccctgcagcagccctcgctcgctctgtcctctactccgcagcaccgccattgtccttgcctaagcgcagtccaaatccctgcaacaagcctcgtcgagcattgccccacaaaagcatgctccttcgcctcgcgcgttgggtgctcgacgaatcgcagcagcgagccacgccctccggcttcgcttcggtctcccatgcgcgacgatgcgttcgtcttcatgccacatgtgcagcaaccacgaccgaggaggagatagagtctgtgaggagctgctcccctgtgctcccgctggaggcgccccctacaccaccactgagcgccacagccactagagtagctgctggaggagacccagacgatggaggtggcgacaacagctcgagccacaacaccgacctttcaaccgacctagagccagaaggatgggttgctcaacccatcactcgcgacgctgctcgcaggtgtcacttccatgacgcgctcgaccggcgcacttggtctatcgagtatcgctgtgttgtcttccagcacaatcgcggggtttacccggatcgttgggaggcgacctacttggtgcgccatccggagaacagtctccgaggtgcggagatctgctcagagcactattctatctctgagcgggactcagctgaggcggccatgctagatgtcgcacgcatgcgctttcgcactactgctcagtgctcggcggggtag

SEQ ID NO: 14136 - DNA, 507 bp, Zea mays
  Peptide Sequence Number=SeqID_57511
atggcgcctcctgttgacgtggctggtctgcgccctaggttgggcgatgtggaggctcctccgaagtcgaggtcgattctgtcttccgtggccgaggtcgagtccgagcccctgggtcgggcgaggcggagaccgtcggctgaggccagggcggagtccgagccctggggtcgggcgaagcggagttcgtcgtcttccggggctgagcccaagtccgagccctgggtcgggcagagcggagttcgtcgtcttccggggctgtgcccaagtccgagccctgggtcgggcggagcggagttcgccgtcttccggggcttagcccgagtccgagccctaggtcgggcgaagcggagcttcctatggtgtctgcggccgggcctgactgcctgtcagcctcactctgtcaagtggcaccgcagtcagagcggcgcaagcggcgctgtctttctgttaggccagttagtggagcggcgaagtgacggcggtcacttcggctctgtcgactga

SEQ ID NO: 14137 - DNA, 333 bp, Zea mays
  Peptide Sequence Number=SeqID_57512
atggctgcctcaatgcatgcgccattccgaagaggtcctcgcccccgtcctcctatggtgggcgacaacgaggccattaaagccaaagagtgggaggctcggcggcaggtggcactggtggtctcgccagcggaggcaaccacctctgcaacgggcagcctcaccagcggcggcgaccacctcagcaccgacgacaacggccacctctgcaccggtggcttaccagcgacggcggccgttctcaccgcgtgcagaaaggtcctcgcccccatcctcctacagggtgaggacaagaccatccaagaacgcggccgccacctccgcggcatatga

SEQ ID NO: 14138 - DNA, 171 bp, Zea mays
  Peptide Sequence Number=SeqID_57513
atgtacgtggtggtgccaaacagtccgcacggcggcggcgccggcggccagtgcgcccaacgcccatacctcgattccgaagagctatacgcaggggaggacgtgacagacaacatgggagggtttctcacctgcaagaggttgcggaggagcctgccctcgcgagaatag

SEQ ID NO: 14139 - DNA, 762 bp, Zea mays
  Peptide Sequence Number=SeqID_57514
atgatgaccgcgtcaaaaagggaccgggaaaggggatacttcgaaagggatccttctctacgaaggaagcgggccccgagccctcctactgatcagaggttcgaaggctggtccctcggaagggttcgacagccgcctcagagcactcaggctccgcgcctactactgatcagaggttcgaaggctggcccctcggaagggttcgatagccgcctcagagcactcgggctccgcgcccactactggtcagaggaagctctgcctcgcctgaccccagagctcgggctcaacctcgaccttggacgacggactccgcctcgcccgaccccagggctcggactcagcctcgacctcggaagatggtctccgcctcgcccgaccccagggctcggattcagcctcgacctcggacgacggactccgcctcacccgaccccaaggctcggactcagcctcgacctcggaagacggtctccgcctcgcccgaccccacagctcggactcagcctcgacctcggacgatggactccgcctcgcccaaccccagggctcggactcagcctcgacctcggaagacggtctccgcctcgctcgaccccagggctcggacttagcctcgacctcggaggagcctccgcctcgcccgacctcgagcttggaccttccacgtcacagggggccatcattaccctacccctagctagctcaggctacggggaacatgaccggtgtcccatctggctcgccccggtaaacaagtaa

SEQ ID NO: 14140 - DNA, 675 bp, Zea mays
  Peptide Sequence Number=SeqID_57515
atggccggagtcggtcggtccacgtgcgcaggcggggatgctcgtcggcggcgaggagaccggcctggtcacggcgagatagttcaatcagatgggtcagggaggtccacgggatgccagagaagacatgagcgcaaggaattgggcggagactcactggatagctcggtccacacgcggcggcggaagaccgaagtccggacgtgttcaagggaatttggcatgactttgatatttggatctcctggctttgagtttcgaaaagcagagaacgcagatgatctttgggaagaggaggtggagtctgggaggcaaccgtcccctgtgcctcagctagatgtgccccgtgcaccaccacagggcacctcgactactggaggagaccctgacggagacgacgatgatggcagttcgagccacaacacgaagcttttggaggagcaggagccggaaggatggatcactcggcccatcattcgtgacgccgctcgtggttgtcatttccacgacgctctcgacaccttgctgtgttgggctttcaaccgacacaattggtccatcgagtaccgttgtgtagtctaccagcaccgtcgcgggttatacccggaccagtgggaggctacttgcctagtgcgccgtccggacgatgatctccagggtgcagaggccttctaa

SEQ ID NO: 14141 - DNA, 285 bp, Zea mays
  Peptide Sequence Number=SeqID_57516
atggacttgcacgagagggttttcctcgtatcttgtgagaggtactttagggagccggtgaggcgaggagaggcaatgtctcatctgatggcattgttggaggctaccaagattaccttggataacatagaggaacttgtggtagatctgtccactgagatggtggaaaaggacctacacgtggaacagatgtccaatgagatccaagagctggaggaactagtgggaaccagggagaacaccattgaggttcttgaggatcagttaatcaacactcagcaataa

SEQ ID NO: 14142 - DNA, 978 bp, Zea mays
  Peptide Sequence Number=SeqID_57517
atggaggcagcaaccaccgccgccgtcacctgtgctgtcgactatgccatcctcaccccgacctcagccaccttcaccgccaccaccaccaactccgtccagagctcagactcgtcgcagctccgaggcggccgaccgtccacagctgacctggagttgacgctctccggcgccccgcccgccggccaggaacagaggtcgggcgtagacgacggcaaccgccgcaacgacaccaagatcgccatttccggcttcccgcggtcgcggctcttcgacggcgcacgcgcgccgtaccggcgggagatcgaggacgggctcaagagcttggccgcgcgcgagacgccggcgccgaggccggagagcggccacgggtaccgtgtcatcacgctcgccgggcacaatgtcggcgcgagtatggtccttggctatggcggcggcctcacggaagcgccagcgccactgccgagagccgcggagccaggggtgccggtgccgggtcccggttcgagaccgtcggcggtggccgcgaacgtgaacagcaacgtgcagagcgtgaacaactcgtcgatggaagagagcacgtgcaccgccggcaatcctggcgtgcacgtggacatcaagaacgcgcgcgaggagctcgctgcggtgacaccaacgccgattcagatggaagaagagaagccaaaggagcctgtgagaagaccgccgcttgctgtgacgccgcagcagaagagctcagcagcaggtggcgctgaggtggcaccggcgaggccaaggccgaggcggtgcttgcgcgcactgatgatggagaacgggagcaacacagaggctgcgcggaagccgaggccgagcgcctgccggttccagtgcgtgacggatcatgcaccgacggcgacggcgacgccgagcaacggcggtggcgctggcgataagaatgcagaggatggcgggaaatccagcacggaaggggcaagctga

SEQ ID NO: 14143 - DNA, 1335 bp, Zea mays
  Peptide Sequence Number=SeqID_57518
atgcaggcggcaagcaaccgcaccaagggggctcaccctttcgacttcgacgcgtccagcatggaggtccaggcccacacgtcatgtaaccggcgcgccggttactacgtgcgagaaactgcaccgccactcgcgccagtaccgcgccttctcgactgcggaaccggtgccgcgactcgaggcgaccctgcgcatgacccaacagtgccagccgagcacatcggtcacgggtcagtcagctgcgagagaaggcgcgacggtcgatacggccagaaatgggccgacagtaatggcggtggcaggcgggcggaagcagcagtcaagtcgtcagcaagctcacgccccctcctgggacagcgagagaaccctctcccacggcgtgaagacgacgcgcccgtgttccgttcctcgaacggctcgcgcacgcacaacggctgccccgcggaccactcgtcccgtcgcattaactctacggcaggacaggcggcacctttggcaggcgaagctggcccctcggaagggttcaacaaccgcctcagagcacttgggctccgcgcccactactggtcagaggttcgaaggctggcccggaagggttcaacggccgcctcaggccactcgggcttcgtgcccactactgatcaggggttcgtaggctggcccccgaagggttctgacagccgcctcagagcacgcagagcgagggatgaccctgggtatgttcgatacataaccaaggctcgggctacgctcccgagcctcgggtgccataggaagctccgcctcgcccgaccccagggcttggcccccgtctcggcctcagaagatggactttgcctcgcccgaccccagggctcggactcagccacgactcagaagacgacggactccgcctcgcccgaccccagggctcggacacagcctcggcctcagaagacggtctccgcctcgcccgaccccagggctcggacacagcctcggcctcggaagacggtctccgcctcgcccaacccaggggtcggactcagcctcgacctcggaagacggactcgacctcgacctcggaggagcctccacctcgcccaacccagggctcggaccgaccatgtcacagggggggccatcattaccctacccctagctagctcaggctacggggaacaagaccgtcgtcccatctggctcgccccggggcgcgtcggggaggctgaggggcgcctggcgtccagcggctcgacgacgtcgagcgcgtgtggaagaagcaggggaggggagagagagaaaggtgggtggcggcggctaagggagcaggaggcaagggcggcggctggctag

SEQ ID NO: 14144 - DNA, 93 bp, Zea mays
  Peptide Sequence Number=SeqID_57519
atgacgaagaaggcacagggcacaacatgtgtaaatttacattcatgcccttcatatttactattgacttatggacaacccaatggggactag

SEQ ID NO: 14145 - DNA, 201 bp, Zea mays
  Peptide Sequence Number=SeqID_57520
tctgcaagtcagactggcaaacaggtcgccagaggtgtcaggggcggttcaaccggtctggtcaaccctgaccagtctgcaggtcagtctgccagtcagactggcagtcaggctgccaggcctgctaggggcggttcaaccgccctagggggcggtgttggggaccttcggcatccgaaggtcctcaaaaacaggatttaa

SEQ ID NO: 14146 - DNA, 170 bp, Zea mays
  Peptide Sequence Number=SeqID_57521
atggccagacctcgccgggacttacccccaaacactaatctacacgctggaccgacgctaaaccaagcaagagagatagagagtgcaccagtagacttaccaccacgattaagggtgcagccgaagccgcccacgctgcacagaggttccgcggcggcaacacagcgccg

SEQ ID NO: 14147 - DNA, 303 bp, Zea mays
  Peptide Sequence Number=SeqID_57522
atggccagacctcgccgggacttacccccaaacactaatctacacgctggaccgacgctaaaccaagcaagagagatagagagtgcaccagtagacttaccaccacgattaagggtgcagccgaagccgcccacgctgcacagaggttccgcggcggcaacacagcgccggttgatcttttatttcccggccttggtctcatttattcgagatgtgattgtggacattactccacaacccatcacactcaatcaaagatccaaatcagacaagtatcataagaacaaacattcaagcacatag

SEQ ID NO: 14148 - DNA, 705 bp, Zea mays
  Peptide Sequence Number=SeqID_57523
atgaaaaaggaaaaaggtaaagattcaattaatcatgttgtttgcactgaccttctctccatgtcattcaagtacaaaaagggaaaaggaaaaaggaggtgtttcaagtgcaagaagttaggccacctcatcgcgtcttgtccgtacaaagacaagaatgaagggacaaggagttgttttggatgcaacaaaaaggaccacacgatcacttcatgtccggtcatgaagaatcaaggatgtgcatcctccaaggtgaccctcactaaggaaaatgacacacagcaagcgtcgtgtcaagttgagcgacatttctgctacaagtgtggtgagcagggtcatctatccaaggtatgttataaagtctcaaggtggaaaagggaagatgagcaagaaatggagcgatcaggacttgggtacctccacaagtcgagtaattggtatctaaagttcaacaagaaaaagttaggagaaagaatcaggcacaagtgtggagaagctctcaagagattaactattttcaagatgggaagtacactaaatcatggtaaagctttaattgtgttgccatcaatcaccaaaaagggggagattcaaagctctcttgatgttggagctaagaaatgtcaatctagatcaagtcaagccgactcgacgatttatgagtccaacatcaaagctcaagcatgtgaaatgctacagatgtaa

SEQ ID NO: 14149 - DNA, 321 bp, Zea mays
  Peptide Sequence Number=SeqID_57524
atggcacccaaaagagctagttcgaaggcagccccatccgtcgacgaagcggcaaaggcagcactgctagctgagagaaagggcaaggccctcgcagacaacacccaccaaggagctggcgaagacgaagcacacaaccgcaacctccagaagcagaaagaaatccttgaggccaagcgccaacgtgtctccgcgcagaccaaggtgcgccagatgatacgagatgaggagcagagggctcaagaactcgagcaagagattgcgatcatgcagcgcgaaggccaacatgatctgcagcacgaagacctattcattccttag

SEQ ID NO: 14150 - DNA, 705 bp, Zea mays
  Peptide Sequence Number=SeqID_57525
atgctcccaaggtcgcgcctcctccaccggatactatgcccgctggcaggtctggctctcagcaacaggcatctgctaggagtggtgccgctagtccgcccccggctgctgccgctgggacagcgccaccgggccccgtgctccagctgggggtccagcagcagcggcgccaacaccaagcggcgttgcagcagtgggggaggtcccaactgcgccgacggctaccgtagcctcaacgacgatgatgtcgtcgagtacaccatcggcagtagtggaggagatcccaaccgcgcccactcctgccgtcgaggggagctggaggcgtcgcgacgagagaagaggctggccaagagggaggaggccctgagccagagggaggctctcaccacagagctctgggccaagctgaaggccctggaccagaccctggatgcccagtgggcccagcaagtggaggccgtagaaaaaatcagaaaatgggagcaagagctggaggacaaggctagcgacattgccctcgccgaggagaacctcaaggagaaggatgcatccctggacaggcgggcggcggacctcgctaggcgagagatagacctcgccttccaggaggaaatgcttgaaaggcggggcaagttcctggctgagcacgagctggaagcagaggagaaggagaagaagctagaggagcggatccagcagttctag

SEQ ID NO: 14151 - DNA, 438 bp, Zea mays
  Peptide Sequence Number=SeqID_57526
atgggcaagaaacgcaagcgcgagccgactcctccgtctgaagactttggtgactcggaatactcagaggaggagttctcctctgagtccgaggaatctccggctcccatccctctgcgtgagtcgtctgacgattcagatgactcccaggggctcgcgacggaggtctggacttacatccgggccgtcgagcgctccgggctcgcgggctcggatgagtcggagtactcctcggacgaggaggactcgtccgaggaggacggcggcggcggtgagggcgacgacgacgacgacaacgacggaggcgatggcgacgacgacgacggtgacgacgacggcggcagcaggggcgacggcggcatcagcaggggcggcagcagcggcggcagcaggggcggcagcggcggcggcaggggcggcaacaaggccagtggctaa

SEQ ID NO: 14152 - DNA, 1659 bp, Zea mays
  Peptide Sequence Number=SeqID_57527
atggacaggggcaagagacctgcaagcagctcctccgccctaggtggcaccggggggtcagaagaagagaggcgacgccggttgcgtcgcacggacgggtcgcttatcttggaccccctagaaatgtcagaggactgctggtggggccgaggaggctggctcctaggcccagggggcgcaaaggcgcgccagtcctctgattccgccaccaccaccaccacagcaacaacagcagcagcagcaaccatcgccagcacagccacagcagcaagagcggcggtcgtcttgcttccagggtcgctggaagtgcatcgtgcagcacgggcacactgtcttgacaatggactggacaggggtccgggtcatgcgcacaggggtccggcgtcttctgggcccgatagcgttatctctgagaacgccaccttaactgcccacaagatacccctgaggctattccccacgcggctatgggtggggccagagtttgactggcgatcggctcgctgctcctgcgtgcctgttgatgcacttactgccggcccgcctatggtcacgtcgactgccacgcctgttcccacggctaactggcccgtgacctccgtacttaatgtctttgttgggccatgcgcgggcggtctcatcgccgaggagctcgcgctcttcgtttctgcgtggtggtgctgccaatcttgtcttcttcttgttgctgttggagaggcgcaacctcgtgggggttggcactcttctgccatcgctcggcttcaaggattttcatcatgcagcccgactgtagtctctcgccggtggtcatctataaggatgaccaccagcctcgtggtggagagaagcaagctgggctgcggcctcccccctaccctcagcttcaaggatgttcatcatcctcgctggggtggaaggcgagccgagtcggggccctgccctccgcatgggctggcgacccgcttcttcctccagcatttggaggagaaggatgttcatcagccttgcggaggaggagaacctcggctacgcggtgccggctggctgcaggccgtcatctacagcgtgtttggctccttggcccggatggctttggtgccgcctccaacgctgcctcccaccgtcaagtcgagcgtggctgtccgtccaccacacgggcgacgttcacaccgtgcgcaggaggacgggggcgaggacctttctgcacgtgctgaggcgtccgccgttgccgaggtggtcgctgctgctggtgaggctgcccagtgtagaggtggttgcctccgctggcgagaccaccagcgccgtctgtggccaagcctccaactctttggctttaatggcctcgttgtcacccccataggaggacaggggcgaggacctcttcgcaatggcatgtgcattgaggtggccatcaccgctgccacaccgtcttggaggattccgcaaggacagcggccgcaaacttccaacgcgactccactggcgtatggcccatggtacggaaccaggctaagcggctacacggctccggacctccccaggagacaagaccaggctaagcggccacacaggctccggaccactccatggaacgggctcccgctctttagagctggccccaggctgtcgggccctcctgctttcgcagagaggtcctaa

SEQ ID NO: 14153 - DNA, 1623 bp, Zea mays
  Peptide Sequence Number=SeqID_57528
atggagaagagcgctacaactggcggcggttcaagcggcggcggcggagaggctgcggaggaggcgaaggtgcctctgctgcagccgagggctgcggcggcggcggcggcggccgaggaggaccatggaggaggaggaggatacgacggcaaggcggcggcggatgaggagggcagggacgcgtcgtggtcgtcgctgccgctgcggcggcgcgcgtgggaggagaacaagaagctgtgggtggtggccgggccgtccatcttcacgcgcttcgcgtcgttcggcgtcaccgtcatcagccaggccttcatcggccacatcggcgccaccgagctcgccgcctacgcgctcgtctccaccgtcctcatgaggttcagcaacggcatcctgctgggcatggcgagcgcgctggagacgctgtgcgggcagtcgtacggggcgaagcagtaccacatgctgggcatctacctgcagcggtcgtggatcatcctgtcggcgtgcgccgtggtgcagctccccgtgtacctgttcacggagccgctgctggtggcgctggggcaggacccggacatctcggcggtggcggggaccgtggcgctctggtacatccccgtgctcttctccttcgtctgggccttcccgctgcagatgtacctgcaggcgcagatcaagaacatgatcatcacgtacctcgccatgctcaacctcggcctccacctcgccctgtcctggctcgccgccgtccacctccgcctcggcctcgccggcgtcatgggctccatggtcgtcgccatgtggatccccgtgttcggccagctcgccttcgtcttcttcggcggatgccctctcacctggaccggattctcgtccgccgccttcgccgacctcggcgccatcgtcaggctctcgctctcttctggtgtcatgctctgcttggaattgtggtacaacaccatactggtgctcctcacaggatacatgaagaatgcggagatcgcacttgacgccctttcgatatgccttaacatcaatggttgggagatgatgatctccataggcttcctggctgcaacaggagtgcgagtggcgaacgagctgggagctgggagcgcgaggagggccaagttcgcgatctacaacgtggtcgtcacctccttcgccatcgggctcgtgctgttcgtgctcttcctcttcttccgcgggagcctcgcctacatattcaccgagagccaggcggtggccgcagccgtcgccgacctctcgcccctgctggccttctccatactgctcaacagcgtccagcccgtgctgtcaggtgtcgctgttggtgccggttggcaaggcgtagtcgcgtacgtcaacgtcacgtcgtactacctgatcggcattcctcttggcgcagtcctaggctacgtggtggggcttcatgtgaaggtgaggtgctctcagagcctgggcatttggatcggaatgctgctcggaacgctggtccagactatcgtgcttctcttcataacagtaaagaccgactgggacaaacaggtggtggccgctcaagagaggctgaagaaatggtacatggaagagaacagaaggatgcaggcctcgagggggaatccttga

SEQ ID NO: 14154 - DNA, 257 bp, Zea mays
  Peptide Sequence Number=SeqID_57529
tgagggcagaagtaaatgaatctggaagtgttttggctgttgatgcactctcgcaagttaaacatgttctgcttccagtccttgatcgcaacccttacctttctgaaggcacaagacagcaatgctcagctctaaccatcctctttgttaccatggccttgctgccagagcttgactgggaaccagtaagattacatgagaaagagggagtcagctccgtgcttaagcttcaatttagccactctggccatcactaa

SEQ ID NO: 14155 - DNA, 1272 bp, Zea mays
  Peptide Sequence Number=SeqID_57530
atgtaccgagaggcgttgtggcagaagagaggtcgtcctcgggagttatatccggacgtatctagtaaggatgctcctgttcctcctgaactccccgtgcctaactgtgactgtggcagactggcttgggtacatcaatcacaacatccagacacggctgctcgctgctactacctttgtggcactttggacggacatgagaggtgtttctttttccagtggatcgatggtcctgataaatttgaccctcgatatcttctttccgttaattggttgagtggaaagaccagtcatgagcgttttaagcgttgggtacctcctcccccgaatcctccaccaatgacggatgaggagaaggaggtagcaacagaaagacggatggactcaccgcctcgatgcgattgtggagaccgtgctgtcatcgacgaagactatgacaagcagttctgttgtccgaacattgattatccatacgggtggcgtaagtgtcgtttcagagagtggttgtatggtcctttgtcccattggccagagccagaggagacgaggaaatgcagttgggagagttacgacgacaaaggagaggtgatgcgcacaatagagtccaagagaataatgggacagaagatgcgttgtggatctcggctcgttgattcgtacattaacgatcgcatacgcgacatgcgtagggaagcaaaatctgccttttatgatagcccgaagcgtgcagagtataggaggttgaaggcggcagatgagaagagagcacaggatgtacgggaatgggaagcggctcaagccgagaaacagatgttggataatctagctgatcgcctcaagggaaatattggaagcggcgtaaactatttggccgatgaggcgcatgcgagatatgttcaggataaaatggcaacgatggaggaggaggacgacgacacatctagattgaaagaggaggacgacacgtcaaggttgagtgagctcatcgcactagctgaggcaggattacgtgctcaagaggaagaggatgagtttatgtcacaagccgtcgcagaggtagagacagcttattacaagaagaagtctgatgaggctgaggctgaggatgagctattctcccaagctgcagatgaagcagaagccaattattacaaaagaactggtgacaagtgtgatgcaggacaatgcagcaagtggaatgaggttgttgttgaggattgcgcgacggatgactccgaagatgagttactcatagattgtgattcagactga

SEQ ID NO: 14156 - DNA, 1803 bp, Zea mays
  Peptide Sequence Number=SeqID_57531
atggccgcggccgccgccgaggatgagaaggggctcctgtcgtcggtagtgggcgacatccggtgctactccggctccgaccccctccgcccgtggctccgggggatgcggaggatggagagggcgctgccgccagcgacgctgcgggagaagctgcccaggttcctccagaagtgcgcccaggagttccaggacaactcccgctaccgcgacgacccgcggtacctccgcgtctggatccagctgatggactacgtgacggacgcaaagccattgctcaagacgatggagaggaatggaataggcctcaaaagggcttcgttctatatggcatatgcactgtattatgagaagcacaggagattcaatgatgcagagaagatgtaccgtttgggaatccagaaccttgcagagcctattggggagttgcacaaagcacatgaacagtttcgtttccgcatggattcatacaagaagaaagataaagaaagaatgcctaggaaagtggggtctagtgctacatctatgaaccaagtcaaaggtgaaagcagacactataaagaactgaaatccaatataaagcaaacatcagaaagcagttctaatccttcattagggccaactaaagttggtgttctctccagaggaaactcaggagcaaacaataatttgccccgttgtaatagtgatgatactgtcgttgtacggtttataggctctgctttggttgggaagtcagagactgaagatgcctgtcaccacggcctagttgagccaactataaacactaaagaggctttggatgccattaatagcatgtttatggagccactggaacctgaaactgttctcaagagacaatcaaagcgtgagaacccaaatcataatcagcaaacaagggcatttggtatctttgttgatgaagatgaacctactaccaaaaatggaacgcaaaacaggaactcttcaaaggaacagagtgggtttgagatctttgttgatgaggattgcgctaatggcaacaatcaaaatgcggggcaaaacaggaattgtaggaaagaaaacacgaagttaaatcaggaaagaaataagtctgaactctttgttaaagaagatgaggctaatgacactgtccagaatgctctatgccacaagagtaataggtatcctccaaggccattattatctgattcatctaggcatcaaggcgaaagtgacttccagaagccatttgttggagggtttgcgatattgccagatgatgaagaaccatgtgagaaaagttatggtggtgctaatataaattgcagaactgtgcagcctactcataatactaataatttgctctgtccagttcaagatgattcaggaacaaggaatcgtgaaggtcctcattctgtgacttctggacttcaagaagacactgtcattcgtaggtttgttgcatcctctattgatgatgagcccaaggtggaaaatgcatggcaccatgggttagtcgacccaactgttaatctaaaggaagcaatggatgatataaacagcatgtttggaaaaccactaaacttcaagggcgaaaaaacaaagaggaaaactaatgcacactcagatggaaaagcagctccgatttctggtttctctatattagctgatgatgacctaaaagagggctgcaccagtaaagcgagtcagagcaattctttcaaatttggggatgagaatggtctatttgaacccacaatcaccactcgtgatgtcatggcagagatcaacgatatgtttggaatgccactggatttgtaa

SEQ ID NO: 14157 - DNA, 1257 bp, Zea mays
  Peptide Sequence Number=SeqID_57532
atgccgacaccagtgaagtcggtgctgcccgtagtgctcctcggctgcggcggcgtcggccgctacctcctccgccacatcgtctcctgccgtcccctccacgccaaccagggcgtggccatccgggtggtgggcgtcgccgatagctcctccctgctcgtcgccgaagatgtccactccaccggcctcgatgacgcgctcctcacccagctctgcgccgccaagtccgcaggctctcccctctcctccctgctcggccgagggcactgtcagctgttcaagaaccctgaggctaggggcaaagtcatagacgccgctaccacactcggaagaacaactggtctggtgctagttgactgttctgcaacttatgacactgttagcctgctgaaagatgctgtggatcatggatgctgtgtcgtattggcaaacaagaaacctcttaccggtgcttatgaggattttcagaagttggtctccaacttccgtcggataagatttgaatctactgttggagcaggtttgcctgtgatagcttctgtaacccgtattattgcatctggagaccctattactcgtattgttggcagtttgagtggtacacttgggtatgtgatgagtgagcttgaggatggaaagaaatttagtgaagttgtaaaaactgccaagtcccttggctatacagaaccagatccacgtgatgatctaggtggaatggatgtcgctagaaaggcattgatcctggctaggcttcttgggcaacagataagcatggagagtatcaataaacggtgctctgtacactgggtggcattttcactgttactggttagagacatggtcagtgattcagttacactgaagattttgtatttctctacgcctcaggttgagagtttatatcctagtgaattaggacctgatgcagtgtccacaaaggacttccttgaaagtggtttagtgcaacttgacaagagcatggaagaaagaatcagagcagcatcttcgagaggaaacgttcttcgctacgtctgtgagattgaaagcgcagggtgccaggtaggccttaaagagctcccaaaggattctgcgctgggtagattgaggggaagtgacaatgtggtcgagatatacagcagatgttaccagagctcccctctggtgatccagggcgcaggagctggcaacgacaccactgccgccggcgtccttgctgacataatcgatctccaagacctgttccagacgatggcttga

SEQ ID NO: 14158 - DNA, 144 bp, Zea mays
  Peptide Sequence Number=SeqID_57533
atgttcggatttgcaggtggcaatgagaatgatggttttggtattgattatggtaatggttgtccgcattgcaaccactgctcaggagaagatgaagtcttggaaggagacttccaggagttccaagactacgacgagttctag

SEQ ID NO: 14159 - DNA, 246 bp, Zea mays
  Peptide Sequence Number=SeqID_57534
atggctcaccggatagctcggtctatgcgcggcggcaggcgattgaagtccggcgatgatgatcttgctgttccggtgaggcagggcttcgatttttgcttggagaagcttcacggctcctcgaggaagctgtccaagggctcggttgaggctgagggtctctggaaatggctggccatggtggccggcgcttgggtggctcggacgagtggtgaagagctcgccggagctaaggatggtgtctag

SEQ ID NO: 14160 - DNA, 603 bp, Zea mays
  Peptide Sequence Number=SeqID_57535
atgacagaggaagtcaacaacagaggtcgtagtattcttcgcaagcttcggggcagcaacaaagctctttcctgctgccagctccaagaggtagaggggccagaggcttcggaggaagatatggggaccagcccaggaagatctactgcctattttgtggtgaagacaagggccacaatacaagaacgtgtcaaatcaccatccaaaagcaaaaagagattgcagaagccgaagcccggcaaagtcaaccgaagcaggtcctgcacactgctttgtgtcattcaccctacataccagaatatgtggataatcatcccgcagcttgtattgcttcggctagtcagccgcaagtttcttggccacagcttccacctccgccgccacaacagcctgcctactcacgagacttacgagaataccgaagctacaaagagatattctttcaggaatgcggagctaaaaatcgcagtgaaagtttcaccaaagctacaaaaagtcgtccttaaagagcgcatcataagttgccgaagcttcaaaaagtcgttcccaagggagcgcgtgtatgtccttcatgaccttcgtctgaagatcattatatcctaa

SEQ ID NO: 14161 - DNA, 1158 bp, Zea mays
  Peptide Sequence Number=SeqID_57536
atggagagtcatgatctccgggcactaagggaatcacggcttgtgggtggctatgagactgatggttttggttatgactatggtgctgctagtccactacagccaaacaggatacttgctgagtatgttgatgtgtactcacccttgctctacacaccaaacccccccatccccagggttgtcagcattgcaaccactgctcaggcgaagatgaagctgtggaaggagacttccaggagttccaagactacgacgagttctaggcgtgggatggctcgacttagacacactgcacgaaagtccgtcatccccttcttaccctcccgccttgctgagcgtccgcttcgccgtcccgtggccggacagtccagccacttggagagactgcaccaccgcctgcatgaggagcaggaacgtcgacgacaggagcaacatggctcttctttctcgctccaacaggagatagagtccgtgaggagctgctcccctatgcttcccctggaggcgccccctgcaccaccactgggcgccacagcctccggagtagctgctggaggagacccagacgacggaggtggcggtgacagctcgagccacgacaccgacttctctgctgaccatgagccggaaggatggcatagtcgcggggtctacccagaccgctgggaggcgacctgcttggtgcgccttccggagaacagtctccagggtgcagaggcctgctcagagcactattctatctctgagcgggactcagctgaggcagccatgcaagatgctgcacggcgtgcgctttcgcactactgctcggttctcggtggggtagctgacagtctcgacctgaagtattacccccgccgtccatctggcagcacaggaggcgtgattgtctcacctgtcggtgagagcaatcctaggttgagcagcacagtcaacctagccgccgtgctaaacacggagctggaccatgcattagacgagctgagtagggctcgtgctgagatcgccctgctgcgggctgagcgcgcggaacgtcgtcacctggatgatggttcccccgctcccgtcgggactcagcacccgtaccgctcacctcggcgtggccgccagccttatggcaatcccgactgcaagaccaagataaatctagaaccatag

SEQ ID NO: 14162 - DNA, 51 bp, Zea mays
  Peptide Sequence Number=SeqID_57537
atggcccgcctctcgtcgtcgcagtcaccgcctccaagccgggttctcaag

SEQ ID NO: 14163 - DNA, 435 bp, Zea mays
  Peptide Sequence Number=SeqID_57538
atggagttgcccgttgggagttggtcggccagtccgcctcatagagttactgggtgggacttggtcaacctctccgcctcacagagttgcccggtggaacttgtccctagatgggtctccgcatggcctctacgtggtgcgactcatggtgctctgcccgagccgggagccgtctgccgaacggacagtttctctgctcggggtcataggcgagcagaatttggagcggcgaatcctcccacgccgtggtcatgtcattacgagggcgaatggttgtacaccaagaatatggagggtagcgtgccaccattcaccgactgggtgccggtgtccactaccgagtggggctacaacacggaggcatgctttaagagtaaggtggagcaccttctgaaggcggtcgtcgttgaaagttgcctagaggggggtggatag

SEQ ID NO: 14164 - DNA, 1576 bp, Zea mays
  Peptide Sequence Number=SeqID_57539
agctcttaatctctactacacaaggctggagcgagggcgtccaccaccctcaccgtgcccctgctccagccccgcccgcgccgtcttcctccctacaatcctgcccgcgccgtccctcaatcccccccgcaagcgccgtcgcttccctcaatcccgcccccgcaaccgacttcaccgtggcaccgctcccgtcgcgtgcccccgcacccgtcctcgcgatgcccgcccctgcgcccgccccgtccccgtgacgcacgccacggtgaccccatccgtgcgtgatgctcgcggccgtcgcctcctcttccacacgacgcgaccaaggctcgccttcctctcctcgccgccagacatgccctcgatctccaccgtctccactcactcccgcttcgtcttcctttctgccctcaatcactcttgtttgctccccgcctccgtgattcccgcctccgtcctgtctccagcgcgcacgccgcctccttcccaagaatgcctggcgacaccacgccctcacctcccctccatgcacccaccgtaccctgcgcacaatcctcttcatcgcgcccgcgcttggatgcccgatttggcaatgcgcgcacctcgacagccgaatccccgccgccctgacgccgatctccaacgatctcggagcctcggcgctgctcccctcgcctcgctccctttcctcacggtctccgccctaatcctctccctcctggcctctctctctcccgactgcctggccgcctccctccctgacaagtggagaaacctgctgaaaggttaccaggcacagctctgggtctggggccaagactggggatgctcaaaaatgccaaattcacagagtggcagacaaatgcagctcgctttccaggcgttggctcagagcccatggaatgccaattttgacaagctccatcttatatgtactgtcgacaggaattccgagtctaggctcaagtacatctgccatggcggcacgctcggcacgaggatggttcgggcagacgccgcggccatcaacttggaccggaggctccaccaacttctcaatgagcatgaggagtccgagagtcgtgccgaccatgcgacagcaatccctgtgcaggaatgggggcagaggagcgtcggcgtctactctctactaggactaggatcgccctcaaggtgctcatcctccccaacaaacaacggggtgtccgtggagatctctatcggcttcgcagcctcccggctgctccacatcgacctcgcgtggaacgtgctcgctggtatgctcccgctgttgccacccacgctacggtacttgtcagtcgctggcgacacgatggagggcacactggaggggccttctgctctggtgaagctagagatggacattgagagtgatgatgaggaccttgatgatgaggttgatgatggagctgaggatgaggacctttgcttatattataccgaatccttctacaaggaatgggaattcatggccaacatcagtggtccttgcaggtttattagcaacactcaagatggttcgtggtaccctgacagagcagacttatttgttccttag

SEQ ID NO: 14165 - DNA, 1566 bp, Zea mays
  Peptide Sequence Number=SeqID_57540
atggacaaggaccgccagggagcagcacaaaagcgccatgcggttgtcaggctcgttgaagctaggccgaagaggcagcgggggtctgcgaaggcggcggcccccggcggaggcaagccgccgctggcggcgaagtcgggcgcccctacgtctagcaaagcgccggaggcgacggcaggcgccgggggctcaaaatcgatgaaggcagtgccgccggccagcagagtgccggaggtcgcgaaggcggcccgagcgttgccgtcggcaggcaagcgtgtcgccgacttcgccaccgatattagtgtggaggactatcttggtgggtcggacgaaggccaacttgctatagttgcgcctgccgcggcgacaacgacggctgtcgtagcgccgaaggcgaagggcggggctcttagcgccggaggcgaggtggcggcccttgcggctgtcagggatgaggcgggcgctgcgtcccgccggctgaaggaggtggtggagtcgctaagtcaggtggctgacttcgccaactgcacggtgtcgggggccctcacgacagttgtgtctgccgaagtcgagagacttcggacacaacatgctgacgccgtccgagagaaatcggccgccgacagcaagtgccgcaaactggcggacaaggtggccacgctggagggagagaaggctgacctccggcgccaattggcgggggagaggagggagaccaacgaggccctcgtcaaggcgcaggctgcgcaggcggaggccaatctggcacgggcggagggcaatcttgccagggagcgcgccgagcagctgcaggagcggctcatcgccctggagggccgcgtggagcgggccgaggccgcgacgcgcgcggaggccgaacggacgcgcacacagcttatggatacatatcgtgagctgggtgcgcggactggtgacttcgaagtgccggaccgagagcccggacttcgctgtctggaatgggtgcaggaggagctgcaggcactccccactatcgtggaggggtttatgtcgtacacctccctggtcacctgtgagggggcgatgaacgcgctctcccgcgaagggtgccggcacttcgaggtcttcgaccaggccgatgaagattttgagcgagatatctataaggttgaagaccccgtagtgaaggaatccgccaaagccatctacgaccggatgtggggtccacacggtcgcgaggtggtcagggagcgggccgagacggcgagggctcaggcggcgcgtggcgagcgggtggacgacttcggggcgttgaacagcgcgctgcctgacttggagccgaccccggcggaggccgtgtctggggtcgccctggagccaaccccggagactgcggaagacgcaccggatgcccccgcatccgctgcggccggcgaagacctgcccccaaaggtggccgaaggcgcgcctgatgcccccgcagctgctgcgccgagtgctgaagatcccgcggcggtggcggcggaaacaacagcggaagcaacgacggaggctcccgcaacgtcagggccttcgcaggtggcgtag

SEQ ID NO: 14166 - DNA, 684 bp, Zea mays
  Peptide Sequence Number=SeqID_57541
atgcgcacgctctcaccccccacgcatcgcccccgcccccaccacggatcccgcatcccccacggatcccgcagccgcgccgcagccgctccctcccgtgctcccttcgcgcccgcccatggatctccaacagcgagcgccgccgccgcctcgcctcggcaaacccggctccagggcgacagctcccgccggtgggacctcgtgttcagcgtcgtgaagccgtccgtgatccagctgcgggggcccaccaaggtcagcgtcttcatcgccagcaacgacgccgagcaggcctgcaacttcaagatcaccggcatctaccacgacggtacaaaccttgcaccttcttcgactcttcccgtccgatttgactatctaaaactgttgtttctgattcggtgcgctggcgatctggtcgcccgcagggagttcgtgaagaagaactatggtgacatcaaggcccgcaacccctccctccccttccttgtccgcgagtgctccggtgtccagccccagctctgggcgcgctacggtttagcgtcagtaatagctaggattagggttcaggcgatgctaagattttggggcgccaattgcagaatcactggattgattcatcttttaggggtttcctcgtactcggagtacgagggcaccgttttagttgaatgttgctctggtgtctaa

SEQ ID NO: 14167 - DNA, 462 bp, Zea mays
  Peptide Sequence Number=SeqID_57542
atggctgctgtaacaaagatgaagatgtcgactgaataccatttcctatggtacagtgtctgcaccggatcagaccgccagcgcggatgtcttcaccgccgacgaccggtcttcgccgtgattcgcgccaccgccgttgtgattcacgtcgacgatgacccgataaggccgccaagtaaaagccatgcacctggggataactccggtgactcaccgccgtacccctcgtgctccgcggatgtggaggataagttcaccgacgagagccgccttccggccttgtgccacgtgcctgagtacctccaccgcaccgccgtaagccttagtgactctctgttgatcgccggaatgaccgccacggtagaagccacgaattcattgcgccagtactttcttccacctccggccgccgcgcgtcctcctaaaaattcacggccaccgtcttaccctcctataaattga

SEQ ID NO: 14168 - DNA, 762 bp, Zea mays
  Peptide Sequence Number=SeqID_57543
atggcgattcttggtcctatgataagcacatcatacaaggccatatacacagggctgccccttttttttgtaagcattcatatctttcatttcattggtatttttcttatgttcatgtacgttggagctccagataactgggagacagttcttggaggcattaaaatcatgaggttatctggtgaagcccccatagatacgaagggctgtgtaaaagctggttctctccttccacccaagtgcgggccacccgtttggcccgtgacccggcacgattctagcccggtccaagcacggcccggcacggttagtaacgggttcgagtcggcatggcccgttaagcgggccgagtttgagcggctatggaggcccgcgtgctatggcccggcccggcccgagctgcaggccggcacgaaggcggcccttggagctccagataactgggagacagttcttggaggcattaaaatcatgaggttatctggtgaagcccccatagatacgaagggctgtgtaaaagctggttctctccttccacccaaggttacatggagcaaaatttgtagcatatctataattcatatgatgcgctgtaatgataatgattcacaaccgaataccggcggaaatgactggaaccgatgcaccaatgactattctggctatgatgcatctactgtcaaggtaaggaagaactcatttttcaagtgtgactttgtgacagatgtgaaattagaaatgaaaaacaaggttccatgctga

SEQ ID NO: 14169 - DNA, 258 bp, Zea mays
  Peptide Sequence Number=SeqID_57544
atgtcagagctccaacggtcggaacccaacgacttggtgacgtggctggcgcaccggactgtccggtgtccgattcgccctattcaccccttctttgtagggccttcaatccagactcaacacccgggaccctatgaacctcacttatccgacaatggggtggatgtggaatatgtggttctgatccctaatgctcaatctacccctaatgaggagtccttcctgataatggcagttgtgctccaattcctcaagtag

SEQ ID NO: 14170 - DNA, 318 bp, Zea mays
  Peptide Sequence Number=SeqID_57545
atgaggaaatgggcaaggcctagcccactactcctcatgctcctctcctgccggagcaacatcccactcgaccgtccaacccggtggcagggtggtaggccaagtcacaccatcaactacatcctgcatggtacctgcaaaaatggtgccacaagcaaggctgagtatactaatactcagctagacttaaccggttacaaggaatcaagcagtctcattagctgcgagaagcagacgattcgaatcgagtttttaaaccttgcaaggtccttgctcggggatgagcacgtactctccgtcggcaagattacaatctaa

SEQ ID NO: 14171 - DNA, 78 bp, Zea mays
  Peptide Sequence Number=SeqID_57546
atggccaaggttgcttcactgcgaagcctgcccgagctaggcctcgggcgagtcgaagggactatgaacgaacgatga

SEQ ID NO: 14172 - DNA, 393 bp, Zea mays
  Peptide Sequence Number=SeqID_57547
atggggaaggggagagaggacggggcgagctcacctcgacggcgcgacgactccgggcgggacgaagcgaggcgcgtgggtcccactggcggcggcggcagcagcgaccatgcgcggacgtgcgtgctgggcgcgtgcgcgcagggctgcaggccgctgggcgagctcgcgtgtgttggctgggttggcggcgccggcgagcgtgcactgggccacgggcgcgcgctggcgaagcaggccgcgcgcagggaagttgggccggctcgcgcgcacggcgctgggctgcttgcggagctgggccgcgacgctggcagctgggcgagctgggctgcatggcgcgcgcgggcccacgagggaggggctggcgcggtgggccgagcggggggaaaatga

SEQ ID NO: 14173 - DNA, 786 bp, Zea mays
  Peptide Sequence Number=SeqID_57548
atggcgccgacgatctcgtcggcggagaaaccttcttcggctgccaccacctcagcaccgacggtagtgtccacctgcccaccaacaccgcaccagcgagcgccggccaccccaaaagcgcaccggcaggtcctcacccccgtcctcgccatgaaaacgaacgggaccatcccagaacacgagtaccgccctcacggcgtacgacgtgttgtgggaccctccgggtcctccccctacgacacgaggggctgggtcccacgcgtcatgcgagctgtcccaggacagaagaagccaaccgccgcgcgcgtagcgtgtaaccgccccacggttacaagcactcctccaccttcgcctaaaccagcgggtgaaagggcggaccgccatgcaggcggcatgcaacccgcaccacggagacgcaccctttcaacttcgacgcatccagcatggaggcccaggcccacacgtcatgtaaccggcgtgccggttactacgtgcaaaaaactgcaccgccacttacgccaatgccgcgacttcgtgactgtggaaccggtgccgcgactcgaggcaaccctgcgcatggcccaacagtgccaaccaagcacatcggtcacagagcagcaggggagccctctcccacggcgtgaagacgacgcgcccgtgttccgtccctcaaacggctcacgcaacggctgcctcgcgaaccacccgtcccgtcgcattaacttcgtggcagggcaggcgacacctttggcaggcgaagcgggcgacgcttcacctccgccatga

SEQ ID NO: 14174 - DNA, 579 bp, Zea mays
  Peptide Sequence Number=SeqID_57549
atgaatagtgtcggcgtttcgaccccggggggtccctggaccgacgataggttacaagcgttcgcgagggagagagagagagagagcctgctcgtcagcccgtcctcccgcgcggccacctcctcgtacgagggccctggacctttcttttatagatgtaaggagagggtccagggtaatgatgtaccccctgtggcgtggtcggttcgagccctagggtcgggtgaggcggagaccgccttcctcgaggttgaggccgagccctggggtcgggcgaggcggagaccgtcttccgaggtcgaggtcgaggcagagccctggggtcgggcgaggcggagaccgtcttccgaggtcgaggttgaggcggagccctggggtcgggcaaggcggagaccgtcttccgaggtcgaggttgaggcggagccctggggtcgggtgaggcggagaccgtcttccgaggtcgaggcggggaccgagccctggggtcgggcaaggcggagcttcctatggtgcctgaggctggactcgactgctgtcagcctcaccctggcgggtggcacagcagtcggagcagggtag

SEQ ID NO: 14175 - DNA, 363 bp, Zea mays
  Peptide Sequence Number=SeqID_57550
atggggacgggctgggcagcggcgagcgcacagcaactcggctgcgacgcgcaggggcgaggcgcatgggtcccactggcggcggcggcagcagtgcaccacgcgcggacgtgcgcgctgagcgcgtgcgcgcagggctgcaggctgctggggcgagctcgcgagtgctggctgggctggcggcgccggcgcgcgctggcggagcaggccgtgcgcagggaagttgggctggctcgcgagcacggcgctgggctgcttgcggagctgggccgcgacgctggcagctgggcgagctgggctgcacagcgcgcacgggcccacgagggaggggctggtgcggtgggccgagcggggggaaaatga

SEQ ID NO: 14176 - DNA, 690 bp, Zea mays
  Peptide Sequence Number=SeqID_57551
atggcttttactgggccatgcgcggggcgactcgatacggctgcatatggttttgaaaattcaccttctctgtcttctgtggcagccctaagaaggcacggtactggtgcgagtggcggttcaacttctctgcacccaggaaccgctgcccaagggggtgacccatgggcctgggccctcgcgatagagcttgggttgttggtttcggcggacatgaaggggcacactaccacagctggtggcgtgctcctcacgcggcggctcgcctcctccccacacggaggccgacatccgaggagtatgactcatggacccgagcccccgtgccagaggctggaccgctgcccttggcggagacgaagaggcgcggcgaatcgttcctcgcacggcagttcgccttctgcgcaccaggaggccattgcgccagccaggagcacggcctcatgggggctggcgcccttccgccattgctcagcttcaaggattttcatcatgcagctgggctgtggtctcccaccagtggtcatctacaaggatgaccaccagccttgtggtggagagaagcgagccgggctgtggcctccccctgccctcagcttcaaggatgttcatcagccttgcaggggtggagagcgagccgagttggggttctgcctcccgcatgagctggtggcccgcttcttcatctag

SEQ ID NO: 14177 - DNA, 1042 bp, Zea mays
  Peptide Sequence Number=SeqID_57552
atggacacaccttcggctcgcccgaggcccagtcttcaccaagaagcaaccttggccaaatcgccacgccaaccgaccaaatcgcaggggcatttaatgcaaagcgccgcctgcgccactccgactgctgagccactcgacagagtaaggctgacagcagccaagtccggcctcaggcgtcaaaggaaactccgcttcgcccgaccccagggctcggagtcgggctcggccccggaagacggcgaactccgctccgctcgacccctgggctcggactcgggctcagccccggaagacgacgaactccgcctcgcccgaccccagggctcagactcgggctcagccccggaagacggcgaactccgctccgcccgaccccagggctcggactcgggctcagccccggaagacgactccggctcagccccggaagacaacgaactccgcttcgcccgaccccaggactcggactcagccctggcctcagccgacggtctccgccttgtccgacctgggggctcggactcgaccccgaccttggaagacagactcgacctcgacctcagaggagcctccacctcgcccaacctagggcacagactgaccacatcgacaggaggcgccatcattaccctaccccgagctgactcaggctacggggaacaagaccggcgtcccatctggctcgctccactatacgagctccagcgctcctctgacggccacaacaccacgcgaactgggtgccaagacctctccggctgccatgatggcatggccctcttgcagagtgttggccgcacggggaaggacgggacggcgctcgcgcaaggccgctcgctccctcccgcgtggacgcttgtaaccccctactgcaagcgcacccgacttgggcgcggggctaacacgaaggccgcgggttccacctcccacgcctgtctccctccagctgctttctcccccttcgcgttccgcctcgcgccgacccatctgggctggggcacgcgacgacaattcactcgtcggtctagggacccctcgg

SEQ ID NO: 14178 - DNA, 141 bp, Zea mays
  Peptide Sequence Number=SeqID_57553
atggccatgatgggttcatcatcggaaaagatgtacctctgccaggtgaagaagcagcaaacttttgttgcttctgttccaaggtgttgtctaaagaagaaaatcaagactgaagctgcgggaggaagtgtcctccgttaa

SEQ ID NO: 14179 - DNA, 237 bp, Zea mays
  Peptide Sequence Number=SeqID_57554
atggtcaatacggctcataccgacgcgataaacttcctaaggcgtggcgtcctcacggtgaacgtaagtctggacccccatgggagtgcgcctaagtttgcggacaggactttcaggggaggtctgaggcctccacgtgtgcataccgggccccctaaggtgggaactagaccccttcgcaaggggtctggaccgctcacggcggggtcccggtgcactaggacggaaaatgcttaa

SEQ ID NO: 14180 - DNA, 582 bp, Zea mays
  Peptide Sequence Number=SeqID_57555
atggacaaaaaccagaatctagcatatgcgccttacattatggctctcatcaaagcaaagacaagatttgaggggccctgtgagatagttcatacaccctttcaacccttcaagaatgaaattgggttcctcaccaggccactcactctcttcccagatgatgaggaagatcctggttatgatgcaggagaagctcctgtagctgagcaagggcttcagacccacattgatacccgctttcagggaatgatgacacatatggaccaacgcctggatgacatgcaatctagttttgatagtaactgggatgcgctaaacactgagtattctgagtttcgcagtcacattcaaactaatgtcactgatcctatcatgtccagactcaacaacatgcagcagagctttcaggacaacatgggagctctgtctagtcaatttgacaatctctctaccaatgacagcatgcaagagatcagtcagaggcagcagcaactccaacaagactttggacagttctcctctctttttgacaccttcagcactcactactataacatgcatcctccaccaagtgatcagtga

SEQ ID NO: 14181 - DNA, 420 bp, Zea mays
  Peptide Sequence Number=SeqID_57556
atggcggcgcgaagggcaggaagggcggttctctcttctctggctagatctctcgggttgcgaaaacctaaggggcaggcaggaagcggagcaaagaaccatcgccggaccctctccggggtatataaagaccaaggcgaagacggttccaacgttccgcccggaccggacgcgggattcaaaaacgcgaagcgaaacggctgctcctcgaacggctcgcgcacgcgcaacggcaaccccgccaactactcgccccgtcgcattaactccgcgactggacaggcggcacttctggcaggagcaacgggcgacgcttcgccttcgccgaaacaaccgcgccgaaaaagggaccgggaaagggggataccccgaaaaggatccttccccgtgaaggaaccaggctccgagcctccttactga

SEQ ID NO: 14182 - DNA, 417 bp, Zea mays
  Peptide Sequence Number=SeqID_57557
atgaggacgattccatccgccgacgaggaccccaactacgcctgctgcagtaccttgtatgtcttgtcggagggatcatcggagtcggtgaggtcggcgaggagcgatgtggcaatggatgtgaggtctatattgtcatgggtgagggaggcacggcacactcatggcgggcattgcgagtgtgtcgtcgagggccaagacgacggtgaggtcagaggggtcctctcgatgcactgcctcggccttgtcggggtcgatatttggatttgtttaagatgggagcaaggtgaccccgaatttgttgcagatgggagcgaggcggtcggggggatgaaatttgttgcacgcgacgagcatgacggggggaggagattgttacgacgcttgtcggtgaagggggagatgacgacgggttga

SEQ ID NO: 14183 - DNA, 303 bp, Zea mays
  Peptide Sequence Number=SeqID_57558
atggccccccgcgcgccccccacgcgcccctccgtggcccccggcggcgcccctgtgcccccccgtggtgatgaggatgatggttatgattatgcttatggtaatggaaagtggtattctttccgtttggaaaggctagtccactacagccaaacgggacattttgctgagtatgttgatgtgtactcacccttgctttacacaccaaaccccccaggttgtccacgttgcaaccactgctcaggagaagatgaagtcgtggaggaggacttccaggagttccaagagtacgatgagttctag

SEQ ID NO: 14184 - DNA, 369 bp, Zea mays
  Peptide Sequence Number=SeqID_57559
atggtgatatgtgtgggtgacgtccacggctacatcacaaagctggagagcctctggtccaacctccaggccgcactccccgccgacgccttggccaccgcgctggtcatcttcctcggcgactacaatgactgcggcccgcacacccgcagggtcctcaacttcctcctcgcgctcccgacgcgctacctagcgcaacaccatgtattcctctgcggcaaccatgacctccccttcacggcgttcattggggcgctaccgccgccgcccgacggctccccgttctcggccacctgggacgagtacatccacaacgaggagcacaaggggtggttccgcgggccaggattcgagggcatgcacgtgtag

SEQ ID NO: 14185 - DNA, 843 bp, Zea mays
  Peptide Sequence Number=SeqID_57560
atggctcatcttagacacactgcacggaagtcagtcattcctttcttgccctctcgtctcgtggagcatcctcttcgccgcccggtgactggaggtagagtctgtgaggagctgctctcctgtgcccccgatggaggcgcccctgcaccaccactgggcattccggccgctggagtagctgctggaggagacccagacgacggaggtgacgatagcagctcgagccacagtatcgacctctcagaggagcaggagccagaggtatgggttgctcgacccatcactcgtgacgccgctcgcgggtgtcactttcacgacacgctcgacaccttgctacgccagacacttgacaggcgtacttggtctatcgagtatcgttgtgttatcttccagcacagtcgtggggtttacccggaccgctgggaggcgacttgcttggtgcgccgtccagagaatagtctccggggtgcggaggtctgctcagaacattactctatttctgagcgggactcaaccgaggcagccatgcaagatgccgcacgacgtgcgctttcgcactactgctcagtgttcggtggggtggccgatggtcttaacctgaggttgagcagcacagtcaacctagcagccgtgctaaacacggagctagaccacgccttagatgagctgagtagggcttgtgctgagatcgcccagttgtgggctgagcgcgcggagcatcgtcatctagtggatggttctcccgcccccatcgggactcggcacccgtaccgctcacctcagcgtggacaccatgcttatagtaaccccgactgcaggaccaagataaatttagaaccatag

SEQ ID NO: 14186 - DNA, 210 bp, Zea mays
  Peptide Sequence Number=SeqID_57561
atggggttcacggcgagctataggcggagtagctggccaatgtgcggcggcgacagaggaaaggtgcggctgcggctcgatggaaggcagcacacgcacagtggcagtgccaaggcatctccgagttgtcctctaagtgatgtaataacaattaatattgttagaggcactatattaagtttggaatgctacattctgcaatgcctgtag

SEQ ID NO: 14187 - DNA, 411 bp, Zea mays
  Peptide Sequence Number=SeqID_57562
atgggcaagaacaagaagggtggaagttcgtcgcaccactccggtgacaagcggaagcgcgagccaagtccccactcgaagggctttggtgactccgagtactcggagaagaagttttccttcgagtccgaggggtcgccggtctacgtctctcccccggtgtcgtccgatgattcggacgattcccagtggatcgttgccgatgtgtggacgtacatccgggccgtcgagcgctctaggctcaagggctcggatgagtcggagatctcctcggacgaggagaactcctccgacttgtccaaggaggagagcggcagtgacggcgacgacggcgacggcaagggcgatggcaacggcggtaagggcagcggtggcagcagcaagaccagtggcaaagtgccactggtttaa

SEQ ID NO: 14188 - DNA, 744 bp, Zea mays
  Peptide Sequence Number=SeqID_57563
atggctaagctgaacttcaacttcaactggggtccaggcaagttcaaccggggtccagagaggttcaaccggggtccaagaaaagttcagccggggtattttttccggacctctctgctttggtactacatcgagttctttgtggattcattactcttggagcttctagctcctagacgactaggtgtctcttatgttgatcctagggcaatagatcttgccatgagaatcgccgaaaggatgttcctcaaaatgaaggaagatgaggcgaagaacaaaattgaagaaaatgatcgatggagaccaaacgacgaatccacctcttcacaaggttcgtctttcaaatccacttctcatatgtgctttattgctaatgggagtgacagtgaaagcgaaagtgaggatgaggaggagcaagaaagtgatagtgaagatgaggatgatcttcaacaattcttcgctcagctaagcaagaaacatcggatgagcttgctcaaactcatgaaaagagcggaagaacaaaaagaaatgcttcataagcaagaagacttcctcatcagaaaaatcgaagacttagagaagttgaccaaagagcatgagaagctaaagtgctctcatgatgatttggtccaaaggtatgaagacatttcaattgagcaaattaaagttgttaatcattcatcatatattgctcaattagaaaataaaaaatgctatgttcaagaacacgatagaaaggcttaa

SEQ ID NO: 14189 - DNA, 1293 bp, Zea mays
  Peptide Sequence Number=SeqID_57564
atggaggcgaagcagcgcccgcggcacggcgaggagaggaggccgccggcgacggacaacggcggcggcggcggcgaggagtacgacccatggacggcgtggctctacaagccgcacaccatctcggtgctcctcgtcggcgcctgccttctcatctgggcaagtggagcactcgatcctgaaggcgctgctgctcacagtagcttgacatcaatcaagaggggtgtctgggctatgattgcagccttccttgcctactgcacgcttcaggcaccttcaacgatacttattaggccccatcctgctgtctggcgcctggtacatggactggctgtcgtttacctcgttgctcttaccttcctccttttccagaatcgtgacgatgctcgccagttcatgaaacaccttcaccctgatcttggagttgaattgccagagagatcttatggagctgattgccgtttgtatgttccagaaaaccctaaaaacaagttcataaatatttatgagacattgtttgatgaatttgttgttgcccatatccttgggtggtttggcaaagctgtgatgatacgaaatcaacttctactttgggtattgtcgatcggctttgagctaatggaggttagatctgagtgtactattggaacgacttcaaagatatttttcattcctgtcatctttttggcaaggaagaatgcttactatgacattttgcagctaactttcagacatatgttgccaaactttaatgagtgctggtgggatagcattattttggatatcttgatctgcaattggtttggtatttgggcaggaatgcacacagtccgttactttgatggcaaaacatatgaatgggtcggactgagccgccaacgaagcatcatgggtaaggtgaaaagatcgctgagccagttcacccctgctcaatgggacaaggatcagtggcatcctttcatggggccactgcggttcatccaagttctgttcctctgtgttgtcttcatgaccgtggagcttaacacattcttccttaagttttgcctgtggatccctccaaggaatcccttagtcgtgtacagattgatcctctggtggctgattgccatcccaaccatccgcgagtacaactcctacttacaagacagcaaaccggcgaagaaggttggagccttctgttggctctctctggctatatgcatagtggagctgcttatctgcatgaagtttgggcatggagagggagtatatgttaaaaaggctgcaaaccgcttgcctgacattcagtaa

SEQ ID NO: 14190 - DNA, 390 bp, Zea mays
  Peptide Sequence Number=SeqID_57565
atgcctgcccccacccccgtccctgcgattcccgcgaccacagcgccccctccccccgacgcgctctgcgcgcaatgcctgctaaccaaggccacaacgcctggagcaagggggaggatgtcggccttgcatggcccaggcgagggcggcccctgcgcggatgcggcccccggcctcagccctagctgtgagaagcaaaagctgctaaccggagttgtacaactaagaataattccaggggtttatgctgatggagatagctcagtgtcgacatatgaaaggcgggcaagccttaggcaattctatgcaattgtctatctgattctgcagcagcttgagagtagtttgatcgagagggacctgaaagggaagggccgatgcaaggatata

SEQ ID NO: 14191 - DNA, 702 bp, Zea mays
  Peptide Sequence Number=SeqID_57566
atgatgcatgcattggaagggaagcaactgcttgaggatgaccccatagttgtgtacctcactgcatacctgctcaccctggatgcacagtatgatttcttggctcgggaccaccatcagatgattgcccgagcagaagatgcagagaagcgcaactctgccttggaaagtcgtgaagtcattgcggttgaagccctgaagcaagccaaggatgagcacgtccagaagctgatagaggcctacttggtaacccacaaccaacgtaaagccctgcggatccaagagcccgcttcatccaacccagttcaacccaggagagctgaagatccccagattcttgaaggtcgcccagtctctatcaaaggagagaagaagacttgggaactcccggaaggagccatagtcttggaaggaattccagtcttcccccaggttatggataagcaagagcgccccgagtcctcccaagatcccccgctagaattgtttgagcccctcaccatgaagaagattctagcaccatcccctgaagtcaaagaagaagttgcaagcaccccgccagcaccgccgccctctgaggagctacaagagccagtcccgcttgaagaagagtttgaccccgtcttgccatatcagtcgccaccagaagaagtcatcaacatcagctccctcttaacccatctaggagatttctcagattga

SEQ ID NO: 14192 - DNA, 261 bp, Zea mays
  Peptide Sequence Number=SeqID_57567
cttgattcgtacgtcctcgtgccggagcaagaagctgctcaggaggtagccccggatccagcaccagagcctgcaccagaggatctgcctgccactgctttggaaggcaagctccggactcctgttgagatgaatactagtatgctaggtcgaggttctctggagaacatggttgctggagtgacttggccgtccatcttgccaccgggttggactatcgagtgggaccctacctcggctgaggaggagcatgaggagtga

SEQ ID NO: 14193 - DNA, 609 bp, Zea mays
  Peptide Sequence Number=SeqID_57568
atgccccctgcaccacctcagggcatcccggctgctggaggagaccctgacagagatggagacgacgacgatgccagtggcagttcgagccatggcacggagctctcggaggagccagagccggagggatggatctctagacccatcactcgtgacgccgctcgcagaagccttctcagagcactatctaatactgagagggatactgccgaggtagccatgcaagatgtagcacgacgggcactttctcagtattgcttgttgttcagcggggtagctgatggcctcgacctgaagtactacccacgccgttcgaccggcagtgctggaggtgtgattgcctcgctagttggtgagggcaatcccaggctgaacaacatggtcaatttggctgccgtgctcaacacagagttggaccacgcccttgatgagttgggcaaggttcgggcggaggttgcggaattgcgtgctaagtgcgcagcacgccactatctggatggtggttctcccgcccctatcgggattcagcacccttacatgtcattgccccgtggtcgcttcgactatggtaccccagactgcaggacccacatagatttggatccctag

SEQ ID NO: 14194 - DNA, 1108 bp, Zea mays
  Peptide Sequence Number=SeqID_57569
atgactgttcccgtcgctccttcatttgtgtgtgctaaccgtgttgacaagaggaaggagttctacacaaaattagaggagaaacataaagctttggaagcagagaaggacgaggctgaggccaggaaaaaggaagagcaagacgttgctttaaaacaactaaggaagtcattggtgattagagcgaaacccatgccaagcttctatcaagaagggcccccaccaaaggctgaactgaagaagactgtccccgcccctaatcaacgccccgcgctaccgcacgcatgccagcccccgcgaaactcgtcgcaaccgaacgccccccacgcccaccgccgtcgcgaatctcgcccgcacggtcgccgccacgaaaccctccgataccgcaccgcccacacgctagcgcccgagaatccctccggttccgaaccgcccgcacgccacgcaatccgctccttcctccgccgcagcaaggagaaccttatcgcgcgccagatccgcgtcacacgccaggagaacgcgctctgcactgccgcctcttttgaccgtgatgccgccaacgcgttccagctctacgtcgctgagttcctcggctttggcgtcaagcgggcgggtttcctctacggccgcgtcgacgtagagaccaaggatgtcttcgtcgactttatcgatgagccaccgcagcagggctccgaggacgtggtccacctcttgagggaccccgacgaggaggcccgcgtcgataccatcgctgaggggctcgggatgcgccgggtcggcttcgtgctcacgcaggccgttgggagaaaggccagcgagactggtgagtacaccatgtccaaccaggaggtcatgcaaattctaggcaaaggagttgggttaacatgggaagaggccaagctccagattctatcgatcaatgctgatgttagtgaagttgggtttgggaagaaggaccggacggtccgcgacctgtcgcaggaacggctcctcctctgcacacttcaagatggtccgtgtaacaccctaaattctgaggtgaaactaacacatccttgtcgtcgtgctgattccagatcaaggggtagtgatccggaaggtggctatg

SEQ ID NO: 14195 - DNA, 888 bp, Zea mays
  Peptide Sequence Number=SeqID_57570
atgctcaacaatagcacacagaaaaaggatatgaggatgtcacagaacaagagtcctcttccagaggatgaaatgccctctcaggtgatcatgtgtggtagaaaacttaaaacatggaataagtccatgatcagtttccagtaccccatccttgaagagcttgacacaaatctcactcatctaaaaggcctcgaagtggacattcccggtgccatcatcccccacctccagtttgactatggcggtgacacactccgggatcccgccctcagcctgcagctgggccgcctacacgacctcccggttggacatggtgtactcaccagtctcgctggcctttcccccaacggcttgcgtgaacacgaggccgacccggcgcatcccaagcccctcggcgatggtatcgacgcgggcctcctcgtcggggtccctcaagaggtggaccatgtcctcggatccctgctacggcggctcatagataaagtcgacgaagacatccttggtctctgcgtcgacgcggccgtagaggaaacccgcccgcttgacgctgatgccgaggaactcggcgacggagagctggaacgcgttggcgacatcacggtcaaaagaggcggcggcgcagagcgcgttcttctggcgtgtgacatggatctggcgcgtgataaggttctccctgctgcggcggagggagaagcggattgcgtggcgtgcgggcggttcaaaatgggagggattcgcgggcgctggcgtgtgggcggtgcggtatcggagggtttcgtggcggcggccgtgcgggcgagattcacggcggtggattttgcggcggcggcgggcgtggggggcgttcggttgcggcgagtttcgcgggggctggcagacgtgcggtag

SEQ ID NO: 14196 - DNA, 420 bp, Zea mays
  Peptide Sequence Number=SeqID_57571
atgaggtgtgggttaccatttgctgaagatctcactggcattgattctgtccatctcgctggagagggtcctgatgctgaatcacttgaaggttctttaaatgtcgtgcgaaaatccactcaggctgcagctcgtatatttcaagcctttagggtggactcattatacagaaagaaagtcgtggaatacggagatgtcacctgtggattatctgatgaatgcacactttcacttgtttctcttaaaaatgtcaagccagaacaacatgatacacatctgcattctgctgctgttcgcatacagaacaagtttcgcggatggaagggaagaaaggaatttatgatcattcgccagagaattgtcaagccacagcttataacggaagacttctgttccactaacttgcttggatggttttga

SEQ ID NO: 14197 - DNA, 324 bp, Zea mays
  Peptide Sequence Number=SeqID_57572
atgctggacgacgccgcacggtgggatgacctcgtcacaggtcttcatccgatgtcgtatggggtgaagggtgtccctgcccattgtcttgtctccgttggaccaacgaccacgacgaaggccttgagcgaagggtggcgtcttcgccttcgccccaacatcagccctcacggtcatgccgagattcctcggcagagggggttagtcttccaaggccctgatttcttctccttcaccattgaaggggaagtcaagacacccaaaattgatcatcgttccgggagggtgattgtcgtcacggcttgccatccggagcttggataa

SEQ ID NO: 14198 - DNA, 76 bp, Zea mays
  Peptide Sequence Number=SeqID_57573
attggtagcaaggttgctgctgctctggaacattgggaaacgctgctgtcttgctccgtttgcgtcgtgggccagg

SEQ ID NO: 14199 - DNA, 228 bp, Zea mays
  Peptide Sequence Number=SeqID_57574
atgctccgatatgaaggagttgatcatgagccccatgagagtgggtggtcggtgccaaagcccaaaggtgaagaggacaccaagagaaaaattactaatagggagctcataatgattgaaaaggagtacatcacttttggggataattctagaggtaaggttatctctcgaggcaccattcaggtgtttttcatggatgctaagaatgatgcattttcacatgcttaa

SEQ ID NO: 14200 - DNA, 327 bp, Zea mays
  Peptide Sequence Number=SeqID_57575
atgccaaatgaagtaaggatgcacttggaaaatatggtcatactagaagaattacccctttttcaagaaaaggtcatggaattaccactagacgcgcagagcagcggaagacgtctcgatgtagacgaacgcgtcgagcagtgccgtgcagtcgccggcgtccttcacgtcctcgcgcggttcgtccaagtgctccagatgcagcacctccgaggtatccacatgtacagggaggaagcgccgcgtaccgaactgctaggttcgcgacggcggcttggcgagggcgagaggtgggcggcggctgttagttcgcaggtggcgaattag

SEQ ID NO: 14201 - DNA, 186 bp, Zea mays
  Peptide Sequence Number=SeqID_57576
atggaattaccactagacgcgcagagcagcggaagacgtctcgatgtagacgaacgcgtcgagcagtgccgtgcagtcgccggcgtccttcacgtcctcgcgcggttcgtccaagtgctccagatgcagcacctccgagagcgtgatcaagtcacactattgtttagtgcactagagatgacttaa

SEQ ID NO: 14202 - DNA, 2460 bp, Zea mays
  Peptide Sequence Number=SeqID_57577
atggaggttgttgagttggttccttgcgcccgcaacaagtggggcaactggcatgagttttggttctacgtcgcggagggcacaatcgaagaccatacggggctccccgtgtccgagatgtgctcgcattattactcagcatacccgtcatttgaagtggcggaggaggatgcggacgaaggggcccttcggtgcgccgccggcctgagcagcgggcgcgatttggttgaggagtttgtggcgtacggggtatggcctttggcgcatggctgggcgttgggcgaagatggggcggtgcggatcgtcggtcgatacgtgccgaagacagagggccagcgtagctgggatattcgcgggtctaatgaccgcttgaacagggttttcgagttgaaccgtctaccgtatggcggttatccgggccaagacgatgtggatcgtcgcgggaagaaaccggtggtagagactggagacgaccctgcgccggcggccgccctgtcctctaagaagaggaaactaggtattgctgtgggaggactgggggtttctgatggtttttctagggaattgatgaggacatgcgcggccccggggggaaggatgtcttcgcccgagctccgggagtcttcggcgcggatgctgagggttaccggggtgatggacaaggatcgtcagggagctgcgcagaagcgccaggcggtcgtcaggcttcatgaggccaggccgaagaggccgcggggggctacgaaggctgctgcccctggcggaagccagccgccgctggcggcgaagtcggccacccctgcatccagcagggcgccggaggctgcgaaggctgctgccgccggtggttccaagtctgcgaaggccgccccagtgtccagcagggtgccggaggctgcgaaggcggcccgagagttgccgccgccgggcaggcgcgtcgccgacttcgccaccgacattagtgtggaagattatcttgttgggtcggacgaaggccaacttgttgttgttccgcctgccgtggcgaccgcggcggctgccgtggtgcccagggcgaagggcagtgctcttagtgccggcggcgagataacggcactcactgccgtcagggacgaggcgggtgctgtgtcccgccggctgaaggagatgaaggaggcactaagtcaggcggctgacttcgcagaccgcgcggcgtcaggggccctcacggcggttgtgtctgccaaagtcgagagacttcggacgcaacatgctgacgccgtctgggaaaagtcggccgccgacagtaaatgtcgcaagctggtggataaggtggccgcgctagagggtgagaagactgacctccggcgccaactggcggaggagaggaaggaagctaatgaggccctcgccaaggcgcagtctacgcaggcggaggccaatttggcgcgggcggagggcagtcttgccaggcagcgcgccgagcagttggaggagcggctcagcgctctgcaggcccatgtggagagggccgaggcctcgacgcgctcggaggctgagcggacacgcaaacagcttatggattcataccatgagctgggcgcgcggaccgctgactacgaagtgccggaccgagagcccggacttcgctgcctcgagtggatacaggaggagttgctggcgcttcccgccatcgtggaggggtttatgtcctatgcctctctggtcacctgcgagggggcgatgaacgcgctctctcgcgaagggtgccggcactatgaggtcttcgaccaagctgatgaggatttcgagcgcgatatctacaaggttgaagaccctgtggtgaaggaatccgcgggagccctctacgaccagatgtggggcccccacggtcgggaggtggtcagggagcgggccgagacggcgaggggtcaggtaatgtttggcttttgtttggtgttagctgaatgtgggctatatgtgggtttgctaaatctgtgtgatgtgtctcaagcggcgcgtggcgagagggtggatgactttggggctttgaacagcgtgctgcctgacccagagccgaacccggcggtggctgtgtccgaggccaccctgcagccgcccccggaaaccgccgaaggcgttcctgatgcccccgcagccactgcggtcggcggaggcccgtcgccaactgccgcgccgagggttgaggatcctgtgaaggtggcggcggagctgacagcggaggatcccgcgacggctgggtcttcgcaggagtcgtcggatggggacttggactactttgcggccttggatgtggcagcggcggaggcttcgccgcatgctgcggatgctgaagttgtgcctggtccgagtactgggcgtgagggggagttgcgaagtctttttgcgggtgaggagattaggataatgttatttaactatagggagatgggaattattccgaaggttgagccgatgtag

SEQ ID NO: 14203 - DNA, 525 bp, Zea mays
  Peptide Sequence Number=SeqID_57578
atggcccttgtgtctagaggaggttcttcttctaactcttcacctggtctatttgctttgtcttccttattgtctcttacagaggagcagccgtgtaccagagggaacgaggcccgcgacgtttcggccggaagcttgatagtgaagacgacagggagcatccaagaggagccagaagcgaagaccacttgcatgtggagaagagattctatgtttaccggtatgatcgattcgacggagttgcggtctcatggtagctcttcatcgctggcgggttgtggtagcagccatagtcggtgctcgagcatggaggaggccatgagggagcagcaagaaaggtttcgtaaagagggatctggggttttgagccacaacacgccaccactggtgataccagcaccaggacaagcttgtggaggggaggaaactactacagaagaaactccaaaccagatagacgacttcgtaaacaacttcttcgcttctggaggtagtggtcacaactcaaatgacccttatatgtga

SEQ ID NO: 14204 - DNA, 843 bp, Zea mays
  Peptide Sequence Number=SeqID_57579
atggtgatcttgctgtggaaggtgacggccattgagctagcttggatcgtcgacacaccccctacctggcgcgccagctgtcggtgttttgggtccgaccgcacacccggggttgcccctcaaggcccacgaaagaatgaccttacgaattattgggcccttgggcttttcgtgaggccttttacttctttagtggacccagggggatatctatcccccacagctggttacacgacgcctccccaggctgaggatactatcgaggcgattgcccttcacggactgaccaccttctgtggtttccaccccttggagctgtccactcaccccattggcttgttccccgcggagaaggaggacgacccaatgtggaaggaccaagtggagcatgccaaggatatatgggctatctacccaagtcagactgctcacttgacggtgcggtgcatgaatgccctgtatcgtctgcaagtgatgcgaggagaggcaatgtctcacctaatggcattgttggaggctaccaagatcaccttggataacagggaggaacttgtggtagacttgtccactgagatcgtggaaaaagacttacaagtggaacaattgtcaaatgagatccaagagcttgaggagctagtgggaaccagggagaacaccatcgaggttctcgaggatcagctaatcaacactcagcagcaacttgcggaggctaaccagcatctggatatgcaccaccaggagatccaggacatggaggccaacgaggatgtcgacatcgagggaggagaggagcctgcctccagcttggacactgctggctcagggagaccaccttccccctag

SEQ ID NO: 14205 - DNA, 327 bp, Zea mays
  Peptide Sequence Number=SeqID_57580
atggcgggcggaagagagctcgccggagctaaggaggggtgtctagccggcgaaggcttgcaggttttgctgactggatcaagagatagagaggggagaaatcgggtggataagttcatctacaactattctaagttgactgtccggaataccgtagattattccagacaggagaagctttttggaaaaacacctatgtgtggaccgtccgggcccttgcggcggaccgtccacgacaccagggggcggactgtccggaccaggggcgcggaccgtccacggtcggcagaaaaggagcaacgactaggaagtggttggaggctataa

SEQ ID NO: 14206 - DNA, 213 bp, Zea mays
  Peptide Sequence Number=SeqID_57581
atgaggatcaggctcaagatggtaaagatgaagatcaagaggaagagccacctcaagaggaggacaatgatcaagggggagatgaagacgatcaagacaaggaagatgatcaagaaatacagggtcaaagaccgccacacccaagagtccaccaagcaattcaacaagatcaccctgtcaactccatccttggtgacattcataagggggtaa

SEQ ID NO: 14207 - DNA, 426 bp, Zea mays
  Peptide Sequence Number=SeqID_57582
atgcgcgccagagttagagcagcgccagacggcgcaccggacagtctacagaacctgtccggtgcatcactggacagcccagaggccccacctatcagagctccaacggtggataagttcatctacaactattctaagtcgactgtccagaatactgttgattatttcggacaagagaagcttttttggaaaaacacctatgagcggactgtccgcgacaccaggccgttgatgtgcaagggcggaccgtccgcggtcggtagaaaaggagcaatgactaggaagtggttggaggctataaatacaacctcgaccacctccattcacttgatccaagcactccactcatacacattcaatacaagagctagcaattcattccaagacacattcaaagcttccaatctctccaagttcccaaattga

SEQ ID NO: 14208 - DNA, 1552 bp, Zea mays
  Peptide Sequence Number=SeqID_57583
ccgtactgcgtcgggggcccttacggcgacgttgtctgccgaggtcgagagacttcggacgcaacacgcggacgctgtccgtgagaagtcggcctccgacagcaagtgccgcaagctggcggagaaggtggccgcccttgagaaggagaaggcagacctccggcgccagctgatggaggagagaagggaggccaacgaagccatcgccaaggagcagtctgcgcaggcggaggccaggctggcgcgggcggagggcaatgtcgccaaggagctcgccggggagctgcagcggcggcttgctgccttcgagagccgcgcggagggggccgaggccgcggcgcgagcggaggccgaacggacgcgcacgcagctcatgacttcatatcgcgagctgggtgtgcggacgagcgacttcgaggtgccggagcgagaggccggacttcactgtctggagtgggtgcaggaggaactgcaggagctccccactgtcttggcggggttgatgtcgttcacctccctggtcacctgcgaggcagcgatgaacgcgctctctcgcgaaggctgccggcactttgaggccctcgaccaggtggatgaagattttgggcgagatatctttgaggtcgaagaccccgtggtgaaggagtccggcggggccctctatgaccggatgtggggttcatacggtcgagaggtggtccgggcgcgggccgaggctgcaagggctcaggcggagcgcggcgagcgggtggacgattttggggcgctgaacagcgcgccgcctgagccggagaccacccctgcggaggccgccactggagtcgccccggtgaccgcggaagatgcaccaggcgcccttgtacctgctgcggccggcgaaggcctactcccaagggtggccgaaggcgcgtctgatgcccccgcagctgctgtgccgggcgctgaagatccagcggagacaacggcggaggcggcggcggaggctcccgcagcggcagggccttcgcaggttcaagattttgggcctgcgcacgcaaccgctactactggttttttggcggcttcgaccgcggaaggtggaaatgaatgtggtgggtctgtttctgagttttttgattttactgactctgggagctcggctgaatggaccgaggagtcgtcggaggaggacttggactattttgcggccctggacgtggctgcggcggaggctgcgctacatgctgcggacgcgccaggcgtgcccggtcctagcaccgggcaccgacgacgaagggcggttgcgaagcgtaggattagtgcggaggaaggggctcggcttcgcgttagtagggttggtcggcaggagctgctgtctttgccggccgtctcgggtgtgggggaaggggagctgcgaagcctttttgctggtgaggagcttctgctgtctttgccggccgtctcgggtgtgggggaaggggagctgcgaagcctttttgctggtgaggagcttaggataatgttatttaattatagagagatggggattattcctaaggttgagccgatgtag

SEQ ID NO: 14209 - DNA, 132 bp, Zea mays
  Peptide Sequence Number=SeqID_57584
atgacgactgacaggccgcttgagctactccacatggacctattcggcccgatcgcttacataagcatcggcgggagaaaaaactcaaacccaagagactttaaagggattcttgagacgagctcaaaatga

SEQ ID NO: 14210 - DNA, 861 bp, Zea mays
  Peptide Sequence Number=SeqID_57585
atggcgactgaaaccgacatgaagaggtgccctaggggataccccttcagtcggtacgatgccgaagaatggggtatccgactgaatgaggtgaccagttgggatgcccgaggcctgtataatattcataaaaactcggccaagagcccgaccccctgctccggcaccagcgccgccaccgccatggatatggaagtgtacgagcgcctcaccgccgaaaccagtcactaccgtggcacgcgtttcgatgcgctgatcgggctcgacgaggtggagcctagtgacgaggaagaggatgaggaggaagaagagcgagcggcgggtgccggggctggagacgagctgctctgcccgttctgcagcgaggagctggacgcggtggggctgtggtgccatatggacgacgagcaccgtgctgaggtcaatgccggggtgtgtccaatttgcacagataaggttgatatgaacttgattgtccacatcagctcacagcatcgaggtttcttgaaggataagtggagaaatcagcaaggttcatctggggtgcgttattcaacacttgccttattgaagaaagatctacatgagaggataagtggatcatctcgtgctgccccagtcagcacggtgcctgatcctctactgtcctcttttgttggtagcttttatgaagtcgatttgccaaaggatgctaaaaaagagtccttggttgagacagaagtgagaagtgataacatagagcagagagcagcggagagctttgatgagcctttgctccctgaggtgaaggaggagaaaaccaggaggagccaatttgtgcaggggcttgtcttgtccctgatgtttgatgacatcttatga

SEQ ID NO: 14211 - DNA, 2760 bp, Zea mays
  Peptide Sequence Number=SeqID_57586
atgtgctctcactattactctgcgtatccgccttttgaagtggcagaagaggatgcagacgaaggggcccttcggtgcgccgccggtcagagcagcggtcgtgacttagttgaagagttcgtggcgtacggggtctggcccttggcgcacggctgggcgctgggcgaagtgtgccctcgccagatgccttttcacggaggaagggtggtgcgaagtcctgccttcgcactgaatttgcgaaaccgtgacccggccgcctttgtgcgtgatgcggaggacttggcggtgcggctcgtggggcgctacgtgccgaggacggagggccagcgcagctttgatatccgcgggtcaaatgaacgtttgaacagggtcttcgaattaaatcaattgccgtacgacggctaccctggacaagacgaagcggaccgccgtgggaagaaaccggcggtggagactggaggcgaccctgcgctggcggccgccgtctcctcgaaaaagagaaaattaggtactgcgatgggaggacttggggtgtctgatagttttgctagagagttaatgaggacgtgtgcggccccgagggaaaggatgtcttcgcccgagctccgggagtcttcggctcggatgctgagggttaccgggggttgttggcctagagatgttcctatcccctgcgcggctgaggaggactgttttacatctcgtatggttcatcggtggagagtttttccttacgggcaaaatatcggtgctgttgtgtgggcagtgatggacaaggatcgccaaggtgcggcgcaaaaacgccaggcgactgtcagggttcacgaagctcggtcgaaaaggcagcggggaccggcgaaggctgcggcctccggcggaggcaaaccgccgctgccggcgaaggcgggcgcctctgcacctagcaaggcgccggaggcgacggtgggcgccgggggccccagactgacgaaggtggtgccgccggccagcggagtggcggaggctgcgaaggcggcccggactttgccactgcctagcaaacgcgttgccgacttcggcaccgagattaatgtggatgattatcttggggggtctgacgagggccagcttgctcttgctgcgcctgggcgcggcgatcgtgacagctgcgctagcgccgaaggcaaggggttagacccttggcgtcggaggcgaggtgtcggccctcgcgctggtcagggacgaggcgggcgtggcgacccgccggctgaaaggagtgacggaggcgctgagtcaggcgacggaggcgctgagtcagctttgtctgccgaagtcgagagacttcggacgcaacatgctgacgctgttcgtgagaagtcggcctccgacagcaagtgccgcaaactggcggacaaggtggccgccctggagaaggagaaggccgacctccagcgccagctggcgggggagaggagggaggccaacgaagccatcgccaaagagcaggctgcgcaggcggaggccaggctggcgcgggcggagggcaatatcgccaaggagcttgccggagagctgcaggggcggctcactgccctggagagccgcgcggagggggccgaggccgcgatgcgagcggaggccgaacggacgcgcacgcagctcatgactgcatatcgcgagctgggtgtgcggaccggtgacttcgaggtgccggagcgagaggccgggcttcgctgtctggaatgggtgcaggaggaactgcaggagctccccactgtcttggcggggttaatgtcgttcacctccctggtcacctgcgaggcagcgatgaacgcactctctcgcgaagggtgccggcactttgaggccctcgaccaggcagatgaggattttgggcgagatatctttgaggtcgaagaccccgtggtgaaggaatccgtcggggccctctatgaccggatgtggggttcgtacggtcgagaggtggtcagggcgcgggccgaggctgcgagggctcaggcggagcgcggcgagcgggtggacgacttcggggcgctgaacagcgcgttgcctgacccggagacgacccctgcggaggccgcgactggagttgccccgggaccgaccccggagactgcggaagacgcaccaggcgcccccgcatctgctgcggccggcgaagacctgcccccaaaggtggccgaaggcgcgcccgatgcccccgcagctgctgtgccgagcgctgaagatcccgcggcggtgggggcggagccagcggcggaggctcccgcagcggcagggccttcgcaggttcaagattttgggcctgcgcacgcaaccgctactaatgagtgtttggcggcttcgaccgcggaagatggaaatgaatatggtgggtctgtatctgagttttttgattttactgactctgggagctcggttgagtggactgaggagtcgtcggaggaggacttggattattttgcggccttggacgtggctgcggcggaggctgtgccacatgttgcggacgcgccagacgtgccaggtcctagcaccgggcgccgacgacgaagggcggtcgcaaagcgtagggttagtgtggaggaaggggctcggcttcgcgtgagtagggctggtcggcaggagctgctgtctttgccggccgccgcgggtgcaggggaaggggagttgcgaagtctttttgcgggtgaggagcttaggataatgttatttaattatagggagatgggaattattcctaaggttgagccgatgtag

SEQ ID NO: 14212 - DNA, 411 bp, Zea mays
  Peptide Sequence Number=SeqID_57587
atgggcaaggacaagaaaggtcgaggtttgccgcgtcgctccggcgacaaacggaagcgtgagccaagtcctcccttggaggactttggtgacttcgagtactcgaaggaggagttttcctccaagtctgagagatcgccggggatagccgcggaggtgtggatgtacatccggtccgtcgagcgcgccaggctcgagggttcagatgagtcggaggtctcctcggacaaggagaactcttccgactcgttcgaggaagggagcggcgacgatggcagcggtggaggtggaggcgatggcgacgacggcgacaagggcggcgatggaggcagcggcggcggtaggagcgacaacgacaacaagggcggcagaagcagcagcaaggctactggcaaagcgccactagcttaa

SEQ ID NO: 14213 - DNA, 450 bp, Zea mays
  Peptide Sequence Number=SeqID_57588
atgggcaagagtaacaaacgcaagcgcgagccgactcctccattggcggacttcggcgactcggaatactcggaggagttctcctctgagtccgaggggtctccggctcccgtctctcccccggcgtcgtctgacgattcagacgactcccaggggattgccgcagaggtctggacttatatccgggccgtcgagccctccgggctcgagggctcggatgagtcggagtactcctcggacgaggaggactcttcggactcgtccgaggagggcggtggtggcgatggcggagacgacgacgacgacggaggcgacggtgacgacggcgacgatggcagtgacggcagcagcaggggcggcaacggcggcagcaagggcggcaacggcggcagcagcaggggcagcaacggcggcggcagcagcaagggcagcaacaaggccagtggttag

SEQ ID NO: 14214 - DNA, 558 bp, Zea mays
  Peptide Sequence Number=SeqID_57589
atggccatgatgggttcaacattggacaagatgtacctctgcgaggtaccaaactttgggatttttaaagctgagaccggcaatgacccaattggagacctagaagccagggtggagcaactccggtcagaactacgccacagaaacagggcacgagagcaggacaaccagcgtatagctgaattgtcagctgacatcaggcgcttgcaatatgagatttcagaatgggactcggccattgattgggccatcaactcgcgttcgatcgcatgggaccgtgaagcaaaggctcgagcttgtaaggcagagcttagtgcggccctcgacagcctgcaagggtactgtaatactttacatgaagaagtacatgtattgtatgctcgactgcactcgaatgtgccttctgacgttgctgcaatgggatccggaccatcgggaatagcaaatgaaggacctgaacgggagttggacctttttaggccccctccttccatgaaccttgctgacgaacggtctcctgcagcaggaaatgaaggaaccaaggatgacgaagactag

SEQ ID NO: 14215 - DNA, 381 bp, Zea mays
  Peptide Sequence Number=SeqID_57590
atgagctgtgcacgaggtccgaccaactccagccaccccaacgaaaacccgcacaccgacgtgaccgttgcgacctccccaacgtcgtcgactacttcaccggagctaattcgccgccgctatgcgctaacgtgtctggcagagaagtgcctgagccctatgtacatgccaacgtggctgtcggagaagtgcttgagccctgcatacgcgataacgtggccgtcggagaagtgcctgagccctgtagaagcacagctggcgagacttctcccgaggtcgaggctggggtcgggcgaggacgcgattcctcccaaggccaaggctgaggccgagtcttggggtcgggcgaggcggagacctcctctcgaggccgaggcctaa

SEQ ID NO: 14216 - DNA, 245 bp, Zea mays
  Peptide Sequence Number=SeqID_57591
ggtacaagtgcggtcactgcacgacggcagtcgaggtcagtgaggcattgtacgccaaggcggtgggccctgatctgctggcggggaatcattggggacagttgatatgtgtggggacggagtgcctcgccacgtcgtgttctctggaggacatggttgctggagtgacttggccgtccgtcttgccaccgggttggacagtcgagtgggaccctacctcggcagaggaggagcatgaggagtga

SEQ ID NO: 14217 - DNA, 99 bp, Zea mays
  Peptide Sequence Number=SeqID_57592
atgacgggggagaagaaaatgttcacctcctacgtcaagaacaaggattcccgggattcgatcatctttggagatgggaaccaatgcaagaagaagtga

SEQ ID NO: 14218 - DNA, 870 bp, Zea mays
  Peptide Sequence Number=SeqID_57593
atgaccaccaacaagatgtatcttccatctcttcaaggcctcctgcagattgatgagagggcgggggagggtgcagcacaatgtctgggggaaatttaccgtttatttggacgcaagattactgcagggctgattgagacatcaagcattgtagctaaactcatgaagtatcatgaggttgactttgtgagacaagatgctcttctcttgcttgagaatgcattggaaggctcaggtggtggtggtgctgctgcagcttatcaagaggcttttcgtatcatcatgcgaggtgtaagtgataaatcgttcattgtcagagcagcggcagcacgttgcttgaaggcatttgctaatattggtgggcctgcattggggatggctgatttcgattcttctatgtcttattgtgtgaagggtttggaagatagtgtatcttcagttagagattcatttgccgaagcacttggtgccatacttgctcttgcagtgaatccagatgcccaggtgaagaaaggcgggaaaaaacaaactgcttctgcaaagaaaattgaagatggtgtgcagaagcatttgattgtgccatttgtcaaagatagagcagatgttgatactggagcgaaactccgagaacatctaggagggaagaccattggtgaagatgttggcaaactgcgagctcgtcgggacgtggacccggacatccctgacgacaacacggtcacggatgatgtggaggttgatctcaacgtgcttggtgcactgatgctggacagggttgacatagaggtagatggcgctgacgttgtcgtagtagaccaaggtgctctaggagagggggctatggagttcctggagaagctggcagtctag

SEQ ID NO: 14219 - DNA, 369 bp, Zea mays
  Peptide Sequence Number=SeqID_57594
atgggtaacaatgtgacatgggcagctgaaatcgaggacctagattggtggggcccaataaggcgctgggtcggactgggtccagtcaccgagggggtgggagacgttgagctggcccctggaaggggggtggaagccggcgaggggctggtggagaaggggttggggaggcgggcgcggttgggagctgaggagtccatgaacctagccattctaatagagacaaaacccaaaagtccaagattatcttccaagtcttgctgcagcacaacagtttgtaagacgtcccagagggttccagctgaattcaaggatgttcttgataacacagttgttgcagcattgtctcattcttctgctcatggatag

SEQ ID NO: 14220 - DNA, 537 bp, Zea mays
  Peptide Sequence Number=SeqID_57595
atgaatgctgtggtaacttcacacctacccgtctgtttatatagtgctgcaggtcctgcagaaaggaaacaacttcgactgaagctgcttgaacgtaatgccgaagactacagcttcacactcgagttgaaactagggatggcaattttacccgcgggttcgggtatccacggatatccgacccgccggtttcgggttcgggcagtcacacatagccgccagaaagcagaaactgctccagcgctcctgctcctcaccggcgtcgaccctgccgcggtgccacactgtcgcctgcgtggttggctggctgcgtccctgctcggctgcccagctacctggccgtcacccgccatcgccactccgccagtgaggagcgagatccaggcgagcgttgacatgatccatagggtgtttggtttgctggttaaggggctgtttggtgtggcgcgtctaccaccacaccgtgcctcacttgcggcggtcaaattggctgccacaactgcggcagctgaagtgtggcaggctgtggctgcttag

SEQ ID NO: 14221 - DNA, 429 bp, Zea mays
  Peptide Sequence Number=SeqID_57596
atgggcaagagcaagaaaggtggtggctctttgcatcactccgacgacaagcgcaagcgcgagccgactcctccctcggaggacttcggtgactcagagtactcagaggaggagttctcctccgagttcgagggctctccggctcctgcctctcccccggcgtcgtctgatgattcagacgactcccaggggatcgccgcggaggtatggacttacatccgggccgtcgagcgcgctgggctcgagagctcggatgagtcggagtactcctcggacgaggagaattcctccgacccgtccgaggagggcagcggtggagacggcggtgacggcgccgacgacggaggcgacggtgacggcgacagcggcaagggcggtgacggcagcggcaagggcagcagcaagggtagcaacaaggccagtggctag

SEQ ID NO: 14222 - DNA, 438 bp, Zea mays
  Peptide Sequence Number=SeqID_57597
atgggcaagaacaataagcgcaagcgtgagccaactcctccatcggaggagtttggtgactcggagtactcagaggaggagttctcctctgagtctgaggggtctccggctcccatccccctgtgtgagtcgtctgacgactcagacgactcccaggggctcgcggcagaggtctggacgtacatccgggccgtcgagcgctccgggctcgagggctcggatgagtcggagtactcctcggatgaggaggactcggacggcggcggcgaggacgaggacgacgacgacgacgacgacggtgacggcagcggcaggggcggcggcggcggcagcaaggacggtgacggcggcggcagcaggggcagcaaccggggcggcaacagcaggggcagcaccaggggcggcagcggcggcagcggcaacagggccagtggctag

SEQ ID NO: 14223 - DNA, 180 bp, Zea mays
  Peptide Sequence Number=SeqID_57598
atggcccgccatcctcccgttgcccagagcaatggcgcccgagcaaacgcggcggaagtacgacggcttgcccgaatccccagccctgaagctcgaatcccacattcgctaggaaatatacaagtgctatggccggagtccaatcggtggtgcccggccgcatttccgcaaacacaatga

SEQ ID NO: 14224 - DNA, 111 bp, Zea mays
  Peptide Sequence Number=SeqID_57599
atggggagtcatgatccccgggcaaaatggaaatcacggctcatgggtaaagaagaaggcgtcgaggcggatctccaggagttccgggacttcgacgagttcgaggattag

SEQ ID NO: 14225 - DNA, 345 bp, Zea mays
  Peptide Sequence Number=SeqID_57600
atgatctctggggtgcagaggcctgctcagagcattattccatcactgagcggaacactgccagcagccatgcaggatgctgcacggcatgcgctttcgcagtactgtttgttgttcagcggggtagctgacggcctcgacctgaagtactactcccgccattcgaccgacagtaccggaggtgtgattgtctcaccagttggtgagggaaatcctagattgagcagcatgatcaacctggtcgtcgtgctcaacaccgagctagaccacgcccatgacgagttgggcaaggctcgggaggagattgcggaactacgtgctgagcgcgcgaagcgccgccattag

SEQ ID NO: 14226 - DNA, 432 bp, Zea mays
  Peptide Sequence Number=SeqID_57601
atggaggtccgctgccaaaccaacttttgtcagaatgaagacggtttccccaaattgttgagagcatgcacagttcgcctcggaatcaggagccagctagagtatgatggtcgtgaatttgtcgagcatggcacagagaaagagaccgtaccgtttggatggccagaatgcgtgcattgggaagggcaacagctgctagaggacgaccccacagtcgtgtacctcactgcatacctgctcaccctggatgcacaatatgatttcttggctcggcaccaccgtcagatgattgcccgagcaaaagatgcagagaagcgcaaccgtaagctccatgtggatctcaccacagctcaagcccgtgtagctgccttggaaagtcatgaagtcattactcttgaagccctgaagcaagccaaggatgagcacgtctag

SEQ ID NO: 14227 - DNA, 120 bp, Zea mays
  Peptide Sequence Number=SeqID_57602
atggcgggcggaaatacgctcgccggagctaaggaacggtggctggccggtgagggtaaagaagaaggcgtcgaggcggatctccaggagttccgggacttcgacgagttcgaggattag

SEQ ID NO: 14228 - DNA, 135 bp, Zea mays
  Peptide Sequence Number=SeqID_57603
atggccccggcgagatccctgctagccggtctcctctccctctgttctctgctccgcccgtggaagaagaagctctgcgcgtcgttcccgagcttcgaggaatcgaagaccaagcgttggcgaccaagtgattag

SEQ ID NO: 14229 - DNA, 549 bp, Zea mays
  Peptide Sequence Number=SeqID_57604
atgcaggcggcatgcaactgcgccaagtgggtgcacttctccgacttccagcgcgcccagcatggaagcccaggcccacgcgtcatgcaaccggtccgccggatgctacgtgcgagcaactgcaccgccactcgcgccactgccacgcctcctcgattgcggaaccaacaacgcgcccgtgttccattcctcgaacggctcgcgcacgcgcaatggctgccctgcgaaccgcacgcctcgtcgcatcaactccgcggcgggacaggcggcgcctctggcaagagaagcaagcgacgcttcgccttcgccataaggaccgcgtcaaaaaaggctccgagcctccctactgatcagaggttcgaaggcaggcccctcgaagggttcaacagccgcctcagagcgcgtgggctccacacccactactggtcagagaggctcgggggctactctcgcaaacccggctccggccaaaccgttgacagcgtcaacataccagccccgagaacttgggacccgaccgtgcacccgggctacggccagctcgcatga

SEQ ID NO: 14230 - DNA, 483 bp, Zea mays
  Peptide Sequence Number=SeqID_57605
atggcggcagactcctttttttcctctgctgcttctccctatttggtggaggcacggacgatgactaaggccgagagagagtccccagaacctccaacttatactcttggctccagggcaacgctcgagtccaccaacggccacggcgagctcccaagcggcttccgcggcgaggaaaatggcttcaggcgcaaccacccaaggaagacgcggcctgaccactgggatccactccacagcgattcaacgcgtcagccagttggtgaaggcaatcctaggctgaatagcatggtcaacctggccgccgtgctcaacactgagctggaccacacccttgacgagttgggcaaggttcgggcggaggttgcagaattgcgtgctgagtgcacagcacgccactatctggatggtggttctcccgctcctgtcgggattcagcacccttaccgcttcgagtatggtacccctgactgtaggacctag

SEQ ID NO: 14231 - DNA, 180 bp, Zea mays
  Peptide Sequence Number=SeqID_57606
atggccgaaggtctggcggcaatggcgggcggaattaagctcgccggagctaaggaaaagtggctggccgatgaggagatatggagccaggaaatctggtctgtctccctgcccaaacccgaggcaaatctaaggatgacgaagccgaaggtcaatgatccgaagcttgacggatactga

SEQ ID NO: 14232 - DNA, 330 bp, Zea mays
  Peptide Sequence Number=SeqID_57607
atgcgccatcttgcggtacctgttcttgacctgtgggggtgtgagacagcaagagtgagctcacatacgttcatcgctcaacaagttgtggggaataatgtgcatgaactcgccaaaggtgggagctcacgtgaagtgaccgcccatcgcagcaaaatcctccccgagggcctcccctacactgaccactcccctactgcccttgcccctttcgggcgctttcttcctccctggaacacgccagcggcggagcccgagcggaccacagcagaaggctcgccggagcacgccaagttctgggttctggccgtcgatgtgggattagactag

SEQ ID NO: 14233 - DNA, 144 bp, Zea mays
  Peptide Sequence Number=SeqID_57608
atggcgggcggaattaagctcgccggagctaaggaaaagtggctggccggtgaggccttcccccttaaaggaatctcgtcccgagattcgggccagagtcctttcagggtgaagcgaagggtgagacttataggaaatgggtga

SEQ ID NO: 14234 - DNA, 138 bp, Zea mays
  Peptide Sequence Number=SeqID_57609
atggccgaggttaccccgtaccccttcgcgtgtccgaagcttcgtgaacggtgtcttcggcatcatgttcaagcagcttcagctgaagctgtttctttttgcaggaccttcggcgacgaagcatggtcccaacagtag

SEQ ID NO: 14235 - DNA, 1071 bp, Zea mays
  Peptide Sequence Number=SeqID_57610
atggccggctcggccgcccccatgccccgcccggctcggccgcccctgtggccgcccggcctcggccgcccctggccggttcaaccgccccggccccggcccggtcgccctgcccccgtcccggccttgcccgaccgtgtccccgctcacccgcgctcgcgatggctcgacttagacacactgcacgaaagtcagtcatccccttcttaccctcccgccttgctgagcgtccgcttcgccgtcctgtggccggacagtccagccacttggagagactacaccaccgcctgcgcgccccctgcaccaccattgggcgccccagcttctggagtagctgctggaggagacccagacgacggagatggcgacgacagctcaagccacgacaccgacttctctgctaaccttgagccggaaggatgggttgctcgacccatcactcgcgacgctgctcgcgggtgtcacttccatgatgcgctcgacaccctgctacgtcgggcatttgaccgacatacttggtccgtcgagtatcgctgtgtggtctaccagcacagtcgcggggtctacccggaccgctgggaggcaacttgcttggtgcgctgcccggagaacagtctccagggtgcggaggcctgctcagagcactattctatctctgagcgggactcagctgaggcagccatgcaagatgctgcacggcgtgcgctttcgcactactgctcggttttcggtggggcagctgacggccttgacctgaagtattacccccgccgtccatctggcagcacaggaggcgtgattgtctcacctgtcggtgagggcaatcctaggttgagcagcacagtcaacctagccgccgtgctaaacacggagctggaccatgcattagacgagctgagtagggctcgtgctgagatcgccctgctgcgggctgagcgcgcagaacgtcgtcacttggatggtggttcccccgctcccgtcgggactcagcacccgtaccgctcacctcagcgtggacaccagtcctatggcaatcccgactgcaagaccaagataactctagaaccatag

SEQ ID NO: 14236 - DNA, 309 bp, Zea mays
  Peptide Sequence Number=SeqID_57611
atggcctcagggcaaacgctgctgctaaaaggccctcgttcacgtcccctcacgggggacgagaaccaaccattaaagccaaagagctggaggcctggagcacaggtggcactgacggtgtcgtcgacggaagcaaccgcttcggcaagaggcagcctcacctctggctacccccacctcggcaccgacgacagcggccacctgcccaccaacaccgcaccagcgggcggcggccgccccaaagcgcaaaacagtcaaaattctggtcctagcaaaaaaaatgaaacggacgtccccggaacacggtaa

SEQ ID NO: 14237 - DNA, 363 bp, Zea mays
  Peptide Sequence Number=SeqID_57612
atgagctgggaagggcagggaatcgagtgcctagggcacccggctgatttgatgcacctcgtcgtcgagtgtgggagaccattcatcgaccagcctcatagaaggagggggctgaaaaaggtcttcaacggccaagttgagctcggctactcgagcttgagccttttcctccttggcccatgcaagcgaacgagattgaacaacccagtcgagtgccaaatcctggtccgcgagctgatcccgcagatggcggacgtctcttctcaactcatttatgcggtcgtcatctacgactcatatagccgtcctacggcggagttccgcttggagccgactcacttctgctttcgagatcccctatag

SEQ ID NO: 14238 - DNA, 204 bp, Zea mays
  Peptide Sequence Number=SeqID_57613
atggaggtggctgagaatcattcagccttagaggtggctgatgtagagaacccggtcctcaaggatggtccaagcggttacccagccccgagggtgttgccgattgcctcagttgatattcctttgtcgagccatcaactggcttctcatgatttggggattccttcattcttctccaatcttcaggcaaaatactgcctctag

SEQ ID NO: 14239 - DNA, 507 bp, Zea mays
  Peptide Sequence Number=SeqID_57614
atggcctcactcggactccggacgctgagggctatcggcggctgctcactcgggcagcaaatcatcttctacctctcgctcatcctccgagtgatctacgacacgccatcaacagtcgttgggacgcacggagctccatcaacgcatcacgcgaacgacgacacgagaacgagatccggcgccgagaagaatatgatcgggaccatggcgtccctgcacggagtcagaccaccagaattaagtcggcaacggcttcgactggcggcacaacccgaggacggtcgaggaatcacgacaacaactcccctccctaagatagacatcatcatcgatgataggaggacacgtgtggagtattggcgctcactccacgccttaggtccattcaatggccccctaacttcaaagtctccaacgtcaacaagtacgagcctaagcaggatccaggaggctggttggccgtctacaccaccgctgcccgagctgcttgggcaaccgaagatgtga

SEQ ID NO: 14240 - DNA, 225 bp, Zea mays
  Peptide Sequence Number=SeqID_57615
atggggcgcacccgtgttgccttcgtcttgctgctgctggaggagcgcgaccccgagggggttggcgctcttcagacatcgctcggcttcaaggattttcatcacacagcccggctgcattctgtgacggaacctcccaagaacgtttcacccatcttgcagacattacagaacatcggagatatagaaatgcggaagcggttacataaacttacatttatttag

SEQ ID NO: 14241 - DNA, 759 bp, Zea mays
  Peptide Sequence Number=SeqID_57616
atgaaggcccgggcccgcatgtcacgtaaccggcgcgacggttactgcgtgccaggaaaccaccgccacccgcgccaatgccgcgtcttctcgactgcggaaccagtgccgcgactcgaggcagccctgcgcatgacccaacagtgccaatcgagcacaacgatcacgtgtcagtcagccgcagggggaggcgcgacggtcgatatggccaaaagtgggccggcaggcaagcgacacctttggcaggcgaagcgagcatcgtttcgcctccgccgtgacgaccgcgtcaaaaaagggaccgagaaaggggatattttgaaaaggatccttctcagcgaaggaaacaggctcccgagccctcctactgatcaggggttcgaaggctggcccctcggaagggctggcccctccgaagggttcgacagccgccccagagcacgcagagtgagggatgactctaggtacgtccgttacatggccaaggctcgggctacgctcccgagccacccgggcaaggttgacagcagcaagttcagcctcgggcgcaacaggaagctccgcctcgcccgacctcaggcctcggcctcgggaggaggtctccgcctcgcccgaccccaagactcggcctcagcctcggccttaggaggaatcgcgtcctcgcccgaccccggccttggcctcaggagaagtctccgcctcgcccgaccttgggctcggaccgaccgcgccacatgggatacatcattaccctacccctag

SEQ ID NO: 14242 - DNA, 756 bp, Zea mays
  Peptide Sequence Number=SeqID_57617
atgaccacggatcgggaaaggggatactccgaaagggatccttctccgcgaaggaagcgggccccgagccccctattgatcagaggttcgaaggctggcccctcggaagggttcaacagccgcctcagagcactcgggctccgtgcccactactggtcagaggttcgaaggctggcccctcggaagggttcaacggccgcctcaggccactcgggctccgcgcccactactgatcaggggttcgtaggctggcccccgaagggttctgacagccgcctcagagcacgcagagcgagggatgaccctgggtacgttcgatacataaccaaggctcgggctacgctcccgagagtgaggctgacagtagctaagtccagcctcgggcgccataggaagctccgcctcgcccgaccccagggctcggactcaacctcgacgctggacgacggaatccgcctcgcccgaccccagggctcggacacagcctcgacctcggaagacggtctccgcctcgcccgacccagggctcgagctcaacctcgacgctggacgacggactccgcctcgcccgaccccagggctcggacacagcctcggcctcggaagacggtctccgcctcgcccaacccagggctcggactcaacctcgacctcggaagacggactcgacctcgacctcggaggagcctccgcctcgcccgacctagggctcggaccgaccacgtcacaggggggccatcattaccctacccctag

SEQ ID NO: 14243 - DNA, 216 bp, Zea mays
  Peptide Sequence Number=SeqID_57618
atgacgagagtagcgtgtaccctccatggcaagaggctggtcggtggtgtatctgtgctctcggttggcgtgaacccggattttgttgatgggatatctgcccagctgaaatcctgcggcgccactgttcctgaacaagctctatctttgatgcagtggaatccattgctgctccagaaacagatcgatgacctgaagacgtcgaatgctggttag

SEQ ID NO: 14244 - DNA, 420 bp, Zea mays
  Peptide Sequence Number=SeqID_57619
atggcacaggggatcgcgaagtctaccgcccccaacaccagcaaacctccgctgggcgcgaagtccgccgcccccggccccagcaagccgctccctgccatgcccgcacaggagcgaaggcctccatccccaccgtgtagtgctaagacggagctttttatgctaggcggccgccttagccgaacatattgcatcggggccctgacctcagagttcgctgccgaaaggcgacgactcgagggggggattgagcgcctccagacgcagcacacggaggctgtgcgggacaaatcggccgaggagaacaagagccgcaacctgatggagaagctgtcggctgtggaggccgaaaaagaggacctcggccgccggctggtggtggaaaaggagtgtgcggacagggcctgcgcagaggcctag

SEQ ID NO: 14245 - DNA, 442 bp, Zea mays
  Peptide Sequence Number=SeqID_57620
atggcgaatgatgaggaggtcgacgacttcagaggcctagagagcatggtgcctctggcagaggatgcaagggcggggattggggagcagctggcgccgccgactggcgctggcgaggaccctgtggcagccgtcgcgccacctgggctttatttttgtgatactgaaaatcggttgctgcgcaaggttctgacgtctgggcctgcgcaagcaacccctactgatgatactaattttgtggcggccgcaaccgcagtgcctgctgatgatagtttgtctggttctaaatctgggtctttttcatgtgatgatgtggccacggtggagtcctcaccgcggctggaggtgggcgaagggtctgatcccccggctggcgcggggatcgagcgccggcgacgaaaagtggtgtcgaagcataacgttggcgagatgtcgcgaattg

SEQ ID NO: 14246 - DNA, 234 bp, Zea mays
  Peptide Sequence Number=SeqID_57621
atgactcaccggattgctcggtctacgggcggcgacaggcgaccgaagtccggcgaggacaatctcgggcctccgatgaagttctgccgggtccgaggacttggaaagcttcacgggctattggcgaagctagccaagttgctggcgcggcttggaagcgacttgagggagctggccacggtggctgaggctcgggcagtggtggcgggcggaggaaaggctcgccggagctaa

SEQ ID NO: 14247 - DNA, 654 bp, Zea mays
  Peptide Sequence Number=SeqID_57622
atgatgccatctcgaactcatgcacatgacggctcgggaacatcccgtggccaggaagatacaccaaatccaccgccagttccacccacgctggccgaggcaatcgtcgccttggtcaccgcgaccgctgacaacacctgtttccttcgtgaaatggcggacaacaactgtagcagcaaggcgggagagcttatccgcaaggaccccgctaaacttcatatttggatttctcagaaacacgtcccccactatttgtcaaggctaaagatccccttgaagaggacgaatggattcgggtcattggatagaagtttggactcctcagatgagcactacattctagaaggagtgctccatatgaagcaagaagaattcatgaagcttaagcaaggtggagatactgttacacagtatctcaacaagttcaatcatatgtcccagtacaccattgaccaggtcaacactgacctgaagaaaagaaattgttttatgaggggccttaatgaccgactacaacaaaagatggtcacctgcctcgacctgtcttacagcagggctatcagcaccgcgctggcagttgcagccaagtatgcaggcccaggaaagtcaaagggctatggaggtgacaggtccaaccaggggcctaagaagtga

SEQ ID NO: 14248 - DNA, 525 bp, Zea mays
  Peptide Sequence Number=SeqID_57623
atggcgcagagacttacatggtccacgttcgtcggtgagcggaagaagtccggcgagggtgattcagggtctctggatttggcctactggttccaaagatatggagctctcaagtcgggtctgtctcttagcctgagcctgaggcaaatcttcggttttgtcgtgtctagggtccgaatcccaatggaatcttcagatatgtgccttccccccttaaaggaatctcgtcccgagattcaaggcagagtcctcgagggtgaagagaaatttttatggcttgatcctttagggttgattcataggcagggggagggttgggcatggttacatgccgattccatcagaaccttggaagggtactcttggtacgatatatctggctctatctccacttctggttctgctatgatctcgatcggcaatcgaacacatctctttagttgggatacatggaatacattgtggatgccagacatttttggagtcactaagtcagttccaaaaatttctctttctccaggctga

SEQ ID NO: 14249 - DNA, 231 bp, Zea mays
  Peptide Sequence Number=SeqID_57624
atgggcaagaacaagaagggtggtagttcttcgcatcactccggcgacaaacgcaagtgtgagccgactcctccctcggaggactttggcgactcggagtactcggcggaggagttctcctccgagtctgagggttcaccggctcctgcctctcccccgacatcgtctaatgactcagacgactcccaggggatcgcctgtggcggaaccgcccgaattattccagcttaa

SEQ ID NO: 14250 - DNA, 2130 bp, Zea mays
  Peptide Sequence Number=SeqID_57625
atgtcctttccgctcccgcccctttcgctttcgtcccttccgctcccgtcccatgccctcccacctccggccgacgccccagcccctccaacccacagcctcacgccggtcatcctcccatggtcggcggccacccaacctgctaccccggcgtcggtttcctctcctctctccgcccagtctgtggctgatattcctggtggccgttcaaaggcgcagcgatggtgtgaacaggagtttccttcagctgcttcccggagtgatttacgtcgctcgtataaggaggcgctagtggatggaaggttcactgccagcggcgctgatgatggtgacggtggatgggtgaaggttgtgggacgtcgccatcgaagtccctgctcccctcttcccctgcgccccccagacccattcctgctgatttacgtgggagatgcttcaactatttctcgccgtcccaccgtgcggctgagtgtggcagtttggtacggtgttttcattaccgcctgcctgggcatcgggtgcgtgcgtgcccacgccggaagaggactctgcatcacccagcgaaggtgttggtgtggcgtccagttcccaggaaggtcgagtgtgtggcgtccagttcccaggaaggtcttgcgaaggtgttggtgtggcgtccagttcccaggaaggtcgtcccggaggagttttctctctgcgatatggaaggtgtttcgtgggtcggcgatgatggtgatggcggaggaggatcttcatcgtgctctgttcgtcaatgttcttggccaggagggttctgactgcgccgttgtgattttggaggcgctcgcctcgaagtatggccttgaggctgatgcgctccaaatccgacgtgctgcgtccatctcgttcctggttttcttcccctccgtggatcacgctgttcgtgccttggctggtggaaattccatttccataccccccctccggctgcatcttaggaggtggtcacgtcaggcgtcggcctctggtggaggtgccctccctgttcttatggatgttgaacttggcggaattccggcacacctctggaggattgattcggcagagcatctgctcggtggacactgcattgttcagggattacatccggatgctgttgatgggacggatttgtcagttctgaaactgaaggcttggggtttctctatggattgcttaccttctcgctgcgatctccacgttgaagagccgacgtctattggagaagatggatcctgcttccctcgcacattgatttactccattttggtgaaagtgactactccgattgttttgccggttgaggagcagcctctgttctcctccccagatgatgatgatgatcgggatagcaagcatcagcggcagaggcagcatgttacggatcatcagttctcttcggtccggacctctgttcatgcatggttgggaccacgtattactcctggtgggggaggtggaacagttgatgccgctcctctcccgaattcctcggttgatgagttgcaggcgcatgttccctccttccctggttgtcccccgtctcctgtgttaggggcgccatttattgataataccggactccttcctgcttcagttggggtttctgatgtttccaccggtggaaaggctgctgagcctttttctgggaatgcccttgttcctttggtttcatcgtttaatttggaggagcaatctgcgtcaagaattctggtttcttcttgggactataagatcagggccaaacctccttgcttcaaggtttatgtccgtaaaaaaatcccggttcagatagcactgtctgaggagattggaacttctactcctttgcaaaaatttaaagatggaattactaagcagatcaatggaatcctaccggcacctattcaaccagtcaagcggaagagaaagctgattcctagcaatttcaacctaaggcgtagcaggagggtggccaagataccacctgagttaggctctccctctactgctaaggtgtgcaagcttctgggtttctgtgatgagagagagaatatttccttcacggatgcaagaagatatgctaaattgtttgattcacctctttctagagagcatataagggcgaatcggtaa

SEQ ID NO: 14251 - DNA, 579 bp, Zea mays
  Peptide Sequence Number=SeqID_57626
atggcgcaaagacttacccggtccatgttcgccggtgagcggaagaagtccggtgagggtgattcggggtctccggtgaggctctgctgggtccaaggacttggggagcttcacgggtctctggcgatgctaaccgaacagctggcgcagactaggagtggctggagtgagctgaccgaagtggccgagttgccgcagaaaagatctcaggttcagtccccatcgcccccggtgacctctgcgcaaggattcacggtgatcgcgccctacgacgtggccagaccaccggtgtcgtcgtggaaactccggcgacctcaattatgccacatcgtggctctttactgtgcagtattaaccgtggaatgcctaggcataccatttctgaaccgctgcaccgctccccaatttgggatttcccccaaatctatcaagaacaccgcagtgtgtgagctcgccgtggacagctctacacaggctcgtcggagccactgctccgtcgtccacggtcggggacctcaattcgtgaaggaacagaaagtgaatgaccttgatgcaaatgtcagtgacatagcggaatag

SEQ ID NO: 14252 - DNA, 279 bp, Zea mays
  Peptide Sequence Number=SeqID_57627
atgtctaaccatattaagaacgaggaagaagtgactgttgaagaagaggagactactccatcaacagaaaaaccacctgctgggaactatttttactttgacatctgtggaatagagcccgactctcctacaacacaaggcaagccccgactaataccagaaaggccaacactcaatgggagtggagagatggcaagagtagcatgtactctccgtggcaagaggctggacggtggtgtatctgtgctctcagttggcgtgaacccgatcttgtcttaa

SEQ ID NO: 14253 - DNA, 669 bp, Zea mays
  Peptide Sequence Number=SeqID_57628
atggagcagcgacctggagggagcagaacgcagaggggagaaggaaagccagccgtgggagggagctcggcgaccagggaggaaaaactcctgctcaccggcctggggaagaaggagcaggggcgccgcgccaagggattgaagacagggagcgccggcgttgagggaggaggggtgcagcgaaggggtggctggggaagaacgccctgctggatgggtgccgggcgccatggcaaggagccaagctctggcgtgcgtggagcctgcggctggaaaatggcagaggatgaagagaagagatgttggcggctggggtcagagaaggcgaatcgtgatattttaaaatcgctgtcgatacggggttttgagttcggttcgaacatgggatatttagccgagtcgaaggtgtggacctacatccgggccgtcgagcgcgccgtgctcgagggctcggatgagtcggagtactcctcggacgaggagaactcctcgtactcgtccgaggagggcggtggcggcgatggtggtgacgacgacggaggtgatggtgatggcggcggaggcggtggcgagggcggtgacggtggtggcagcggcgacggcagcaagggcagcagcaggggcagcaacaagggcagcagcaagggtggaaacagggccagtggctag

SEQ ID NO: 14254 - DNA, 465 bp, Zea mays
  Peptide Sequence Number=SeqID_57629
atggggaagcccgtcccatcactcctcatgctcctcctcagccgaggcagggtcccactcaacagtccaacccggtggcaaggtggacggccaagtcactccagcaaccatgtcctcccgagaacctgtaaaaattatgccacaagcaaggctgagtatactaatactcagctagacttacccgtgaccgcacttgtacccaccataaccggaatgggagacctcgtctcaggtcgcgtgaggagggcaatctgcgggcaggttcactcaggtactaggcttaccgatttaccatatttctcgtggcaggcaggtcctctggtgcaggctctggtgctggatcgggggcaacctcctgggcagctccttgctccggcacgaggatgtactctccgtccgcaagattacagtctatcgaaatgcaatgaaatgtatgtcatgattatgcaagatttaagaacataa

SEQ ID NO: 14255 - DNA, 675 bp, Zea mays
  Peptide Sequence Number=SeqID_57630
atgctggcacccgggggcgcgctcagagcacgccggtgcgcgaacccccacgcgcccgcggccacccatgaccacgcccgcgccaaggctataaagcccgtcccagtgcttgactactgtccccgttgcctcgtccgtacttcgccggacttgcctgagccagccgttgcctccggcgacctcgcgaaccgccagtgccgcccgagagcaaccaccgtggccgacccctctccagccatcctccattcgatccaagcccccagaaagtttcctggtgaagccgtgaaccttgctcaagctttacccgggggaccgcgtcaccggagtagccgaatcacgctcaccggagttcacgaacccgccggcgcacgtggaccggactgtaatcttgcggacggagagtacatcctcgtgccggagcaaggagctgcccaggaggttgcccccgatccagcaccagagcctgcaccagaggacctgcctgccactgcttttgaaggcaagccccgaaactcagctagtgcttttggcaaccaaaccccacagccaaacagctgcatgtctagaggttctcgggaggacatggttgctggagtgacttggccgtccaccttgccaccgggttggactgttgagtgggaccctgcctcggctgaggaggagcatgaggagtga

SEQ ID NO: 14256 - DNA, 1050 bp, Zea mays
  Peptide Sequence Number=SeqID_57631
atgtggggtaccaaaaaccccgaaagaaaagaaagaaggagcaaaagagaaattttaaggaaagaaaccccaaaaacccccaagtttttcaagttcctttcaaaagattttttttcccaaagatttgaaaatgggaaaaggcaaaagaaggtgtggaagaaagaggggaggggttttttgggtttagaaaaggaagttcaaatcggggttcaatgctgggggggagagagacctggcaggcctgtctgccagtctgactggcagactgacgcgcagactgaccgcagactggtcaaagttgaccaacaccggttgaaccgcccagggggggcggttgaaccgcccctgacagctcctggcgacctgtttgccagtctgactggcagactgcagatcagaggtcagaggggtcagagaccagctgaactgcccctcaggaccagttcaaccggtcttgaccaaaaaatctcgacttggaacccacaacaaaaagataggatttggagcagagaagtgaccgtacacagtgaccttgccaagatatgcacgccatggcgctcaaaccggtcgttgaaccttggcagacgcaaccatccacgtgttcgacgcatgctggcacccgggggcgcgctcagagcacgccggtgcgcgaacccccgcgcgcccgcggccacccgtgaccacgcccgcgccaaggctataaagcccgtcccagtgcttgactactgtccccgttgcctcgtccgtacttcgccggacttgcccgagccagccgttgcctccggcgacctcctcgcgaaccgccagtgccgcccgagagcaaccaccgtggccgacccctctccagccatcctccgttcgatccaagcccccagaaagtttcctggtgaagccgtgaaccttgctcaagctttacccgggggaccgcgtcacaggagtagccgaatcacgctcaccggagttcacgaacccgccggcgcacgtggaccgggtaaaccccttcgccattttccgattcctcgcgcgtatggcctctgtgtcatcccgtga

SEQ ID NO: 14257 - DNA, 213 bp, Zea mays
  Peptide Sequence Number=SeqID_57632
atgaactacatcattgccacctccgtcccagaacatccaaatcgggttgtgaaagcagctggtccaaaaggtcatatacttaatctgggccatggtgtacttcagaaaacacccgaagaagctgtagcacatttctttgatgtcacaaggcgcttgagatatgacacccttttccaaggttctgttgctgaagaattgcatcacgttgcttga

SEQ ID NO: 14258 - DNA, 71 bp, Zea mays
  Peptide Sequence Number=SeqID_57633
gtgtcactcccccttactccacagaaggaccaaatgctctctacgagctagttcttcgtcgctccgtcatg

SEQ ID NO: 14259 - DNA, 615 bp, Zea mays
  Peptide Sequence Number=SeqID_57634
atggagaatgatgttgtagaaactccaatgctcgagatcgtcctcattgacctcaagctcatagtcaagaaggcatacacatcctcagacataggatgtcttcactatgacgaaccaaagtgggcacgaggcttcgttgtgaagcgaccttggccaaatcacctcaccaaccgaccgtatcgcaggcgcattcaatgcaaggatcgtctggcgccttatcctgacacgcgtgcttcagtcggcaaggtcgaacctcaggcgcaacaagaagctctgcctcgcccgaccttgggcctcgacctcaggaggaagtcttcacctcgtccgaccccagggctcggcccccgcctcggcctcggaaggtggtctccgcctcgcccgaccctagggctcggcctcaaccttgacctcaggaggaagtctctgcctcgcccgaccccagggctcggcccccgcatcggcctcggaaggtggtctccgcctcgcccgaccccagggctcagcctcaacctcgacctcggaaggtggtctccgcctcgcccgaccccagggcccagcctcaacctcgacctcgggaggaatcgcgtcctcgcccgaccccagcctcgaccttag

SEQ ID NO: 14260 - DNA, 708 bp, Zea mays
  Peptide Sequence Number=SeqID_57635
atgaaggagaaggtggacgtgtcggcggtggacctggaggccggtatcggggagacgttgtaccgtggatctcgtgaagatgtcatcccttccgtcttcctttcttctcccccaccccctctggatcctccatcgctgccacaactttcgtctatgtgggacaaggagggtgcggccaagggcaacgcggtgaccccaacgttagccacggccatgctgggctcgctggcgccctgggtgtgcgccgccgcgggggcgcccgtgatggcgcccaggcttaagctactgcaaggggcccaaccccgttcgaattatagggttccacgcgcacaaggggcccaccttgagcaggacacaacccgtagcacaggggtggcgaggagtgggagaggaggcgtatataacaagacgctgctaggggataagcttggcaagttctcggcgtcgctgctgatgaacaccatgcatttcgcgctacaggcggggctctccaagctcatcatctgcttccagcccaaggggcccgaggccgccgtcgacatgggatggaaggactacttcatgagagtcgtgccaactgctctcgggacggccttggacataaacctgagcaacgcgtctctggtgttcatgtcggtgacgtttgctactatgtgtaaatcagcctccccgatattcttgttgctctttgcttttgcatttaggtga

SEQ ID NO: 14261 - DNA, 201 bp, Zea mays
  Peptide Sequence Number=SeqID_57636
atggggtccaggcacagtgcttgctctgccgaggctgagtgccgaggttctttcgttttgcttttgttagtcaccctcctgcggggagagaaaggggatcacgactcatgggtaaagtgtgcgacctctgcagagggtaatgaaactgatatatcagccgtgctcacggttatgagcgaccttgggatcctctttgattag

SEQ ID NO: 14262 - DNA, 210 bp, Zea mays
  Peptide Sequence Number=SeqID_57637
atgccgtcaatggggtccaggcacagtgcttgctctgccgaggctgagtgccgaggttctttcgttttgcttttgttagtcaccctcctgcggggagagaaaggggatcacgactcatgggtaaagtgtgcgacctatgcagagggtaatgaaaccgatatatcagccgtgctcacggttatgagcgaccttgggatcctctttgattag

SEQ ID NO: 14263 - DNA, 459 bp, Zea mays
  Peptide Sequence Number=SeqID_57638
atggttgccccgcctcctactcctgtggcgaggaaggcgacgggacaaacccggatgctgctcttctgccacggggggaagacatcgccgagtctgccgccgccgggcgggctgacggtcgtcgttgttgctgctgcgctgcgggggaaggagtaccatgtcgtagctgtcgtcgagggacatgaactcgaggctcccgaaatggagcagcgtcccgggctgaagaggttgttggagactacccatctggaactcaacgggaagttgttcgtcaacacgcagcaggcccctacctggcgcgccaactatcggtgtttcgacctcggggggtccatggaccgacgagtaaaaatgtcgttgtgtgccccagcccagatgggttggcgcgagatggaacacaaggggggaaaactgcggctcgtgttatcctgcgcccaggggaggatgcgcttgcagtag

SEQ ID NO: 14264 - DNA, 765 bp, Zea mays
  Peptide Sequence Number=SeqID_57639
atgtcccccgcatccgccgcggatctcgccccccccccccccccccccgcggatctcgcgctagcccacaaccgcgtgccctcccacgcgcgatggaatgcccctcccaccacaaccgcgcagcaccatcctgggcacggcgccccgcgcggggcctcgacgaagaggggctcggcggaggctgcggaggggagcggcgagaaggagatgagcagcgcaggggaggaggagaaggagagcgacgcggagatgaggagcgacgagagcaggaccgatagcagcggcgccgcccaccgccggtcgcccccgccctcgccctcgcccatcggccatgtcgtcgccgacggcctgcgagtcgagcagcgcggcgggcggccccgccctggccgcggcgaaggccgcctcggcgtccctggcgcggagcgtgtggcgtcctcgacggtcgggaaggtgcccagccacacccgcgccgccttctgcgggtcccggatctccgccacccacttcccccacgggcgacgtcccaatgctccaagagtcgaggaagcgtccgttcccgtggccactaaagagcccgtccacgatgccgctgggctcggtggcttcgagaatcctcgaatagtcgaggggagagtggaggagcggctgccgctgtttaccgccgcgagacgtggccatggcgctcgcgctagagcaacaccgccaaggcaatcgagtgtgccactgatggctgccatctccgccttcaccgcctccgtctcctag

SEQ ID NO: 14265 - DNA, 627 bp, Zea mays
  Peptide Sequence Number=SeqID_57640
atggacaagtccggcaaagtgattgcaaagtgggatagtagagcaacaaaaatttacacagaaatttgtgtagaagagagtaacattagtattggccatctaaaagtaggactacgaattggtgcaggcaatgccaggttgtattatgttcaaaacaaccccctagagaatgaggacgagctaaaggttatgtttggaccaattgtgtgcacaaatgaaagaaccctggtgcccggcgtcgaggatgctaattcatcttctgatgatcatttggaatacactttaggtgggggtgaaaacagcacacctgacccctgcacaaatgctactggcaagcgtaagatgcgacatgattcccctaaaccaaagaagaaaaaagattcgagggaagagtacatgaaaagacttgtggcggcttttgagtcccgctcaattaccacaaacaagtctattacctcttctgacaatgacccggttcgattagagattaaaaagcagttgatacaagtgaaggaagatggatcacctgaagggagcgaaatacatttgtttgccacgcatcttctgattcataagaagtatagagatgtttttgcaaacttggagacaaaagaaggaagaatctga

SEQ ID NO: 14266 - DNA, 1275 bp, Zea mays
  Peptide Sequence Number=SeqID_57641
atgaagacgcaagtggtcaccacgcagcggcaactgatgcgcgatctggaggtgctgccactcgaggaggccaccgcaagtgccaagagcatgaacgtgaatggtgcatgtcagcgagggaagctgctacggttcctagagcaggttgttgtgatggtggttgctgttgatgtagatgaagttcttggtagctttcttgcggctctgaacaaatttattgttgatcgttgttcttggaatcactcagtatcaaaataccatgtatacgagttctttaaggttgctctagagagtggtaggatccaaacagccatcaatgacgtgatactcaatctttttgacaagttctttgagatgcagagaaatgacataataagggcacttaacatgtataaaagagaaattgagcaggttcttgatcccacatacaaggaagaagcagtaatggcagggaggatgactgctatagttaactcaaatggggatgtttgtgccattcagaaagctggtggagagggtctcatgtcaagtgttaccatgcagtgtttaagaattgcttcggtaaaggctgctgatataacaagcaaaataaagaaagcaatattaacaggacataaggaaaatgaggaatttgcgcttgccatgtgtccagcagaaccatatgtcctatcaggaggaaaggacaaatctgttgtcttgtggagcatccaagaccatatatctgcccttggggattcctcgtcttctcctggagcatctggcagcaagcagtctgttaaaactgcaaatgaaaaggagagcccaaagttgatcctagagggtggcgagttcgatgctgtgaagcccctgaagcagagccgcgtgggattccggggccaggcatggttccatatcaacttctgggctcgcccccgcagcagcagcagtaataacaagacaatcaagcgcttctttgctgaggtgcactacaagccaacctcgatcagtagcccctcatcgtcttcgtcatcacttgcaataactgcagttcctatagttcaaatatgcatcattatcgaggaacctctatcccaatataggcgtagctgtgccttttgtcccagctaccgggacattttacaccctaagggctgccgtaaggtcgtctgtggaaatgacaaggacctgtttgaacagcgattggacccttgctgctgcactggtatggggattgggaagatgccattcactgcccgcccagacatgtctgcttttctcaacatcagtcctaagtag

SEQ ID NO: 14267 - DNA, 144 bp, Zea mays
  Peptide Sequence Number=SeqID_57642
atggcttctttgtcgaatactttttatcggacactcgacaaagactttactcgacaaagaaaagtcgttgtcacggcgccaggtctacattctctaggaacaaaccacaaaaagtttggtggaaaaaagaaaaaatgcaaataa

SEQ ID NO: 14268 - DNA, 2076 bp, Zea mays
  Peptide Sequence Number=SeqID_57643
atggctgaaaggtaccaactcccacggagttgcgttcctccaacgatgaggcgaaaagacggccggcccacgcgtcatgcaaccggcgcgccggatgcttcatgcaagcaactgcaccgccacttgcgccaccacctcgcctccttgattgcggaaccaataccgcgactcgaggtgaaccagcgcacgacccagcagcgccagcctagcgcggcggtcaatgcggtcaaaaatgggccggcagtaatgacggtggcaggcgggcgggagcagcggtcacgtcgtcagccaagctcacgtcccatccgggggaagcaagagaaccccctctcacggcgtgaagacaacgcgcccgtgatccgttcctcgaacggctcgcgcacgcgcaacggccgccccgccaaccgctcgccccgtcgcattaactccacggcaagacaggcggcgcttccggcaggagcaggaccgggaaagggggataccccgaaaaagatccttccccgtgaaggaaccaggctccgagcctccttactgatcagaggttcgaaggctggccccccgaagggtttcaacagccacctcagatcgcgtgggccctacacccactactggtcagaggttcgaaggccggcccccccgaagggttccacggccgcctcaggctactcgggctccacgcccattactgatcaggggttcgaaggctggcccctgaagggacatttccgagaccagcgggagcgatcttgtaacggaatcccatcagagggaggcatcgagccctcggaccccgtcgccaggggaccgggtccggcagatcacccgcagctcaccggagacaccatgttcggcgcccatcgagggctcgggggctgctctcgcaaacccgactccggccgaaccgttgacagcgtcaacataccagcccgagaacttgggccccgaccgaacacccgggctacggccatttcgcatgagggaacaaccagaccagccgaagcattacgcaaggcattaagacctcgaaggagtgaaaccactcctccgaggcctcgggggctacacccggcgggtgcgctcgcgcgcacccaccggaacaaaatgcaaccgagaaaggctggtccccttgcaaaaaagtgcgacgaaagcctccaagcgagtgctaacactcccttcgaggctcgggggctactgtcggggaccataattagaggtaccctcaagactcctaattctcagctggtaacccccatcagcataaagctgcaaaggcctgatggggctcgaactcgggctaggtcccggaagacggcgaactccgctccgcccgtcccagggctcggactcgggctaagtcccagaagacgacgaactccgctccgcccgacccagggctcggactcgggctcagccccgaaagacgacgaactccgcttcgcccgaccccagggctcggactccgccctggcctctgccgaacgacctccgcctcgtccgaccctagaggcttcggactcggcctcggccatggaagacatactcgacctcggcttcggaagagcctccacgccgcccaacctagggcgcaggcccagccacgtcaacaggaagcgccatcatcaccctgcccccgagccgattcgggccgcagagaacaagaccggaggacgtcagcaaggactcaaccgctccgacagctgtccctccgccaggctccgtcgctcctccgacggccacgacatcacaccagctgggtgccaagatctctccggctgccacatcggcatgaaggaccagggccctcttagagagggttggccgcgcggggacgaggacgggacaggcgctctcttggggccgctcgcttccctctcccgcgtggacgcttgtaaccccctactgcaagcgcacccgacctgggcgcgggacgaacacgaaggccgcgggatttccacctctctcacgcccatctccggccacctcacttcccccttcgcgctcggcctcgcgtcgacccatctgggctggggcacgcagcgacattcactcgtcggcttagggaccccccggtcttga

SEQ ID NO: 14269 - DNA, 1077 bp, Zea mays
  Peptide Sequence Number=SeqID_57644
atggctccagggaagaggtccgcatggacctcacggaaacccgaagaacctatgccaactgattacgagaaaataagggctatgaatatgatgaagaacaatcaattgtttcaacggctaggccttggacaactgaaatcactggtgactgctacagctgcaaacaacaaagacgactctcctcagcaatcagagagtttatatgatggtgaaaacactgacaattctaatgaagaggaatcccaatgtcgttacaatggtcgtgccaacttatccaatgatggtgatcagatctcaacaaaagagcgaacaattagagtcaccaggcaaagaattgctgaaataaaccaagaaaatagccacaacctgtctgttcataaacaactcagttcatgtcctactacaaaccatgattcgatcgaaactcttgttgttcctacacaacctagtgcaaataccaccatagacaataacccaacacataacatagataatgctatagagcctaattctctgatacaggaggagagtgataaccacaatgcagttgaaggaacaatagatatcataccaaggagaaaaagtatgggcaaacaacttgaatcgttaagcagaggactaggaatgaagattccaatccaaattactgaagggagcaagaggccggagccacccattcaagctgctaagtttgcatcagaggggggaatcacattgcggcagcacattccaatatttcaccactggaaggagtacaagaggaaagagaatgaacctacaataaaaaactatattggaaaagttactgctcaattcaccatggacaatgatagcaaggcagtggaagatgcttgtctagatatgctaaaggttggacaacgccaaatgaggtatagactaaaacaaaagtatttcaatgggatacctgctaatcaagtgaggagtacatcgcctatttcaagcatgtctgatgaggactggagaaagttggtggagaagtggtctaccccaaaacacaaggtttttgcaataaatctccactggcttgcactgtactatctttattgcttgaagtga

SEQ ID NO: 14270 - DNA, 162 bp, Zea mays
  Peptide Sequence Number=SeqID_57645
atggccgccccgccaaccactagccccgccgcattaacttcgcggcgggacaggcggcgcctctggcaggagaagcgaacgacgcttcgccttcgccataatgaccgcgacaaaaaagggaccgagaaagggggatatcccgaaaaggatccttccccgtga

SEQ ID NO: 14271 - DNA, 234 bp, Zea mays
  Peptide Sequence Number=SeqID_57646
atgaattcagacactcatgtggaagctcttgaggatgatgtccttaataatgctcatgaagatgagagaatgtttccagagtttattgaaaatggtcatgcacgtgggtatgacatgcttgcacaatttgaggatagcgatgatgaagagagggaggagaaccataccatgggtgtgcccaatgatgtagaagatgaggatagactgattgttgattgggatagagaaatctaa

SEQ ID NO: 14272 - DNA, 312 bp, Zea mays
  Peptide Sequence Number=SeqID_57647
atggagtggggagaccggaggcgccctggaggggacctggaggcgcgctggagctggagacacgctggagctgcaaatccggcgctagagtggggagagcggctagccagagacgcgcgctggacctgggaggcccgcgtaggagcaggttgtgccctctgggagcgcggctgctacttgcggctcctcctccacagtgtgcgccgcggcgtcctcctgaccctggtcaagcccggctcctccagatccggcggtgggcggtctgcggcggcgggactccggcagtctacgacggcggacgagtggtcgtag

SEQ ID NO: 14273 - DNA, 576 bp, Zea mays
  Peptide Sequence Number=SeqID_57648
atggggatccacaagaagcccgaatatgtctggaaggaataccgcgaaaatggaatggagaagtgctctatggcgaggaaaagacttcaggccctgtcagggagagaccctaccgaggatgacctcaccatcgtctacatggtcagatacctccacactctcgataaccactacgatgacattttctcccactgcacccacctaaactcccgggtggaaagcttagagcagcaggtcaaggaacttaagaaggagaaggcatccctccaagagtgtctcgatatagcagaaggcgaggaggccaacacccgtgaagcctaccgaaccctgaagatggattatgataagaagctgaggaagctcgcccccacgaagaaaatccaaaagaagaccaagaaccaaggaggccaaactgagcgaaggaagaaggcccctccagcaccaactcccgctaggatagagaatttgtccgacgtcgagtatatgtccctagctagccttgatgaccttctcaaggaatttggggacactttagaaaaagagttcggtagtacctcagagaatgctcgcgtgtag

SEQ ID NO: 14274 - DNA, 1062 bp, Zea mays
  Peptide Sequence Number=SeqID_57649
atggctgaaaggtaccaactcccacggagttgcgttcctgcaacgacgaggcggaaagacggtgggtatcccccatccgggggcttggaaggtggaaagacacgatgcataagggagcgcgaagacatggtcgccttccaagggggtcaccctccttttaaaggcgactctccctacttgcgtccccagccgtcgcgggctgagtcttctccaacacgctccaaggtcctcccctgcagcgcggggactgggtcccacacgtcatgcaagccggctcagggcagaagaagccaaaccgcccagcgactcttcacttttgcccagaccaacgggcgaaaggggcgggcagccatgcaggcggcatgcaaccgcgccaagtgggcgcgcttctccgactcccaacacgcccagcatggaggctcaggcccacgcgtcatgcaaccggcgcaccggatgcttcgtgcatgcaactgcaccgccacttgcgccaccaccgcgcctcctcgactgcggaaccaataccgcgactcgaggcgacccagcgcacgacccagcagcgctagcctggcacgacggggcagcgagagaaccctctctcacggcgtgaagacaacgcacccgtgttccgttcctcgaacagctcgcgcacgcgcaacggccgccccgccaactactcgccctgtcgcattaactccgcggcgggacaggtggcgcctctggcaggagaagcgggcgacgcttcgccttcgccataacgaccacttcaaaaagggaccaggaaagggggataccccgaaaaggatccttccccgtgaaggaaccaggctccgagcctccctactgatcagaggttcgaaggctggcccctcggaagggttcgacaaccgcctcagatcgcgtgggccctacacccactactggtcagaggttcgaaggccggcccctcggaagggttcaacggccgcctcaggctactcgggctccgcgcccactacagatcaggggttcgaaggttggcccccgaagggttcacagtcgcctcagacacagagcgagggatga

SEQ ID NO: 14275 - DNA, 495 bp, Zea mays
  Peptide Sequence Number=SeqID_57650
atgcagcccggctgcacccttccgccggcggtcacccaagacggtgacctccagtttgatggtgggggaaagcgagccgggctgcggcctctgcccctccctcagcctcaaggattttcatcaccagggctggggaggggaacgcgagtggcttcggagccgctctcggcgccggcgtctgccacggcagctggaagaggttcttccgccgacgagatagccagagccgcccacggactgacctccaactctacggccttctgcccgtccttgcttcacgagtttgggcatgggcgggggcctcctggcagcggcatccgccctgaggtcatcgctgccgctgttcggccccccggagcagaagtcgtcgtcgtcgtcgctgctagagcgggcgacagcgcgccgttcgtcggtcttctgttgctccgtagcccccccccccgtcgagtggggttgttcgtacctgcggaggtggaaccggagttccatttgtaa

SEQ ID NO: 14276 - DNA, 1500 bp, Zea mays
  Peptide Sequence Number=SeqID_57651
atggccgagcagggcggcgcagccggggaggccgctggcagcgacccccctgcgcctgcgcctgcgactgccccggcgccagccccagcgcttgctgcggacgcggccgggcagaggtccctgccgacgccgttcctgaccaagacgtaccagctggtggacgacccggcggtggacgacgtgatctcgtggaacgaggacggctcgacgttcgtggtgtggcggccggcggagtttgcgcgcgacctcctccccaagtatttcaagcacaataacttctccagctttgtgcggcagctcaacacctacgtacgttacctgatgctcgctaggcttatattcctccgtccgggatttaggaagatggtgcccgaccggtgggagttcgccaacgacttcttccgccgtggggagaagcgcctgctttgcgacatacaccgacggaaggtagcaccggctccggcggcggggctggccactgcggccgccgctgccgcgtccggggccgtaacggtggccgcggcgccgatccccatggctctgccggtgcggccggcctcaccgtcgctctctaccgacgagcatgtcctctcctctaactccggatccgccgaggaccacccgcaggctgccgcttccggctccgtcagcgcgtcggcgtccggcgacacgggggaggaaaacgagcgcctccggcgggagaacgcgcggctgacccgcgagctcgggcagatgaagaagctctgcaacaacatcttgctcctcatgaccaagtacgcctcctcccagcagctagacgcctctgcagcgctctcctctgtcgtcaactgctccggcgagtcatcggaggccgtacccgcgcctccgcccctccccccggcgatcctcgaactaatgcccgcgtgcccgggtcttgccaccgcggccgcgggcctcgtcgccgaagcggatcctgaccaggcctcgaggctgttcggcgtctctatcggcatgaagcggatgcgcgacgacgacgacaccggcgaggaacaggcggaccacggcgccgcagcggatgtgaagacggaggcgtcggatccgcagcatcgcatggagccgtcgccggagtcgccggaccagcatccgtggcccatataccggcctacgcccgtgtaccattcgatgcggccctgcaacgggccggaccagggcgccgggtccgaccaagacgggtccaactccagcctcgggcgcaacagggagctccgcctcgcccaacctcaggcctcggcctcagcctcggccgagggagaaggtctccgcctcgcccgaccccaggcctcggcctcagcctcggcctcgggagaaggtctccgcctcgcccgacctcgggcctcggcctcgggaggagtcacatcctcgcccgacctcagcctcggcctcaggagaagtctccgcctcgcccgacctcggcctcggacggactacgccactggggatgcatcattaccctacccctag

SEQ ID NO: 14277 - DNA, 1161 bp, Zea mays
  Peptide Sequence Number=SeqID_57652
atggacgcctccctctccggccccgtgatgcaccctcctctccgtcccgcacccccgtcgtccccttcttcacccccccccccccccgcacagcggcccggatccccgccccttctcgcgctggcgggcgtggagatcggcttcggcgggccgagtcgcgctggcgggtgtggagatcggcttccgtggtttcgggaggctcagcgagctcgtggcagggtccccctccagagcgaggatgtcaagctcgtcatcgtcgacgaccctttcatcaccacggactacatgctcgatgctgaaatgctcgcactctgcgccgccaaagcgtccgagagctcgcgagaggaagaaggcactgaccacacgccgcagagcaaggccgttcggccgaggcaggagctgttccacagcgtgaagcaccagaaggagtcgttggccgctgcagctaggaaagggacggtcgtcaagtctctgttcatgagcacgacgccaaaaaaggaaccggtccagacgccagcggcagacaagagcaagggggcggtgtccgaggtctgttcgaagctgaggaagctgaacttggcgtgccgggaggtgccgagcaggtacatgtctcagcctcagccgaagaatacgaagactaccaagaagagtgaagagaccacggtggccaagagcgagaagcgggggctggaatccaagaccaatgccaagaagaaaattttaggacgctcagtgaagcgtgctaatgccggacctgatggagagaaccgaaatggttgcagcactgctgcagacgagaactcgcttgcagaaactgctggctcccatcaggaaaggaaggttgtgctgcaggaattgagaatcgaggtggatgtatcgcgatgtggcaattcagatgacaacaaggagaatgtgtccagtgctccgagtgaagaagcattggacaattcatcacattatggaagtgaaaacagactgttggagaacaatgataatgttcctctgaaggagaatgttgctctaaaggtggccaaattgcagaagaaagtgcatcaagagcaggcaggaaagctcaagaaaaccaccaatcctagggtcttaagggatggggtcccaacttcccacgattcaaacccttttgatggatatacttcgttgtag

SEQ ID NO: 14278 - DNA, 1365 bp, Zea mays
  Peptide Sequence Number=SeqID_57653
atggccggctcggcccgccccgcccggccgctccctggccggctcggccagcccccggccgtgccccccgccggcgcgccccctggccgcccagccgtccgcccgcccggccccttggccgcctggccgccctggccggcgcgccccctggccgccttggctgcgcgctcgtctggccgtttggccggctcggccgcctggccagcccgacccccccgcgcgctcgcctggccgccggttcaaccgggccggctcagccgccccgccgcccagccggccggtggttatgagattgatggttttggttatgactatggtgctggtaagtggtattctttccgtttggaaaggatggctcgacttagacacactgcacgaaagtcagtcatccccttcttaccttcccgccttgctgagcgtccgcttcgccgtcccgtggccggacagtccagccacttggagagactacaccaccgcctgcgtgaggagcaggagtgtcgacgacaggagcagcagagctcttccttctcgctccaccaggagatagagtctgtgaggagctgctcccctgtgcttcctctggagccgccccctgcatcaccactgggcgccccagcttctggagtagctgctggaggagacccagacgacggagatggcgacgacagctcgagccacgacaccgacttctctgctaaccctgagccggaaggatgggttgctcgacccatcactcgcgacgctgctcgcgggtgtcacttccacgatgcgctcgacaccctgctacgtcgggcatttgaccggcatacttggtccgtcgagtatcgctgtgtggtctaccagcatagtcgcggggtctacccggatcgctgggaggcaacttgcttggtgcgctgcccggaggacagtctccagggtgcagaggcctgctcagagcattattctatctctgaacgggactcagctgaggcagccatgcaagatgctgcacggcgtgcgctttcgcactactgctcggttttcggtggggcagctgacggtcttgacctgaagtattacccccgccgttcatctggcagcacaggaggcgtgattgtctcacctgtcggtgagggcaatcctaggttgagcagcacagtcaacctagccaccgtgctaaacacggagctggaccatgcattagatgagctgagtagggctcgtgctgagattgccctgctgcgggctgagcgcgcggaacgtcgttatttggatggtggttcccccgctcccgtcgggactcagcacccgtaccgctcacctcagcgtggacaccagccttatggcaatcccgactgcaagaccaagataaatctagaaccatag

SEQ ID NO: 14279 - DNA, 354 bp, Zea mays
  Peptide Sequence Number=SeqID_57654
atggtggcggcgcacctggggcgtcgttttttccccgatgggggcaccattgtggggcaccaggctctagtagcacagggatctcgaggtgaaaaccctgtccatcgttggacgtgtgatggcggcgcctttggcgtcgtgccctccttggaggcgtcggatctggagcccgtctcggcttgtggcaggggtggtgttggttggttggtggagatgctcgtgcgcagtggcagaagaggtggtgctctcatcgcggtttcagtggcaaggatccttggagcagtgttccgtgtgatgggcggcgaggtccccgtacactttaaggtggttgtttctgaggagattcgagtttga

SEQ ID NO: 14280 - DNA, 906 bp, Zea mays
  Peptide Sequence Number=SeqID_57655
atgacggatgcggagaaggaggtagcaacagaaagacggatggactcaccgcctcgatgcgattgtggagaccgtgctgtcatcgacgaagaccatgagaagcagttctgttgtccgaacattgattatccatatgggtggcgtaagtgtcgttttagagagtggttatatggtcctttgtcccattggccagagctagaggagacgaggaaatgcagttgggagagttacgacgacaaaggagaggtgatgcgcacaatagagtccaagagactaatgggacagaagatgcgttgtggatctcagctcatcgattcgtacattaacgatcgcatacgcgacatgcgtagggacgcaaaatctgccttttatgatagcccgaagcgtgcagagtataggaggttgaaggcggcagatgagaagagagcacatgatattggatgtggcgtaaactatttggccgatgaggcgcatgcaagatatgttcaggataaaatgtcgacggttgagctgatggaggaggaggaggaggaggacacacctagattgagtgagcttatcgctctcgcagaggcaggattacatgaagaagaggaggatgacacatcaaggttgagtgagctcatcgcactagctgaggcaggattacgtgctcaagaggaagatgacgagtttatgtctcaggccaccgaagaggtagaggcggcttattacaagaaggagtctgatgaggctgaggatgagctagtcttccaagctgcagatgaagcagaagccaattattacaagagaactgttgacaagtgtgatgcaggacaatgcagcaagtggaatgaggttgtcgttgaggattgcacgacggatgactccaaagataagttacttatagattgtgattctgattga

SEQ ID NO: 14281 - DNA, 1062 bp, Zea mays
  Peptide Sequence Number=SeqID_57656
atggccggcggccctgtctgtcgtgcggtccccgccccgacattcgtgatgccccctatcagttttagaggtggcgaagagcggaccccggatccaaagccccagtggaaccccaggccggagcagatccggattctggaggccatcttcaactccggcatggtcaatccgccacacgacgagatcccccgcatccgcatgcgcctgcaggagtacggccaggtcggcgacgccaacgtcttctactgcggcgcccgtcaagccgcagctcagtccttgatccagaaccaattccagctgctcgcctcgcccacgcaagcacaggcgccagcttcctcatcctcgtcctcctccgaccgctcctctgggtccagcaagccggtgccgcagccgatgttcacgacggcagcggccatggactttccagggccgctcggcgcgacgtgtgcgcaaatgtactaccaagcccaccccgtggcgtcggtctcggcgtcgccagcgcacaaggtgcaggaccctgtagcctccgacgagcccgtcttccagttgtggccacaaggctacttcctgtcggctgtcgaggtcgccaccattctcgggggcagtataggcacgacgacatgcgcctggggcccggcgaggctcgggcagttctggcccgtgggcggcgctgatcaccatcagcaccacaagaacaataccaccgcgacgaccaacaccgtggcaagggacgcggcgcatgagcacaacacgacgctggggttgctgcagtacggctttggagatagcgcggccatggagacgacttccatggcggtgccccttactgcgtcgccgggaaccgctgcgagcgtggtgaccgctgggctcacagctttgcctttaagtactaatgctgttgtcgtcaactatgatctgctgcaagataatcttggagtaccatttttaaaaaggatattctactcgcacaaggtcctcacgcagaagagcccgctgggcaccgtgtggatcgctgcgcacttcgagctcttcgagcaacatcaagtccgtcggctccgctag

SEQ ID NO: 14282 - DNA, 1275 bp, Zea mays
  Peptide Sequence Number=SeqID_57657
atgggggaggggtcgaaggcgatgctggccaagcccatccagctcgcggatcaggtggcgcagcaggcgggctggcagtgcctcagggcggactgcacggagctacagtcccgcgccatgaagctcgccgagctcctgcggcaggcggcgcggggggcgctccacaaggccgcgggcatggccgcgctctgcttccagagtcactcctgcctccgccgcttcttcacgctcaacccggtgtccgggctcccgcgcaccctcgccctactcgacaccatgctcgaggacatcgcctggctcatccatgtctcgtccccgcaggtcgacgacggcgacctgcgggggctccccaacatcacacagaacgagcccgtgctcggcatggtctgggacaacatcgcgtgcctccacaccggcggcctcgccgcgcgggccgacgcggccgccaccctcgcctccctcgccgtgggcaactcctacttcgccaagtacatcgtcgaggaggacggcgtcgcgccccttgtcaagctgctcaaggaaggcaccgacgacgggcaggaggccacgaccatggcgctcagcctcctctgccgcgacgaggatagcctgcataagctcctccactccggggtgtgctccatcttcgccgctgcgctcaaggagccgccatgcccaggacctattcgcgcagagcaacgccgtcccggcatcttgtcacccacctcgcttccaccccgtccgtaccaccgccctgccctgcacctcgccgcgcatcgcctgtcctcgcgcccgctgcgcttcctccgccgctgcctgcgtgtgcgcccgctcggccgccccgagatccgacgggacccgcgtgagctcccgtgctgctcgccctgcgccgccgcgtccccgtcccccacctcccgcctctacgcctgcctctcctgcgccaccgtattctgcccctcccacgctgccacgcacgcctccgcctccacgaggcctagccaccagatcgccgtcgacgtcgaccgcgctgagctcttctgcgccgcctacgaggaccaggtctacgatcctgacttcgaccatgccgtcttcctcgcccagtcctcctcacttctcccctccacctccaccgcctccacctccctgaccctccgcaagcgccggcgcgtcgattactgtgcgtggttgcggacctcgagcatcgcggacgcggaatggggagaggactggacgacagctgttgagggcgtggcaggtttctcggcgtggtggttgtag

SEQ ID NO: 14283 - DNA, 1140 bp, Zea mays
  Peptide Sequence Number=SeqID_57658
atggcgcttcctgttgacgtggtgggtctgtgccctaggcagggtgacgtgggggctcctccgaagccgaggttgagtctgtcttctgttgccgaggccgagtccgagccatggggtcgggcgaggcggaggtcgttcggccgaggccagggtggagtccgagccctggggttgggcgaggcggagtttcgtcgtcttccgggtcttagcccgagtccgagccctggggtcgggcggagcggagttcgccgtcttccgggtcttagcccgagtccgagccctagggtcgggcgaggcggaggtcgttcggccgaggccagggcggagtccgagccctggggtcgggcgaggcggagtttcgtcgtcttccggccccgagtccgagcccttggggtcgggcgggagcggagttcgcccgtctttccgggtctagccccgagtccgagccctggggtcggggcgaggcggagttcgtcgtctttccgggtcttagcccgagtccgagccctgggggtcgggcgggagcggagtttcgccgtcttcccgggtattagcccgaagtccgagccctggggtcgggcggagcggaagttcgccgtcttccgggtcttagcccgagtccgagccctggggtcgggcggagcggagttcgccgtggcgcctttggcaaggcctgactgtctgtcagactcactctgtcgagtggcaccgcagtcggagtggcgcaggcggcgctgtccttctgtcagactgctttatgctgatgggggttaccagctgagaattaggcgtcttgaggcccccgagcctctgcacagggcgagaggacgatcagggacagactcgactttttacatacgcccctacgtcgcctttccgcaaggaggaggggggagtgcgccatattaccctcgatgggcaccgaacatggtgtctccggtgagctgcaagcgggtaatccgagtggacgtccgtgccccgttcgttgggggtcggctaggggcccagaggcacgcccaaaagtacctgcgggtgatttgccggacccggtcccctggcgacggggtccgagggctcgatgcctccctccgatgggattccgttacaagatcgttcccgctggtctcggaaatgtcctag

SEQ ID NO: 14284 - DNA, 267 bp, Zea mays
  Peptide Sequence Number=SeqID_57659
atggtgtggactgtgaaggtcggggccgatgtacatagagatgccagggaaggtgtcctggagtttgagagagctttcagggagaggttctctgcttacacattagctgctaagaggcatattgactccactaccatcttcgacgtccaagctaatttatatgatatgaggcctaggagttgccacttcgcttatgcttgcttcaactcttctcaggggctcacatggatcatcctcgagcgcaagcaaactttgagatcgcgctga

SEQ ID NO: 14285 - DNA, 615 bp, Zea mays
  Peptide Sequence Number=SeqID_57660
atggctgcggcgcatgctatcaggttactacttgtgacttgccaagtgctgtgtgtgttgtctgtgctgctgtacgaacacaatacgaagatcaagtgcaccggcaacaaagcctgctccgggtggccggtgactgtcactatcaccgactcctgccccggtggggtctgcctcgcccaggcggcgcactttgacatgagcggcacggccttcggcgccatggccaaccgcggcatggccgaccgcctccgcgccgccggaaccctcaagatccaatacaagagggtgccgtgcaactacaatggcatgggaatcgccttcaaggtggaccggggctcaaacccgttctacctcgccgtgctcatccagtaccagaacggcgacggggacctcgccgcggtgcacatcatgcagcagggccagggcggcgcgtggacgccgatgcagcactcgtggggcgccatgtggcgcgccaacaccggcaagccgctgcgcgccccgttctcggcccgactcgtctcgggctccggcaaggtgctcgtcgtcgggaacgcgatccccgccggttggcgcgcgggtatgacgtactggtccaagctgaactacgccacctaa

SEQ ID NO: 14286 - DNA, 789 bp, Zea mays
  Peptide Sequence Number=SeqID_57661
atggcttgcaagcctcagctcctgttcttcaccgcgatcgcggctctagcctcgatcatccatccttgtgcatccgtcgagtttcaccgcaagctatccagctggtccgacggcggcgcaacgtggtacggcgccgccactggggctggaagtgatggtggcgcatgcgggtaccgaggtgccgtcgaccaggcgccgttctcgtccatgatcgccgcggggagcccttccatctacaactccggcaagggctgcggctcttgcttccaggttaagtgcaccggtaacgatgcgtgctccggcgaccccgtgaccgtcgtcatcactgacgaatgccctggcggtgcgtgcctcagcgagccgtcccacttcgacatgagcgggacggcattcggcgccatggcgaagcccggccaggccgacaagctgcgcggcgccggcgtcctccaaatccagtacacccgcgtgcagtgcaactggcctggcgtgcagctaaccttcgtggtcgacgccggctccaacccggagtacttcgccgtgctcgttaagtacgtgaacggcgacggcgacctctccgccgtcgacctcatgcagaccggggctggggcatcgtgggcgtccatgcagccctcgtggggcgccgtctggaagttcagcgccgggtcgccattgctggcgcccttgtccatccgcctgacgtccagctccggcaagcagctcgtcgccagcaatgtcattcccgcggggtggacgcccggcgccacctaccagtcttctgtcaactactaa

SEQ ID NO: 14287 - DNA, 768 bp, Zea mays
  Peptide Sequence Number=SeqID_57662
atggcgcttcctgttgacgtggcgggcctgtgccctaggtcgggcgacgtggaggctcctccgaagcctgggtcgaatctgtcttccatggccgaggccgagcccgagctcctgggtcgggcgaggcggaggttgttcggcagaggccagagcagagtccgagccctggggtcgggcgaagcggagttcgttgtcttccgggggctgagcccgagtccgagccctgggtcgggcggagcggagttcgccgtcttccggggccttagcctgagtccgagccctgggtcgggcggagcggagttcgccgtcttccggggccttagcccgtgtccgagccttgggtcgggcggagcggagttcgccgtcttccagggccttagcccgagtccgagccctgggtcgggcggagcggagttcgccgtcttccggggccttagcctgagtccgagccctgggtcgggcggagtggagttcgccgtcttccggggctttagcccgagtccgagccctgggtcgggcggagcggagttcgccgtcttccggggccttagcccgagtccgagccctgggtcgggcggagcggagttcgccgtcttccggggctttagcccgagtccgagccctgggtcgggcggagcggagtttcctatggcgcctttggcaaggcctgactgcctgtcagtctcactctgtcaagtggcactgcagtcggagtggcgcaggcggcgctgtccttctgtcagaccggtcagtggagcggcgaagtga

SEQ ID NO: 14288 - DNA, 804 bp, Zea mays
  Peptide Sequence Number=SeqID_57663
atggcgtcgaacaacctcctcgtcgacttgaagcgctgcttctcggcgccgtcgctccgttcctacctcgccgagttcatctccaccttcctcttcgtgttcaccgccgtcggctcagccatctccgcccggatgctggcgacgccggacgttaccagcagcgcctggcccctggtggccaccgccgtcgcgcaggcgttcgggctcttcgccgcggtgctcatcgccgccgacgtctccggcggccacgtcaaccctgccgtcacgttcgcgtacgccatcggcggccgcatcggcgtcccgagagccatcttctactgggcgtcgcaactgctcggcgccaccttcgcatgcctctccctcaacctcttatccgccggcgaggcatgtgcatgtcttcgtaaccgctctcgcttcctacctgcaaactacactgtcgtttctcacactgacccatcgatgaacggcgtgctcacgttcctgctggtgtacacggtgcacgtggtcggggagcgcgagcctcgctcgcgcggcggcgacggcaagcgggagttcgcggccacggcgctgggcgcgctggctgttgggctcacgcagggcgcgttcgtgcttgccgcgggcgcgctgacgggcgcgtccatgaacccggcacgctcgttcgggccggccgtcgtcagcggccacttcaagaaccaggccgtgtactgggccggcccgatggtcggcgcggccgtcgccgcgctggtgtaccagatcatggcgtgcccgagcgtgacagggaacgtggaggcggtggtcgtttga

SEQ ID NO: 14289 - DNA, 1551 bp, Zea mays
  Peptide Sequence Number=SeqID_57664
atggcgggttggtgcgaggaggcggtggcgttgctgcagcgccccgcggcggcggagatggccgtcgacgtgctgctctgcgcggtgccgatctgggccgctgtcatgatcggcctcgtcgtcggctggtcctggcgcccgcgctggacggggctgctcttcctcggcctccgcacccgcctccgcatcatctggctgccgcccggcctcggggcccggcggctctggttcgcctgcactgcgctctccgcctgctccgtcgcgcccaggctcctctcctccgcattccgccgctgcagaggtaagcaacaggacaaggcctcccctgaggatactgctgctgtggctcgggacggcggaggttgcgccgatggcaggacaaattttgagggtgaacatgatactgtcactgagaaggacctagaacttctccttcaacttttagataataaggaaagcggggatacagcttggcagaatttgatggagcgtacaacctccaacatgacctacaaggcctggcggcgtgagcctgaggagggacctataatgtactgcagccgcactatttttgaggatgctacacctgaactggttagagatttcttctgggatggtgattttcgtctaaagtgggatcccatgcttgcatactccaaatctttggatgagttccctcagaatggagcaacaattgtccactggataaaaaagttcccattcttttgcagtgaccgtgaatacatctttggaggacgcatatgggaatctgggaagacttactattgtgttacaaagagtcacgccttcatcttcctcgccgcactagggcagatgcctcgcaggagctactcacctgcaccagagctgcctgggaaaaggccgcgcgtcgtggccgctgccggggcagggacacggacccgggccttgcccatgccggggtgggggcaccggcaagtggttgatttcgtggactttccgaactccatagcagatgaaagcagggagaaggctactgtgaaatttggactgggtgttccatatccatcattgcccaagaaagaaaaaccaaggcgtgtggagttgtacttctcaagttggcgtattagagctgttcaatcgcctaaacatgtgggtcagcaatctgcgtgcgaagtaactttggttcactatgaggacatgggcataccaaaagatgtagccagggttgctgttcgccacggcatgtggggtgctgtgaagaaacttcagtctgggttcagagcgtaccagcaaatgagagacacagaaaataccctgtcacacagcgccattatggctcgaatgaccaccagggtatccatcacggcttcgaatggtggcttagaccatgacctctccatcgccgataaaatcagtggcgagaatgacagctcccatgcagttcagcatggttttgactggaagtgggtggtttttggtggtgcggtggctgcggtttgtgtgctcaacaccggactggtaggcaaggtcctgttgcttggagcagcgagacggcaggcaaagaagtga

SEQ ID NO: 14290 - DNA, 2570 bp, Zea mays
  Peptide Sequence Number=SeqID_57665
atgacgttcgggacccacctgacggagactccacatgtcatccgcgtctccctatggcccgagtcccattcgggcgtcccgcgggtcccgcctcgggctggattgaactcatcaatgacacccctccatcagcagcatcatcagccgccgccgccgccgccgcgcttccactttgtcttgagccctgccctcaacgacgactcgcgggccggcagcacagcacgtatagctatggaaggaaacggtggcgcgggcggcggtagcggaagcgcggcaccgccctgggatctcgccatgcactgggcacccgccgtagtgtcgtcctacccgccgcagcccttggagctgcagcagcaggagcttacctgcctcaagctggggaagcggcccgcctgctgctgggcaggggcgccgggcaaccaagcggcgcaggtccacggcaatggcggcgctggtggcgcagctgctgagggtaagaggaaggacaaggcgcctgccgcggcggccgtgacgaggtgccaggtggaggggtgccacctgtcgctggcggacgccaaggagtaccaccggcggcacaaggtgtgcgaggcgcactccaaggcgccccgggtcgtcgtcctcggcgccgagcagcgcttctgccagcagtgcagccggttccacgcgatctcggagttcgacgacgcgaagcggagctgccgacggcgtctggccgggcacaacgagcggcggcggaagagcaacgccagcgaggccatggcaagaggcgtcgcgcacccacacggagtgacggctttcggccacggcggcttcctgccctcgcgcggcctcgtccccgcagggtcgtccccggcggcggctggtgctctctctcttctgtcatcggccagaggcagcgtggcgggcgccagcgggccctggctggtcacggcggcgcgggaggacatcccggcgcgctccagcgcggcgctcgacgaccttatcgccgagaaccgcgccgccgcgctcctcgcgcggcagtacttcgtctccgaccgctcgccggcgcccagacgggatttcgtcgcctcttcgacggcgggttgctccctccagcagcagcagcacccgcccgaccacgaccacacagccggctggcacccgcacccccacccctacagtggcggtggcggtggcagctgtggtggtcggtaccagtaccaccacgtggcgccgccgagcgcgtggcacgcgacgacgctggaccttatgcagccgacagcaagcaccaccgccgctcccgccaccgccggcgcagcgttgtggccagcagtgccggagagggcgggcgcgaggtcgtctcgctctcgcagcgagaccaaggatggcgacgcgtcgggatgtagcggcttggacgcgtgggcgcccactggtggagctcgtgtgctgacacaggaggttgctcaggagcactttgccgctctcgtggacgtcgatcccaagccacttctagaaccgccttgcaaactcacagcgaaagagggcgagaccacacctccacagacagaggccgagcatgccagccggacgaggacgagccttcgtgtcgtcgagcagggcccggcggcccgtagcttaaggagtggcatggacaaactctgcaggagccttggcggcaagacgctgtctgcggcgcgagggagcaccaggacgctgacggcgcggcaggagcagcgtcagaggctgaggctgaagcgtcaagcaaagcagcaacagagacagcgcagcgggggcagcaagcgatggggagcgcggtggctaggggagcggatgcagcagggcgcgcggcgcagggtggcactggccataggcgagaagcgcgaaggaggccgagatgaccagcagagcagacgggcccgctccgaggcgcggcagcacaatccggcacggcggcagcggaagcacaggggacagaggcaaagcggggggcggcagcttttgcgagggaagcgccaccccactgggattggaacggggttgacggagcggcggggggcaggagagcgggcggtggaagggggtctgtacgcgagggatcggcatcttgcaggaggaccggattgcctgtggccggaggcgccacaggcacagcaccgcatggggtcgctcgcggcaatcacgcacgaagtgatcagacttcagaggcaaggcaacggaagccagccgaaggcgagcccaacttcggcagtttccagggaactggaggagggagcggttttgaaggcgaggtcgtggcctcagcagccgaaggcacagtccgatgtccccatccagcacgtctggttggagagcagtaatagcgtcttcttcaacccccggcagccgaattgcagcagcagcccgcatggcggacggcaaacaggggtgaggcgtcaacgagaggacccagccagcctaagcggcccaacccaactcatctcgaggcgccggaagctgctccacgccagcaccagcctcggtgcagcgccggtttttgaaaagctgtgcaccagcgagactgttctgaagctgtcatcgcccgacggcacctg

SEQ ID NO: 14291 - DNA, 111 bp, Zea mays
  Peptide Sequence Number=SeqID_57666
atggcagtaaatcccgctcaccgtggccccagggtgctactcctcgtggcgctccttgtggcgctggtcgtctccgggcactgccctggctcacttaaggattggagctga

SEQ ID NO: 14292 - DNA, 132 bp, Zea mays
  Peptide Sequence Number=SeqID_57667
atggccgcaccggcctatgcgctgtcgtggaggttgaaggggacgggccgaccctggcatggtcgggccagggcgggggcgaccgggcatgggctcgcccactgcagcgccggcggctgcttaggactttaa

SEQ ID NO: 14293 - DNA, 804 bp, Zea mays
  Peptide Sequence Number=SeqID_57668
atgacttctcacggatcctcggacgaagggaatgcacagtcccacactgacgggcttgcacgagagggttttccccgtatcctgtgggaggtacttcagggagctggttacacgacgtctccccagtacgcggtgcagctgtttgagaagcaccaagtgccccactgtagggtaaggatgaccctggagccacatcccctacagccaggctggcgttcgctggactctgagtcttttggataccgggctgaggacactatggaggcaattgctcttcatggactgaccaccttctgcggattccaccccttggagctgtccactcaccccattgggttgttccccgcagagaaggaggacgacccaatgtggaaggatcaagtggagcatgccaaggatatctgggctatctacccagaggcgatgtcccatctgatggcattgttggaggcgaccaacatcaccatggataacggagaggaacttgtggttgacttgtccactgagatggtggaaaaggacttacaagtggagcaactgtcaaatgagatccaagagcttgaggagttagtgggaactagggagaacaccatcgaggttctcgaggatcagttgatcaacacccagcatcagcttgcagaggctaaccagcacttggatatgcaccaccaggagatccaagacatggaggctaacgaggatgtagacatcgagggaggagaggagcctgcctccagtttggacactgctggctcagggagaccaccttcccccgagtcgagtgttgcctcgtttgctcactag

SEQ ID NO: 14294 - DNA, 1086 bp, Zea mays
  Peptide Sequence Number=SeqID_57669
atggggagcgcccgcgttgctttcgtcttgtcgtcgttggaggaacgtaacttcgcggaagttggcagcctggctgcatccccttgccgatggtcacccaagacggcgaccaccagtttggtagtggggagaagcaagccgggttgcggcctctgccccgccctcagcttcaaggatgttcatcatcctggctggggcggaggccaggctgagccggagctctacctcccgtacgggttcgtgggccaccttctccctcagcactcaggggagagggcgctcaccggcctagcggaaggggcggacttcgacaacgcggggccgagcggccgcaagcgtcgtcagctcccgcgtgcccggttcgctggctcagctggctctggcgcagcttccggtgccaccttccgccgctgggtggagtgcggctatctgcccgtcgtatgggcggctgtcgcgtcgcgcgcaccgggggaccgcccaagacgccgcgcgctgctagggcggcgttcgtgttcttgggctgtcctgcctttgctccggtatgacgcccctgcgcggaggtcggtgctcgcccgtccgggaggacccgagtggggatctaccggtgggcagatggccgtcgtcgtcggtgctgaggtggtggcggctgaagatgtcctcgtcgccgacgagatcgccgccaccatccgcgctccgggcctccggctctttggctttgatagcttgtcctcgcccctcgagtggggacgtgggcgagggccttatcgcagcagcgtctgccctgaggtcatcgctgctattgtttggctgcccggagcggaggtcgttgtcgctgctaccggagtgggcggcggcgagccacctggggttttgtcgtcccgcaggccctccaatgtggggggttgttcgtacctgcgggggtggaaccggagttccgtttgtaatggcaccttgagtgccggtgtctgttcattgcggctgtcggggcctgaacatctaggtattttgggtgtaataccatgtttttcctcatttcgagcactaggactcacctgtcggctagctggaccacttaaccaagtgtga

SEQ ID NO: 14295 - DNA, 1314 bp, Zea mays
  Peptide Sequence Number=SeqID_57670
atgaccgcgtcaaaaaaggtgcgccacgtcgttcgatttcgtatccttttcctcttcctctttctctctcttgctacaaggaccgggaaaggggatactccgaaagggatccttctccgcgaaggaagcgggccccgagccttcctactgatcagaggttcgaaggctggcccctcggaagggttcgacagccgcctcagagcactcgggctccgcgcccactactggtcagaggctggcccctcggaagggttcgacagccgcctcaggccacctggctccccgcccactactgatcaggggttcgtaggctggcccccgaagggttcgacagctgcctcagaacacgcagagcgagagatgactctgggtacgtccgatacatggccgaggctcgggctacgctcccgaggtaccctaggacatttccgagaccagcaggagcgattctgtaacggaatcccatcagagggaggcatcgagctctcggaccttatcaaacgggaccgagtccggcaaatcacctgcaggtacttttggagcgcgcctctgggccactatccgacccttatcgaacggggcacgggcgtccactcggatcacccgttagcaactcactggagacacaatgttcggcgccctccaagggaaacatggcgcttcccccctcctccttgtggaaaggcgacgcaggggcgtatgaaaaaagtcgagtcagtccttgaccgtcctctcgctctgtgcggaggctcaggggctgctctcgcaaacccggctccggccaaaccgttgacagtgtcaacataccagcccgacaactcggaacctgactatgcacccgggctacggccagtcaaggctccgtccactcaagggacacgatctcgcctcgcccgagcccagcctcgggcaaaggaagccgacccaggaggattcacgtctcgcccgaggagccgaagtgaccgcagtcacttcgccgctccactgaccgacctgacaggaaaacagcgccgcctgtgctgctccgactgctgtgccacccgtcaggggctcggactcaacctcgacctcggacgacggactccacctcgcctgaccccagggctcggactcaacctcgacctcggacgacggattctgcctcgcccgaccccagggctcggactcaacctcgacctcggacgacggactccgcctcgcccgaccccagggctcggactcaacctcgacctcggaggatcctccgcctcgcccgacctcgggctcggatcgaccacgtcacagaggggccatcattaccctatccctagctag

SEQ ID NO: 14296 - DNA, 348 bp, Zea mays
  Peptide Sequence Number=SeqID_57671
atgtggaggtttcgtaatgtcgtgggccgctggcggtgcggcaccgtcgaggtggcggcagtggatgactctgggggcggccgcgcctgctcctggtggctggttggctctggagtgatggttgcgcgactaggggcaatggcgcgagctatcggaggtggcgacggtgagggattgacgtggaggcggtgcacggatccagtggcgacgacgacgatgcaccaggctggcaacggcgagggccaaaggtggcggccgtgcccaacggcggcgaggtcccaggacgacggtgaggacccaccctggtggctagaggcagcgacgacgtttttctgtggaggcggctag

SEQ ID NO: 14297 - DNA, 462 bp, Zea mays
  Peptide Sequence Number=SeqID_57672
atggcatctgtgtgtggagcgctgcgcaagtcaacgtcccaggcgtcgaaagtgagcgtgggtggatgtggtgtggagggttgggtagaacctgcacctcttgatggtgctggtaagcatggttgggtggatgctggatttgctcgttgtggtatggttgttggtgatgtcttcgccgtgaaacaagcaatagaatctccacggctgctgtgcccgtccacgacctcttcctcttgcgttgttgccacacccttgggggtattcctggcgatgggtaggctctccagctgggtgctaattggctatattgtgcacctgctgatgatcgcgattgtcccggccggagtctggctgcgccagcctggtccaggttctgctggactacggagggtccttgggcttcctcttagattcaaccttgcgttgatggagctccttagacctagcatacttctcaaatag

SEQ ID NO: 14298 - DNA, 312 bp, Zea mays
  Peptide Sequence Number=SeqID_57673
atggggttattatgcctaggcctcggcgaccggagctggggatctgcaacggccgagccgagatcatggggagatgtcacacccgggtttcgggggcacgaagacccgggcacgaacataatcaccagacacgagccttattacacctatccaggtggggcccatctctatgggccgaatcacacatgggctcccctggtggtgagggagtgggagccttcgtctgcgcaaggcgaggcgaaatcatcgagcgaagggtggcgtgttcacattcgccccaacatttgccctccgagggaccagttcgactaa

SEQ ID NO: 14299 - DNA, 1494 bp, Zea mays
  Peptide Sequence Number=SeqID_57674
atggcacgggcgagcgtgaagcctgccgccccctgcgccagcatgcctccgcctggcgcgcccagcgccagcatgctgctgcctgccgcgcccacacatgagcgaaggcctccctcgccatcgcgcgctgctgaggcggcggtgggtggcaccgaagtctccatggatatttccgtggatgactaccttgtgggcggggtcgcaatgttcgacgcccacacagggcggggtcctgctggtggcggatggcccggcgaccgtggcgaaggggtcttcgcaggacccatggtccaggcgcctgccttcgccgagcacattgcgtcgggggcgtttgcctcggagttttctgccgaaaggcggcgactcgaggggaggattgagcgcctcggaacgcagcatacagaggttgtgcgagataagtcgacagtggaaaacaagagccacaatctgttggaaaagctgttagcggcggaggctgagaaagaggacctcggtcatcggcttgcggcaaaaaaggaagacacggaaaaagcccgcggagaggcccaggctactcgtgccgaggccagccttgccctcaagcgcgccaccgacgtggagtcggggcagaggagtctgcgtggctatgtggacaaagcggaggcctccacctgcactgggtcgactgagcacacgcgttgctcgtggacgcgtaccgaggagctagagttgctcctgtccatcgtgatgggtctcatgtcctttgcctcgctcattacctgtgagggggccgcgaatgctttgtcccatgagggatgcaggcatttcgaggtcgaagacgaggtgttaaagcggtccgctggggcgctttatgacaggatgtggggccctcacggccgcgatactgtccgggagaggtccgaccgggcgctggagcagatgatgaacgatgaagaagtcgacaacttcggtggactggaaagctcggtgatccaagcagaagatgcgaggacgggggttgaagagcaaccggcgccacaagctggccctgttggagaccctacagcagtagctgcaccggctagcgaagaccctctagcggcagttgcgccggctggcgaagaccctgcagcatcggctgctctttcgcaggttccgacgtccaggcctgcgcaagcaacccctactgatgatattaattttgtggcggctgtgaatgcagtgcctgttagtcgaaatttgtctggttctgaaatggagtcttggtcatcaaacatgggtgagtttgggagcccattttcgtggactgaggagtcttcggatgaggatttagattattttactgcgttggatgtggctgcggcggagtccttgccgcagcctgaggtgtgcgaagtgtctgctcccccggctggggcgatgaacaaagagcgctgccgacgaaaggtggtgtcgaagcacaatgttggcgagatgtcgcgaagtgggaggcatcgacggatggggatggagtaa

SEQ ID NO: 14300 - DNA, 330 bp, Zea mays
  Peptide Sequence Number=SeqID_57675
atggagcccccgacactcgaagatggagagatggcggagcccctaaaggctggagatgggaccccattaagtcagggcaaaggggaagctatccatcgggcatgccttattgaggctagtgaagtgtcggtgttcaccggcggcgagagcttcgctccaggaagttgcatcatgtttggctctctcgacttcctcgccaccagcgaaccctgccttgtccactacgacaacatccaaggcgtacaaggttgccatcatcagcaccagctaagctccaccctcgacacctaccaggatggcccaattgactgcttaactgtagaagtctga

SEQ ID NO: 14301 - DNA, 603 bp, Zea mays
  Peptide Sequence Number=SeqID_57676
atgacccttgaagcctcatccccctgcagccagggatgggcgctccttggactccgagtcttttcgggtaccggggcagaagacacgatcgaggcaatcgctttgcatggattgactaccttctgcgggattccatcccttggagctggctacccaccccattggcttgttcccccgctgagaagggaggacgacccaatgtggaaggatcgggtggagcatgccaaggatatctgggccatctacctaggtcagactgcgcacttgacagtacgagaggagctcgtggttgacttgtctcaagaaatggtggagaaggacttgcaggtggagcagttatccactgacattcaggagttggaggagctggtgggcaccagggagaacaccatcgaggttttggaggaccagctccttaacactcagcagcagcttgctgaggctaacgagcacctggacatgcatcaccaggagatccaggaccaagaggccaacgaggacgtcgatattgagggaggagatgagcctgcctccagtgtggacactgctggctcgggaagaccaccttcccccgagtcgagtgttgcttcgttcgctcactag

SEQ ID NO: 14302 - DNA, 300 bp, Zea mays
  Peptide Sequence Number=SeqID_57677
atgcccgacccctcaccggagcaacctcatcgccggaaaatgagaagggcactagaaaataatgaacagtggatgcaaatatttttcctagcccacttaagtaataaagagcctagaaaaaataaaaggaaccctagtccagaacaaattcaagattgcaatctcgagaacggagagtacgtgctcatccctgagcaaggagttgtccacgaggaagaccaggagcaagctcccgagactgccatcgaggatctccccacagccccaacaattgaaggcaacccccggttatatgcataa

SEQ ID NO: 14303 - DNA, 153 bp, Zea mays
  Peptide Sequence Number=SeqID_57678
atggcgggcggaggagagctcgccggagctaagggaggggtgtttggccagcgagggaaaatagaaataatattaaattacaagggtacattcggcttgaaagaaggtaaaagtacaagcgtgacgcaaaagcagaatgacaagtcagcgtga

SEQ ID NO: 14304 - DNA, 102 bp, Zea mays
  Peptide Sequence Number=SeqID_57679
atggtggccgaggctcgggcagtgatggcaggtggaggagagctcgccggagctaagggaggggtgtttggccagcgagggcttatgggtttcgctgactag

SEQ ID NO: 14305 - DNA, 1086 bp, Zea mays
  Peptide Sequence Number=SeqID_57680
atgaaggacatattattcgccaatgcccccaagaagcatctagaccaactagagaagaagaccatgaagcaagacccaagcaataatctagaagaccaaacagtttataagtacgatgatgaaggttgcctggcccccaacaccattctagctgttggagaatctgctgctctccgcggcacaccggacagtccggtggggtttggcgctgagagtccgggtgtaaaagctctccgcggcacaccgcgcctagccattggatctgacaccacaggggaccagctccacaacttccatcgaagtcttcccggacttcggtgtgaaagtgcactatccgaattgcgcaatcttatgtccaatttttctcttctgccagtgcagacaatattgcttggcgaagacctccaccgaaggctgaccgccatacgacgtcgttgcccaggcatacttcgccaacgccaccacggcgttcggtgtcagctaatgaaccaggacttcgaacttctgcagaacctccgacacaaaacgatgcgcgggcagacgaaggtcggcgatgaaaaatgcctcaaaaacaaccaattcgccctcgggctcgggaacctcctctgcccccgggacgcgcccaaccccgccgccaaaataccccaaccgttgcatatcttgcacgcggaccaacgacatccgcgaaacaccgaattccaccacgaggaggaagacggcatggctacgtaccgtcggcggcggcgcgcggtctgcttcacgcgggccagttctcaggcgaacaggagcaaggagggcagacgagcaagcgagtcacgacgcttcgggaagcccgcaatccaacagtgcggcgtcaatcaacggtcatgtcaaaaacccccgcggaaccacttcgagcgagggcagcgtctccaccatctagcgacgccttcggcaccagatgacttagtcgaactggtccctcggagggcaaatgttggggcgaaggcgaagacgccacccttcgctcgatgccttcgccagactcgctacaccaacgaagataagatgattgacagactctacccttcatctcacgcgtcgtag

SEQ ID NO: 14306 - DNA, 507 bp, Zea mays
  Peptide Sequence Number=SeqID_57681
atgacgaatgggcaggtggagcgtgccaacgaacgactttcgtgccgtttcgactgcttcgatagcagaaccctaaaaacgacgagagtgcacgttcagacatcggcagggggaggagcagcgccctcggcgtcatttccaccctcggcagaacctggcccagcctcagacggcgacacgggcggaaggatctccacctcgaaggaggacgccgacaccgtgcttgggccctcacggccaggttctccgcaagggtctggcccaagcggacgcctcggctggccgctccgtagcctcagccagctgtcccccgaggacctcagcccggctcatggcctcgacagcatgactccggggttggtcccgctcacggatgacctggccaagctccagccgtcgctactgcacctcctcggcctgggaagccacatgctcccgagccgacgaagcctcttttcgagccgactccgcctctatccacaccgacaccgctgcctccgactttag

SEQ ID NO: 14307 - DNA, 366 bp, Zea mays
  Peptide Sequence Number=SeqID_57682
atgaccgacctgacagaaaaacagcgtcgctcgccccgctccgactgctgtgccaacaacccgagcaaggctgacaacagccaagttcagcctcgggcgcaacaagaagctccgcctcgcccgaccttaggccttagcctcgggggaaggtctccgcctcgcccgaccctaggactcggcctcaacctcggcctcgggaggaatcgcgtcctcgtccgtccccaagactcggcctcagccccggcctcgggaggaatcgcgtcctcacccgaccccggcctcggcctcaggagaagtctccgcctcgcccaaccttgggctcggaccgaccgcgccacaggggatacatcattaccctacccctag

SEQ ID NO: 14308 - DNA, 336 bp, Zea mays
  Peptide Sequence Number=SeqID_57683
atgcaggcggcatgcaaccgcaccaagggggcgcaccctttcgacttcgacgcatccagcatggaggcccaggcccacacgtcatgtaaccggcgcgtcggttactacggaccgggaaagggggatactccgaaaggaatccttctccgcgaaggaagcgggccccgagcccccctactgatcagaggttcgaaggctggcccctcagaagggttcagcagccgcctcagagcactcgggctccacgcccactactggtcagaggtttcgaaggctggcccctcgaaagggttcaacggccgcctcaggccactcgggctccgcgcccacaactga

SEQ ID NO: 14309 - DNA, 312 bp, Zea mays
  Peptide Sequence Number=SeqID_57684
atggtgatgacgacgaggggatggatgtctggctgggcttggccaggctctgatctgagccatcctcggttggctgttggtttggatgtgctggtgctcgagcttgaggcatctatgcctccgctcgattcgcgggcgtctgccgagctggggcctatcctcatagccgaggaggaggaggtggcggtggacaaagggcccgaggagccaggggctgagaaggctaggcatgccttggtctgggagcttatggcgaagtctgtggccaagtccatttcctccaccgcgagcgcggcgtctgggatgagatga

SEQ ID NO: 14310 - DNA, 273 bp, Zea mays
  Peptide Sequence Number=SeqID_57685
atggcggcctacgccatccgagaactctccatggaggcctcgagcgtgatcttgtctaggcataggcaccgctccactagcggcaacaccctcctaaagtggaaggcgatgacaaccctgaccgtggtaagggtggaagggatgtaccgttgcgcgcgatccgagcgtagctggagcgtgcagccactggccctcactacatggcagaccttcttcatgtccgaagggagggagaacggttccacgcggaagaggtggagccataggtcctag

SEQ ID NO: 14311 - DNA, 546 bp, Zea mays
  Peptide Sequence Number=SeqID_57686
atgtcccagcgactgagggaagcgtcgcagcagctgtcacagcagctgaagcaagcggccgacttcgctgaccacgtcgcgtcgggtgccttgactgtggacgtggcttccgaggtcaagagtcttcgggcgcagcatgcggatgctgtccgggagaagtcggctgcggaaagcaaaaaccgcaggctggcagagaaagtggctgccatggaggccaagaagacggacctccggcgcaagctggcagaggagaggagggaggaggagctgctggtgctctcgaccattgtgacgggtttcatgtccttcgcctccctcgtcacctgcgagggggctgtgaatactttgtcccgcgaggggtacaggcattacgaggacttcgaccaagcagacgaaaactttgaacgtgaaatcttcaaggtcgaagaccctgtggtgaagcagtcgacgggggcactcttcgataggatgtggggtccgcacggccgagaggcggtcagggagcgatggcacatgtcgaagacgtctaggaccttggtggtctag

SEQ ID NO: 14312 - DNA, 1086 bp, Zea mays
  Peptide Sequence Number=SeqID_57687
atggctacttcgcgcaacggtcgactgcaaaagctgatgaacaatgctacaatgaagaatagtgcgcggcagagtcagagcgcagagtcagtggcgcaccagacaatgaataggagctgtctggtgtggcaccggactgtccggtgccacaagaagacaacggcgctgtcggtgttccgagaccggggggtccctgagccgacgagtgaatgtcgccgcgtgccccagcccaaatgggtcgagcgcgagggcgagcgcgaaggggggagagcgaggcggccggagaccggcgtgagagaggtgggaatcccgcggccttcgtgttcgtcccgcgcccaggtcgggttgggcgatgtggaagctccttcgaagccgaggtcgagtctatcttccgtggccgaggtcgggtccgagccccaggttcgggcgaggcggagattgccggctggtgccggggcggagtccgagccctggggtcgggcgaagcggagttcgtcgtcttctggggccgagcccaagtccgagccctgggtcgggcgaggcggagatcgtcgtctgaggccagggcgtagtccgagccctggggtcgggcgaagcggggttcgccgtcttccgggtcttagcccgtgtccgagccctgggtcgggcggagcggagttcgccgtcttccgggacttagcccgtgtccgagccctgggtcgggcggagcggagtttcctatggagccttcggccgggcctgactgcctgtcagtctcactctgtcaagtggcaccgcagtcggagtggcgcaggcggcgctgtccttctgtcaggccggtcagtggagcggcgaagtgacggcggtcacttcggctctgccggctggggggcgcgcgtcaggataaaggtgtcaggccacctttgcattaaatgctcctgcggtttagtcggtcggtgcggcgatttggtcagggttgcttcttggcgaagacagggcctcgggcaagccggaaatatgttcgccgctggaggggggcctcgggcgagacggaaatcctccggggtcggctgcccttgtctgaggctaggctcgggcgaggcgtga

SEQ ID NO: 14313 - DNA, 213 bp, Zea mays
  Peptide Sequence Number=SeqID_57688
atgtaccactgcatgcggcaggaaaaaacaaccaagggagaggaggaggccatgcgcctctgtagaaagcaagacaagaacaaccaagggagaggaggaggtagcggggcaagaacacccgagggagaggaggaggcaccaccgccaccgatgcaagtggttgaacagtcgactctccgatgccatgcacctctacaagtatcggggcaataa

SEQ ID NO: 14314 - DNA, 1107 bp, Zea mays
  Peptide Sequence Number=SeqID_57689
atggctgaaaggtaccaactcccgcagagttgtgttcctccaacgacgaggcagaaagacgacagatatcccccatccgggggcttggaagccgtcacgggctgggtcttctccaacacactccaaggtcctcccctacggcgcgggggctgggtcccacgcgtcatgcaagccgactcagagcagaagaagccaaaccgccgcgcgcggagaagcgagcgacgcttcgccttctccataatgaccgcgtcaaaagaggctgaccccccggaagggttcgacagccgcctcagatcgcgtgggccctacacccactactggtcagaggttcgaaggtcggcctctcgaaagggttccacggccgcctcaggctactcgggctctgcgcccattactgatcagggctcaccggagacaccatgttcggcgcccatcgagggcaacatggcgcttccccccccctcctccttgcggcaaggcgacgctggggcggctcggacacgggctaagtcccggaagacggcgaactccgctccgcccgacccagggctcggacacgggctaagacccggaagacggcgaaccccgcttcgcccgaccccagggctcggactacgccctggcctcagacgacgatctccgcctcgcccgacccagggctcggacttgggctcggccccagaagacgacgaactccgcttcgcccgaccccagggctcggactccgccccggcaccagccggcaatctccgcctcgcccgaacctggggctcggacccgacctcggccacggaagatagactcgacctcggcttcgaaggagcttccacatcgcccaacctagggcacagaccagccacgggaacaagaccggcgtcccatctggctcgctccgcccagataggcaatgatggcgcccccgcatactctgtgacgacggcggctctcagcccccttacggaagcaagaggacgtcagcaaggactcaaccgctctgacagctgtcccttcgccaggctccatcgctcctccgacggccatgacatcacaccagctaggtgccaagatctctccggctgtcacaacggcatgtacttagggcgctag

SEQ ID NO: 14315 - DNA, 2052 bp, Zea mays
  Peptide Sequence Number=SeqID_57690
atgtcattcttgcggcggcgaaagccgctgccgccctctgacggtgacgagtccgaccacgacgacaacgacaaggggaagaagccgtcctcatcctccgggtcgccgtccaaggagcccacgaagcggaccaaggccaagtggtcgtgcgtggacagctgctgctggctggtcgggtgcgtgtgctccgcctggtggctgctgctctttctatacaacgcgatgccggcctcgttcccgcagtatgtcaccgaggccatcacggggccgctcccggacccgcccggggtcaagctgcagaaggaggggctgcgagttaagcaccccgtcgtcttcgtcccgggcatcgtcaccgggggcctggagttatgggaggggcaccactgcgccgaggggctcttccgcaagcggctatggggcggcacatttggtgacgtatacaagagacctctatgctgggtcgaacatatgtcattggacaatgaaactggattagacaaacctggaataagggtcaggccggtcacaggcctggttgcagcagactattttgtccctggatattttgtttgggctgtcttaattgccaatttagcacgtattggatatgaagaaaagaccatgtacatggctgcatatgattggaggttatctttccagaacactgaggtacccttcttcgacggccttatacaagtccgtgatcaaactttgagcagaataaagagcaacattgaactcatggtagcaacaaatggtggaaatagggtggtggtgatcccacactccatgggggtcctctattttttgcattttatgaaatgggtcgaagcacctcctcccatggggggtggcggtggtccagactggtgtgagaagcatattaaagctgtaatgaatattggaggacctttcttaggagttcctaaggctgttgctggccttttctcatctgaagccaaagatgttgccgttgctagagctatcgctcctgatgtcttggactctgatttccttgggcttcaaactttgcgccatttgatgcgtatgacccgaacatgggattcaacaatgtcaatgattcctaaaggtggtgatacaatttggggaaatctggattggtctccagaagatggcattgaatgtaaagctaagaagcacaaagccaatgatactggggtttctaaggatagcaatgggggaaatatcgaggttcaacctgaacctattaactatggaaggctggtatcttttggtaaagatgtagcagaagcaccttcttcagagattgagcagatagaatttcgtgtgagtattcagaggcttattaacatgtttttgcctgttccccgggatgctgttaaaggtaataatatcgcccattcaaatacgtcatgccgggagatctggacagagtatcacgaattaggatggggtggaataaaggcagtcgcagactacaaagtttacactgctagttctgttgtagaccttcttcattttgttgctccaaggatgatgcagcgtggaaatgttcacttttcatatggaattgctgataacttggatgatccaaaataccaacattacaaatattggtcaaaccccttggaaacgaagttaccgaatgctcctgacatggaaatattttccatgtacggagtaggcattcctactgaaagggcatatgtctataagttggccccacaggcagaatgttatatacctttccgaattgacacctcggctgaaggcggggaggaaaatagctgcttgaaagggggtgtttacttagccgatggtgatgaaactgttccagttcttagtgcgggctacatgtgtgcaaaaggatggcgtggcaaaactcgtttcaaccctgccggcagcaagacttacgtgagagaatacagccattcaccaccctctactctcctggaaggcaggggcacccagagcggtgcacatgttgatataatggggaactttgctctaattgaggacgtcatcagaatagctgctggggcaaccggtgaggaaattggtggcgatcag

SEQ ID NO: 14316 - DNA, 1350 bp, Zea mays
  Peptide Sequence Number=SeqID_57691
atggtctccacacttgatggctttactaggccatgcgcggggtacctcgataccactgcatttggttttaaaaattcaccttctttgtcttctgcggtggccccgaggaggcacgatactggcccccgtgttagagactgggctgttggtttcggcggaggtgaagaggcgttctaccgcagacggtggcatgctccccacgcggcgattccccttctctgcacatggaagccgacgcccgaagagtatgactcgtgggcccgagcccccgtgccagaggttggtctgctgctttcggcggaggtgaagaggcgcactaccggaggcggtggcgtgctcctcgcgcggcggttcgccttctccgcacacggaaggcaatgcccgaagagtgaagaggcgcactaccggaggcggtggcgtgctcctcgcgcggtggttcgccttctccgcacacggaagccgacgcccgaagagtatgactcgtgggcccgggcccccgtgctagaggcttggtacactgccatgccttcgctcctctcccactcgctgtgccctttcgcctccgagctctctgtgcccctttgccttcaaggtttctggatggagcgcgccggcgtttggtggaaggatccgcgtcagcgccttcccccatggagcgcgacctcgtgggggttggcgctcttccgccagtgctcagtttcaaggatgttcatcagcctcgcggtggtgggaagcgagccgggctgcagtctcccaccagcgctcggcttcaaggatgatcatcaaccttgtggtggtgggaagcgagctgggctgcagcctccccctgtcctcagcttcaaggatgttcatcagccttgcaggggtggagagcgagctgagctacggttctgccttccgcatgagctggtggcccgcctcttcctccagcattcggaggaaaggatgttcatcatccttgtgatggaggcgaacttcggctacgccgcaccggccagaccacaaatgtccgggctgagctacggctgcgcccccatctctttggctttgatggcctcggtgccgcctctaatggtgaccgtcggcctagctgctgaagacgtcgcctggggggtcgtacaagacgttgtacgctgtggaggtggcggccgcgcactcccagcgctcgatgtgtcgaggctttataccagcatacctaagaaagagttggcaatggcccccaggaggctcacggtacgggaccaggctgagcggctacacggctacggaccaccccaggagacaagtgtccattctttagagccagaccccaggttgtcggacccacagtactatagttccaaatactag

SEQ ID NO: 14317 - DNA, 990 bp, Zea mays
  Peptide Sequence Number=SeqID_57692
atgaagcagtggcgggacaatgttgaccgtctgctcagcatagcgcactccggctcaaccagacctaggcctcggtcatcccgtcgtcaacatgaggcatcggcgttagtgcgctcacccttggtgagggcagcgctgactgaggacctgtgggcggagctcaaccgccggcgcgcggtggaggacgctctaatctctctagagaggtctaatgacctgcgggcagaactcaaccgcaggcgtgcgggcgaggatgcccgcgtctctctggatagggcgcgagagcgccgacaaaacatcgagggtcgcaacctcggtcaagacttcgctgcggtagcaccgcaaaccccagtggccgcccggttccaggtgggtgtcccgttggccggcgtgggctgcgccgctctcgcggatcatctccgcgcggcgtcctggccatccaagttccgaccgcacctgctggagaaccggcgccgccaggaggccagcagccgccctacgccaaccaccgagcgcgtgctgcgcgaccctgcctacaggacgcgcccagcgcaccgcgcccaggccgccctgcacgtccgcgacaccgagcactgcgccgagcctcgggctccctgctcgcctgcacgcccgagcactgaagccccggcctccccgccaggcccccgccgagccgcatggacgccagccgccccgaccccgaccgcccgacaccgtggagcaaccgcgtgtgtgccccaactccgaagccgccgcgccgcaccaagcgctgcactcgacgcgcgccaggacccgctcgctacccggacccgaagtcaaagcgccacgaccccaatgctgcacagccgccaggaaccgaccgtgtccgacccaggcgacctcgccgtccgtgacgttcgtcttcaagaaacttcaatgcatcagtttctctccagcgtaaatggaacttcaatgctgtcgttacctccctccgttgatgaatgccattga

SEQ ID NO: 14318 - DNA, 108 bp, Zea mays
  Peptide Sequence Number=SeqID_57693
atggcaaggtcatggcgctggaaaaggagatattcagatatagtccagttgcctacacataaatactttgaacaaaccaggttgagtataatcaacacatttaattga

SEQ ID NO: 14319 - DNA, 1080 bp, Zea mays
  Peptide Sequence Number=SeqID_57694
atggcgaagaagcaccttgccgctgtcgtcctcgccatcctgctggctctcgcggctggcgccaccggcatgcgcgcgtccgagatcgacgacggcatgccgctgatccacatgctgcgcccgctgctgcattctggcggcgacctcggccggcgcggccgcgtgccgtgcgacagctggcggttcgctgtggagaccaacaccctccgcgactgggacactgtcccagcccgctgcgagaagtacgtcggcaactacatgctcggcgggcactaccgcagcgactcccgagccgtcgccaacgaggccatcgcctacgccgagggcctcaacctcaccggccaaggcaaggaggtctgggtgttcgacgtcgatgagacgacgctctccaacctcccctactatgctaagcatggcttcggggttgagccatacaactggtcgacgttcggcgcgtacgtgaaggaggcgaacgcgccggtgctgccggagacgcagcggctgtacaagaggctgcaggcgctgggcatcaagccggtgatcctgactgggcgacgcgaggacaagcgggaggccacggctaacaacctcgccgcggcgggctacaccggctacttgaagctgctgctcaagcctcagaacgtcaaggtgagttcgattgagttcaagtccggcgagcggaagaagctgcaggacgccgggtacgtcatcgtcggcaacatcggcgaccagtggactgacctcctcggcgagccggagggcggccgcacgttcaagctgcccgaccccatttgcgtcgtcatcgtagttctcgtcaccccaagcgccgacgtgcatctgcgattgagagagcttcggaacgcgtcgcctttgagatcttgcaccgggagagggcgaataaggtttttgggaagcggcttaacgcgactgcctgtgaccttctcgtcgatctcatcaatgacaccatcccttctcgttgatctcgtcaacgacatcatcctcaaccttgccgcttcgatgtcatcgatcctgctgcttcgacactatcgaccctgctgcttcgacccacgtcgtctagca

SEQ ID NO: 14320 - DNA, 441 bp, Zea mays
  Peptide Sequence Number=SeqID_57695
atgggtacgatagggacaaacatgcacacgggttccacaagcccgacggtcgatgcaagcacctctgcccctatccttggtaagctttctagaaggaggggtccaacctcaaaggtatggttgaactttgaggaggttactgcgatgcagagaggtaaggaggagtacataaatgaaagggaaataggcctaaaaaccatttccacacttgttttggtgacatctaccaccttcgtccggctacgtgccgagaaagttgacctggagactaagattgagtaccttctaaccatggatactgaggatgcatgggaaaattggaggccaagtcgaagagtcgacggcatgcatgatcgtgttgccacgctagagttggaattttcgattgcgaagacttatgacgagaagctagaagctgagatgtgggctggcgtggattag

SEQ ID NO: 14321 - DNA, 561 bp, Zea mays
  Peptide Sequence Number=SeqID_57696
atggggagtcggctcagggctgttgccatatcaaaaggtcccgaggagttgcgctcgcagatgcaaaagaaatggtctcctcacaacccagcggatgccaaagagctgtgtatgggtgttggtgggcaaaatgagccgctgggcaaaagcggctcaaaaatcatagtgggaacagtggagtgcgacatattaaatgctgcagaaagtctccaggcagagatggcgaagcaaaatggtcaggtggctgtcacaaagaattacacaaagaacggcgaagaagtggcaaccaagccaaacataggacagggacacatagctgctgctgggacaaacagattacaggagagtaggccgcaaagtggtggaggtcaagggatgagaagcaagcgtatgaagcttgatgtagtggctacacggcaaatgagtaattctgctagctgggataggaaacataggaccgaaatgattgcgaatcagcgtgtagtcggtcccggtgttgtgatggatggccactgtagaggagagcatcacacgtgggccgagcaaccaggtgcagtataa

SEQ ID NO: 14322 - DNA, 468 bp, Zea mays
  Peptide Sequence Number=SeqID_57697
atgacggtggagaaaggccacgggtcgcgcgacgaaacaatggtcacctggtcggccatcaccaagcagaagaggtggcggcggaaaggactgggtgtgcggtttcctttctctggctattccctcgggttgcgaaaacctaagtgggaggcgagcagcagagtaaagaaccgtcaccagtccctctcccgaatatataaaggcccaggcgagacccgttcaacacttcgcccgaacccgccggaccgggaaaggggatactccgaaagggatccttctccgcgaaggaagcgggccccgagcccccctactgatcagaggttcgaaggctggcccctcggaagggttcaatggccgcctcagagcactcgggctccgtgcccactactggtgagaggttcaaaggctggcccctcggaagggttcaacggccgcctcaggccactcgggctccgcgcccactactga

SEQ ID NO: 14323 - DNA, 750 bp, Zea mays
  Peptide Sequence Number=SeqID_57698
atgaaggggaggaaacaggcaaaggggaaacccgcggccttcgtgttgccctgcgcccaggtcgggtgcgcttgcagtaggggttacaagcgtccgcttggaagagccttatgcgtcggcccgtcctcccgcgcggccaaccttctcggtaatgatggcccctcctgcgacgtggtcggtccgagccctaggtcgggcgaggtggaggctcctccgaggccaaggtcgagcctgtcttccgaggccaaggctgagtccgagccctgggctcgggcgaggcggaccgaggctgagtccgagccctggggtcgggcgaggcggagttcgtcgtcttctggagccgaggctgagtccgagccctggggtcgggcgaggcgaagtccatcttccgaggccaagacgggggccgagccctggggtcgggcgaggcggagcttcctatggcgcccgaggccggacttggctgctgtcagcctcactctgtcgagtggcacaacagtcggagtgacgcaggcggcactgttttcttgtcaggccatccttgcattaactgctcctgcgatatggtcggttggcgtgacgatctggccaaggttgcttctctgcgaagactgggcctcgggcaagccgaggctttgtgctgatgggggttaccagctgacattaggagtcttggggggcgccgaacatggtgtctccagtgagttgctaatgggtgatccgagtggacgcccgtgccccattcgttag

SEQ ID NO: 14324 - DNA, 312 bp, Zea mays
  Peptide Sequence Number=SeqID_57699
atggacggcggcaagaagagccggaacccgcacaaggcctccgcggactaccgcagcgaccgcaagtcagcctccgggatgagcggcgaccccaagaagggcggccgcggcggcaagttcacctgggagggcgccgacgactacggctacggctacgccgacgaggacctcggcctcatctccaagaaaggcaacatcaacagcggacgcgctagccaggtccagggaggcgccgccgctaagaaggacgacgacgaggaaggagcaacgactatggggtcatttggggctataaaagtgatagtcgcctag

SEQ ID NO: 14325 - DNA, 430 bp, Zea mays
  Peptide Sequence Number=SeqID_57700
accgggggagggtgaacagctgcgggcggcgccgctcctcctcgcgacggtgaagtcgtcggagttggggcaagtgcgtgctacggtgggtccggggtcgccgaaattgggcagagagggggagaacgacacgacaaactcagtggcggggaaaaggccacgaatccgaggtcagagagggggaatggcggggaaaaggccttgggcgcaccggaggaactccggtgagggattccggccgcggggagggggtttgaggcgtgctaaggcctgggatagcttcagcagagggaggggtaccttagggaccaacgcgagggcactgggcagagctaatttggccggtcaccgcgcgggcgcggcggaccgccacgaccgaactccggcgaagccgaaattggttgacaacaaagcgaaaattgatttatga

SEQ ID NO: 14326 - DNA, 471 bp, Zea mays
  Peptide Sequence Number=SeqID_57701
atgggcggcgagaagatgtccaccatcggtgctggcgatgacattctgcctgtaacatctgtgcataagccagcagcgtctgcaatcgccccatacacagagggtgtctctgttactcctccggcggcattgagggcacctggacatatcgatgagcacacaaaaacgacagacgtggtcggcgcagagaagcacatccccatgagacatattgggccgcatgaacaggacacacctcatattcttcaaagacacccggacaatattgatataagattgatacctaaagtcggtatgacatttagtaacgtggacgaggcgtataatttttatagtcaatatgcatacgagattgagaccctgccatgccaatcgcacttggcagagtattcccaaacacaatacatcgattgtgtttgtggcatgtgccaaacagggtcaaaaggatacaactacattgtatatgtttga

SEQ ID NO: 14327 - DNA, 519 bp, Zea mays
  Peptide Sequence Number=SeqID_57702
atgcagcagcgttgggcgagctgcgggcgggatgtagccgcgctaggcgggcggcgccggcgggagctggcggggcagtggcgcgggtgggcagcgctgggcgcgccagagggagccgggagggagcgggcggcccgaggcaggctgcagcgcggggcgagcggcgctgggcaggcaggagggagccgggaggagcgggcggcgtggggcgtgctgcggcgcggggcgggcggcgcggggcgggcggcgcgcggcgaactgcgagctactgctagtacgcagcggcgtgctgcggagcgggcaggccgagcgacgcggctgggcggcaccgtcgcgagaggacgagggcggcggcgtcgcgggctggaggagcatgacgtgcgggcagtggaggagggcgcgagggcggcgggcagtggaggagggcggcggcggcgacgacgacgacgtcgcggtcgggaggagaatgaagagcgggagaacgacgtgggatggaaccgaacggctaattttggctag

SEQ ID NO: 14328 - DNA, 884 bp, Zea mays
  Peptide Sequence Number=SeqID_57703
atgaagaacgtagaccgacctccttccaatccaaaacggatcataatccagtctactcaggagtgcttcagcgttgacataccctgtgctccggcggggactgttagacccgaaacaaggaaggctgctgatgaggatgatgactttatgccattatccaagaagcgtaacttggacgacagtcctgggaaagttttgaagaagcataagaccaggaccagcacttttgatgtacctcgtcctgacccatctggacagcactcaattcacatcgaactcccgctcatcagggatttgatatcaagcaagctgaatcagcttccatcccgcgaccgcctgggtttcatagagaagttatcacattttgatgcggaggttggtaaggcgtgttcagttattaaacagactcttcagcagattgttgagaaacaatacaatctatctgatgtttttggcgagttaattgatgaggtcctccgtgctgaggcgggtgacaacgaagatgcttacgatgtgcagaaaaccacttcaaaatcagatgatattcttccccagacagctgaaagttgcgccgatgaagctgatattgatccactggttcatacaaatataatgaaacggaacaaaacacctacaccctcagtgggtaaacatggtgacggtggcaagaacatgccgaccaatacaaacgtcactcttaaagcaacaccacatatggatcctgacgcgccgatatttgatgcgactccgcaaatcaaggtttctgttgaaaccgatccagctacaaacactccacaggttggccaggcttctcttgattcggagatgcaaactgtgttagctctacgcgaatatttgtgtggtctgcaatctgacaccggcag

SEQ ID NO: 14329 - DNA, 318 bp, Zea mays
  Peptide Sequence Number=SeqID_57704
atgggagaggacgacgaacacgacgccattgtagccgcaagtctgcctccggtgggccagctggaggaggcgcacggcgtgtcgtctgcggatgggcgcccaaacaagcccgaggaaaaccaacccggcatagataaccatcacggcgtgcccgacaaaaaaggccgaggaagaagccaagcaatgcggtcgtacaaggaacaactattccgaaatggtgccaacgtcgaaatagtagtatatatggattcgaagagatcgaaccacagtggtaacaccaatgaggaacaactatatatgcgcaaagtcagcttgtaa

SEQ ID NO: 14330 - DNA, 570 bp, Zea mays
  Peptide Sequence Number=SeqID_57705
atgtcgtcctcttcctcttctgctgccgctacgccgccggccgacacgttgtttgaggagacgctgagccatgtggcggcggaggagttgcgcgccggcgacacagtggagtttggggtgtcgcggatgtcctcggtccacgtgcaagacatgcaacagcttggttattttggcggcggagtgggacgtgtcccgggggcggaggaggtccccgagccagaaggcgagttggttgtcttcgaggctttcttcgccgctggtcttcgactacccgtgcatcgattcgtgggagaagtcctacagattcaacgtccaggtccaccagctgacgccgaatgtcgtggtggccctgtcaaaatatgtctgggcgacgacttccagcatggatcaagcagtctcattagctgcgagaagcagacgattcaaatcgagtttttaaaccttgcaagtggcaggcagatcctctggtgcaggctcgggtgctggatccggggctacctcctgagcagctccttgctccggcacgaggacgtactctccgtcagcaaggatttaataacattatgctaa

SEQ ID NO: 14331 - DNA, 147 bp, Zea mays
  Peptide Sequence Number=SeqID_57706
atggggaagcctgtcccatcactcctcatgctcctcctgggccgagtgaccgcacttgtacccaccataaccggaatgggagacctcgtctcaggtcgcgtgaggagggcaatctgctgccaggttcaatcagggtttctagtgtag

SEQ ID NO: 14332 - DNA, 1245 bp, Zea mays
  Peptide Sequence Number=SeqID_57707
atggtaacacctgaggtgttacatctgcactggcagaagaggatgatcggaaataagattgctcaatttgggtcctgtacatttatgccgaagaccggcaagacttcgatggaagtcgttgagttggttccttgcgcccgcaataaatgggacaattggtgggagttttggttctatgttgtcgagggcacagtcgaagaccatccggggctccccgtggccgagatgtgctcgcattattactcagcgtacccgcagtttgaagtggcggaggaggatgcagacgaaggggccctgcggtgcgcggccgacataagtagagggcgcgatttggtagaggagtttgtcgcgtatggggtgtggcccttggcgcgtggctgggcgctgggcgaagtatgccctcgccagatgccctcccgtggcgggatgcaggtgcggagtcccgccttcgcattggatttgcatggccgcgatcccgccgcattcgtgcgtgaggtggaggatggggcggtgcggattgttggtcgctatgtgccaaggacggaggcccagcgtagttgggatatacgcggatccaacgatcgcttgaatagggtcttcgagttgaaccgtctgccgtatgacggttatcccgggcaagacgttgctgaccgccgcgggaaaaaaccggcggcggagactgaagacgactccgcgccggcggtcgccccatcctccaagaagaggaagctaggatccggtgaggggcaacttgttgttgttccgcctgcggtggtgaccacagtgcctgccgcggtgcctggggcgaagggtagcgctctcagcgctggtggtgagattccggcgcttactgccgtgaaggacgaggcgggcactgtgtcccgccggctgaaggaggtgtcgcagcggctaagtcaggcggttgacttcgctaaccgcgtggcgtcgggggcccttacggctgtggtgtctgccgaagtcgagaggcttcgggcgcagcatgctgacgccgcacgggaaaagtcggccgccaatagcaagtgccgcaaactggcggagaaggtgggcgcgctggagggcgagaggactgaactccggcgccagctggcggaggagaggagggaggcgaatcaggccctcgccaaggcgcagtctgcgcaggcggaggccaatttggcgtgggtggagggtagcgtcgccaggcagcgcaccgaggaatgggaggagtggttcaacgctctgtag

SEQ ID NO: 14333 - DNA, 273 bp, Zea mays
  Peptide Sequence Number=SeqID_57708
atggcggcggatgcggcctccttcctgctccagcttctgtgggaggtgctgttgtgctgttgcccccgccggccaggtcaagatgcagcgcccagccaaggtgacatgcgcgagagtactcctacggagcaaccggtggacgacgtggtccagttgcagcgagatcttacaagccccagctccccatcccaacccaaggaaacagacaaacaattcaggcatcacggccaaccaccgactgcgcatggcggtggtggcagccatcaccactga

SEQ ID NO: 14334 - DNA, 363 bp, Zea mays
  Peptide Sequence Number=SeqID_57709
atgctggtagactacacaacgatactcaatggaccaagtgtgtcggtcgaaggcccaacgcagcaaggtgtcgagagtgtcgtggaagtgacaaccgcgagcggcatcacgagtgatgggtctagcaatccatccctccggctcctgctcctccgagagcttcatgttgtggctcaaactgccacaatcttcgttgtctctgtctatgtcaggggggcatctctagctgaggtgcaggggagggttgccttccaaaatccagctcctgttgaggcgaggaggaagagacctgctgctcctgctcctagcgtcggcgctcctactcttcgtgcaggcgacgatgcagcctctccaagtggctag

SEQ ID NO: 14335 - DNA, 831 bp, Zea mays
  Peptide Sequence Number=SeqID_57710
atgggtgttactggtatattatgtgtttctacccatgatgcagtcacaaaagaatgtgttgctccagtatcaactaacacatttgcagaatgggattcgactgagaacgtactgagtgccactcctggggggcagtgggagctgactgctgctgagctgctttctttgggcaatgactcgcctagtggccttgttccccacaatggaaacatacgtggcctcctctttgcgctggaactgcttggttattctggttggttgctagggcaggaaggcgaggtgcttggttgttctagcggtactgcagctactgctgctgttgagggaattgtctctggtactactgctggtgttgacgctgatgttgatgctacgcttcctttcggtcatgattgctctgtcgatcaaatgctggaaggtagggaaggtgtggttcatgagctggtagtgaagggggtcaaccaaacatctcagaaaacggtactacctcttggcatctgtattgacatcttcaggcacatggtaacaacggaaattgtctctgaactcctcccatgtgatagcttcagggtctacatgggtggtgaggttgaggtgggggttgctgctgctgcacctgctgcattgctgctaaagtctggccagttgcttggactgcttgggtttgcattaggaagatctgttcaatggtcatcgagggtggcgatggcaactgctgctgaggtgcctcctcctggggtgcctgctgctcctgctgagcacgccttccacctctgcgtcggttttcacacatctgtagaaagcatacacacatcagatctgactctgtag

SEQ ID NO: 14336 - DNA, 876 bp, Zea mays
  Peptide Sequence Number=SeqID_57711
atgggaagtcttatgttgggtgctggtcgtggtcgaccggaacgggggcatctggcaagctcttatagttccggctcaggcagattggatacgggcatagttcccaaagctttaccctgtagtctggactataagttggttacgatgaattcacccacccccgccagtggaggagactctcgtttcagttctgacttcctttctcgcaatggctttccttccatcttgtgggaagtgcttaactccgccggttaccccacgccccctttgtacacagtgcagttgtatgaggagcatcgggtacctcgttgtcgggtctggctaactttggaggctcatccccttcagccgggttggcgttctcttgactctgagatgattggactcaggacggacgacaccgttgaggcagcagccatgaagactctgacaactttctgtggctaccatcccctggagatggtgatgcaccccttgggactcttccctgctgagaagaaggatgatcccatgtggtgtaaccgcctcactctcgacagtcgggaagattttgtggtcgacctatccacagagttggtggagaaggatctgcaggtggagaggctgaaccagcgtatcaataccctggagcagcaagtggagatccgagacaacactattgatgtcttggagaaccagcttcacgacgtgcagagggaactcgaggaagccaatgaccacttggacatgcaccacctggagatggaggccaatgaagcaggaagcgagggagaagaggctcccgaggagctaggaccagcccctggtgccaatgggactacctccgcgatgcctccttcactcgtatccagtgtcgcttccaccgctcagggttaa

SEQ ID NO: 14337 - DNA, 186 bp, Zea mays
  Peptide Sequence Number=SeqID_57712
atggaccaaggtatcctccagcagccgggatgccctgtggtggtgcagggggcatctctggctgaggtgcaggggaaggctgcctcccagactcctactcctagcgtcgacgctcctgctgctcctattcctggtgtcggcgctcctgctcctcgtgcaggtgatgcagcctctccaggtggctag

SEQ ID NO: 14338 - DNA, 639 bp, Zea mays
  Peptide Sequence Number=SeqID_57713
atggcgcctcctgttgacgtggtcggcccgcgccctaggttgggcgatgtggaggctcctccgaggtcgaggtcgagtctgtcttccgaggccgaggtcgagtccgagcccctgggtcgggtgaggcagagaccgtcggtggaggccagggctgagtccgagccctggggtcgggcagatcagagttcgctgtcttccggggctgagcccaagtccgaaccctgggtcgggcggaacggagttcgccgtcttccggggctgagcccaagcggcgctgtccttctgtcaggccggtcagtggagcggcgaaatgactgcggtcacttcggctctgtcgactggaggacgtgcgtcaggataaagggcgagaggacggtcagggacagactcgacttttttacatacgcccctgcgtcgcctttccacaaggaggagtgggggaaagcgccatgttgccctcggagggcgccgaacatggtgtctccggtgagctgctggcgggtaatccgagtggacgcccgtgccccatttgttaggggtcggctagaggcccggaggcgcgcccaaaagtacctgcgggtgatctgccggacccggtcccctgtcgacggggtccgagggctcgatgcctccctctga

SEQ ID NO: 14339 - DNA, 720 bp, Zea mays
  Peptide Sequence Number=SeqID_57714
atggctgaagggtaccaactcccacggagttgcgttcctctaacgacaaggcggaaggattgcgggtgccccccatccgggggctcggaaggtggaaagacacgatgcataagggagcgcgaagacatggtcgcctttcaaggaggtcaccctccttttaaaggcgactctccctacttgcgtccccagccgccgtgggctgagtcttctccaacacgctccaaggtcctccccctacggcgcgggggctgggtcccacgcgtcgtgcaagctggcccagagcagaagaagccaaaccgccgcgcgcggtgcatgcaaccgcccagcggttacgagcattcctccactttcgcccagaccagcgggcagccatgcaggcggcatgcaaccgcgccaagtgggcgcgcccctctgacttccaacgcacccagcatgggggcccacgcccacgcgtcatgcaaccggcgcgccggttgctacgtgcgagcaactgcaccgccactcgcaccactaccgcgcctcctcgactgcggaaccagtaccgcgactcgaggcgacccagcacacgacccagcagcgccagcctggcgcgacggtcaatgtggccaaaaatgggccggcagtaattgcggtggcaggcaggcaggagcagtgatcacgtcgtcagccaagcttacgtcccatccgggggcagcgagagagccctctcccacggcgtga

SEQ ID NO: 14340 - DNA, 531 bp, Zea mays
  Peptide Sequence Number=SeqID_57715
atggcgccccacacgctctatgacgacggcggctctcagcccccttacggaagcaagaggacgtataggaggacaaggattgtcgtcactagaactatcctccccgctcccttcaccggagctgcttgttgtatgccattcaagtttggtcgcgtcttcatcaactctgttagacgcaccagtgcagaccacatccatcctagtaggtacctagaaggcagaatgtctagtaactgtgaggtcctagagtctttactgcctacgaaggacgaaattccggagcaggatcggaccgggaagcacagagcagatagaagtgcactttccaatgcagttagacagagaaggcatggatgtgatgttataatgctgaaggaccccaagaagagattatggcctatcatttaccaccactacccgttatttgtgggtttcaccgagggctggaaacatttggtggcagcaaacgatcttcggactggggacgtctgcgagcttgttaaggggccagacgatggaggttttggttaa

SEQ ID NO: 14341 - DNA, 261 bp, Zea mays
  Peptide Sequence Number=SeqID_57716
atggcgaacacgaccgtgggcacaatgctggcacaggggcaccagagggcgcagaacgcggcggggtggcccaacgggcggtgcgaatctactccggcgataaatcgcgcgaagaacagggcaataaacagagaaatatgggcacagggagtttgctcacctcgagaggaaacactggagcaccggagcaacggcggagacgcagggacacctcgggtcgacggtggcggagctccggttacacggggagaactctggtga

SEQ ID NO: 14342 - DNA, 693 bp, Zea mays
  Peptide Sequence Number=SeqID_57717
atgccgccgcgcatgaggaaaaccgcgcgtaagtccactagaccgattggcgtgcttcagcatcagctagctccaaggcatgaggagagcagcagtggcagtaatgaccccattggagacctagaagcccaggtggagcagcttccaacggagctacatcacagaaaccgagtgtgggtagaggatggtcagcgtataaatgaattaagagctgacattagacatctgcaagatgagcttttcgaacaggatttggcaatcgattgggctgtcaactcatgttccattgcttgggatcgggaagccaaagctcgagcccgtgtggaggagcttagcatggccattgacaacttgcagacgtacctaccgaccctgtcagaatgggagccggaccttctggaacagcagatgccatcccgaactcgtgcacatgacggcgcgggaacgtcccgtggtcaagaagatacacccaatccacagccggtaccgcccacgttggctgaggttatcgctgccttggtcaccgcaaccgctaacaacacccgctttctgcgtgaaatggcgggaaatcaatttcagcagcaaggcgggagggcttatccgcagggaccccgtgaaacttcatacttggatttctcggaaacccgtcccccactatttgtcaaagtcgaagaccctctcgaagccgactaa

SEQ ID NO: 14343 - DNA, 759 bp, Zea mays
  Peptide Sequence Number=SeqID_57718
atggatgagtacatttgggcagataatgatttccgccaaagaagggaagaagcttataggttttctgagatgactaggggcttcgaaggaagaatccaccctagcatgtcagatcaatccacagatccagtcagagtgatgacaaaggaagccagtttcagaggccacaacatagctcacagtcttcaggacagcagcaaagttccttcaggccaccagctccaagaggcagaggcggcaggggcttcagaggaagatatggggatcagcccaggaaaatctattgcttattatatggtgaagacaagggccacactacaagaacatgccagattaccattcagaagtaaaaagagattgccgaagcagaagcccgacagaaccagccgaagcaggttttacatactgcttcgtgctactctccttacataccagaatatgtgggcaatcaacctgcagcttctattgcttcggcaagccattcacaagatttctggccccagcttccactgccacctccattgccacctgttcatacccaaagccagcagccagatgggcgccagcacccccaacagcaacgcgacttcagggaggagtctgaagctcgtacagtcaacaacactgtaccagaatcgaagcacatatattgaggaatatcctaattttgaaaacttataccgccgaaatacaaggcgaagaggttcaaaagtcgttcctaaggggatgcagaacttataccaccgaaatagaaggtga

SEQ ID NO: 14344 - DNA, 228 bp, Zea mays
  Peptide Sequence Number=SeqID_57719
atggcccgcataaagtggcccatcggcacactgaatccccgctcgtggaaggagacgaagctcacgacgtaccccggcggtggggacggagcggctccgcccatgggaggaatccactctggccgctgcttatcggagaagcgggcgacgcttcgccttcgccgtaataaccgcgccaaaaaagggaccgggaaagggggataccccaaaaagggtccttctctgtga

SEQ ID NO: 14345 - DNA, 498 bp, Zea mays
  Peptide Sequence Number=SeqID_57720
atggcggaactggacaaggtgttctcaccggcaattgacagggcgaagagctgctcgagacacccttcggtgtgccctttccctctctactgcgtccggtccatgctcaccggagcaatcttcgcgcagccggagccccgctgccatcgccccatcgagtctctgctcctccgtcgttgcttcgcgacaccatcgcttcccctcaaggtgagcaacccgcccgtgcccttaatttggtcatcaccgctctgtagctcgcgcgattgctcgccggagcaatccagcgccgccgttagcctgccccgccgtggtctgcactctctattgcctccgcgccagcgtgaaggccatagccgagtccgccagactgcactgattgcgcccaggctagtccccgagcctctagtgccccgccgtggccagccttctcatctccggcgagctctcgccgcgggaccgagcggcgccactgtgcctaagtccgcccctgatcgttag

SEQ ID NO: 14346 - DNA, 672 bp, Zea mays
  Peptide Sequence Number=SeqID_57721
atgcaggcggcatgcaaccgcgccaagtgggcgcacctctccgacttccaacgcgcccagcatggaagctcacgcccacgcgtcatgcaaccggcgcgccggtcgctacgtgcaagcaactgcaccgccacttgcgccaccaccgcgcctcctcgattgcaaaatcagtaccgtgattcgaggcgacccagcgtgcgacccagcagcgccagcctggcgcgacggtcaatgcggcccaaaaatgggccggcagtaatggcggtggcaggcgggcgggaacagcggtcacgtcgtcagccaggcttgcgtcccatcctggggcagacaagcggcgcctctagcaggggaagcgagcgacgcttcgccttcgccataatgaccgcgtcaaaaaagggaccgggaaagggggataccccgaaaaggatccttctccgtgaaggaaacaagctccgagcctccctactgatcagaggttcgaaggctagcccctcggaggggtttaacagccgcctcagagcgcgtgggctccacacccactactggtcagaggttcgaaggtcggtcccccggaagggttcaacggccgcctcaggccactcgggctccgcgcccactactgatcaggggttcgaaggctggccctcgaagggttcacaaccgcctcagacatag

SEQ ID NO: 14347 - DNA, 1296 bp, Zea mays
  Peptide Sequence Number=SeqID_57722
atgtcttcgcgctcccttatgcatcgtgtctttccaccttccgtgcccccggatgggggatacccgcagtccttccgccttgtcattggaggaacgcaactccgtgggagttggtacctttcagccatcgttcggcttcaaggattttcatcatgcagctcggctgcacccttccgccggtggtcacccgagacggtgaccaccaacccctggatggggagaggcaaaccgggctgcgttcttggtcccgccctcagcttcaaggatgttcatcatccttgctggggcggagagcgaggcgagccggggctctacctcccgcgcgggtcggttggccacctcctcttccagcttctggtggatgcaacattccgccctcttcctcgctttagtggcgagggtgggagcgaggacctgccggtgcgcttcggagcggcccgcgtttgccagcgcggagtcggtgctgacgtggtggcggccggaggaagcttccccatcgtcgagggcgtcagtgccgcctacgggtcggcctccggctctttggctttgatggctggttcgcatcccttgagcggggacgcgaacgagagcctttcggtggctgcgtccgtcctgggaccatggctgctgctgcagaggtcgccggcgagtcgcccggaacttgtcgccccgcaggctccccagtgcggaggttgttcatacccacggggacggaaccggagttccgtttgtgatggcaccttgaatgccgactcgcctattggttgtctgaaccgcttcaccaagcgtgagtcgccccgtgcaaaggtgacgagtgaggagtccctcggctcggtcggccttgctgtccgaggcttctcttgcttagttaaaggaacccctcggccgctcttctatgagccgaggccaggggtagcggtgtcagcacggacagaggcagagttggctcgaaaagaagacttggtcggccggagcctggccgggtcgtccgttagcgggaccgacgccggagtcgatctgccgaggcctcgggccgggctgatgtcttcgggggacagctggccgaggcctcggggtgaccagccgagccgcctgctcgagccggattcttggaggagacccaggcggcgatggcccgggcgtgatggtgaagtcgtccttcagagtggagaccctcgaaccgtgtcgccgtcagaggctaggtcggacctcgccgaaggtgtagttgacgccgagggtgctgctgttcccctcaactgtcgagatccgagcctacaggatcggattatcttgtag

SEQ ID NO: 14348 - DNA, 963 bp, Zea mays
  Peptide Sequence Number=SeqID_57723
atgtggggtcctcacggccgtaagacagtccgggagaggtccgaccgggcaatggatcagatggcgcatgacgaggaggtggaggaccttggcgatctagacagcacgctgcccgacagcatgctgccggaggcctcgagggtggagctggcgccgccgcccgatgcgggcaagggcccctcggcgaaccccatgccgactggaggtggcgaagaccccacgccagcccctgcaccgacgggtgaagacacatcgaaggcagtggtcgaaccagctgctgaagacctcgcggcggccgccgggccttcgcaggttccgacgtttgggcctgcacaagcaaccgctactgacaatactaattttgtggcggagacttcaaccgtagtgcctgctgatgatagtttgtttggttctgtgtctgaatgttttgagtctgatggtgaatctgggaacttgtttccttggacgaaggagtcctcggatgaaggcttggattattttgttgcgttggatgtggctacagtggagacttcgccgcatgtggagggtgctggggatcttcctgaccgggttggtaaacgagaattgttgtcctcgccgactggggcgagcataggcgagggggatcttcggaagctttttgagggtgaggaattgaggataatgctgtttaattacagggagatgggtatcatcctgaaggttgagctgatgtatattacatggctccgcctcgttaaaaacctcacccccgggaggaaaagagaatgctctaggtcttcgccggatggcgttgttagcctgtacgcgctgggggacgccttcgtcttgacgatgaatggaccctcccacttcggctccagcttgccctgtgactctgtccgggtggtttggacgaggcaaaacgcggtctccgtcgatgaggtctttggatgttggttcgtatacgtcggggacggctga

SEQ ID NO: 14349 - DNA, 501 bp, Zea mays
  Peptide Sequence Number=SeqID_57724
atggccacatgtatagacctcacatatggaaaggctgtcagcacagccttatctgttgaagcaaaatacacaaattctgggaagaataagggattcggtggtgagaggcctaatcagggccaggcaaagaagcaacgccaatcattatccgccccaacaatacccccactaccccaaaacagccgggtgccccaggcactcgattccctgccttgcctagttcttcaactgggtgttttaattgcggcaagtcgggacattttatcaaagactgcccatatcctaggcaaaatcaaatctaatgctccgcaaggatctgggaaatcagctcagcctaaaggaaatgctgtggggaagaatacaagaaagacggggcgtgtatattacacccaagtggctactacaccggaaggagagccggtgatgatgggtacgtttcccgtggccagtcacccagcaattattctttttgatttctggtgcttcacatacattcattag

SEQ ID NO: 14350 - DNA, 1215 bp, Zea mays
  Peptide Sequence Number=SeqID_57725
atgtcaatccttggaatgtcaactacaagtgaggtcactaagtgcaaagaatacattgtgttggcaactcctccagctaaggatcagatggaacagttcaagaaggcgcatgctcagtttctacaagcaacatctcaagtggtagctagactccaacaagttgatttagcagaatttatagcacatgagcagactaccgataaccatatgacatcaaccacaacatcaccctcaatagttgacttagaaaagctgttacatgcacaagctcttgtaatacagaacgtatcgcaactcacctcctcataccagcaggtgttggcaagtcgaaacgtcactaggaatgaaacaactgatgaacaaaaggatgcacaccaacaaacaaatgatcttggaacatgttgttgttgtgagtactatggaatcccttgtcgccagatcagtacgaacgaaagtgaaactacaaaacagaagaaccggattttattttctggtataaaaagtcaatggtcttcccaagagcaactaatagcagatgcactgtcagacgatgaattgccaggttttccaaaaaggaaacatcacaaggatgctcagctccaaaaagaagcaaatgagtattacattgatggatggactatcacctgcacacagtttcagcctcgtcgtcgcatcagttccaagaaacaaaaagggaaacatggaaaaagtcaagaaataacttcaagaaaagcttgctatcaatgtggacgtgaaggtcattactttcgtaactatcctaagaagagttcactaccggatacctccgagataaagctatctcagtctccagacatggaatatgaacaaaaatgcgtagaaacttctatcaacatagtgaagaacaacaaaaggtatagaaaaacatttggatatatgagtagtcaacctcaaccacaagcaaaagccccaaaacacatggatacccaaaccgaagaatcaagccagactcagctatgtgagacacagacactcaatcatccctcatcacctgttggtcaagcaaagttgactcgcaaagaactcaaagcaagaggtgcttgtttctactgcaagaatgaagaacatattattcgcgaatgccccaagaagcgtctagaccgactagagaagaaagctgccaagcaagacccaagctataatccagaagaccaactggtttataagtacttttga

SEQ ID NO: 14351 - DNA, 648 bp, Zea mays
  Peptide Sequence Number=SeqID_57726
atgctctcgtcctctgccgaggagagccccgtcaagccgctccgcctgtgggtcgtcgggtacgccacccagtgcctggtccacgtcgggctcgtctgcgccgacacccgccgcgagacgtggcgcgcccggagatcggcgtctgatgtcgagtctgccggtgctgggacagacagctcggacgccgacagcaaagatgacgaaagggcggaagggaggagcagatctcctctgtctccattctccatttccctccgtcggcgtctgtctgctcgccgttctcctatcagagctggtgtcgccgccgctagtgaggtttctgaagatgaatctttgtttgattgggattctatggttctcggtggtttgtgggaggaggaagggagacgtgatgttcctagtgagatgcagatgtattctcaacttggacttattgaagaggacgaggtagagaaaaatagaagagatgaagccttacgaggtggtacaactaatttggatcaatcggaccatattgattcaggagaccaacatgagagtgaagctcaacacacaactactaatgatgaagcaccaattgtggcaggggcacatgagagtgaagctcaacacatgactgctacttcgccacctagaagtgtcaaatag

SEQ ID NO: 14352 - DNA, 285 bp, Zea mays
  Peptide Sequence Number=SeqID_57727
atgtcgagcacgaggacggggcgggagtgcgcccagtccgcgcgcctccgctgcagttgcagcgccgccgtctcgtgcaccagcatcgagggaccgcgccgccccgtcgcgcgcccgatgagcgccgcaaggcgactccgcctcgccgctgaaggaggactggaagcccggtcgccggagctggcggcgtcggcacggagattgggctgcggagatgggggccgcagcagcggctcctcctgtcacggcgacgtagggaggcaggtaactgattcaaacatgtaa

SEQ ID NO: 14353 - DNA, 2538 bp, Zea mays
  Peptide Sequence Number=SeqID_57728
atgccgtcctcttcttcttccgccgacaccacgccgccggcggccgcctcgtctgaggagacattgagtagcttggtggtggaggagttgcgcgccggcgactctgttgattttggtgtgtcacggatgacgtcagcccgcgttgaagatatgcagcggttgggctactttggcggcggagttgctcgcgctccggggacggaggaagtccccgagccggaggtggcagaagaggatgcagacgaaggggccctccgatgcgccgccggtcagagcagtgggcgtgatttagttgaagagttcgtggcgtacggggtctggcccttggcgcacggctgggcgctgggcgaagtgtgccctcgccagatgccttttcacggaggaagggtggtgcgaagccctgccttcgcactgaatttgcgaaatcgtgacccggccgcctttgtgcgtgatgcggaggacttggcggtgcggctcgtgggacgttacgtgccgaggactgaaggccagcgcagctttgatatccgcgggtcaaatgagcgcttgaacagggtcttcgaattaaatcaattgccgtacgacggctatcctggtcaagacgaagcggaccgccgtgggaagaaaccggcggtggagactggaggcgaccctgcgctggcggccgccccctcctcaaaaaggagaaaattaggtactgcgatgggaggacttggggtgtctgatagttttgctagggagttaatgaggacgtgtgcggccccgggggaaaggatgtcttcgcccgagctccgggagtcttcggctcggatgctgagggttaccgggggttgctggccgaaaaatgttcctatcccctgcgcggctgaggaggactgttttacatctcgtatggttcatcggtggagagtttttccttacgggcgaaatatcggtgctgttgtgtggacagtgatggacaaggatcgccaaggggcggcgcaaaaacgccaggcgactgtcaggattcacgaagctcggccgaaaaggcagcggggaactgcgaaggctgtggcctccggcggaggcaagccgccgctggcggtgaaggcgggcgcctctgcacctagcaaggcgccggaggcaacggcgggcgccggaggctccaagtcaacgaaggtggtgcccccggccagcggagtggcggaggcttcgaaggcggcccgagcgctgccattggcgggcaaacgtgttgccgacttcggcaccgacattactgtggatgactatcttggtgggccggacgagggccaacttgctatagttgcgcctggcgcggcgatcgcgacggccgccaaagcgccgaaggcggggggcgaggcgcttggcgccggaggcgaggtgtcggtcctcgcgctggtcagggacgaggcgggcgcggcgacccgctggctgaagggggtgacggaggcgctgagtcaggcgacggaggcgctgagtcaggtggctgacttcgccagccgtactgcgtcgggggctctcacggcagctgtgtctgccgaagtcgagagacttcggacacaacatgctgacgctgtccgtgagaagtcggcctccgacagcaagtgccgtaagctgacggacagggtggccgccctggagagggagaaggctgacctccggcgccaactggcggcggagaggagggaagctaacgaggccgtcgccaaggggcaggctgcgcaggcggaggccaagctggcgcgggcggagggcaatcttgccaaggagctcgccgaacatctgcaggagcggctcaccgccctggagagccgcgctaaggaggccgaggtcgcaatgcatgcggaggccgaacggacgcgcacgcagcttatggatacatatcgtgagctgggtgcgcggaccggtgacttcggagtgccggaccgagagcccggccttcgctgtctgcagtgggtgcaggaggagctgctggaacttccagccgtcgtgggggggttgatgtcgtacgcctccctggtcacctgcgagggggcgatgaacgcgctctcccgcgaagggtgccggcacttcgaggccttcgaccaggcggatgaagattttgatcgagatatctataaggtcgaagaccccgtagtgaaggaatccgccggggccctctatgaccggatgtggggtctgtacggttgtgaggtggtcagggagcgggccgaggctgcgagggctcaggcggagcgtggcgagcgggtggacgacttcggggcactgaacagcgcgctgcctggcccggagccgacccctgcggaggccgcgactggagtcgccctggaaacaaccccggagactgcggaagacgcgccgggcgtcccccacctctgctgtggccggcgaaggcctgtccccaaagatggccgaaggccgcctgacgcccccgcagctgctgcgccgagcgctgaagattccgcggtggtggtggcggaagcagcggcggaggcgacagcggaggctcccgcagcggcagggccttcgcaggtggcgtag

SEQ ID NO: 14354 - DNA, 174 bp, Zea mays
  Peptide Sequence Number=SeqID_57729
atggggagtagctctctccgggcagaaagggaatcacggcttgtgggtggcaatgagattgatggttctggttatgactatggtactggttgtcagcattgcaaccactgctcaggagaagatgaagccgtgaaaggagacttccaggagttccaagactacgacgagttctag

SEQ ID NO: 14355 - DNA, 177 bp, Zea mays
  Peptide Sequence Number=SeqID_57730
atggcggcccgggcatccacccagcccaccagtgcccccctggcccaccggaggccggcctttgggcggcgccccagccgccacccggccccgagaacgattcggtcgaagagcccgaggaattcgcaggagaagcccctgagcagcagtcggttggtggaggcaagtgtcctttga

SEQ ID NO: 14356 - DNA, 1038 bp, Zea mays
  Peptide Sequence Number=SeqID_57731
atgggaaggtggatattaaaaaccaagccagtacatgttcacatggctagtcacagatacagtatagacaccatcgggctagtccaacagaatgtacaactaagaaatcaaactcacatgctctcagatgttcttgaccagaggacatgcaacaacatatggcgatgtatgggaaactctgtgaggagaggcagaaggctcgttcaaatgtttaatcaacacccactactgaggaagaaggagtacattctacagcagcctgcagctctagtcataatcaacaacaccgtggatgcacaaaggattgaagccaggatgtgtgcacccgatgatttttgcaagaactcgaagcaattaggaatcatggctaggtctgggttcagagagcttagaatttggggtgcttggcttcgaaaaggaagaacagggagagaagggagcaggcatacctggtgggtaatagtctccggcgatgaggtggagaagcgaggcagcattcgcccggccgtcgttggtggtaccggtgaagacccgaccgcggcggtggcagttgctgggtcagtcgttgcatggagagagatagcgagtgagctgcgaccagcgaataaggacccagaggggggcaacttcgcttcgcgcattgcgtgcggcggtgataatcgcctcgccgaggaccaacaaatccagatccgatcgccgtggctctcctcggagcggtggcagaggcatcaacaagagtcgacggaggatccgagagggagggggacaggatgcggcgatgtttgggatgagtgggagcacgtccgcagtagaggcatcgagccgagcgatggcggcagaggatcaggagggggagggaagcacgaagtatgggagagagaaggggacggcgacctcgtgaccagagaaacaagcggactggacgaccgagcaagacatccaacccatccgaacggccacgattttcctgatgaggtggaccgccccataacttggaaaatcgcaccaagttttaatataagagaagagaagagatga

SEQ ID NO: 14357 - DNA, 906 bp, Zea mays
  Peptide Sequence Number=SeqID_57732
atgcaagtcgtgccccatctcctctccgcagcactcgtctctccccctccaagcgtcgccaccatcaccgccgtccgtcgaggtcgtcgtcggccgctccgtgcaccccccgcccttcctagtcgtggttgctctgtgtcgctgtggtacccatcccgcgtgcccctgcctgctcgacgcgaccccgcccctcccctcgcgccctcctcggccctagcgtgcgccgcggctcccctgcgcgctcgttgcgcggctgcggcaagcctggcccggcgcgaccccgcgccctccccggccctggcgcgtggcgcggctcccttgcgctcccctggcgcggtcgtggcgccccgtgtggcgcggtgcccgacgcagccgcccggcgcgcggccatggcgcgcgacgcccggccccctcgcgtccccctccctggtgcagcctgacacgactcgccatgcatcagcgcggcccgcggtgtgcagctcgcacggccagcgcggcgcacagccggcacggctcgcagcctggcacggccaaccatccagcggctcgcccgtgccctgcgcagccgccctgtgcgccccgtgcgccagtggcctagccggccatggccaccgtggccgagtcgccgtcgtcttcatcgcgccgatgtcttcgccaacagttcgtcatgttctgtgtccacgcctcaacgtcgtgcgtctgcgccccaccgttcgccgtcgtctgaggaatcgacggtcaagctttggcaaccaagagatcaaactcttcgagttctacgaggatgaagaccctgagcatctgtttggtggtgacaaggatgatgtttatgactatggtaatggtaaagaaggcgtcgaggtggatctccaggagttccaggacgtcgacgagttcgaggattag

SEQ ID NO: 14358 - DNA, 654 bp, Zea mays
  Peptide Sequence Number=SeqID_57733
atgggctcacctcagatgacggtgaactgcggggcgcagacgcacgacgttgaggcgtggatgcagaacatgacgaactgctggcgaagacttcggcgcgatgaagacgacggcgactcggccactgtggccatggctggccaggccatgggcgcacggggcgcacagggcggccgcgcagggcacgggcgagccgctgtatggttggtcgtgccaggccgcgagccgcgccggctgtgcgccgcgttggccgtgcgagctgcacaccgcgggccacgccgactgcgccggggcaccgcgcgcaccgcgccgaggcacggcgagccgggccaggctgcaccagggaggggggatgcgagcgggccgggcggctgtgccgggcaccgtgccacacggggcgccacgactgagccaggggagcgcaagggagccgcgccgcgcgccagggccggggagggcgcgagggcaggggcggggtcgcgccgggccgggcacgccgtggctgcgcagcgagcgcgcaggggagccgcgccgaggcgggccacgccgcgagccgtgccgggacaccgggcgctagctgggtgggccaccacgctggctggccgcggacccgagcgggcaggggcgcgtgggatgggtaccgcagcggcatag

SEQ ID NO: 14359 - DNA, 297 bp, Zea mays
  Peptide Sequence Number=SeqID_57734
atggcgcgggggagggcgccgacgggaggaaaggaggagggagggggaggagaggaggggagggggagggagagcctcaccgaggcacgagaagatattaaagagatcatcatgcgccctatctggcagcacttcggactccggaaaccgaaggtaccttcggacatatatcaaagagggagaacctcaaaagatacgaaggttggcagtgccgaagctgtgaagcaggaaagcttcggcatgttcgcagaaaagggaaccgacttaaagatgaaaaggccatttagacctcgatag

SEQ ID NO: 14360 - DNA, 420 bp, Zea mays
  Peptide Sequence Number=SeqID_57735
atggctagtttggtcttgagtctcttgacaagccagactaatgtcgcgaaggatccaaatgtccatgttgaagatgggagtgaaatgatccagcataggccatacaaccagaaagttgatgtctacagttttgccattgtcctgtgggagttagtgactgggaatgtcccctttgcaaacatgagcgcagtgcaagctgcatttgctgtggttaacaagggcgtgcgaccagccataccccacgactgcctccctgcccttgcggagatcatgaccatgtgctgggacacaaaccctgaagtccgtcccccattcgctgagattgtgaggatgctggagcaggtggaggtggaggttctgaccactgtccgtaaggctcgcttccgctgttgcatcgcccaaccgatgacgctggactga

SEQ ID NO: 14361 - DNA, 549 bp, Zea mays
  Peptide Sequence Number=SeqID_57736
atgcagcccggccgcacccctccaccggcggtcaccctagatggtgacctccagcttgatggtgggggaaagcgagccgggctgcggcctctgcccctccctcagcctcaaggattttcgtcatccaggccaagatggaggatgaggcggatcatggggctgcctccgcgtgggtcggatttgccctcttcttcccctggcgtctgggggagaaatggcatcctccgatttcgcggagacttcctccagccatgccgagaaaggcgggccgccgccacccgctctgactgtggcaatgatcacccccgccccgggcgacgaagcagcttcagcagcagcttcggggcaggtgctacgacagaaggactctcacccaccgaggacgagagccagccattcgagccgggagacggagacccagggctactggcggagttggcaatctcatcggtagagaagccgctcgtcagccttctgttgctctgtaggcctacccctatggagtggggttgttcgtacctgcggagggggaaccggagttccgtttga

SEQ ID NO: 14362 - DNA, 1716 bp, Zea mays
  Peptide Sequence Number=SeqID_57737
atgaggcgaaaaggcggcgggcatcccccatccgggggcttggaagatggaaagacgcgaccaacgggcgaaagaggcgggcagccatgcaggcggcatgcaaccgcgccaagtggacgcgcttctccgactcctgacacaccagcatggaggcccaggcccacgcgtcacgcaaccggcgcaccggatgctgcatgcaagcaactgcaccgccacttgcgccatcaccgcgcctcctcgattgcggagccaacaccgcgactcgaggcgacccagcgcacgacccagcagcgccagcctggcgcgacggtcaatgtggccaaaggtggaccggcagtaatgacggtggcaggcgggcgggagcagcggtcacatcgtcagccaagctcacgttccatccgggagcagcaagagaaccccctctcacggcgtgaagacgacgcgcccgtgatccgtccctcgaacggctcgcgcacgcgcaacggccgccccgccaaccactcgccccgtcgcatcaactccgcggcaggacaggcggcgctcccggcaggaaaggcgggcgacgtttcgccttcgccgaaacaaccgcaccaaaagaggctccgagcctccttactgatcagaggttcgaaggctggccccctgaagggttcaacagacgcctcagatcgcgtgggccctacacccactactggtcagaggctggcccccgaagggttcacagtcgcctcagacaccgagcgagggatgaccagggaatcccatcggagggaggcatcgagccctcggaccccgtcgccaggggaccgggtctggcagatcacccgcagggctcggactcgggctcggccccagaagacgacgaactccgcttcgcccgaccctagggctcagactccgccctggcctccgccgaacgacctccgcctcgcccgacccagaggctcggcctcggccacggaagacagactcgacctcggcttcggaggagcctccacgtcgcccaacctagggcgcaggccagccacgtcaacaggaagcaccatcatcaccctaccccgagccgcctcgggccgtagggaacaagaccggcggacgtcagcaaggactcgaccgctccaacagctgtccctcgccaagcaccgttcgctcctccgacggccacgacatcacaccagcagggggccaagatctctccggctgccacattggcatggccctcttagagagggttggccgcgcgaggacgaggacgagacaggcgctcccttggggccgctcgcttccctcacccgcgtggacgcttgtaaccccctactgcaagcgcacccgacctgggcgcgggacgaacacgaaggccgcgagattcccaccactctcacgccggactccggccgcctcgctcctctcccccctttgtgctcgcccacgcgctcgacccatctgggctggggcacgcggcactcactcgtcggcctgagggacccccggtctcgaaacgccgacactttcctaattagtcatccaagggcgtcccataccacccttgtggtagcactgttttcccgggtgggcgatcccaacagaatcccgaagctcacggcgagcagcatgcaactgcccaagaaagaggaagcccctggtaacgcgggcccacccgtcagcgaaagcgggaccagtggcgcggtgatgcggctggcgcgtgcggccgagtga

SEQ ID NO: 14363 - DNA, 771 bp, Zea mays
  Peptide Sequence Number=SeqID_57738
atggacaatccttctggtgacttcagcagaaagtaccgccacatatctaagggagggtggggcttccaggttgcagatcaggggtggcaggtttcagattgcacagcagaagctctcaaggttttgttaatgctgtccagattttcatcagacattggaagcgatcagatggaaacatgccgcctatatgatgcagtgaatgtgttgtttggatcttggggtatttgtttcacatatggcacatggtttgctattgagggtctatcagctgttgggcagagttatggtaacagcacttgtatccagaaggcctgcaagtttctcttagcaaagcagctaaagaatggtggatggggtgagagtcatctttcatctacaaccaaggcatacacaaatctggataaggagaagtcacacatagtgaacactgcgtgggcaatgttggcgctcatgaaagctggacaggcggaaagagatcccactccacttcacaaagctgcacggcttatcatgagtatgcagctcagcaatggcgacttcccacaggagtctggacactacgccaactactgtcccaacagggccgcttacactactccagctccgatgaaacatggtcaagcctcaggaggcaagagtcagcccttatctgtcaaccgggtgcaagccaaccatgcaaaagtagaagctaaacctggtgaacctgacaaccaagaagtactgattgaagatgaagaagttggtgaagaagtcaacgagcagcaagattag

SEQ ID NO: 14364 - DNA, 510 bp, Zea mays
  Peptide Sequence Number=SeqID_57739
atggagggagcagaggagcgcagccacaaggggaagaagggggcgaccacagggcaccatggaacagggagtcgagcgccatggggaagctggcctgggcgcctgtgtgccagcatgaggggcacggccagcaggggcgcgacggagaggacaaccagcaagagggcgccgacttgggttgaagacgaacagggaggagtggagctcgagcgccgtgggagcttggagcttggctccctgctgcagctcgccgtggacagcagagggcgggaggaaggggaggacgccatggctgccgaggggaggagctgggcgctcggctgctgggcagaggagggcggctgggagtgtggaggcgccatgggagaaggagctcagctccctgcgcacgtccaggaaacagagaagagctgctggtggcggctagggaaaaatggaggggtgggagtggaaaatgaccaagtgaacacccctatttatagaagaagccctagggttagggtttcttag

SEQ ID NO: 14365 - DNA, 732 bp, Zea mays
  Peptide Sequence Number=SeqID_57740
atggatgaaggaactcccctcggtggtctggagcctgaggacaacactgagccgagccacgggttttcacgccgttcttcccggtctacggggccgaggctgtcttgcccactgacctggaatacggctccccgaggacgagggcctacagcgatcaaagcaaccaagctagccgagaagactcgctggaccagctggaagaggcccgggacaaggccttactacactcggcgaggtaccagcagtccctgcgacgctaccacgcccgaggggtccggccccgagacctccagaagacacacactacaagacattctgatcctgcaggctcaagtcttgacgctggaagggggcagcagcaccctccgcatcgacgacaccttcggcgaggttcgacctagcctcggacggcgacgcggtccgaaggcctccgctccgaaggacgacgtcatcaccacgcccgggccatcgccgccagggtcctctccgggaatccggcccgagcaggtggctcagccggataccccgggggcctcggccgactatcttccaggggcgccagcccgacccgaggcctcggctgatcaactccggcgtcggtcccgctaccggacaacccggctcggctccggccaaccaggtttcattttcgagccaactccgcctctgttcatgctgatatcgctacccctggcctcggctcgtcgaagagcggccaaggggtccctttaa

SEQ ID NO: 14366 - DNA, 1158 bp, Zea mays
  Peptide Sequence Number=SeqID_57741
atgtggcggctgaagatcggcgagggcgggccgtggctcaagagcggcaacgggcacattggaagggagacgtgggagttcgacgaggatttcggatcggaagcagacagggaggccgtcgactccgcgcgggaggagttcagcaagaaccggctccggatgcgacacagctccgatctcttggcccgcatgcagatagcgaaggagaacggtttcagcctcgacctgcacaagacgagagacgacgacgggcggtctcctctgctggtggcgacgacaggctccagcacggtgtcggagacgctgcgaaaggcgctggactacttcgcggcgatacaggcgcacgacgggcactggccaggagacttcccagggccgctgttcaccacagcaaccatgatcacggttctgtacgtgacggggtcgttggacagcacgctgtcgtcggagcaccgcagggagatctgccgctacctgcacaaccgccagaacgcggacggggggtgggggctgcacgcggaaggcgaaagctccatgctcagcacagctctcaactacaccgctctcaggctgctcggcgagggcggagacggcggcggcgggcccggcatgtcgtcgtcgtccatgcttattagagcgaggaagtggatacgtgatcgtggtggcgccaccatgatacccatccttgggaaagtgtggctctcggtgcttggagttttcgaatggtcaggcgtaaaccccatcccaccagaactgtttcttttcccatcctgggttcctattcaaccaggacggctgtggagccacttcaggatggcgttcattcccatgtcctatttgtacggcaagaaatttgtcgggcccatcaccagattggtcgtgtcgctacgggaagagctgcatgtccacccctacgaaaagattgactggaaggcagctcgtaattcatgtgccaaggaagatgtgtatagtccacatacgtggctgcaggagtgtctatctcactgcctttacagcttcggcgaaccttttctcacccgttggccaatttcctacatgagaaagaaagccctacagcaagtcgctgaattcttgaaatacgaagacgagaattctcaatacatctgcattggtgctgcacagaagactcaatgctag

SEQ ID NO: 14367 - DNA, 315 bp, Zea mays
  Peptide Sequence Number=SeqID_57742
atggcttctgtgttgccgtggtcatgcgaagccgcagccgcttcagttcctgcaggagatgcctgccgggccatgcatgtgctgtcgtgctccgttcatcacaggaactgcgtgcgatgcgatgcgaatgcgagcccaggagctcagctagctcactttcagctttgggttcttcaagctgtgagttggatgccccacgttctattccacgagcgtctatgcgttcgggttactagaacatgggacttctatgatcctggagatgataaaaaacttctgcattctgatcttgtactgatcgatgaggaggtataa

SEQ ID NO: 14368 - DNA, 972 bp, Zea mays
  Peptide Sequence Number=SeqID_57743
atgttcggactacatgtggcaatgagaatgatggttttgggtattgactctggtaatggtggtatcaaagcaatgctgatgatggctcgtcttagacacactgcatggaagtctgtcatccccttcttaccctcccgtctcgcggagcgtccgcttcgtcgtccagtgaccggtcagtccagccacttggagagactgcaccaccgcctgcgtgaggagcaggagcgtcgacgacaggagcaggagcagcagggctcttctttctcgctccagcaggagatagagtctgtgaggagctgctcccctgtgctcccgctggaggcgccccctgcaccaccactgagcgccccagcccctggagtagctgctggaggagacctagacgatggaggtggcgacagtagctcgagccacgacaccgacctttccgccgaccaggagccggaaggatgggttgctcgacccatcactcgcgacgctgctcgcgggtgtcacttccacgatgcgctcgacaccctgctacgtcgggcacttgaccgacgtacttggtccatcgagtatcgctgtgtggtcttccagcacagtcgcggggtctacccggaccgctgggaggcgacctgcttggtgcgtcgtccggagaacagtctctggggtgctaagtattacccccgccgtccatctggcagcacaggaggcgtgattgtctcacctgttgatgaggacaatcctagattgagcagcatagtcaacctagccgtcgtgctaaacacgaagctgaaccatgcgctagatgagctgagtagggctcgtgctgagattgcccagctgcgggttgagcgcgcggagcgtcgtcacctggatgatggctcccccgctcccgtcgggactcagcacccgtaccgctcacctcggcgtggacaccagtcttatggcaaccccgactgcaagaccaagataaatttagaaccatag

SEQ ID NO: 14369 - DNA, 1032 bp, Zea mays
  Peptide Sequence Number=SeqID_57744
atggcccgcacccgcacttataaaaccctcccagacttagattgtacccttccgcgcaccctcaaacctcaccggagtcgagctcgtcgccgtttgcccgtgcgcagcgagtccgcggccgcccactccctctgccaccgcagaccggccagtggagccattcccaactccgtccagccctcggagaagattgtgcacacctccgtgaggctccctgagcgaggaatcggagtttacttcgccggagaggccagtccacgctcgccggagctctcaaccccgccggagtacgtggaccggcagttcgagaagcaccgagtgcctcgctgtagggtgaggatgactttggagcctcatcccctgcagccaggctggcgctctttggacttcgagtctttcgggtaccgagcagaggacacgatcgaggcgatcgctctgcatggattgactaccttctgcggattccatcctttggagctggccacccaccctattggcttgttccccgctgaaagggaggacgacccaatgtggaagaatcgggtggagcatgccaaggatatctgggccatctacccaggacagactgcgcacttgacagtacggtgcatgaatgctctgtaccgtctgcaggtgatgcgcggtgaggcaatgtcccatctgatggcgctgctggaggcaacaaagattacactggataacagagaggagctcgtggttgacttgtctcaagaaatggtggagaaggacttgcaggtggagcagctatccactgatattcaggagttggaggagctggtaggcactagggagaacaccatcgaggttctagaggatcagctccttaacactcagcagcagcttgctgaggctaacgagcacctggacatgcaccaccaggagatccaggaccaggaggccaacgaggacgtcgacatcgagggaggagatgagcctgcctcaagtgtggacactgccggctcgggaagaccaccttcccccgagtcgagtgttgcttcgttcgctcactag

SEQ ID NO: 14370 - DNA, 378 bp, Zea mays
  Peptide Sequence Number=SeqID_57745
atgcagtacaaggggtcaagcagtctcattagctgcgagaagcagacgattcaaatcgagttttatccttgcaaggcgggggagctcgtcggcggcgaggattccggcctatccagggcgaaattgaccaatcaaacggggcagagagcttcaccagggatcaaggaaggggtccgagggcttggaaaggttcacgggcctatggcggagctaaccgaagagctagcgcgacttgggggtggctggagtgggctggccacggtggccgaggctctggcggcaatggcgggcggaaaagagctcgccggagataaggaggggcgtctggccggcgaagggatcaaggtgtactcacttgatctttggctcaaggtctga

SEQ ID NO: 14371 - DNA, 321 bp, Zea mays
  Peptide Sequence Number=SeqID_57746
atgggcaagaacaacaagcgcaagctgactcagacgactccccaggggctcgcggcggaggtctggacgtacatccgggccgtcgagcgctccgggctcgagggctcggatgagtcggagtactcctcggatgaggaggactcggacggtggcggcgaggacgaggatgacgacgacgacgacgaaggcggtggcggcggtgacggtgacggtgacggcagcggcaggggcggcagcagcaggggcaacaacaggggcggcagcggcggcggcagcaacaggggcggtagcggcggcggcagcaacagggccagtggctag

SEQ ID NO: 14372 - DNA, 507 bp, Zea mays
  Peptide Sequence Number=SeqID_57747
atgccccctgcaccaccacagggcatcccggctgctggaggagacccagacggagacagagacgacgacgacgccggtggcacttcgagccacggcaccgagctcttgaaggagccggagccggaggggtggatcgctagacccatcactcatgatgttgctcgcggcggggtagctgacgaccttgacctgaagtactaccctcgccattcgactggtagtgccgaaggtgtgattgtctcgccagtaggtgagggcaatcctaggctgagcagcatggtcaacctggctgctgtgctcaacatagagttggaccacgcccttgacgagttgggcaaggttcgggcggaggttgtggaattgcatgctgaatgcgcggcacgccactatcttgatggtggttctcccgcccctgtcgggattcaacacccttaccgttcaccgccccgtggtcgcttcgactatggtaccccagacttcaggacccgcatagatttagatctatag

SEQ ID NO: 14373 - DNA, 372 bp, Zea mays
  Peptide Sequence Number=SeqID_57748
atgaacccacgtaaatgtgcttttggagtgtcggctgccggagtccgccaccgtcgccctatcgagcccctgcgcctcaaccgttgtttcgcgacgccagcacttctgctcgaggagcaatccagcgccgccgttagcccgctccaccgtggtcagtgtgctgtggtgcccctgcgccagcgtataggccatggccgagttcgccagacctccctgattgcgcctaggttagtccccgagcctctagtgccccgccgtgtccggtatgctcgtatccagcgaaccctcgccgcgggaccgagggacgccaccgcacccaagtcagccctggccgttagatctcggtcgtccgtccgagatcggatggtttag

SEQ ID NO: 14374 - DNA, 225 bp, Zea mays
  Peptide Sequence Number=SeqID_57749
atgaccgcgcactgtcgcgtggggcccagttgtctgtccctctggcgtgtgcggttgcgatgtgtcgctgacaaatcggccccgttgtcagttgcttcaaccgctccgcggattcgcctcaacggagtgcggccatggcggagtgcgcccgcggaactcggagctccgatgcctgatgctcgcccaccaatctcggaccgcattgaccgcgccgggtatgcataa

SEQ ID NO: 14375 - DNA, 2148 bp, Zea mays
  Peptide Sequence Number=SeqID_57750
atgggagaactgggggtctctgatagttttgctatggaattgatggggacatgcgcggcccccgggggaaggatgtcttcgcccgagcttcgggagtcttcggcgcggatgctggaggttaccaggggtcgatggcctaagaacgttcctatcccccgcgcggtcggcgaagacttctttacgtctcgcatggttcgtgacttgagagtgtttccttatggacggaatattgctgttgttatgtcggcagtgatgaacaaggatcgccaggaagctgcgcagaagcgtcgggcggtcatcaggctccccgaagctaggccaaagagggcgcgggggactgtgaaggctgccgtccccggcggtagccagcctacgctggcggcgaagtcggccgcccctgggtccggcaaggtgctggagagcgtgaaggcggccggcgccggtggaatcaagtctgcctcggacggacctgcgaaggcccgggagttgccatcaccggggaaacgcgttgccgacttcggcacaaatattagcgtggatgactatctcgttggatcgggcgaggggcaacttgctgttgttccgcctgtggtggcgaccacggtgtctgtcgcggtgcctggggtgaggggtagcgctctcagcactggcggtgagattttggcggtcactgccgtcaaggacaaagcaggcactgtgtcccgccggctgagggaggcgtcgcagcggctgagtcaagcggccgacttcgccgaccgcgtggcgttgggggcccttactgcagatgtgtctgccgaagtcgagagacttcgggcgcagcatgctgacgccgtccgggaaaagtcggccgcggacagcaagtgctgcaagctggcggagaaggtgaccgccctggagggcgagaggacggacctccggtgccagctggtggaggagaagagggaggctaaccaggccatcgccaaggcgcatgcggcgcaggcgaaggccaatttggcgcgggtggagggtagtctcgccagtcagcgcaccgaggaatgggaggtgcggttcaacgctctgcaggcccgcatggagagggccgaggcctctacgtgctcggaagttgagcggacgcgcaaacagctcgtggactcataccgcgagctgggcgcacggactgctgacttcgaagtgcccgaccgggaggcgggccttcgcttcctcgagtggctgcaagaggaactgttggtgctcccgaccattgtggagggatttatgtcctttgcctccctcgtcacctgcgaaggggcgatgaacgcgctgtcccgcgaggggtgcagtcactatgaggtcttcgatcgatctgatgaagattttgggcgcgagattttcaaggtcgaagaccctgtggtgaaggactccgcgggtgccctcttcgaccggatgtggggcccccacggtcgggaggtggtgagggagcggtccgaccgggcgagggatcaggcggcgcgtgtcgaggacgtggaggacttcggacccctgaacaaaaccagtgaaggctccctcgctgcccctgcggctactgtgtccggtggtggctcgtcgccaaccgctgtgccgagggtggaggatcccatgaaggcggcgacggagccggcagcggaggatcccatggcggcggctgggtcttcgcaggttcaggattttgggcctgcgcacgcaaccgctactgctaattttgtggcggcttcgaccgtggatgctgggaatgaatcggatgagtctgcgtctaagttttctgattttggtgactctgggagttcggttgagtggacggaagagtcttcggatgaggacttggattactttgcggcctttgatgtggctgcggcggaggcttctccgcgtgttgcagatgctaaagttgtgtctggtccgagtgctgggcgtaggcgacgaagggcagtggcgaagcgtagagtgagtgaagtggatggcggtcggcttcgtgtgggcagggctggcaagcaggaattgttgtcctcgccggctggggcgagtgtaggtgagggggagttgcgaagtctttttgagggtgaggagcttatgctaatgctatttaactatagggagatgggaatcattccgaaggttgaaccaatgtaa

SEQ ID NO: 14376 - DNA, 267 bp, Zea mays
  Peptide Sequence Number=SeqID_57751
atgggggcgcgcgtggcgacaacccagataggcgccgacggcgctccggacgagggcacacgcggcggcagcccagacgggcgtagacacgccggcggtgctcccggtggcggcgaccgagtcgacggagatcgcggcctctacaggcggcgcaaatctcgctcaccggatcagtaccatgctcgccgcgcaaatctccctcaccggatcggtaccatgctcgccgcggggctgaaagggaaatgtgcctttgggccatttctataa

SEQ ID NO: 14377 - DNA, 1218 bp, Zea mays
  Peptide Sequence Number=SeqID_57752
atggaggcgctcgtggtgcggcagctgggcgatcccaccctgccccctggcggtgaagcctccccgttcgccgcggtctctggggatcacccagtgccggagatctcatcgccgacggctgtccgagtgcgagtcgcggcgaccagcctcaacttcgccacgttcctccaggtgcagggcaagtaccaggagcggcccccgcttccgttcgtgcctggatccgactactctggcgtggtcgacgcagtcggtcccggcgtgcgtgggctccggcccggcgaccgcgtctgctcctttaccggcctcggttccttcgctgacttcatcgtcgccgaggagaagcagctattatcccctaaaatgctcttaaaactcaaggacatcatcaagccttttttacaagcttttttgagtatctggctatggagctggctgttgaaagaatctaagtatcttgtggattacatgttgtcgggtatgataattagtggtacccagattattcccaaaaacgcatttaaaactcaagggcatcatcaagaatctgactgtagagctgactgtggaaaggatctgagtatcgtgggattacatgctgccagatttttggtgcctgatggatgcgacctggtcacagctggggctttaccagttgcatttggtacatcacatttggcccttgttcaccgagcccaattgaaggctggccaggtgctacttgttcttggtgctgctggtggtgtcggggcatctgctgtgcaaataggaaaagtttgtggtgctgttgttattgcagttgctagaaagtgccagtctttcttaaaggctagaggcttgaaaggtgttgatgttttatatgacccagtcggggggaaattaactcaagatagcctgaaacttctcaattggggagcacaaattcttgtcatcggatttgccagtggtgatgttccagttattcgagcgaatattgctcttgttaagaactggacagttcatggtttgtactggggaagctacttaactcaccggccacaagtactcattgattcgctcaatgaactcttgtcatggctttcaaagggtctgataacagttcaaatttcacactgctacagacttgttgaggtccatcttgctttctctgccctgagagataggaaggcggttggcaaagtgatgattgtaatgggctcctcagctgtaccaaggctctga

SEQ ID NO: 14378 - DNA, 78 bp, Zea mays
  Peptide Sequence Number=SeqID_57753
atgggaactaatgggcatctcgacctcgacacgggaggttccaagctgatcctaaggaagttcaccttagggccgtga

SEQ ID NO: 14379 - DNA, 144 bp, Zea mays
  Peptide Sequence Number=SeqID_57754
atggggagtcatgatccccgggcaaaacgggaatcacgactcatggatgatgatgatgatgatggttatgactatggtaatggtaaacaaggcgtcgaggcggatctccaggagttccaggacgtcgacgagttcgaggattag

SEQ ID NO: 14380 - DNA, 423 bp, Zea mays
  Peptide Sequence Number=SeqID_57755
atggtagttactggaagattatttgcttctacccatgatgcagttataaaagaatgtgttgctccagtatcaaataacacttctgcaatatgggacgtggctgagagcggttgcctgctccagactgaggcgcattctgctttgttggggcattggggcctgactgctgctgggctgccttcttcagacattgcatcacccaatggctttgctctccacagtggaaacatgccctgcttccaccctgagctggtgttgcttaactgttctgctgggtcactggggcaggaagacgaggtgcctgctgattctgcctttggaactgacctcctcctgactgattgttctggcgattctactgctggtgctgagggtactgcctttggaactgctactgctgaggtggacgttggttctgcctga

SEQ ID NO: 14381 - DNA, 441 bp, Zea mays
  Peptide Sequence Number=SeqID_57756
atggcgcttcctgttgacgtgactggcctgcgccctaggttgggcgacgtggaggctcctccgaagccgaggtcgagtctgtcttccatggccgaggccgagtccgagcccctgggtcgggcgaggcggaggtcgtcggcagaggccaggacggtgtccgagccctggggtcgggcgaagcggagttcgtcgtcttctggggctgagcccgagtccgagccctgggtcgggcggagcggactttatgctgatggaggttaccaggtgagaattaggagtcttgaggctgaactatctccttccccggagctcttcgagccaacggtcgacccagaagcaaagaaagaagatgagatcattaaaatggccgaagctattttggacgaagctgttgctcaactgttaaacaaaactgcagaagcagttttaaaagaagaataa

SEQ ID NO: 14382 - DNA, 2514 bp, Zea mays
  Peptide Sequence Number=SeqID_57757
atggagcgactggaagaagagcaggcctgccgaagcctcctggtcctattttccagtgccttcagtgcctgcctgtcagagttcccggtgttgtccctagatgatgttgagaactgctggtgtgatgactgcgatgcaaccgtgctggcggtgtatgtatgcatctggaccttgaagggcagcagcagcctgccgttctcggaagtcggacaacctgcagtctacacagccctgcacgatgtcaccgctgcagcctgcagtgcagcttatgaaggattgcaaaaccgtcaaaaaccggcgcctctgcctgcgctcccacaccagaacaccacaccgctccgcgtgcgtcgcccgcactcctcgcctctgcccgtctgcctaccgtgccgtgccgtgccgtgctccccacccgatgcagccgccgacgcgggccgtgccgagccacagccggagatgagctccaggaaccgttccgccgccgcctcgtccgctgccccggctctccggacaccgcgccgcctgaagcggcggccagttaaggcgtcggcgccggggccgggcagcgggcggcggagcgggcccgcgacgccgctgctgaaatgggacgtcggtggcggcggcgggcgcggtgaggggaggaaggctggcgccgacgaagcgggggacgccgcgcgggcgcgggagaccaaggcgaaggcgacggaggtgtcggtgcggaggctcgcggccggggtttggcggctgcgcccgccggaggccgtggccggcggcgggagcggggtccgcgtgggcgtcgagcatatcccaaggcatctacaagtccagcttctgaagcagaacacttcaggtcatcaccagagttcgaagaatgaggtttcaagccccatatctgttttggagcggaagagtggagagctccacaagggacaacttcatgctacttctgctatgctgcctgtcgctaccatggagaaggcaacgaaatgggagcctggggacataaagggaatggaatcgcatgatgcgtatctgatagccagccagctgaatcttcttgatgaacacagagacaccgcgtatgttgctgacctccagatggagcttcagcaagcacgtgataggataagtgcgatggaaactgagcgacggtcagctaagaagaggcttgaccacttgttcaagaaacttgcggaggagaaagcggcttggaggaacagagagcatgaaaaggtgcgtgctatcctcgaagatatgaaggcagaccttgaccacgagaagaaaaaccggaggcggctggagatgattaacatgaaactcgtcaacgagctgaaggaggccaagatgtcagcaaaacagctgttacaagagtatgagacagagaggaaagcacgtgagctcactgaggaggtgtgcaacgagctagcaagagaggtggatgaagacaaagctgagatcgaggccctgaaacgggactcccagaggttgcgagaggaggtagacgaggagcggaagatgctgcagatggcggaggtgtggcgtgaagaacgggtgcagatgaagcttgttgatgcaaaacttactctcgacgcaaaatacacacagctgagcaaactgcaacaggatgttgaggcgtttattgctgcatgcagtactgctaatggagacgtcacggtagtagagcaagcagagagcataatacaggcaatcaagtcagtcagagcccaagatgctgagttcaggtacgagccaccggccgcatcagaagacatattttccatttttgaagagctgcgtccaagtgaggagcctgtcatcaaggagatcgagccatgttacaagaatagctctgccaaatgtgaaccagaaattcaagaggttagcccaatgaccgatatattcctcgaaaagaaagccaaggcaaactcgaacaaaagccctaaagatgaaagcgacactgaagatggcagcagctgggagacaataagccacgaagatgtccagggttcaagcggttcacctgatggaagcgagccttcggtcagcaacaaggtctgcgacggaagcattccttggaagagcagaaatggattcgagcgtatggagagtgagaagctgaaggatgagtcagctgatgcctgcctgacaaacatgaaccagcccaagaagaaagaatcggccatttcaaagctctggaagtcgtcccgcccaaagaacagcgagatatgcaagaaagacgcagttgaaacggtaaatgcaagatcgtcaaacgtgcggctctcagtcgggacctattccactgttgaaagtggcatccaagaaatagggctcagtccaccgtgtgttgagcagtggagctcaccagactcgatgaacgtccaattcaaccggggattcaagggctgtatagagtacccgcggatgtcccagaagcacagcttgaaggcgaagctcatggaggcacggttggagagccataaggtccagctccgccaggtgctcaagcagaagatctag

SEQ ID NO: 14383 - DNA, 189 bp, Zea mays
  Peptide Sequence Number=SeqID_57758
atgggctccgccaccgttggcgccctcctcctcggcttcgcgcacgccccggccccgacgattgcagaatggctgctaggttctctgctagagttttgctcacagtttaaagttgaaccactgatgaagtgctataaagaaatcaccgactatttagaagtggataaaaaatcttctgattctggataa

SEQ ID NO: 14384 - DNA, 675 bp, Zea mays
  Peptide Sequence Number=SeqID_57759
atggcgctgcacttcaccgcggtggtggtgcgctcgcgatggacgagtaaccagtgcttggacaagatccagagcacgacagccaagttcaacaccctgatgcactcgcccccgggcggcggtggcatctgcgcgccgttcgcgcaccgcgccgtgtcggcgatgtaccgtgggctgaggcggtggctcgccggcgagatcatggctacggcgagcagggccagctgctggggcgagtcgtcgtcgtcggtgacggtggccgcgggcggcgacgtggagcagagctgggagtcggccttcatacagaagcactggtcggcgcagcagctgtggcgcaccgagcagcagtgctggcggccccagtgcgggctgccagagaagtctgttgccgtgctcaaggcgtggatgttcgagaacttcctgcacccgtatcccaaggaccatgagaaggacgtgctggcggcaaggagcagcctcaccaggaaccaggcacagatcgaaatcccaccagactcgtttcaaattcgattcttttttggcgagatggggtgtgagacagtcataccagggattgcgcctaggacttctgaaaaagatgaatccaaagctattggacttgatgcagaggtggatggaagtagatccatccgacaggacctcagcagccattcataa

SEQ ID NO: 14385 - DNA, 4281 bp, Zea mays
  Peptide Sequence Number=SeqID_57760
atggcctccgctgcggtggagccgcccaagcgggagcaaaattttctagtgaaggtggggatggaggcatggacgcagtcgttcgcggttgcacacaaagtcaggttggtgcacatcctcaagaatctccacacctcggaggtgaaaatctactccgacgcgtccaaggagttcataggagtactggatggtgagtctggcggcgaggtgctgcaggagtacgtgcaacagtcaccgcagcttggggagctgctcgaggcatggcggctccaccgggagaacccggggatggcgcacatacttttgctctttgcagctgtcctgggccaccctgatggtaagctgcggcgacatggttcggttaagaagagcttggacggtgtcgctaggatgatactggaggataaggagaagatgggggatgtgtatttggagctgaatagtggtgagttccgacggcagaatgcagcactggatttgcttgctgcaattgtcaggcgtggagggggtctagcgtctgaggtcgctgagagatttgattttaagatacctattttgccgcagctggctgggacaatgaagaagaaggggagcagggatggaaggaatcggcggaagggtgccgactttgggtccacaaggcggtcgtttattgggtttgccatgtcatttttggaggttgggaatccaaggctgcttagatgggtccttcaacagaaggaggtatattcaggggtgcttcgtgggattggaaatgatgatgctgagactgtcatctatgtcctctcaactttgcgagacaatgtcctggtagatgagtctcttgtcccaccagggctcaggagtgtcctctttggaagtgtcacattggagcagctgagcttgatctcaggaaatcttgaatcaggggaagcagctgacattgctcatgaggtattggtcatggtgtgcactgatccaaaaaatggattgatgccaggatcaaatttgagaggtaatgagaaacgcttactagatctcatgaaaaagttgaaagctactgaggttgttcatcacaaaaaattgttactggccattgtgagtaatagactgtctctttgttcggcgtacatgaatgagtttccttacaatattgaaccacgttcgtctccttcatggttttcagccatctcccttgcagctgatgtcatagcttcagcaaaatgcaatagcattgttcaaactctttcatccagttcacatggtctggtatctgtagatgatgaagaagttcagcatggttctctgaggcttgtttttgaatcagttaacctgctttgttatatcactgaatccatcaattgcatggtatcaaaagggagactgaagtcagaattcattggctcagagaaagtaaccatgaaaatagatggtttcccagtattaagctgttctgatgctacagatgcatccttagttgatgaggttcaccagggagatgaaatgcaggtcaagaggtggacatctctaagagaatacatccaagatgaagttcatggagctatgcctgatcctcaagtctttctcaagttactctcttctaccagccaaaaacatcaaagttattctcagagcatacaaaagaataatgctcaactttctgagcctcctcaaaagaaacgaagatgcagtccttcctgtgaagttgatgatattattattggtggcattgatgttgagcaggataaggacgcatctgaagaacaaggcctggaattaaaaaatgaccgcacaaccaccttgtgtgagatatggagcttagataaacaagatccaaagacgaaagatgcaaatgttgtggaaaatgtcttccactcgaagttgctggatgttctcaggctttatttgggggtgatgcccagctcttttgatggatcatatgacttctttaagattataccacctaacccattggatctgtccatggatgagcaacagtccctgttatcttttttacttgaatattcaggccaatctagaggatgtttggacccagaaagagttccagaatcaatgtacaagtatctgcaacccttggtttatatcatgttgcattcacagattaagaacatccgtgatcaagcatatattttagttaaagctgctatggcaagttcgggtgcttttgatcataacttcacagagattgatgcatggttggttttcttgcctggttatgaggccaaatggtgtgtaagagagaacctaagaattggagcacctaataaattatcacacattgtgatcccttttctgtgtgatgctatttcggtagttggtaataacctgtataaataccaagagcacacacacaagcttatctctaaatcaggccagttggaaggccgttctccagatttcagccctctgattatttgtgttcttcagaaatgccttaggctactcgacacagcatctagaagtacaaagttacacgagaagtctacaatttcattgtatgtgtgcaacacgatccaccttattcttcagtctcaggtggacatgcatttattgcctgatcttataggtactattctaaaagaaagatttgataaattttcatcccaagaactgaactctaggatttatctggctgagtggaggccgttaacaaatatgctgcatttcttgaggaaaatttctgaccagcaaaattatagcctgttcaacacgctggaacattctcctgagtttgatggtaactcgttgtgctctgtatctagacaggttgaagaattgttgaatcaagaacaaactaattcgctggatgatgtagcaaccgcattcttattttcaatcatatgtgcacctccaaaagatgttatcagtgcctttccagatcttcttgatttggtgaaagcacattttccatctcatgttgctttcttgtcatcggttctttttctacaacatgattatctggctaaagttgctagttgttggccagatatattcttcagcagcatcagactgttcaaggatgatatcaatgctgaccatgcaaacacagttgaggacgaatgccagaacctctctgtttcaacagaatcagctccgctaagtacatttttaagtgtcagtcccttctgtgcgcttttaccttcagtattgagccttgcatgttcttcgccagatgaaatcatggaagcacataaggatgcacttctaagactccttgaagttaaattgtctgactgcacattcagtgagcttaccttgtatctgagagtcatcttgttctggactcatcacctactgtcatcatatactattaaggattcaaattcagatgatcttgagcaagtatgtcatttgtgctttggtcttcttgatagagtatttgagcgtattcaagttttgactgctgacccttcacagtcaaattctgaatacccgtactatcccgctcaacatatccaagacattgttgattctgttcttcggcatcctgttattaccctgtctttgtcatgctctttatccaattgccaaaatttagcagatgggagtttggaacatctggaagaagctttggctatttttgcgacggaaaatctgcaccttatagaccgtttcgttctaaaccttttgggtaaattgtatgaccttttgctaatgtttggtagctatggtggtaactactctacagataatgggccatcccatgagtcactgtttgctgctccaaatcttctgctggagaacataatattgttgttcaaggagaagtttgagctctgcgtggacaaactaaattttgaattgcttttgccaaatttctacatggttcgcacactgtcaaagttcttttctcctttcaaactcctggagcttgcaaattggatgttctcaaaattggatggtcacaacttcagttcacctgcttttgtttctgctgttttgatgtgcctatacattattgatgtcaccatggaaatgctgtgcttttatctgcaaaaaactgatcagagatcacaatcctatctatttcggcacttggagattcacaattctgatatcaatgccattcagcaagcctatcacatcattcttcattttgctactaaatggaatgttgagtttgctgatcattgcttgctgaagatgctgtgccatattcattacacagaaagatgcgcaggatggaacactgactatattgcattccatatggtattatctacaatggccatcaatactcccattgacattcttcatcactgcattttccccacatctaag

SEQ ID NO: 14386 - DNA, 612 bp, Zea mays
  Peptide Sequence Number=SeqID_57761
atggaaattcttagcatacacaataatgagctaactactaagctagaaaacattggtagcactccagcaacatctttagttgaaatacctgaaataattaagaaagatgcttctacttcctgctttgatttaattgatgattctaacccctgcaaccaagttcttgttgagaatattgttgtagaaacatgttcggatgatgttgcaaaagaaaatgaacaattaaagcaagaagtggctcaccttggcaaggctttgtatgacaagaaaggcaaagccaaacaaatccgacctccacaggataacaccactgcgctatgccacatggaaggccacaagtctttccaatgcaaggcgatgaccggggataaacaaaggcaaaagctcaagcaaaagccatcaagcaaaatctccaacagctacatcaaaaaggtgaacaaaaaggatgctacaccatatttgatcaagaagaaaaagaatggaaaggtgatagcaatcaaggccaacaagcaagccaacaaaggaaaaggggccaaacgcatctgggtgccaaaggaaataatttcaaccatgaaaagcaccaagaaggtttggatcccaaaagggaagtga

SEQ ID NO: 14387 - DNA, 65 bp, Zea mays
  Peptide Sequence Number=SeqID_57762
gctgatgaatcagcttgattcgtttgcccctcttgatatcaaatcaaagtgcatgtctcctacaa

SEQ ID NO: 14388 - DNA, 1551 bp, Zea mays
  Peptide Sequence Number=SeqID_57763
atggtgaggaagaccaccaagatgttaaagaagctcaacagagaaggcatcaagtttgactcaagaaagaagaaattcttctccagtaaaagaaagcccatctctgaaatgcactgctacaattgtggagagcttggtcatcttgctcatcaatgcaacaagcccaagaagaacaagttgaagggcaagaaagatgatgacagtgatgacgagaaaaaggaaaagaaattcttcaagaggaaggatgggaagcacaagaggttccacaaaaagaaaaatggaaagacatacattgttggtgactggctcactgacattgagtcatcaagtgggtcttcttcaagtgaagaagaaaatgatgaaaaagttgccgccatcactggggacttctcttcaccaccaccatcaccttcatcgacttctcacctatgcctcatggctaaaggtgaacggaaggtacaaattgataatgatattattaatgatagtgatagtgatagtgatgatgaatttgcttcaccttcctatgatgaactagctgacttgcttaaggaatacactcaaatcattaggaagtcaaaggctaaatgtgataagttgaaggatgaaaatgaatttttaaatgccaaatatgacatagctataaaatctagtgatgagatgaaagaagaaaacaaaactatgtcatgcactgtaaatgagcttaaatcctccctaaaagatgttaaggataagtgtgaaaaattaaatgaagcaaatagggagttgaaagaaagatttgtgaaaattaaggaagactatataaagattaaaattgatcatgataatcttcttgttgcaaatgagcttttatattgcagtacacatgaggctattaaccctgttgttaagattgatgtagcaacctcatgtgatgatttgagccaagatgatcaaactagtcttcatgatgaactgactaaaaaagttgaagtcttgacattagacaaccaaaaactgaagagacatttgactgatgcaactactagaggaaaggttgccattgagaacaatgacttcaacaatgagttggcagtggataatgaaaggcttagaaatgaggtcaagaaacttaagagtgaaaatgaacatcttgcaacaagtgtgcaaatgttcaacaaaggccaatacctccaaaatgaattgctcatgaacactatcatgaaaaacaacaagagtggtattggatataattcttttgtgcaaaagaaagctacaaatcaatacaagccaaagcagactcataagcctatcaaatgctttgagtgtggaaaagaaggtcattttgcccacaactgcaaagccaaaccaccaactcccttgccaaagcactcaagaccatttgccttcaatgcccattatgttctaagaaaagtagcaaatggaaaagtcaaagttacattcctaggtccaccaagcaagagtagacctagacaaatttgggttgcaaagtctttgattgagaaagtcaccggtcctatgcaaaatagagccctcaaaattcaagcttga

SEQ ID NO: 14389 - DNA, 1080 bp, Zea mays
  Peptide Sequence Number=SeqID_57764
atggtgtctccggtgagctgcaagcgggtaatccgagtggacgtccgtgccccgttcgttaggggtcggctaggggcccagaggcacgcccaaaagtacctgcggggcccacgcgatctgaggcggctgttgaacccttccagggggccagccttcgaacctctgatcagtagggggggctcggagcctggttccttcacggggaaggatcctttttggggcgaagcgtcgcccgcttctcctgctagaggcgccgcctgtcccgccgcggagttaatgcgacggggcgagtggttggcggggcggccgttgcgcgtgcgcgagccgttcgaggaacagagcgcgggcgcgttgtcttcacaccgtgagagagggttctcctgctgcccccggatgggacggagagtcacctttaaaaggagggtgacccctttggaaggcgaccatgtcttcgtgctcccttatgcatcgtgtctttccaccttccaagcccccggatgggggatacccgccgtctttccgcctcatcgttggaggaacgcaactccgtgggagttggtacctttcagccatcgttcggcttcaaggattttcatcagccagcccggctgtaccccccgccggcggtcacccaagacggtgaccaccagcccctgggtggggagaagcaagccgggctgcgatcttggtcccaccctcagcttcaaggatgttcatcatcctcgctggggtggaggccgggctgagccggagctctacctcccgcacgggttcgtgggtcaccgtctcctgcggcgttcgagggagagggcgctcactagccctgcaggcgggtcggactttgacaacgcggggctagtcgacggcgggcgtcgccagcctcagcgtgtcgagctcgtcggcttggcacccggtgccccctcctgccggaaggcggctgccgcgccgtgtgcacgggaggaccgcccaagatatcgcgcgctgctagggcggcgttcgtgttctggggcggtcctgcctttgcaccggtatggcgcctccacgcggaggtcgatgccccactcgtccgggaggatctga

SEQ ID NO: 14390 - DNA, 93 bp, Zea mays
  Peptide Sequence Number=SeqID_57765
atggagtcccgcctacgcaaagcctggcgcccacgcaagcggcggcctgggaagtgggcctacacgcgacttgctgtggcccaggaattttag

SEQ ID NO: 14391 - DNA, 1368 bp, Zea mays
  Peptide Sequence Number=SeqID_57766
atggggggaagacctgcggagcaacagaagactgacgagcggctcgccgccgcccgctctgactacgacgacaacgacccccgctccggatggtcgagctgcagcagcgcaggcctcagggtgggcgctgctgcaatcttgccctcgcccacaccgacgctcgaggggcgaggacaacgcgcgacatctagggtggtcctcccgtgtacacggcgcggcagccgccctccggcagaaggggccgccgggagccaagccgacgaacccgacacgctggaggtgacgacgcctgccatcgaccagccctgcgttgtcgaagtccgggccacccgcagggccagtgagcgccctctccctcgaatgccgcgggagaggatgacccacgaacccgcgcgggaggtagagcgccggcttagcccggcacccaccctagcaaggatgatgaacatccttgaagctgagggtgggaccaagatcgcagcccggcttgctcctccccacccaggagctggtggtcaccgtctcgggcccacgcgtcgcgcaaccggcgcgccggatgctgcctgcaagcaactgcaccgcctgcgccaccaccgcgcctcctcgattgcggaaccaataccgcgactcgaggcgacccagtgcgcgacccagcagcaccagcctgacgcggcggccaacgcggccaaaagtgggccggcagtaatgacggtggcaggcgcgcgggagcagcggtcacgtcgtcagccaagctcacgtcccatccgggggcagcaagagaaccccctctcacggcgtgaagacaacgcgcccgtgatccgttcctcgaacggctcgcgcacgcgcaacggctgccccgccaactactcgccccatcgcattaactccgcggctggacaggcggcgcttctggcaggagcagcgggcgacgctttgccttcgccgaaacaaccgcgccaaaaaaggttccgagcctccttactgatcaggggttcgaaggctggccccccgaagggttcaacagccgcctcagatcgcgtgggccctacacccactattggtcagaggggttcgaaggctggcccccgaagggttcacagccgcctcagacgccaagcgagggatgaccaggggtacgttcgatacataaccaaggctcgggctgcgctcccgagctcaccggagacaccatgttcggcgcccatcgagggtaacatggcgctctccccccctcctccttgcggaaaggcgacgcaggggccgtcaacataccagcccgagaacttgggccccgaccgtacacccgggctacggccagctcgcatgagggaacagccagaccagccgaagcattacgcgaggcattaa

SEQ ID NO: 14392 - DNA, 54 bp, Zea mays
  Peptide Sequence Number=SeqID_57767
atggggcctggatctattaggcccacttccaccagcgcaagaatatttttctaa

SEQ ID NO: 14393 - DNA, 216 bp, Zea mays
  Peptide Sequence Number=SeqID_57768
atggcggagcttcctgttgcgcccgaggctgaactcggctgttgtaagccttatccgggtggttggcaaagcagtcggagcggggcgagcgacgctgtttttctgtcagatcggataaggtgccaggcgatcttcgcattgaatgcgcctgcgatacggtcggttggtaaggcgatttggccaaggttgcttcacgatgaagcctgcccgagctag

SEQ ID NO: 14394 - DNA, 849 bp, Zea mays
  Peptide Sequence Number=SeqID_57769
atgcaggcggcatgcaaccgcaccaagtgggcgcaccctttcgactccaacgcgtccagcatggaggcccaggcccacacgtcatggaccgggaaaggggataccccgaaagggatccttctccacgaaggaaatgggccccgagcccccctactgatcagaggttcgaaggctggcccctcggaggggttcaatggccgcctcagagcgctcgagctccgcgcccactactggtcagaggttcgaaggctggcccctcggaagggttcaacgaccgcctcaggccactcgggctccgtgcccactactgatcaggggttcgtaggttggccctcgaagggttcgatagccgcctcagacgcagagcaagggatgaccctggaagacagcgccgcccgcgtcgctccgactgttgtgccactcgacggagtgaggctgacagcggccaagtccggcctcgggtgccataggaagctccgcctcgcccgaccccagggctcggactcgggctcggccccggaagacgacgaactccgcctcgcccgaccccagggctcggactcaggctcggccccagaagacaatgaactctgcctcgcccgaccccagggctcggactcggcctcggccccggaagacgaagaactccgcctcgctcgaccccagggctcggactcggccttggccccgaaagacaacgaactccgcctcgcccgacccaggggctcggactcgacctcgacctcggaagacagactcaacctcgacctcggaggagcctccgcctcgcccgacccagggctcggaccgaccacgtcacagaaggggccatcattaccctacccctag

SEQ ID NO: 14395 - DNA, 864 bp, Zea mays
  Peptide Sequence Number=SeqID_57770
atggcccctcctatgacgtggtcggtccgagccctgggtcggcgaggcggaggctcctccgaggtcgaggtcgagcctgtcttccgaggtcgaggtcgagtccgagcccctgggtcgggcgaggcggagttcgttgtcttccggggccgaggccgagtccgagccctggggtcgggcgaggcggagttcgtcgtcttccggggccgagtccgagccctggggtcgggcgaggcggagttcgtcgtcttccggggccgagccctggggtcgggcgaggcagaattcgtcgtcttccagggccgagcccgagtccgagccctggggtcgggcgaggcggagcttcctatggcgcccgaggccggacttggccgctgtcagcctcactccgtcgagtggcacagcagtcggagcgacgcgggcggcactgtcttcttgtcaggccggataaggtgtcaggccacctttgcattaaatgctcctgcgacacggtcggtcggtgtgacgatccggccaaggttgcttcttggcggagactgggcctcgagcgagctgaagctttgtgctgatgggggttaccagctgagattaggagtcttgggggtacccctaattatggtccccgacacccatctaccatgggctcatgaatctcatacacctctatcaaggaagcgaggcaggaggagatggtccgcgctagggggtcttcccgcggcggaggaattgctccggcgagcaattcccggtggcccggagtgcaatccgcccaggaattgcgacgttcatgatctgagaagcttcacgaagctcttaggtccgatcccgtaccccgagcggcagcagacacgttttaccaagaattag

SEQ ID NO: 14396 - DNA, 1002 bp, Zea mays
  Peptide Sequence Number=SeqID_57771
atggaggcccaggcccgcgcgtcatgcaaccggcgcgccggttgctacgtgcgagcaactgcaccgccactcgcaccactaccacgcctcctcgactgcggaaccgcttgcgcacgcgcaacggccgcctcgcgaaccactcgccccgtcgcattaactccgcggcgggacaggcggcgcctcaggcaggagaagcaagcgatgcttcgccttcgccataatgaccgcgtcaaaaaaggaaacaagccccgagcctccctactgatcagaggttcaaaggctggcccctcggaggggttcaacagccgcctcagagcgcttgggttccgcgcccactactggctggccctcgaagggttcacagtcgcatcagacatagagcgagggatgaccctggcgcgcctccgggcctctagccgacccctaacaaatggggcacgggtgtccactcggattacccgccagcagctcaccggagacaccatgttcggcgccctccgagggcaacatggtgctttccccccctcctccttgcggaaaggcgacacaggggccgccgcctgcgccgctccgactgctgtgccactcggcagagtgaggctgacagcagccaagtctggcctcaggcgccataggaaactccgcttcgcccgacctcagggctcggactcgggcttagccctggaagacggcgaactccactccgcccgaccccagggctcggacttgggctcagccccggaagacggcgaactccgctctgcccaaccccagggctcggactcgggctcggccccgaaggacgacgaactccgctccgcccgaccccagggctcggacttgggctcagccccggaagacgacgaactccgctccgcccgaccccagggctcggactcgggctcggccccggaagacgacgaactctgctccgcccgaccccagggctcggacttgggctcagccccggaagacgacgaactccgctccgcccgaccctag

SEQ ID NO: 14397 - DNA, 318 bp, Zea mays
  Peptide Sequence Number=SeqID_57772
atgaagctgtggaaggagacttccaggagttccaagactacgacgagttctaggtgtgggttagcggcaacccccagtcggctgcctgtgaaggccgcgttatctacgtttcttttccgcactttgatttattacatagatgatgagaggaagaagcatgaggaagcatggagccaatatggctgcacactcatgtctgatggttggatagacaaaagaggtcgccatttgatcaatttccttgttaacagccctcaaggaacattcttcttagagtcagttgatgcatcaaatgagtcacacagttgtaggatctag

SEQ ID NO: 14398 - DNA, 1357 bp, Zea mays
  Peptide Sequence Number=SeqID_57773
atggcgctctcctcctcccggccgaagcacctcctgcgccccatcctgcggggtttccacgcctcagcgcgggccctggcgcgggtggagccgcacgagttctccaagcccagcgagtacctgggcagctgggagcccgcggcggagcctcgggaggcgtgggcgcggctggaccggctgcgcaaggggtacgcgagcgaggtgcgggagctgcggcggcagtacgcctacgaggtgcagctgttgcaggccgagcggcagcggaaggccgacgccagagccgaggccgcccgcgccgccaaccaggagcgcaaggccgccaagctcgccgccgcccagacgcgcgccgccgagcgccgcgcgttcgaggaggacttccgccagaccctcatgaaagaaagagctgagaagctggagagctggcggaagaaggagaagcgcaaagaggagaagaaggcaataaagaaggagctcctgcgcaggaagagcagcatgaaagctgataatagtagcttgcgaatcatgaggagggggggtggacatcacatggacgtgctcgtcgttacctgtgagaagctaataagaacggacctgctgctgtgtcccagattgctccggtgcatagtgcaaatgcaaatctgcgagaggagcgtgggcgtatatgatgccgacgaggagggggcgggcatgaaaagaagaggaggcaaagtgcaaagcaagaagggtggagcaaaagcaggctccgcctcgctacaacccttcctcaacgacgtccgctctgaggacgccggtgccgtcgcctcctctggctcgctcgccacgctccacaaggtcgtgtctagagatggccaaacgggccgcccggcccggcccgggcccgcccgcccgcttattctaccgtgccgggctcggaccgggcccaaaaagcgggcttcgtgccgggctcacgtgcctcgtgctttttggccatctatggtcgtgtccctgccgagccccacactcccgggcgtcatgctcgactacgaggtcgtccatgccgtcgccagctaccgcttcgaggccaggggcggccaccctcctctttactacctccccaacagcgctcccacgactccatctcgtgccatcaaaggctctctgctgcattcacgaatagccatcgaccctacgactacgagtagcgagagaggattgatggcggcgcagctgcggtacatgataagccattatttcgaatcattttctgaagaattctccccaaatcttgttcacttctttggttcggggttgacggggctctttgttcctaatgaggcagggggtgatccaagatctggactacgccttgaggacaaag

SEQ ID NO: 14399 - DNA, 498 bp, Zea mays
  Peptide Sequence Number=SeqID_57774
atgaccctgggtacgtccgttacatggccgaggctcgggctacgctccagaggtaccctaggacatttccgagaccagcaggagcgattttgtaacagaatcccaccagagggaggcatcgagccctcggaccctatcgaatgggtccaggtccggcaaatcacctgcagtcagcaaggtcgaagtgaccgcagtcacttcaccctttcactgaccaatctgacagaaaaacagcgtcgctcgccccgctccgactgctgtgccaaccacccgggtaaggctgacatcagccgagttcagcctcgagcgcaacaggaagctctgcctcgcccgaccttaggcctcggcttcgggaggaggtctccgcctcgcccgaccccaagactcggcctcagcctcggcctcgggaggaatcgcgtcctcgcccgacccccggcctcggcctcaggagaagtctccgcctcgcccgaccttgggctcggaccgaccgcgccatag

SEQ ID NO: 14400 - DNA, 996 bp, Zea mays
  Peptide Sequence Number=SeqID_57775
atgactcatccgcgtcgtcatgcgttcctgctgctccaattccaggcaatctacctgctagccaaccccggcggcacgatcaagctgtacgtgttcgtggccatcttcggcgtcttcatgatgatcctggcgcagctgccgtccttccactcgctccgccacgtcaacctcgtctccctgctgctctgcctcgcctacagcttctgcgccgtcgccggctccatatacctaggtactgatagttcccggaccagcagttcatcagctagaccaaaggactactccatctcaggtgacgcccagaaccgtgtgttcggcgtcttcaacgccatcgctatcatcgccaccacgtatggcaacggcatcatcccagagatacaggcaacagtggcggcgccggtgacggggaagatgttccgggggctgtgcctgtgctacgcggtggtggtcacgaccttcttcagcgtggccatctcggggtactgggcggtcggcaaccaggcgcagggcatcctgctgagcaacttcatggtggacggcgcggccgtgatccccaagggcctcctcctcgtcacccagctcttcacgctgctgcagctctcggcggtgggcgtggtgtacctgcagcccaccaacgaggtcctggagggcctcttctcggacgccaagcagggtcagtacgcggcgcggaacgtggtgccgcgcctcgtgtcgcgcacggtggccgtcgcgctggccaccaccgtcgcggccatgctgcccttcttcggggacatgaactcgctcatcggcgccttcggtttcctgccgctcgacttcgccgtgccagctctcttctacaacgtcaccttcaagccgtccaagaagggattcgtgttctggctcaacaagactatcgccgtcgtcttctcggggctcgccgtcatcgcgtccgtcgcggcggtgcggcagattgccttggacgccaaaacttacaagcttttcgccaacgtgtga

SEQ ID NO: 14401 - DNA, 429 bp, Zea mays
  Peptide Sequence Number=SeqID_57776
atgggcaagagcaacaaatgcaagcgcgagccgactcctccatcggaggactttggcgactcggaatactcggaggaggagttctcctctgagtccgaggggtctccagctcccgtctctcccccagcgtcgtccgatgactcggacgactctcaggggatagccgcggaggtctggacttacatctgggccatcgagcgctccgggcttgagggctcggatgggtcgaagtactcctcggacgaggaggactcgcccgaggaggatggcgatgacgacgacgacgacgacgacggaggcgacggcggcgatgacggtgacggcggaggcaggggcggcaacggcgacgacaagggtggcaacggcggcagcagcaggggcagcaacgacggcggcagcagcaagggcagcaacaagaccagtggctag

SEQ ID NO: 14402 - DNA, 255 bp, Zea mays
  Peptide Sequence Number=SeqID_57777
atggggttgggagctgttgctgcgacccgggaggatgaggaggcgaagatggaggccggcggcgacaccgctggccagaagctcgacgccggcgcgctcttcgtgctccagtccaaaggtgatttgccgcggcgcttcttttgctcccgatcgccatgcatatctttccgtgttgttatgtttcttgagcacgaacaagcttcaacggcggtggacgtcgggggcggttgtgttttttccccttgctgcaagtaa

SEQ ID NO: 14403 - DNA, 573 bp, Zea mays
  Peptide Sequence Number=SeqID_57778
atgcctaagataaagacaagtcgtgtcaagtatcctgaaggatgggagcttattgaaccaaccatccgtgagttggatgccaaaatgagagaagctgaaaatgatccacatgatgggaagagaaagtgtgaagctctctggcctattttccgtatttctcatcaaaggagccgctacatatatgatctttactacagaaggaaggagatatcacgggagctttatgagttctgcctggaccagagctatgcagatcgtaacctgatcgcaaagtggaaaaagtgcagtccagtctgtttttttggttatgaagtttgtggttgtgcaatgccagatctggcatcctcatttcttactgctacatttggccctcttgcagccagttttttggaagcccgcgatgtttaccgcaatactgacgcggtaatctccagtctagaagaactgaagaatctttatgatactggtgactcggtgggtgacctatacccacagggtatgagtatgggggtaaatctatacccaccagcagatatgaatgactcgacatggtttgtttttgtcggggtatag

SEQ ID NO: 14404 - DNA, 249 bp, Zea mays
  Peptide Sequence Number=SeqID_57779
atgggggcgattcagcggagcaacgacggctcaagctcggcgcggctgtggctgcggcggcggggtggcttcgagtttgcctcggcggcggctgtgcgactgttgaggctggggcggctggccgacctccggctagcgcaggcggcaggcgcggccgcgcggggtggagcgaagctctcgcggtcgatcccgagcagaggaagcctcggccgagatatggaagaaggggtgttgggttacgtggactaa

SEQ ID NO: 14405 - DNA, 119 bp, Zea mays
  Peptide Sequence Number=SeqID_57780
atggatctatcaaaggccttgataggttcaacatcggaaaagatgtacctctgccaggaccttgtcgatgtaggcttattgatcgaggaccctttaactggtcacatgcctcgtcatgg

SEQ ID NO: 14406 - DNA, 69 bp, Zea mays
  Peptide Sequence Number=SeqID_57781
atggagaagaaggcaatggaagatgaggcgctcgggagagatttgtctgaaggccttgcctttatctaa

SEQ ID NO: 14407 - DNA, 126 bp, Zea mays
  Peptide Sequence Number=SeqID_57782
atgtgggcacaggaagcatctcgcatccggctccagtccatgattccttatggcccatataaaaacctccactctgataagagcttcaggggtaaactaatgaagatatatctcgaatgtctttaa

SEQ ID NO: 14408 - DNA, 387 bp, Zea mays
  Peptide Sequence Number=SeqID_57783
atgtcgcgtcttctcgactgcggaaccagtgccgcgactcgaggcagccctgcgcgtgacccaatagtaccaattaagtgcaacgatcatggggtaagcgacatctctagcaggcgaggtgggcgtcatttcacctccgccatgatgaccgcgtcaaaaaagggaccgggaaaggcgatatttcgaaaaggatccttctcggcgaaggaaactggctccgagcccattactgatcaggggttcgaaggctggcccctcggaagggttcgacagctgccccagagcactcgggctccaagcccattactaatcaggggttcgaaggctggccccttggaagggttcgacagccgccccagagcactctggctccaagcccattactga

SEQ ID NO: 14409 - DNA, 945 bp, Zea mays
  Peptide Sequence Number=SeqID_57784
atgatgatgaccgtaggcctcgtggtggggaagagcgagccaggccgtggcctcctccctaccctcagcttcaaggatgttcatcatccgtgctggggaggagggtgcaccaagtcggggcccgcctcagcgcgggtagcggcccgctccttcctcaatgatcgggggagaagggtgaggcatcctcttgccgaagcggttgccttcgccgacgagatcgtcagtgccacctgcgctccggacctctggctctttggctttaatggatggtcctcgtccccccggtcgctggcgagccacacggagtttgttatcccgcaggccttccggtgtggaggttgttcattcctgtgggaatggacccggagtcccgaccttcggccgctctgcgatgagctaaagccggaggcagcggtgtcggcgcgaacagaggcggtgtcggctcgaatagaggcttcgtcggcccaggagcaggtggcttcccaggccgaggaggtgcagcagcgacggctggagcttggccaggtcatccgtgagcgggaccaaccccggagtcacgctgccgaggccatgagccgggctgaggtcctcgggggacagctggctgaggctacggagcggccagccgaggcgtccgctcgggccgggacccttgtggagagcctgaccgtgagggcccaagcgcggtgctggcgtcctcattcgaggtggagatccttctgcccgtgtcgccgtctgaggccaggccagattccgccgagggtggaaatgacgccgagggtgctgctcctccccctgccgatgtctgaacctgcagaaacagtttgtctaaagcatgcaatcacttatccgagcgagagttacttttcgcggaaggtgatgagtgagggttttgtcatcgatatagtcgaaagcacgaaagtcgttttctacccgagcgtttag

SEQ ID NO: 14410 - DNA, 1080 bp, Zea mays
  Peptide Sequence Number=SeqID_57785
atggcgtcaaccgcggtgcttggggtgaagggtggcgctttcagcgctggcggcgagatttcggcggccactgccgtcaaggacgaagcgggcaccatgtcccgccggctgagggaggcgtcgcagcagctgtcgcagcaactaagtcaagcggctgacttcgtcgaccgcgtggcgtcgggtgcccttactgcggatgtgtctgccgaagtcgagagacttcgggcgcagcacgaggacgccgtccgggagaagtcggctacggagagcaagagtcgcaggctggcggagaaggtggccgccctggagggcgagaggacggacctccggcgccagctggtggaggaaaggagggaggccaaccaggccatcgccgaggcgcaggctgcgcaggcggaggccaaattggcgcgggtggaggggagtctcgccagccaacgcaccgaggaatgggaggtgcggttcaacgctctgcacggccgcatggagagggccgaggcctctatgcgctcggaagttgagcgggcgcgcaaacagctcgtggactcataccgcgagctgggtgcgcggactgctgacttcgaggtgcccgaccgagaggcgggccttcgcttcctcgagtggctgcaagaggaattgctggcactcccgaccatcgtggagggcttcatgtcctttgcctccctcgtcacctgcgaaggggccatgtacgcgctgtcccgcgaggggtgcaatcactatgagggcttcgaccggtccaacgaagactttgggcgcggaatttttaaggtcgaagaccctgtggtgaaggattccgcgggggccctcttcgatcggatgtggggtcctcatggccgggaggcggtcagggagtggtctgatcggacgagagagcatatggtgcgtgccgaggatgtcgaagaccttggggatctgaacggcgagcggcccaaggccgaggtcaacccggtgctacccgaggctgaggtcaaccctgaagctgctgagggctccgccgctggacctgtgctcactgtgtctggttcaagattttgggcctgcgcacgcaaccactactga

SEQ ID NO: 14411 - DNA, 507 bp, Zea mays
  Peptide Sequence Number=SeqID_57786
atgatcaccagctttgtggtggggagaagcaagccgggctacgacctctgccccgccctcagcttcaaggatgttcatcattcgggctggggaggagggcgcaccgaggtggggcctgcctccgcgtgggtcggtgacccgcttcttcctccagcatttgggggagaagggcatcctccagctctacggaggaggcgtcctccagccatgcgggggaaggtgaactgctgctgcctggccagggtgcagatgtacgtcctccatctggacgatggtcgtgccgtgcgcaggtggctgctgtcgccggtgctgaagcggcagccgccgctagtgaggtttcccaccgcagcggtggttgcttccgccgacgagaccgttagtgccacctgcgatccgggcctccggctctttggctttaatggctggttctcgtcccccgtgaggggacgtgaacgagggccttccagcggtagcatttgccctgaggccatcgctgctgctgtctag

SEQ ID NO: 14412 - DNA, 501 bp, Zea mays
  Peptide Sequence Number=SeqID_57787
atggagggatacactacagaagaagtgattgagagctgtatagattacatcagtgacggaacaatgataggtgtgcctatacctaaacatgagggggtcgagccctggggtcaggcgaggcggagcttcctatggcgcctgaggctggactcggctgctgtcagcctcaccctggcgggtggcacagcagtcgaagcagggcaggcggtgctgttttcctgtcaggcgatccttgcattgaatgctcctgcgatatggtcggttggcgaggcaatctggccaaggttgcttcactgtgaagcctgcccgagctgggcctcgggcgagtcaaaggcttttgtagcttgtgctgatggtgattaccagccgagtttaggagtcttgggggcctccacgctggatgcgttgaagtcgaaagggtgcatccccgtggtgcagttgcatgccgcctgcatggcggccagctcgtatgacgcgtgggacccagcccccgtgtcgtag

SEQ ID NO: 14413 - DNA, 1149 bp, Zea mays
  Peptide Sequence Number=SeqID_57788
atgcattgcgcccttccaccttctgagcccccggatggggagcgcccgcgttgctttcgtcttgctgctgttggaggagcgcaacttcgcagacgttggcacctttcagccatcgctcggcttcaaggattttcatcaggcagcccgactgcatcccctcaccaatggtcacccaggacggtgaccaccagttcgatggtgtggagaagcaagtcgggctgcggcctctgccctgccctcatcttcaaggatcttcatcatccttgctggggcggggggcaagctgagccagagctctacctcccgtacgggctggcgggccacttcttccttcagcattcaggggagaaggcgctcaccggcctagcggagggggcggacttcgacaacgcagggccgatcggccgcaagcgtcgtcagctccagcatgcttggttcgctggctcagctggctctggcgcagcttccggtgccacctcccaccgccgggcggagtgtggctatctgcccaccgtacgggcggctgttgcgccgcgcgcatcgggggaccgcccaagacgtcgcacgctgctagagcggcgttcgtgttcttgggttgtcctgccctcgctccggcacgacgcctccacgtggaggtcggtgctcgcccgtccgggaggacttgagtggggatctaccggtgggcaggtggctgccgtcgttggtgctgaggtggtggcagccggagaaggcttccccaccgacgagactgtcagcgccacccgcggaccgacctccggctctttggctttgatagcttgtcctcgcccctcgagtggggacgcgggcgagggccttgtcgtagcagcgtctgccctgaggtcattgctgctgctgtttagccgcccggagcggaggttgttgtcgccgctgacggagcgggcggcggcgagccaactggagtttgtcgtcccgcaggccctccgatgtggaggttgttcatacccgcgggagtggaaccggagttctgtttgtaatggcaccttgagtgccggtgtctgttcattgtggctgtcggggcctgaacatctaggtattttgggtgcaataccgtgtttcttcctcatttcgagcaccaggactcgcctgtcggctagctggaccgcttaa

SEQ ID NO: 14414 - DNA, 1629 bp, Zea mays
  Peptide Sequence Number=SeqID_57789
atgtcgtggccgtcggaggagcgcttgagccctgtagaagcacagctgtcggggctgtcgggcgagtggggtcgggcgaggcggagaccgtcttccgaggtcgaggttgagtccgagccctggggtcgggcgaggcggagaccgtcttccgaggtcgaggcgggggccgagccctggggtcgggcgaggcggagcttcctatggcgcctgaggctggactcggctgctgtcagcctcaccctggcgggtggcacagcagtcggagcagagcaggcggcgttgttttcctgtcaggcgatccttgcattgaatgctcctgcgatacggtcggttggcgagacgatctggccaaggttgcttcactgcgaagcctgcccgagctgggcctcaggcgagtcaaagagcgtgcctgttctcttctcccttctctgcctcgcctcgtcgcttcgggaccggataatttcattctctcctgtccgtctccgctttggtggatcggccgaaatccttggtgagctacggactgcggttccacttgcaccaaggcccaggccggagccgtggactatcacgcctacgttccgtgggatggactccggcaagagcgccagcctgcagtcgtccagcggcggcgacgacgagttcgactgcagaagcggtgccgactcctcgccgctatccgccctgctccggcagccgccgccgccgccatctgtgccgggcttcggcggcggctccttgatctacggcctccaggagctccgcacgccaccgctgtcccactggtgctcgacgacggcgcccctcccggccggcgcagaggcctcgccgccgtctctgtccggccatggttctatgacggcctaccaggccgacgcagcgccggtccagctggccgcagcggcgccgccgcaggggtccaggaagcgggcgcgggcgtcgcgccgcgcacccaccacggtgctcaccaccgacacctccaacttccgcgccatggtgcaggagttcaccggcatacctgcccctcccttcgccggcgccgcgagcgcacgctctctcttcgaccacatcttccccttgcgcaccgccgccgggaccgggagcctcgccacgctcccgcagtacctccgccgccccttcgcgcagaagctgcacgcgtcgaacccctacccgccgagcttcgcctcgtcctccacgtcctcaccagcgccgaccaacgtctccattgcgcccgcttccaccaccaccccgggcacggcagccgtggcgtccagcgacagctaccaccagctcacagcagcctcaacgtccgctcttctctggatgcagcaagatcacggcagcaacaactaccacccgttccatcagtgctcctccctcggcgacggcaaatacgcggcgcacccagtgttcgaccgcggcataccgtcgccgccgtcgtcctccacgaggctgcaggaccgggcggacttcgtcggtctcacacacgacgtcatggtgggctcccaagggccgaacgtgtacttgcacccgcgcaacggcggcgacgacctgtccagcctggtcgggggcgcgtccgtcaccggggccggcggctgcaagtcgacggctggagcgcaatcggcgtaa

SEQ ID NO: 14415 - DNA, 450 bp, Zea mays
  Peptide Sequence Number=SeqID_57790
atgggtatgggggaatttggtatccgcaggtacggttatggatataataaggtaacgggtatccactggatagcggatacccggtgggtacaggcttggacccttggggatccatcctccaactccgtgaggaacaccgcctctgcaccaaacgataagaagaaaggtgtgcaagctgttgccctggagggtgtagccgttagcgcgctcgacccggtcgttggttcgtgggtgtgccacgacagcccagtcaatgcagatgttgaagttgtcacagaaccagaggaagggttcacctgtgaattgagtcccatcatctattatgatagagttggggactccgaatcgatagacgatgttgcggaagaatgtggtggcctccgacgacttgagtttgatgaatggctttgccttgatccactttgtgaacttgtctaccgcgacgagtag

SEQ ID NO: 14416 - DNA, 240 bp, Zea mays
  Peptide Sequence Number=SeqID_57791
atgggccgacaacaaggagaaattggggaaactgagcacgggtacaagtgtctcacctcagggcggagctcggggtggcttggcgcggtctacagcgagctagatggctggggaggcgggtgcgggtctccagcgaggtctggcggtgtgagtagagtgcgagtgagggcgggagtgcgtgaaatgaggcggggggtggttttcaatccaaattcaattcaagtttcaaattcaaactaa

SEQ ID NO: 14417 - DNA, 753 bp, Zea mays
  Peptide Sequence Number=SeqID_57792
atgaagtgggtagagtgggtagccgctgtcgaggatcgccatcgagagggcgacggccgcgctctcgacggttcggccagcatcagtgctcaccccacggttcttggcctcaagggccagagcagcaactgggtggtcgtcgagttcaggcatccgaacccctccaacgacgactgggtcggcgtcttctctccctcgggtttcagcgaacacggaggaggactgggggccgggaacggagcagtacaagttcatcgatcgaagcagccctggctcgtcttcctcgcgcaccgtgttctcggctactcgtcgggtggctggtacgagacaatgatgggctcgtacggggagccgatgggccgggacgggcttcaagacctctggcagaggtacgatatagcggtcttcggccacatccacggatacgagcgcacgtgccccgtctaccaggcaaaggcaagactgagcttgcatctctgcatcaggcgagatgaacttgtgagacagtgtgccgtactggagcttcttcagggacgccgacacttgatgttcggcaagctcacggccatcaacagctcgttcctcttgtttgagtacaagaagagccgcgacggccatgtgtatgaccgtttcagtctcgcacgactaccgtcacctggtggcctgctccgtcgacagttgcccccgaagcaccttggccgtctgatcgagctccggactctggagacatgtgttgatagatacactgtttga

SEQ ID NO: 14418 - DNA, 2388 bp, Zea mays
  Peptide Sequence Number=SeqID_57793
atggcgcccgaggctggacttagctgctgtcagcctcactctgtcgagtggcacaacagtcggagcgacgcaggcagcgctgtcttcttgtcaggtcggctccgtggcttttgcctgtcctgtggcagcgaatcggagagcggaggggaggggaaagcgcagcaacgccggcgagcgagcgggccgttcgaggatcgcaatgtgagcacgagcaggttggttctgatcccgattcccgagccgcatcctctccccgggtgtcctgatctcgtaatatccctctccccgctctattttatgcaacaaacagcaagttctgcctgcctttttgctgttcattgcgattgccacgggacacacaagatgcttcatcctagctgggtcggtgtctcggcacacgtctcggagtattggtctgtgataatcgccactgttgttttcgcatttgttggcgcggtgacaatttactatacagtcaatcagttgaacaagaacatcagcttgagcctgataagggctatcaaggccagggccaagaggtacaagaaatcgaaggacaaggtgcccgctgcatcccacatctggaggaaagaagttgtctcccgcagcaaaggcctgaaatgctgcgtgtgcttgaagtccgtttcacctcctcagtactctggggggaccatccatcagtgcgatatctgcggggccgctgcgcatccgagctgctcggggaatgcacacaaggattgcaagtgtgtatctatggctggtttgggccatgtgcttcaccagtgggctgtacaatggattgacagcgcggatcactctgaagaagactctttctgttgccactgtgatgaatcttgcaatggagctttccttgcaggctcaccagtttggtactgtatgtggtgtcagcgactggtgcatgttgattgtcacagcagcttggccaaggaaactggtgatatctgtgacttgggaccattgaaacgattgatattatcacctctttgtgttaaggagcttcattggacaggtgctgggattttgagttctatcacaaatggggctaatgaattggcttccagtgtccgagagacaattcggattcgtagtaaaaggtacaaaaggggtagcgcttctgctgattcagatagctctggggctattgagctaccatctgatgctgaaggagattcacaagaagtaaacagcaaagcaaaggtgagggatgatcatgccaattgcaaactcaatgaggtacaccaaagctctgaatcagagaaagataagcaacttgtaccagataacgcagcaacaaccaatatgtcagatgtacaacgtgaaaattctcatgtacagaacaatcagaagtacgaaattatcaatgtgccttctgattctaggccacttctagttttcattaacaagagaagtggggcacagagtggtgattcactgagacagcgtctgcaaattcttcttaatcctgtgcaggttttcgagttgagcaaacagcaaggtccagatgttggtttagctttatttcggaaggtaacccatttcagagttcttgtatgtggtggagatggcactgctggttgggttttggatgccattgagaaacagaagtttgaaaccccgcctcctgtagccatccttccagctggtactggtaatgatcttgcgagggttttatgttggggtggtggccttggtgttattgagaagcggggaggtctattctcagttttgcaagatgtagagcatgctgcagtcactgttcttgacagatggaagatcacaataaaggacaaccaagggaaacttatgagaccaccaaaatttatgaacaactactttggggttggctgtgatgcaaaggttgccttagatatacacaacctgagggaagagaaccctgaacggttttatagccaggactccgaaggtatccttgttgccaatatcaggagttacatgggaggggttgacctttggaagaacgaggatgatgtctctgacacttacctccctcagtccatgcatgacaagaagctggaagttgttagcttcacaggaatgctgcatctcgggaaactgcaggttgggctttctcgtgcaaaaagattagcccaaggccatcatataaaggttgaagtcagtactacaatgccgatccaagttgatggagagccatggtcccaggagccgggaaccatagaggtttctcatcatagccaggccttcatgcttaagagagtctccgaagaaccgctgggtcatgccgcttcggtaatggccgacatcttggaaaacgctgagagcagtggcattatctcagccttgcagaagaggactttgctccaggagatagcgtctaggcttttgtag

SEQ ID NO: 14419 - DNA, 1941 bp, Zea mays
  Peptide Sequence Number=SeqID_57794
atgggtgcgggaatcggagacctggtgcggtcggaggcgtcgaggatgcaggcgacgccggggatggccgggaaggagacctcggacgacgaggcaacggaagggcacgacacgtcgatctcctcggcaccccgcggcgttgccgtcaacgtcgccgtcgcggttgcctcgtccttcctcctcctcctcgccgcgcctctgttccgcgccgtggggccgccgccgccgcccagcaagaggagccgctcgaacgtgtccaccaggtacttgacgcggccctcgccgggctccgggaggccggccatggcctcctccatcgccacgacactcatcgcccgcttccgcgaggcggaggccgcgctgcccctccgccgttcttggcccgccgcctcgctgacccgtgcctcgtcgccagcgcctgccgccggggctgagaacttgctggtcttggtgcaagggtccagcctcctcctgatcgccgtcccgggcgcccgcttcaccgccgccggcgtcttcatggaagagagacaaaccggggacggtccagagcggcacttcctggccgcctcgccgccggcgccaagaaccgcgggccccgcgaccttcccggcgcacgccacgaacctcctccgcaccggccgcgcaaacgaggacggcgcgtcctcgcgctccagccgattctccgcctgcgacggcggcgacaccgccacgggcgcgaacggccgccgcggccgccctctggctctcgtcgccgcagcggccgtcatccccccgatcaaaaagtgcgcaaaccaggaggaaggaagacgaaagcagaagaggtcccgagcgcggcggttgatgagcgggaggcgtccacccggcgtcaccgtgcccccgcccccgccagtccgtcaccatcgcgcggcgccaccaactacgcccgagcccccgcctccacaccccgtccccacgcgcggcgcagcggagctatcagcgcccttccccaggccggcttcaacgctgatggagccatcctcgcctcgaatcctcgctgcagttttcgttccaaagttctcgccccgaatcctcgcccttccccaccgcaccttcggtgtctccaccacaatcaccgcggtggcttcaccgtgtccccgcaatcaccgtggcggccagatccactacctcgccttcctgccgggcgacgtcctcttcatcgcgcaccacctcgccacgctcttcgtcttcctgacctgctgccacctcgtccgccacagcgcctacgctctcctcgtcctcgccgaggtcaccagcctgctgcagaacgctggacgctcgccgggatctagcgggaccagtcccccgccgcggcccgcgtctacagcgccctctcgccgtccttctacgcgctctacacgctcgtcaggggcgtcgccggcccgctcttcctcctcaagatggccgccttctacctgtccagccaggccgtcgacgccatcccgtggtgggtgcggatctcctggatcctggttgtcggcaccgccattgcggtcagcaacctgtggatttggaacctctggaaggagctcatcagggaatggaagcagcaggcccctcccaagtcaaagaaagacacataggccgccacctccaagccgagtgccgagaagtagaaggacaagatctacatcctcatgccggtcatggccagttgcccaccccggcgcctacgctcgagaagccacccatcttggccgcttcggtgcgaggaggcgctaccgtcctcttcctccgatccacctctcctgccaacccgccaggttgccgctgccgagagcgagcggaggcctccctccgccgacgggggaggaagatgctcaccaaatgtgggactaccgcgtgggcaccctcctcatccgcttcgaggagcacaacgggcccgtcaggggcatccagttctag

SEQ ID NO: 14420 - DNA, 1305 bp, Zea mays
  Peptide Sequence Number=SeqID_57795
atgacggccgctgcggcgacgagagccagagggcggccgcggcggccgttcgcgcccgtggcggtgtcgccgccgtcgcaggcggagaatcggctggagcgcgaggacgcgccgtcctcgtttgcgcggccggtgcggaggaggttcgtggcgtgcgccgggaaggtcgcggggcccgcggttcttggcgccggcggcgaggcggccaggaagtgccgctctggaccgtccccggtttgtctctcttccatgaagacgccggcggcggtgaagcgggcgcccgggacggcgatcaggaggaggctggacccttgcaccaagaccagcaagttctcagccccggcggcaggcgctggcgacgaggcacgggtcagcgaggcggcgggccaagaacggcggaggggcagcgcggcctccgcctcgcggaagcgggcgatgagtgtcgtggcgatggaggaggccatggccggcctcccggagcccggcgagggccgcgtcaagtacctggtggacacgttcgagcggctcctcttgctgggcggcggcggcggccccacggcgcggaacagaggcgcggcgaggaggaggaggaaggacgaggcaaccgcgacggcgacgttgacggcaacgccgcggggtgccgaggagatcgacgtgtcgtgcccttccgttgcctcgtcgtccgaggtctccttcccggccatccccggcgtcgcctgcatcctcgacgcctccgaccgcaccaggatcaaccatgcacggggccaacggcggcagagggcatacaacagcaccgcgggatcgtcggacagggcatggagctgcagcaggaaggtgacacgggtgacaacaacacagcagccgttccgtctcaggaccgagcaaagaggaaaagccaaggaagggagtttcgtcgagaggttgaggaagatgcagcaagaggaggagaggctgcgcaacccactcgcgcaaggtttaccctacagcactgatgaaccagagatccccatgaaacctccaacgaaggaacccaccgaaccgatcgaccatgtgctgcacagcgaagtgcgtgtggccagacgcgccaagttcgacagccaagcggatgaggagattgagatcaagtacatgaggaagcagcaggttccaagagcacatccgatgccggacttctccaagccatttgtgccgaaaaggtcagtgaagcttcctacaatcggcagggagccaagatttcaccccaggttgatgaggcgcatctcgacggccgaatgctctttgaaaatgctggccagtagaaagtag

SEQ ID NO: 14421 - DNA, 548 bp, Zea mays
  Peptide Sequence Number=SeqID_57796
atgagcatagtgcacgcggcagtatgggtgtgtcgcctgccagtggaatggcaggcacgccgcctgtggaatggacaggtcgccgcctgccagaggaatgaacagaggccttacgtcaggctccgcccgttggcttacgtcacgtgcagtaggccacgcggcagcatcgggtctccgcctgggcggagagcagaagcgtatacgataaggtctagacacgtgtcggctccgaacccccgcctggccttgattaaggcctgggtattctctgtcctagaatcccgggaccctgctgtgagcggcccggaccccacacagaggggtttggatcccatcctaggggtccggtttgcgcccatggaggtcctgtaccttatccggaggcccagtgtgtatatacaggggtccggcacttccccatgggggtccagactcactgttgataccttggagcatatcatcttctctggccacgtggtggccccggagccatccacgtggaggggtcgggtgctcttgctggcccagagtagtcactcgaagctggg

SEQ ID NO: 14422 - DNA, 234 bp, Zea mays
  Peptide Sequence Number=SeqID_57797
atggcggtgccgtctcgggctgccaccatcgcggcggcgtctcgagctgctgctgctgctcctttagtttgtcacaacagaaaggaggttggcagatttagagatctttcaagactgttgcgtcgggcattctatactaccggttcaaagaaggaccactcaaaacccaagattgcatggaccaaaaagaccaccacgttttgttattcatcctacccaaccttttataactaa

SEQ ID NO: 14423 - DNA, 1455 bp, Zea mays
  Peptide Sequence Number=SeqID_57798
atggagacaaaagcaattttctgcaacctgcaaaatgaaggggcaagcagctgggtgggaagtcctcttttagtgatccggtccgcatttcaagaacggttctttactgcaagccaaatggagagcttgcagcaaagaggagcccaggacttccaaattcgtttccatggagcaaagcggatggaactaaggaaaaaggctgcagcacgtgtaatccgcatcggttcaagaacagatttcatgcttggtgatattttgcatcctgcgataaattgggctgataaagagtctcatctggatcctgatgaaatggccaagatgaagtctgcttttattggtaacctgccagaagatgttaatgaggagtacttgagaaagctttttggacagttcggtgaggtagtacgggttgctatctcaagaaaaggacaatgtccagttgcttttgttcacttcgccaaacgttcagagcttgagaatgctatagaagaaatggatggtaaaacggtgtcagttgctcgacctacggcagacaacgacaagaagcgatctcgtgaagaagtgagaactagaagatcaaatgcatcaggagataggcgagattattctcatggaagatatggacacgattcacttgatcgtcaagtgaaagctccaagattatctaattatgtggccgatgctgctgacccctatgaatcagctgttaattcattaccttcagctgtcaaggaagtcttgcttcgaattctacgtctaagaattggtactcgatatgatattgatatccattgtgttaaaagccttgatgagcttcctgagtcatctgctcttgctgtccttaatcagcaccaggctgagacctttggcttaacacatgcattacacggtaccacttatttgtcaagaaatccggaaatgcatagcaagcgatacccacatgaagattatgattttgtgacacccaggagcagtaggtacgattcgtcagcccatcatccttcaacatactacgaagacgatccaccagtgtctgagtcaagggttagaagatatgctgaagaaaggtccaccattgtaagaagcccagaaccacgtccgcgatatgacgaaacagacataagaataaacccagaaccaagattaccatatgaatcaagacacaacgccgaaaagcatctcgatcgaagatacatacaagagcatagttcaaatattgaaagaccagctgaagaagctctcctttctagggaaaggagatttctgcctgctgcagggtacatgccgaacccaggcggctcggatttccgctccaggtcgcccgccgaatattcagcacaacgccaacaaatgaggtttgatccattcacaggtgaaccttacaagtttgatcccttcacaggggagcccatcaggccagatccgaaccagcgccgctcaggaagcctgtactga

SEQ ID NO: 14424 - DNA, 159 bp, Zea mays
  Peptide Sequence Number=SeqID_57799
atgatgattgagagctcactggcactgctgctgatcgagtccttcaagcaaccacttactccttgcatggatatatgtcctaggccccagaaccctagcagaacggttctctgggaaaggaaatgggttggttatgctgtcaccagggctaacgcctaa

SEQ ID NO: 14425 - DNA, 891 bp, Zea mays
  Peptide Sequence Number=SeqID_57800
atgcaggcgacatgcaactgcaccacggggacacaccctttcgacttcaacacatccagcgtggaggcccaggcccacacgtcatccgcgggagaaggcacgacggtcgatattgccaaaagtgggccggcagtaatggcggcagaggacggacggaagcagcagtcaaattgtctgcaggctcacgtcccctcctggggcagcaggggagccctctcccacggcgtgaagacgacacgcccgtgttccgtccctcgaacggctcacacaacggctgccctgcgaaccactcgtcctgtcgcattgactccgtggcagggcaggcgacacctttggcaggcgaagcgggcgatgcttcacctccgccataatgaccgcgtcaaaaaagggaccgggaaaggggatactccgaaagggatccttccccgcgaaggaagcgggcctcaagccctcctactgatcagaggttcgaaggctggcccctcggaagggttcgacagccgcctcagagcactcgggctccgcgcccactattggtcagaggttcgaaggctggcccctcgaacgggttcgacagccgcctcaggccactcgggctccgcgcccactactgatcaggggttcgaaggctggccccacgaagggttcgacagtcgcctcagaacacgtagagcgagggatgactctgggtacgtccgatacatgtctgaggctcgggctacgctcccgagtgtccggtgcgccaacggctctgaatctccaacggtcggcttcgccaaagaaggaaagaaatccgcaccggacagtgtccggtggtgcacaggactgtccagtgcgccaggtgacagaaggcaggaattgccttcctggaatgctctcaacggctcctag

SEQ ID NO: 14426 - DNA, 72 bp, Zea mays
  Peptide Sequence Number=SeqID_57801
atggccgccgccgcggttgctactgcaccgccgctcggtctgcgctggggtacatgggcggagttccaataa

SEQ ID NO: 14427 - DNA, 303 bp, Zea mays
  Peptide Sequence Number=SeqID_57802
atgcccgcccacgcgcccaaccctcttcttatagccccgctggtgccccacacacacccctcacctcatttcgcacaccctcaccctctctcgcgctctgccctcgccgccagccgccgtcggagacccgcgctcgtgttcctgaccatccagctcgtcggagaccgccccaagcctccccgagctccgcctcgagacaacgagcagtctgaggttcctatgtgtgttgttggagacctccctgagcaacaacctggtgaaggcaagtgttctctgacccattatgtcctacatactttatga

SEQ ID NO: 14428 - DNA, 360 bp, Zea mays
  Peptide Sequence Number=SeqID_57803
atggccagaatcgctcaccggagttactccggcacgcccgagaccatctcactgccgttgtaccctctctgcgcgtggattcatggcctcttccccgccattgagttcgtcgtggcgccctctccctctctgcccaactccggcgaccccagagccaccctagctcacgccagccttagctcgagtgacctcaccgtcgtggagaggagcggcgccgcccgcagccatctgttttcccgtgacaacgagcagtccaaggttcctgggtatgttgttggagacctccctgagcaacaacctggaggtgaagctggcaacatggatgacttcgaggagttccaggaatatgacgagttctag

SEQ ID NO: 14429 - DNA, 414 bp, Zea mays
  Peptide Sequence Number=SeqID_57804
atggatacagtatcaaagtttctggttgccaacgcgagccaggcaaaactgccctccggcgctgctgatccaaaagtcaacgcgtggaaaataaaaacggacgggagaaacgctatgccaggcgccaccaatggctgtgccgttgaacaagaaggagaccccgttacgctgtccgacagtgggtccacgcgtcgtccttggtttgcacgcgctcttctggggagtgaggacggggtcttcgctgtccagtcaactcttggacacaacaacaggccacagcggcacggatatcccaacggcacagccccaaacgggccaaccgtccctgaacgcgaaagcgaccgctcatcgactgcttttgaccggctttgtggtcatgggccccatgcacccaaacccgacacgatactttaa

SEQ ID NO: 14430 - DNA, 936 bp, Zea mays
  Peptide Sequence Number=SeqID_57805
atggcggtggacctcatgtcctgcggcggcggggcgtacgagcaactggcgttccaggaggcagccgcggcggggctccgcagcctggagttgctcgcttcctcgctctccccgtgcggcgcggggcgggcggagtcgccgccgctcgggcagatcgccgaccaggcggtgtcccggttccggcgcgtcatcaacctgctggaccgcacggggcacgcccgcttccgccgcgcgcccgccgtcgccgcggtggagcccatagagacggagacgccagcgtcacagcaggcggcggcggagccgcctcatcaggctcagaacaaagccctgacgctggacttcgccaagtctgtcccgccggcagcgaacaagaaggccccgcgggcgccggccgtgtccgcgacttcgacctcgttcctgtcgtccgtgaccgcgggcggcgaagggagcgtgtccaaggggtgcagcctcgccgccgtgtcctcgggcaagccgcctctcccgaagcgcacgtcgccgtgccccgccgctgctccgccgggggcgcaccacgccgagtccggcgctggaggttgccactgctcgaagaagaagcgcagccggcagggcctgtcccggcgcacggtgcgcctacccgcggccgcggcaacgccggggtcgcagccgcccggccacgtgccggcgtcgtcggacgtaccccacgacgagtactcgtggcgcaagtacgggcagaagcccatcaaggggtccccttacccgcgcggctactaccggtgcagcagcgccaagggttgccccgcgcggaagcacgtggagcgcgccgccgacgacccggccgtgctcgtcgtcacctacgagggcgaccaccgccacgacggcgacggcgacggcgacggcggcgttggcgctggcgctgcccgctcccgcgcggcgtga

SEQ ID NO: 14431 - DNA, 387 bp, Zea mays
  Peptide Sequence Number=SeqID_57806
atgggcaagaacaacaaacgcaagcgcgagccgactcctccatcagaggactttggcgactcggaatactcagaggaggagttctcctctgagtccgaggggtctccagctcccgtctggacttacatccgggccgtcgagcgctccgggctcgagggctcggatgagtcggagtactcctcggacgaggaggactcgcccgaggaggacggcgaaggtgacgacgacgacggaggcgacgacagcgatgatggtgatggcggcagcaggggcggcaacggcggcagcaggagcggcaacggcggcagaaggggcggcgacggcggcagcagcaggggcagcggcggcggcggcagcagcaagggcagcaacaaggccagtggctaa

SEQ ID NO: 14432 - DNA, 318 bp, Zea mays
  Peptide Sequence Number=SeqID_57807
atgagacgacctcgtcacaggccttcgtccggtgacgtatgggacgaagggttagtctgcccgttgtcttgtctccgttggtgcaacgaggacggcgaaggcatcgagcgaagggtggcgacaacggtgtctaccacagtgcctgtggcgaagggtggcgctctcagcgctggcggtgatatttcggcgctcgctgccgtcaaggacgaggcgggcgctgtgtcccgccggctgaaggaggcgtctcagcggctaagtcaggcggctgacttcgctgaccgcgtggctgtgatacccaattttctgaaaagaagttaa

SEQ ID NO: 14433 - DNA, 543 bp, Zea mays
  Peptide Sequence Number=SeqID_57808
atgtggcaggacgccaagaaaagcttcgcacagatgaacataaatggaaatttgcagaatggaattgggattcagatgggtcaaattaagacgataaaaatcaaggaggccgcggaaaaagggagaaatgggaagaccgagaccgcggagaagaaaaggaacataaattacggattcgtgggtatcctctgtcgggacagtgaccccatggcaaatccgccaagaacaaagctccctcgggggaaggaccccgatggatacgaggtggagaaggtcaggcttggagacaacagacatatgagaggatctggaggcaggaaagcaagaactagggcacagaaagcagaggcggctaaaaagcgcagtgcatatgggatattcccgagtcagataccgtttccaaaagcgcccagtcagcacccggcagttacttctaaaacaccggcgtgccacgttgtcacccggcggttacttctaaaacccctgcgggccacatcatcactcggctattatcctcaaagtggccgacacgacccgttctaa

SEQ ID NO: 14434 - DNA, 228 bp, Zea mays
  Peptide Sequence Number=SeqID_57809
atggcggagccagagcatcgacgagtctcttccgagcaacagaatgcagtagcatttaaattgatggcgtgggagagtgggtcggcgtgcaaggtgtccacggcggcgttccagggcgacgatgctgtgttctcggagctctgcggtggtagtgttcaaccgatcgacatagtgagcaaccagagactaaaggcatgccaaaacaaggattatatgggtatgaactaa

SEQ ID NO: 14435 - DNA, 456 bp, Zea mays
  Peptide Sequence Number=SeqID_57810
atgagcttgacacaacttaaagggaagtgcattgctcaaccttctcaagataaccgtgatcacatggtgaagaagcttgagacaaccgtggcatgcactaaatcccttgaagaaaatgtcaaggacttgaggagtgccaagaggagggaacaaaataagaaaatcaatacctcttccaaaagcctcaatcatgcctacataaaaggtaacgtccaagagaataagcgcatgatcaactcactaaaagacacaagcatcaaagggttactttttgcccgaaggaagaaagtttggaaggaaaaaggagttaactatgaagggaggacatttaaagggaaaaaggaagacattaagagcaacaacacctacttgaaaaatgagatcttcaaaaacaatggtgtggttgattgtagctttcattatcaaagtagcatatttactgggttatcctattaa

SEQ ID NO: 14436 - DNA, 285 bp, Zea mays
  Peptide Sequence Number=SeqID_57811
atggccttgttcagccaaagccagctctgtctgggtgcaccggacagtgtccggtggtgcaccggacagtgtccggtgtgccagactggctcaggcgaacttgctgctcttgggaagaaattaacggcgtacagctataattcaccggaatgtccggcgacagaaggcaagaaatgccttcctggaatgctctcaacggctcctagctgccttggggctataaaagggacccctaggcgcatggaggagtacaccaagcattctctaagcattcctaagcactaa

SEQ ID NO: 14437 - DNA, 981 bp, Zea mays
  Peptide Sequence Number=SeqID_57812
atggcggccttctcatccagcaacggcgtgccgccgggcttccggttccaccccaccgatgaggagctgctgctatactacctcaagaagaaggtcgggtttgagaagttcgacctcgaggtcatcagggaggtcgacctcaacaagatcgagccgtgggacctgcaagagaggtgccggatcgggtcggcgccgcagaacgagtggtacttcttcagccacaaggaccgcaagtacccgacggggtccaggacgaaccgcgccaccacggccggcttctggaaggccacgggccgggacaagtgcatccgcaccagctaccgcaagatcggcatgcgaaagacactcgtcttctaccgcggccgcgcccctcacggccagaagtccgactggatcatgcacgagtaccgcctcgaggacgccgacgacgcccagggcggcaccagcgaggacggatgggtggtgtgccgcgtgttcaagaagaagtgcttcttcaagattggcgggggcgaagggagcaccagccagagcgcggacgctggcggccacctggctgtgtcgccgccgctcggcggacaccacgaccagcaggccagggccgcgctggcgtacatgcacccgcacccgtactaccaccacgcctcctcctactactcccagatgcacgcgccggggccgcacgccgccgcgtactcgcaccacgtgcaggtccaggacctcctcaccaaccaccggcccacggacgacggcgccggcacaagctatgacttctccggactgccggtcgagcatcaccccggcggcggccttgacgtcggcaccagcgacggcgtcgccacggatggcggcgagaccaccggtacagccgcagagcagtggcaggcgatggatggtttcagcaacggcgggagcgcggcggtgcagcaaatgaccggcgcccaacgaggtggggagatggatttatggggttacgggaggtaa

SEQ ID NO: 14438 - DNA, 150 bp, Zea mays
  Peptide Sequence Number=SeqID_57813
atggtggctgcctgctggctggtctcagcttgcttcttgtgccacatgcttgcttgctgcccctggttccaggccccggcctcagttttaaacctgctagtttggaaaagtgtcaatggatgcatgcttcagaaatacaagggactctag

SEQ ID NO: 14439 - DNA, 135 bp, Zea mays
  Peptide Sequence Number=SeqID_57814
atggggctcagtgtatgcggctcgctctgccaaggtggtgacaaggatgatggttttgactatggtaatggtaaagaagaaggtgtcaaggcggatctccaggagttccaggacttcgacgagttcgaggattag

SEQ ID NO: 14440 - DNA, 342 bp, Zea mays
  Peptide Sequence Number=SeqID_57815
atgggggacgccgaccgagcacgggcgagccacgcagggcatggggcgagccactggctgcagcaccgggcatgccacgggctggtcgtgcaggctgccacgccgggcaagccgcgggcagagccgcgctggctaccgcgggcagagccggccacgcaggttgccgtgggcgagccgagggaaggcgagccgcgtgccgcgcaggccactgcaagtgggctggccgcgcaccgcgcgccgcgccggggtgccacggctggaccaggaagggggtgcgagggagcagtgccgcgatgggactcgcgccaggctgcgggcaagccgggcccgcgcagctcatga

SEQ ID NO: 14441 - DNA, 534 bp, Zea mays
  Peptide Sequence Number=SeqID_57816
atgggcaatctcccacaggaagatgaccggcgcatcgttagacttagaactcatcgtcgaaatctccatcaaagtctccagcatcaccctctgatcaaaatattagcaaggttttctctagattataagtttttacaagtgccaaaggttcacaataaaccaataaaaagaccaagaaaaggttcaaacaaagagagcaaaagtcaaccgaagtgtgtcctggtctggcgcactggactgtccggtgtgccaccagacagtgtccggtgcaccagggaactcaactcagaactgctcaccttcgggaattctgggagccgctccgctataattcaccggactgtccggtgtagcaccagactgtccggtgtgccagcggagcaacgtctactttgcgccaacggtcgtctgcagagagcagttaatgcgctacagtgcgcccagaagtcagagcagagccagaaggcgcaccggacagtgaacagtgactgtccggtggtccagaagacagaagctccaacggtcgaaccctaa

SEQ ID NO: 14442 - DNA, 465 bp, Zea mays
  Peptide Sequence Number=SeqID_57817
atgaaggggcgcactaccacaggcggtatcatgctctttacgcggcggactggtccgctgcttttggcggagatgaaggggcgcatttaccgtgggcggtggcgtgctcctcccgcggcggactggtccgctgcttttggcacagaagaagagaggccaacgcccgaagagtatgactcatgggcccgggcctccgcgctagagactaggtcgttggtcgcggcggaggtgaagaggcgtgtcatcacgggtcaacagtacgctccttgcgcggcggttcgccttcttcgcacacggaggctgacgcccaaggagtatgactcgtgggcccgggcccccgtgccagagactgggtcaccttggtgcgcgtcgaccgaggtcttctgtggcgcttcggggcgacgatgggggaatccttgtttaaaaagtgaaagggaattaggcttacacctttttcctaattga

SEQ ID NO: 14443 - DNA, 852 bp, Zea mays
  Peptide Sequence Number=SeqID_57818
atggccttgctagaccctccagggcgcctccagcccgaggtggcactcaacttggtgtgcaactcgctcggatggggtgtactggcgtttaccggaaggatccgtgtcggtgtctctcctcacggtgaccttgctgctggagagtttgtgttcttcgtctccaaactccccagcgggttggggctgccgaacccgtctttcttcgtgctgctgccggaggggcttggcctccagcctctacacgttacgccctgcttcatccttcaagcgaccatcatcgcctacctccgagggatgttcgtggaggcgacgctccttcccgcttcttcctccagcattgggggggaaggatgttcaccagccttgtccgccacacccacagcaccccctgcgccgccggccaccgcagaccacgctgctccgacgccgcccggggagtcgtacaagacatcgtacgctgtggaggtggcgggcgcgttcttggatggtcttgtcctcacccccatactaggacacccgtcgcagagtggtggagcgtgcaggcttacggtatgggaccaggctaagcgactacacggctccggaccaccccaggagacaagccaacatgccgggtttatgagggcggacctcaccgggctagcgtacacgtatgcgcaacctggttacaaaagggagaaaaactcaaccctcaggcttgctcctatggacagaacttacagagatgctccagagagactggacccgtggggagtccagaagggtttccaggggaagacaggcttcggctccatagaccggggagtacggggtccccctggtggcccgtctagctgtcgccaccggagttag

SEQ ID NO: 14444 - DNA, 1269 bp, Zea mays
  Peptide Sequence Number=SeqID_57819
atggatggcaagcagaaaggaagattgcgctgcgcctataaaggaacaaccagatataaccagaaacacttgcactgccttagggttcgtaattgctcggccacgaggatttacctccacaacgtcgttccgttgctgcgaaggatcgcctccctgcgcacaaactcacacagagcgacaccagttttagcaatccccagcctaaccaagcccgaagtcgggcagccgacaaatccgactctgactggttaccccgaggagtttgaggagcgggcacaggaacgacataacgctgccgctagtggtagaggtggtttcagttccggacgcccccgcgctgggagggcgcgctcggacgagggatcggacgcggcggcgattgggaaggtaagctcgactcggagcgggagggaggtggagatggctgcagccggcggagtgtgcgagcggcagcatggcagccagcgctggtttgagggcgccctggagctgggagtcggcgtgagcgtgaccactggcacccggcgtgtggcggccgtcgcgggaggcggacgggcagttcggctggctctgtggaccaggccactgagtcgtcgtggccccctctcggaccagcgcaatgggctttttggtcgcaaactcgcaaagaattggcggcccaggatacccgactgcgggcacggtgcatgtgcagctatctctggccgcgtgatgaacaacacccgactccaccgcatgagcggtcccaaggacgtcacacctccgagtacagttcaggactcccaagtgagcaagccggaccccttggatgaggcccggacccctctgagtgaggcgaaggtccagtacagacacgtgcccaggctttatctagtgcgcttccactccccgctcaggcggaggcccgatgctgccacgtggactatcgcccgtgacgtaagccagtggacggagcctgacgtaaggcctctggaccgcgctgccacaacatttattgtggaaaagacgcgccgcctgtctatcccgctgacaggcgatgtgccccctcggtatttaatgtgtcctgtgcactcggctggcaagcgtcgtccaggccatcctacaggcggcgtgcctgtccagtccattgtcaaacagtacgcccgtgctgcgaggtgtactgtgtccatcatcacctatacgttaccagggaagcttcccctgcacgccgatactacgcagatctcggatgtcagggcgcaagaagattgccccagcaacgaacattag

SEQ ID NO: 14445 - DNA, 261 bp, Zea mays
  Peptide Sequence Number=SeqID_57820
atggttcagattgtcgagcaccgcgacttggttcccgaggacttcctgatggaggaagagaccacatcttccatgccacaaagctccaaccgccctgcgaccggtgctgctgctatgcacgctgctcagcagcacacgcatgtgcagacatctagggctccgtcaagggctgctccaggggcgttgtctgcagccagagagttgctgcgcaagccccccaagttccacggcctcgccgggggccatgaggcagtggcgtga

SEQ ID NO: 14446 - DNA, 492 bp, Zea mays
  Peptide Sequence Number=SeqID_57821
atggtctacacaccaccaaaacagcaggaatcaacgcgagctgtcagaagcgtctatcagaagcaagttaaattcacctccttttttggtcctaggattaaggcagaaattggttatcctgattatgtgcttaaagagggtgaaggaggcacaattgtttttggcatgtcatccctcctcatattttcacctcaagaacttgactatctaatatgtggccaacaagaaatttgggagtctagaatacctggtgcagttacatggatgttaggatataagattgctatagttttatccaagaaattcaagcacataatgagggaactacaaggggctatacttgttggttcagtattccagataatattaggatacactggtcttatttcactgtttctgaggttaataaatccagtggtggtggcaccaactattgctgcagtgggtttggcatttttagttatggtttccctcaggcttgcagctgtgtag

SEQ ID NO: 14447 - DNA, 639 bp, Zea mays
  Peptide Sequence Number=SeqID_57822
atgcgtgggaaggggatcgcgggggctgcggcagggaagcggatgcgcagggacgagtgcgggagggacgtgggatgcgtcaggggcgttggatgcgggttggacgttctggatgcggcagaacgtgcaccacagttggctgtgaacgcctacaatagaaaattcgaagtttctatcgtgatttcgtttccggtggaatacatgaaatggtttcaaaccggaaagccgaaaggttatgacgaggctagggtcttccagggaaccttgggatttgtctcttccacgcgcatggattttcggaaaagctactacgcatttcgatcagcatccacggagtttattatgtatggatgggccgtggattttatagaacgcatgggacggagtttgaaagcatttgtaattctgaactgggactggatgaatccgaaagcgattgacgctttgctatggcgaggaaagatgggaggccggcgctgccacgcgaactctgaaaggagcccgacggatgatgatagggtatcgcgggagtcgaggatcggtggtccattcttgtttcttctgttgactttgtaccgccatgccatgccatgcggcccgtctcgatctgatcggggtagcctagcccctcgaaaatag

SEQ ID NO: 14448 - DNA, 318 bp, Zea mays
  Peptide Sequence Number=SeqID_57823
atgggttctatatgtgtgctactaacacttcaaggccgaagctgtgtgcaggtccaggtccccgtccagagcaggatcccgctggaagcgctcggccaacagctccacggcgtcttgtacgccctcccgggcggcgtcttcagcagcggctaccggaccagcgatcatcggctccaaggatatggccgggtcgtgactacggaagcacgtcaagatatattcgatcaccgcccggcagagcctgccgccctctgcctccaggcgggctccaagaatcttgtccaggcatcggagacgatcgacggcggagttcagtag

SEQ ID NO: 14449 - DNA, 252 bp, Zea mays
  Peptide Sequence Number=SeqID_57824
atggaccgcgtccccccgactcccacgattcacgcgggcgcgcccgaccccacgcatcagccctttcttcacgcgcgcgcccttgactccgcggtcgctgccgtgtgggccatcgataggattgggcagcaccgccccgaattgccgcagccaaccccattcgtgcgctggcggatactcaccgcgatagcgttctgccgggagctcgactgcgcgcgtgggcaggaatccgtggagcctaatcaccggtaa

SEQ ID NO: 14450 - DNA, 294 bp, Zea mays
  Peptide Sequence Number=SeqID_57825
atggagtcttggtgcttagaaatgatcaaggaatgcttgggtgtctcctccatgcgcctaggggcctcttttatagccccaaggcagctaggagccgttggaggcaatctgggaaggcaattcttgccttctgttgggtggcgcaccagacagtctggtgcaccaccggacagttctcaagtggtagctgatccatttgctttggccttaatttctccccctttggcattaagcaccaaaacgggatcattattggccctcaaaccccattgccttaccaaaatcgtcaattaa

SEQ ID NO: 14451 - DNA, 447 bp, Zea mays
  Peptide Sequence Number=SeqID_57826
atggccgatgttcaccttggcacggacgtaggaatagagtgcgcgccggggatggtgaggcaaggatcgaagaacgtcggcacacggtgcgggacgaaccacggtggccggggcgcgcgaccgcgaggtgctccggtgacggcggtcgagggaaacggtgtggcgggcgcacgcctgcgtgtggcgcgggcgtgggtggtgggtggttcggacggtgctggttgcgagggacgagacggggtgttggttcctattttggggcgacgtgcgcagggtggacgcacgacgcgcgcagacggactgcatggggcacggcggcggctggtggagggcacgcaggcgcgctgcgggagtgcggcggccgagcgcggctgctgggcctgggcgagcacgctagggtttgggaggtgggtcgcacgctgcggggtgggccacgcgatgggctag

SEQ ID NO: 14452 - DNA, 50 bp, Zea mays
  Peptide Sequence Number=SeqID_57827
atggcgacgcacgaggtgcgaggttcgagcggcgtcacggaaggcgcaag

SEQ ID NO: 14453 - DNA, 129 bp, Zea mays
  Peptide Sequence Number=SeqID_57828
atgggaaccaatgggcatctcgacctcgacatgggaggtaaattcatagatcaaaagatattatgctttccgtatgtatgtgtgcaagattccaagccgatcctaaggaagttcaccttagggccgtga

SEQ ID NO: 14454 - DNA, 636 bp, Zea mays
  Peptide Sequence Number=SeqID_57829
atgtcttcgcgcttccttatgcatcgtgtctttccaccttccaagcccccggatgggggatacccgccgtctttccgcctcgtcgttggaggaacgcaactccgcgggagttggtacctttcagccatcgctcggcttcaaggattttcatcagccagcccggctgttcccctccgctggcggtcacccgagacggtgaccaccagcccctgggtggggagaagcaagccaggatgcgatcttggtcccaccctcagcttcaaggatgttcatcatcctcgctggggtggaggccgggctgagctggagctctacctcccgcgcgggttcgtgggtcggcctctccttcggcgttcgagggagagggcgctcactggccctgcgggcgggtcggacttcgacaacgcggggctggtcgacggcgggcgtcgtcagcctcagcgcgtcaggctcgtcggcttggctcccggtgccccctcctgccggaaggcggctgccgcgccgtgtgcacgggaggaccgcccaagatatcgcgcgctgccatggcggcgttcgtgttctggggcggtcctgcctttgcaccggtacggcgccttcgcgcggaggtcggtgccccactcgtccgggaggatctga

SEQ ID NO: 14455 - DNA, 336 bp, Zea mays
  Peptide Sequence Number=SeqID_57830
atggaggcccaggcccacgcgtcatgcaaccggcgcgccgaatgcttcgtgcatgcagctgcaccgccacttgcgccaccaccgcgcctcctcgactgcggaaccaataccgcgactcgaggcgacccagcgcacgacccagcagcgccagcctggcgcgacagtcaatgcggccaaaaatgggccgacaacaacgcgcccgtgttccgttcctcgaacggctcgcgcacgtgcaacggccgccccgcgaaccactcgccccgtcgcattaactccgcggcgggacaggaggcgcctctggcaggagaagcgagcgacgcttcgccttcgcagtaa

SEQ ID NO: 14456 - DNA, 1467 bp, Zea mays
  Peptide Sequence Number=SeqID_57831
atgacgtctagcccacgatctcggcaggaggaagatgtcctggaggaggtcgtcgctcagcgtgatttagctgaaacttcatcctcagtagctcatccattaaaagagaacgatcatgcccacaagagacaatcgatccccatctcaaagtttgtgacaggactttcaccaaaatcctcgcttgttttctgtatctcgttattgtttgcttctgcatatggttctgatagatcagatgaccgtatggacggctgcacatttgcgtcaaacaatgccgccggcggctcccttccacccagccgctgcctgccatcgctgcccccgggaggcccaaccttcgctcccgggggcagcctcccagctccacaaccgccactcctcgtcctgctctccgccaccaactccctcgcccagtccccggcgaccgcgctggccaaggcaccacccaagtcctccaaggccatgccggccgcctcgccggccgacgcgtccgcgtccaccccagccgtcgtgcccgcgcccgccaccaaggccgccgccccggccccggccaccctgctctcgtcgctgcgccattcgccgtcccgccggacctgctcctgttcggcctcttcttccccctccccttcctgtctctgcgcgacaggtggggcaggacgctcgcaccgcgagccagccctccacgcaggcgtcgtggaacccgtggccacacaccaggagcacgcggacgcgctcgccgccttccagctcggacaggcagatggcgccctccacatcttctctgttctagcgcaggggagtagcggcaacaactttcgcatggccccaccccttccccagctccctctatttcccatggtggggctcggccaggcctgcgcccctccccagtgcgctgccctcccctggcggccactccccgccactgccggccactgccggccgtgcccggcggccccttctcggcgtccgcgccgccacgcgtcttcttctcctcgcgcgtgctttgcaaccaccacagtgctgccatcgccgggcctagtgcaacctcgacccttcgagcttctcccgtcaccggtgccgtcaacaccccttgctaggtccggcgcaggcccttgcccgactggacccgccccgccgcccatccccttcatcgccttcgttggatccgtcgctgtcgcggccttcccggccggatccacgttgctgcgacctttccggctcgatccgccgtccctttggctggatcgcgtcttcccggcaggatccgtcgctgccgcggccttcccggcatctaggggctatcgtcttcttggagcacacaccggtctctgctccagccgcaacattggcaccatcacgacgctgcgcctgcggggggatttcaacacgtcggctcttaccttcggcctctactccagtctcatcgtgtgtggtgcccccgttgcgactgcggggggatgttag

SEQ ID NO: 14457 - DNA, 981 bp, Zea mays
  Peptide Sequence Number=SeqID_57832
atggcgtgcgtcgccgcgctcttcgcctccccggcgctcctccccttcccctccaccacctcgtccatggcctcctgctcgtgccgcctccgccccgccgtcgtcgcccgcgcgccgcgccagcagccgcggggccggcgcgcgctccggcgcttcgatgaggtggaaggggtgtcgaagaaacggcgcggcatcggaggcggtggcggcgtcggcgctggcgggtcgcagccgtcgtcctcgcgcagggatagggggctttccgtcgatttcaaggagccgcaggttgctgagtttgatgatcttgaagaggacaaattccttaatgctgtcgtcaaggtcaaagtaaagagaaggggagatgacaaaaaatatattgccaaggttttagctaggggtgttgaatgcgatcttgcgttgctatctgttgagaatgaagagttctggagaggaacagaggcacttcattttggtcgtttgccatgccttcaggaaacagtgggggaccagcctttaatgatcaaggggagtgcattggtgtggcatttcagatactttccactccacattttagcaatatttcctagtttacgctttttaagtgtcccttcagtcctctcacttcagtacttcaccatcaagaagtcagatgaagctgaaaatattggatatgttattccaactacagttgtatcccatttcttaaatgactatcagaaaaatggaaagtacacaggatttccatgtttgggtgtcttacttcagaaattggaaaatccggcattgcgtgaaagcttaaaagtaccttcaagcgagggtgttcttgttcgtcgggtggaacctactgctccagcaagcagtgttttgcgaaagggagatgtaattgttagctttgatggtatcgcagtaggatgtgaagcaacagtaccatttcggtccacagaacggattgctttccgctatctcacaagccaaaagtaa

SEQ ID NO: 14458 - DNA, 327 bp, Zea mays
  Peptide Sequence Number=SeqID_57833
atgaagatgccatccgagcgtccagcgagcggtcgcggactccaggcgtccgggcagcagcggctgacgggctctaccgtctctgcgtgcgggcgagcagtggtcctgggactccgggtccggctctgcgtctggggcttcgggcgagcggcggtccggggagaggggtcgatcggtggtggcttccctgagaagaaaccgggcggcgatggtcctatgcgtcatcattatgtctacgccgacccctggcctcctagcctggggttcggcacaacccgtggtgtagtgccctgcgggaggtctgcgtactcaggcctagtccgatag

SEQ ID NO: 14459 - DNA, 1836 bp, Zea mays
  Peptide Sequence Number=SeqID_57834
atgagagatgtgtggtccccgcccctcagctacgcccacctcagcggcctcctcgcgcgctgcggccgcgctggggacctccgcctcggcacctcgctgcacgccatcgtcgccaagaaccccagccacttccgcctctgcccacgccgttcctgcctgcagcacgtggtcgtggtatggaactccctcgtcgccatgtacggccgctgcggctgccgcggggacgccgtcagggtgttcgacgaaatggccctccgggactccgtgtcctggaactcgctcctctccgcctccgcttcggccacggatgcgctcgcgctgctcaggcggatgctgagcgccgcgccaggcgccgccgcgtgcgaccacgccacgctgaccaccgtcctgtccgcgtgcgcgcgcgctggcgggggcacgggctccgcgtcgctccccgcggtacacgggctggcggcgtcgtgcgggctcgacgctgaggtgtccgtcgggaacgcgctgatcaccgcctacttcgagtgcagctccccgggctctgcggagcgtgtgttcgacggcatggcggacaggaacgtcatcacgtggacggcgatggtctccgggatggctcgggcagagcgatatagcgagagcctgtctctgttccggcagatgaggcgcgcggtggacgccaacagggcgtcgtactcgagttctttgctagcatgtgccggatcacgcgccgccagggaagggcagcagattcacgggcttgccgtcaaggctgggctggagactgatctccatgtcgagagtgagctcatggacatgtactccaaatgcgggttgatggaggatgcgctgagggtgttccgctccggccaggatcctgacgaagtttccttgacggtgattcttgctgggtttgctcagaacggactggaggaggaggcgttcaggttgttcgctgagatggtcgggaaaggaatccgcgtcgacgcaaacatggtttctgcagtcctgggtgccttcggtgcttcggcgccgtttgctcttgggaaacagatccacgcgctggccatcaagagatgcttcggagggaacacctacgtctgcaacggcctgatcaatatgtattccaaatgcggcgagctacaggagtctatccgagtgtttgacggaacgcccagcaagaacacggtcacgtggaattccatcatcgctgcgtatgcccggcacggccatggttgggaggtttttgggctgttcgagtccatggaagccgatggcgtcaagcccaccgatgtcacgttcctgtcactgctccacggatgcagccatgtcgggtcacccaggaagggactggagatactggactccatgccatcgaagtatggaatccatccgaaggtggagcactacgcatgcgtggttgacatgcttggccgagccagccagctggatgacgccaaggcgttcatagaagacggaccgttcaaggacagcgctcttctgtggcagtcgctgatgggagcttgcagcttccacaagaactcaggagttggtgaatgtgcggcagagaagttgctcctcctggaccctgactgcactgccgcttacgtcttgctctcgaacgtgtactcgtccgagggcagatgggacgacagggccaggatcatgaagaggatgagagctaggggcttgaggaaggacactggcaagagctggattgagctggaaaaggaggtccgttcttttgccgctgggccaacaaggtctcgccctgatgatgtgctggtgcagttgtccgcagttgccagtgatcaagaagatgtagtagagagcagtgctttgtga

SEQ ID NO: 14460 - DNA, 330 bp, Zea mays
  Peptide Sequence Number=SeqID_57835
atggagcctggcggagggacagctgtcggagcggttgagtccttgctgacgtcctcttgcttccgtaagggggctgagagccgccgtcgtcacagactcgagtcagctcggggtagggtgatgatggcgcctcctgttgacgtggctgatctgcgccctaggttgggcgatgtgggagctcctctgaagccgaggtcgagtctgtcttccgtggccgaggtcgggtccaagccccaggttcgggcgaggcggagatcgccggctgatgccagggcggagtccgagccctggggtcgggcgaagcggagttcgtcgtcttctggggcttag

SEQ ID NO: 14461 - DNA, 918 bp, Zea mays
  Peptide Sequence Number=SeqID_57836
atgcaggcggcatgcaaccgcgccaagtgggcgcgcttctccgactcccaacacgcccagcatggaggcccaggcccacgcgtcgtgcaaccggcgcgccgaatgcttcgtgcatgcaacaacaccgccactcgcgccactaccgtgcctcctcgactgcggagccaataccgcgacttgaggcgacccagcgcacgacccagcagcgccagcctggcgcggcggacaggcggcgcctctggcaggagaagcgggcgacgcttcgccttcgccataatgaccgcgtcagaaaaggctggccccccggaagggttcgacagtcgcctcagatcgcgtgggccctacacccactactggtcagaggttcgaaggccggcccctcagaagggttccacggccgcctcaggctactcgggctccgcgcccattactgatcagggcgggaacgatcttgtaacggaatcccatcagagggaggcatcgagccctcagaccccgtcgccaggggaccgggtccggcagatcacccgcagctcaccggagacaccatgttcggtgcccatcgagggcaacatggcgctttcccccctcctccttgcggaaaggcgacgcaggggcgctcgggggctactgtcggggaccataattagcggtaccctcaaggctcctaattctcaactgagccaaagtgaccgccgtcacttcgccgctccactgaccggcctgacagaaagacagtgccgcctgcgccgctccgaccgtggtgccactcgacagagtgaggctgacaggcagtcaggcccggtcgaaggcaccataggaagctccgcttcgcccgacctagggctcggactcgggctaagtcccggaagacggcgaactccgctccgcccgacccagggctcggactcgggctaa

SEQ ID NO: 14462 - DNA, 441 bp, Zea mays
  Peptide Sequence Number=SeqID_57837
atgggcaagaacaacaaacgcaagcgcgagccgactcctccatcagaggactttggcgactcggaatactcagaggaggagttctcctctgagttcgaggggtctcctgctcccgtctctcccccagcgtcgtccgatgactcggacgactctcaggggattgtcgaggaggtctggtcctacatccgggccatcgagcgctccgggctcgagggctcggatgagtcggagtactcctcggacgaggaggactcgcccgaggaggacggcgaaggtgacgacgacgacgacgacggaggtgacggcagcgacgacggtgatggcggcagcaggggcgacaacagcggcaacaggagcggcagcaggggtggtgacggcggcagcagcaagggcagcaacggcggcggcagcagcaaaggcagcaacaaggccagtggctag

SEQ ID NO: 14463 - DNA, 267 bp, Zea mays
  Peptide Sequence Number=SeqID_57838
atgaagctcctatatacaaccacttcgtcagcttcgggcataggggcattgcaatctcctctagccctcatgatagaaatatcgtggaagtatcttcctttcattgcatcaattcgactctacttgattgttgatttcccaaagatgtgtaacatagactgttacaggaggcttcggcttttggatgaaggttctctttctggtgaaagcatgtgtgatatgaagatacaacccaaaggcagaatggttaaaggagcttcgacttaa

SEQ ID NO: 14464 - DNA, 315 bp, Zea mays
  Peptide Sequence Number=SeqID_57839
atgtccttcccccaaatcaaacagtacccacggcggaagaaaaagggcggagaggcttcccagcggcgagactgctccggcgggcgactgaagtctggcgaggacgatcttggttctccggtgaagttctgtcgggtccgagagcttgggaagcttcacaagctcttggcgaagctaaccgagtggcttgcgcggcttggaagtgatcggagtgggctggccacggtggccgaggctcgggtggcaatggcgggcggaagagagctcgccggagctaagaggggcgtctggccggcgagggtgagcacggggtga

SEQ ID NO: 14465 - DNA, 186 bp, Zea mays
  Peptide Sequence Number=SeqID_57840
atggcggaagcaggggtcagtggagcattgtatgccaaggcgatgaggcctggacgcgaacggggaatcgatggggacggtacgcttcaagatatggttgatggtgtgacttggcctaccaccctgccaccgggttggacggtcgactgggatgccgctcctgcagaagaggagcatgaggagtag

SEQ ID NO: 14466 - DNA, 366 bp, Zea mays
  Peptide Sequence Number=SeqID_57841
gcgggggagctcgtcggcggcgaggagtccggcctatctagggcacaattgaccaatccaatgggtcagagagcttcaccagggatcaaggaagacgggcagctgaagtccggcgaggacgatcttggttctctggtgaagttttgccgggtccgagagcttgggaagcttcacaagctcttggcgaagctaaccgagcggctggcgcggcttggaagtgatcggagtgggctggccacggtggccgaggctcgggtggcaatggcgggcggaagagagctcgccggagctaaggaggggcgtctagccggcgagggtgagcacggggtgaggcttgtaggttttgctgactggatcaagagatag

SEQ ID NO: 14467 - DNA, 1164 bp, Zea mays
  Peptide Sequence Number=SeqID_57842
atgcgtgttgagagcctcgggaaaattctacaaagcaatcacatgggtattatattgagcgatttctcttgttctgtgcatgagtactatgatagctgtgcagaggcttgcgtctcaactcttgggggtgtttacaactttggcatattgttgctagagatgtttattgtggatctctacaggacatgttcaaagattatagacatgcataggcttgccaagacccccttcatcgaggattccgtcagctacttgtcatacggcggtctcatgaacatctacgatgtggtgaaagcatacctagacaggctgctgatcgaggtgctgaacgacagccttctgaacatgatatacgctcgttccctgggcatgtcgcagatgatgcagctcgctggaaacatattggtccttgagcaagcatgcgacatgtatctgttgcactctgcccagctgtgcggcatcccgaagcgtgtcgccgagaggtcccattctggcctgactgctcgagcggtcctcaaggcctcgcagaacgtggtgtacaacgcgctgataaacctgaccaatttcaaggttgacgagttcatggtgctcctggaagaggtgaactggatagcggaggaagccctcgacaacgcgaacgactacatgaacgaggtcctgatctaccttgaaacgttggtgtcgacggcgcaggagatcctgcctatggaagctctgtacaaggtggtttctggtgccatgagccacatctcggactccataatgaccacgctcttgaacgacggcgtgaagaggttcaccgtcaatgcgatgttagggatcgatattaacctgaagacgctggaagcgtttgcggacgacaagttcgacagcacggggctgtcagatctggggaaggaaacgactttcagggactgtttggttgagatcaggcagctcacgaatctcctgctcagcagccagcctgagaacttaatgaacccggtgatcaggcagagaaactatgggtctctggactacaagaagctggccatcatttgtgaaaagtacaaggactttgcagacagtctgttcggaagcctttcgaaccggaacactccccagcagagcgcccgtaagaaatctatggacgtcttgaagagaaggcttaaggattttagctaa

SEQ ID NO: 14468 - DNA, 366 bp, Zea mays
  Peptide Sequence Number=SeqID_57843
atgggcaagggcaagaaaggtcgaggttcgccccgccgctctggcgacaagcggaagcgtgacccaagtcctccctcagaggacttcggcgactcggagtatttgaaggaggtttcctccaagtccgaggggttgccggtctatgcttgtaacgccctgaatttgggggttgttagcattgcaaccattgctcaggagaagatgaagctgtggaaggagaccaccaggagttccaagattacgacgagttctaggcgtgtgttagcggcaacccccagtcggctgcctgtgaaggccgcgtttatctacgttttgttttcgcactttgattattgtaaagactatgtggatgtctcagacatatga

SEQ ID NO: 14469 - DNA, 288 bp, Zea mays
  Peptide Sequence Number=SeqID_57844
atggccatcacatcccagtgcaagatttctcttcgccctggaacgatgttctactttggaaccatctcgtccatagtggatgagaagggaactctgcagcgcatagcagacccgccggagaagaagcttacctcgaagggcgttgcacatgggaaagttgagcagatgcttcagatatcgctcgagctacttgggcatgagcctacttccttcttacgtcggcccattccacctgtagtcctccactggcccacgaaggaatggcctagtgagataaacaggctttaa

SEQ ID NO: 14470 - DNA, 213 bp, Zea mays
  Peptide Sequence Number=SeqID_57845
atggccttaatgactatttcattgggtactgtgggtgcttgtgctcttagacgcaagaaccttcggacatacgcctggagcttctgccatgatgtgattattcttgaccgaagagaggagtatcaggtttgtgcaacattcttgactgccatgacgaaggatttcgccatgactgcagtattgcccccatatgaagatatggttgcttcatag

SEQ ID NO: 14471 - DNA, 204 bp, Zea mays
  Peptide Sequence Number=SeqID_57846
atggcggaactactccctggattcgagccgatccgaacccgtgtgtccgttggctgtccgccgctgcgcgatatccgccgccagactggggcatcctcagccggagctctcggggtcggactctgcagtcagggaacctttcgggacgaagtttatgacattaaaccccggaaatcgcttgcggccagagctgcgccgccgtga

SEQ ID NO: 14472 - DNA, 108 bp, Zea mays
  Peptide Sequence Number=SeqID_57847
atgggcctgacatggtggcccacagattttgggccttacaaatcctacccccttaaaaataatctcgtcctcgagattagtaagcagaagggttataccgagatgtaa

SEQ ID NO: 14473 - DNA, 912 bp, Zea mays
  Peptide Sequence Number=SeqID_57848
atgctcgcgccccctgctctgccgcgctgctccccttgctccgcctccccctccgtacacggccctgcctctcgctggcacgccgcgggagctccaggcgcgctattacccctgccccgcctccccctcgcaccgcttctggaggaggacacggcggtgcaagtgtcgcgagggagccaaccaagtagttgctggacacggaggagtcttgatccggtgccagtggacatagagcagtccggaagcgtcgactgggaccctaccatccctgctcccatgtggaatgatgggattgatggctcggcctggccatccgataattccatcctggcgaggatgcttcgtgatttcggcggactagcaagggtcctcttccctgagaacaggtttggtggcctcctaggccaaggtgtctggttcctgtttcctgctggcccttctggccaaaaagcttgggaatggacaatgttggtgattgcgctctccttctcatctggagcatgcaccttccaatcagcaacacctttccgtttacatcgccctcgtcgacaagcaaccaagcacgaacgccagaaaaccaagcacaaacgccagaactccaaagaactcgccgctcggggcctcgggctgctgtggcctgcgcagctgcgcttcgcagctatcggctggcgcctccgcgtgaccgcgcctggcggacgagccacgagcgcctgggcggctggtggtggcggcctggcgatggcgggctatgggcgagcgcgctggagagaaggcaggaccacaggaccaggacacaggagccaggaggtgtcgaggcgggtagaaggaggcagccgacaggaagctgcactgtggcggctggagctgaggctggacgcaggacgcctgccgctaggtcacgtcgcgcgatga

SEQ ID NO: 14474 - DNA, 291 bp, Zea mays
  Peptide Sequence Number=SeqID_57849
atggctcggatgactcctaggggctcgaatgagtcggagatctcctcgaatgaggagaactcctccgactcgtctgagggagagagcggcggcgacggggacgatgaaggcgacggcactggcgacgacagaggaggaggtggtggaggcaacggtgacgacgatggcgataagggtggtagtgaaggcagcggcagcaagggcaacggcggcgacggtgatggtggcgacggtggcggcgagggcgacagcggcagcagcaaggccagtggcaaagcgtcactgatctaa

SEQ ID NO: 14475 - DNA, 207 bp, Zea mays
  Peptide Sequence Number=SeqID_57850
atgccgacggcgcaaacgcccagggagatggcgccatggttgaagcaaccccggccgatgctatggacgattctgtgggagtcgggcgctacaaccatggtaaaggaaccagatttacttacagcggtgcagcagaggctctcaacgggactccagcgacaacgctgtggaggcgaccggatgacgatagcgcgtggtcccactgag

SEQ ID NO: 14476 - DNA, 285 bp, Zea mays
  Peptide Sequence Number=SeqID_57851
atgtcggaaactggagggttccgcttgtcaatgactgttgctattctagcaaaaggaagcaaattaatattgcgaggggctactattgggggccttcggcttctgaaggtcctcaaaaacgtacctgcggagtcaagttgcgagtatacaaaaacatggttaagacgaagcttaactgggacggcaatcacggcgaaggataagacgatcacgaagctatgcgcagaagatcttcggcataacggcagaaggggaaaccgacttaaagatgaaaagccagattag

SEQ ID NO: 14477 - DNA, 81 bp, Zea mays
  Peptide Sequence Number=SeqID_57852
atgcggcttcatacccttagagatgatgtagttttataccctcagaggtgcttgttgctcatccagggaagtgggaagtag

SEQ ID NO: 14478 - DNA, 114 bp, Zea mays
  Peptide Sequence Number=SeqID_57853
atgggaatcaaggcaagaaggagtgatggttcattagcttttaagggtgtattagacgacaagctctatttagttgatttctcaaaagagaatgctgatctagatgtagcttaa

SEQ ID NO: 14479 - DNA, 582 bp, Zea mays
  Peptide Sequence Number=SeqID_57854
atgggcaagggtaccaagcgcaagcgtgagcccactcctccgtcggatgatttcggtgactcggaatactcggaggaggagttctcctccgagtccgagggatctccggctcccgtctctcccccggcgtcgtctgatgattcagacgactcccaggggattgccgcggaggtctggacgtatatccgggccgtcgagcgctccgggctcgagggctcggatgagtctgagttctcctcggacgaggaggactcgaacggcggcgaggacgaagatgacgacgacgacgacggcaacggcgacgacggtggcgacggcgatggtgacggcagcaacggcggcggggcgacgacgacaagggcagtaccagaggcggcagcagtacgggcagcaccagaggcggcggcagcaaaggcggcaccaagggcggcggcggcggtagcagcagcaaggccagtggctaaacgccactgcgtcttagaggcaacgccgagtggtttgaaggtcggcgtcggcattttagaagtaatgccgagcgatagaatacagggtcagcgttttagaggcaacgctgagtactag

SEQ ID NO: 14480 - DNA, 234 bp, Zea mays
  Peptide Sequence Number=SeqID_57855
atggatgggcataaggataggaggtcgtgcgtccttgatttatatggccccgagtcccagggatccgcaataatcgggtatggctggccgaggaggagtttggcgttgagggactcgaccgatctcaacaaccccgacgatcacgactcagtttcccgtgtccacattctgtggagttcacaggcgctagaacagaagcccatcggcttgaggcaaagaggtggtgctgactaa

SEQ ID NO: 14481 - DNA, 600 bp, Zea mays
  Peptide Sequence Number=SeqID_57856
atgccgatgcggcggaggcgccctcgccgctctctggcggctccgccacaacacttcctctgtcgtagcgtcgcctcctgcggtctagagcgaccctgcctttctccacggttctactccaccgccgagatgagccagcaactccctacgaacctagtggagatcatggagcagagaatgaagttgatcgagcagaggagcgcgtacctccaagagcaaatcaaccaggaaatcgagggtctcaaatctttggtagcaaatgatcgtgaagagaaagacatgtgtgagatggcagcagaggagcttcttgtggctgtcgaggaggagaaacgattgcagcatgaactgtttagatcgctgcttccaaaggatgaagcagatgaaaaggattgcatattggaggtgcgggcagctaatgtgtgtgatcatcactctatgtcgctaagcttgattcttctacgttacaggtacgagaaatatgcccagaagaatggatggaaatttgatgtcattgacataatggagtctgctgtgaaagggtacaagccaaaggtattttcaccatttctcggcacgaacgaacgaaaccagggaacctag

SEQ ID NO: 14482 - DNA, 774 bp, Zea mays
  Peptide Sequence Number=SeqID_57857
atggaggtaggatgtgaggggtggggtggatgggagtggagtaacgaattagtggtggtggttcggggaggtggaagtggcgaagggggcggcggctggggcgcggatcttgccgtccgccgccacaaaccccagattgagatgatgagcgacgcgacggaggtgaagaacagcaggacgaaggacgcgccgacgagccccagcagcgactcgcgatcggagaaggctcggccgaagagggcgacagggcggctctgtcgcgacgctgggcgcgcgcgggtgcagggctcctggcacggggaaggagcgacggggtcgcgcggggctgctcggctcctggcgcgagtgcgaccgtggtcgcgtcctggcggcggccgtccaaggcgcgcctgggcgtgggtccggcggggtgcgcagacggtggctcggccgcagcctgggcgggtcgcggggcagagagcggcgccgggcgcggctgctgctcctggcggcgcgtcgggccgcgagcttggggacgggcggctcggccgcggttgctgcacggggccgaggccagtcggtgcggcggcgcgggctgagcggcgtcgggcgcgcggcgtcgggagtggcggccctggtggggtcgagcgacagtcccgggagcggcgtctcgggcccaacgtcgggggcgcggctacggcagccctggcggcgctcggcggtggggagggagagccggcggctggcggcaggagaggtgtcgtcggttgggggccggcggctgggagggactag

SEQ ID NO: 14483 - DNA, 1158 bp, Zea mays
  Peptide Sequence Number=SeqID_57858
atgcagtatcacctacgccgatgcggcggaggcgccctcgccgctctctggcggctccgccacaacgcttcctctgccgtagcgtcgcctcctgtggcctggaggcgaccctgccttcctccacggttctactccaccgccgagatgagccagcagctccctgcgaacctagtggagatcatggagcagagaatgaagttgatcgagcagaggagcgcgtacctccaagagcaaatcaaccaggaaatcgagggtctcaaatctttggtagcaaatgatcatgaagagaaagacatgcgtgagatggcagaagaggagcttcttgtggctgtcgaggaggagaaacgattgcagcatgaactgtttagatcgctgcttccaaaggatgaagcagatgaaaaggattgcatattggaggtgcgggcaggaactggaggagaagaggcttctttgtttgcaatggatatatttagaatgtacgagaaatatgcccagaagaatgggtggaaatttgatgtcattgacataatggagtctgctgtgaaaggatacaaggaagctagtggaactatatcaggtcctggggcgttcggcaaactaaagtttgagagtggcatccatagagttcagcgagtgccagcgactgagaaatctggacgaatgcacactagtgctgtatcagttgctgttcttccgcaagctgatgaggtcgcggttgatgtccagctgcgaaatgaggacctgagaattgatacctacagatcaggtggctctggaggtcagtctgtcaatacaaccgatagtgctgttaggataactcatattccaaccggaacagtggttgcaatccaagatgagagatcacagcacatgaacaaggccaaagctctgaaagttctccgagcgcgactgtatgagttggagaggcgtagactacacatggacaggtcaaagcttcgatcagaacagattggaagcggtgacaggtctgagcgaatcagaacatacaacttcccacagggccgtgtcaccgaccatcgcgttggagtcacacaccactccatagcagatgtcatggagggggagagcctggacatgttcgttgatgcgctcctgcttcaagaagagatggacgccattgcttcatttggcgcatag

SEQ ID NO: 14484 - DNA, 927 bp, Zea mays
  Peptide Sequence Number=SeqID_57859
atggaagcaagaagagcttcgaggtaccgagtgcatgggaggaagtcaagggaccaggacccaaggccagaggtgaagaagaagacttgcggaatcaaggttgatcagggcattttgagacaggatcttctattccgctgcaacctactcgaagagtctgtcattccactgagatctggtcttcgagtagagcgacatccagatcctgttcccgggcaaagggaactttcaattggtatcggagctaggcctctccagtgtgggcttagccgtccggagatgacgatatcgtcacaagagaagcattttccctctgattttagtagagaaccttctaatgctgaactaagatgtctgtctctcaatcaccttgcttgcaacatcttagttgactcactttctagaggtgcctattttgccatcatgagtagtgatagtgacttatttgttgacgctcatgatctatggaccaaaattaaattgaaattttttaagtccatatgcactgcttctgctccctctattgctggtagtactaacttgtccaagggagaagaacaagaacgatggacaccaagcgatggatccacctcaccgacaggttcatctcccactagttacacatgtcttgttgctaacgataagagtggagatgaaagcaatgatgaggaggaatatgaggatgaggagtctacatcatcacaaggtacattttcctgttttgcttccactgataataatgacagggaaaatgagaccgacgatgtggaagaagaggaaattcaccatttctacacccatctcaacaaagaagacaaagcgctcttggttaagctgttgagaaggaataagaaacaaggcgagacgcttctcaggctagaggagactctcatcaaaaccaacgacagcctggagaagatgacctaa

SEQ ID NO: 14485 - DNA, 63 bp, Zea mays
  Peptide Sequence Number=SeqID_57860
atggcaaccacgaccagtgccttcaccatcggggtatttagtaattcatgtgttttcttctag

SEQ ID NO: 14486 - DNA, 600 bp, Zea mays
  Peptide Sequence Number=SeqID_57861
atgagccagcagctccctgcgaacctagtggagatcatggagcagagaatgaagttgatcgagcagaggagcgcgtacctccaagagcaaatcaaccagccagccgcctcgccggaagagtacttgagggctaacaaggagttccgcaagctggagagcaccatggagttgatcaaagacctgagatcgaaacaggaggttgaaatcgagggtctcaaatctttggtagcaaatgatcgtgaagagaaagacatgcgtgagatggcagcagaggagcttcttgtggctgtcgaggaggagaaacgattgcagcatgaactgtttagatcgctacttccaaaggatgaagcaaatgaaaaggattgcatattggaggtgcgggcaggaactggaggagaagaggcttctttgtttgcaatggatatatttagaatgtacgagaaatatgcccagaagaatgggtggaaatttgatgtcattgacataatggagtctgctgtggaaggatacaagcgcaatcgatcgttggcgaagttgatcgttgctccattggctcataggactgtctggtgcctcataggacagtctggtgaattttag

SEQ ID NO: 14487 - DNA, 1812 bp, Zea mays
  Peptide Sequence Number=SeqID_57862
atggaacaagggatcgcccaggatcgccagggagctgcacaaaagcggcagggcggcccatccggcttgttgaagccaggccgaagaggcagcggttgggtgcgaaggctgcgggccccggcgggaggcaagccgccgctgccggcgaagtcgggcgcccctgcatctagcagggtgccggaggcaacggcaggcgccgggggcgccaactcggcgaatgtggtgtcgccttccggcggagtggcggaggtcgcgaaggcggcccaagcgttgccgttgtccggcaaacgcgtcgccgacttcgccaccaacattagcgtggacgactatcttgttgggtcggacgaaggccaacttgctatagttgcgcctgtcgcggcgaccacgacggccgccgcggtgccgaaggcgaagggcggggctcttagcgccgggggcgaggcgtcggccttcgcggctgtcagggacgaggcgggcgctgcgtcccgccggttggcggaggtgatggaggcgctgagccaggcgtccccccgggagaaggaggtgtggctgacttcgccgaccgtacagcgtcgggggccctcacggcggctgtgtctgcccgaagtcgagagacttcggacacaacacgccgacgccgtccgcgaaaaatcggccgtcgacagcaagtgccgtaagctgacggacaaggtggccgtactggagaaggagaaggctgacctccggcgccaactggcgggggagaggagggagaccaacgatgccctctccaaggagaaggctgcgcaggcggaggccaaaatggcgcgggcggagggcaatattgccagggagcgcgccgagcagctgcaggagcggctcactgccctggagagccgcatggagagggccgaggccgtggcgcgtgcggaggcagagcggacacgcaaacagctcatggatacataccgtgagctgggcgcgtggaccggtgaattcgaagtgccggaccgagaggccggacttcgctgcctggagtgggtgcaggaggaattgcaagcgctcccccactgttgtggaggggtttatgtcgtcttcgaccaagccgatgaagattttgagcgagatatctttaaggttgaggaccccgtagtgaaggaatccgccggagccatctacgaccggctgtggggtgcgcacggtcgcgaggtggtcagggagcgggccgagacggcaagggctcaggcggcgcgtggcgagagggtggacgacttcggggcgttgaacgacgtgctatctgactcggagccagccccggcggaggccgtgcctgggcccgtcctgtggccgaccctggagactgcgggggacgcgccgggtgcctccgtagccgctgcggccggcgaaggcctgcccccagaggtcgccgaagtcgcacctggtgcctccgcggcggctgcgccgagcgtcgtagagcccgcagcggtcgcggtggagataacagcggaagcaacggcggaggctcctgcagcgtcggggccgtcgcaggttcaagattttgggcctgcgcacacaaccgctactactaaaattttggcggcttcgaccgcggaagatggtaatgaatgtggtgggtctgcatctgagtttttggattgtgctaactctgggagctcggttgagtggactgaggagtcgtcggaggaggacttggactactttgcggccttggatgtggctgcggcggaggcttcgccgcacgtcgcgggcgcaggagatgtgccaggtcctagcaccgggcgacgacgacgaagggcggttgcgaagcgttga

SEQ ID NO: 14488 - DNA, 255 bp, Zea mays
  Peptide Sequence Number=SeqID_57863
atggctcatgagatgataaaaaagagcgaaaaagattcttatgattcaaaagaagcgacgaaggcgactgagaaagcggcggaacttgagaggcgaataactgaactatctcctcctctagagcccttcgagtcgatggccaacccagaagtagagaaagaagatgaagtcactaaagtggccgaagctattctggacgaagctgttaatcgactgctgaacgaagctgcggaagcagttttaaaagaagaatag

SEQ ID NO: 14489 - DNA, 603 bp, Zea mays
  Peptide Sequence Number=SeqID_57864
atggctttcggacgaagaaatgatatcaaattacaagtataccttcgacttgagagaagctctcctgcgcacagcttcggcttcgcgctatccttcgtaccccttcttgtgcttcttcacgctgtggtttcgactcaagtccgaagcaaaaagaaaagaggaaaaaggaggtgcttcaagtgcaaggaattaggtcacctcattgcttcttgtccatacaaagacaaggatgaagagatgaggaggtgttttggatgcaatggaaaggaccacatgatcacttcatgtccggtcataaagaatcaaggacgtgtacccttcaagatgaccctcaccaaggaaaatgataaacagcaagcgtcatgtcgggttgagcgacgtttctactacatgtgtggtgagcatggtcatccacctaagtctcaaggtgaaaaagggaagatgagcaagaaatggagcaatcaggacctgggtacctccacaagtcgagcaattggtatcaaagttttgcatctgaaagccactaaaagcaggtccagaggtgcttttatttttgcactgcgagaaagtcggcttttagaaaaagctgcttcctggatctag

SEQ ID NO: 14490 - DNA, 339 bp, Zea mays
  Peptide Sequence Number=SeqID_57865
atgaagctgtggaaggagacttccaggagttccaagactacgacgagttctaggtgtgggttagcggcaacccccagtcggctgcctgtgaaggccgcgttatctacgtttcttttccgcactttgatttattggcaaataccaccaccgccatcccaacttggcagatcggtgcccctagacacggtcgcattgtccaagcctttgcctagacagtctagcccttacgtggaccgtctcgctttcactgtcaaacagtccagggctacaccaggactcccacgtggtgccctgatagtagtgaacataattggacagtctgaatttaccatcgaatag

SEQ ID NO: 14491 - DNA, 1725 bp, Zea mays
  Peptide Sequence Number=SeqID_57866
atggaaagttttcttcctgcagccctgggagagctcatggctcgacacataaacttcatcatcaacaagtgcttcaagccgcacacaatggtcatggaggaaagcctacaaagggctcttctccgagcacaggtcatcgatgaggaggccatgggacggcaaatcacaaatcaagccatgatccagcagctgggcatgctgagagatgccatgcaccgaggctattacgcgctcgatgccttcaggtaccagcctcactgtggagaggactgcaatgatccagctattaggggcatgctatccctatccaaggtaccctctccaaaggaaccctatttcttcagtcaaactgcgcagtcccgggtacaactacaagatgcacttgacggattgagttccatgattgttgatctaaatgagtcagtcatgttcttgatgagctatcctcgtctgtaccgccaaccttacagcatgcatatcctactggctaactgcatgtttggtcgccatatggaagcagaacttgttgttaaatttctgttgcacacaccccctcattgctctcgagaattggaggtcatgccaattgtcgggccacccagagtcggcaagagtaccttagtagctcatgtttgcaaggacgaaagagtctgtgattatttctcagaaatcttgtggttgtgcgagtctgattttacaagtgatgagctagctggcagacaagggtgtggaatgaaacgccacaattgtatgccaaacttgaacagaggcaagagattgcttgttgttgttgaactgtgtggaaatctatatgaagatgcatggaataggctgtaccttgtttccaaacggagctttcctagtggtagtaaaatcatagtcacaagccattcagacacgattgtaaagtttggaacaacaccggctctaactctgaagcctctgtcccatgaggcgtactggtatttcttcaaggctcttacgtttgaaagcatggatcccaagaagcatccaacgcttgcacagcttgcaatggagatagctagaatgttgcatggttcgttccatggtgcacacatcacatcttatttgctgagggaaaaatttaacatacacttttggttcaagtttatgtgcttcttgagagggttcatccagaagcatgtctccgagatcggtgtgaatccatttgatcttctgaaccaaaatagacctgtacgacatggaagaatggctacaccttccgaagatttaatagtttgtcatcagtatcaccgttcttcacaagaggaggttccggagataaggatccaagatgtgctgtatggaagcactaagagacatggaaaatttgaggtcctagtatggagatctcagatacccccttactacagctatgtcaatgtttgtgagattcgagagcgtaaaattacaggaacacacacacattcatcttatattcactttgagccaattatgaagtgtaactgttatgttttcatatctgaagtttcaacccgggaggccattctatcaatagagcctcacggtaagggtgtgagcaagataatggatcaaaatccggctttcgcgtctttcaaggtttgtctctacatgcatgatccccatgagccgcacttgatcgttgtcaagcggatactatggtaccttcagggtactgtcgactacgaacttcttcttagggctcctccacacatgagttag

SEQ ID NO: 14492 - DNA, 438 bp, Zea mays
  Peptide Sequence Number=SeqID_57867
atgagtcaccattggttggacgtggccggggtcacggtggatggcgaccgggtggtacaccgggggctcgatgcagggatgaggagggcgaagtgtgggagtgaggtggctcaccgccttcgaggggaggtggttaaggagatgggtagcggtgttcagggcctttgcccagtagttggcagggagagacgtctgaaagaggaggcagcagatcatgttggtagtggtgcgaatgttgcattcgacatgaacgttctggggagaggtgtaggggcacaagagacgcgactgaacaccgtgggagagaaagaaggagcgagagacgaagttgttgaactcgcggccattgtcacactgaagggcacgaaccgggtgacggaactaggtggagacccaggcgaagaagtgtgtgagggtggacaaggtgtcagactttaa

SEQ ID NO: 14493 - DNA, 480 bp, Zea mays
  Peptide Sequence Number=SeqID_57868
atgggtaagaaaacacaagatgttcatactggatccaaactcggcaaaaacactggacgacaaccccttggtgaagatgtcggcgaactgcagcgtggtcgggacgctgagaacccgaacgccactggtggcgacacgctcgtggacgaagtgcaggtcgatctacacgtgcttcgttcactgatgttgcacgatattggtggagaggtagaccgcactgactttgtcgcaatagacgagggcggcgcgctggagggggctgtggagctcgtggagaagttgacacagctaggaagcctcgaccacgtccttggccacatcgcggtagtcggtctcagtgctggagtgagagacaacaggctggcgcttggtgttccaggggacgaggttcgtgcccaggaacacggcttaaccggaagtggatcgacgcgtgtcggggcagccagcgcagtcagcgtcggtatagaccacgagctctga

SEQ ID NO: 14494 - DNA, 1359 bp, Zea mays
  Peptide Sequence Number=SeqID_57869
atggaggaaagcctacaaaggactcttctccgagcacaggccatcgacgaggaggccatggggcggcacatcacaaatcaagctatgatccagcagctaagcatgttgagagatgccatgcaccgaggctcttacgcactcgacgccttcaggtacgagcctcactatggagaggatgacagcgatcaagttgtgagtggatttatgtccctatccaaggcaccctttgcaaaggatcaatatttcttcagtcgaactgcacagtttcgggaacaactacaagaggcacttgacagattgggctccatgattgttgatctgaatgagttggtgatgttcttggcgagctaccctcgcatgcattgccaaccttacaacatgcatatcctactgggtaactgcatgttcggtcgccagatggaagcagaacttgtcattaaatttctgctgcacacacagcttcatagttctgaagaactggaggtgctgccaattgtcggtccacccagagtcggcaagagtaccctaatcgctcatgtttgcaaggacgaaagagtccaagatcatttctcagaaatcgtgtggctgaatgaccttgattttacagatggagagcatcaaaatcaagtgtcaaactcgaacaaagacaagagattgctagttgttatagaactatctggaaatctgtatgaagatgcttggaacaggttctatcttgcttccaaacggagcttttgtagcgggagtaaaatcgtactcacaagcagttcagacagagctgtaaagtttggaacatcacaggctctaactctgaatcatctgtctcatgaagcatactggtatttcttcaagacacttgcatttggaagcattgatcctgaggcacacccagggcttgcacaagtagccatggagattgctaggacgcagaatcgttcaatccctggcgcatgcatcatctgttatttgctgaggaacaattttaacatccacttttggtgcaaggttctgaggttcttaagagtgttcgtccagaatcatgtctccaaattcaacaagcatccatatgatcttttgagccaaaacagaccaatacagattagccgaatggctacaccttctgaatatgtcgttattcgtcgtcagtatcagtgctcttcacaagaggaggttcccaagataagagcccaagatgtagtgtatggaagcatgaagacttgcggaaaatttgaggtcctattatggagatctccaatacccccctactatagctatgccagtacttatgagattcaagagccaaggactacaagtgccaagaggaagcgttctatgaaagatggagtcacattttgttaa

SEQ ID NO: 14495 - DNA, 1203 bp, Zea mays
  Peptide Sequence Number=SeqID_57870
atggaagctgatccgccgttgccgccagcgagcgcactgatggtggagctcgtggaggaggtcctgctgcgcttcccacctgcggacccggcaagcctcgtccgggccgcgctcgtctgcagacgctggcgccgcatcgtcacgggcccgcggttccgccgccgctaccgcgacctccacctccaccgcgggcgcgggggttcgcatcccccgatgctgggcttcctcgccaacgccggcacggggacccgcttcgtgcctacctccaccttccgccccgcatccgcgcgcgcgcgcgcggccgcggatggcctcctccttctcggcggctggcgcgcgctcgacgcccgccacggccgcgccctcctgcgccgggacaccggccgcgacgcgcccgtcgactgcgagctcgccgtctgggaccccgccacaggccgccgtacggacctgccccgcctcccctggtcgccctacccctacagctggaacgccgccgtgctctgcgccgccacaatcaccgcctccgcctgtgaccacctcgactgctgcggcggcggccacttcctcgtcgtcgtggtgggcaccaaccacgcggagatgttcgcccatgtctactcgtcggaggcgggcgcgtggaacgcgcccgcgtccgctcggcacccagacgacaacgtcgacttcgcgcccagcgcgctcgccgggaacgcgctctacttcgcgttccagacgggcgcggcggccctggagtacgatttgggcacgcgggagatggcggtggtgcgcctgccgccgccgccacgcttggactggcagcgcgctgtgctcgccaccagggacgatggtcgtctgggactcgccacggcaggcaagtccacgatctacctgtgggcgagggaggcgccgcctcgaggagatgggagttgggtacagaccagagccatcgagcttgacacgctgctccctgtcggtgccctctcggcctttgttgatgtggttagctttgtggatggcgtcggtgtcgtgtttgtgcggacgggcgatgggctattcaccattgatctgatgtctcgccgggtcacaaaggtattcaaggacactttcttctccggcattttcccctacatgagcttccacactccagcactggaagttgcctcaactggtgaggggccaagttcagcttgcaaagaaatcctagaatga

SEQ ID NO: 14496 - DNA, 189 bp, Zea mays
  Peptide Sequence Number=SeqID_57871
atgaccggcgcaaatgtgtgcgctgtcgccgacctccctggaggggctcctcgacgtccggacgatcgaagaagcaagaaggttggcctgctgaaaacacacattcagacatcatctatacttgtacgctgcagcatgtctaaggaatgcacaggattaactgcgctgaggtcgattgagagcacctag

SEQ ID NO: 14497 - DNA, 741 bp, Zea mays
  Peptide Sequence Number=SeqID_57872
atggcgcggtacgtcggcggcggagcgcgcggcagcgcggtgcctacaggcgtggcgggacgctgccgtgagggcgtcgtggcctgcctccgcacctcgctcgaggatctgctccgatcgtcgtcgtcgtgcgctgatggtggggctctggcggtgcggtcgcagcactgttgctgcctgctagggctacagagtggtccggcggcggtggcaggcttcccggctgtggccgaatctggctcctcagtggtgatgtgtggcgacggtaagtgggcagcaactagcaatggccctggtggcgtctgcggtggtgcgcgtgccagcggatatggtgcatcgcagcggctgctgctagggatggccgatgggagccggcgtgtcgatgaccctctagatgggtatgtgtgggttgtctgggcagcggtggcggcggaagtggttgctttgtctcgggttcctgaccggacgttgtgctgggggttttcttgggcgaaagctttggcgacggcaacgcccatgggcgctgcttcccccattgagggcgtcggctccccagcactatcttctgtgggcgaaaccctggtgggggcttgcatcatgaagttgaagctgctacatctggggatgtggctcagcaacaatgacgtgggggtgaaccccccattcttcgtgggctgcccaccccctgcgctggcatcttcgcccgtgcagcccctcgtcatcgcgctgaccacctcctaa

SEQ ID NO: 14498 - DNA, 603 bp, Zea mays
  Peptide Sequence Number=SeqID_57873
atgggcgccagcggccagagcaaaggtggggccgaggaacccgggagccacaggagcagcgggcaaggcaaggctcatgcatgccggggggacgacgtgaggccacccgacggcgcgcggatggaggccggggtgactcagcgtcctggacctgggtggtggcgcacctggggagggaggggaggtgacgggggatgcaatgggggctgcgggtccagcagggaggaagcgaactacgaggtcattggcgacaacatgctcacgaatgaagtgagggtcgatatcaacatgcttcgtgtgctggtgctagacggggttgatggagaggtagacaatactgactttgtcatagtagacaagtgtactcctggtgaggggcttgtgaagcttctagaggaactggagcggccagctcgcctcaaccttcccactagcgatagcccgataagcctcagcactagagcgagagaccacgacctgacatttggaagaccaggagatgaggttatcccaagaaacatcgcacatccaaaagatgcattgacgctactggagaaccatgttatccgggcgacgctcaacagaatccctaggaagtggtga

SEQ ID NO: 14499 - DNA, 1269 bp, Zea mays
  Peptide Sequence Number=SeqID_57874
atggggcggcacatcacaaatcaagctatgatccagcagctaagcatgctgagagatgccatgcaccgaggctcttacgcactcgacgccttcaggtacgagcctcactatggcgaggatgacagcgatcaagttgtgagtggatctatgtccctgtccaaggtaccctttgcaaaggatcaatatttcttcggtcgaactgcacagtttcgggaacaactacaagaggcacttgacagattgggctccatgattgttgatctgaatgagttggtgatgttcttggcgagctaccctcgcctgcattgccaaccttacaacatgcatatcctactgggtaactgcatgttcggtcgccaggtggaagcagaacttgtcattaaatttctgctgcacacacagcttcatagttctgaagaactggaggtgctgccaattgtcggtccacccagagtcggcaagagtaccctagtcgctcatgtttgcaaggacgaaagagtccaaggtcatttctcagaaatcgtgtggctgaatgaccttgattttacagatggagagcatcaaaatcaagtgtcaaactcgaacaaagacaagagattgctagttgttatagaactatctggaaatctgtatgaagatgcttggaacaggttctatcttgcttccaaacggagcttttgtagcgggagtaaaatcgtactcacaagcagttcagacagagctgtaaagtttggaacatcacaggctctaactctgaatcatctgtctcatgaagcatactggtatttcttcaagacacttgcatttggaagcattgatcctgaggcacacccaaggcttgcacaagtagccatggagatagccagaacgcagaatcgttcaatcaatgccgcatacaccatctgttatttgatgaggaacaattttaacatccacttttggtgcaaggttctgagattcttcagagtgttcgtccagaatcatgtctccaaattcaacaagcatccatatgatcttttgaaccaaaacagaccaatacagattagccgaatggctacaccttctgaatatgtcattattcgtcgtcagtatcagtgctcttcacaagaggaggttcccaagataagaggccaagatgtagtgtatggaagcatgaagacttgcggaaaatttgaggtcctagcatggagatctctaatacccccctactatagctctgtccatacttatgagattcaagagccaaggactacaagtgtaggaagctga

SEQ ID NO: 14500 - DNA, 981 bp, Zea mays
  Peptide Sequence Number=SeqID_57875
atggaagctgatccgccgttgccgccagcgagcgcactgatggaggagctcgtggaggaggtcctgctgcgcttcccacctgcggacccggcaagcctcgtccgggccgcgctcgtctgcagacgctggcgccgcatcgtcacgggcccgcggttccgccgccgctaccgcgacctccacctccaccgcgggcgcgggggttcgcatcccccgatgctgggcttcctcgccaacgccggcgcggggacccgcttcgtgcccacctccaccttccgcctcgcacccgcgcgcgcgcgcgcgcccgcggacggcctcctcctcggcggctggcgcgcgctcgacgcccgccacggccgcgccctcctgcgccgggacaccggccgcgacgcgcccgtcgactgcgagctcgccgtctgggaccccgccacgggccgccgcacggacctgccccgcctcccctggtcgccctacccctacagctggaacgccgccgtgctctgcgccgccacaatcaccgcctccgcctgtgaccacctcgattgctgcggcggcggcggccacttcctcgtcgtcgtggtgggcaccaaccacgcggagatgttctcccatgtctactcgtcggaggcgggcgcgtggaacgcgtccgcgtccgcgtccgctcggcaccccgacgacaacgtcgacttcgcgcccagcgcgctcgctgggaacgcgctctacttcgcgttccagacgggcgcggcggccctggagtacgatttgggcacgcgggagatggcggtggtgcgcctgccgccgccgccacgcttggactggcagcgagctgtgctcgccacaagggacgatggtcgtctgggactcgccacggcaggcaagtccacgatctacctgtgggcgagggaggcgccgcctcgaggagatgggagttgggtacagactaactatctactggctaactacaaaggaaacgaatggaaataa

SEQ ID NO: 14501 - DNA, 1062 bp, Zea mays
  Peptide Sequence Number=SeqID_57876
atggaaagtttcctttctgcagtcctgggtgagctgatatctcgatccataaatttgatcatcaacaagttgtcaaaggtgaatatggaggaaagcctacaaagggctcttctccgagcacaggtcatcattgaggaggccatgggacggcacatcacaaatcaagtcattctcctgcagctgggcgtgctgagggacgccatgcaccgaggctattacgcacttgatgcattcaggtaccagcctcactatggagaagatggcaatccagctgttaggcgctttgtgcgcctatccaaggtaccctgtgcaaaggatctctatttctccggtccaactgtacagtttcaggaacaactacaagaggcacttgacaaattgagctccatgattgttgatatgaatgagttggtcatgttcttgatgagctaccctcgcctgtatcgccagccatacaacaagcatatccttctgggtaactgcatgtttggtcgccagatggaagcacaacttgtcattaatttccttttgcacacaaaacctcatagttctgaagaattggacgtcctgccagttgttggtccacatagagtcggtaagagtacactaatcgctcatgtttgcaaggacgaaagagtccgtgattatttctcagaaatcttgtggctgcatgactctgattttacggatgatgagctaactttgagacagggatgtgcaatgaaacgacagttttttttgtcaaactttaagaaaggcaagagatttctagttgtgattgaactatatgggaatctctgtgaagatgccaggaataagttttaccgttcttccagacagagctttcttagtggtagtaaaatcatagtcacaagctgttcagacaagatcgtaaagacacttacatttggaagcattgatcctgagatgcaccctaggcttgctcagctggccatggagatagccagactgcagattggttcaatcaatagtgcacataccatctcttatttgttgagggacaattttgacatacacttcttgtgtaaggaagataaataa

SEQ ID NO: 14502 - DNA, 318 bp, Zea mays
  Peptide Sequence Number=SeqID_57877
atgagtattgatgtttctgaaactcactctgtagtctgtatgactgtattctatgcttcacttgagaactccgaggagagcaagggaatatataaggccccgtttggttctttagggagagctcatggtactcaagtgccaattcttgaggatgatgaagatggtgttgatgagggtgatgagaatgaagacgatgacaattttgtgcttgacgaccttgacatggatgatgaagaagaaacaaacaatagtggtggccgtggtgatgagcaagacaaggatgatgttggtttagatgatttggatgatggttattga

SEQ ID NO: 14503 - DNA, 1482 bp, Zea mays
  Peptide Sequence Number=SeqID_57878
atggaaagtttcctttctgcaatcctgggtgagctgatatctcgatccatgaatttcatcatcaacaagtggtcaaagccactgacactggacatggaggaaagcatacaaggggctcttcttcaagcacaggtcatcattgaggaggccatgggacggcacatcacgaatcaagccatgctcctgcagctgggcatgctaagggacgccatgcaccgaggctattacacacttgatgcgttcaggtaccagcctcactatggagaagatgctaatgatccatctgctaggcgctttctgaccctatccaaggcaccctgtgcaaaggatctctatttcacccgtcgaactgtacagtttcaggaacaactacgagaggcacatgacaaattgagatccatgattgttgatatgaatcagttggccatgttcttgatgagctaccctcgcctgtatcgccagccgtacagcatgcatatccttctgtgtaactgcatgtttggtcgccagatggaagcacaacttgtcattagtttccttttgcacacaaaaccccatagttctgaagaattggaggtcctgccagttgttggtccactcaaagtcggtaagagtactttaattgctcatgtttgcaagggtgaaagagtccgtgattatttctcagaaatcttgtggttgcatgactgtgatttcacggatgatgagctaagtttcagacagggaggtgcaatgaaacgtcaattttttttgtcaaacttcaagaaaggcaagagattgctagttgttattgaactatatggcattctctgtgaagatagatggaataggttttaccgtgcttccagacggagctttcttagcggtagtaaaatcatcgtgacaagttgttcagacaagattgtaaagtttggaacaacaccagctctaactctgaagcacctgtcccctgaggcttactggtatttcttcaagacacttacatttggaagcacggatcccgagatgcaccctaggtttgcacaactggccatggagatagccagactgcagattcgttcaatcaatagtgcatatgttacctcttatttgttgagggacaattttagcatacacttctggtgtaaggtgctgagcttcttgagaggggtcctccaggcgcatatctccaaattcggcgtgcatccttctgatcttctaaacaaaaacaaccttgtacatcttggtagaatggcttcaccttctgaagatttaataatctatcatcagtatcaccgctctccccaagaggaggttccagagataagaatccaagatgtggtgtatggaagcattaagaagcaaggaaaattcgaggtcctaggatggagatctcagatacccccatactacagctatgtctatgtttgtgagattcgagagcgaaaaattacaggtgcaaagaggaagcactgtgtggaagatggagccacatccagttaa

SEQ ID NO: 14504 - DNA, 1059 bp, Zea mays
  Peptide Sequence Number=SeqID_57879
atggggctcgacgtcatggagatcgggatgggcgccgatttgagcctggatctgaggcacttcgcctccaaggccgtgaggcagagcaaggacgacacgccggcgccggacatggacgcatgcatccgccgcctcgaggaggagcggggtaagatcgagatgttcaagcgggacctcccgctctgcgcgcgcctcctcgccgacgtaattgatgtcatgaaggaggaggcggggaagaagaagacgacgacgaggaggaggagtgatcgcaggctggcgtctgcggcagctgatgatgaggaggaggaggcggacggcgccaccgcggacaagagcaagtggatgagcacggcgcagctctggacgggcgattccgggcgggaggacgcggaatcagagaagcaagacaaggggcggtgctcgccggaggccaggtcccgcggcgctctcttaccgttcaaggctgatgtgggctctggcgcgccggcgttcgcgccgctcttcttgagaacggacgacaaggctgcggctgcgcgcgtcggggtgccggatctgtcgtccttgctgtcgccgccggcgaccatgcctcctgcggacgccggcgccgaggagagccgtcgccaggttgtgggatttgcgcaagctgcggccagggcggctgccatggcgccgtctgcccctgcgcttgggctccagtcgcagcagcagcagcagcagcagcagcaggcaaggaaggctcggcgttgctggtcgacggagctgcatcgcaagttcgtcgccgccttggatcagctcggtggcccccaagttgccacgccgaagcaaatcagggagctgatgaaggtggatgggctgacaaacgacgaagtgaaaagccatcttcagaaataccggctgcacaaccgcagggcgcctggatccggcgtggtctatctaactgaaagagcagcaaagaagaaagagatctcaataagaaaagaacccgattccaccattgaacaaccaaccaagagggttgctcctgctcctctgctgttcaccatcatcaacagcacgtaa

SEQ ID NO: 14505 - DNA, 1677 bp, Zea mays
  Peptide Sequence Number=SeqID_57880
atggccttccaaagggcgctcgtcgtctgggtgctgtcggtcatggcgaggttgaggacggcgtcggaggtggtgctgtacatccatccgcggacgcagaagtcagcctgtgcccatgccgcatcggtgggcgcgaggtggagagttggagggtttcaactccagggtcatggggacgtggagcttgatgttgatggtggcaaaggggcagaggacaggagcagaatcggtagcatcggagatggtgctcatggcgcagggaaggggaaggagaggttgtcaaaggtgaatatggaggaaagcctacaaagggctcttctccgagcacaggtcatcattgaggaggccatgggacagcacatcacaaatcaagtcattctcctgcagctgggcgtgctgagggacgccatgcaccgaggctattacacacttgatgcattcaggtaccagcctcactatggagaagatggcaatccagctgttaggcgctttgtgcgcctatccaaggtaccctgtgcaaaggatctctatttctttggtccaactgtacagtttcaggaacaactacaagaggcacttgacaaattgagctccatgattgttgatatgaatgagttggtcatgttcttgatgagctaccctcgcctgtatcgccagccatacaacaagcatatccttctgggtaactgcatgtttggtcgccagatggaagcacaacttgtcattaatttccttttgcacacaaaacctcatagttctgaagaattggacgtcctgccagttgttggtccacatagagtcggtaagagtacactaatcgctcatgtttgcaaggacgaaagagtccgtgattatttctcagaaatcttgtggctgcatgactctgattttacggatgatgagctaactttgagacagggatgtgcaatgaaacgacagctttttttgtcaaactttaagaaaggcaagagatttctagttgtgattgaactatatggcaatctctgtgaagatgcctggaataagttttaccgtgcttccagacagagctttcttagtggtagtaaaatcatagtcacaagctgttcagacaagatcgtaaagtttggaatggcaccagctctaactctgaagcacctgtcccctgaggcttactggtatttcttcaagacacttacatttggaagcacggatcccgagatgcaccctaggcttgctcagctggccatggagatagccagactgcagattcgttcaatcaatagtgcatatactacctctaatttgttgagggacaattttagcatacaattctggtgtaaggtgctgagcttcttgagagggttcatccagaagcatatctgcaaattcggtgtgcatccttttgaacttctaaacaaaaacgaacctgttcagcttggaagaatggcttcaccttctgaagatttcataatttgtcatcagtatcaccgctctccccacgaggaggttccagagataagattacaagatgtgttctatggaagcattaagaaaaatggaaaatttgaggtcctagtatggagatctcagatacccccctactacagctatgtccatgcttgtgagattcgagagcgaaaaaatacaggtgccaagaggaagcgttgtatgaaagatggaaccacatctagttaa

SEQ ID NO: 14506 - DNA, 2883 bp, Zea mays
  Peptide Sequence Number=SeqID_57881
atggaggaaagcatacaaggggctcttcttcaagcacaggtcatcattgaggaggccatgggacggcacatcacgaatcaagctatgctcctgcagctgggcatgctaagggacgccatgcaccgaggctattacacacttgatgcgttcaggtaccagcctcactatggagaaggtgctaatgatccatctggtaggcgctttctgaccctatccaaggcaccctgtgtaaaggatctctatttcaccagtccaactgtacagtttcaggaacaactacgagaggcactcgacaaattgagatccatgattgttgatatgaatgagttggtcatgttcttgatgagctaccctcgcctgtatcgccagccatacagcatgcatatccttctgtgtaactgcatgtttggtcgccagatggaagcacaacttgtcattagtttccttttgcacacaaaacctcatagttctgaagaattggaggtcctgccagttgttggtccactcggagtcggtaagagtacactaatcgctcatgtttgcaagtatgaaagagtccgtgattatttatcagaaatcttgtggttgcatgactgtgatttcacggatgatgagctaactttcagacagggaggtgcaatgaaacgtcagattcttttgtcaaacttgaagaaaggcaagagattgctagttgttattgaactatatggcaatctctgtgaagatggatggaacaggttttaccgtgcttccagacggagctttcttagcggtagtaaaatcatcgtgactagttgttcagacaagattgtaaagttcggaacaacaccagctctaactctgaagcacctgtcccctgaggcttactggtatttcttcaagacacttacatttggaagcacggatcccgagatgcaccctaggtttgcacagctggtcatggagatagctagactgcagattcgttcaatcaatagtgcatatactacctctaatttgttgagggacaattttagcatacacttctggtgtaaggtgctgagcttcttgagagggttcatccagaagcatatctgcaaattcggtgtgcatccttttgaacttctaaacaaaaacaagcctgtacagcttggaagaatggcttcactttctgaagatttcatgatttgtcatgagtatcgctgctctccccaagagggggttccagagataagaatgcaagatgtgatgtatggaagcaataagaagcaaggaaaatttgaggtcctaggatggagatctcagatacccccctactacagctatgtctatgcagatagcaacctcggcctgggcttcaagcctgtgttttcgtttttatctttccagttcaaccccaacctcggcctgttgttttcgtttttatccctcatggtcatgtttggtgccctgggagagctcatggctcaacacataaacttcatcatcaacaagtgcttcaagccgcacacaatggtcatggaggaaagcctacaaagggctcttctccgagcacaggtcatcgatgaggaggccatgggacggcacatcacaaatcaagccatgatccagcagctgggcatgctgagagatgccatgcaccgaggctattacgcgctcgatgccttcaggtaccagcctcactgtggagaggactgcaatgatccagctattaggggcatgctatccctatccaaggtaccctctccaaaggaaccctatttcttcagccaaactgcgcagtcccgggtacaactacaagatgcacttgacggattgagttccatgattgttgatctaaatgagtcagtcatgttcttgatgagctatcctcgtctataccgccaaccttacagcatgcatatcctactggctaactgcatgtttggtcgccatatggaagcagaacttgttgttaaatttctgttgcacacaccccctcactgctctcgagaattggaggtcatgccaattgtggggccacccagagtcggcaagagtaccttagtggctcatgtttgcaaggacggaagagtctgtgattatttctcagaaatcttgtggttgtgcgagtctgattttacaagtgatgagctagctggcagacaagggtgtggaatgaaacgtcaaaattgtatgccaaacttgaacagaggcaagagattgcttgttgttattgaactgtgtggaaatctatatgaagatgcatggaataggctgtaccttgtttccaaacggagctttcctagtggtagtaaaatcatagtcacaagccattcagacacgattgtaaagtttggaacaacaccggctctaactctgaagcctctgtcccatgaggcgtactggtatttcttcaaggctcttacgtttgaaagcatggatcccaagatgcatccaacgcttgcacagcttgcaatggagatagctagaatgttgcatggttcgttccatggtgcacacatcacatcttatttgctgagggaaaaatttaacatacacttttggttcaagtttctgtgcttcttgagagggttcatccagaagcatgtctccgagatcggtgtcaatccatttgatcttctgaaccaaaatagacctgtacaacatggaagaatggctacaccttccgaagatttaatagtttgtcatcagtatcaccgttcttcacaagaggaggttccggagataaggatccaagatgtgctgtatggaagcactaagagacatggaaaatttgaggtcctagtatggagatctcagatacccccttactacagctatgtcaatgtttgtgagattcgagagcgtaaaattacaggtgctaagaggaagcaccctatgaaagatagaactactttctga

SEQ ID NO: 14507 - DNA, 414 bp, Zea mays
  Peptide Sequence Number=SeqID_57882
atgttgagattggatcaaaactctgagaacaccgatgatggaagctccttagtgaagatattagcgaactacgaggtcgttggcggcaacatgctcacgaatgaagtgaaggtcgatatcaacatgcttcgtgtgatggtgctggacggggttgacggagaggtagacaatactgacgttgtcgtagtagacaagtgtactcctagtgaggggcttgttaagcttctagaggaactagagcggccagctcgcctcaaccttcccactagtgatagcccgataagcctcagcactggagcaagagaccatggacgtttggaaaaccaggaaatgaggttatccccaagaaacatcgcacatccaaaagtagatcagtgtgggtctaggtacccgacccaatcaacgttggtgtag

SEQ ID NO: 14508 - DNA, 873 bp, Zea mays
  Peptide Sequence Number=SeqID_57883
atgtgttggaccgaaacgggagtgacgactggcgaccggtgtgaagctgcgtgcgcgcgctcacgtgcggccacgttcgggcccgtgcgaacggccacgtgcgcgcgctcacgtgacaagactcgacgacggcctcgggcttggggacggctgcggcctcgggtaacgcggcggccaaggcggggaggtcccggcggccacgggcggcgctggccaggggcggggaggccgcggcgtccaccgcggcgctctggccaggggcggcggcggcggctctggcgcgcgagccccccgggcggcggcggccacgggcggcgctgtccaagggtctggcgagccccccgggcggcggtgcgcggctctggcgacccgccggtgcacaccttcccgcaccacgagttcgccgagatccccgacgtctccgacacggcggcgctctacggcgcgcaggagctgcagtaccgctccttctgcttcgacccggaccggctggagcgcgtccgcgggctgacgcttgccgacggcgccctcggccgctgcaccaccttcgaggcgctgtcggggctcgtgtggcgtctctggcgtctccggcgagcctccggggcggcggcggcgcgctgtgcgggcggcggcacggacgcgggcggcagcgcggacgcgggcggcggcgcggacgtgggtgtgcgggcggcggcgcggacgtcgacgagggacgtgggcgcgctgtgcgggcgacggcggcggacgggcggcggcggcgcggtgggtgtgcgggcgcgcggctgtgcgggcgttgagctacggagatatccatctatctcgacctccattgccattgggtcgtcatgcttgtggttcgtgctgcaggaatag

SEQ ID NO: 14509 - DNA, 489 bp, Zea mays
  Peptide Sequence Number=SeqID_57884
atgctgaattgcgtcatagcaaaccaccgcgaacactcgtcggtgcaggctataaaagccgggcaaggtcgactcgggcctttgtcacgtgtttatagctcttccataggaaaaaggtgtggggcgaggaactcaccgcgtagagagagggtacgaaattatgccagcgagtgcttgaacacctccgcagagccttcatcaaggagtcaaggagatgtgactcgccatgccgctcgtgcccaaaccctagttgtgtgtgggggtggtctggtccgggcgagattgctcgctagagggagaggtcattggtgggccacagagcatggtggtcatcatcaccatcgcctcggtatcaagttgcgcggaattggtcactggcgatgcgtttctgccactagctacaaatcaatgtggtcattcaccttggtgactcatacatccggtgaagactcccacaccgaagtcgcctcatcttcctatgcgatttga

SEQ ID NO: 14510 - DNA, 312 bp, Zea mays
  Peptide Sequence Number=SeqID_57885
atgtctggtgcacaccggacagtccggtgccttcttctagccgttggctcggccacgtgtcccgcgcagattgcgtggccgaccgttggcccggccgaccgttggctcaccggacagtccggtgcctcggcctcagcctcggccttggaagaaggtctccgcctcgcccgaccccaggcctcggcctcggcctcgggaggagtcatgtcctcgcccgacctcggcctcggcctcaggagaagtcttcgcctcgcccgacctcaggcttggaccgactacgctacaggggatgcatcattaccctactcctag

SEQ ID NO: 14511 - DNA, 813 bp, Zea mays
  Peptide Sequence Number=SeqID_57886
atggaggctcgggcccacatgtcatgtaaccggcgcaatggtttctacgtgcaaggaaaccgcaccgccactcgcgctaatgccgcgtcttctcgattgcagaaccagtgctgcgactcgaggcagcctgcgcacgagaggaagcagcggtccaatcacctacaggctcgcaccaacggcagggaagccctctcccacggatgcaagcgacacctccagcaggagaagcgggcgctgttttgcctccgtcatgatgaccgcgtcaaaaaagggaccaggaaaggggatattctgaaaaggatccttcccagcgaaggaaaagggccccgagccctcctacagattaggggttcgaaggttgcgccctccggggttcgacaaccgcaccagagcactcgggctctgtgccctttactgatcaggggttcaaaggctggcccctcggaagggttcgacagccgccctagagcatgcagagtcagggatgaccctgggtacgtccgttacatggtcgaggcttgggctacgctcccgagggatcgcatgacaccttatcctgacacgcgtgcctcagtcggcaaggtcgaagcctcagcctcggaagaaggtctccgcctcgcccgaccccaggcctcggcctcggcctcaggaggagtcacgtcctcgcccgacctcggccttaggagaagtctccacctcgcccgacctcaggctcggatcgactatgctacatgggatggctcaaggtgcttctccgacagccacattagcccgtctacagggctcaaggcgcttcttcgccagccacattag

SEQ ID NO: 14512 - DNA, 717 bp, Zea mays
  Peptide Sequence Number=SeqID_57887
atggcccaagggcacatttccctttcaagcgcgcgctgctgggcagccacggcgagtttcgtcgtggagggcgacatcaacgacggccgcctcctggccaagctcttcgacgtcgtgcccttcacccacgtgctccacctcgcggcgcgggccgacgtgcgctatgccatggagaacccggcggcgtacgtccactccaacgtcgccggcctcgtctccctcctcgaggcctgcaaggacgccgacccgcagtcggccgtcgtctgggcctcctcctcctccgtctacggcctcaacgaccgcgtccccttctcggggctcagggggcgggggcatcgcgggaggtcgcgggcgggggcacggagccgggatccggggccgccccacccaccgccctcgcggatccaccatcaacgccgatcccgtcgatggaaggtgagcggggcggccacgttgatggcggggagcagagatcgaggagcgttgatggcggggagcgtagattgcggatcgaggatctcggatcgagggtgcatcggccgcgctgctggggctccggttcgcaggatcgacgttgatggcggctcggcgtcgcgtggatggcgggcagcagagagacggtggaacgattacaggtgcaatccgacggaaacgaacaaggccttaccggggcgggttcctcccgatatcctctcagactcgttggctcttaattag

SEQ ID NO: 14513 - DNA, 165 bp, Zea mays
  Peptide Sequence Number=SeqID_57888
atggcctatgaagcaaaggcaaagggtagagagaccaaagcagttcactcagagcatcctcatcgccataaattcaatggttgccaatcctctgctgtaacaagggcattcctagtgcctcccgagcctactaggacaagagtggatgggtctctaagaaaataa

SEQ ID NO: 14514 - DNA, 210 bp, Zea mays
  Peptide Sequence Number=SeqID_57889
atgggaaaatccccaccgtcgcggactgactggtgcacaggcgcccgggcccaaccaagtgccttgggtgatgtacctcggttcgagggtgtcgttcagcgtctctggtggggcgcgaggctttgtgccatggagaattgctcgtcggagtcgcttcgccgccgcaagccgtgggcagagccctatgtgccacgttctatgttgcgttaa

SEQ ID NO: 14515 - DNA, 504 bp, Zea mays
  Peptide Sequence Number=SeqID_57890
atgaggagagagagcaagcttgggcagggagaaggagagggctcgacgtcggattttatagaggagagggagagaagtgaagggtcggtcttcatggctgccattaatggcatccgcatcaatggaggcggtaacgacggcattgaagctcccttaatgaaggagaaacggacgcgggcttcggggcttcactcgggcgcggctggcacgggacacggcgcgcggggtcttcgtcggggcggtccttggctcggcgtcgggcttcaggggcacaggtggctatgcgaggctggggcggtccttgggcgggtgcgcggtcgactcggcagctgggcgcgggctccatgggcggttggtgcaggggctcgagcacgggctcggtcggctccaggcggggacgcgctcggcggcgtcaggtctggctggggcggcttggcgcgcagggcttgggtggctctcggcggcccgagggagagggagcagggtagtgggaggcgcggttag

SEQ ID NO: 14516 - DNA, 204 bp, Zea mays
  Peptide Sequence Number=SeqID_57891
atgacaaacacagagatgcggaaaactggggagcagcttacggagtcgaggagggagagcgcctcgcgggtggcctggtgctcgcggccgccatcgcaggtgatgaagaagcctgcacgccggggcgcagtcgctgctgttaggtctagggacgcacgcacgggtgacggcgcgccgtgcctcggcataccagatgagatatga

SEQ ID NO: 14517 - DNA, 438 bp, Zea mays
  Peptide Sequence Number=SeqID_57892
atgtcgcgcgcgttcgacgactactatatcgaggattatggcgtcatcttggcgccggagcctggaggtgacgtagaggaggatcgacaacagaagaaaaaaatggtagcaccaaaatttaatggcgacgcggcgttctcgctggtgaggcggcagctggagtcgctgagcgtggacaacatgctgctccggcgcgccgtggaggtcctccgcgcggaggtccgtagcagcaacagcagggccgcgcggcccgctgcttctgcggcgggggcccgtggcttgggcagggtggcggcgaccgcgccacaaacgcatacgcagccttaccacgtgacaaagccggaccaccgcccccgaggcgccgcgagggaggctgcggccgcgccggacgacgttggcgaggagctgaagaaggcgttggaggcccgcctgcactga

SEQ ID NO: 14518 - DNA, 357 bp, Zea mays
  Peptide Sequence Number=SeqID_57893
atgggaaaagtgccggacccctgcatatacggaccggacctccacgggtacaaaccggacccctgggacgggtcccagacccctctgtgtggggtccaggccactcacgtcagggtcccgggattctgggacgaagaattcccgggccttagtcaaggccaagcgggtgtccgaagccgacatgtgtccggaccataccatgtacgcttctgctccccgctcaggcggagaaccgatgctgccacgtggcccaccgcccgtgacataagcgagtgggcggagcctgatgtaaggactctgaaccacacgtcctctgcatttattgcggataaggcgcgccgcctgtcaaactggtag

SEQ ID NO: 14519 - DNA, 312 bp, Zea mays
  Peptide Sequence Number=SeqID_57894
atggcgagggtagcatgtaccctccatggcaagaggctagacggtggtgtatctatgctctcgctggtgcaacgtcagctccacgcccaacaatttggtggagggcaacaacagcgctcgcaagcggaggctacctatcaagagtttctgagcacccaaccaccactgtttacaaaggcaaaagacccattggacgctgtagtatgtctcagggttgtggattcaaagttcccccttctcacgggagtttgccctgaccccgccaaggctcgcttcgtcgcacagcaattccggggacttgcaaaaacatga

SEQ ID NO: 14520 - DNA, 219 bp, Zea mays
  Peptide Sequence Number=SeqID_57895
atggccatgatgggttcaacatcggaaaagatgtacctctgccagagtaataccagaaaggccaacacgcaatgggagtggagagatggcgagagtagcgtgtaccctccatggcaagaggtgaggaaacaacagagttttgctatttttgctctaaggtggtgcccaaagaagaacctcaacagtgaagccgcgggaggatgttggcctaccacttga

SEQ ID NO: 14521 - DNA, 483 bp, Zea mays
  Peptide Sequence Number=SeqID_57896
atgcaggcggcatgcaaccgcgccaagtgggcgcacttctccgactcccaacacgcccagcatggaggcccaggcccacgcgtcatgcaaccggcgtgccgaatgcttcgtgcatgcgactgcaccgccacttacgccaccgccgagccacctcgactgcggaaccaataccgcgactcgaggcgacccagcggaccgggaaagggggataccccgaaaaggatccttccccgtgaaggaaccaggctccgagcctccctactgatcagaggttcgaaggctgacccctcggaagggttcaacagtcgcctcagagcacgtgggctccacacccactactggtcaggggttcgaaggccggcccctcagaagggttcaacggccgcctcaggctactcgggctccgcgcccactactgatcaggggttcgaaggctggcccccgaagggttcacagccgcctcagacacagggcgagggatga

SEQ ID NO: 14522 - DNA, 507 bp, Zea mays
  Peptide Sequence Number=SeqID_57897
atgacgctttacgtctggcacctccttagagaggctctccaggtcggcgatgagggcctcggcgtactccacgcactccacatcgcattcgaacgcgtgtttgtatgtggggccgacggtgatgaccccgttggggcctggcatcttgagcttcaggtaggttcctcagaacccgagcacctcgaacgtcagggtctcccttcggaagttggagggtgttccgaagcagacgggaaggtcgagttgtccgaggggctggacgcgcttcccggggttgatcccatggaaaggcgcagcgcctacccggaccgaggacagatcgacacgcaggagcccgagggtctcggcgtagatgatgttgaggctgctgcccccgtccatgaggaccttggtgagcctgatgtcgccaatgatggggtcgacgacgagcgggtatttccctgggctcggcacatggtcggggtggtcggcttggtcgaaggtgatgggcttgtcggaccagtctag

SEQ ID NO: 14523 - DNA, 246 bp, Zea mays
  Peptide Sequence Number=SeqID_57898
atggaggcagatgggaacaacaaggaggaggaggatcctgaggagattgagccatcttctagtctggatacggcttactctggagtactgccttcacctaagcatcccgaatgggtgctcgatgggcatcttttcgctgggatatttgcagatgggaaaaggaccgcactcgacgtcaccggtgatggcaagcgaggtccggtgaagcttatcacctgtaccgccaccgtgagtcaccagccctag

SEQ ID NO: 14524 - DNA, 375 bp, Zea mays
  Peptide Sequence Number=SeqID_57899
atggggggaagtgaggtggccggagacaggcgtgagagaggtgggaatcccgcggccttcgtgcgtaaggagaggatccaggtgtacaatgggggtgtagcagagtgctacgtgtctagcggaggagagctagtagccggagagattttggcacccagctggtgtgatgtcgtggccgtcggaggagcgctggagcctggcggagggaaagctgtcggagctgttgagtccttgctgacgtcctcttgcttccgtaagggggctgagagccgccgtcgtcacagagtatgcggggcgccatcattgcctatctggcggagcgagccagatgggacgccggtcttgttccccatggcccgagtcagcttggggtag

SEQ ID NO: 14525 - DNA, 282 bp, Zea mays
  Peptide Sequence Number=SeqID_57900
atggccaaggttcctatgatcgaattggagctgaaatcaaagaaagacacccctgaagatgctctgtcagaacaactaaagaagatcctgatgggattagggtcgcctggggtaggatttggtgttagccgagttagggattctttactagttgacttggcgcagtacaagttcgctggaggcatgctcatcgccgttcaccatcatggacttgacgcagtaaagaaacagaaatacatggacctaagtgagaatgtcagcgagacagtaaatagtggctag

SEQ ID NO: 14526 - DNA, 618 bp, Zea mays
  Peptide Sequence Number=SeqID_57901
atggggatggagtggaagagaaggggagcctcttcgacgtggtcgacgagacctccgtctccaccaagcttggccatgctgcctccaatggcgtcgccgccactgcgacttggggcaactcgtatgtcaaccggtggaatgggcggcccacacgaacggcacttcgagatcctcgagaagggtcgtgcgctccctgattcattctaccatgctttaactgaggagcagtcgaagcatgtgcaagactacaactttgatcaccccagatctgtttacatgggagttgaattttgcatgaagttctatgtagtgtctattgttcaaagggttacagagagcaactatgatgctgctaatgctggtggtggtactaccactacgagtaccagtgctagcaacatttctgcccccttgtgttgcgatgtccggttcaaattagcacatgtaagggtctcaaaaagaagagctgatgaactgcaaatagcgcttatggagatggttaagcaagacattaggcaccaaatgccatcccggactcatgctcatgatggggcgggtacatcccacggcggggaggacacccccaatccaccacttgtacctcctaccctggcttag

SEQ ID NO: 14527 - DNA, 180 bp, Zea mays
  Peptide Sequence Number=SeqID_57902
atggtgggatgtccctcgggacggcttcgattcctcattagagattgctaccgccgcgccattgtgaacaagcttctacgtggtctaaccaccgtagaagagtccatgactgaggatcctggtgtccagcagatagaagtagctgagcaggagctcattgaaggcaagttgtgcccttaa

SEQ ID NO: 14528 - DNA, 294 bp, Zea mays
  Peptide Sequence Number=SeqID_57903
atgccgccgtcgtggggctctactggcggccgtcttcgtccatgcgctccgcctggtccccgtgaagaaatttgtggctgcgccgtggtgggatgtccctcgggacggcttcgattcctcatcggagattgctaccgccgcgcctttgtgtacaagcttctacgtggtctaaccaccgggcatatgcgccgccacatccagctttggggaaggaaacggtgtgtccattggattcaggatgtagggatgagattagatctggggattgatggctccgagccgttggtagtttga

SEQ ID NO: 14529 - DNA, 174 bp, Zea mays
  Peptide Sequence Number=SeqID_57904
atggagcaggggtcagcgaggcgtgaactccggcgagcacagtcgcggcagctgcgagccgcgagagagcgatcaagggcaaggagagaaggactgggcgcaaccttttatagccaaagggaggaggaatttgcaaccgcgaccattgaagccgaccttgaattacagaggtaa

SEQ ID NO: 14530 - DNA, 681 bp, Zea mays
  Peptide Sequence Number=SeqID_57905
atggctgaaaggtaccaactcccacggagttgcgttcctccaacgacgaggcggaaagacggcgggtatcccccatccgggggcttggaaggtggaaagacacgacgcacaagggagcgcgaagacatggtcgccttccaagggggtcaccctccttttaaaggcggctctccctacttgcgtccccagccgtcgcgggctgagtcttctccaacacgctccaaggtcttcccctacggcgcgggggctgggtcccacacgtcatgcaagccggctcaaagcaaagaagccaaatcgccgtgcgcgaccagcgggcgaaagggcgggcagccatgcaggcggcatgcaaccgcgccaagtgggcacacttctccgactcccaacacgcccggcatggaggcccaggcccacgcgtcatgcaaccggcgcgccgagtgcttcgtgcatgcaactcaactgccacttgtgccacaaccgcgcctcctcgactgcggaaccaataccgcgactcgaggcgaccccgagcacgacccagcggcgccagcctggcgcgacggtcaatgcggccaaaaatggaccggcagtaatggcggtggcaggcgggcaggagcagcggtcacgtcgccagccaagcctacgtcctatccgggggcagcgagagaactctctctcacggcgtga

SEQ ID NO: 14531 - DNA, 1068 bp, Zea mays
  Peptide Sequence Number=SeqID_57906
atggcgcctcctgttgacgtgactgggctgcgccctaggttgggcgatgtggaagctcctccgaagccgaggtcgaatctgtcttccgtggccgaggtcgagtccgagcccctggttcgggcgaggcggagaccgtcggctgaggacagggcggagtccgagccctggggtcgggcgaagcggagttcgtcgtcttctgggctgagcccgagtccgagccctggggtcgggcgaagcggagttcgtcgtcttctcgggcagtgcccgagtccgagccctgggtcgggcggagtggagttcgccgtcttccggggcttagcccgagtccgagccctgggtcgggcggagcggagttcgccgtctttctgggacttagcacgagtccgagccctgggtcgggcggagcggagttcgaccgtcttgcggggcttagcccgagtccgagccctgagtcgagcggagcggagcttcctatggtgcctgcggccgggcctgactgcctatcagcctcactctgtcaagtggcaccgcagtcggagcggcgcaggcggcgctgtctttctgtcaggccggtcagtggagcggcgaagtgacggtggtcacttcggctctgtcggctggggggcgcgcgtcaggataaagctttatgctgatgggggttaccagctgagaattaggagccttgaggcccgggtgtacggtcgggtcccaagttctcgggctggtatgttgacgctgtcaacggtccggccggagccaggtttgcgagagcagcccccgagcctctgcatagggcgagaggacgatcagggacagactcgacttttttacatacgcccctgcgtcgcctttccgcaaggaggaggggggaaaacgccatgttgccctcgatgggcgccgaacatggtgtttccggtgagctgcaggcgggtaatccgagtggacgtccgtgccccattcgttagggattggctaggggcccagaggcacgcccaaaagtacctgcgggtgatctgccggacccggtcccctggcgacggggtccgagggctcgatgcctccctctga

SEQ ID NO: 14532 - DNA, 1737 bp, Zea mays
  Peptide Sequence Number=SeqID_57907
atggaggagcttcttcctgctagtgctggcagtgtgatagaggatagcctggagaaggagcagaatgataccagtgaagaagaggggaaatatcttgcagtatctaaagaaggggctgagaatgaggtgttgcagtttcagttagcagacgatgaaataagggaggataaagataaccaaactgaagcgagaaaagggaatactgctaataccttgcagtgtgacctgttagacagtgcgctcggcctggaggaaaagcatggcgatgaagatgcatcaaaatcacagacatccaactctgatagaataggattcttcattcctgtcatgtcttttatgggacacaatggtgaggaaggaattaatagcacaccaactaagggacatatatctgaggtagatccttcggaagtatcaggaacaacatctccaaaattgccttcaaattcggaagaagtccatgtagcagaagaaaagcttgatagctctaccgagacacctgcatctaaggttggtgatgctgaatcatcagaagtatcacaatctacaggacatccttcaacagtagaagacatccaggtccatcaagttagcaaacatcctggtcctagtgatgaagtagagccaaatcagcttagagggtctgttggagacttacctgagggtagtgcctcgtcggcgactaccaaaatacatcaatcaggtgacaccgagacaagggaatctattcatacaagaatgggattggaagatacatctgataggaatattttgcaggcacaactagcagagtctgcattagaacctgctgaacctgaagaatctttagcaatagaagaggttcttgtaactacaagcaatgaggcggataaagaatcagctgctgtcattgaggctgtaccagccttgtgtgagacaactggtcccaaggaggctgctgctactgaaaaagcagtgaaagaggttgacaacattgtgaaatctttggatgaattcaccttcgaggagggagaatcaaaggagatgcaaaagaagcagccgcaagattatgtttctgttgatattgttgataatagattactgcctcatttgccacacgggttttcacaaaacagtgagcaatataaggtggagcagtccccacagattatatgtgaacaaggttctacgcatccgggccagtatgatgaggatacatctttatctttaacagatattcacatgggtgtatccttccagaacttactgattcaaaggcaccacttggatttctattcaccaatcaacgtaatttttgaagcctatgcagcaaagttcgattcatctagcggttcttttgcacaaaggaattccaaattgctgaaggaaactgtgaacatgcaacctgagcaggctgactattatgtcgttcgcaatcacattgtagtgctctggtgttctagtccttgcactaatgctgatgagtatcacgccattgttgttgctgctgattttggagacatcgttttcaaccagtttttggacaaagtttgtcggttgagacaggtggttgtagatgttgcaccacatggtgttgaagtgacgttaggcatggcacttgcagcattccgggcagcacgtggtgttgcagctaagcatgaagcgaaattgtttctggactggcatttggaaaatctcgtgtatgctattgctgcctcccttactgatctctccatggccttatggggatctgtatga

SEQ ID NO: 14533 - DNA, 276 bp, Zea mays
  Peptide Sequence Number=SeqID_57908
atggagtcatggacactttatcctcagacctcagctgaggcagcttcaggcttcagcaggtctgcagatctcttcgcagatgacagggtgaggaccctatcgcaccaggtctccacacttggggacagggtgtgggaactggagcacaaaattacccagctgatgggcgagaaggccaagctggagaagcaactggaggaggcaaaggcgatctcaagccacaaggaagaggtggggagaagcttgaaggctgaaaatgataagcttcagtcggag

SEQ ID NO: 14534 - DNA, 381 bp, Zea mays
  Peptide Sequence Number=SeqID_57909
atgggggctttaaagagaagcttcttgaggttctctagggcctcttcgtcttcgggcatccaagtgaagtgctcggtcttcctcaagaggcgatataggggcagacccttctcgccaagtcgcctcaagcatggagcctatgtggtcgctgaacacatggttcatgcaacggtgatacgtggctcctacattgcgcagcctgaagggcatgtattgttacacaacagtctgctggacttgcatggaacatcgtggatgcagcgtccttcggtggtggaaggctccaacatggtgtggagtaggagcgcagctgctaccaggctttggctcacccggttgagggcgggaggtttggtggcatcggcgtcttcctcaatgtga

SEQ ID NO: 14535 - DNA, 444 bp, Zea mays
  Peptide Sequence Number=SeqID_57910
atgacgatacccgcgagatcaggatgtttactcgtgccgggaacgatctttctccgagggatagcagcagagtttagtaagaactggagcacggacgacgcgtgcgcggggcggtgggtgggcgggcgtgggctgctcggcggacggccgccgcgtcacctcgctgaccctgccgttgctggacttgcgcagcccgctcgacctgctgtcccacctgggcacctggcggagctgcgcgcgctggacctgcgcgagaaccgcctcaacggcacgctggacggagttgaggatgccggcgaggtcagcgccgcgaacgccaccgatgactgcaggaggttgccgtttggcacagcgagcatcgtcagcgacggcgtgagttatgagataaaggatgacatatacgagctgtccgagatgacatcgaagagaaactcgggcatgtga

SEQ ID NO: 14536 - DNA, 729 bp, Zea mays
  Peptide Sequence Number=SeqID_57911
atgaagagaccttggagtacgctgcttcgacgttatcgggcccgctgcttcgacgtcgtcgaccctgctgattctgacccgcgtcatctaccagacagcacatcaaccaccggagaggtcttcggcaaggggatcccctatctcctttatgtttattcttgccatggacgtcctgcagcagatttatctatcactcttggcattcttcagctttttggggatgcctctgggctgcacaataatgcccagaaatctaatgtcattcctatcagatgctcaatggaagatatggtagaaacccaagctcacgcgcacaagagatcgcgcgaaatcgagcggcgggatctaggtgcaacaaatgcgagcgggaggagaggaggtggcgcgaaccttgtggacatagtcgcacactcgtactcactctccttctcagagtcctcgaaggtggtgacgcggtcgccgtatgccatgacgcgaggtggcgacgggggaggggaggcgctgcggctgagcaatgaggaacaacttgcgccgacttgtcctcttcctcctccgcgcgcgctcagccttggtgcggcatgctccgcatttagcttcctctgcacacgacgcttgatgaaggtggatggtgcgaggcgggcgagcggttgttgctcacagttcgttgctgtacgcgcgatgaacaagggatcagtctcatctgcgcggagatcagtttcacctgtgtaa

SEQ ID NO: 14537 - DNA, 177 bp, Zea mays
  Peptide Sequence Number=SeqID_57912
atggcatacggcgaccgcgtcaccaccttcgaggactctgagaaggagagtgagtacgagtgtgcgactatgtccacaagggagcagctacagaagcagccagagaacatagggccttcgccccaactgcctcccaacgacttctctcctcgtctgcccaagcaaggatataggtga

SEQ ID NO: 14538 - DNA, 606 bp, Zea mays
  Peptide Sequence Number=SeqID_57913
atgtgcactgatgatattctgatgtacccagacaactcactggtgagagacataagccgaatgcagcagagcaactacgggagggaaggattctcgcatataactgtcacaggtgctcttgctcacgggacgaaggagatagctactgcccagggctgtctcctaaaatatggggacctggagcgaactcaaccaggttctgaggctgtcttcggtgtggatcgtgtggatcgtgtggaagtgtggctacaaacatttggtccaggtcaaaggaccccaatccacaggcattcttgtgaagaggttttcattgtcctcaaggggaaaggcacgctcttactcgggtcgagctcgctgaagtacccaggacagccgcaggaagttcccgtctttcagaataccacattttcgatccctgtaaatgatccacatcaggtctggaattctaatgagcacgaagatttgcaagttcttgtgatcatatcacgcccaccggtcaagatatttatatatgatgattggagtatgcctcatacagctgcaaagctgaaattcccctacttctgggatgaggactgcttgccagcaccaaaagatgaactctag

SEQ ID NO: 14539 - DNA, 597 bp, Zea mays
  Peptide Sequence Number=SeqID_57914
atggcaggcaccctgaaggagcagctgaattccatcacgcccgccctacaagaaatgcagatgagaaaggacgccagagtaaagcagttcgtggaggttcagactgaaatacacagaatcgcttctgaaattgctggacggttagcgggtggagctatcgctgtgaacgaagaggatctgtcgctaaagaaactcgaggagttccaaagcgaactgcgaagactgaagagagaaaagagtgaccgcctctgcaaagtggaaaaatacaaagttctaattcacaattttgcgaaagtgatgggaatggatccttcaaagatacttgctagtgttcacccaaggttgctagatggaccaaatgagcacgcagccccgcaggcagaggtggtcgctggaggccggcgccggcgccatctcggtgagcctgcagagcacccgcgcgacgctctccctggccgcatcgctgccggcgctcgcatccaggacgcggaccacctcgtccagccgcgccatgtgcgcgtcgagggccacgcccaggacgttcaggtcgctgcgcatgcgcgagaaccgcctcaacggcacgctggacggagttga

SEQ ID NO: 14540 - DNA, 340 bp, Zea mays
  Peptide Sequence Number=SeqID_57915
cccgagtccgagccctgggtcgggcggaagcggagtcgccgtcttctggggctgagcctaagtccgagccctgggtcgggcgaagcggagcttcctatggtgcctgaggccgggcctgactgcctgtcagcctcactctgtcaagtggcacagcagtcggtgcggcgcaggcggcgctgtccttctgtcaggccggccacctttgcattaaatgctcctgcgatttggtcggttggcgcggcgatttggtcagggttgcttcttggcgaagacagggcctcgggcgagccgaaattttgtgctgatgggggttaccagctgagaattaggagtcttgagg

SEQ ID NO: 14541 - DNA, 126 bp, Zea mays
  Peptide Sequence Number=SeqID_57916
atggatgttttgatgattaggtaccttggagaggatcagcaaggacttgggaaaggccaagggataagccttcgtggcgaggtcattcgggtgtcacgggtgataaccaacggagccgtggtgtag

SEQ ID NO: 14542 - DNA, 618 bp, Zea mays
  Peptide Sequence Number=SeqID_57917
atgccccctgcaccaccacagggcatcctggcttgtaacatcccaaaaatcccaacccaaggcggcccaactccgcgcgcccgcgcctccgctgacagatcggccccaccagtcagcgactcgactccctccctctcgcgccgctctctctccctggtagctcgggcccgcctgtcagcaccatcgtctcgcccatgcctcaccggcgcgttcgccgtcgagcgcctcacgccctgtcgccttgccattaaagcttgcaccggcctcagcgaccaccccgccactgtgtccgagccgtcccctcacccctcgcctgcccgagccgtcccaatcgccgttagctccattcccgccatcatggcgagctcgtcggcgctcggtgtcccctccatccctctccctctcccgggcgcctataaaaggagctgcccgagccccgtcctctccacactagctccgaccaactcctccgtttctccccaagcaaatcaagctagcgccgctgtgcttccccgtcactctgggcacccctccccacctcctattgcacccgacaacctcaccggcgacctcaccgctgtggacacccgtcaccgcgccgcggactggccgccctag

SEQ ID NO: 14543 - DNA, 1341 bp, Zea mays
  Peptide Sequence Number=SeqID_57918
atggacgcagccaccggaaggctctcgttcgcgtccccactcaagggacgcgaaccagacattaaagccaaagagtcggaggacgcctcctccgcagagctggaggatggtttccaccaccagaagctggaagaagaggtggccagccgacccgcgcgggaggtagagccccggttcacctcgctctctgccccagcaaggatgatgaagatccttgaagctgagggcgggaccaagatcgcagcccgactcgcttctccccaccaccaaactggtggtcaccgtcttggccaacgcgggctaagtcttctccaacacgctccaaggtcctccccctacgacacgagggctgggtcccacgcgtcatgcaagctggcccagggcagaagaagccaaaccgccgcgcgcgggaccgggaaaggggatactccgaaagggatccttctacgcgaaggaaacgggccccgagcccccctactgatcagaggttcgaaggctggcccctcggaggggttcaacagccgcctcagagcgctcgggctccgcgcccacttctggtcagaggttcgaaggccgacccctcagaagggttcaacggccgcctcaggccactcgggctccgcgcccattactgatcaggggttcgtaggctggccctcgaaagggttcgacagtcgcctcagacacagagcgagggatgaccctagcggacacaccttcggctcgcccgaggcccggtcttcgccaagaagcaaccttggccaaattgccacgacgaccgaccgtatcgcaggagcatttattgcaaagcgtcgcccgcgttgctccactgctgtgccactcgacagagtgaggctgacagcggccaagtccggcctcgggcgtcataggaagctccgcctcgcccgaccccagggctcggactcgggctcagccccggaagacgacgaactccgcctcgcccgacacagggctcggactcggcctgggccccggaagacgacgaactccgcctcgcccgacccagggctcagactcgacctcggcctcagccgaaggtctccgtctcgcccaacccaagggctcggactcgacctcgacctcgaaagacagactcgacctcgacctcggaggagcctccgcctcgccctacccagggctcggaccgaccacgtcacaggaggggccatcattaccctacccctagctagctctggctacggggaaccagaccggtgtcccatctggctcgccccgcgctcctccgacggccacgacatcacacgaacagggtgccaaaacctctccggctgccacgacggcatgtacttagggcactag

SEQ ID NO: 14544 - DNA, 441 bp, Zea mays
  Peptide Sequence Number=SeqID_57919
atgggaatagtcctgcctcccgaagaggattcaacggcctccgaaggccacaacgaacatcggttgagtcgacaggaaataagagtgattcggcaccgcggcgactacctcctgcacccggaaatcgccagtggcggcgaggcgcggcggtgcagggagaagggcgacgaggcgcggcggcgaaggaggaagggcggcgacgacgacagccacgggggcgccgagccgtggcgccgcagcagtggcgccggcgtcacctgcgccgccaccatcgaccgtgcggaccgcctcaggttgtacccggctcctctcctccccgcagcgccgccggcggacaaggacaagcagaaaccgaggggcgccgttttctcgcggagcaggcgcgagcacggtcgcgcgggtgtgcaggtgcaggggacgctcgtccgcggcgcggcctag

SEQ ID NO: 14545 - DNA, 668 bp, Zea mays
  Peptide Sequence Number=SeqID_57920
atggctgttcgaggaagcagtgctttcaagctacgtttctatcccaacttagaagtacaaaatattgcacaagaatgggttaaagagagccggaggctgttctatctaagaactgccaacaatgtcacaaataacatctataagggaaacactcctctatggactggaatggtacaaaatgaactctctgaagattgcaggggtttgaactacacttatttgaataatttgagggaacgcgtatcgtccaaatcaattgtaaatagacatggtaataaccgagaactgatcgggcatagtacgataaatcagcatgtgaaatcagtgccagctccagtacgtgttgttaatgatagtgtcaagtgtttcagcatgcctagagcctctaaggtggagattccttggcctgcctattcaccagcggaggatcctttgcttgataaatctaatacagaggtaattttggagcttgaggataaagttcatgatggtgatgacaaaaagaaaaaaactgttgtaaaaaaggtggtttcacctttcccaactaaagcggccttctctgaggaatctttgaaagcacgggaggcacttgctagcatctacgacaaagttttggtagttgacgatatcgagtcagctaggaacattgttaaactgctcactacaaa

SEQ ID NO: 14546 - DNA, 1350 bp, Zea mays
  Peptide Sequence Number=SeqID_57921
atgtcgatgctggacaccttcttcagcaagggcggcggcggcggcttccgcggcgccaagtgcaagacgctgctgaagctgtcgatcccgcggataaagctgctgcggaaccggcgggagctgcagctgcgccagatgcgccgggacatcgccaagctcctagaggccggccaggaggccactgcccggatcagggtggagcacatcatccgggaggagaacatgatggccgcgcaggagatcctcgagctcttctgcgagctcatcgcgataattgaattgctttctattcgtcctcctcctgttgatgcaaagttgaaactgctgaaggagatagctgaggaacatgaagttgattgggatccatcagagacagagacagaatttctcaaacctcatgaagatctattgaatggaccgacctacttcaatgtatccacactacctcttcccaaggagaaacatgaggaaacagtagttgcaagtgctgccgagcagcctgatgaagactatgagtcagataccggtcttgactcactggatttgcctgaagtcccaaaagctgcaattcgtccaccttctgacgcaccattgaccccagatatttgcccacatgttcagggctctcagtcacttcctcatgagttctcagatcctggtaacttggaggagaatccaacagctggtggtgcttttaatgttattcagatgaaaagcttggagcatcttgtttatgcaccatctgatcagtcaaacataccggatttgccaaatgaaaagaagcagtttattccttttgcatctccaccgcccgttctttctccttcggtgggaaaagccgagacagttccctcaccttctctgtctcctccagtgaagccgacagagccagaaccagaaatcctcacaaagaaaattgatgaagtgaccacacctccagtacttccctcagattatattttcacaaaacagccagaacaagtgcggacaatctctccttctgagagtggggcaaatattgacttggacgacgttttatctgctgcgcagacagctgctgaatcagctgagcgagctgcatcagcagcccgtgctgctgcaaaccttgcacaactgcgcatttcagacctgaagaagaattccaaggtttatagcaattacggtgatagcgtccaaaaggaaagccatcatcagactgaggcgacacaggaaccggtatttgatcaccaggactccttcaccaatgatacacaggactatgtgtcatcccatgtgccgcagaggtcgtcatctttggaggacgatccatatttctcgtatcccaacttgttctcagcgccaaagccctga

SEQ ID NO: 14547 - DNA, 588 bp, Zea mays
  Peptide Sequence Number=SeqID_57922
atggttaaaaattttggcagcaaaacagtgcaaatagcagtaaatgctgtggtaacttcacacctactcgtctgtttatatagtgctgcaggtaagaaggcgaagtggcagggtttttacaccaggcgggcagtaacttgtactcgctgcgcagtggaccgcaaagaccaaacagtgactctgcaaggtgggaccgacacgatctcgggaaatgaatcgtttctcggcaacgagctcagggaaggtgtttttcggaccttcggcttcccgaagcttgagaggattttttcacggttcaagctcgttacgaaaaacgatctagcgccgcgaaaggggctactgttggggccatgcttcgttgcgccgaaggtcttgcgtgaagaagcagcttcggctgaaatcgtccccaggaaatggccgaaggaccgaagccctagccctgaagacttctttggcgacatgacgaaggtcacagcttgccgaaggtggtcaaatgagttcaccggaggatataatgatcctcagaaggaggttatgaaggacaaaccttcattatctcaatatgtaatgaaaaacagggacatatga

SEQ ID NO: 14548 - DNA, 1584 bp, Zea mays
  Peptide Sequence Number=SeqID_57923
atgaacacgacagaagctgtcggcaaacggctccaccacttggcttcggagagcccagatatagacgctgagcctgacaatcgcattgggcccttggagacagtcgactttccgaagtccaagtggctgggcttgcttggcacgacaatatgtacggattccttccgaggtcaccagtccggatcgttgcatcgcttcggagataggaacagtctccgctccttcggcttcgcctccctcacgctcaactctagcggtaagaaggtgaatcgtcaggatttctacaccaggcaaacaactgcttacacccgctgcgcggtggaccgcagagaccaaatacatttgagaacgagtccccaacatgggtcttcttcaagtgaagaagagaatgatgaaaaagttgccgccatcgccagggacttctcttcaccaccactatcgccatcatcgacttctcacctatgcctcatggctagaggtgaacggaaggtacaaaatgatattgatattactgatgatagtgatagtgatagtgatgaggaatttgcttcaccttcctatgatgaactagctgacttgcttaaagaatacactcaaatcattaggaagtcaaaagctaaatgtgataagttgaaaaatgaaaatgaatctttgaatgccaaatatgacatagttatgaaagttagtgatgaaatgaaagaagagaacaaaactatatcatccactgtaaatgagctcacaacctccctgaaagatgctaaggataaatgtgacaagttaaatgaagctaatagggagttgaaagatagactagtgaaaatcaagaaagactatactaagattaaatttgatcatgataatcttcttgttgaaaatgaacttttatcttgcaatacacatgaggctattaaccctgttgttaagattgatgtagcaacctcatgtgatgatttgagtcaaggagagcaaactagtctacatgaggaattgaccgaaaaagttgaagtcttgactttagacaaccaaaaattgaagagatacttgactgatgcaactactagaggaaaggttgctattgagaataatgatttcaacaatgagttggcagtggataatgaaaggcttaaaaatgaggtcaagaaacttaagagtgaaaatgaacatcttgcaacaagtgtgcaaaagttcagcaagggccaatacctccaaaatgaattgctcatgaacactgtcatgaaaaacaacaagagtggtattggatacaatgcttttgtgcaaaggaaagcaactactcaatacaagccaaagcagactcataagcctatcaaatgctttgagtgtggaaaagaaggtcactttgcccacaactgcaaagccaaaccaccaactcccttgcctaagcactcaagaccatttgctttcaatgctcattatgttctaagaaaagttgcaaatggaaaggtcaaagttacattcctaggtccaccaagcaagagtagacctagacaaatttgggttgcaaagtccttgattgagagagtcactggtcctatgcaatatagggccctcaaaactcaagcttga

SEQ ID NO: 14549 - DNA, 453 bp, Zea mays
  Peptide Sequence Number=SeqID_57924
atgggtttgttaatgggttcaaatggaaacccagtggtgggtatgggaaacccgttgggtacccgaaacccgcatgggtatgggtttgggcaaaattttatacccgtcatgggtatgggttttttagcgggtgtattttttcttcgcgggtacgggttcgggcaagtaatacccagcgggtttttacccattgccatctctagtagggttttactggccaatggccaagcaagatgcaaccggcttagtcaagagagagctcaagaaggatgcacacatgtactagcagtcgttgacaagttcaccaagtggatagagtacaagccaattatgttattgacagtggccaaggcggtggagttcattcaaaaatatatacagggcaccaaggttgatgttcaagaacataacaaaaagcagaacatctcggctagaagagaccgaaacacttga

SEQ ID NO: 14550 - DNA, 2664 bp, Zea mays
  Peptide Sequence Number=SeqID_57925
atggggaagcccccgggggccaggaatccggcggaggcggaggccgatggcgacgacgcggtgttcctcgagctgtcgcgggagctcaaggaggagggcacgcggctgttcaacaggcgggacttcgagggcgcggcgttcaagtacgacaaggcggtccagctgctccccgccgggcggcgcgtcgaggcggcgcacctccgggccagcatcgcgcactgctacatgcgcatgagccccgcggagttccaccacgccatccacgagtgcaacctcgcgctggaggcggtgcccaggtacagcagggcgttgctccgccgggccgcctgcttcgaggcgctgggcaggcccgacctggcgtggggggacatccggacggtgctgcgttgggagcccggcaaccgcgccgcgcgccagatctcggacagggtgcgtacggcattggaggataagggtatctcggttgccttggatgtgctgccagaggatgagaatgagattgctagcgccaaaggagaggagaggaagaaatctcgtaataagcgttttgattcggttgcgggggggcgggagggtgaaaatggtattgcgctactagaatctgcttccacggagaagcaggctggcccgagacaaacaaatggaacagggaatcatcaggatcatactgaagatagtgaatccaatggtctcgagaagctagaacaaagtactgagacgggagagaaggacatgggcaaaaagcgaggtgcacacgctgctggaaagaaaccgaggtgtggtgagagcaagcagcaaaagcattctgcagtgaatcattgtcaggacaacattggtgccaaggaggaagtcatgaaggatgtgaagctggtctttggagaggacatcaggtgtgctcagatgccagctaactgctctctgccacaattgagagaaatagttcagaacaaattcccgtcactgaaagcgtttctgatcaagtataaagacaaagaagaagacttggtgacgataaccttgtctgaggagctaagctgggcaagcaatctggcagtttcgcaagtgccaatccgattctatgttgtagaggttaatcatgttcaagagcttggtgtggatggggtcaggagacgtccttcctttgccacgttagagagaaatcgtgatatcatgttggataatgggaccattgggcatgatgttgagcataagcattacgctgatgactggatggtacagtttgcacagatatttaagaatcatgttggttttagttctgatgcatatctggatctccatgaccttggcctgagactgcactatgaggctatggaagacacaatacaaagagaagaggcacaggaaatatttgaggttgcagagtccaaatttaaggagatggcagcactggcattgtttaactgcggcaatgtccacatgtctcgtgcaagaagaaggccatgcttggctgaagatcctttacaggaatttatacttgagaaagtcaatgtttcatatgattgggcatgcacagaatatgccaaagctggtgcaatgtttgaagaagctgtcaaaactaaatctgacttttttgaaggacttattgctcttggccaacagaaattcgagcaggccaaactctcttggtattacgctcttgcatgcaagataaatatggaaactgaagttttggagttgttcaaccacgcagaggataatatggagaagggaatggatatgtgggaaagaatggagacattgcgcttgaagggactgtctaaaccaagtaaagagaaggttgtacttgagaagatggtcttagaaggttttgtgaaggatatatcagcagatgaagcatttgaacaggcttcaagcatacgatcacatataaatatcttgtggggaaccatcctctatgaacgttcagtagttgaattcaatctgggacttcccagctgggaggagtcactgactgttgccatggaaaaatttaagatcggaggtgcctctcaagctgacatcaatgtgattgtaaagaaccattgtgctaatgaaaccacccaagaaggaacttctacaataatgccaaaagagaaacaatacttacgccatgaatttgagatccttggaattgaattccattctaataatagtaatttaggactcagtttcaaggttgaggagatagttcaggcatggagtgaaatgcatgatgctaaaaattggagaagtggacccctgtatttccggcttcaaccagtgcgtgtccgtagggataaactagccaacattgcgagaacaaagtggtggatactaaaaggggatactatagaagtcttcaagaaaaggaccatcaaagatggcacttggaaggaagaagttgacacaaacaatatgtgggagaagatagcaacttgcattcggaaggtggtattagagttagagttgtgtggagcaaccaaagggagtggagaccaagctaaagatactttgtggtggaacgagaaagtacaaagagcaattaaggagaacaaagaatgctacgaacatttataccatgacaagaatgtggacaacatagaaaagtacaaggtagcaaagaagacaacaaaatttgttcatcttagaagctttgttgcacttactcatggaaaaaaggaataa

SEQ ID NO: 14551 - DNA, 2484 bp, Zea mays
  Peptide Sequence Number=SeqID_57926
gtagcaaatattaatgccaaagaagagacaccagttggtcatggagaagtaatatgctttagcatctattcagcaaattctgatgtacaggcagctgattttggaaatggcaaaacttgcatttgggttgatgttctagatggtggaaggggtgtcctgatggagtttgctcctttctttgaagattcatcgatcaagaaggtttggcataactatagttttgatagccatgtcattgagaattatggaatcaaaattgctgggtttcatgctgatacaatgcatcttgcacgcctttgggattcatcaaggaaaattgatggtggatattcacttgaaggacttacaaatgaccgtagagtcatggatactgttccagaggatttacctaagcctggaaagacatcaatgaaaaccatctttggcaggaaaaatattagaaaagatggatctgaagggaaagttgtatctgttgagccagtcaagaagttacaaagggaagacagagagttatggatttgttattcttctctagattccatgagcacattgagactttatgacagcttaaaaagcaagcttacaacaaggagatggatcttggatggttgtcctaggggcaccatgtatgatttctatgaacagtactggcgtccttttggtgccctacttgtgaaaatggagacagagggaatgcttgttgaccgtggttacctttcagagatagaaaaggctgctattgctgaacggaaacttgctgcagataagtttcggaaatgggcatctaaatattgtcctgatgccaagtacatgaatgtgaatagcgatattcaaattcgccaacttctctttggtggcattgaaaatagacacaaatctggtgaaacttggccacatagtaaaacttttaaagtgctaaatgaagaaagtgttgctacagagggtaagaagacgtcaaagtatcgtacaatcaaactttgcagtattgttgaagatctgaaaatcgatatgttcaccccgagtggctggccaacagtcagcggggatgcattgagaagtttggctggtaaaatacctacagaatatatttacacaatagatgatattcaagatgatgatgaatataccagtggttcagaaaacccagatgggaattcctcttatggaacagcatatgaagcatttggtggaggaaagaatggaaaagaagcatgccatgcaattgcagctttatgtgaaatatgttctattgattctttgatatccaatttcattcttccgttgcagggagatcacatatcatgtgcagaggggcgcattcactgttcattgaatatcaatactgagacagggcgcttgtcagcaagaacaccaaatctacagaaccaacctgcccttgagaaggataggtataggattcgccaagcttttgttgcagccccgggaaattctcttatcgttgcagattatggtcaggcgggtggtgatttccattctaggacagccatgaatatgtatcagcatatccgtgatgctgtccaagaaaagaaagttcttcttgagtggcaccctcaacctggtcaagagaaacctccagtgccgctattgaagggcatgtacaaccctgagcccctggattggttttccaagcagaagatacagctaagagactacacagtgcaatggaccatctctaaacgatgtctcttaataagttgcggtattggggtggcggaggcaggttattgtgatggcgatgaccagaagaacccaagtgtgggagtgtcccaaagcctagagtgccttgaggcatcgggagtttgggtcttaggctcttccttcaagacaagaatagctttattccttcatggggtccccgagatcgaactacccggaatggtgggccctgcttttgcgagagcggaggatgcttttggcgctgagaggaggaaagctaaaatgcttaatttttccattgcttatggaaagacagctgttgggctatcccgggactggaaggtttctgttaaagaggcaagagatacactgaagctctggtacagggatagaaaagaagtgttagcttggcaaaaaagtcagaagaagcttgcaagcgagaagggtgaagtctacactttgcttgggcggtcgcgccattttccttacctgactcagtatggtcctggccaacgaggtcatattgagcgtgctgctataaatgcaccagtgcagggaagtgcagcagatgttgctatgtgtgccatgcttgagatcgaaaggaatgtccgccttaaggagcttggttggaggctcttattgcaggtgcatgatgaagtgatactggaagggccttcagagtctgctgaggtggccaaggctatagtggtggagtgtatgtccaaacctttctacggaaccaacatcttgaacgtcgacctggctgtcgacgccaagtgtgcaaagagctggtatgctgccaaatag

SEQ ID NO: 14552 - DNA, 1569 bp, Zea mays
  Peptide Sequence Number=SeqID_57927
atggaggcggcagcactgctctgtgcaagtgtaatctttaggcggccaaatagctcatcactatctttagcttgtgaggctgcatcttgggcctccttcgccatgcccatccgagcatatgcctacacaaacaatcacaacgttgttactggttctcaactccactttctgaaatcggaagtcatgttaatcaaatatctggataagcttatatctaaatggaaagtgatggattatcaaattccaagccaaatctctactattctatatgagtctaacgagggcgtccaccatgcccccgccccgactgtcgagtcctgcaatttcagccgtgtaggtcctgccgcgtctcgcgatcccagctaccccaccaagcctgtcctgggtttctgccgccggctgccatcacgcgatggatcccctctccctcctgcagctccctcgtgcctcgcgcccaccgctgcccctggccgcggccgccgcgccattggtctccgcgaggctaagcataagcggcggggtgcgccccgttcggaggtggcggcggcgctacgccgctcggctgtcggtgtcctccgtggcgaccgagacgccgaggagcagcagtcgtcgccgtccggggaggagcggttcgactggctggacaagtggtacccgctggcgcccgtgtgcgacctcgacccgcacgtgccgcacggcaagacggtgctggggctcagcatcgtggactggtacgaccgtggcgccggcgaggggcgcgtcttcgacgacgcctgcctgcactgcctagcgtcgctctccgagggccggatcgacgacagggggcgcctccaaacaacatcctgtggttctaccagagggctgaccctagagtacagggacgtgctgcaaaggaagcgcccgccgctcattccggaaattgacgacccggacttcgtcaccgtgtatggcatcagagaccttccttacgggtatgatattttggttgagaatctcatggaccctgctcatgccccgtatgcacacaaggggatcatgcggggcatccgcaagaaggaagatcctggaagattctcatggaccctgctcatgtcccgtactgttcccaaattcactgacacagtgcgtagatttcgtgatagaagatatgaatacaaaggtcttaacgaaacatggaaaggaaaactcgcagaagcgaaagccagtggaaattctatgaaaattcagaaagcgcaggggagcaagatggtactctatggaaatggctggtgttgtaacatatactggtgcaaagattatccaaaatgcccgattacttgtagaaaaattggaaggccactggaactggatacagatggcatttggtgtgttttgcctggctcttttccagaaaactttactttcaagacaaaagctgggaagaagctaacgatatcttatccatgtgtcatgcttaatgctgacgttgcaaggaacaacactaatgatcaatatcaaacattgaaagacccagtaaacaagacatatacaacacataattatgttccttggtccgaatatttactataa

SEQ ID NO: 14553 - DNA, 96 bp, Zea mays
  Peptide Sequence Number=SeqID_57928
atggcacacgcgagaacacaggatgatcaactaacaaacaacgccaccatcagaaaggacacatcgatgaacagaccaaaatccacctttagctaa

SEQ ID NO: 14554 - DNA, 555 bp, Zea mays
  Peptide Sequence Number=SeqID_57929
atggggctgtcaatctcgtacccaccggacgactacctgccagcagtggaggacgacatggggcggctgttcatccggtctctcagcttcgacgacatggaggccgccgccgattcgccttcgtattcgccttcggcattgccccccgcctttggctccaggaagctgatcatggagggctccctgggcttcttcgaaagaagagaagctgacagcgtccagatgcagaacgtgttgtccatcaggaatcctaaacctcctgatagagaagcctgcagcagcgtcagtcccggtcatgaaaacttgcataactccattgacgaagctatcatgttgaaggtattgatcaagatcatatcaagaaatcagaacaagttatgttatacttatataggatatgtaccacttccatgcgcacctgtggtgggagatcgagatccagtgtggcctcaaccaccccaacgttccacgatgaagaacgagtcgtcctcatcctcgagcacgcggcccttggcgagatcaataagatccttcacgccactggccgctcagtaa

SEQ ID NO: 14555 - DNA, 534 bp, Zea mays
  Peptide Sequence Number=SeqID_57930
atgggtggccagatgccggacgccgacgggaaggcccgctcggcggactcctcgtcctcttacgggtacccgccgtcggcgccgccgcagcaccagtacggcacctttggtcccccatccggagcctccggggagtttccgcagccggcggtcgggttcccccagccggcggcgccgcctgggatgcagcactacccgcagcctcctccggcgtcgtatgccgtctacccacccccgcagcaaccctactcggccgccgcgccgtactacgcccaaggctaccagatcgctcaaggttatattcctgttgttgaaggaaggcctgttagaatccgtcctcttccatgttgtggccttggcatggggtggtttctgtttataattgggttcttctttgctgccattccatggtatcttggagcttttgtgctgatttgtgtccgagtacgtgattacagggagaaaccaggatatgttgcttgcactattgctagtcaactcctgtcactaaactacaccattgcatttcaatag

SEQ ID NO: 14556 - DNA, 1137 bp, Zea mays
  Peptide Sequence Number=SeqID_57931
atggccaatgcactgccaggccagaaaaccggcgaggtcacggcgacgcagaatccgttcgagttccatgtgtacgggccgcgacacctgtcgtcccccagctggtgggatctcctccgttcgagctggaaggatcccagctaccggcggatggtgatcgcgtgcttcatccagggggtgtacctgctggagctggaccggcaggacaagcgcgacgagcgcaccgcccttgcgccgcagtggtggcgccacttcatgtacaggctctcccagacactcgtcgacgagcgcgacggctccatctacggcgccgtgctcgagtgggaccgccgggccttgctggctggctacgcgccgttccgccccgccggcgccccggccgccgtcgtggcgctccgcggcacgctgctgagcggggccacgttccggcgcgacgtcgtggacgacctccggttcctggcctgggacagcctcaagggctccgtgcggttcgccggcgcgctggccgcgctgcggtccgcggcgcgcaggcacggcacggggaacgtgtgcgtgggcgggcactcgctgggcgccgggttcgcgctccaggtgggcaaggcgctggccaaggaaggcgtgttcgtggagtgccacgtgttcaacccgccgtcggtgtctctggccacgagcctcaggggcttcgcggagacggccggcgagatgtggggctacgtgcgcgcgtggctgccctacgtgggctcggctgcggcggcggacgcgggcggcgaggccaaggaagtgtcgctggggcgcgccgggacggccaagtggttgccgcacctgtatatcaacaccaacgactacatctgctgctactacaccgacactgcggccgggacggcgaccgtgacggccagaggagggagcgggggcagtaaggttgctggaggggacggtggcatcggcaagccggggctggcgaggatgttgacggtgtccaaggggccgaccaagttccttgatgcgcacgggctgcagcagtggtgggctgacgatgtggagctgcaggtcgccctcaaccacagcaaactcatcgaccgccagctcaggtcgctctatgccgcgcagccggcctcgccgcaagtgaaccagtag

SEQ ID NO: 14557 - DNA, 474 bp, Zea mays
  Peptide Sequence Number=SeqID_57932
atgacgggggcggacaacgcgggagcggcgggtgggtgtgcggggcaggagcgttggcagaggcggggacaggtgggggccttctgggtgtggacgcccacgggctggggctccgttggcgggatggggtcatcgaaggctggttgtcaatggaaggagacgctgaggttggaagggcgcaggaatgtgggcggggaacgcagggcgcgtgatagaggcgagacagagcgggggcacggacgctatggagggaggggcacggtgccgctgcttcggatcggcggcgatctcgggaggaatttgggcgagcgcagagggttgctgacgctgacgggacgggggcacgtattcgggagggatttacgcgagcgcagagggttgctgacgctgacgggacgggggcatgtattgcagccgcaacgggagcaggcgggggcatggtggacgccctcgttacgctcccagttacagtga

SEQ ID NO: 14558 - DNA, 1035 bp, Zea mays
  Peptide Sequence Number=SeqID_57933
atgggtccacagatcctagtgggggtcaatccccaaaaatccttcgcaaaccgccgcgaagatggctgcttgcgcgatggagttgaggttgagattgtgcagctccaccccgtagaaatgcagaatcgcccgcatgaaacggcttgctggcactccaaacccccgctcatggaaagagacgaaactcagcacataccccgacggcggggacggggcggctccgctcggaggagccatccactccggctgtgggtcaccggagaggggacgaagcaagccatcggcaacaagggcctccagatcgtccaccgtgacggtggagaaaggccacgggtcgcgcggcggaacgacgggaccgggaaaggggatactccgaaagggatccttccccgcgaaggaagcgggccccgagccctcctattgattagaggttcgaaggttggcccctcggaagggttcgacagtcgcctcagagcactcgggctccgcgcccactactggtcagatgttcgaaggctggcccctcggaagggttcgacagccgcctcaggccactcgggctccgcgcccactactgatcaggggttcaaaggctggtcccccgaagggttcgacaaccgcctcagaacacgcagagcgagggatgactctgggtacgtccgatacatggccgaggctcgggctacgctcccgagaggctcgggggctgctctcgcaaacccgcctccggccaaaccgttgacggcgtcaacataccagcccgagaactcggaacctgaccatgcacccgggctacgaccagtcaaagctccgtccactccaaggacacgatctcgcctcgcccgagcccagcctcgggcaggaacagtagacccagtcggattcacgcctcgcccgagggcctcctcaagcaacgggcgcaccttcgacttgcccgaggcccagctcgggcaggcttcgcggagaagcaaccttggccagatcgcctcgccaaccgaccgtatcgcaggagcattcaatgcaaggatcgcctag

SEQ ID NO: 14559 - DNA, 1953 bp, Zea mays
  Peptide Sequence Number=SeqID_57934
atgtcctcctccgtatccattgcggcagagtgggatctcctctccgatcgcttctaccgccggctcacactctactcacctctcccatggtccaccccagccgcggccggcgcgacctcgtcctcctccggcgtcagcggtgctgtgatcggtcgccttgacctgtccacccacatcgtcgccgccgcgccctttggaggcccgatcgccgccgtccgcgacgactctaagatcgtgcagctccactccgagccatcccgccgccgcgtcctcctcttctcctcctccggccacccaattgcctccgcgccctggccaccccttctcccacgcctccactcgctcggtttctccagctccctcagcctcctcgcacttctctccgacggctcgctcctccgcttccgcctccccgatctgcaacccagcccttgctccagtcccgttcccctgctcccgccggcctccggcggcgtcgccgacgctctattctggggcggcggtgtagccatcctcacggaagacaaccgcgtcgtggtggccactgacatcgaggtcgacgatcctcacccccgtcacctcgccgacccaggcatcggtgatgaggaacatgttctgtgtatggccgtggtggaggcacagtttgtcatgtcagggagcccagaagtgctgcttgctgttggcgaccgggtcattgcggttgacgaggatggcgtacaagtgcttggggaagagctggagattggacccgtgcagaagatggcagtttcacccaatggcaagctcctcgcagcatttgcacatgatggtcgccttctcgttattcccaccgatttctctaggatcatattcgagtatgagtgcgaatctgcattgccaccagagcaaatagcttggtgtggactagacagtgtactcgtctactggcctgaagtgcttttgatggttggtccaaatggagatcctgtccaatacaattatgatgaacccataaaactgattcctgagtgcgatggtgtaaggatcctatctaactcaagtatggaatttctacaccgagtctcagactctaccacgtcaatttttggcattggaagcatgtccccagcggcattactgtatgatgctcgtgatcactatgacaggcaaagtgcaaaggcttatgacaactatcaattaatatcatcttcattgcctgaggcaattgaggcttgcatcgacgctgctggccatgagtttgatgtttcacgccagcgcacattgctgagagctgctacatatggcctagctttctgcagtcgatttccacatgaacgctttcaagaaatgtgcaaaatgttgagagttctaaatgctgttcgtgatcctgagattgggatgccactgaccattcatcagtacaagctgcttactacatcggtgctcattggacgtctcattaatgctaatcagcaccttttggcccttcgcatctctgagtaccttaacctgaacccgatccccttgttgctcagcatcgatgaacaagacaaagcattatcaaaggcaattgaaagtggcgataccgatcttgtgtaccttgtgctattccatatttggcagaaggtagctgtagagaagaaagctcctttggatttttttggtgttataaatgcaaggcctgtggctagagatttgtttatggcatatgcaagacattctaagcatgaagaattgaaggacttctttttatcgactgggagacttcaagaatcatgggaattggagaagaaccccatggcaagcaaggggtctcctctccatggtccacaagtgaggctcattgagcaggcccatagactttttgctgaaaccaaggaacatgtttttgagtccaaagcttctgaagagcatgccaaattgctaaggtatttgatgctttattatgattatgatgccaaatttgtcatgtga

SEQ ID NO: 14560 - DNA, 414 bp, Zea mays
  Peptide Sequence Number=SeqID_57935
atggtgaaaaattttggcagcgaaacagtgcaaatagcaatgaatgctgtggtaggaaggcgaagcggtggaaactgttacaccaggcgcgcagtaactcatacccgctgcgcagtggaccgcaaggatcaaacagtaactctgcaaggtgggaccgacacgtgctcggaagtcggatcgtttctccgcaacgagctcagggaaggtgttttttggaccttcggcttcccgaagctgaagaggcttttttcacgggtcaagctcgttacgaagaacgatctagcaccgcgaaaggggctactgttggggtcgtgcttcggtgcgccgaaggtctcacacgaagaagcagcttcggctgaagtcgtctccaagagatggccgaaggtcccttttcatggagcttcggcgttttaa

SEQ ID NO: 14561 - DNA, 276 bp, Zea mays
  Peptide Sequence Number=SeqID_57936
atgggcttttctgaattaatacccgcagtccaaatgagatctcagatcatcatgttaattagaacatggagagccacccgagaaaatagtgctaccacaagggtggaatgggacgcccttggccaagtaattaagaaagctagggagagattaccttacccgaaacattcaagaggggaggcgtcgctgcagagtatagggaggttctcgggtcgaactgtcgcgatggcatttcggacgagggattcctatgcttccttcttccagaaactgtag

SEQ ID NO: 14562 - DNA, 324 bp, Zea mays
  Peptide Sequence Number=SeqID_57937
atggagagggagaaggaccaaaaggaggaagtgggggtcctgcctgaatcgctggcacaacggttgcctgaagagctggaggaggggcagactaaactggtggcagctgaacaccgcgggggtggtggaatgggtggagcggaaatgggagcgggagggggaacagtggaagctgcagcggtggaggtggtgggtatggcggaagtggtggatggctttagagcgacaggagttgatgcagtgggaggtggagtagtatctctggctgagggtgtagagggagcggaggagcgaggccgagacgcgaggcgacgaactttgtag

SEQ ID NO: 14563 - DNA, 468 bp, Zea mays
  Peptide Sequence Number=SeqID_57938
atggccaagggcatcttaccggcaatgacgtcgcagaggcgtcgggctacggcacgagcaggttctacgacagggcagcaggttccgaagtcagcgccacgggctctgatgaaggtcttccggtctgcggcgggaccgctggtctcggagatccgcttggctcggtggactccccgcaatagcccgaggaataaggagatattggtgacgcgggccattttatcggagacccagggatctagcgcagagcttggacgtttctattgcgcggcgtggactggggataggggcggatctgacctgggtggcccacacgccagcgatacagggatacgcgaggacggattacccaggctgacgagtgggcctgagtgcgcagaggctagactgcgggtgaggcgctggaccgcgagcgagggctgggatagtgggccgaaatcggtttcccggcccaggcggcgtttttaa

SEQ ID NO: 14564 - DNA, 777 bp, Zea mays
  Peptide Sequence Number=SeqID_57939
atggccaagggcatcttaccggcaatgacgtcgcagaggcgtcgggctacgacacgagcaggttctacgacggggcagcaggttccgaagttagtgccacgggctctgatgaaggtcttccggtctgcggcgggaccgctggtctcggagatccgcttggctcggcggactccccgcaatagcccgaggaatatggagatattggtgacgcgggccattttatcggagacccagggatctagcgcagagcttggacgtttctgttgcgcggcgtggactggggataggggcggatctgacctgggtggcccacacgccagcgatacagggatacgcgagggcggattacccaggctgacgagtgggcctgagtgcgcagaggctagactgcgggtggggcgcaaacccactgttcccctttccccgttcgctgggctcagctcaatctcaacggatcgccatgaccgtcgggtcgttgcaacggccgcagctgggcaaccgatcacccgatttgcgcacgccgaacgcccgggtcacgcgcagcttagcacctcataccgcgtcgtcctcttcaaaaccgggagctggcgcctgtttcgcagagaacataggcaaccattagtgccgagctcggggaggaaaattgagagccgccgcgaggggaactcggaagtcggcggcacccaggccttcgtattgcgcccaacgtcctctgcatggccgaagaagggaggtggtggccgtgccgccttgaattcgccaccgacgctgctctaa

SEQ ID NO: 14565 - DNA, 846 bp, Zea mays
  Peptide Sequence Number=SeqID_57940
atggtcgccttccaagggggtcaccctccttttaaaggcgactctccctacttgcgtccccaaccgtcgtgggctgagtcttctccaacacgctccaaggtcctccccctacgacgtgggggctgggtcccacgcgtcatgcaagctggcccagagcagaagaagccaaaccgccgcgcgtggtgcatgcaaccgcccagcggttacgagcattcctccgctttcgcccagaccagcgggcgaaagggcgggcagccatgcaggcggcatgcaaccgcgccaagtgggggcgcccctccgacttccaacgcacccagcgcgggggcccacgcccacgcgtcacgcaaccggcgcgccggtcgctacgtgcaagcaactgcaccaccactcgcaccactgccacgcctcctcgactgcggaaacggtaccgcgactcgaggcaaccctgcgtacgacccagcagtgccagccaggcgcgacggtcaatacggccaaaaatgggctggcagtaatggcggtggcaggagaagcaagcgacgcttcgccttcgccataacgaccgcgtccaaaaagggaccgggaaagggggataccccgaaaaggatccttccccgtgaaggaaacaggctccgagcctccctactgatcaggggttcgaaggctggcccctcggaggggttcaacagccgcctcagagcgcgtgggctccacacccactactggtcagaggttctaaggccggcccctcagaagggttcaacggctggctcaggccactcgggctccgcgcccactactgatcaggggtttgaaggctggccctcgaagggttcacagccgccttag

SEQ ID NO: 14566 - DNA, 1038 bp, Zea mays
  Peptide Sequence Number=SeqID_57941
atggcaccggcgccggcagcggcctcggcggggcggaagtctcatgtcaccgttctcctcctctacgtagtgtgcggcttgatcctgctgcttctcctcgcctcctactcgccccgcctccagccccacgcccacggccgcagcctccaccgccgcctcaagctccacccaaagagctccttaccatccgacgcttcctccggtgggaacggggggcaacagaagacgcagcaccaaaaccaccatgcggcctccttcgacccgaccatcgccgagctggagcgtcggctggacgacaaggagtgggagcgcgagcactacagcctcctccacggcggcgagccggatgaccatatgaaggagtgggaggagttcctcaaggaggaggaggacttcatcaacgacgacgaccgattcaacatcgccgaccgtatccgcgcgctcttccccaagatcgacgtcgccccgcaggacggattcgtctccctcgacgagctcaccgcctggaacctccagcaggccagggctgaccagcaccaccgctccgccagggagatggagctctacaacaagaacggcgatgagatagtctcattcgaagccttcaatgctctgcgccaagaatcccatggagagggcaatatgcttgggttcgaatggtggaaggaggatcatttcaatgcgtcagatgcaaacgctgatggtttccttgataaaactgagttcaatgatttccttaatccaagtgattcggataatcccaaaatcatcaatttgctctgcaaacaagaaataaggcagagggataaagatggtgatggaaagttaaactttgaagaatactttactgggctacatgaccatatacatggttatgatgacgagaatgcagatatttcccaaattgggaacataacagttgcgaaggatcggtttttcaaacttgacaaagataatgatggtcttttggagccaaagccatctcatgtgcagggcccagataagttccttgagactagaaatgccaagaccgcctag

SEQ ID NO: 14567 - DNA, 1059 bp, Zea mays
  Peptide Sequence Number=SeqID_57942
atggcgctcggtggcctcgcgtcgcgttactcacccaccggcaccgcgccacggccgcgttcgtctcaacaggagccgatggccactctcgcgccacggccacatatcctcctcggcttgacaaggccgcagcccatagcgcttcgtgcctgcgccgccttctcccgctcccgccacgcgccagtcccaccgcgggccgcgcagccgcggcgcgtcttcctcggccttggcgctgccttcatcgaccaggccacccgcatggcctccggcggcacctcgtcccgctctttcgttgccggagcgcggccgaggcaaggcgtttccccagtcgagcagattctcaagaatgtcgagtggccagatgagttccctttcaagcctgaggacttcagccgcttcgacgaatcatcagatactctgttctactcggttccacgttttgtcactcacattgatgaccaagcaatccaagctctcacagagtactattctgaagttcttcctccaagtaatactcctggggtggccattctggacatgtgcagcagctgggtcagccattatcctcccggttacagacaagagaagatcgtggggatgggtatgaatgaagatgaactgaaaaagaactcggtactgactcagtatgtcgtgcaagacctcaatgtgaacccaaagcttcctttcgaagataacacttttgatgttatcaccaatgtggttagtgtagattaccttacaaagccaatagatgtttttaaggagatgcgacgaatactcaagccaagcggccttgccataatgagcttttcaaaccggtgcttttggacaaaagctatatctatatggatctcaactggtgatgctgatcatgcatggatagttggtgcttacttccattatgttggaggttttgaacctccccaggcacttgatatatctcctaatccaggacgaactgacccaattgctatcaagaaacaaatagaaggaaaaatacaagaagcaagttgtttggccctgatcgcaggacctattggtgagctgatgtttccgtga

SEQ ID NO: 14568 - DNA, 1431 bp, Zea mays
  Peptide Sequence Number=SeqID_57943
atgcaggcggcatgcaaccacaccaagggggcgcaccctttcgactctgacgcgtccagcatggaggcccaggcccacacgtcatgtaaccggcgcgctggttactacgcgcgagaagctgcaccgccacttgcgccagtaccgcgccttctcgactgcggaaccagtgccgcgactcgaggcgaccctgcgcatggcccaacagtgccaaccgagcacgtcgatcacgggtcagtcagccgcggcagaaggcgcgacggtcgatatgaccaaaagtgggccggcagtaatggcggcggtaggcgggcggaagcagcggtcaagtcgtctgcaggctcacgtcccctcctaggacagcgagagagacctctcccacggagcgaagacgacgcgcccgtgttctgttcctcgaacggctcgcgcacgcacaacggcagccccgcgaaccactcgtcccgtcgcattaactttatggcagggcaggcgacacctttggcaggcgaagcagggaccgggaaaggggatactccgaaagggatccttctccgcgaaggaagcgggccccgagcccccctactgatcagaggttcgaaggctggcccctcggaagggttcgacagccgcctcagagcactcgggccccgagccctcctactgatcagagccgcctcaggccactcgggctccgcgcccactactgatcaggggttcgtaggctggcccccgaagggttcgatagccgcctcagagcacgcagagcgagggatgactctgggtacgtctgatacatggccgaggctcgggctacgctcccgaggctcgggggctgctctcgcaaacccggcttcggccaaaccgttgacagcgtcaacataccagctcgagaacttggaacctgactatgcacccaggctacggccagaagttccgcctcgcctgacccctgggctctggctcaacctcgacgccggacgacggactccgcctcgcccgaccccagggcttggactcagcctcgacctcggaagacggactccgcgtcgcccgaccccagggctcggactcagcctcgacctcggaagacggactccgcctcgcccgaccccagggctcggactcagcctcgacctcggaagacggactccgcctcgcccgacccgagggctcggactcagccttgacctcggaagacagactccgcctcgcccgaccccagggctcggactcaacctcgacctcggacgacggtctccgcctcgcccgaccctcgggcccagactcgacctcgacctcggaggagcctccgcctcgcccaacctcgggctcggaccgaccacgtcacaggggtccatcattaccctacccctagccagcttaggctacggggaacaagaccgacatcccatctggctagccccgctgaacaagtaa

SEQ ID NO: 14569 - DNA, 858 bp, Zea mays
  Peptide Sequence Number=SeqID_57944
atggggagcgctcgcgttgctttcgtcttcgccgttggaggaacgcaacttcgcggaagttggtacctttcagtcatcgctcggcttcaaggattttcatcaggcatcccggctgcatccccttgccggtggtcacccaagacggtgaccaccagttcgatggtggggagaagcgagccgggctgcggcctctgccccgccctcagcttcaaggatcttcatcatccttgctggggcggagggcgggctgagccggagctctacctcccatacggatcaacgggccacctcttctttcagcttctgggggtggaaaccatcctccagctctgcggaggaggcgccctccagccatgccggggaaggcgaactgttgctgcccagctagggtgcaacattccatcctctgtcctcgctttcgtggcgaggacgggagtgaggacctgccggtgcgctttggggcggccggcgctcgctggtgcggtgttggtggacaggtggacgccaccgtcggtgctgacgtgtgtggcagctggagaaagcttctccgccgacgagcccgtcagtgctacccgcggaccgacctccggctctttggctttaatgtctggttctcgtcccttgagtggggacgcaaacaagagccttccggcggcagcgtccgtcccgggaccatcgctgccactgcagaggtcgctagcgagtcaccaggagtttgtcgtcccgcaggctctccgatgtggaggttgttcatacccgcgggggcggaaccggagttccgtttgtaatggcacctggagtgtcggtgtttgttcatcgtggctgtcggggcctgaacatttatgtattttggcgtga

SEQ ID NO: 14570 - DNA, 471 bp, Zea mays
  Peptide Sequence Number=SeqID_57945
atgaggctgcgtcctcggagcgcgaaccctacggaagatgaagaaaatgagacgcgtcgtaggataaaccccaccggcgcggcggaggttcgccgtacgtaccacgatgcggggaggagacggaacgccggcggcgcgatgggttcgcggcggcggcgcgatggcttggcggctgcgggggagcgtcgcgtgggctacaaccctagggaagtgggcgcggcttcgaaccgaagccaagtgacgggcgcttcaggcgttaagtgcgcggacggcttccagcggaagcgcgtggtggagaagcggcgcgagaagcggcgcgtttggctccagcttctgcttctggcggccagaagccgcccggaagctgaaccaaacagccgctatataggttgggattggattgggtcaagaggatgggtgcgtttggttaggaagccaactaggatagagtggctccattttagtttctaa

SEQ ID NO: 14571 - DNA, 813 bp, Zea mays
  Peptide Sequence Number=SeqID_57946
atgcgggtgcttgtctccgaggccactggcgagcgagtggcagagggcaaggaaggggatggcgcgctagcatcacccttcctccttcctgttggattggtttcgcttgcactcaccaggacacgcattttaggtgacgagaagacaggccacctgaagcacctcgagatcagccccaaagattgtcgtcgaaatctaggtgagggtaacgacaacggctgcgtcatgtggaaagataacatcgttgatgtctggtacatagaaaatgggcaggatctctatcttgggttggcaaactctgaaacagctacaaggaataagatggggcgtgtggcaaagatctcagtcccagtgatggcgtctgtgcttgcactacggccaccggcatgtaccttgtttggatatgcaagtttagagggtatgctgggacacaacgtagaagtcgcaatcaaaaggctcggccaaggttcaggacaaggcgcgcaggaattcagaaacgaagttgctctgaatgcaaagctgcagcgcagaaacctcgttcgacttattggatggtgcatcgatggagatgagaagctgatggtttacgaatacttaccaaacagaagcttggattccgttatctttggttgtaactctaatcttgtgtacggctgcaagagactccaatttgtggagattccttgcgagagggttataagtgatataaggaagatagtgtcactcaagtttggtatttggatcacaagagaggggttgagtgcaacccttgttagttgggacaccacaacatggagtaggcaagcattttag

SEQ ID NO: 14572 - DNA, 690 bp, Zea mays
  Peptide Sequence Number=SeqID_57947
atgaatgaactggacttgaatacagctgctcttgatccggatcattatgctacaggattgagagttcttcttcagaaggagctccgaaatagcgatgtaagccagcttgggagaattgttctcccaaagaaggaggcggagtcttacctccctattctgatggcaaaggatggaaagagtttatgcatgcatgacttgctaaattcacaactgtggaccttcaagtataggtatattggttcaacaacaaaagcaggatgtatgtgcttgaaaataccggtgcttattaccgcgtgctgcattttgatgaaggtcataggagcaaagaaggcaggagatgagcagaccgccactgtacctcaagtccatgaacacatgcacatctctgccgcactgccagctccacaagcgttccatgactatgcaggccccgtcgcagcagaagctggtatgctcgcgatcgtgccacagggtgacgagatattcgacggcatactgaactccctgccggagataccagtggcgaacgtgaggtactccgacttcttcgacccgttcggtgactccatggacatggcgaatccgctgagctcctccaataacccctcggtcaacctggctacgcatttccatgacgagaggatcgggagctgctcgtttccctacccaaaatccgggcctcagatgtga

SEQ ID NO: 14573 - DNA, 72 bp, Zea mays
  Peptide Sequence Number=SeqID_57948
atgacaagggaacaccccttcaacaaaggagggctgcacatcattaaattaagacagagtttcaggtcctag

SEQ ID NO: 14574 - DNA, 138 bp, Zea mays
  Peptide Sequence Number=SeqID_57949
atggcgaagatggaggtggaggtagaggaggcaatggtggaggtgaaggcgatagtggtggaggtgaggggggtcgaggtgccaaatgttcagcacaaaccaataaaaagattaaaagttagggttcaaaagaaatga

SEQ ID NO: 14575 - DNA, 477 bp, Zea mays
  Peptide Sequence Number=SeqID_57950
atggtggaagcaaggtcccagaagccggaatgcaggaactgggtgtcgccgatagtagaagagcccggtggagaaccgacagtggtgctcttcccaaaagcagatggcgatgtagagctgctgggagagaaacctagtggtgcgccggtagtggtggacttcgatgagcgccaggaaggtctagcaggagggccggctcaagtagcaggcccaatgagcggaacacctggtgtacgggggtcaccggctggtccgctggtggacccaatcgagttcggcgtaggggcaaccggtggaaggccagggttgctggtggtacctgcagtgaagaaaggtgacaactcgaatggaactgaaaccgtgttaggtatgtcgtccaaaaaatcaaaaactgcgcttgtgggtggagagggatcctcaaaaaagggaaaagaggtctcctcgaagaccacatggcgagagatgatgatgcggtga

SEQ ID NO: 14576 - DNA, 273 bp, Zea mays
  Peptide Sequence Number=SeqID_57951
atggcgacacgctcggacgaagtggaggtcgatctcgacatgcttcatgcgctggtgctggacggggttggtggagaggttggagttattcttgtcttctgcccgatgtatcaaattaaaatcgcctcctgccagccaaggtttgaggcacaaagctctcacatctctgagttccttaaggaagagaatcttgtcactatcatcttgaggcccatacacgcccgtaaaccaccaattacgcccttccgcttccatgaaatgtacagaaactga

SEQ ID NO: 14577 - DNA, 2076 bp, Zea mays
  Peptide Sequence Number=SeqID_57952
atgatgatactgttaaagcctcttcttttggatttgtgcacttgcttactcactttcgtccaccagtcagcaaaagcggactcattagagacaggagaaagattagccatccccaacgaagaaagaattctatcagctgtccaacatttatttcttattgccaaccaaagaaaaaatttgcatttgggtgaagcccaagtcttccacaacctcttccatggttcaaaatttgacaagagtggtaagatatctggtgctgccattagaacttacttgcttgagagatctcgggtttgccaaattaatagtccagagaggaactaccattgcttttacttcctatgtgcagctccatcggaggatcttaagaagtataagctcggggacccatcgtcctttcactatctcaaccagtcagcttgcattcaagttgatggaatcaatgacgctgaggagtaccttgcaacaagaaatgcaatggatactgttggaatcactgatcaagaacaggaagctatattccgtgttgttgctgctgtgcttcatcttggaaacataaattttgcaaaagggagagaggtagattcatccataataaaggatgacaaatctagattccatcttaagacagcaggagagctcttgatgtgtgattgtgagaagttagagaatgccttgataaaaagggaaattaatacacccgaaggagtgattaccacaacagttggtccaaattctgctactattagccgggatggtttagcaaagcagatatactctcgattatttgagtggcttgtaaacagaataaatgcatcaataggacaagacccagactctaacaaactgattggagtacttgatatatatggttttgaaagttttaaaaccaacagttttgaacaactgtgcatcaattttaccaatgaaaaactccagcaacattttaatcagaatgtcttcaaaatggaacaagaggaatacacaagggagcaaattaattggagttacatagagtttgttgacaatcaagatgtacttgacctgattgaaaagaaaccaggtggcattattgcacttcttgatgaagcctgcatgtttccaaagtccacacacgagacattgtctcagaagctgtatgaaaagttcaagacccacaaaagatttaccaaaccaaagctttctcgtactgcatttacaattcaacattatgctggggatgtaacatatcaatctgatcaattcctggacaagaacaaggactacgtggttgcagagcatcaagaattacttaatggttctaagtgctcttttgtatcaggattatttccaccagcaacagaagagaacacaaaatcatcaaaatcatcaattgcaactcgctttaagatgcaacttcacgagctcatggagactttaagctctacagagccacattatattagatgtataaaaccaaatagtgtccttaagcctggcatttttgagaataccaatgttctacagcagcttcgatgctctggtgttcttgaagccattagaatcagctgtgctggttatcccacaaggaaacaatttcatgattttctacatcgcttttgtgttcttgctcctgaaattttgaaagagaatctcatgtcaaaagattttggacaaaatgggactacagggttatcagccacaacatatgttgagactggactgaaactccaagaacaacgagaatggaagtcccttggtgaaggtgtcaacaaaatgcgaggtcgtcaggacgtggaggacacaaatatccctgatcgccccacgctcacgtacgacgtgaagatcattctcaacatgttttgtgcgctggtgctagaccagatgagtgtgctcctggtgagcgggttggagctggtgaaggagctaacggagccaatacgcctcaaccatgctattagcgacgacgcggtactcagccatggcactggaagggagaccatgagctggcgcttggaggaccaagagatgcggttgtccccaaggatgacaacacagctaaaggtggatgaacgagtgtccggacacctcgcctag

SEQ ID NO: 14578 - DNA, 633 bp, Zea mays
  Peptide Sequence Number=SeqID_57953
atgaggccagttgcacacgcgttggctgcggcagtggcagcggacgcgctaggcaaggggaagccgagctcggagtcgacggggagggtcgggccggtgccggaggcggccgtggtggtctgcatggcggcggttgcaggcggggggagggacgccatggagcacagggagcagaggacgcgaccaaagaaggcaagggcggggccaacggcagcctgcgcagtgggcgggcctgacgacagcggaggcgccgaaggtggagggcgcgaccagagagggactaggagtgttgggccaggcccattacagcgggggcgagagggtaattacatagggagagccccaaaccctaatagttacgctaacaggtggatcaaggcagctttccaacccgggagacggtcagcaatcttaccgatgagggaaataatatcagccttagtgatcttccgcactgagagtggtaacccaaggtcccccgattcaccattgacaagcaccatggtggaagacgatctgaggagcttgcaaaggatattacaccacgcaggacaaaccaaggtatctcagtacttccagaagaaagggccacgaaatagagtcaaaagccttgcttatgtcaagtttgattag

SEQ ID NO: 14579 - DNA, 66 bp, Zea mays
  Peptide Sequence Number=SeqID_57954
atggccgcgggcaaggaacctacgacgacctgctcaagattgacggctacaggataccaaatttaa

SEQ ID NO: 14580 - DNA, 62 bp, Zea mays
  Peptide Sequence Number=SeqID_57955
atggtgaactcaaaatctctgactgcgaagatcgacaatgttgttgtctcgatagggcgcct

SEQ ID NO: 14581 - DNA, 951 bp, Zea mays
  Peptide Sequence Number=SeqID_57956
atggcactagggttaccaagtccggagaaatcccaacaaaagtcgggctcgtcatcttcctcggaacccgagggcccgtacgagggtgacgcccagcaagtccttcgcgagcgtgctggcgtcgtccgtccgcttggagttggcatgttgcgggtaaacggcgctcgtctttgtctcagacgcgaggtcgatgcccgacgtgtcccccgttggggcgccgtcgactcgctcgacagccgacgaggtgccgcctcctgcttggccttggttgccccgcctcctcctccgtcggcgggggaggcgacgggacaaacccaaatgttgctcttccgccacgtggggaagacgtcatcgattccgccgccggcgggcgggttgtcggccgccattgtcgctgtcgcgcggcgggggaaggagtatcatgtcgtagctgtcgttgagggacatgaactcaagactcccgaaacggagcaccgtcccgggatgaaaagtttgctgttcgtcaacacgcagcaggcccctacctggcgcaccaactgtcggcgtttcgaccccggagggtccctggaccgacgagtgaattgtcgccgcgtgccccagcccagatgggtcggcgcgagacggagcgcgaaggggggaaaaccagagggagacaggcgtaaaaggggaaacctgcggccttcgtgtttgtcctgcgcccaggtcgggtcgagtccgagccccgggtcgggcgaggcggagaccgtcgtctttcagggccgaggccgagtccgagccctggggtcgggcgaggcggagttcgtcgtcttccggggccgaacccgagtccgagccttggggtcgggcgaggcggccacctttgcattaaatgctcctgcgatatggtcggttggcgtggcgatctggttaaggttgcttctcggcgaagactgggcctcgggcgagccgaag

SEQ ID NO: 14582 - DNA, 141 bp, Zea mays
  Peptide Sequence Number=SeqID_57957
atggccatgatgggttcaacatcggaaaggatgtacctctgccaggtgaggaagcggcaaatttttgctgcttttgttcaaaggtggtgcccaaagaagaaaatcaagactaaagctgcgggaggaagggtcctccgttaa

SEQ ID NO: 14583 - DNA, 357 bp, Zea mays
  Peptide Sequence Number=SeqID_57958
atggtgaactccgcagagcaggcagtgggcgactggcacagtagcacgcgtcgcagcttgctcttcgcgcatcttgttgctctcgccgtagaggccgccatggacgagaggcggaagtctgctgcaggccttgaggccttcgcggagccggagccgccgacgtcatcctccttgtcatcggaggacaccgacgacgtcatcctcgcggcacggcgatcaactgcagcaacccgagatgctgccaggtcggaggacaccgacgatgtacttcaacgtgaaggagtagtctgggttgggcagcggctccgggacggtggtctccggcgagaacatccggcgcacctgtcctcccagtag

SEQ ID NO: 14584 - DNA, 288 bp, Zea mays
  Peptide Sequence Number=SeqID_57959
atgagcaagcagtacgaggagcctgagcaaccgatgcagagcatggatgagatcatgcagatcctagccgaggcgaccattccagcagctggttcttgtggactcaatcagttcttgaacgacgaccttgacctcgacgatgacatggacgacctggactcagataccgatcttgacctggaaagcagtggggaaatcgttgttttacaacagtttggctctttggaattggtagtgctagaacctcgttcatctgagaagaccctttgtttttgcatcaccagctaa

SEQ ID NO: 14585 - DNA, 183 bp, Zea mays
  Peptide Sequence Number=SeqID_57960
atggttgaagcaattgtaaagcgggatgaaaagtgttgcaaaagaatcaaggcagctggtattgacaatgagtgtccagctcttaagctgaaggatgccattgcaatgcacaacactgctcattgcagcattggcccacctgttggagttggcgatgttggtgtattcggcatttttcagtaa

SEQ ID NO: 14586 - DNA, 351 bp, Zea mays
  Peptide Sequence Number=SeqID_57961
atgggggagcaggagaacaacaagatcggcggcagcggcaacgacaacgccatggcggtggacgaagcgggcgcgggcgcggccgcgaacaaggggaagagcctcggcgccgcggacccgcgcctgcaggccatttccgacgccatccgcgtcgtcccccacttccccaagccagggatcatgttcaacgacatcacggagctgctgctgcggccgggcgtgttcagggacgccgtggacatgttcgtcgagcgctaccgcggcatgggcatcgcggccgtcgcaggtaagaccgaatcgggaaccgctagccatcattggttcaccatgcagtacggcctcaccatctga

SEQ ID NO: 14587 - DNA, 117 bp, Zea mays
  Peptide Sequence Number=SeqID_57962
atggtgagagctcaccgggacgtggggttcaaagcagcctcttcacatttgcggatgaaggatttctataagctcaacgggaaaccggtttacatcctggtggagtcccgcaaatag

SEQ ID NO: 14588 - DNA, 1128 bp, Zea mays
  Peptide Sequence Number=SeqID_57963
atggcgctctccgtctcctccctcgccgtcgccctctcccacctctccctcccatcgacctccacccccaagcctcacctagccccgctcctgcgcctgcgctccacctactgccgcaggcgaagccaccgaagccttcgaggcgggcctgcccatggaggaggtgatggctgtcgaggaggaggtagaggaggatgccctgtcgggaatcgtgctgcgaaagtatgtgaagcatcgactgccgggcaggaagttgaagccgatgtggcatttctttttagcttgagtgatacctcagttggcgtcgcacatgatgccttcaacacattcttcagcgagactggttccggcaagcatgtgcctagggccatcttcgtcgaccttgagcccactgtcatcaacgaggttcgcactggctcgtaccgccagctcttccacccagagcagctcatctcagggaaggaggacgcagctaacaactttgctcgtggccactacacggttgggatggtgattgtcgatctatgcatggaccgtgtgcgcaagcttgcagacaactgcactgggcttcagggattcttggtgttcaatgctgttggtggtggtactggctctggacttggttcactgctgttggagcgcctttcagttgattatggcaggaagtccaagcttggtttcaccatttatccttccccacaggttgctcaacttttttctggtttggtgaaggctggtaagcaagcacgaccggagaagtttgagatcccagctaaaatcaagctgacactgcagccatggacgtcgagcttaagagggtgttatcttaactgttgccatttcttttactttgcagtttgttggtcatcattttcctgtttggttgtgttgcttctgcttgttattcttgcattgagcgtgagcgaggtcgaggcattgtacaagctgttcaagaagatcaacaacgccttcatcgatgatgggctgattaacaaggtcatcaatgggtgtctgctgctacaggccaaccacgctaggcgatcgcggaggccaaccacgcttcaggcgcgatcagccgccgccatgcagggcttccccggcggcgcccccgatccgcagcaactatag

SEQ ID NO: 14589 - DNA, 366 bp, Zea mays
  Peptide Sequence Number=SeqID_57964
atggcacccaagagagctagctcgaaggcagccccaaccgttgacgaaacagcgaaggcagcgctgctggccgagaaaaagggcaaggcccttgcagacaccacccaccaagaagcctgcgaagacgatgcactcagcaagagacagcgcaatgatcaaccaacacccgaaggcaccctccgcacctgcagctccggaggacaaccgcaagcacccccaggcttcgctccactagagggcgaggacgccacagaggatggcgaagtcatcggtgtttcagcagaggaacagctacagctgcgggccttgcgcatcaagaatagtaacctccagaagcagaaagagatcctcgaggccaagcgctaa

SEQ ID NO: 14590 - DNA, 333 bp, Zea mays
  Peptide Sequence Number=SeqID_57965
atggcgcccgagggtggacttggctgctgtcagcctcaccctggtgggtggcacagcagtcggagcggtgcaggcggcgctgttttcctgtcaggaacgtgcgtcaggataaggtgtcagatgatccttgcattgaatgctcctgcgatacggtcggttggcgaggcgatctggccaaggttgcttctctgtgaagccttcccgagctgggcctcgggcgagtcgaaggtgcgcccgttgcttgaggagaccctcgggcgagacgtgaatccacttgggtctgctgttcttgcccgaggctgggctcgggcgaggcgagatcgtgtcccttga

SEQ ID NO: 14591 - DNA, 603 bp, Zea mays
  Peptide Sequence Number=SeqID_57966
atggtgacaactacaatcacagttcacgagctagccacaccaggcctgaaggcatttttatgcattcctttcccgtacaagaaatctgcaaaggctgaactccagtacttgcaccaccatgctggtgttgctgcaagtgttggcctaaatgcaaaccctgtcgttaagctttctggtgtattcggaactaaaactgttgctgttggtgctgatgttgcatttgatacttcatccgggaacttaaccaaatacaatgctggactgagctactccacgtctgacttcgttgctgcagctactttgaacaacaaaggagacaagatcgccgcttcctactaccactcggtaagtccaaccacagctgttggaggagagctgagccacagcttctcgaccaacgggaacaccatcaccttcgggacgcagcatgccctggaccgtctgaccactgtgaaggcacgattcaacaactgcggcatggcaagcgcactgatccaacacaagtggaggcccaagtctttggtcaccatctccatggaggtggacaccaaggccatcgagaagagctccaagattgggctctccctcgtcctgaagccctga

SEQ ID NO: 14592 - DNA, 591 bp, Zea mays
  Peptide Sequence Number=SeqID_57967
atggcggcagtcggagcgcgcccagtgctgtaccaccaccacccccacccggcgccggcgggcggcgcccccgcccccatgtcctcttcctacttctcccgcggcggaggcagctccagccccgcgtccagcctctccgccgcgcacttggacatatccgagttcctcttcgacgacgcctccgtcgtcgtgccgccggacgccagtggtggcggtgcgatcagcgcaggcggcgctgggagcgcggcggcgccggagcggccgcgcacggaccggatcgcgttccggacgaggtcggaggtcgaggtcctggacgacggctacaagtggaggaagtacggcaagaagtccgtcaagaacagccccaacccaaggaactactaccggtgctcgacggaagggtgcaacgtgaagaagcgggtggagcgggacagggacgaccccggctacgtggtcaccacgtacgaggggacgcacaaccacgccagccccagcacggtgtactacgccagccaggacgccgcctccggccgcttcttcgtcgccggcacgcagccgccggggccggggccgggctccctcgtcaactaa

SEQ ID NO: 14593 - DNA, 1208 bp, Zea mays
  Peptide Sequence Number=SeqID_57968
cccccgaggcctcggaggagtggtttcactccttcgaggtccttaatgccttgcgtaatgcttcggctggtctggttgttccctcatgcgagctggccatagcccgggtgtacggtcggcgcccaagttctcgggctggtatgttgacgctgtcaacggtttggccggagccgggtttgcgagagcagcccccgagcctctgcatagggcgagagggcgatcagggacagactcggcttttttacatacgcccctacgtcgcctttccgcaaggaggagggggggagagcgccatgcaaccctcgatgggcaccgaacatggtgtctccggtgagctgcaagcggggcccacgcgatctgaggcagctgttgaacccttcggggggccagccttcgaacccctgatcagtaagaaggctcggagcctggttccttcacggggaaggatccctttcggggagtcggagaagcgtgtccacttggcgcggttgcatgccgcctgcatggctgcccgcctctttcgcccgttggtctgggcaaaggtggaggtccccgcgccgcagggagggctttggagcgtgtcggagaagacccagcccgtgacggttggggcgcaagcagggagagttgcctttaaaaggagggcgacccctttcggacgcaactccgtgggagttggtacctttcagccatcgttcggcttcaaggattttcatcatgcagcccggctgcgacccctccgccggcggtcacccaagatggccaagatggaggatgaggcgagtcggggggctgcctccgtgggggtcggttgccctcttcttcccctggcgtctgggagagaacggcatcctccagcttcacagagacttcctccagccatgccgggaaaggcgggccgccgtcactcagccagggcgcagcaccatgtcctccgcccggacgacggttgcgccgcgcatcacgagggcagcgcccacgctctgggtggtcccggcaagggcgaagacctgccggcgtgcttcgaggcgtcggcggccggagatggcttctctactgatgagattgccaactccgccagtagccctgggtctccgtctcccggcctgaatggctggctctcgtcctcggtgggtgagagtccttctgccgtagcacccgccccgaagccgctgctgaagctgcttcgtcgctcggggcgagggtag

SEQ ID NO: 14594 - DNA, 75 bp, Zea mays
  Peptide Sequence Number=SeqID_57969
atggccgccgttcaacaacctaatgatgaaggaaaaaggagtagatgccggtacaggacccagacgcctcaatag

SEQ ID NO: 14595 - DNA, 753 bp, Zea mays
  Peptide Sequence Number=SeqID_57970
atgagcgacggcaaggactccctcgacctctccgccctcggcgctgccatccccaactcggccgagctcagcgcggaggacaaggctaaccttgtggcgtcgatcaagaacacgctcgagggattggcgtcgcggcataccgacgtgctcgagagcctcgagcccaaggtcaggaagcgcgtcgagaagctcagggagatccagggcgaacacgacgaacttgaggcaaaatttttcgaggagagagctgctctagaagctaagtatcagaagttgtatgaaccactttactcaaagatccaggagagggacgaggaagctctcaagtacctcaagaacatcacgtggtataggatcagcgagccgaagggctttaagcttgaatttcaatttgattgtgagagcttcttcaacttcttcagtccacctcaagtccctgatgatgatgaggaaattgatgaggatatagctgaacagttgcagaacgaaatggaacaagattatgatattggatctaccatcagagacaagattatcccacatgctgtctcgtggttcactggagaggctgctcaagatgaggagtttgaagttatggatggtgaggatgacgatgatgaagacaatgatgatgaagacgaagatgacgaggatgatgatgatgatgatgattacgattcaaagaagaccaagggaactgccggaggggaagggcagcagggcgaacgacctgcagagtgcaagcagcagtga

SEQ ID NO: 14596 - DNA, 2364 bp, Zea mays
  Peptide Sequence Number=SeqID_57971
atgccctccctgggcgggcagcgggtgcgaagtccagccttcgctttggagctgcatggccgggatcccgccacattcgtgtgtgaagcggaagacggggtggcgaggatcgtggggcgctatgtgccgaggacagagggtctgtggagctgggatatccgtgggtccaatgttagattgaattgggtcttcgaattgaattgcttgccatacggtggttatcccggggaggacgctgcctaccgccgcgggaagaaaccggtggacgtgaccgaggaagggccttcgcaggaggctgccccggccactaagaagagaaaattaggtattgcagtgggggtgggggtctctggaagttttgctatggatttgatggggacgtgcgcagccctcgggggaaggatatcttcgcccgagctccgggagtcttcggcgcgaatgctggaggttaccgggggtcgatggcccaagaatgttccgatcccccacgcgtctagcgaagacttctttacgtcccgcatggctcgcgacttgaaggtttttccttacgggcggaatattgctgctgttgtatcggcagtgatggagagggaccgtcaagacgttgcgcagaagcgccaggcggtcgtcaggatcgtggatccaatgcgcgaggcgaaaaaggcgcgggggagcacgaaggttgctgcctctggcggtagcaagccggtgccggctgcgaaaccggcttcccccgggctcgacaaggcgtcggcgagtacaaaggctgccgcctctggcaggagcaagccacccccgggcggggtcgtgaaagggcgaaggccgcttttgccggcacgacgtattgccaacttcggcacagacataagtgtcgacaattatcttgttggttcgagcgaggggcaactggttgttgtcccgcctccggtggtgaccacttcgccaacggcgatggcggccgacttcgccgatctcgtcgcgttgggtgccctgactgcggacgttgctgccgaggtcgaacgtctccgggcacagcatgcggatgctgtgcgggagaagtcggctgcggaaagaaagaaccacaggctgacggagaaggtggccgccatggaggccaagaagacggatcttcagcgccagctggcggaggagaggagggaggcgaacaaggccatcgctgatgcgcaggctgcgcaggccaaagctaaagtggcacgggcggagggcagtctcgctcgccaacgcgccgaggagctggaggcgaggttcaacgccctgtgtggccgcgtggacaaggctgagtcctcgacgcgcgcggaggtcgagcggacgcacgcgcaggttgtggacgcgtaccgcgagctgggtgcgcggactgctgacttcgaggtgcctggccaagaagcgggccttcgccttctcgaatggttgcaggaggagctgctggtgctctcgaccattgtgacaggcttcatgtccttcgcctccctcgtcacctgcgagggggctatgaatgctttgtcccgcgaggggtgcaggcattacgaggtcttcgaccaagcggacgaaaactttgaacgtgaaatcttcaaggtcgaagaccctatggtgaagcagtcagcgggggcactttttgataggatgtggggtccgcacgaccgagaggctgtcagggatcggtccgaccgggcgatagagcagatggcacatgccgaagacatcgaggaccttgttggtcttgacggcgcgctgcccgaggccgcggaggtcggtccggtgccgccgtcggatgccggtgaaggcacctcgacgatccctgagcccactgctgccggcgaagaccccgcaccggcccctgcgccgatgggcgaagccgccccgaaggtggtggccgagccggcagccgatccggcagccgaagaccccacagccgtggtcgggccttcgcaggttcttaggtctgggcctacgcacgcaaccgctactgataatgatatttttgtggcggcttcgaccgtggctgctgatgatgattcgtttggctctgtgtctaagtgttttgagtctgatgattctgggagttcgattgcatggacagaggagttttcagatgaggatttggattattttgcggcattggatgtggctgcagcagagccttcgccgcgcgcggagggttccgaggaactcccgggtgcgagtactgggtataggcggcagagggcggtggtgaagcggagagtgagtgaattgtcgcgaagtggtgagggggagctgcgaaatctgtttgagggtgaggaactgatgataatgctgttcaactacagggagatgggtatcatcccgaaggttgagccagtgtaa

SEQ ID NO: 14597 - DNA, 318 bp, Zea mays
  Peptide Sequence Number=SeqID_57972
atggccgccgctgggcccgggctctactccgacatcgggaagaaggcaagaggtctcctgtacaaggactaccacactgaccggaagttcacgctcaccacttacgccgccaacggagctttcaaggcgcgtgtcaccatggacatgaagcaccgcgtcgtccgcgccatgatcgcgggtagcatgggagacggtgatggcgcacccgtgcatgtccaggataagaccgagtcggtggttgtgcatatcggttgtcatgctgcaagtctgcagctgcatttatgtcctaattcatatatgtcttcgtcttcattgtga

SEQ ID NO: 14598 - DNA, 1284 bp, Zea mays
  Peptide Sequence Number=SeqID_57973
atgtccggtgctccaaggaagggcggcctccggaactcgccagcctcgggaattaacttcggctgcttcgctaaaattcaccggactgtccggtgtgcaccggactgtccggtgcaacagcggggcaacggctatttcggcgccaacggctacctgcgacacattaaatgcgcgcgctgcgcgcgcagaggtcaggcatgcccatactggcgcaccagacaatctacagtgcatgtccggtgcgccaccggacatccaggcgggcccagaagtcagaactccaacggtcagattccaacggcactggtgacgtggctggggcaccggacatgtccggtgtgcaccgggactgtccgggaagcaaggagcggagcaaagaaccgtcaccagaccctcccccgagtatataaagaccaaggcgagacccgctcaacgcgtcgcccgaacctgccgcgggattcaaagactcaaagcgaaacgaccgttcctcgaacggctcgcacacgcgcaacggccgcctcgcgaaccactcgtcccgtcgcattaactccacggcgggacaggcggcgcctcaggcaggagaagcaagtgacgcttcgccttcgccataatgaccgcgtcaaaaaaggaaacaggccccgagcctccctactgatcagaggttcaaaggctggcccctcggaggggtttaacagccgcctcagagcgcttgggttccgcgcccactactggtcagaggctggccctcgaagggttcacagccgcctcagacacagagcgagggatgaccctgggtacgttcgatacataatcaaggctcaggctacgctcctgagcgccgcctgcgccgcaccgactgctgagccactcgacagagtgaggctgacagctgccaagtccggcctcaggcgccataggaaactccgcttcgcccgaccccagggctcggactcgggctcagccccggaagatgacgaactccgcttcgcccgaccccagggctcggactcgggctcagccccagaagacgacgaactccgcttcgcccgaccccagggctcggactcgggctcagccccggaagacgacgaactccgcttcgcccgaccccagggctcggactcgggctcagccccgaaagacgacgaactccgcttcgcccgaccccagggctcggactcgggctcagccccggaagacgaagaactccgcttcgcccgaccccagggctcggactcgggctcagccccggaagacgacgaactccacttcgcccgaccctag

SEQ ID NO: 14599 - DNA, 840 bp, Zea mays
  Peptide Sequence Number=SeqID_57974
atggcggcggcggcgatctgcgtggaggacgaggcggcgtgcgccgccgcggaatgcgcggggatcgggaatctggatctcgctgccgccggcgccggggctggcggcaagaggagcgtctatctcatggactgcgcgccggtctggggctgcgcgtccacgcgcggccgcagcaccgagatggaggacgcctgcgccgcggccccgcgcttcgcggacgtgccggtgcgcctgctcgccagccgccgggacctcgaccgtctgggcctcgacgctgacacgctccgcctgccggcgcacctgttcggcgtcttcgacggccacggcggcgccgaggtggccagctactgccgggagaggctccaggtgctcctgaggcaggaactgaggctgctcagcaaggatttgggggagacaagcgaggccgacatgaaggagcactgggacgagctgttcaccaggtgtttccagaggctggatgacgaagtgtcggggcaggcgagcaggctcgtcggtggcgtccaggagacacggccggtggccgccgagaacgtcggctccactgcggttgtcgccgtcgtgtgctcctcccatgtggtggtcgccaactgcggggattcgcgtgttgttctctgccgtggaaaggagcccttagagctgtcgattgatcataagcctgacaggaaggatgaacgagcgaggattgaggccctggggggaaaggtcatccaatggaatggctaccgggtctccggtatacttgctatgtcaagatcgattgggtttgattgcaactgcctggatattggctctaatcctattagtgaagctttaaaatga

SEQ ID NO: 14600 - DNA, 237 bp, Zea mays
  Peptide Sequence Number=SeqID_57975
atggggggagagggtgagggcgagtggggctcggggcacaagtggccgagggcgaggtggggcgagtcccacgcgcgacgtgggcgcggggaaggcgggcgcgagcagctcggcggcggttacgcggggacgacggggctgacaagccgggcccgcaacgcagagagagagaagaaagcgggtatgaagtgggccacctttgttaagcggtccacaaccacccagatggaatcgtag

SEQ ID NO: 14601 - DNA, 534 bp, Zea mays
  Peptide Sequence Number=SeqID_57976
atggcgctctcccccctcctccttgcggaaaggcgacgaaggggcgaaaacagcgccgcatgccctgctccgactgttgtgccactcgccagagtgaggccgacagcagctaagcccagcctcgggcgccataggaagctctgcctcgcccgaccccagggctcggcccccgtctcggcctcggaagacggactctgcctcgcccgaccccagggctcggacacaacctcgactccagaagacggtctccgcctcgaccgacccccgggctcggactcaacctcgacctcggaagacggtctccgcctcgcccgaccccagggctcggactcaacctcgacctcggaagacggtctccgcctcgcccgaccccagggctcggactcaacctcgacctcggaagacggtctccgcctcgcccgacaccaggggtcggactcagcctcgacctcggaggagtcaccgcctcgcccgacctcgggctcggaccgaccacgtcacaggggggcccatcattaccctacccctagctag

SEQ ID NO: 14602 - DNA, 735 bp, Zea mays
  Peptide Sequence Number=SeqID_57977
atggaccgaaggtccatgacaaacacacatacatccttttcctttatcaagagttttagtgctggcagcatggacgctcacagtttccaattaggtaagatctcacaagctgttaaggctgtcctgcctgtaaatacaactacgtatggcgtcagtacgtcactgtgggctacaaattcatgcagcaacacacagttgttccaagtcagtttacctgccgctgtctacaagctaaaatcacaactggtggaagcagatttcgatggtgatttctgtggatggaaaaagaactatatgtatatgaaagtggggttcgggggttttctcgacctgtgtgagaaggtcttcttcttaatacaatacccgggggctgtcttaccccccgcagtttttgtgagggagcacaacgaggatggaaaccgtggaacctggtgctttatattagtagagaaatctaaaatctcatcaaggaaggtgtggacatggatcttgagggagttcaggctgtatgtagtcttgccacccaactcaagtcgactctgttcttggtggagtaaggctgctgcttctcttgaaaaagacctgaggaagggcttcatctccttggttatcctggtcacctgggaactgtggaagcacaggaatgactggctgactgcgtgttcgatggcgtgcaacctcaggcgcaaacagttatctttctggtggctgtcgagggtcacatgtggtgtctag

SEQ ID NO: 14603 - DNA, 666 bp, Zea mays
  Peptide Sequence Number=SeqID_57978
atgaagctgtggaaggagacttccaggagttccaagactacgacgagttctaggtgtgggttagcggcaacccccagtcggctgcctgtgaaggtcgcggttatctacgtttcttttccgcactttgatttattgttccatggacaaccatgtggtgataaagttcacttttcaagaatgactgctatggtacaagttctagaaaaaaataacatcgaaacaattacatacctgtttcaatctgatggatatggatcacatgcaataactcattggacagcatttctcgtatctgaccccctacttcgagttccctgtgcccagctgttactggtgcagcacgaagaagttgggctaatcatcccaggtgcacaagtcttggtcaacaagaaggacgccgccacggcgctgtacgcgctctgcagcggcgcacgcgagaaccggcagcgcgccgtggagaccggcgacgtgcggcccctgctggacctcatggccgacccggagtccggcatggtggacaaagccgcgtacgtcctccactccatggtgacctccggcagaaaccgcgccgccgccgtcgaggaaggcggcatccccgtcctggtcgagatggtggaggtcggcacctcacgccagaaggagatcgccaccctctccctcctgtag

SEQ ID NO: 14604 - DNA, 75 bp, Zea mays
  Peptide Sequence Number=SeqID_57979
atggcgtgcggaattaagctcgccggagctaagggaaaggggctggccggtgaggagaacacagatgagctttga

SEQ ID NO: 14605 - DNA, 522 bp, Zea mays
  Peptide Sequence Number=SeqID_57980
atggtcgagtggaggggctggggagtggcattgccgtcacagcacatgtgggtgagcggcctagtcgccggggcaaggagtgcgggaagacggaaaccccaacgttgctgtctgcctgcctacaaaggcgtagaaacctattcgattctgtttgcccgtggtgcccacgacggaggggatgtcaagctccgtctccttcctgttgttgaagccagcggggctacggaggggatggcaagctccttctccttcctgctattgaagccgtcagagcttgtggaggcgctgcacaactacgacacgacgactagctctagcctccgcaccgaggacatcgtcaacctcctcctcctcatcgcgcttgtggtggtggcggaagccaacatcgctgctggcaatgttgcgggcttggggaatctctatagctccaggaacaacccaacacagctcatcggcctccacaaatctgagtttgaacacataacagatgatattcttaagctggatggatattttgcttag

SEQ ID NO: 14606 - DNA, 525 bp, Zea mays
  Peptide Sequence Number=SeqID_57981
atgctattgggcgcgttggtgcccttctggctgctggcttcggcttctccagagtctggggggtttcctgacgaagtattgagccgtaggtcctggccaaagacctttgatcatggcttcaatgatgatttcattgggcactatgggcgcttgtgctctcagacgcaagaaccttcggacatacgcctggagtgtttcctgattgacgtccagtggctgcagtgcaaccccagcgctgaagccttcttcggcggcatgatgaagcttcggaattggttcaaccttctcccagaccatgcttttcatatcgtgtatagcttcattctgaggccgaaggtccctgtgaatgtatcaaacttggaaagcatgttagttgcatttttgaggacctttggaagacaaaggcccccaacacctggttcactgcaagacatggttgatggtgtgacttggccatccaccctgccatcgggttggacgatcgagtgggatgccgcctcggcaggagaggaccaggaggagtag

SEQ ID NO: 14607 - DNA, 438 bp, Zea mays
  Peptide Sequence Number=SeqID_57982
atgggcaagagtaacaaacgcaagcgcgagccaactcctccatcggaggacttcagcgactcggaatactcggaggaggagttctcctccgagcccgaggggtctctagcttccgtctctccccgggcgtcgtctgatgattcagacgactcccaggggattgccgcggaggtctggacttatatccgggccgtcgagcgctccgggctcgagggctcggatgagtcggagtactcctcggacaaggaggactctttggactcgtccgaggagggcagcggcggtgatggcggagacgacgacgacgaaggcgacggtgacgatggcgacgacagcggcggcggtggtgacggtggcagccagggcgggaacggcggcagcagcaggggcagcaacggcggcggcaacagcaagggcagcaacaaggccagtggctag

SEQ ID NO: 14608 - DNA, 306 bp, Zea mays
  Peptide Sequence Number=SeqID_57983
atgtggaggagaccctacgtgaacatccatggaagtaccagagggagaccccgctcgaacaccctcgggggctgggtcatagtttgcgctacccattcgagctggatcgtctccggcaacaccctcgagggctgggtcgcagcttgcgctacccacccgagccgaatcatccccggcaacaccctcgggtgtcacacccggttttggaaggtccttacggagaggtactcaggaaacagcctgagccccctagagtatcacaagatcaacagtataatcaggataacagtatcgtatcataaatag

SEQ ID NO: 14609 - DNA, 189 bp, Zea mays
  Peptide Sequence Number=SeqID_57984
atggcaagagtagcgtgtaccctccgtggcaagaggctggacggtggtgtatctgtgctctcgcatatccttgagagtcttttactttgtcgggtgaggaagcgacaaactttttttgcttctgctctaaggtggtaccaaaggaagaacaccaggagtaaagctacgggaggaaaggatcctccataa

SEQ ID NO: 14610 - DNA, 225 bp, Zea mays
  Peptide Sequence Number=SeqID_57985
atgacgaatgggcaagtagagcatgccaacgacatgattctacaaggactcaagccgcggatctacaacaacctcaacagtccctgcgacgctaccacgctcgaggggttcggtcccaagacctccaggtgggcgacttggtgcttcggctacgacaagacgcccgagggcgtcacaagctcacgcctccctgggaagggccattcatcgtcgccaagattttga

SEQ ID NO: 14611 - DNA, 1116 bp, Zea mays
  Peptide Sequence Number=SeqID_57986
atgtcttcgcactctcctcatgcatcgcgcccttccaccttccgagcccccggatggggagcgcccgcgttgcttttgtcttgtcgtcgttggaggaacgcaacttcgcggaagttgatacctttcagccatcgcacggcttcaaggattttcatcaggcggcccggctgcatcccctcgccggtggtcacccaagacggtgaccaccagtttgatggtggggagaagcaagccgggctgcggcctctgccccgccctcagcttcaaggatcttcatcatccttgctggggcggagagcgaggcgagccggagctctacctcccgcacgagtcggcgggccacctcttcttccagcttttgggggtggaaaccgtcctccagctctgcggaggaggcgccctccagccatgccggggaaggcgaactgttgctgcccagccagggtgcaacattccgtcctctgtcctcgttttcgtggcgaggacgggagtgaggacctgccggtgcgctttggggcggccggcgctcgccggtgcggtgttggtggacaggtggacgccgccgtcggtgctgaggtggtggcagctggagaaagcttctctgctgacgaggccatcagcgctacccgcggaccaacctccggttctttggctttaatgtctggttctcgtcccttgagtggggacgcgaacgagagccttctggcggcaacgtccgtcccgggaccatcgttgctgccgcagaggtcgctggcgagtcacccggagtttgtcgtcccgcaggctctccgatgtggagtcggccttgccgcccgaggcttctcttgcttagttaaaggaaccctcggccgctctgcgatgagccggagctggaggcagcggtgtcggcatggacagaggcggagttggctcgaaaagaagcttcgttggccggagcctggccaggccgtccgctggcgggaccaacgccggagtcgggttgacgaggccatgagccgggctgatgtcctcgggggacagctggctgaggctacggagcggccagtcgagccgtctgcttgggccgggttcccggaggagaccctagcggcgatggcccaggcgtggtgccgatag

SEQ ID NO: 14612 - DNA, 471 bp, Zea mays
  Peptide Sequence Number=SeqID_57987
atgaatcagcttgacttctctctctcctcccctccctgcttctctctccctggcatccgacgcccgcgcttccagccgcaaggaacgcgccatcaacccgccaagacccagcccttgccgcggacctcgtcgcgccgagccgaccgagcgcccctgcgcagccgaccgtccaggcgccgacacccatgccctgaagcccgtgttccgccgtgcagcgcccaggccgcgcgcgctcaagccgaacgcgtcgcgcccctgcttcccctgcacgcgagtcacgccatgcgcgcagaatggactccgtgccaggccgaccgtcgagccgaccgcgcgcaggaccgcgccctgcccctgttcaagacccggctggaccccaacgtcgccagagcccgagcgcgcccctgccccaagtcatcagcgccgaggacagcaccccgtgtcgagccccgtccgtttctgcttcgcgagtaa

SEQ ID NO: 14613 - DNA, 912 bp, Zea mays
  Peptide Sequence Number=SeqID_57988
atggacaacctcgacgccgaggaaaatttggcggcggccttaaagtataggagcaccttgcggcgaggcttggatttcaatgcgttcctggaagacgaagaaagtgcggcaatttccccgacaccgacaccggctacggatggcgagctcgcaggcacaggagggctcggcaccaccactggcgtgcggcgagggggacacgacgtcgcaagcgttggcaggggccgcggccagaactacccgaggtcgtcgatcgacgttgtcgaggacgagcgcagggctgggcgaggactcgccaccgctagcgttggcatggtgagcgctgggcgcggcctcaccaccgcgaacctcggaatggcgagggctgggcgtggtgtcgccacacaggacgaagctatggatcgtgtcgcaggatggaattctgcattaaaaactgtggatgcacctgaggactattggaatcgtgttactaagggcaactctcactggaaaaaactgaaaaaaggtcctcctgatcatgaagagctgttacaacaattgtttgcaggcgttgttgtggatggctctggtgcatgtgctcctggtgaagagttgggtgctgatgatgtgcctgcaaactatactccagaacatgctgacacatatatgtctcccccaggcattcatgagaccttaaagaataattgtaaaatttctgagatggtcatgcttggtcagcatttggatgaacagatcaaggaagttcaacaaatagcagttcgatgtggggcaagagaagggtcaggggaacatttcatggcaactgaattgtttaagaaagctgagaacagggcaacattcaaagcatttgagacagatgaaggaaggctattatggttgaagcggcattgtgctaatgcaggctacatttag

SEQ ID NO: 14614 - DNA, 3246 bp, Zea mays
  Peptide Sequence Number=SeqID_57989
atgcacaagagcaaggggaaattctccggcgtcctgcacaagggcttcaagcctgacaagtgcaagacgtcgctgcggatggcggtggcccggatcaagctgctgcggaatcgcaaggaggtgcaggtacgccagatgcgtcgcgaggtcgcgcagctgctcgaggccaaccaggacatgaccgcgcgcatcagggttgaacatgtcataagggaagaaaagttcatgcaagcatatgacttgattgaagtatactgtgaacttatagtagcacgtctgtccattattgactcacagaagacttgcccgattgatctgaaggaggcagtagccagtgttatatttgcatcaatgcggtgttcagatgtcacagaactagcagatgttcggaagcatttcaaaagcaagtacggaaaagagtttgaagcagcagcccttgaagtgcgacctgacagtggtgtaaatcgtctgataattgagaagctgtcagcaggagcacctgatgtgcagactaaaatcaaaacattgagctcgatagcagaggagcacaacatcaaatgggagccaaaagcgtttgaggagaaactgcaacaaccaactgaaggtcatctgtatggttctgcaacatattctggaggaaatacttcaactatgggatcatctacttctagcatatcaacaccacagcctacatattcaggtgttagtgcggcacctgtggactcagccactatccatgtgccagcaaataaaactgcatatggcagtgccaattctaatactttttcgaaagaaagcattcataatagttccagtgcatcagtacctcctatctcccaacatgggccgtctgcttactcttcagcacaggttcctggttctaacaatatctcacatggaaatccaggaggtccaccttaccctcaatacagcgcaacagtcccagacgcagtatccaggaatgaagatagcaatcagaatagggaaagaaaacctttggtgactggtgccaattggaatgtggaattcaaggatgcaacatctgctgctcaggcagcagcagagtctgcagagatggctagcattgctgctagagctgctgctgaacttgctagtcgtggaaactattctggagataaaggcactggagcctatgattcagccgcatacagtagcaaaaacacagtgaggaagcaacgggcggaacatgtagtgaaggatgagagtttccatgaccagagttcaggtgttaatgatccaagcgagatgccaagtaactcaagaaatttttttggaggaacagaaacatcccatgttgatagtgagaatatatcgacagccccatatcaacagttccatgcctacaatccagacagccatccatatgtttatgaaatgccaactgaaccacctcgtgctcattcacctgacccacgttttgatgatttatatgagagggaaagtgacattggaagatctgaagttgatccgtttgattttcctagagaaaacttccaagatactgcatctgttgggcacaatttcaaggatgtggaaatcaggacacctagctacgatcaagaaagcacagatgactactatggtaattttaattcttcacatgatacattggcccatggcagcagcaccactgcttgggataagcaaaacgacaaagctcaagacaactcttcacctgttgtttttgatcaatatgattctgatgttgaacaagagaatttgttggacacattctcctcaaagcatactgaacaactacctgctcccggagatcatatgagattctcaactgcagattggagtgaacagcataccagtgaatctccatccaagcagagaacgtcagccctattttccagaacagaaacacaactatctgataatttaggaacaaacaaaagtgatattccttcacctcattcttatcataacatgcgtcctgcttttgattcagatggtggtagctctgatgaggaaatagccacaaccacgcatgcagtgcctttaaggtcacattcaggaggatctgcttcgtctgtcctgaacaaaggtggtggacctgatgcttcacccatatttgattattcaggagcacatgcagtgaggaacttgaaccgtgtgcaaagcagagattctgatctttcggaagaagagacagatttagataaatttaaaggttcatccttcgccagagcaaatgagcagcagctgttgccttctgccatacgtacttcagcaacttctgatgataaggaagatgacatcagcctgaactttggtaagttaacgcctggactaagaaacaaacccaggcaacccccaccatacaccaaagtttccagggagagcattctgcctaagcagtccttgcctaaggtttctgctggcactgaagagtcagtcgattctgaagagaatactacattcaaacaggatagaagtagtccccaaagctcattttcagccaggacttcttcaggtaaagactacgacagtggactttatgaaaggaaccgaagtgttggaacacactgggaagcaaaatcaaccatagcaagaaattcctctggtttagatgatgctgagaagttatctgatctacctactaatataagtcttccaacaactaagagttctgaacgctggaattcgagtaaagtgccttatcatgaaaaaccaggtattggaacacgccgagaagtgagatcaacactggctagaaattattttgattcagatgacagtgaagaagaactagagcaacagcagattcctcagtcgaagcaatctggagtgctgatacagtcacgcaggacacgggaggtgacatcagacacaaagagagatggtcgtttccaaaccggagctcagtatggtgatgaaactgagagtgtgacaagtaagacacaagtccatcaaggattcaacagctcaagtactgaacggagtgaaaggagggatccaagtgtgtaccccagggttgcagtacagcgctcttcgtctaaagctgagcagattgaatctccgatggagagagggaagccacaaggagctgaaatgagaagcaccttatttcgaggaaatgaagaggacacagaaacctcatctggaactccaaaagaaagcacccccaaaacaccccctgcacatgttcatcccaagcttccaacagactatgattctttcgccgcacattttaggtctcttcgaacaaaccggccttag

SEQ ID NO: 14615 - DNA, 216 bp, Zea mays
  Peptide Sequence Number=SeqID_57990
atgaggacacaaggggaggggcatgtggaggaggccacggggttcgaggtgggcatcgtggtgcccaggctctcccgcgccgccgcggcgggggccaccgacaactgcgtggcgcgtctggtgcgggagctcgagggcgccgggctgctcgtcgagcgcgtccgcggcgtctccgctgagttcatcaagatgaaattaaaaggaagcaactcctga

SEQ ID NO: 14616 - DNA, 741 bp, Zea mays
  Peptide Sequence Number=SeqID_57991
atgcaggcggcatgcaaccgcaccaagggggcgcaccctttcgactccgacgcgcccaacatgggggcccaggcccacacgtcatgtaaccggcgcgccggttactacgtgcgggaaactgcaccaccacttgcgccagtaccgcgccttctcgactgcggaaccagtgccgcgactcgaggcaaccctgcgcatggcccaacagtgccaaccgagcacatcggtcatgggtcagtcagccgcgggagaaggcgcgacggtcgatacggccagaaatgggccggcactgatggcagcggcaagcaggcggaagcagcggacagacggcacctttggcaggcgaagcaggcgacgcttcacctccgccataatgatcgcgtcaaaaaagggaccgagaaaggggatactccgaaagggatccttctccacgaaggaagcgggccccgagccctcctactgatcagaggttcgaaggctggcccctcggaagggttcgacagccgcctcagagcactcgggctccgagccctcctactgatcagaggttcgaaggctggcccctcgaaagggttcgacagccgcctcagaccactcgggctccgcgcccaccactggtcagaggttcgaaggctggcccctcggatgggttcgacagtcgcctcaagccactcgggctccgcgcccactactgatcaggggttcgtaggccggccactgaagggttcgacagccgcctcatag

SEQ ID NO: 14617 - DNA, 519 bp, Zea mays
  Peptide Sequence Number=SeqID_57992
atggcggatcttttaacatgttctatagatactctgaagttgtcggcgtttcgaccccggggggtccctggaccgacgagtccgagcccaaggtcgggcgaggcggaggctcctccgaggtcgaggctgagtccgtcgtccgaggtcgaggctgagtccgagccctggggtcgggcgaggcggagtccgtcgtccgaggtcgaggctgagtccgagccctggggtcgggcgaggcagagtccgtcgtccgaggtcgaggctgagtccgagccctggggtcaggcgaggaggagaccgtcgtccgacgtcgaggttgagcccgagctctggggtcgggcggggcagagcttcctatggcgcccgaggctggacttagctgctatcagcctcactctgtcgagtggcacagcagtcggagcagcgctggcggcgctgttttcctgtcaggtcggtcagtggagcggcgaagtgactgcggtcacttcggctctgtcgactgaagagtgcgcattaggataa

SEQ ID NO: 14618 - DNA, 2799 bp, Zea mays
  Peptide Sequence Number=SeqID_57993
atgtgctcgcatttttactcagcgtacccgccctttgaagtggtggaggaggatgcagacgaaggggcccttcggtgcgccgccggcctgagcagtgggcgcgatttggttgaagaatttgtggcgtacggggtatggcctttggcgcatggctgggcattgggcgaagtgtgccctcgccagatgccttcccatggtggcaagctggtgcgaagtcctgccttcgcgctggatctgcaaagccgcgatccggccgcctttgtgcgtgaggcggaggatggggcggtgcggatcgttggtcggtacatgccgaggacagagggccagcgtagctgggatatccgcgggtcgaatgaccatttgaacagggtttttgaattgaatcgactgccatataacggttatcccggccaagacgatgtggaccgtcgcgggaagaaaccggtggtagagtctggagacgaccctgcgccggcggccgccccgtcctctaagaagaggaaactatgtactgctatgggaggacttggggtttccgatggttttgctagagaattgatgaggacatgcgcggccccggggggaaggatgtcttcgcccgagctccgggagtcttcggcacagatgctgagggttaccgggggttggtggcctaggaatgttcatatcccccgcgcggccggcgaagacttttttacatctcgcatggttcgtgaatggaaagtgtttccttacgggcagaatattgctgttgttgtgtcggcagtgatggacaaggatcgccagggagctgcacagaagcgccaggaggtcgtcaggcttcatgaagccaggccgaagaggcagcgaggggctgcgaaggctgctgccctcggtggaggcaagccgccgtcggccgtccctgcatctagcaaggcgccggaggctgcggctgtcgtaggtggttccaaatctgcgaaggctgtgccgacgtccagcagggtgccggaggtcgcgaaggcggcccgtgggttgccgtcgccgggcaagcgcgtcgccgacttcgccaccgatattagtgtggacgactatcttggtgggtcggacgaaggccaacttgttattgttgcgcctgccgcggcgaccacggcggctgccgtagtgccaaaggcgaagggcggtgctcttagtgccggcggcgagatgccggcactcgctgctgtcagggacgaggcgggcgctgtgtcccgctggctgaaggagatgaaggaggcactaagtcaggcggctgacttcgtagaccgtgcggcgtcgggggccctcacggcagttgtgtctgccgaagtcgagagacttcggatgcaacatgctgacgccgtccgggaaaaatcggccgccgacagtaagtgccgcaagctggcggacaaggtggccacgctggagggggagaagactgacctccggcgccaactggcggaggagaggagggaggccaatgaggccctcgccaaggcgcaggctgcgctggcggaggccgatttggcacgggtggagggcagtcttaccaaggagcgcgccgagcagttagaggagcggctcagcgccctgcagagccgtgtggagagggccgaggccgcgacgcgcacggaggctgagcggacgcgcaaacagcttatggattcataccatgagctgggcgcgcggaccgctgacttcgaagtgccggaccgagagcccggacttcgctgcctagagtgggtacaggaggagttgcaggcactccccactatcgtggaggggtttatgtcttatgcctccctggtcacctgcgagggggcgatgaacgtgctctctcgcgaagggtgccgacactatgaggtcttcgaccaagctgatgaggatttcgagcgagatatctacaatgttgaggaccctatagtgaaggaatccgccggagccatctacgaccggatgtggggcccgcacggtcgagaggtggtcagggagcgggccgagacagcgagggctcaggcggcgcgtggcgagagggtggatgactttggggcattgaacagcgcgctgcctgacccagagtcgaacccggcggaggctgtgtccgaggtcgccctggagcccggcggaggcccgcccccagagaccgccgaaggcgctcctgatgcccccgtagccgctgcgccaagggttgaggatcctgcgacggtggcggcggaggcgacagcggaggcgacggcggaggctcccgcgatggctgggtcttcgcaggttcaagattttgggcctgcgcacgcaaccgccactactaattttttggcggcttcgaccgtggatgatggtaataaatcggatgggtttgtatctgagttttctgattttgctgactctgggagttcggttgagtggactgaggagtcgtcggaggaggatttggactactttgcggccttggatgtggcagcggcggaggcttcaccgcacgctgcggatacagaagacgtgcctagtgcgagtactgggcgcaggcggcgaagggcggttgcgaagcgtagagcttgtatgatgaagttgtgtgccctcgcacattcggctatgctcgcgaaggcgttatgtacttggtcaggtgtatttgttatgctggactggtgcgcatatagtcggtcttggcgcggacagtttggtgtggtcgtttttgcttttgttacgcttcgtccggctgtgccctcgggcaacttctgcgcggatagtcttcgcagtagacttcggtttttcgcacttgttgtgctagtccggctgcacccttag

SEQ ID NO: 14619 - DNA, 561 bp, Zea mays
  Peptide Sequence Number=SeqID_57994
atggcgcaggaggagtcgatggggtcgcgcgtggcacatgcagggatgacagggccgtgcgaggcgcagacagggacgacggggccgcgtgtggcgctggaagaggcgtcgaggccgcacgtggtgcaacaacgacgcaaggcggggtgcctatggggggagggtaaccggatcgaactcaaggagggagttgagatcggtgggtggggaggagccagcaaggggaaacacatcttcgtcgaagatgacgtgacgagagagggtgatgcggtggccgagacgacgatgctaagtggtggaggtggtggagaccgggacgagaggtggagacacgtcggtggtggaaggccggagcatgtagaggggcccgacgctgtcacatcgggcaataggggtccgggtggccagatccttcacagaaaaaccagaggggtcaaactcaatggaacaagaattgttgatggtgaaccgacgaacaaaaatgagattatgggtgatatgtggggctacgagaacgtcgttgagatagaacggcccagggagaaccgaggcacctactga

SEQ ID NO: 14620 - DNA, 381 bp, Zea mays
  Peptide Sequence Number=SeqID_57995
atggcgacggtgacggtgacggcagcggcaggggcaggggctgcggcggcggcagcaaggtcggtgacgacggcggcagcaggggcagcaaccagggcggcagcagcaggggcaacaaccagggcggcagcagcaggggcagcaccaggggcggcgacggcggcagcaacagggcaacgccgaccgactggaaggcgacgtcggtattttagaggtaatgccgagcgactgaacacgaactcggcgttttggaggcgacgccgagtgatagcaggccacgcgagccactttgaggacgatggccgagtgatgaggtggcgcaccggtgttccggagataactgacgggtttccacgtggcatgctggggttttggaaataa

SEQ ID NO: 14621 - DNA, 627 bp, Zea mays
  Peptide Sequence Number=SeqID_57996
atggtgacctccagcttgatggtgggggaaagcgagccgggctgcagcctctgcccctccctcagcctcaaggattttcatcaccagggctggggaggggactgcaccgtgcctggctctcggacgcgagtggcttcggagccgctcgcggcgccgacgtctgccacggcagctggaagaggttcttccgccgacgagatagccagggccgcccacggaccgacctccaactctacggccttctgcccgtccttgcctcacaagtttgggcatgggcgggggcctcctggcagcagcacccgccctgaggtcagtgctgccgctgttcggccccccggagcagaagtcgtcgtcgtcgctgctgctggagcaggtgacggcgcgccgttcgtcggtcttctgttgctccgcaggccctcccccatggagtggggttccgggtcgtccgttagcgggaccaacgccggagttgaccagccgaggcctcgggtcaggctggcgcccttggaagatggttggccgaggccccaggggtcgaaccttgccaaaggtgtcatcgatgccgagggtgctgctgcccccttccagcgtcaagacccgagcctgcaggatcagattgtcttgtag

SEQ ID NO: 14622 - DNA, 279 bp, Zea mays
  Peptide Sequence Number=SeqID_57997
atggccgcgacgagcgaggaggatgcagatggaggagtcgtcgacgacggggcgatgttgacccacgtggtgtcggagatggtggggaagcttggcggggctcactggtgtagggactccgaccgaagaggccttcgatcaggcgggcccgacatcgaggggccgcaccgagcggcggctgaacgatcaagacttttcgctacatcccagaagcgaagtcctcgtcaccccttgcggcgctccggaagcaaagccctcgttcaccctccgtctggctaa

SEQ ID NO: 14623 - DNA, 1800 bp, Zea mays
  Peptide Sequence Number=SeqID_57998
atgcaggaaacaaaatctgtgggtgccgaaattaactggggagtcagatttaatgacaacaaagatgccgaacattttcttaacaacctttgcaaggaggtttctctacgcttgcagggttgtggagttcagggacgtactattacccttaaggtgaaaacaagaagggaaggtgctggggaaccaataaaatatatgggatgtggtgactgtgaaaccacgagtcgttctatgacgattgcaggtgcaactgacagttttgtcactctccagagaattgcaaaacaattattttcagctcttcatcttgatgtgaaggaagttcgtggaattggactgtcactatcaaagcttgagcatgcagatttgggccggggagcatcgcaaggacatatgcttgaatcgtggcttgcttcaccagccgccaagctcaagaaacagcagagtgagatactggggaatgttaatgttgcagcttcattagggaccagcggactgaaggatttgagatctggaccatcacatacagcagaagcgaaccttagaaatgataggtctactgtatttcacaatgtcgagctgcctccgttgtcccaacttgatttggaggtcctgaagaaccttcccccagagataatgtctgaaatgaatgaaatgtacaagggagaattacaaagtcttgtggacaccctcaatagtgacaagggcaaggaaaatagttcaaaatctcttgctttgcctgcagttattcgtaagtctgtacctgccgatgcaaagcttcaaggatacagagaccacagagactccatgcatttggaggaggaacatactaagggaaaatctgacaaacaactatcagaagctaaaccagccaataatgcttcatgctcaagagttagtgcatcaattgagaaaacaacaaaaagtgttacacaacttgatttgatgcctgattcgctaagccaggcagatctaacagttctgcaggaattacctgaggatgtgaaggctgatttgtttagtgcacttccactgcatagatcaggagatcctgcatgcagcacttccaatgtatctgaaagtaaatcacctaatgtggttagagctgaaaatagatcttctaatgatggtggaactgatgatctgaaaaccccaaggtcttttctcccaccaggaagttctcaaaaatggatcgaacagtttagagttagcagttgcctgattttgaacgtaattgcagagcaacacacagattccagctgtcaacgaccattgtcttctgttctagagcctgtagcttcgttcctacctttgtgtcctaacccaggtagtgaagaatggaatgaaactcattcatgtctctccgagcttcttagacactacatacaactgaaagttgaatatgatattgaagagctctacaaatgtttttgccttttgaaaagattctcgtcagcatcagagttttttctggatctacatgatagcatccttcctttcctacagcttgttgcatttctatacctttgcaccctgctatttcgtttcacctacttcaaggcctgtttggataaacccatctcaatacatgttggattctatcagccagcattacggtgggacactgcaattctagctccttgctcaagttgtagccattctattttgctagaaaggaagaagcaatgccgtgaatgtgcggagagacgtgttatgacaatctgcgcctccaagcagctactcaaatcccgtgctggcagattccttggacgcgtttataactttattataactaattga

SEQ ID NO: 14624 - DNA, 441 bp, Zea mays
  Peptide Sequence Number=SeqID_57999
atgggcaagaacaacaagcgcgagcgcgagcgcgagccgactcctccatcggaggatttcggtgactcggaatactcggaggaggagttctcctccgagtccgaggggtctccggctcccgtctctcccccggcgtcgtccgatgactcggacgactcccaggggatagccgcggaggtctggacgtacatccgggccgtcgagcgctccgggctcgaaggctcggatgagtcggagtactcctctgatgaggaggactcggacggcggcgacgagggtgaaggcgacgacgacgatgacgacgacgacgacgacggcgacggtgacggcagcggcagtggcaggggcggcggcgacggcagcagggacagcaccaagggtggcagcagcaagggcagcaccaagggcggcggcggcggcaggggcagggccagtggctag

SEQ ID NO: 14625 - DNA, 1512 bp, Zea mays
  Peptide Sequence Number=SeqID_58000
atgcgggtggcgcgggcgatcggctgggccaacgtcgccgacgcgctgcgggagcacctccacctctgctgcatctccctcggcctcctcctcatcgccgctgcttgcccgcacgtcgcgctgctcaactcagtcagccgcctgcaggccgctctcatcgccgtcgcctttcctctcgtcggggtttctgcagcgcttgatgctcttgtaaatattgcagacggtagaataaatattcatgtcctcatggctcttgcagcatttgcttctatatttatgggaaatgcattggagggtggcctgcttcttgcaatgtttaatttggctcatattgctgaagagtattttacaagtaagtcaatgtttgacgtgagggaactgaaggaaaatcacccagaatttgctttgttgttagaaacaagtggagaagaatctgtacagttttcaaatctaagttacaccaaggttcctgtgcacgatcttgatgtgggttctcatatcttggttagagctggcgaggctgtgcctgttgatggtgaagtctaccaaggttcatcaactgtcacaattgagcacctaactggtgaaacaaaacctttagaaaggacagttggagatgccataccaggtggcgccaggaacttggaaggaatgatgattgtaaaggtgaccaagtcatgggaggattcaacgctcaacagaattgtccaattgactgaagagggccagctaaacaagccaaagttgcaaagatggcttgatgagtttggggagtactatagcagagttgtggtagccctttctttggttgttgcacttttgggaccattactttttaagtggcctttttttggtaactcagtctgtaggggttcaatttaccgtggattaggacttatggtggctgcatctccctgtgcattggctgtagctccattggcatatgcaactgcaatcagttctcttgctagtaagggaattttgttgaaaggtggccatgtcttggatgctctttcgtcttgtcagtctattgcttttgataagacaggcacactaacaactgggaagcttatgtgcaaagcaattgagcctatccatggacatttgggtgtgaaaagtggtcgtagtaatccttcttgctgcactccaaactgtgaaagtgaggcattagctgttgctgcagccatggagaaaggaacaacccatcctattggaagggctgttttagaccactctgttggaaaggagcttccagttgtcgctgtagaaagttttgaatgcctacctggtaggggagttgttgctactttgagtggtgtaaaggtaagggaaaatgaaaatgagctatccgaggcatctatcggttctgtggattatatttcttcactatatagatccaatggtgaatcagagcaaataagagcagcagcaaaaagttctgcatatgggcctgaatttgttcaagctgctctatctgttgacaaaaaagagagctgcgcatcattagattaa

SEQ ID NO: 14626 - DNA, 885 bp, Zea mays
  Peptide Sequence Number=SeqID_58001
atggctgaaaggtaccaactcccacggagttgcgtttctccaacgatgaggcggaaagacggcgggtatcccccatccgggggcttggaaggtggaaagacacgatgcatgagggagcgcgaaatcatggtctacttccaagggggtcaccctccttttaaaggcgactatccctacctgcgtccccagccgtcacgggctgagtcttctccaacacgctccaaggccctctcctgcggcgcgggggctgggtcccgcatgtcatgcaagccggctcagagcagaagaagccaaaccgccgcgcgcgaaccaataccgcgactcgaggcgacccagcgcacgacccagcagcgccagcctggcgcggcggtcaatgcggtcaaaaatgggtcggcagtaatgacggtggcaggcgggcgggagcagcggtcacgtcgtcggccaagctcacgtcccatccgggggcagcaagagaaccccctctcacggcgtgaagacaacgcgcccgtgatccgttcctcgaacggctcgcgcacgcgcaacggccgccccgccaaccactcgccccgtcgcattaaactccgcggcgggacaggcggcgcttctggcaggagaagcgggcgacgcttcgccttcgccgtaatgaccgcgccaaaaaagggaccgggaaagggggataccccgaaaaggatccttccccgtgaaggaaccaggctccgagcctccctactgatcagaggttcgaaggctggccccccgaagggttcgacagccgcctcagatcgcgtgggccctacacccactactggtcagaggttcaaaggccggccccccgaagggttccacggccgcctcaggctactcgggctccgcgcccattactga

SEQ ID NO: 14627 - DNA, 1290 bp, Zea mays
  Peptide Sequence Number=SeqID_58002
atgcagttggtgggtgacctgaagaatgatggacatgaccagtggatgctcgccaagcgagtatcctcgagcaagcactatctaagtgttaaattcaaggcaagccccgactcggcctcggccccggaagacgacaaactctgcctcgcccgaccccagggctcggactcggccttggtcccggaagacgacgaactccgcctcgcccgaccccagggcttggactcggcctcggccccgaaagacgacgaactccgcctagcccgacccccagggctcagactcagccctggcctcagccgacggtctccgcctcgccctacccaagggctcggactcgacctcgacctcggaagacagactcgacctcgacctcggaggagcctccgcctcgccccacccagggctcggaccgaccatgtcacaggagggaccatcattaccctacccctagctagctctggctacggggaacaagaccggcgtcccatctggctcgccccggtaaaacaaataatgatggcgccccgcgtgctccatgacgacggcggctctcagcccccttacggaagcaaggagacgtcagcaaggattcgacagccccaacagctgtccttccgcaaggctccagcgctcctccgacggccacgacatcacacgaacagggtgccaaaacctctccggctgccacgacggcatggccctcttacagaaggttggccgcgcggggaaggatgggacagcgcgcgcataggcctctcgctccctcccgcgcggacgcttgtaaccccctactgcaagcgcacccgacctgggcgcgggacaaacacgaaggccgtgggtttccccttttacgcctgtctccctccggtttttccccccttcacgctccatctcgcgccgacccatctgggctggggcacgcagcgacaatttactcgtcggtccagggacccccccggggttgaaacgccgacactaagtgaacatgcccgcagattgatctcctcacgcgacctgagacgtggtctcccattccggttatggtgggtacaagtgcggtcactgcacgacggcagtcgggggctgagtatttgcttcaccggcgatggtcgtggccaccgtcttccatttggggagtttggccggggggaaacagaaaaagaaaaggacttggctgaagcagccaagactcagcgcagtctgggtgcaccggacagtgtccggtgcgccaggctggattctggtcaacaggccactctcgggaattcgtcggcggagtacggctaa

SEQ ID NO: 14628 - DNA, 192 bp, Zea mays
  Peptide Sequence Number=SeqID_58003
atggaacctaagtttgtgacagtacaacaacgtgacaaacttatgaccgacatccttcgagggcttatgccagggctgcagccgcgcacctggaaagatgtcacgaggcaatgcatgcaacgtgatgagaggtggttgtgctttgaagtcaccgatggttaccctgctctaccgaatgaattaaagcactaa

SEQ ID NO: 14629 - DNA, 774 bp, Zea mays
  Peptide Sequence Number=SeqID_58004
atggggagaagcaagccgggctgcgatcttggtcccaccctcagcttcaaggatgttcatcatcctcgctggggtggaggccgggctgagccggagctctacctcccgcgcgggttcgtgggtcaccctctcctgcggcgttcgagggagagggcgcttgctggccctgcgggcgggtcggacttcgacaacgcggggctggtcgacggcgggcgtcgtcagccccagcgtgtcgagatcgtcggcttggctcccggtggcccctcctgccggaaggcggctgccgcgccgtgtgcacgggaggaccgcccaagatgtcgagcgctgctagggcggcgttcgtgttctggggcggtcctgcctttgcaccggaccgacgccggagttgaccagctgaagcctcgggtcgggctgacgtccttagaggacggctggccgaggccccgggaacctcggaccgcgtcgccgtccgaggctaggtcggacctcgccgaaggtgtcgttgatgccgagggtgctgctgccccttccagcgtcaagacccgagcctgcaggatcggattgtcttgtagcgtggatgtttgtgcgagcgagagctgcttctcgcggaaggtgatgagtgagaaggtgatgagtgagccgaagcaccgggtcgcccacctggaggtctcgggaccggacccctcgggtgtggtagcgtcgcagggactgctggccctcgtcctcggggagccgtattccaggtctgtgggcaagacggcctcggccccgtag

SEQ ID NO: 14630 - DNA, 1038 bp, Zea mays
  Peptide Sequence Number=SeqID_58005
atggcccaccgcaggctcatcgcccctcttctctttcggagtacggtgtgcccaccctgctgtggtgcattcttttctatttgggtttcccagagggagaggaactgcgttacttctgggaagggaggccatgctctggaggaggagaccgtatacccagagaagggtcaggcagagccgcttataagatacttcaagatttgctggaccattttcctggggagattgctaccgccatgcctggagtctttcctaggggtgatattttcaaccctaagtgggactagccagaagaaccagttgtaccaggctcgagaagcacatgctacagagctaacccaagtgcaagagaagctggcccaagttacgcttgagaaagatgaagccgtccaggtcagagatgtggctattttggacaatgtgttgtggattggcgaatgccaggactaccagaccttgctggtggaaatcatcagagaaaggaatgcaactttgactgaggtagcacaactcagggcaacatgggtcaacctaatgcagcagccgaacaatgcagaagcttggaactctagtctacataaggaggttcaccaactgtttgcccagctcaatcaaatcaaaccgtcagaaccagaagaagcaaatgccgccgcagtcgacgatggaggtgtagtctccaagaccggcagcgtgcagatggtgactactcgccgcattaacccaggagccgctagagcttctggtagtggtaaccaggagggtgaccaagaagcatcagttcctccacctccgccattcacacctgagcagttcttcacacaatttcttggagctcagaggaacatggagaacttgcaacagaacatggaggcagaactttgcaacatttctaacaacacccgccatgggcagcatcaggaagctcatggagtcaaccaatatagtagcttcaaggatttcatggataccatgccgccgatattcaaggaagcagcagaacccttggaggcagatgaatggatcaacacgatggagtag

SEQ ID NO: 14631 - DNA, 285 bp, Zea mays
  Peptide Sequence Number=SeqID_58006
atgcatattcattgcatttcaatagactgcaacctcgctgacggagagtacgtcctcgtgccggagcaaggagctgctcaggaggtagccccggaccccgcaccagagcctgcaccagaggatctgcctgccactgctttggaaggcaagccccggaatcctgatgagatgaatactagttccttggaggacatggttgctggagtgacttggccgtccatcttgccactgggttggactgtcgagtgggaccccgcctcggctgaggaggagcatgaggagtga

SEQ ID NO: 14632 - DNA, 246 bp, Zea mays
  Peptide Sequence Number=SeqID_58007
atggcccgcgcccgcgcctataaaacccccagggaccttgaccgtacccctccgcaagcgctcgacctcaccggagctcaaacccaccggcgtttgcccgtgcacggcgtgtccgcggccgcccgattcccctgccaccgtagaccggccaaccgagcctttcccaaccccgtccagccctcggagaagactgtgcacacctcagtgaagctcgccgagcgaggaattggagtttgcttcgcctga

SEQ ID NO: 14633 - DNA, 969 bp, Zea mays
  Peptide Sequence Number=SeqID_58008
atggcgtaccggttattcatggccacgcgcgccggcggggagaacaacttcggcgggggtggaacggcttctccgagctcgacggagctaagtgttgggcttgagaagtcaagtgaggcgcggagggagtacggccgaggcttccctgctcttatagatgtggcgcggtgcacgagcgagcgtggaccggtgtgggcgcgtgggcgtgctcggctgggcgcgggtgcgcgaactggcgtgaaccgggcgtgtcagccgcgatcgaacacgtggcgccattgtttctgcccgagttctaacaccgatagggcgcagatctttgcgaatttgggcaagatcgctgtctcaccatggacgttgggggatctccgtacccgccgcgcagaattcaccgaggaattcggccataccgttgcctcggccattgctgtatatatagaacccttgggccgtctcgaccgattgacttgttccctagcaccacccacaagccatcggggaggagagtctggtggacggattgcggggcacggtgggcggaagtctgacgccagtggaaagcgccaccgtttgagggtcgtcgtcggtcagggagcttcgcttcggttcggtgatagcttccgcggcatcgacgtcgggttgggtgcgtccggtgccaacgaattttacactggatcacctccgttcgccgtgaacctgggagctcggcgtacagctctggaccgcatcctgccgtgggcgggtgccttcgcggcctactactctggtataattccacccctagctttgcctccctctactcctcgcgatgccctaaaccaagaaatagcactgggggacttcgatttggaactcgccggcataaacgccgccgttgcgagcttgtgccccgccgtgctcagttgttgcctcacggtggatgacgaaggcccctgcgccgtccgtccaaggatgggcgaacacgattag

SEQ ID NO: 14634 - DNA, 744 bp, Zea mays
  Peptide Sequence Number=SeqID_58009
atgggtcggcgcgagacggagcacgaaggggggagaaacggcaaaggggaatcccgtggcctccgtgttgtcgtgcgcccaggtcggcccagggtcgggcgaggcggtgactcctccgaggtcgaggtcgagtctgagccctggggtcgggcgaggcagagtccgtcttccgaggtcgaggctgagttcgagccttggggtcgggcgaggcagagtccgtcatccgaggtcgaggctgagtccgagccctggggtcgggcgaggcggagtccgtcgtccggcgtcgaggttgagtccgagccctggggtcgggcgaggcagagtccgtcgtccggcgttgaggttgagtccgagccctggtgtcgggcgaggcggagcttcctatggtgcccaaggctggacttagctgctgtcagcctcactctgtcgagtggaatagcagtcggagcagggcaggcggcgctggtttcctgtcagttcggtcagtggagcggcgaagtgactgcggtcacttcggctctgtcgactgaggagcgtgcatcaggacaagcgtggcgatctggccaaggttgcttctccgcgaagcctgcccgagctgggcttcgggtgagtcgaagagagtatgtgctcatccccgagcaaggagctgtccacgaggaagatcaggagccagctcccgagcctgccatcgaggatctccccgcatccccagcaattgaagacaagccccggttttatgcataa

SEQ ID NO: 14635 - DNA, 483 bp, Zea mays
  Peptide Sequence Number=SeqID_58010
atgagctcgcccgcctgcgcaagtggaccgacctactccgaccatccctggagacgatccgcacatcggcttgaccgtcaagacctcccctacaccctcggccacttcaccggagcaatcccaccgtcgttcgttgaagatcccagcaatctttggagtcgttgcaactacccgccgagatatctgctgctcgattactctggctattccgtgtgctcgccacccaagcccctccccgtcaagctccggcaggatcatcttctcctgtatacaacagcggaacaccaccgtcgaagagaagaagagaggagaagatttggccgccgcggggtgttccttgtcggggaccgaagtcgcgtcgccgtaatccctgaacgaatttcaccggcggcgaagctccaccgcggggttactctggcgccgttcctgttcggtgttgggggatgcggggtggaggacgagcgctgcgccgtcggattttag

SEQ ID NO: 14636 - DNA, 1056 bp, Zea mays
  Peptide Sequence Number=SeqID_58011
atgaccgtgagcacggctagtataccagttttacactctgcagaggttgcgcatctttacccacaagtcatgttacccatctgccaagggatcgcgacttcccatacacctaccgaggaggcgaggcaggggttcttgcctgaccgccatcgcagcaaaatcaaccaaggacctccctacattgaccactcccctactgcccttgcccctttcgggggctcatatgcaaaacgcctaggccgaaaaggtacgggcaacgctggccgcgcgatcaaggctgaacgcgtgagattagatctagcctattccgaaccggggcatgtccgagccgttatactaaaatccgacggcgcagcgctcgtcctccaccccgcgtcccccaacaccgaacaggaacggcgccagagtaaccccgcggtggagcttcgccgccgcctacttaccagggattacggcgacgcgacttcggtccccgacaaggaacaccccgcggcggccaaatcttctcctctcttcttctcttcgacgatggtgttcctacgcacaggagctgggtatgactacggtcacaagcgaccagagatttatagaggagggaggccaggggcacaagccgagtccgcgcgtatgagaaacacggacgggatcggatcttgccgcgcgcagagttcggcggatttctgtttccgcccgacgaattttcaggcggcgggcacagctagcaacgtcccaggcgagccaagagcagcggattacgtgcgcgacctttccccggaaatcccagcgcgagctccgtcctattggtctcggcggccatgtgattcgcaccgctgttgtatacaggagaagatgatcctgccggagcttgacggggaggggcttgggtggcgagcacacggaatagccagagtaatcgagcagcagatatctcggcgggtggttgcaatgactgcaaagatcgctgggatcttcaacgaactggaaacaaagagcctcgacacggctgagtgcacaaatgctagtcggatccataccagtgatacgtgggagagctag

SEQ ID NO: 14637 - DNA, 825 bp, Zea mays
  Peptide Sequence Number=SeqID_58012
atggcgtcggctggcctttggcgtgacgcggggcacgcgaggtcgggcgcgggcgtgctctggcgcgcgcagaatgcgtcgaacacgtggaagtgttcatctgcccgtgttcaaacgcctgctgagatcgcaaacgtgcgaatcttggcaaaaatccggcgcggacctcttcctggcacctatggctatctccaatatgtatatactggtcactttgccgagtgtaacactcggcaaagaggcgctttaccgagtgtcagggtcataacactcggcaaagagcacaggcctgggcaccggcttaggctctttgccgagtgttatgtcgctgacactcgacaaagaggtcggctttgccgagtgccgcacggaacactcgacaaagagcctgacatggggaccctctctggcgggctctttgccgagtgtcccaagtggcacttggcaaagatggattctttgccgagtgctgcctggaagacactcggcaaagataacttctttgccgagtgtcaccagggacactcggcaaagccgccgtctccgtcacccggcgccgtaacggccgcttttctttgccgagtgctctctggcactcggcaaagaggtttgccgagtgcccgagaaaaagcactcggcaaagaaggctttgccgatgcactgtttgccgagccttctttgccgagtgtcacactcggcaaagcctttgccgagtgttttccaggctttaccgagtgcttcaggcactcggcaaagaggtcgattccggtagtgtctccaacaatggcgagatcaccgacgatggcacgagctcgcatagactag

SEQ ID NO: 14638 - DNA, 438 bp, Zea mays
  Peptide Sequence Number=SeqID_58013
atgaacgtatgtgagctcactcttgttgtctcacaccccccacaggtcaagaacagagaagaagtggaggtgggggctgccgtgggatctccagacccacctgaagtggttacggaggtgctacgaaagctctgggaccgtggtctcaccgcggctggagttgtcacggccttccactggaggcgggtgctgccgctgtccgatcgtcgactccgcctcgatgagatgacccccgagacctccgtgaaaagttcccagatggccttggaagccctctccaccgacgaacttcttcggtgggtgaagggaatagtggggaagacagactattccgctgcactgccgatgcgccccgagcagggctacgtgtctgtaacaccccttgtgttactggcactaaaacttgagcataacatcatgtgcattaacatttcatga

SEQ ID NO: 14639 - DNA, 261 bp, Zea mays
  Peptide Sequence Number=SeqID_58014
atggtgacgatggtagctcttggcctgacattggtgttgggagcttcttgggcgagagcctcggcgacgacgatgcccttaggcgccgcttcccctgttgggggcgtcgtatttgatgaggacatcactatgagtacgactacaccagcagcacctccacatcaagcaccacttccttcattagctgggccaatcactcgggcccgtgccaaagatcttaacttcgtcatgctactgaagaatgagggtccagaagaatag

SEQ ID NO: 14640 - DNA, 144 bp, Zea mays
  Peptide Sequence Number=SeqID_58015
atggcggtccgccgcgcccttacggtggccgacaacaagcagtccgaggttcctgagtgtgttgttggagaccttcctgagcaacaacctggggactcaggccattttcctgagtacctctccgtggacctgttcgtggagtga

SEQ ID NO: 14641 - DNA, 1188 bp, Zea mays
  Peptide Sequence Number=SeqID_58016
atggctggaatccctcactggaattccttcggtccgcccgaggccttctccccaccgttctcccctctctgttctcagattcatggccttttccccgccactgagttcgccgtagcatcttcctcctctcttcccaatcccgacgacctcggagccaccctagcacgcgcgtgcctcaactccggcaacctcaccaccgttgagaggagcagcgccgctcacagccgttcatccctccctggtctaatctccctcgtccgattttcatcgcacgacccagatcgcggataccgcttcgcgcacgcgcgcccgtgttcactggcgctgggcccgttcgacaacgagcagtccgaggttcctgagtgtgttgttggagaccttcctgagcaacaacctggtgaaggcaaagatgcccctgcaccaccacagggcatcccgactgctggaggagaccttgatagagacggagacaacgacgatgcctgtggtagttcgagccacgacacggagctctcggaggagccggagccagagggatggatcgctagacccatcactcatgacgccgctcgcgggtgtcacttccacgacgctctcgacaccctactgcgtcgggccttcgaccaacacacttggtccatcgagtaccgttgtgtagtctaccagcatcgtcgcgggttatacccggaccagttggaggctactttcttggtgcgccgtccagacgatgatctccgaggtgcagaggccttctcagatcactattctattactgagagggatactgccgaggcagccatgcaagatgcagcacgacaggcactttctcagtattgctcgttgtttagtggggtagcagatggcctcgacctgaagtactaccctcgccgttcgaccgatagtgctggaggtgtgatagtctcgccagttggtaagggcaatcccaagctaaacagcatggtcaatctggctgccgtgctcaacacagagttggaccacgcccttaaagagttgggcaaggttcgggcggaggttgcggaattgcgtgctgagtgcgcaacacgccactatctagatggtggttctcccgcccctgtcgagattcagcatccttaccgttcaccgccccatggtcgcttcgactatggtaccccagactgcaggactcggatagatttggatccctag

SEQ ID NO: 14642 - DNA, 252 bp, Zea mays
  Peptide Sequence Number=SeqID_58017
atggcgttcatggagcttgaatggagggagagagaagaggaaacagaaacattaacgcgttggcgaatggtcgcgactgggacttcggtttgtggctcgggcgtcggtcaggctcccagcgtcgcggtgctcggcttcgggtcctggtcgcgcgcttggcgcgactgggcttcctgtgcgcggcgcgttgggcggtggtggcgcgcctgggcgccggtcgtgcagggctcggggcggcgcgacagggcctag

SEQ ID NO: 14643 - DNA, 148 bp, Zea mays
  Peptide Sequence Number=SeqID_58018
atggcggtgggaggcaagggcgcgatgggaggcaaggtcggggcggcgaaccttagaggggtcgcgacctggacgagcgactactgcgcggatggagccccctggacgacggatggagagccctccgttgtgcccctcgtggatgaag

SEQ ID NO: 14644 - DNA, 120 bp, Zea mays
  Peptide Sequence Number=SeqID_58019
atgccgcttgagctactccacatggatctattcagcccgatcgcttacataagcatcggcggtagaaaaatcacaaacccaagagaccttaaagggattcttgagatggtctcaaaatga

SEQ ID NO: 14645 - DNA, 255 bp, Zea mays
  Peptide Sequence Number=SeqID_58020
atgatgagtacttgtctgaggaccatattggagagaaaagtccccaaaaatgatgcatcatctgaacaaaacataagtaataaagaagaccatttagatagcagaagcgataatgagtcccaagacataactatgtcaaataacataaatggagaggaccaacttgatggcgctgatgaggttaaagaggttaaaaggcgtgggaagacaaaacttattaatgttggaacattccaagaggccatagagttgtag

SEQ ID NO: 14646 - DNA, 729 bp, Zea mays
  Peptide Sequence Number=SeqID_58021
atgtcagaccttggaatgtcaactacaagtgatgtcactaagtgcaaagaatgcggtgtgttggcaagtaaaaacaacactataaataaaacagctgatgaacagacattcaagacccaaaaggatgaacaaccaaaccaacagacaagtgaccttggaacatgtagttgttgtgagtactatggaattccttgtcgccaaatcaatgcaaatgaaagtgaaactacaaaacagaagaaccgaattttgttttttggcataaaaagacagatgtctccccctaaacaactaatagcagattctctcatacctaatgcactgttagttgatgaattgcaaagtattccaaaaaggaaacatcacaaggatgcccagccccaagaagaaacacatgagtgttatattgatggatggactattacttgcacacagtttcagcctcgtggtcgcatcaggtccaagaaacaaaaagggaaacatggaaaaagtcaagaaataacttcaagaaaagcttgctatcaatgtggacgtgaaggtcattacttccgtaactgtcctgagaagagtccactacaaatcacctctgagataaagctatatcagtcttcagtcatggaatatgaacaaaaatgcacagaaacttctaccaacaatgtaaagacatttccaccatgtaacttatcaagccgtgcttgctttggctatggtgataccggccatcttttttaa

SEQ ID NO: 14647 - DNA, 429 bp, Zea mays
  Peptide Sequence Number=SeqID_58022
atggcgtacaacaggtacagagcggagaacaggcgatggcgtcacgacatggtcgttgtcagtgatttccaacgagcaacgcgtgcgatgcaaagcactctgggcttggtggatcggcggttagcgaagcccccggacgagtcggcgcgagcaacaacacgtagaggggcttcgaatggaacagaatcagcggtggcggcggtcaggaacgtccggcgaggtgctggcacgacggcgagacgtgggcgaacagcggcacaaagagcttggtgcgggctcggctgggcacggcgcgagcaggggatgagcaggagcttcgcgcggccgcagacggcggagctcaggcgacaaacggcagacagggccacgacgacgagctctggcggcaagctgagcacggcgcagacaaagagagagaggagagcgtga

SEQ ID NO: 14648 - DNA, 382 bp, Zea mays
  Peptide Sequence Number=SeqID_58023
tggtggaccgtaccttggtgctgaacctcctgcgtggcctcagtcctcgctacggccacttgaaggctctgatcaagaggaccgtgccttccccaccttccatgtcgtgcggaatgagcttctcctcgaggagctcaccatgaccttcgaggctcccacccaggcatcggccctctacagcaccacccctggcacccaggcatctccccggggggcaggccccccacgatccgtcgatcgagacccccgctcggcccttcctgtggctcctatggcccctcgtcagcattccaccaccgacggtggtcgtcgcccccgcaagggcggacatggggacgacgacccctctcgtggaggttccaccggccagggaggcgcctag

SEQ ID NO: 14649 - DNA, 1089 bp, Zea mays
  Peptide Sequence Number=SeqID_58024
atgttttcttcctcccttatgcgtcgtgtctttccatcttccaagcccccggacgggggcccggttgcttccccccgctggtggtcacccaagacggtgaccgccagtttcggggtggggagaagcaagccgggctgcgatcttggtcccaccctcagcttcaaggatgttcatcatcctcgctggggtgggggccgggatgagccggcgctctacctcccacgcaggttcgcgggtcaccccttcctgcggtgttcgagggagagggcgctcactggccctgtaggcggcgcagacttagccaacgtggggctgatcgacggcgggcgtcgtcacctccagcgtgtcggagtcgtcggcttggctcccggcggccccccctgccggagggcggctgccgcgcggtgtgcacgggaggaccacccacgatgccgcgcgctgctagggcggcgttcgtgttctggggtggccctgcttctgcaccaggatggcgccctcgcgcagaggccggtgccccactcgtctgggaggattcgagtggggatctgccggggggctggtggcccccgccatcagcgccgaggcggaggtggctcgagaagtccccgtcgccgacgggatcaccgccaccatccgcgccccgggcctccggctcttcgtacttgtcctcgcccctcgagcgtcggcgtgggcgagggcaagattgcagcagcgcccaccctgaggcctgcactgctgcggctcggccatccggagcgggagtcgtcgtcgtcgtactcagttaaagggaccccttggccgctcttcgatgtgccgaggctagggctgggttgcccgtcagcggggctgacgccggagttgatcagccgaggcctcgggtcgggctggcgcccttggaagatggttggccgaggccccaggggtaaccggctgagccgcctgctcgggccggattcctggagaagtccccggaccgcgtcgccgtccgaggctgggtcggacctcgctgaaggcgtcgtcgatgccgagggtgctacagcccccttccagcgtgaagatccgagcctgcaggatcagattatcttgtag

SEQ ID NO: 14650 - DNA, 171 bp, Zea mays
  Peptide Sequence Number=SeqID_58025
atggggcccactggtcagccgaaggcgctgggcggttttcacacgcatgcggcgcggcggcggctaggcgagcacgatgcacgcggcggctggggtgcagggcaggcgcgtgcgcaggccgcacgtggggccagctggcggggtgtgctacagtgggccaagaaaggggag

SEQ ID NO: 14651 - DNA, 327 bp, Zea mays
  Peptide Sequence Number=SeqID_58026
atggcgggacgacgtcgaccgactgctcagtatggcgcattctacctcgaccagaccaacgacctccggacagagctcaaccgcaggcgtgcgggagaggacgcccgggtatccttggaaagggcgcgcaagcgccgccaaaacatcaatggtcgcgacctcgatcaagacttcgctgcggttgcaccgcagacaccaatggcacccagtcccaaatgggtgtccccttggccggtgtacgttaccgccatcacggcagcaggtggaaacaccgctgtgatggcaacatattttcatgtggccttgtctggaccagcccggacctag

SEQ ID NO: 14652 - DNA, 108 bp, Zea mays
  Peptide Sequence Number=SeqID_58027
atgacgaagcgtcggtcggcttcgcggtttgcgacagttggcgagggcagcggggttggggaggaagaacagggtgaaggtatagatggacaaatgggtcatgtctag

SEQ ID NO: 14653 - DNA, 531 bp, Zea mays
  Peptide Sequence Number=SeqID_58028
atggacgctctcaacttcgaatacccagattatgaaaggcttgacgaaggagccgggggtgcaatgaaaaagagggttgtaagtattttaaaaagcaaagccatacggtccattgaaaaagatccgagggctgctaaaaaacaaaaaatttcagtggagccaaaggattcgactcccaaaaaacaaaagtcctcaatcttggctcctgtcgaggcgaaggtacaagatgtaccagagaagactgccggtacctcttcgtcttcctccgctggtgttacagaaatattgaagaaaaaaagtgttgcccctgctaatgtcgaagctaacgctgatgccgaagttgatgaggctacccctgaagctgaaaatagaggaggccctcttagaaccacaatgtcagagattgacaggattatagctgatgtggttcccgagagagaaatggatgaagtgaccactgatagggcttcacccttaaaaatgaaaaagttggaaggagcttctttagaggatatagtgttggacctatga

SEQ ID NO: 14654 - DNA, 375 bp, Zea mays
  Peptide Sequence Number=SeqID_58029
atgggaaatttgatatcgttacctccctcggcgccggctgtagatccgccgcccctggggcttgagcagcaggccagcggcgggctcctgtgctccgccccggcctcgctggtgctggcgcttgggctggcgcggggggcgcccttgtcgaaaggcgagcacccgttgcgcctgcgcggctgcgccgttcccgctggacggccaagcaccgaggggagatggcgacgatcgaccgctaagacagcacgaagcacgagcaagaccggatcgaagtgcagccgtgctggggtaggcggcaaccgtcggtgcctcggcaggacggcgggctgcggcgcatcgtccgtgactctgcgacgggcggacgggagacggtag

SEQ ID NO: 14655 - DNA, 393 bp, Zea mays
  Peptide Sequence Number=SeqID_58030
atggctggttttagcacggaagcatctgcagctggctctcaaatacgaagtgatggatatgatccactgaaagatccaaaaaggaaacccaaatctgatgatctaggctggaagtatgcctattatgtagagcctggcaagcgagagttgatccaatgcgccctttgcccgaggcaaattaaaggagcaattctgagggtgaagaaagatcttgtgggcggatacaaagatatcctcaagtgtcccaataccacaactgcaattgctagagaattaaaggaggctttggatgaaggaaaaagggatagaccaaagggacaatactttgatgaagttgaatcacatgagaacttatgttggttgtttggtatttggcttgatataattgcatga

SEQ ID NO: 14656 - DNA, 1236 bp, Zea mays
  Peptide Sequence Number=SeqID_58031
atggagaatggaagagttcgggaacatatattaggtactgaagctaacaatgtgcttcgaattagaaaagaaagacccttgactagtgactccattgatccactgcaaattggacaggaagcatcagttcatcagtttgggaatactgatgtgagttgttctggatcatctcagaggtattcttgtggtaacgatagctttaggaaaactaacaggtcatcatcaagcagaatatgccggcatgcagaatctgctgttggttcgaaaactcttgcagaaatgtttgctttatctgattctgaaagactgaagctaaattcagactcaaatgctccagttctatgtaatatgattgaccgtgataatggtcatagcaaggatggatgctttatagttttaccaaagcatgcacctgtgctgtctatccgaagctcaatggacatgccttcttgcttggaaggctcctctcagggtaaaaataatctaaacatatccaatatttacaacaatggtaagtttcagattgattcttcccgggataaaccaagatcactgaagcaaattggcagtggcactgaagctcacttgagcagtgctcactgtttccaaaatcttacaggtgacaacttttcaactcctgattgcttaaatgataaagtattgttgacaacagatgaagacgtagttcgacaatcagctgaatctgagccttccaggttcaacttgcaggtttctaggaaacaacgggtcgaggaaaactgggacttctcatatcttctcgacatacttatatgctctggtatcatagttgttgactggcagctcatctgcaagtcatggtacttgcctggttaccctgttggccctcatgtctttgataggcttgaaaggaaatacaataaaatcgcaacatgggcaaagcctgagaggaggcttctttttgacctcgtgaattcaattctttccgaggtccttgcaccatgtgttgatgtgcacccatgggtgcagcctagtagacactgtgtggcattttggggccctgaagggcctgttgagaaggtttggcagacaattgttaggctgcaggaagactgtgtcacaaggcatcctgatgagatggttcttgatacaaattggctggaagtaggcaccgacatcaatatggtggggaagcagatagctaggatgttacatggcgacctcttggaagaagtcatagtggacttccttggttga

SEQ ID NO: 14657 - DNA, 561 bp, Zea mays
  Peptide Sequence Number=SeqID_58032
atggagcgaggcttggaggcagaggaggtggaggtcgtggagcgcatggtggcagacgagcgcctagtcgagtgggaagtctcccgcgaggacggtggcggcggtgaggtggacacggttcttgaagccgaacaagagatcgaggttgaggaggccagcgtcgacgatgacggctgggaggccgtggcgcgcgagggaggcggcgaggctggcggttgtggtggtctttccgacgccggccttgctggagtcactcaactacatccgagcgacgtgcccttgcgtcggccgagcaaaatgcagcacgtcatcaaagaagcacgagggggtggggagacggaggggcaggcggggccagaggtggaggcggcgtgcgcaggcggggccagttgggagagaatagacgctttcgcaagtcgcaactccactaaattgaagacaaatttcagctcctattataaccagaagaaaaatgcggcatgtgtgcacttgaaaagccgttacatattcagcataatctgcttgaagtttgagcgaaccccatgttgccgaagttgttag

SEQ ID NO: 14658 - DNA, 864 bp, Zea mays
  Peptide Sequence Number=SeqID_58033
atggaggcaagaagagctttgaggtaccgagtgcaagggagaaggtcatggaggctgaggaacccaaatcaaggggtcaagaagaagacttgcaaagtaaaggttggtcgagttgagaagagatatggaagtctctggcgaatcggaactgcgtttcccaccgaggttgccctcgggcaaatcaaaattgcgtctcccaccgaggcaagtcgtggcctcggacgagtcgttggtctcaggcagtcaaaggcttcaacgaaaggttggagaggactcggtgagcactatggcgggatcgggatagcaggaacgggggtgaggcaaccggacggcggaccggggagcactctggcgagcaatcgcggggcgagtaagtgcaagacaggaggaattagtggcggggttaggtcggttaccttgaggagagattttgggacccttgaatggcagcagggacacaacgagggcttgagtcgacggcggtggctctccggctacgtgagaaaggctccggtgagcgcggaccaggcgaaccagagggggagggagcaaaccgaggggcatcccgggttgcgggtgataaggcagagcttatcgaggcaatggacacgacgaaggctcgacgacgagggctcgacgggcgcgagaccacggcaagcggcggtggaactccctggacgcgcgcagagcgagggagagggtgagggtgcatggctgagggcgcaactgagcggggaagggcgagtgaacgagggcggggtccagaagaggctcaagcgcatgggggcatggccggaaatcacgtggacatgggcgcgtccacggcggggagcgtgggcagttcggaggggaagggtccgatag

SEQ ID NO: 14659 - DNA, 288 bp, Zea mays
  Peptide Sequence Number=SeqID_58034
atggccatgatgggttcaacatcggaaaatatgtacctctgccaggcgaggaaacagcagacttttgctgtttttgcactaaggtggtgcccaaagatgtggtgcccaaggacgaacctcaacagtgaagtggttgctggggggatgttggtctcccttttgaaaaacaatatacctttatatgggaggggtttttgcctcccagggttgtccaaggtccgttggacaaggacaactgtaggtgggcctaatgacttaggaggttccgtcacagctgttgtacactaa

SEQ ID NO: 14660 - DNA, 486 bp, Zea mays
  Peptide Sequence Number=SeqID_58035
atggtcaacctggtcgccatgctcaacatcgagctggaccacgcccttgacgagttgggcaaggccttcgtcaaagtgccgagtcctgcgaagggtgtccctgcccgctttgtctgtcggaccagcggctgcagcgaaggcctcgagcgaagggtggtgtctttgccttcgccccaacatttgccctccgagggaccagttcgacaaagtcacctggtgccgaagacgtcgctagatggcggagacgctgccctcgctcgaagtggttccgcgggggtttttgatgtgaccgttgatggacggcgtactgttggattgcgggttttccgaagcgtcgcggcctgtcggattgcgggtttcccgaagagccgcgccccgcctataaaagggggcgggggcggcgctttttggactctgccttccgcgctccgtaaaaccctagccgcccgccgtcttgctgctccttttcctccgctgctcccttag

SEQ ID NO: 14661 - DNA, 426 bp, Zea mays
  Peptide Sequence Number=SeqID_58036
atgactaagttcacaggatgcgagaactactttgaccaaggaattgaggaaagcaacacctcaaaagaagacattaagaagatcccagaaaagtccaagaatgaagatttgagtgagtattgtaaaatcacacaacccctcgactcttgtgtgagccgttataattgtatcgagtggggcgagagttgcgagactgtgacaactgtgtttgtgtcacaaccgccaccgtgtactggagggaacgaggcccacggtgtttcggccggaaactctatagtggagacagcagggagcgtccgagaggagccggaagcggagcaccacttgcgcgtggagaaggcccgcgactctctacggagttactcgaccgaggtgcttggccctcgcgtggacttccctttgcgtaggggcaccaacgaggattag

SEQ ID NO: 14662 - DNA, 222 bp, Zea mays
  Peptide Sequence Number=SeqID_58037
atgtatcttcgtagattgaaggtgcttggaatgaagatggaaagggggaaagcaactggcatcacttctgccacaatttcaaggaaaggatactggacgaggaaagtggagacgttggagcgaattcgtaccatatgtaccaaacggatgtcagattgcttaaggaaatgggcatggacgcttataggttctctatctcttggtccagaatactgccaatga

SEQ ID NO: 14663 - DNA, 441 bp, Zea mays
  Peptide Sequence Number=SeqID_58038
atggtgacaggtcagaccagccacctggagagactacatcgtcttctgcacgaggagcaagagcaccaacgccaggagcacgagcatcaggactcttccccctcgcctcagcaaaaggtagagtctgggaggcagccttcccctgcacctcagctagagatgccccttgcaccaccacagggcatcctggatgctagaggagaccctgacggagacgacgacgacgacgccggtggcagttcgagccacagcacgaagctctcggaggagcaggagcaagagggatggatcgctagacccatcactcgcgatgtcgcttgcgggtgtcacttccacgacgctctcgacaccttgctgcgtcgggccttcgaccgacacacttgctctattgagtactattctgtagtctaccagcatcgtcgcgagttatatccagactag

SEQ ID NO: 14664 - DNA, 1476 bp, Zea mays
  Peptide Sequence Number=SeqID_58039
atggaggttgtccgccatggtactctgcatcccgagctccctgcgccggatccctttccatgcgtgtcgcgcaagctcctctgttgggctcgccagcctccgttgtcctatccacgccagcacgcgactgtggtcgtgttcatcgagttcgccaacactctgttgccgattcgactatcgtcgctgttgcgtgcctcactgcgtgctcgccggggtgtcgtctattgtattcttacactcgccttgccgcttgtgccaacttcggccatcgcgacgtctgctccatcccggcaccctgctcttgtgcttgcactacaagaaactgataaatgttcgtggctcccactctttatcactttatatggttggagcctggagaatatgcaccagggctatcccaaagaaacacttgtgcgtttccttaaggctagagagtggaatgtagcaaaggctcataaaatgattgtagaatgtttgaattggaggattcaaaatgaaattgatagtgtgctcgagaggcctatagccccagtagatttatacaaatcaatacgtgattcacaacttattggcctgtcacgatacacaaaggagattcttctgtacaacttcgatggtggtacaatttgttcagtggttattttgaaagaatggcttggcatccatcgcgtcgctgctgctgaaatatctaaagtctgtggtctcccaatttttggcattggtgttgggcatagcacatatgacaaagcttcggctatagctacagccaaaatcataaaagtgcctggtttgaagctatcagcactaagccaaataaagttgcagcagtccgaacaactggctttagaatttagtgttgattccggctctcatcaagtgactccccctcatgttgactttgcggatgtctcaattctagtggtggagctacgaacaacaatccgattcctcgcagacccacgtagggttaagaacgtggatgcccacgttcttaaggttaagaacgtgggtgccgtcgaacttatgggaaaaattcgacggcccccgtcgaacttaaaaacgcacgttcttaatgttaagttcgacggtacccacgttcttaatgttaagttcgacggtacccacgttcttaaggttaagttcgacggggccgtcgaacttacttctataagttcgtccaaaaattgccgtcggctatattcgtcggtaaacccacgttcttacgtttcctgtagtgttgacaaaaagcccaaacgtgtcgtcacgccattatttccatcgaataggattgtcgtgccaccacgtcgatgttgtcacttgcctccgcactgctgtcggtcggcaacctcgctgtcgtcgtgttcgctccaactctgcctctacgtgctcgccttcgatcaccgctgcaattttagaagtttaagtgaagaagtggaactcacggggcgtttgccaggaactcgacgggaggcttaa

SEQ ID NO: 14665 - DNA, 192 bp, Zea mays
  Peptide Sequence Number=SeqID_58040
atggcgagagtagcgtgtaccctccgtggcaagaggctggacggtggtgtatctgtgctctcggttggcgtgaacccgcatacccttgagagtcttttctttagtcgggttacgagtcacttgattgtgattggtgttaagcgccggccattcagttttgaatggattgacgctcaaggtaaggtacactaa

SEQ ID NO: 14666 - DNA, 636 bp, Zea mays
  Peptide Sequence Number=SeqID_58041
atgtcttctcgctcccttatgcgtcgcgtctttccaccttccaagcccccggatggggggtacccgccgtcttttcgcctcatcgttggagggacgcaactccgtgggagttggtacctttcagccatcattcggcttcaaggattttcatcatgcagcccggctgtatccccccaccggtggtcacccaagacggtgaccaccagttcctgggtggggagaagcaagccgggctgcgatcttggtcccaccctcagcttcaaggacgttcatcatcctcgctggggtgggggccgggctgagccggtgctctacctcccgcgcgggttcgtgggtcaccctctcccgcggcgttcgggggagagggcgctcactggccctgcgggcggcccagacttcgacaacgcggggccggtcgacggcgggcgtcgtcacctccagcgtgtcgggctcgtcggcttggctcccggcggcccctcccgccggagggcggctgccgcgctgtgccaaaggttcatctacaactatactaattcgactgtccggaataccgtagattattccggacaggagaagctttttggaaaaacaggccaagcgcggaccgtccgggcccctgcggcggaccgtccgtga

SEQ ID NO: 14667 - DNA, 942 bp, Zea mays
  Peptide Sequence Number=SeqID_58042
atgaagaaaacagaatgcatatcatttgaactcaagccaagccacatgagtccacctattgtccctagcagcgttggatctgtgcaagacttgaccaagtaccctgaagacgatattgttgaggacaagccttgctttcttcatattccaatcaatcgatctgggacaaaaacaaagcaagctgctactggtttggaggcaatgaacgagttggtcctttggcatcgacgcgacatcaagttgggtgatgagccgaattcaacaccaatgcaacaaaaagatagttcgatcattccacaccccatggtgcaggaaaatatgacaccgacctccaaaaaaatcattgaaacaatcatatcgcctcttgcgaaggaactcgacgagggggacgtagacaaaattgttcctcagaatgtcgacgtcaacataaaaaaggaaccaaaggttggcaccaatgttgaaggaccaactatttcaaagaaaattcatatgcgaatcgccactgacgatgtcaagaaaccatcagaatcagtggcacgctacctgcataaattgcagagagttatgacaaatcaatcaaaagcggaatcagcatcacatggagttggcacatggtcccaaatagacaatttcgaagtatgggaagaatatggaatgattcatactcgagaatcattacgtcttaaaaccaatatctcggtatacaagaaggaggatgttcctccaaaatttgtgaatgggaggccgttcttgacgacggtgcaactttctaagttgtcgactccggagattagaatgcatgagtggtacatggtggctagcaacaaatacaaactcgaggacttcacatttgttgtgccagaagatgcattttggagcaatgatcatatagatcctgtgcggcatttattctttgacgatctctggtcgttgtaccactga

SEQ ID NO: 14668 - DNA, 105 bp, Zea mays
  Peptide Sequence Number=SeqID_58043
atgtccgtagcaatttccagcaacctggacaatgccaccgaaaatgccgccctctccccccgctgctccaaccctgctgcctccgtgagccgccaaaatttgtga

SEQ ID NO: 14669 - DNA, 447 bp, Zea mays
  Peptide Sequence Number=SeqID_58044
atggctaatcggaggcgaggactggtgcactgggcgcataacaacctatcagagttcgctagggcatcaatttatagattccatcagcggtggcatccaatttggggaagacacgcgggcagccggagagagggggaggtcactagcgcgagttaccatggcattcgctggagcaacggctcagaggacaaacatgccatctattgtgacctacggcgatgtggtaacactactgattacgtggcacacgggcggcaagaggccgactccggcgaggatcattttggctggttgcggagcaagtgggtacggtggccagcacacaaccacatccgcggtaagatcttttcactatcggtcgtaatccgcaccccagagagcatgaatcgcagcgccagcgcgaatctgggcactaaggtcaccaacggcgagattcagtgcacctaa

SEQ ID NO: 14670 - DNA, 174 bp, Zea mays
  Peptide Sequence Number=SeqID_58045
atggcgaactttgccatcaccgaggcggccagtacaagcgcttcgcttccaagtgtgacgagagtttctttgactgttggggctcaccttgcccaggaaataactcttgaccatgtgaaggcagttggctttcttggagatggttttggcgccacaccagatatgagcaaatga

SEQ ID NO: 14671 - DNA, 1824 bp, Zea mays
  Peptide Sequence Number=SeqID_58046
atgccttcccgtggtgggatgctggtgcgaagtcccgccttcgcactggatttgcagagccgcgatcttgccacatttgtgcgtgaggcggaggatggggcagtgcggatcgttggtcggtacgtgccgaagacggagggccagcttagctgggatatacgcgggtccaacgaccgcttgaatagggtcttcgagttgaaccgtctgccgtatggcggttatcccgggcaagacgatgtggatcgtcgcgggaagaagccggcggtagagactggagacgaccccgcgccggcggccgccccatcctctaagaagaggaagctaggtactgctacggggggactgggggtttccgatggttttgctagggaattgatgaggacatgcgcgacccccgggggaaggatgtcttcgcccgagctccgggagtcttcggcgcggatgctgagggttaccgggggttggtggcctaagaatgttcctatcccccgcgcggtcggcgaagacttttttacatctcgcatggttcatgattggagagtgtttccttatgggcggaatattgctgctgttgtgtcggcagtgatggacaaggatcgtcagggagctgcgcagaagcgccaggcggtcgtcaggctgtctgaggccaggccgaagaggtcgcgggggactacgaaggctgctgcccctggcggaagccagccgacgctggcggcgaagtcgaccgcccctaggtccggcagggtgccagaggctgtgaagacggccgccgccggcggtaccaagtctgtcccggccggagccgcgaaggcccgagaattgcctccgccgggcaagcgcgttgccgacttcgccaccgatattagcgtggatgattatcttgttgggtcgggcgaaggccaacttgttgttgttccgcctgccgtggcgaccgcggcggctgccgtggtgcctagggcgaagggcagtgctcttagtgctggtggtgagatgccggcactcactgccgtaagggacgaggcgggcgttgtgtcccaccggctgaaggaggcattaagtcaggtggccgcgctggagggtgagaggactgacctccggcgccaactggcggaggagagaaaggaggctaatgaggccctcgccaaggcgcagtctgcgcaggcggaggccaatttggcgcgggcggagggcagtcttgccagacagcgcgccgaggaattggaggagcggttcaatgctctacagacccgtgtggagagggccgaggcttcgacgcgctcggaggctgagcagacgcgcaagcagcttatggactcataccacgagctgggcgcgcggaccgctgtcttcgaagtgccagaccgagagcccgaacttcgctgcctcgagtggctgcaggaggagttgctggcgctccccgccattgtagaggggtttatgtcctacgcctccctggtcacctgcgaaggggcgatgaacacgctgtcccgcgaagggtgccggcactatgaggtcttcgaccaagctgatgaggatttcgatcgcgagatttacaaggcggcgcgtaacgagaaggtggagggcttcggggctttgaacaacgtgcaacctgattcggagtcgaacccggtggcggctgtgtccgaggtcgccccggcgccgcccccaaaaaccgtcgaaggcgcccctgatgcccccgcagccactgcggctggcggtggcccgtcgccaactgctgcgccgagggctgaggatcctgcgaagatggcggtggagccggcggcggaggatcccgcgacggctgggtcttcgcaggtggcttag

SEQ ID NO: 14672 - DNA, 309 bp, Zea mays
  Peptide Sequence Number=SeqID_58047
atggcccccaagagagcaaccttgaaggctgccgcatccatcgacgatgcggcaaaggcagcactcctagcagagaagaaaggcaaagctctcgcggacaatgccctcaggaggccttcaaagatgacgttgtcaacagcaagagacagtgccaggataaccccacccccgatgggcactatgcgcacttgcagttccgagggcgcaccgcaagcaccaccaccatgcttcactcccccagaaggcgaggacaccatagaggatggagaagtcataggcatctctaccgaagaccagctaaagctatga

SEQ ID NO: 14673 - DNA, 465 bp, Zea mays
  Peptide Sequence Number=SeqID_58048
atggcacagtggtatatcccgtggttcggccaagaccaacgcttgcctactccacgttgtggcgtcccaacgaacgagggttgcaatcaacccctctcaagcggtccaaagacccacttgaataccacggtgttttgcttgcattactataacccgtttgcgaggaatctccacactttggagcctctcgcccttacacttgaaattcacaaagaagcacggagtgcccctgaactacttgacaagttcggtatctttccttacctttccaggaacgtttcacccgtcttgcagacattacagaacatcggagatgaagaaatgcggaagcgattacataacttacatttattaaaaagaaccaccttggtacagaagcaacagaaatctgctacttcctcacctaaaaacaacgaagggataaaccctaagtatggaattactcagcaagtcttacccgactaa

SEQ ID NO: 14674 - DNA, 405 bp, Zea mays
  Peptide Sequence Number=SeqID_58049
atgtcgcgtgcgttcgacgactactatatcgaggattgtggcgtcatcttggcgccggaggtgacacaaaggaggatcgacaacagtgaccagttcgtcatcctcgccaccgtcaggaagctagaccccatagacatgactcttcgtattggtccagacaaagaactcaaaatcaccaagcatactgtccatctgatattgggtcttccaaattcgggtggtgggaagccactaaatattgatgaagcgaacgctgtggcaacccttcggtcatccctgagtattagcaaggatgaatttgtgatttcaaagctacatgacagactgaggctaggcaacgacgatgaactttcaatcagatgtttttttgatcctcttcaaccggctgcttttcccaacagctag

SEQ ID NO: 14675 - DNA, 822 bp, Zea mays
  Peptide Sequence Number=SeqID_58050
atgccgtcgtcggaggggcaaccgtgctcgctcatgctcccccagccggtagaagttgtgcctcgccttggtgcgcagcggtccggaccagtcggtccgagccgtatcctaggacccagggagagctccgggcccggagtggctggcgggtctgttagcacacacaaggatgccaaggcaagtgaacctgcgccagagactggaagcgaagaagatggtgtgctgctacagccaagattaaaaaggaagtttaagcccaatagcaaggaagctaacagtggtatcaaagaccatcgttcctcggatctggattccatccactatacccgtcgtgccaaaaccctaggcgctatgcatccccaactcaaactcgccttggaagcacaaactcgctccttcatctccgaactcgacaaaaaattcgccaaccacgacgccaaatgggagtctcgcgtgggtgaactggagaaggcggcggtgtctgctgccgaccagttctacgacctcaaggtggacaaccataccgatgccacggcgcagttggacttcttcgtctcttctgtgatcaagcaagcaaatcgggtcgccgcggccacggcgtcgcgcgtgtcagcgctggaatccgccacagcggccttcgaggcgtggcgccctgccatggaatcgacaatcgccgaggtcaaacgtggcatcgccactgtccaagccgtcgtcgccaacatatctcaaccgggggaacatcgtccgttggagccgccacacctacaacccgcatcctcggcgaatttggatcgggccccacacgcccatctaacggtctga

SEQ ID NO: 14676 - DNA, 969 bp, Zea mays
  Peptide Sequence Number=SeqID_58051
atggactcatattgcattgaagaagttcatccagataccctgatgaagaaagatctttcatcctacgtggttgaagagaggagatctctatcatatggtatcagtgtcaatgtaattctcgcggataatacggacgctgccttgaggtcctggcctcctttccttccggcggacggcggtggtcggttcacctccggcttggaccacagccgccgcatggaaggggggagtctcgcgtgctcctggggaatcggactcatcacccccggttcttttgggtgcaccgccggagcaatcaatcttcctgaagggcgcggggcaaaggagatcctgacagaagatttggggctgccgcggcttcctgatgccgctggccgggaggaagacgaacagttccctagaggtggaactgcagacaaactgaaccgtgatggtgatcaagctattcagtcagcttctactgtagatcccagttcctttcctgggcaagctgatctgcattcaagtaaaaccaagctcaaagtttactcaagaagaaaaggtggaccaactcaggagatacaagtggcccctaacccctcgagtgttggggctcccatcctggacatggcggatggtacaagcagtttgatcacagacatctcagtacctctggtcgatccatcaaccttcattagcaggatcaacaagaggtctgcacatcttcttccaacgcctagggctgaacagaggaacctgaattctcagactatgactgtgcctcgacgcagtaggcgcgttgctgggattggcgtcgaattttccatgcaagaatggcgcaacaggtcttctaggaaggctatgggggctctgcatataatcaaggaatctgatggagttaatcctgaagcactgatggggttagttctgcagacaggatggacaaccgtggtggttaacttgtgtatatgggccctagggggatgctga

SEQ ID NO: 14677 - DNA, 2367 bp, Zea mays
  Peptide Sequence Number=SeqID_58052
atgcaggttcttggtgatattgttgaatcttgtgttggtgctgtgcttttagattctggcttcaacctgaaccatgtttggaagctaatgctaatgcttcttaaaccaatattgagcttttgtggcatgcacatcgatcctatgagagaactccgagaaacttgtcaatataatggttttgacttgggacttcccgaacctacgaagtacaatggagagttccatgtcaaagtagaagttaacataaacggcaagatgataagctgtactgcagcaaaccggaattcaaaagatgctagaaaagtagctgcacaagaaacactttcgaaactgaagaattatgggtacaagcataaaagaaagtcgctggaggaaattttgcgttctaccacgaaaaaagaatcggaactgataggctatgatgaagaaccaatcaatgttgaggatgacattgacatgcaaatgaataatctactgataaatggagaaagaacctccattcagagtacagcgggagataacaaggttgacaagaatgatgctaatagtggaaggaataataagtccaatgtggtcatgcagaatggttgcctacctagaggggcaactgataaaataaaccaaaaagaatatcatggtgatatggtccgcaaaacagcaaggtcattcctttatgaattatgtgctgcaaactattggaaacctcctgaatttgagttatgcaacgatgaaggaccaagtcaccttcgaaagttcacatgtaaggtccttattgagatcacgggaacttcggtgagccttttggagtgctatagtgatcctaagctacaaaagagagccgcgcaggagcatgcggcagagggagctctgtgctcaaagcagttgcttttagtttgtcattgtcggtaccctgaaacaggggtaccccttactatagtatggagacgtggtgcccgcgcggctatctctagtcgcgtggtaaacagcactcgaccccaccacgtggacgactccggggccgccacgtggccagagaagacgatataccccaaagtgtcaacagtgggttcggacccccacgggaaagtgccggacccctgtatatacggaccggacctccgggtaaggtctaggacccccacgggtgcggaccggacccctaagacgggtcccggacccctctgtgtggggttcgggccactcagcagggtctcgggtttctgggacaaagaatacccaggccttaatcaaggccaggcgggggtccgaagccgacacgtgtccgaaccatatcgcatgcgcttccgctccccgctcaggcggaggcccgatgcttccacgtggcctactgcccgtgacgtaagccagcgggcggagcctgacgtaaggcctctaggccgcatggcctctgcatttattgcggataaggcgtgtcgcctgtcaattccactggcaggtgatgtgccgcctcggcatttaatgagccctgtcgattccactggcaagcgatgtgccgtctcagcatttaatggacttggcattaggtttttgcttgtttccctgctcgacatcatggtccacatcgtcgagcaccaagatttcatgcccgaggacttcatggtggaagaagcggctgcgtcttccacaccgcgggccaccaacctccctgcgcctggtgctgctgctgtgcactctgcgcggcaacacactcctgcgcaaacgtccagggcgtctagggctgcgcctggggcactgtctgtggctacagaattgctgcgccaccctccaagctccacggcctcgccgggggccatgaagcagtggtgtgatgatgtcgaccgtctactcggcatggcgcactctggctcagccaggctcccgcgcccggccgcgccgtggccgctggccgccctggccgcgcccccagccggccgctgccgcgccgccctggcccccggccagccccagccggccccggcccgccccttggccaactccggccgccccccccggcccgcgcgcctggccgcgcgcctggccgactcggccgcctgccagcccgacccccccccccccccccccgcgcgcccgcctggccggccggttcaaccgggccagctcggccgccccggcccccagctcggctgcccgcgcccgcgccagcccccagctcggccgcccagcctagggccgaggatccggggtgtagttcgcttcgccgtcgtgccgtcaatggggctcggtgtatgcggctcgctctgccaaggtgacaataagattgatggttctgattacgattatggtattggcgaagatgaagctgtggaaggagacttccaggagtttcaagactacgacgagttctag

SEQ ID NO: 14678 - DNA, 270 bp, Zea mays
  Peptide Sequence Number=SeqID_58053
atggtgattgcagattccacaaattttaaagttcaacgttactatggaagtggtaaacactctagagatcaccaggcatgggagaaagagatgggagaatatgaggtccttgtaatgacccctcaaatattattgcacaatttgcggcattgtttcatcaggatggacttaattgcactattgatatttgatgaatgtcatcatgcacaagcacaaaaaaggcatccatatgcacaaattatgaaggaagtgttgttatggctgacatga

SEQ ID NO: 14679 - DNA, 456 bp, Zea mays
  Peptide Sequence Number=SeqID_58054
atggtgcgctcttgctccagggccagggtcgcattacgctcctgctcctgggaagcagcgatagccacctggatggtggctatggccgcaaccaacgcaggggaagcgggagggggtggacatggtcgcgacgaggttggtccacgaggggtcggtgcgggcgaggaagccaagcgaggagcgatgagggtgctgcgcagtgagggttcaaggtcggcgatgaaaggggccccgtccccggtgaggtcgcgggtgcgggaaaggaagagcccgctgtccgcgtccagcgagggcagcaaaccgacacccgaagggcccagcgggccggcgcccaaaggggcctgcaggccgactggtgggaacgcggccacaaaggctgtgtcggcggcggtgaggtcgcccgcccgaggtggggcccgtgcccgcgctagccggtgcagcagtggcaggccctag

SEQ ID NO: 14680 - DNA, 126 bp, Zea mays
  Peptide Sequence Number=SeqID_58055
atggcggactctttccgtgacctcggcgagcctgttgccgaccgtaccttggtgctgatccttctgcacggcctcagcgtccccaccacgctgcagttcatcgacatcttcaccaagggtggctga

SEQ ID NO: 14681 - DNA, 240 bp, Zea mays
  Peptide Sequence Number=SeqID_58056
atgtcggccaccggaccaacaatcaccggctccaaggagatggtcgggtcgtggctccggaagcacgtcaggatgcgggcgccaaggatctggtccaggcgtcggaggcggtcggcggcggagtccagcaccgggagcgtgtcggagatggacgtcggcggctccgacaccgggatgggactcacccctagcggcaccagtgtcgtgctcgcctcgccggcccatgaggcgatgcgctag

SEQ ID NO: 14682 - DNA, 384 bp, Zea mays
  Peptide Sequence Number=SeqID_58057
atggcggctctcggcccccttacggaagcaagaggacgtcagcaaggactcgatggccccgacagctgtccctccgccaggctccagcgctcctccgacggccacaacatcacacaaaccgggcgccaaaatctctccggccgctacgatggcggccctcttagagagggttggccgcgcggggacgaggacgagacaggcactcgcgtgaggccgctcgctccctcccccgtgtggacgcttgtaaccccctactgcaagcgcacccgtcctgggcgcgggacgaacacgaaggccgcgggatttccacctctctcacgcacgtctccggccacctcacttccccccttcgcgctcggcctcgcgccgacccatctgggctag

SEQ ID NO: 14683 - DNA, 162 bp, Zea mays
  Peptide Sequence Number=SeqID_58058
atggctaccccgcgatccactcgccccatcgcattaactccacagcgggacaggcggcaccactggcaggagaagcgagcgacgcttcgccttcgccataatgaccgcgtcaaaaaagggaccgggaaagggggataccccgaaaaggatccttccccgtga

SEQ ID NO: 14684 - DNA, 1545 bp, Zea mays
  Peptide Sequence Number=SeqID_58059
atgctgggcgtgttgggagtcggagaagtgcgcccacttagcgcggttgcatgccgcctgcatggctgcccgccctttcgcccgctggtctgggcaaaagtggagagtcgcttcccccacgccgtaggggaggaccttggagcatgttggagaagactcagcccacgacggctggggacgcaagtagggaaagtcgcctttaaaaagagggtgaccctcttggaaggcgaccatatcttcgcgctcccttatgcatcgtgtctttccaccttccaagcccccggatgggggatacccgccgtcttttcgcctcgtcgttggaggaacgcaactccgcgggagttggtacctttcagccgtcgttcggcttcaaggattttcatccggcagcccggctgtatcccctcgccggcggtcacccaagacggtgaccaccagctagatggtggggagaagcggaccgggctgctgcctccgccctgccctcagcttcaaggatcttcatcacccttgctggggcggagggtgaggcgagtcgggaggccgcctccgcatgggtcggtaacccttttcttccccgacgtctgggggagaaaggcatctcccagttccgcggaggcttccctcagccatgccgggccgcatcagtgggtcgcccagcacgtcgtgtgccgcgagggcggcgctcatgttctgggcggctccggcgagggcgaggacctgccggtgcgctttgaggcgtctggcgcccgctggcgcggtgctgaggtggtggcagccggagaaggcttctccgtcaatgagattgccaactccgcccgcacccctgggcctccgtcttccggcctgaatggctggttctcgtcctcgatgaacgagagcccccctgccgtagcgcccgcccagaagccgctgctgaagctgcttcgccgcccggggcggaggtcattatcgctgctgccggaacgggcgacggcaagccacccatcggccttctgttgctccgcaggccccccaatcgcgtggggttgctcgtacctgcggaggtggaactggagttccgtttgtaatggcacttcgagtgccggtgtttcgttcaatgcggctgtcgaggcccgaacaggaaaccctcggccgctcttcgatgagccgaggccaggggtagcggtgccagcgcgaacagaggcagagttggctcgaaaagaaggcctggtcggccgaagcctggccgggtcgtccgttagcggggccgacgccggaattgatctgccgaggcctcgggccgggctgatgtccttgggggacagctggccgaggccccggggtgaccggccgagccgcctgcttgggccggattctcggagaagaccctggcggcgatggcccgggcttggtgatgatgttgtccttcagagcagagacccttggaccgtgtcgccgtccgaggctaggtcggacctcgccgaaggtgttgtcgacgccgagggtgttgctgctccctttagccgtcaagatccgagcctgcaggatcagatcatcttgtag

SEQ ID NO: 14685 - DNA, 360 bp, Zea mays
  Peptide Sequence Number=SeqID_58060
atgtaccacaggatgaggcgcatggaggatgtgaaagggaaatgtgcccttgggccatttctaagtattttggtgattgagtgccaacacaagtgcttaagtgttaatctatgccaatttatggacaaagtgcaaatcaagagtaaagtgctagtaacaggaaaagtccaatttggaaaagacttggctatgcagccaagactctgtgcagtttgggtgcaccggactgtccggtggtgcaccggacagtgtccggtgcgccaggctggcgactgtcaactggctgctctcgggaagcgatcaacagcgtacgactataaatcaccggactgtccggtggtgcaccggactgtccggtga

SEQ ID NO: 14686 - DNA, 165 bp, Zea mays
  Peptide Sequence Number=SeqID_58061
atgggtgtgaaattgtttgggagctatggagagcgttaccatgtccatgccgtcgttggacctgtccgtgggcaggattcatcctgtgtgcatccgctccaggtatcacaagtaataccaatggtcacatcaattagaaatccttacacatatcgaactcaataa

SEQ ID NO: 14687 - DNA, 621 bp, Zea mays
  Peptide Sequence Number=SeqID_58062
atggtgtctccggtgagctgcaagcgggtaatccgagtggacgtccgtgccccgttcgttgggggtcggctaggggcccagaggcacgcccaaaacccgcgcccggccgcgccgtggccgctggccgccctggccgcgcccccagccggccgctgccgcgccgccctggcccccggccagccccagccggccccggcccgccccttggccaaccccggccgccccccggcccgcgccccggccgcgcgcctggccgactcggccgcctgccagcccgacccccccccccccccgcgcgcctgcctggccggccggttcaaccgggccagctcggccgccccggcccccagctcggccgcccagcctagggccgagaacgatccggtcgaagagcccgaggaattcgcaggagaagcccctgagcagcagtcggttggtggaggcaaccgtgctcgcggttatgagcggccaagggagctccagagattagtgatacttgatcagagatactttggtacaggtgacaatgagattgatggttctgattacgattatggtattggcgaagatgaagctgtggaaggagacttccaggagttccaagactacgacgagttctag

SEQ ID NO: 14688 - DNA, 351 bp, Zea mays
  Peptide Sequence Number=SeqID_58063
atgcgtgcaccatcgttttcgccgtcgtcggacgtctcgttcgtcttcccgaccttcgccctgttcttcctccccaacctgctgcccccgcctatggtcacagctgcgagccgaccgtcgcttgtcaacgcgggtacgacgcgagtcggtcatgctcctagcctttctccatgcgggcagtcgaggaggacatggtggcgcctgccacgcttaggttatcttagcgatgaggagtccaggactgcagtagacggaccgggaccagagcaacagcacagggctgcagctctagcagccttgccgctgcagagtgagtttgataagagcatcttcaacaatagctcaaactga

SEQ ID NO: 14689 - DNA, 768 bp, Zea mays
  Peptide Sequence Number=SeqID_58064
atggcggtggcgtcggccgcgacgctggtggccgcgcagtgcgtggaggccgcggaggccctgggcgccgagcgcgagcagctggcggccgccgtggcgtcggccgtcagcgtcaggacccctagcgacgtcgccaccgtcacggccgccgccgccacagcgctacgtggcgcggcgacgctcagggccagggcgctgaaggaggcgtggaacgtcgcggcggtgacccctgtggagaagggcgcgatgaccggaggcggcgggcatcacctgcacggcggcggctacaagcacgatggccagcagcagcggcagcggctcctcagggaggtggagagcagcaacagcagcagcagctgcttgagcgacgagctggtgctgggcgaggagaacaacttcctaggcatctgcacgcaggagctgctcgcgcgcggcaccgagctgctcaagcgcacccgcaaagggtcgttgcattggaaggtcgtctctgtgtacatcaaccgcgcggggctggtgatgctgaagatgaagagtcggcacgtcggtggcaccatcacgaagaagaagaagagcgtggtggtggacgtgtgccgggacgtggcagcgtggcccgggcggcacctgctggacagcggcgagcaccggcgctacttcggcctgcgcaccgcggagcagcgggtaatcgagttcgagtgcggcagccagcgcgagcatgaggtgtggaccaagggcgtcgcgcgcctcctggccgacgcccggaagcgctga

SEQ ID NO: 14690 - DNA, 726 bp, Zea mays
  Peptide Sequence Number=SeqID_58065
atgtcttcttcctccctcatgcgtcgtgtctttccatcttccaagcccccggatggggggtacccatcgtctttccgcctcctcgttggaggaacacaactccgtgggagttggtacctttcagccatcgttcgacttcaaggattttcatcagccagcccggctgcacccccacgccggcggtcacccaggatgatgaccaccagttcctgggtggggaagggcaagccgggctgcgatcttggtcccaccctcagcttcaaggatgttcatcatccttgctggggtgggggccaggttgagccggcgctcgacctcccgtgcgggcctgcgggtcaccttctcccgcagcgttcgggggaggaggcgctcactggccctgcgggcggcgcggacttagacaacgtggggctgatcgacggcggacgtcgtcacccccagcgtgtcggagtcgtcggctgggttcccggcggcccctccggccggagggcggctgccacgccaggccggtgccccactcgtctgggaggatttgagtggggatctgccgggggggggctggtggcccccgccatcagcgccgaggcggaggcggctcgagaagtccccgtcgccgacgggatcaccgccaccatccgcgccccgggcctccggttcttcgtacttgtcctcgcccctcgagcgtcggcgtgggcgagggcaagattgcagcagcgcccaccctga

SEQ ID NO: 14691 - DNA, 399 bp, Zea mays
  Peptide Sequence Number=SeqID_58066
atgacggcggcggctctcagctctcttacggaagcaggtggacgtcagcaaggactcgaccgctccgacagctgtccttccgccaagctccgttgctcctccgacagccacgacatcacgccagcagggtgccaagatctctctggctgccacattggcatttattgttcaaaagcccacaactacatcactctagctgctccagagctgatcagtcacaaaagcactaaagctacactaatgcttgaagcagttcaaaagccttcagacaaccactccagcttcttgtatcctcctgttttaagtgtggaggcttgtaagactacaatatgcctaaacaaaaagactgaagatgctgatccaatgggaggaaaaatagtagctggatgtgctttctga

SEQ ID NO: 14692 - DNA, 894 bp, Zea mays
  Peptide Sequence Number=SeqID_58067
atggcgctccgtgttgacgtggcgggcccgcgcccgaggccgggcgacgtgggggctcctccgaagctggggtcgaatctgtcttccgttgccgaggccgagtccgagcccctgggtcgggcgaggcggaagtcgttcggcagaggccagggcggagtccgagccctggggtcgggcgaggcggagttcgtcgtcttccggggccgagcccgagtccaagccctggggtcgggcggagcggagttcgccgtcttccgggtcttagcccgagtccgagccctggggtcgggcggagcggagttcgccgtcttccgggtcttagcccgagtccgagccctgggatcgggcggagcggagttcgccgtcttccgggtccgagcccgagtccgagccctggggtcgggcggagcggagttcgccgtcttccgggtcttagcccgagtccgagccctggggtcgggcagagcggagttccctatggcgcccctggcgaggcctgactgcctgtcagactcactctgtcgagtggcactgcagtcggagtggcgcaggcggcgctgtccttctgtcagaccgcgccgcgcccacccagccacggtggagccacccttcgtcccgtcgtccggcggccggccctcagtccccgacggcggtggcgaggccgcggcggacgacgaccaggtcgtggagcccgacgagctcgagatcgcgcggtggaggaagatcttccgcggcccgaacaggtccatgtccacgatcgacgaggggacggagaaggacgacacgacgcccgccttctccacgccgtcggcgtcgcctgaccgacgcgacgcccgggccccggccctggccctcggcatggagaccgtcgcggtgcaacttcgtcaggcgtaa

SEQ ID NO: 14693 - DNA, 1032 bp, Zea mays
  Peptide Sequence Number=SeqID_58068
atggctgaaaggtaccaactcccatggagttgcgttcctccaacgacaaggcggaaggattgcgagtgtcccccatccaagggctcggaaggtggaaagacacgatgcataagggagcgcgaagacatggtcgccttccaagggggtcaccctccttttaaaggcgactctccctacttgcgtccccagccgtcgtgggctgagtcttctccaacatgctccaaggtcctccccctacggcttgggggctgggtcccacgcgtcacgcaagctggcccagagcagaagaagccaaactgccgcgcgcggtgcatgcaactgcccagcggttacgagcattcctccgctttcgcccagaccagcgggcgaaagggcgggcagccatgcaggcggcatgcaaccgcgccaagtgggcgcgcccctccgacttccaacgcacccagcgcgggggcccacgcccacgcgtcacgcaactggcgcgccggtcgctacgtgcaagcaactgcaccgccactcgcaccactgccacgcctcctcgactgcggaaccagtaccacgactcgaggcaaccctgcgtacgacccagtagtgccagccaggcgcgacggtcaatacggccaaaaatgggccggcagtgatggcggtggcaggcgggcgggagcagcggtcacgtcgtcagccaagcttgcgtcccatcccggggcagggaagcgagcgacgcttcgccttcgccataatgaccgcgtcaaaaaagggaccgagaaagggggatacctgaaaaggatccttctccgtgaaggaaccaggctccgagcctccctactgatcagaggttcgaaggctggcccctcggaggggtttaacagccgcctcagagcgcgtgggctccacacccactactggtcagaggttcgaaggccgacccctcggaagggttcgacggccgcctcaggccacttgggctccgcgcccactactgatcaggggttcgaaggctggccctcggagggttcacagccgcctcagacatag

SEQ ID NO: 14694 - DNA, 357 bp, Zea mays
  Peptide Sequence Number=SeqID_58069
atgtcaactaagaaacgccacctagatcagatcaaactcctcgccttgtggctcctcctgaaccacctgctcttctcctgtgggggggggtgtgagacagcaagggtgagctcacatacgttcatcgctcaacaagttgtggggaataatgtgcatgaactcgccaaaggtgggagctcacgtgaagtaacattattgggtaaaaagtggtcaagggcacaacttgtcttcaatgagctcctgctcagctacttctatctgctgctcaccaggatcctcaatcacgggctcttctactcgccacaatacaaacaagcacaatatacagggaaaatcaacatcacaccaaacatgtaa

SEQ ID NO: 14695 - DNA, 2274 bp, Zea mays
  Peptide Sequence Number=SeqID_58070
atggcccataactattattcatttatttgggctgggctggttgaaaaacattatgttggcctgctagtagccgggctagccgctgcctgccccgcctcacaggctcacagccgccgcaggggtgccagggcgttagggcccttagggcaaaagcatagcaacgggcgggctgcgcagcaagcagttcagctcagcacctcgccggacgccggctcacccatccggccatcccctgccggccgactctccctggtccccagcgcagcaagcagttcaccggagccggcgcagcaagtagtcaggcaagtctccatttccagatctcaacacaggttgattaacaaggtttgggtttgggagcacttcacaaggtatgaggtagaggttcaggaagctgatggttctattgttaagcaaaagtgggctaaatgcctaagatgttcacataaagctaaggcatatagttataatggcacaaaggcttttagtaaccatttaaggatgaagcatcaagttttgaaaggtcaacaaatgcttagtcagagtggggatgccatagcaacatataaatatgatgagaatgctagtgtgagacttttatattatgccattatcatgcatgagtatccgtttagtattgctcaacataggtactttgtgaaattcatcaaatcattaagaccatcatttccttcgaagtctcgtgttactgtttgtaaagagatcatggaactttataaggaggaaaagaatctactgtatgcacaattcaataaactatcatgtcgtgttagttttactatggatacttggacatctattcagaacaagtcatatttgtgtgttactgcacattggattgatgatcattggaaaatgcaaaaaaggattatcaactttatgcatgtagaaggcagccatggaggaataaaattgagcgatacattttttgcaaatgtgttgaattggaacctagataagaaaatgtttgctctttctttggataatgctgctgcaaacaaggtagccgttgagatagtgattgaaaatgctaaagagttgcttgtatgtgatggaaaattctttcatgttagatgtgcaaatcatatattgaatctagttgctagagatggattatcatgccttggaaatgtcattggaaacattagacaatttgtaacaattatcaaaaggtcacctttgcagttggaggcatttgagaaatgtgctaaagaatgtggtctagaccctaaaaagaccctttccttggatgttgctactagatggaactctacatatatcatgattagagatgccatttactataagaatgcttttgatcgtctggctaaaaaagataaggacaaatatggtcacatcaatccttcaagcactgattggttgaatgcaacaaatattagcaagtgtttgaaaaaattctatgatgtcacattgcttttttccggtacttcatatcctactgcaaatcatttctttcggaagttttctgagattaagatggctattgcaagatggtgtgatagtagtgatctggtaatttgcacaatggcattttctatgagacacaagtttgataaatattgggaaatgaacaatttagctttggcagtgggagcatttcttgatcctagatacaaacataggatgattgagctatatatgtctaagatgtatggcagtgataaagccgagttagagaaattagtattcatgaatgttatcaatgaattatttgcatattattcagcagtcatcaatgcaaaatcaaccacaaaaggttctagttcaagagagagtgagtttgttccacataaaaatacttgtttggtggatgaggaggaggatgaggttgatcttgatgagttgtatgcaacaacaagcaatgacaagaaggtgtcagagttagatttgtatatgagcgaggacctagtgaaggtcaatgacaatgaagcaacatttgatatcctatcatggtggaaagggcaagtcacaaattttcctattctttctacccttgctcgtgatgtgttgtctatgcaagtgtctactgttgcttcagagtctgcatttagttcgggtggacgcattgttgatgcattccgttcaagactcaaaccagaatttattgaggcattggtttgttgtaaagattggaagattgcttcggagaaagatttggagattgaaattaaaaccttaagtgaacctatgaatgacgttgacttggaggatgctgctgcaattggaacttga

SEQ ID NO: 14696 - DNA, 708 bp, Zea mays
  Peptide Sequence Number=SeqID_58071
atggccgttgctgacgttcccagccaaaagtcatcagtactcggtatgtcgcgcgcgttcgatgactactatatcgaggactgtggcatcatcttggcgccagaggtgacacagaggaggaccgacaacaatgaccagttcgtcatcctcgccaccgttggggctgtaatagtgtcggggaccataattagggtaccctcaagacgcctaattctcagctggggctcggactcggcctctgctgacgacctccgcctcgcccgacccaggggctcggacacggcctctgctgacgacctccgcctcgcccgacccaggggctcggactcggcctctgctgacgacctccgcctcgcccgacccaggggctcggactcggcctctgctgacgacctccgcctcgcccgacccaggggctcggactcggcctctgctgacgacctccgcctcgcccgacccaggggctcggactcggccatggccatggaagacagactcgaccccggcttcggaggagcctccacgtcgcccaacctagggcacaggccagccacgtcgacaggaagcgccatcatcaccctaccccgagccgactcggggcgcagagaacaagacctgctccgttgctcctccgacagccacgacatcgcgccagcagggtgccaagatctctccggctgccacattggcatgtacctagggcactag

SEQ ID NO: 14697 - DNA, 537 bp, Zea mays
  Peptide Sequence Number=SeqID_58072
atggttctttgcatttgttcatacatgcttttggttgattcaggtttggctatcacatgtctgaagttgagcttaattacgttgatggagttcgtcccaccaatgtcactgtaccgcataatctatgagttctctccaccttcatcatcgggacttttctcaaacttctccggtgtacacttgggagacttgagtgatcctgaaactttcgactaccttcagcatgctcaagctcgccaaggaggccagcaggcggcaacatcccgttcgactacctcatcccacccaatgggaatggacaagtgcaacgcgaatagcgtggacaacgacaacgtacacaaggcgggcatggtgatgaacgggttgcccatcagtgtgtacgcatcggagacgttggggttcggcacatacacatgcgacgcgtgcgccatgtcgtgcacgctcaagtgggacgtggccactgccatggagtacaaaggcctacccttgcagcaggccgtcgactactatgtcaggggcacgatgcagaatatctga

SEQ ID NO: 14698 - DNA, 1260 bp, Zea mays
  Peptide Sequence Number=SeqID_58073
atggcggctgtgccatttccagcacaagggacccctaaacctccacctccaacggcggcgcttccccctctccgccgtctcctggccctccgcggccaccgacgcctcctctccacacccgccgcctcatccaacaaccgcctttccccagaggccgtgctctacaacatccacagcctctccaaggacccctcccaagcgctcgccgtcttccgccgctccgtcgccgccggccagccagttggctccgcggcatacaacctcatgctccgcaccctcgcctcccacccctctgcgcagcgccatttctggcccttcctccgcgagatgcaggaggctggccactccgtcgaccagggcacctacctcgctgctctcgcctccttcaagaaggccagtctcaccgccgactatgcctccctcaccgcgcattacgacaagttccggaaaggtgccaagtccgccaccgcggcggcggaggcggtccgggaccacgacgccgcgggcctcgatagcaggctctccgccatcggtctccttccgcttacggagacctccgtcaccacggtgctccgagagctgagggagcatccgattaaggctctcgccttcttcagatgggctgggcggcagcaggggtacacgcacagctccgtggcctacaatgccatggcaagggtgctcggcagggaggagtcagtgccggagttttgggacttgatccgggaaacaaaggctgctgggatgcacgtcgatatcgacacttacctcaagctgtccaggaacttccagaggcgccacatggtccgggaggctgtggagctatatgagctcatgatggatggccctttcaagccagcacagcaggatggacccatcatcatcaggcgcatctcgatggggccgtcgccagatcttgagcttgtcaatcgggttgtcaacaagtttgaggctgtctggggcgtcaagaccaaggagttgcttgatggggtccatagggcgcttacacgtaatgggatgttcgatgaggctgcagagattgtgcaaacaatgaaggcccaaggccaccagccggacaatgttacatatagccagttggtgtatggtctttgcaaggctgacaagctggaggatgctcgcaaggtgctcgatgaaatggaggctgaaggtatccatatgagcatgtcaagactcttcaacttggagaaatttgctattatggagatcctcacgtgcggcttcgacgttttggaggcgtag

SEQ ID NO: 14699 - DNA, 828 bp, Zea mays
  Peptide Sequence Number=SeqID_58074
atgaacaaaacaccagcactaaaggtgtcattacaaacggaacttcggttccacctccgcaggtacgaacaaccccacacgattggggggcctgcggagcaacagaaggccgacgggtggctcgccgccgcccgctccaacagcgacgacgacgacttctgctccgaggggccgaacagcagcagcgatgacctcagggcggatgctgctgccataaggccctcgcccatgtcctcactcaagaggcaaggacgagcagaaggccgtagagttggaggtcagtccgtgggcggcaccggctatctcatcggcggagaaacctcttccggctgccgtggcggaaggtggcgccagaagcggcttcgaagccgctcgggtcggagagccgggcacgtggcagctgccagcgccgcgaatggcgaatgcccttccccccgatcactgagggaaggagcgggccgctgcccgcgcagagaccgaccccaactcggcgcactcccctccccagcactgatgatgaacatccttgaagctgagggaggggcagaggccgtagcccggcttgcttctccccacccagaggctggtggtcaccgtcttggggaccgggaaagggggataccccgaaaaggatccttctccgtgaaggaaagggccccgagcccccctactgatcagaggttcgaaggctggcccctcggaggggttcaacagccgcctcagagcgctcgggctccgcgcccactactagtcagaggttcgaaggccggcccctcggaagggttcaacggccgcctcaggccactcgggctccgcgcccactactga

SEQ ID NO: 14700 - DNA, 1029 bp, Zea mays
  Peptide Sequence Number=SeqID_58075
atgtacgacaagctctggcgccgccaccgcttggacgcggtgcagagcggctgctccgcgttgtccatcgtcaagcaggggacctcatggtcgtcgccaacatcgatgactctcgggttgttctgggcactgcattcaacaacgacgccatcacgtcgtctagctcatcgtccacctgaagcccaacctgccacccaagagtcatcagtactcggtatgtcgcgcgcgttcgatgactactatatcgaggaccgtggcatcatcttggcgccagaggtgacacagaggaagaccgacaacaatgaccagttcgtcatcctcgccaccattggggtgggttgggtaggtgcgggatccagcgagcggaggatgggcgaggaggcggtggacgactacgagctccacatggtgtgctacggcagcgacgaggacgagcgcgtgatggagtgggagtcggggctccctggcgccgacgagctgaccccgctctcgcagccgctggtgccgccggggctggccgcggcgttccgcatcccgccggagcccgggcgcaccctgctggacctgcaccgagcgtccgaagccacggtggcgcggctgcggcgcgcgccgccgtcgtcgccgggcacctcctcctccccccacggccaccaggaggcgagggggggcgaaggggcggactcggcggcggcgactaccacgaacagcaacagacggccccggctggtttggacgccgcagctgcacaagcggttcgtggacgtggtggcgcacctggggatcaagaaggcggtgcccaagaccatcatggagctgatgaacgtggaaggtctgacgcgggagaacgtggccagccacctgcagaagtaccggttgtacgtgaagcggatgcgggggcagggtccgtccccgtccgaccacatcttcgcacccacaccggtgcacggcgtcgccgtcggcatggtgcccatggtcagcggccaggcgtaccactacctgtacaacggaggagggggaggagacagatga

SEQ ID NO: 14701 - DNA, 615 bp, Zea mays
  Peptide Sequence Number=SeqID_58076
gatgaagatgcaaatgagagggcaacttatgataaaaaagaaaccacaaaaaagggcaacgtggtcattgaagaaatagtggatgaatttaaagacgaagaagaaaagaatgaaattctggtaagcactcaggatagtgggatcatgtttggatcacaagaagaggttgatcagaaagaagaagctgagaaagatatgaggaatcccaaaaacaaaaagcaggttgaagaaaagatgtgtgctaaaaaagaggatagaagggttagtgaaagacttaagaaggacgcgggaatcagaatcgagaagaagaacagaagaatagctgctaaaaggaatttggaagagctagaaaaagacaagggtaaagaggctgcaccctatatgcaagatgatcatggcagcaattctgatttcttatataatgaggaagggtctgaatcagacggcttcattattgttcaatctagaaagaaaaagagagagaaaagacttggcattaaaatatctcctattggaaaaggtcaggaaaatcctgatccaaatagaaagaaaaccaaaggtgctgggaaaatccctgccacaaatgaaaaacaaaccagcaagggtgtaaaatga

SEQ ID NO: 14702 - DNA, 207 bp, Zea mays
  Peptide Sequence Number=SeqID_58077
atggacacggcggcggcggtgctgctgctgcttgcgctggtcgtcgtcctgctctggtaccctctcgttctgcccgcgctgccaccttctccgccggcgctcttcgtctggatcccgatgctcatgctgcttctcctcttcgcccttcccttcttcccagctgctcgccgtcggatcactgcaacaaccatgcaacttgactcgtaa

SEQ ID NO: 14703 - DNA, 1692 bp, Zea mays
  Peptide Sequence Number=SeqID_58078
atggccgttggtgaaggcttctgtcgtatggcgcaccggacagtccggtgcgccaccggacactatccggtgcgccagccacgtcaccaggccgttgggttccgaccgttggagcttctgacaactgggccaccggacagtctggtggcgcaccggacagacgaccattggtgcgaagtagccgttgcctcgctggcacaccggacagtccggctgcgggcatcatggcgccaggagattgcacaggcgctgcttgcattagttgctccagttaaggtggcgttctcggagataacgctatcgagcccagaagacgccggacccctgtgcgcacgacctggacccccgaacgcctcccccccgctcggtcaagggtctaatgcagcaacatggcttattgtccgtgacgtaggccagcggacagcgcgtgacgtaagggctctgagccgcgcggcctccgcatttattgcggagaggacactccgcctgtccacccttctgacagatgatgtgcccccacggcatttattgtgtcctatcctttccactggcaggcggcgccagggccaccctacagacggcgcacctgtccaatccattgtcaaaacggtgcgcctgtgctacgcggtgcactgtactcatcccttatacgagaagcttccccctgcacgccgagatctcggcatgatggtgcaaatcgttgagcaccgcgtcgagactttggtggatttcgtggtggaggaagaagctgcttcttccacgccacagggagttgctgcgtcacccccaagctctacggcctcgccaggggccatgaagcaatggcgggacgacgtcgaccggttgctcagcatggcacattctacctcgactaggtcgaggccacggtcatcccggtgccaacatgaagcgtcagcgtctgtgcgctcaccctcagtgaggggcgcacataccaacgacctcctggcagagctcaaccgcaggcgtgcgggggaggacgcccgggtatctctagagagggcacgggagcgccgacaaaactttgagggtcacgatgatgctcgagtctctctggagagggcgcgtgagcaccgccaaaacattgagggtcgcaacctcgatcaagactttgttgtggtagcaccgcagacaccaatgggcacccggtcccaagcgggtgtccccttggccagtgtgggctgcgccgcccttgcgaatcatctccgcgcggcgtcatggccgcccaagttctgggccacacctgctggaaaagaagagctctgtgcgcggtttgttgcgaacttcgccagtgcttaccagcagcacggtgtggaggcccacctccatgcggtgaggcaggagcccagggagactcttcgaacgttcatctcccgcttcaccaaggacggtaagaagaagaagaagaaggaccgcgacttccaaagatcacggtccaccgctctagtcatcgcaaccgcgaccgggggctggggcgaccgcaacaaacgcccacggccgcagaggggtaacaacggcccatgccctgtgcaccccaacggtcgccacagcgccgcggagtgtcgcgagatcattgatctcgtgaaacctaaacgggacctcgggtatcagtcacccgagggggacctgaaggaagtcttcgccagaggttcctactccggtgggaacaactag

SEQ ID NO: 14704 - DNA, 1698 bp, Zea mays
  Peptide Sequence Number=SeqID_58079
atgcctcgcttttcttgcattcatcgcgcccttctgccttccgaacctctggatgaggcgcgccggtgttcactagggggatccacgtcagggtcaccttccccagcggtctcaccgccgtggagctcgcactcttcgtttcttgcgcggtggtgttgccgatcttgtcttcttgctgctattggaggggcgcaacctcatgggggttggcgctcttctgccatcgctcggcttcaaggattttcatcatgcagcccggctgcagtctctcgccaatggtcatctataaggatgaccaccatcctcgtggtggagagaagcaagccgggttgcagcctcccccctaccctcagcttcaaggatgttcatcatcctcactggggtggaaggcgagccgagtcggggccctgccctccgcatgggctggtgacccgcttcttcctccagcatttggagaaggatgttcaccagccttgcggaggaggcaaacctaggctacgcggggccggctggctgcaggtcgtgagttgcagcgtgtctggctccttggctcggatggctttggtgccgcctccaatgctacctcccaccgtcaagtggagcgtggttgtccgtcctgcgcacgggcgacggtcgcgccgtgcgcaggaggacgggggcgaggacctttctgcacgtgctgaggcgttcgtcgtcgctggtgagccaccggtgcagaggtggccgctgttgaggatgggggcgaggacctcttcgcaatggcgcgtgcatttaggcatccatcaccgctgttacgccgtcttggaggattccgaagggacagcggccgcaaacttccaacgcgactccacactggcgtctggtagtttatacctgcagagtagagatggaactaggattccgcttgaaggcggatgtaatacttttgctttttgtaagaccaacaggccgggcttacgagggcagacctcaccgggttggtgtacacgtgtgtgctacctagttacaaaagggaaagaaattcgacccctcagacttgctcctatggatagtacttacagagatgctccagcaccagatggaggtactccttcagtcgtagctgaacggtcaccctcaggtcagcgacgaggtggggagccatccttggaggactgctcatgccgctcgctgacacgtttcacgagatcaatgatctcgcgacactccgcggcgctgtggcgaccgttggggtgcacagggcatgggccgttgttacccctctgcggccgtgggcgtttgttgcggtcgccccagcccccggtcgcggttgcgatgactagagcggtggaccgtgatctttggaagtcgcggtccttcttcttcttcttcttaccgtcctgggggacggcacccgagcctcatgactgggcaaccctggtttgtgggaccaagtgccacgcacggccctcggcagctctggcgcatttgtcggccagagcaaagagcgtggggacagtctccacgtcatgcgtggccaacttctccaacattttctcatcacgtaatccctatcggaatgccgtgatgatggaagcatcggaaatgcgaggtatagtacctcgcaccttggtgaagcgggagatgaacgttcgaagagtctccctgggctcctgcctcaccgcatggaggtgggcctccacaccgtgctgctggtaa

SEQ ID NO: 14705 - DNA, 141 bp, Zea mays
  Peptide Sequence Number=SeqID_58080
atggccgtgatgggttcaacatcggaaaagatgtacctctgccaggtgaagaagcgacaaacttttgttgtttctgttccaaggtggtcccaaaagaagaaaaccaagaatagagctgcgggaggaagggttcctccttag

SEQ ID NO: 14706 - DNA, 759 bp, Zea mays
  Peptide Sequence Number=SeqID_58081
atggacaggtccgaagccgccacgtgtccagagaaggtgatatactccaaggcgtcaacagtggtccggacccccacgggagagcgccggacccccggatatacagtccggacccccagggttggtcccggacccccagggttggtcccggacctcaatgtgtgcaagccggacccctggaatgggatccggaccccctcgtatggggtccaggccgcccacagtggggtcccaaggcggagacccgatgctgccacgtggcctactgcgcgtgacgtaaaccaatgggcggagcctgacgcggcgacctgtccattcagcaggcggcgtgcctatccattccactggcaggcagcatgccatactgccacgtgcactacgcccatcattgctcgtgttccttccgttatgttcctgtgcccacatgtcagggctcaacatccttggcgggtgcgttccaccacccgcccggagatttcctctccaacatttggcacgccagttagggggcttggctttaggtttttggttgttttcctgctcgacaccatggtctatatcgtcgaacaccacgacttcattcccgaggatttcccgatggaggaagaggctgcgtcttccacgccacgggcctccaaccgccctgcgcctggtgctgctgctgtgcacatggcgcagcagcacacttccgctcagtcgtcctgggctccgtcaagggctgctcccggtgcgctgtttgcgaccagggagttgttgtga

SEQ ID NO: 14707 - DNA, 657 bp, Zea mays
  Peptide Sequence Number=SeqID_58082
atgggcacggggaaccgcgtcctctacaagctcgcgctcgtgccgctccgggagtaccccttcttcctggcgcagttcgccacgttcggatatgtagttgtctatttctcgatcctgtatcttcgatatcaagcgggcattgtcaccgatgagatgctgtctctaccacagaaaccttttctagttgtaggactcttagaggcttttgcggcagcagcaggaatggcagctggaggtagtctgttcgtgaaaacttatcttgtctggcagcttcttctatctgctattttcttgaagaggcgctatagaattaatgagatagcaggatgctttctagtgaccgttggtgtcataataactgtagcaaggcaagaaatcatatttctagatgcttctaagaaactgaagtgtggctcagttgatctttttgttgtcaattcatacggctctgcttatcaatccttcaaaaatctttgtctttgtaagttccgctgtccatctacgctttcaccctaccactgccgtatatcggtgtggcatcatctctgccacctggctttgttgcgggtgcagcagtactcaccgctggcttactactgtacagcctaccacaggcacgacattttggaaatactttttcacaacaaaaatgactag

SEQ ID NO: 14708 - DNA, 1356 bp, Zea mays
  Peptide Sequence Number=SeqID_58083
atgtcgccgctgaggctgtcagtcctccttgtgctcctgtccagcctcttggccccttccactgccctgcgcagctcgacgctgctcctggcgcgttctcctcagtccgtgtcgctcagtgccgttcccgggacaccggtcaccgcatgggcggccaccctcgccgcccagacggcgtccgacgcggcgcgcgcagccacgctcgcaacgggaccccgggacccgccgccggccagtgccgtggacgccgccaagaaagggccgcgccggtccttcgtgccgatcgctccgggccggcagcttctcagcatccccagctacgtggcccgcgcgcgcctcggcacgccggcgcaggcgctcctcgtggccatcgaccccagcaacgacgccgcgtgggtgccgtgcgccgcctgcgcgggctgcgcccgggcgccgtcgttcgacccgacgcggtcgtccacgtaccgccccgtgcgctgcggggcgccgcagtgctcgcaggctcccgccccgtcgtgcccagggggcctgggctcgtcgtgcgcgttcaacctgtcgtacgcggcgtccacgttccaggccctgctcgggcaggatgcgctggcgctccacgacgacgtggacgccgtcgcggcctacacgtttgggtgcctccacgtcgtcacgggtggctccgtgccgccgcaggggctcgtcggcttcggccgcgggccgctctcgtttccgtcgcaaaccaaggacgtgtacggctccgtcttctcctactgcctgccgagctacaagtcttccaacttctccggcacgctcaggctcggccccgccgggcagccgaagaggatcaagacgacgccgctgctatccaacccacaccgtccttccctctactacgtcaacatggtcgggatccgcgtcggcggcaggcccgtgccagtaccggcgtcggccctcgcgttcgacccgaccagcggccgcggcaccatcgtcgacgccgggacgatgttcacgcggctgtccgcgcccgtgtacgccgccgtgcgtgacgtgttccggagcagggtgcgagcgccggtggcaggcccgctcggtggcttcgacacgtgctacaacgtgaccatctccgtgccgaccgtcaccttctcgttcgatgggcgggtgtcggtgacgctgccggaggagaacgtggtcatccgaagctcctcgggcggcatcgcgtgcctggccatggctgcgggaccaccagacggtgtcgacgctgcgctcaacgtgctggccagcatgcagcagcagaaccaccgcgtgttgttcgacgtcgccaatggccgcgtcggtttctcgcgcgagctctgtacggcctga

SEQ ID NO: 14709 - DNA, 1419 bp, Zea mays
  Peptide Sequence Number=SeqID_58084
atgtaccgagaggcgttgtggcagaagagaggtcgtcctcgggagttatatccggacgtatctagtaaggatgctcctgttcctcctgaactccccgtgcctaactgtgactgtggcagactggcttgggtacatcaatcacaacatccagacacggctgctcgctgctactacctttgtggcactttggacggacatgagaggtgtttctttttccagtggatcgatggtcctgataaatttgaccctcgatatcttcttttcgttaattggttgagtggaaagaccagtcatgagcgttttaagcgttgggtacctcctcccccgaatcctccaccaatgacggatgaggagaaggaggtagcaacagaaagacggatggactcaccgcctcgatgcgattgtggagaccgtgctgtcatcgacgaagactatgacaagcagttctgttgtccgaacattgattatccatacgggtggcagccagaggtaaaggaaaagagatacatggggtgggcggcagaagaggtcaaatttgatccagtactctgcaaatgtggtattgaagctaagtatggattagttccttcggagcttggcgttggatatttttgtggacatatggtcgattacgatgaggagacgaggaaatgcagttgggagagttacgacgacaaaggagaggtgatgcgcacaatagagtccaagagaataatgggacagaagatgtgttgtggatctcgactcgttgattcgtacattaacgatcgcatacgcgacatgcgtagggaagcaaaatctgccttttatgatagcccgaagcgtgcagagtataggaggttgaaggcggcagatgagaagagagcacaggatgcaagggaatgggaagcggctcaagccgagaaacagatgttggataatcttgctgatcgcctcaagggaaagattggaagcggcgtaaactatttggccgatgaggcgcatgcgagatatgttcaggataaaatggcaacggttgagctgatggaggaggaggacgacgacacatctagattgagtgagcttatcgccctcgcagaggcaggattacatgaagaagaggaggacgacatgtcaaggttgagtgagctcatagcactagctgaggcaggattacgtgctcaagaggaagaggatgagtttctgtcacaggccgccgcagaggtagaggcagcttattacaagaagaagtctgatgaggctgaggctgaggatgagctattctcccaagctgcagatgaagcagaagccaattattacaaaagaactggtgacaagtgtgatgcaggacaatgcagcaagtggaatgaggttgttgttgaggattgcgcgacggatgactccgaagatgagttactcatagattgtgattcagactga

SEQ ID NO: 14710 - DNA, 456 bp, Zea mays
  Peptide Sequence Number=SeqID_58085
atggctccggcggcgcgcgcaccatccgagttcagccgcgtgttctcggcgctggaccgcgacggcgacggcaagctgtcggcggccgagctgcgggcgtgcatgagggcggcgctgggcgaggacgtgtcggcggaggaggcggaccgcctggtggcgtcggcggatggcgacggcgacgggctgctgagccaggaggagctgctggcgctggcggggacaacggcggcggaggaggaggaggaggaggagcgacggcgggggctgagggaggcgttccggatgtacgccgtggaagggcagggctgcatcacgccgctgagcctgaagcggatgctcgccaggctcggctcccaccaggacgttgccgagtgcacggccatgatctgcaggttcgacctcgacggcgacggcgtgctcagcttcgaggaattcagggtcatgatggatgcatag

SEQ ID NO: 14711 - DNA, 1200 bp, Zea mays
  Peptide Sequence Number=SeqID_58086
atggaacgaggagaggacattattgaggagaagcaagctggtggagctgctacgagtgatgagagatcgtcatcccaaaaggtcgccgatggaaagggcgccgagccaccggcggccggagtctcgaaccgcctaaagcctagcgacgacgcagagaagcttgttgcgttcatggaagaccactacgacgacgtcgttgcccgcgtgcaatccttcgacgagttctaccacgccattttcgagctcatcgagatgttctgcgaggaacgtgggcagctgcagtacaggttagcggagaagaaagccctcgaggaggcatacaacaagcaccacaggtcggacggcaaggtgacgaaggaggagttcgaggcgatgagcagggaggtggtgaaggcgggcagcttcagggtggggaaggcgagcctggagcttggcgcgctgctgttcggcgccccggcgtgcgcgctgctggccaagaggatcctgccgggcctgggctggctgtccgacgacgtcgtcgtgcccctcgccacctccggctccgtcgcctacctcatcaagtccaagaggctcttttgcccaccgcgcttctcacagaagccgcccgcgtacaggaaacgaaaagccacccgaagcacgtgtcctctggaagttgggcgggtcgggggcctcgagcacactcccctctgctcatccgccacattcctctcgtcttctcagggttttgcccgcgccgccgcaactccgtcggcaaggttggactcctcccgtatcgcaactcgtcgtcaaggttgcactcctcccgtatctgaactcctcgtcttcgcagcagactccatagccgacaaggcaattggaaggatgcaagagattgcggacaagattttttccgtagcgagggaaacaatccgtcctggacgcgggttgacctcatttgacgctaccaaacttcgtgtagcattggaggatatagcttgcatgctagagcaagactctatggtgttgcaagagaatttggacaacgtcaacaacgtaaacaaccagggtaacagcagctacgaaccgtcagccttgtcctcaccaccccctgctgacgacgaccttagtccagactgggactttgcggagcacttcgaaaacttcaggggtcttgaatatgactccgatcagatgccttcgtttagtgacaatgaggtttaa

SEQ ID NO: 14712 - DNA, 424 bp, Zea mays
  Peptide Sequence Number=SeqID_58087
atgggcgcaccggacagtctggtgttccaccggacactatccgagccggcgcgctataattcaccggactatccggtgtacaccggacagtgtccgatgctccaagaggacgcgactctggaacttggcagcctcgggaattcgcaacggctgctccgctataattcaccggacatgtccggtgtacaccggactgtccggtgtgacatcaaagcaacggatacttcggcgccaacggttacctgcagcgcattaaatgcgcgccagcgcacgcagaagtcaggcacgcccatgctggcgcaccggacactctacagtacatgtcgggtgcgccaccggacatccaggcgggcccagaagtcagagctccaacggtcagaacccaacggctttggtgacgtggctggcgcaccggacatgtccg

SEQ ID NO: 14713 - DNA, 609 bp, Zea mays
  Peptide Sequence Number=SeqID_58088
atggaccgaaggtccatgacacctggtatcagctccaggttatcctcaccaccaccagccgcccatccctcaccaccactaccgccatttgccgccgcaacgccctcccacccgctctctccaactctagatgcattcactcggctcgaagagaagtgggatcaattcgttgtgatgttccaccgctacaaggagaagacagagaaggaactccaagcagcggtgcggcttcaggcggcagcgcgagggttcctggcacgccgccaggtacagtcccttcgtggggagaagcaccttgctgtggcctccagggccaccccatggccgtcatcacatgagcaggtcgtggtgcgcctgcaagccgcagtgcgcggcttccttgttaggcgggcggtgcggaagctgcacttgctgatcagctcatcgctgcaccaactcgcagcctgcgcgcccaaccaccaggtctcgtctatactttttgaatcccctgcagaagtcaagatctggctcgaggacgagctggtcctcaagggagggggagatgtcatgggcatcatagggagcgagaggcaacagccaggctgggataaggctagagaacaagattga

SEQ ID NO: 14714 - DNA, 216 bp, Zea mays
  Peptide Sequence Number=SeqID_58089
atggcagttggacccgtggatatggaacccacgggtttcgtacccgatggatatggatacgagttgaaaaactcaccggtggatcatgtcgggtcgggtacccgaaatacgtcgggtagggttcaggtggagggtgccgttggatccgtgatcaccccaaagtacattctaaatagggtgggggaggtgtggggtgaccggttggagaaggcctaa

SEQ ID NO: 14715 - DNA, 878 bp, Zea mays
  Peptide Sequence Number=SeqID_58090
atggcttgggagattggtgctcgcgattatggaggtttgagctcagatttgggcagggggcgcaacctgcagaacggtgctcgcaagttgttcggtgaaatgcccaagagcgactggaggtcaccaagtcgcgtcctcgaagtcactatacgccaggtccgttaccccatcactgagagcatggtccgtgtagtttttgctccatatggaaaggttgagcatgtccacatgtttggggactcagaccatgtgttggctcatgtggtatttgaaacaaaagatgaggcagcaggaacttttggagacttacatggtcgaaacatctatgatggttgctgtgagctaaacattcagtggggtgcatctcaagatcacagcaatgccaatatagataagagctgctacgatcatgtgagctcatattcatccatagtgaaggtgcacgtacctgtcaccaaccttgctaatgcaacagtgtcggccacaaatgatgttcctggcatcaccaacatcatgccatctctggtccttgctgaaggccccagcgtcaaccatgtaaaggcggcatctgatgacatcaactctgataagttgtgtgtgaaggttgctgcaagtggtgcacaagcagtggttgctgatgtcgcacttgttcctgctacaccaacgacctcgttggctacactgacttccccacctaagagtgtcaacgatgactgcaagagcaacaatgatgttgcgatgcctagactttatgcggctatgttacatgacatcaccaaactcatcaagcccctaccagttgtggtgagggttgtttcaagcacacctccaccagctccattgggtattcagctagtgttcgatggcatgcctagtag

SEQ ID NO: 14716 - DNA, 984 bp, Zea mays
  Peptide Sequence Number=SeqID_58091
atgactaccagccttgtggtggggagaagcaagccgggctatggcctccctcatgccctcatcctcaaggatgttcatcatccgcgctggggaggagggcgagccgagtcggggctccacctttcgcgcgggctggcggcccgcttctttctccagcattcgggggagaagggcgttcgccagccctacgaaggaggcaaacttcggctacgcggggtcggtcgtctgaggcaccgtcagctgccgcatgtctggctcctcggcctgggtggctttggtgccgcctccggcgctgcctcctgccgcttggacggggcgtggctgtccatccaccgcacgggtgatggtcgcgccgtgcgcgggtccgtcacatccacggcttctcccgcgccactggccgtactggggggccatacaagacaccatacgccgcgggggtggcagcggcgttcttggatggtcttgtcctcacttcgtgggatgacgggagcgaagacctcttcacgcgcgctgaggcaaccgccgtccaccggtgcggaggtggccgctgtcgtcggtactgaggtggtcgcagccgctgaggtggtcgctgtcgccggcgatccatcgatgcagaggtggtcaccgccgttggtggagctgtccggagccagtttccagcgcgactcctgctggctcacggtatgggaccaggttgagcggctacacggtttccggaccccccaggagacaagtgcccgttcttcagagccggaccttcaggtactaggacacccgccacagagtggcagagcatgcaggaccacggtacgggaccaggctgagcggctacacggctccgggccactccaggagacaagctttctggtatgggaccaggctaagcggccacacaggctccggaccacccaatggaacgggttcccattctttagaaccgcccccaggctgtcgggccctcctgctttcgcgaagaggtcctaa

SEQ ID NO: 14717 - DNA, 1143 bp, Zea mays
  Peptide Sequence Number=SeqID_58092
atggcgagggtgtgtttgggcctcagcggctgcaaaaaacacgcgctacaagataatccgatcctgcaggctcggatcttgacggctgaagggagcagcagcaccctcggcgtcgactacaccttcggcgagggtctcctccaagaatccggctcgagcaggtggctcggctggtcaccccgaggcctcggccagctgtcccccgaatacatccgcccggcccgaggcctcggcagatcaactccggcgtcggtcctgctaacggacgacctggccaggctccgaccgaccaagtcttcttttcgagccaactctgcctctgtccatgctgacaccgctacccctggcttcggctcatcgaagagcgaccgaggggtccctttaactaagcaagagaagcctcggatagcaaggccgaccgagccgagggactcctacgcctccgggatacggatacctcactcgtcacctttgcacggggcgactcacgcttggtatgaacaacctccacaccggggagcctgcggggcgacaagttcccggcaactcgccggcgacctctgcagcggcagccatggtcccaggacggacgcggccaccagaaggctgtctttcgcgtcctcgctcaagggatgcgaaccagccatcaaagccaaagagcgggccgctctgaagcgcatcggcagttcgccttccccgacatggctggaggacgtctcctccgcagagctggaggatggtctccaccaccagaagctagaagaagaggtggccagccgacccgcgcgggaggtagagccccggctcgcctcgctctccaccccaacaaggatgatgaacatccttgaagctgagggcgggaccaagatcgcagcccggcttgcttctccccatctaggggctggtggtcaccatctcgggggaagcgagcgacgcttcgccttcgccataatgaccgcgtcaaaaaaggctctgagcctccctactgatcagaggttcgaaggctggcccctcggaggggttcaacagccgcctcagagcgcgtgggctccacacccactactggtcagaggttcgaaggccgtcccctcggaagggttcaacggctgcctcaggccactcgggctccgcgcccactactga

SEQ ID NO: 14718 - DNA, 282 bp, Zea mays
  Peptide Sequence Number=SeqID_58093
atgggcaggtggttactccacggctggctccttgctcaaatgcttgctgcagttcacgttcctggaatgagaaagaaactgctccttgtcgtgagtgtctacgcgctgttcgcgcgtgatgtgctcgtggtcgcgtgctggttcatctatgtttgtttgcttgtgcttgttcgtcttcgctttgcgttgcgattagatcgcgatttgtttccgcacttcgaggaatcgaagatcaagagttggcgaccaagtgatctggttcttcgagttctacgagattga

SEQ ID NO: 14719 - DNA, 204 bp, Zea mays
  Peptide Sequence Number=SeqID_58094
atggggtccaggcacagtgcttgctctgccgaggctgagtgccgaggttctttcgttttgcttttgttagtcaccctcctgcggggagaggtagaatgggaatcacggcttgtgggtaaattgtgcgacctctgcagagggttagaaactgatatatcagccgtgctcacggttatgagcggccttgagatcctctttgattag

SEQ ID NO: 14720 - DNA, 340 bp, Zea mays
  Peptide Sequence Number=SeqID_58095
ccatccgcgccgcactgccttgcgtcccgccgtcatttaccacatcgcgcagatctctgttgcgcgcctaggtgcctccgtcgcacgggaagacttcgccaagtcgccggcaacaaccagcaagcgcccgcgagcccatgctgggagcactgcaaaagctcaccatcatcgtcgcgtccgtttccttgcctcgtcgtcgcattcacgcatcagcaggaagccggagccaccgctgcgacgtctgcttgctggagcttcgctgagctaccctccgcgatcatcttcgtcgagcttccttccgagccagcctggccatgagccaccgctaggcgaggcctag

SEQ ID NO: 14721 - DNA, 1197 bp, Zea mays
  Peptide Sequence Number=SeqID_58096
atggggagtcatgatccccgggcaaaacgggaatcacagctcatgggtaaagtgtgcgagtatttcctctctgaagaggttgtccacattgcaaccactgctcaggagaaagacgaagtcgtggaaggagacttccaggagttccaagactacgacgagttcttagcggaaggctctatctgtcatactgacagatctgagcaaacggaggaaggagttgaaatagactccaagcccaggcgacatctagatcctattcccgggcatagggaactttcaattggtatcggagctaggcctctccagtgtgggcttagccatccggagatgacaatgtcatcacaagaggcttgcaacatcttagctgactctctttctagaggtgcttatttttccatcatgagtagtgataatgatttatttgttaatgctcatgacctatggactacaattaaaataaaatattttgagtcaaattgtgctacttctactccatatgttgcttgtgtggagacgaaatatgatgatgaggaggaatatgaggatgatagcaaggatgagtcttcatcacctcaaggtactttttcttgtattgcttccactaataataatgacagggaaaatgagaccgacgatgtggaaaaagaggagattcgtcggctctacacccatctcaacaaagaaggcaaaatgctcttggttaagctgttgaggaggaacaaggaacaaggtgagacgcttctcaggctagaggagactctcatcaaaaccaacgacagcctggagaagataaccaaagaacatgaggagctaaagtgctctcatgataatttggtccaacgtgaattagttgatgaccacatcatgctcaatattgctcataagttaaagtattatcatgtgctgacctccactgcccccaagaaaggccaatccttgattgagaaacaagttgtagggtcaaaaaggaaattgcttgggaacaagaaacaaagacaattgaggagaagacgccatgctcaacttcctcaagatattgacaaacatgtgttgaataagcttgaggaaggaggaaccgcagcaagggtcaaacttcgcgagaaagaagctcctaaggcaataagtgaagcaatcaacatgaacaaagaaaaagagcaaaaagagaagaggaaaaaggaggtgcttcaagtgcaatga

SEQ ID NO: 14722 - DNA, 588 bp, Zea mays
  Peptide Sequence Number=SeqID_58097
atggattttggttatggcatgcctgaaccagttggaaaaatgaaactttgcttgtatgttgtatgctgctcgtgcgttttgctcatgggctccatgtttttactcggaatgttgtctgctgagttgcttcttaacctactgatttcaggaacaagctttgtgacttattttggatttgagcagcacggtcataacattgctgatgccaagaaagatgatcctctaggtttacaacatcttgcactgtgtcatgcgcgttacaggccaaacgacaatgccgtggagtacggcgacaacaagaactacctctgcaggaaccggttcaacgagtactttgacgacgcgtgggtggagcagacctggtgggcggacaactgcgactgcgtcatcgtccagcacaagcacccctcgcgcgacgtcgactacgacgatgaagatctggcggcgcccgtacttcatgccaatccaaggacgacgagcaccaacgagaccaagttaaagcatcctcttcattctgattcgattgtgctgggctttcctactatttctgaattctggggcgcggcgtcggttttgttccgttcctga

SEQ ID NO: 14723 - DNA, 72 bp, Zea mays
  Peptide Sequence Number=SeqID_58098
atggcgtactgtgcactgagagactacctgatggggcccttctgtaggcgtcggatgcaagtggctggaaag

SEQ ID NO: 14724 - DNA, 495 bp, Zea mays
  Peptide Sequence Number=SeqID_58099
atggcgaacttgatggtgttcttggctcgaagggtcgcagacgaagacgtccggtccacgctcgtcggtagaaaccgaagtgctaagctgtcgacgacatgctccggtcacccttcagttcaggaaaggggtgccgagacgggtgcacgagacgatgaaacatttgtggggctcggttcgtggactacggtggtcagtggaggtgcgggcacgagcttagctcgggacggccatggcggacgacttctggtggaagaaacgatgaggcgagggcgagtgagagcgagacgagggcagagggagagagtggagtgcgcggcacagagcagggcgcgccgtccacgcgtccaggcgcccgccacttggcggacgcgatctgctcggactgcagacgcgagtgagacaaaacggggagctcaaagcattgcccacttcagctgttttgttcccctctccaccggttacaacttttctatagtgattagggtggtttag

SEQ ID NO: 14725 - DNA, 129 bp, Zea mays
  Peptide Sequence Number=SeqID_58100
atggcctatgtcaccgagcaaaggaggaaagggaaggaagaagccaaggcactgtcaagacaccaagcatcgtaccagaaggcattgttgcgtccatttccaacttcgcaggtgatgatcgcccgatag

SEQ ID NO: 14726 - DNA, 1377 bp, Zea mays
  Peptide Sequence Number=SeqID_58101
atggagagtcatgatctccgggcagaatgggaatcacggcttgtgggtggttatgagattgatggttttggttatgactatggtgctgctagtccactacagccaaacaggatacttgctgagtatgttgatgtgtactcacccttgctctacacaccaaaccccccccaggttgtcagcattgcaaccactgctcaggagaagatgaagctgtggaaggagacttccaggagttccaagattacgacgagttctaggtgtgggttagcggcaacccccagtcggctgcctgtgaaggccgcgttatctacgtttcttttccgcactttgatttattgtaagacctatatggacgtctcagacatggctcgacttagacacactgcacgaaagtcagtcatccccttcttaccttcccgccttgctgagcgtccgcttcgccgtcccgtggccggacagtccagccacttggagagactacaccaccgcctgcgtgaggagcaggaacgtcgacgacaggagcagcggagctcttccctctcgctccaccaggagatagagtctgtgaggagctgctcccctgtgcttcctctggagccgccccctgcaccaccactgggcgccccagcttctggagtagctgctggaggagacccagacgacggaggaggcgacgacagctcgagccacgacaccgacttctctgctaatcctgagccggaaggatgggttgctcgacccatcactcgcgacgctgctcgcgggtgtcacttccatgatgcgctcgacaccctgctacgtcgggcatttgaccggcatacttggtccgtcgagtatcgctgtgtggtctaccagcatagtcgcggggtctacccggaccgctgggaggcgacttgcttggtgcgctgcccggaggacagtctccagggtgcagaggcctgttcagagcactattctatctctgagcgggactcagctgaggcagccatgcaagatgctgcacggcgtgcgctttcgcactactgctcggttttcggtggggcagctgacggtcttgacctgaagtattacccccgccgttcatctggcagcacaggaggcgtgattgtctcacctgtcggtgagggcaatcctaggttgagcagcacagtcaacctagccgccgtgctaaacacggagctggaccatgcattagacgagctgagtagggctcgtgctgagatcgccctgctgcgggctgagcgcgcggaacgtcgttttctggatggtggttcccccgctcccgttgggactcagcacccgtaccgctcacctcagcgtggacaccagtcttatggcaatcccgcctgcaagaccaagatcaacctagaaccatag

SEQ ID NO: 14727 - DNA, 642 bp, Zea mays
  Peptide Sequence Number=SeqID_58102
atggtggaggccccctgggtgaggtaccttagccaaaaatacgtccccatgttaacgtgggctgccaccaccaccgctccccctcttgcccatatttcaggtatcttcggatccaagtcggcatcacagcagaccagagtaatacgaaggttgatacagcgccgaaggtgtaagcaggaaagcttcggcgcgacaacaaaaagtgaaaccgacttaaagatgaaaaggctatttagacctcgacagattactatagaattattaccaagtgtaaagggcatgaatcatttgagaacaagcccccaacaactggtaaacaccatcagcacaaagctgcaaaggcctgatgggcgcaatgcaggtcaaagctccgtccgctcaagggacacgatctcgcctcgcccgagctcggcctcgggcaggaacagtagacccaggcagattcacgcctcgcccgagggcctcctcaagcaacgggcgcaccttcgactcgcccaagccccagctcaggcaggcttcgcagtgaagcaaccttggccagatcgcctcgccaaccgaccaaatcgcaggagcattcaatgcaaggatcgcctgacaccttatcctgtcgcacgttcttcagtcgacaggggccgaaagtga

SEQ ID NO: 14728 - DNA, 324 bp, Zea mays
  Peptide Sequence Number=SeqID_58103
atgaccgggaaaaagaccacgacttcctctgacggcggcactccaaagaaagccaaggtggtggtggaggatgaggaagaggcggggttggaggatgaggaagaggcgactgtgacactatccgtggagaaggacgcgctggagtgcgacatatgctgcctacccttccagtccaaagttttcaggggaaggcggattaccatgcatgtatatatacagtacatattgatcggtaggctccagcatgatgctctgctctgtgtaaaatcagtgcaagaacgggcattctggatgtgcaaagtgctgcaaccaaaatgtgcctaa

SEQ ID NO: 14729 - DNA, 603 bp, Zea mays
  Peptide Sequence Number=SeqID_58104
atgcaggcggcatgcaaccgcaccacggggaggcaccctttcgactttgacgcgtccagcatggagtcccaggcccacacgtcatgtaaccggcgctccggttactacgtgcgaaaaactgcaccgccacttacgccaatgctgagccttctcgactgcagaaccggtgccgcgattcgaggcaaccctgcacatggaccaacagtgccagccaagcacaacgttcacgggtcagtcagccgcgggagaaggcgcgacggtcgatatggccagaagtgggccgacaataatggcggcaacaggcgagcggaagtggcggtcaaatcgtctgcaggctcacgtcccctcttggagcagcaggagagccctctcccacgggaccgggaaaggggatactccgaaagggatccttctctgcgaaggaagcggaccccaagccctcctactgatcaggggttcgaaggctggcccctcggaagggttcgacagccacctcagagcactcgggctctgcgcccactactgatcagaggctcggaggctagcccctcggaagggttcgacagccgcctcagagcactcgggctccgcgcccactactga

SEQ ID NO: 14730 - DNA, 126 bp, Zea mays
  Peptide Sequence Number=SeqID_58105
atggatgttttgatgattaggtaccttggagaggaccagcaagcacttgggaaaggccaagggataagccatcgtggcaaggtcattcgtgtgtcatgggtgataaccaacggagctgtggtgtag

SEQ ID NO: 14731 - DNA, 156 bp, Zea mays
  Peptide Sequence Number=SeqID_58106
atgccccgacgccccgacgcctcggcacgggttaagaacgtgggtacccacgttcttaaggttaagaacgtgggtaccgtcgaacttaatgggcagccctcaccgacccaggcacgacccataagttcgacggccacgtggccccgtcgaacttaa

SEQ ID NO: 14732 - DNA, 870 bp, Zea mays
  Peptide Sequence Number=SeqID_58107
atgcaccagcagatgtgtctcgccgacgccaagcgctctctcgagatcgtagtatacgaccgtgccttcgccgagtcccagcagcgcgccaacaagcgggcgcgtcaggacgaggccgccgccaagtcgtcgtcatcgttgccggaggaggcgatggcgtcagcaagtgcgatagttccgtacgtgggggccgttcatgacatcgcacccatcaatagcatcgtcgtcccgccctcgctacggccgccaccgccggctgccggcggccgagaagagccgccatgcctgcgcaggcatttcctcgaggcgctggggctccgcgccgacctgccggtgcacttcatacacgacaagcgcatgtcgaaaaccgatctcgatgggcaccagagccggttccgcatcccgcgggacggtgtcgagcgccaccttcggccaatcctaagcccccaagagctcgacgccgccaacctcctggaggggccgaggaggcggccgaggcggcaggagcctggaccgtcagagccgcaggatggcaacaacagaaggaagacatctaagaagaaggggaaggcgcacggcgggctgcccgtgatgcttgtggacctcaacgccggcgccaaggagctgcggctgtcacgttgggatagcagccagggcacgatcgtcaagggagaggggtacctccaattcatgcgccaatgtacattcaaggaaggcgacgacgtcgcgatttgggcctttgtgcagcggcggttccgcctcttcggcgtggacatgtgccacgacagcctactgcacctcctcgtcgtcaagaaacaagacgaagcccggtgccgtgtctgccgtgcccctgcgcagcccgagagttag

SEQ ID NO: 14733 - DNA, 783 bp, Zea mays
  Peptide Sequence Number=SeqID_58108
atgacccacagtccagtgcatgagggagacaaccacccggatcatgcaggcgtcaaggattggcgatctacccctaagaacagtagtccgagggaggatctatggttatctgcttttcctgtcggtactgagtgggaaaacattgataagataaaggagttcaactggagctttgaaaatttagagaaagccttagaagaagggggcgagcttcatggtaaaacagtttatctgtttggaagcactgagccccaactagtggatgttaatggcgaatcaaagatagtgcttattccaattgtagttgctgtagactgccctttccctccatcagacaaaattggcataaactctgtccaaagggaaaatgaggaaatagtgccaatgaaggcgatgaagatggcatgggtgccttatgttccccttgaggaccggcttagcaggattgacagtttgaaaacaaaaatattcactctcggatgcacgcagtggagaccagatgatcggaagggaacgtaccagattgaaccgagccgccaggcgatgggatccggagatggagcctggcggggggcgagggcgcctgcctccctgcggcggatcgaagtggcgtcctcctggacttgtggttgggagcaggccggcggcggcggcggtgggtggtcgggtggtaggctagctgtggctgagtgcgccagacacgagcgagaaggccgggctgagtgcggcgcggcgggatttggacgaacgagcgggtgcggcaggccgagatggacgatttag

SEQ ID NO: 14734 - DNA, 372 bp, Zea mays
  Peptide Sequence Number=SeqID_58109
atgagcaaggcgggtgcacggatcacgtacgtggagtggccgcgggagagggaggcggaggaccgcctggagggcggcggggcgtcatggccgtgcccgttctcggcgggcgggaccctcctcctgaatccggaggaggaggggacgctcctccgaccggcacccgcgccgccgtccatctcccggctcgcgccgcccgccggcggaagcgagggcctccgatcggcgacggcgctgatccgcggcggagagcggagagcggggggcactctatttctctcgctcccgcgaatcgggagcgctcccgataggttggggacggggggcaggcggagaccggagacgggagcgaaggtcgcggcgcgcggctga

SEQ ID NO: 14735 - DNA, 1983 bp, Zea mays
  Peptide Sequence Number=SeqID_58110
atggcgttggttgctgtcaagccgccgctgactggcgagaggaccgtgaaaaggctgaggttgtccaaggcactgacgataccggatcacacgaccgtgcacgaggcttgtcggaggatggcatcacgcagggtagatgccgtgttactgaccgactccaatgctttgctctgtgggatccttaccgacaagatgttcccggtttctcactgtacgctgtattttgggaacgctggtcaggacataaccacaagagtgattgctcgtgagttgaagatggaagagacactggtctccaaggtcatgactagaaaccctgtatttgttctcgcggacacgcttgccgttgaggcgttgcaaaagatggtgcaaggtaagttcagacatctgcctgttgttgagaatggtgaagtcattgcaattctggacatagccaagtgcctatatgatgctattgcacggatggaaagggcggcggagaaaggaaaagcgatcgccgctgctgttgagggcgttgaaaagcattggggaacagctgtatctggtcctaacaattttattgagactcttcgagaacggatgtttaggccatcactgtctaccattatctctgagaattcaaaagtggtcactgttgtaccatcagacacggtgttgacagcatcaaagaagatgctggaactaaaaatgagttcagcagttgtagcaatcgaaagcaaacctgggggaattctgacatctagagatatcctgatgcgtgttatcgcccaaaatcttcctcctgagtccactacagtcgagaaggcaaacaccccaattcttgatgctcttcacacaatgcatgatggaaaatttttacatttgcctgttctggacagggatggaaatgttgtgactgttgttgatgttcttcacataacgcatgctgcaattgctacggttggaaacagcggggcagctggatctgagtcaacgtctgccatgatgcagaggttctgggattcagcaatgtccattggacctcttgatgatgatgatgactccaccagaagcgaaggatcgacaaaggtggcatctgaggcagcagatataggaagatcagccttgtttccagcttctgctttatcaaacacttttgggttcaagattcaggacaagcaagggagaatgcacagatttaactgtgatgctcatcgacgctcctctttgcagagcctaaggctgcacttggactacgcccgccggaagagaggggacggttcctcagacttcgagtacgctggcaaggatgcatgggcttctgcatacagtgctgtcgcggcaggggcggctctggttgctgggctcggcgtgatggcttacttgaaacggtcaggtcacttcgccgctccactgaccggcctgaaagaggacagcgcccgcctgcgccgctccgactgctgtgccactcgaagagtgaggctgacagcagccaagtccggcctcaggcgccataggaaactccgcttcacccgaccccagggctcggactcaggctcagccccggaagacgacgaactccgcatcgcccgaccccagggctcggactcgggctcagccccggaagacgacgaactccgcttcgcccgaccccagggctcggactcgggctcggccccggaagacgacgaactccgcttcgcccaaccccagggctcggactcgggctcagcaccggaagacgacgaactccgcttcgcccgaccccagggctcggactcagccctggcctcagccgacggtctctgcctcgcccgacccaggggctcggactcgacctcggcctcggaagatagactcgacctcgacctcggaggagcctccacctcgcccaacccagggctcggaccgaccacgtcacaggaggcgccatcattaccctaccccaagctaactcaggctacggggaacaagaccggcgtcccatctggctcgccccagtaa

SEQ ID NO: 14736 - DNA, 703 bp, Zea mays
  Peptide Sequence Number=SeqID_58111
gcggctgcgcgtgtggcggctgagcgagcgtctgcgctgcgcggggaaggaggcgggggcggtggcggctgcgcgctgcgcggggaaggcggcgggggtggggcgggggcggaaactacacgtggtttgtagcattatggctatcctgagaacacgtttctgcattggcctgctacctgctcctgttccacccaccctcctgaaaattgtgatggcggcatggcgcagatgctggatcaagttgacatggggcattcgatgccgatgcggcgcgtgttccaacttcctagtagcggggccgctgcagactgcagagggattagcgtacgctgtcgctgtcgctgtcgctgctgatgctgcgctggactggcttgttcttccggtgcgccagctagctgctccatgcacggacggaccaccatctgcatgctgtcgacgcagcaagcaaaacggcaggcgtgcggcgtgccccggccaggcgccagggtcccaggcctccggggaccagctagggaggatgacagacccggcacgtacactctcccccacacatgactgcgctgtgggcactaggcactggcagtggcagtggcagtgtcagcgcgcgctctgcggcacggtggtcacccgtaccaggatcagtgaaggtgtgggggtcgacaagggcgctgcacgcagcgccgggacagcggcgcgggcttag

SEQ ID NO: 14737 - DNA, 3096 bp, Zea mays
  Peptide Sequence Number=SeqID_58112
atggaggagaagggcgacgcgcccgggctcggcttcctgggcctcgaccggatgcgcgtcctcctgccgccgctccgcctgccggagaagctgtcggccagggcgctgcggacgcacctcttcaccaactaccggatgcgcaaggtgcgggacagctccagctggctcatcccgctctgggtcctcttctgggtgctcctcgcctccgtcatctgcctctggatgagcaaccaggccgtcgccaagcgccgggagtcgctcgccagcatgtgcgacgagcgcgcgcgcatgctccaggaccagttcaacgtcagcgtgaaccacctccaggcgctcgctatcctcgtctccaccttccaccactccaagacaccctccgccatcgaccagaccacgttcgcaaggtacgcggagaggacggcgttcgagcggccgctcacgagcggggtcgcgtacggggtgcgggtcacgcacgccgagcgggagcagttcgagcgccagcagggatggagcatcaagaagatgtactcctccaagaccaagaagcagtcgcagggaccagggaacgctgaggacgccgaggtgcgggagccggcggaggagtatgctcccgtaatcttcgcgcaggacgcatacaagcatgtcatctccttcgacttgctatccggcgccgatgaccgcgacaacgtactccgagctagagaatctgggaagggtgttcttactgctccttttaagctgctcaataatcgccttggagtgatctccacctacgctgtgtacaagtatgagcttcccccaaatgccaggccacaggagcgcattcaggctgctataggctacttaggtggcatatttgacattgaagcgcttgttgacaagttgcttcaccagctcgcgggcaagcaatccatcatggtgaacgtttacgatactactaatgatagacggatcagtatgtatggttcgaatgatacaggcagtggcatgtgccaagtcagcacactgaactttggtgacccgtcaaggaagcatgaaatgcactgcaggttcattcagagtccaccttggccttggatggcaataacgacatcaattggaactcttgtgattgctttactgattggatacataatttatgctactgcaaaacggattgccagagttgaagatgactttcaggagatgagtgtgctcaaaaagcgtgcagaggatgcagatattgccaagtcacagttcttggctactgtttctcatgagatcagaactccaatgaatggtgttctagggatgctccaaatgctcatggatactgatttggacacaacacaacaagactatgttagaaccgcacaagccagtggcaaagctttggtatctctcatcaatgaagtacttgatcaggccaagatcgagtctggtaaacttgagcttgaagcggtgccctttgaccttagaacagtttgtgatgacattttgtctctcttctgtgggaaagctcaggagaaaggactggaggtaatcaaagactacaaccatgctgtcacacactgcacttttactgtattttattataaatgcactgactttattctggttattccttactatgacacacaacgggagcagctggcagtgtttgtttctgaccaagttccacaagcactaattggcgatcctggcagaataaggcaaatcattacaaatcttgtcgggaactctataaaattcacagagaagggtcatatctacttgacagttcatgttgttgaagagattatgaattgtcttgaggttgagacgggaactcagtccgccaataccttaagtggctacccagtggcgaacagaaagcgcagttgggaaaactttcgagtctttagcagggaactgaactcatctgagatgccttttgcacccatcgcatcagactcaataagcttgataatatcagttgaagatacgggtgttggaatcccgttcgatgctcagtcccgtgtcttcacccctttcatgcaagtaggtccatccattgctcgcatccatgggggcactggcattggattaagcatcagcaaatgcttggttggactcatgaggggagagattggatttgcaagtaaaccccaagttggttctactttcaccttcactgcggttcttacgagggcccattccagcagaaatgagaataaatcgtcagaatttaaagggatcaatgcattggtggtagatcataggccggtccgtgccaaggttactaggtaccatttacagagactgggagttcagaccgaattgacaactgacctagatcaatatatttctaaaattaattgcggatcacaaattgcaaagcttgtgctcattgacaaagaaacctggctgaaggaatcccactctatgcctcttttggttactaaattgaggaacaaagatcagccagactctacaaagttatttcttttggagaaccctaaaagtactgccaaaagcaattcacatatattcagggaatttaacttgaatgtaattatgaagccacttcgagcaagcatgcttcaggtttcgctacacagagcattgggtgggatagataaactgcactgcaggaatggagtacttggcaattcaacactgggcagccttcttcacaagaaacgaatcttagtggttgacgacaatattgtaaatctcaaggttgctgcaggcgctctgaagaaatatggcgcagaagtaacttgtgctgatagcgggaagaaagcaatcacgcaactgaaacctcctcacagttttgatgcttgtttcatggacatacagatgcctgaaatggatggatttgaagccacaaaaaggattagagtgatggaaagagatctaaatgagcaaatagaacgtggagaagccccaccggaatgcgcagggctccggcagtggcgaactccaatattagccatgacagcagatgttatccaggcgacgcacgaacagtgcttaaaatctgaaatggacggttatgtatccaagccattcgagggcgagcaattgtacagagaagtagctcgctttttccaaaatcaagaccaagttcagtag

SEQ ID NO: 14738 - DNA, 393 bp, Zea mays
  Peptide Sequence Number=SeqID_58113
atggccgattctaaagatctcaacagtgcttctccaaacagcaacacaaggctgactaatttatcggccgctgagcgtgaaagattaaaagatgacatgaagaaaatagacgaagaggtccagcgacaagcagatcaggtgctcaaggtggcggataagtggttcctctcgcacttcagagtagattgccaccagaaggccgtccaagagagggagataaacgccgagtacatgtcagccgtgctgcaacagctccccacgataggtgatgccaggcgccaaaacaattgcgccaaatacatcggcaacaaatgggtttccccagccatattctggtatgccgatggactcatatccaggacgagcgtcaccaccatctttgctaaatggtga

SEQ ID NO: 14739 - DNA, 492 bp, Zea mays
  Peptide Sequence Number=SeqID_58114
atggacaagtacgaggcggtgcgggacatcgggtcggggaacttcggggtggcgcgcctgatgcgcaacagcgagacccgggagctcgtcgcagtcaagtgcatcgagcgcggctaccggattgacgagaatgtgtacagggagatcatcaaccaccgctccctgcgccatcctaacattattcgcttcaaggaggtgatacttacaccaacacatcttatgattgtgatggagttcgcagcaggtggagagcttttcgatcagatctgtgatcgtgggcggtttagtgaggatgaggcccggtatttctttcagcagttgatctgtggcgtgagctactgccattacatgtcatcagtgttgcattcaagacccaaatcagctgtgggaacaccagcatatattgcacccgaggtgctatcccgtcacgaatacgatggaaaggatattctgttaggtcacttgcaatcttcatctagacactgttcatga

SEQ ID NO: 14740 - DNA, 75 bp, Zea mays
  Peptide Sequence Number=SeqID_58115
atggcgccgccgctctgcttgggggcgccgccgccttgcgttctggtgaggggagagacgagggatttaatctag

SEQ ID NO: 14741 - DNA, 234 bp, Zea mays
  Peptide Sequence Number=SeqID_58116
atggatgttaagaagaaacaacttaagacaggttttcttgacccgttgatgatatcccaagctcgctacaaagaagttgctcagagacatggagaagaatacaaagacttggatggtgctgaatttgagaaagccgtcaaacagaatcagagaaagaaaatgaaggttcctaaatccaagatcaatgttgaatggttagaaagagatatggttttcgtcggcgtggctaaggtt

SEQ ID NO: 14742 - DNA, 498 bp, Zea mays
  Peptide Sequence Number=SeqID_58117
atgaaggaaataaagagccatccatggtttttgaagaacctaccacgggaactcacggagactgcacaaggcatgtactacaggagggataacaaggtgccttcttattcagaccaaacgtcggaagaaatcatgaagatagttcgtgatgcaaggaccatgccgaaatcatccagatcaggctatgggtggagcgctgagtattcggatgaagaagagaaggaagaggaacacagactagaggaagatgaatacgataggagggtgaaggaggtccatgcaagcggagaactccgatccagtgggatgtatgcagttttggcttctgaattgcttgtgctcggtcaattttcatgtaacataattcaatacactgaggcagactaccatgtccttgtgttggattacaatttacttctcctaaactcttcattgtactatttgctacaacaaatttccaatcggagacggggaattgtttgtgccaagattgattga

SEQ ID NO: 14743 - DNA, 1134 bp, Zea mays
  Peptide Sequence Number=SeqID_58118
atggacgcggttcaggtcaaggcttcgtctacccaaggggcgcgatctcgcctcgcccgagcccagcctcaggcgggaactgtagtcccggacgaagttacgtctcgcccgagggcctcctcaggcagtgggcgcaccctcggcacgcccgaggcccagctcggatgggcttcgtcgagaagcaaccttggccaaatcgcctctccaaccgaccgtatcgcaggcgcattcaatgaaaacagcgccgctcgctccgctccgactgctgtgccacccaccagggtgaggctgacaaacagccaagttcagcctcaggcgcaacaggaagctccgcctcgcccgaccttaggcctcggcctcggaaggaggtctccgcctcgcccgaccccagggctcggcctcaacctcggcctcggaaggtggtctccgcctcgcccgaccccagggctcggcctcaacctcggcctcgggaggaatcgtgtcctcgcccgaccccggccttggcctcaggaggagtctccgcctcgcccaaccttgggctcggaccaaccgcgccacgggggatacatcattaccctacctctagctagctcaggctacgggggaacaagaccggcgtcccatctggctcgccccgggctcaagcacttctccgacggccacgttatcgcctacgcagggctcaagcacttctccgacagccatgttggcatagccttcatgcggaaggtcgcgcgggagaacgagctaacgaacaggctcacactctctctcgcggaccccggggtcgaaacgccgacaataatcatggggcaggaagacattcgaccactagggtgggacaagctccgtgcccaccatgacccttatgcccggctaggacgcatcccccaagacgcgacgctctcatcctcccactcatcggagtttgcggccaagaggagcacagagtggcggccgagaaggcctgaatggtgcgtcccgttcacccacgacgcctgcgacgacatcgaccggatcctggaggacagccgtcaacatcaaggcatcgtccccttcgtcgactcggctagccatgatgccccctttgccatcgaggactacctcgtcgccacatgccacctaatcggctaa

SEQ ID NO: 14744 - DNA, 468 bp, Zea mays
  Peptide Sequence Number=SeqID_58119
atggtgaaactagacgtcgtgaatgaaagagaaccaaattcaacccaactatggagtcgcttgagggacaaagataaggaaaataagctacaagaagctcttgttccatggactctatctctggaccgcactatcgttgcctcagcccctaggtcgtgctgccctctggcctcctcatcgtacaattcaccaacatctccaattctcttcttcgagcaagagatggagctttctttggtcgggctccaaaatgctaggaaaacatcacttgcagcagctcgcagcgacacccccgcctcctcatcatggaagttgtatctatttcagaataagcaagcagaatctgacgcctttgatggaaatggacacaagaccttggttgcaatggatgattatcttgtcactgacaaaatcactgcattcatagtgcaaatgcaacatgcagcaactgaagtccttaaagagtaa

SEQ ID NO: 14745 - DNA, 243 bp, Zea mays
  Peptide Sequence Number=SeqID_58120
atgtcgtcgcaggcgtcgtgggtgaacgggacgcaccattcaggccttctcggccgccactctgtgctcctcttggccgcaaactccgatgagtgggaggatgagagcgtcgcgtcttgggggatgcctgaagatagagggtcggaggagggcgttgttgtggggttcggcttcgatccggcccccgcgagatccgtctactcaatgtgcggtgtctccaatgccaactccccatatcggtga

SEQ ID NO: 14746 - DNA, 54 bp, Zea mays
  Peptide Sequence Number=SeqID_58121
ccccgggtcgcctcggcaacgagccacaccatcgcaaccgtcgagcccgcctag

SEQ ID NO: 14747 - DNA, 239 bp, Zea mays
  Peptide Sequence Number=SeqID_58122
atgggcaaggtccgagtgaaagaagcggcgcggggtagttggagatccatccgcgtgatttgttgtgatacggcgtggagcgagatggctttggcgggttcgttgcgaggctctccaattcaacacggccgtggtgcaggaccttggatttccgcgtttgctggttctgttggggaaagagatgcagctgcccgcgtggaggggagctggctttggggccccacatgtcggcatgagaa

SEQ ID NO: 14748 - DNA, 771 bp, Zea mays
  Peptide Sequence Number=SeqID_58123
atggagcttgggaggcgccatcattgcctatctggcggagctggtcagatgggacaccggtcttgttctctgtggcccgagtcggctcggggtagagtggtgatggcgctccctgttgacgtggcgggcccacgcccgaggccgggcgacgtgggggctcctccgaagctggggtcgaatctgtcttccgttgccgaggccgagtccgagcccctgggtcgggcgaggcggaagtcgttcgccagaggccagggcggagtccgagccctggggtcgggcgaggcggagtccgtcgtcttccggggccgagcccgagtccgagccctggggtcgggcggagcggagttcgccgtcttccgggtcttagcccgagtccgagccctggggtcgggcggagcggagttcgccgtcttccgggtcttagcccgagtccgagccctggggtcgggcggagcggagttctctttggcgcccctggcgaggcctgactgcctgtcagactcactctatcgagtggcactgcagtcggagtggcgcaggcggcgctgtccttctgtcagaccgggtaccgacagaatagctcttgatgaagttgccaaagaatgggccctagcccctagggctattcttagtgggaatttcgtaacagtcttccaacactgccacatcatcaaaagtgaaacaatgtctctcaatggcccctttggcagggctctggcttctccaaaaacagctttggctctggctcacgaggtgaagccacttctttag

SEQ ID NO: 14749 - DNA, 372 bp, Zea mays
  Peptide Sequence Number=SeqID_58124
atgccttgtctgatgtggctgaggcaccttgccttgcctgcttgtcaagagcaatacaaaaactacccaaatgattcaggggtgaacaaggaaaacagcgccgcctgcactgctccgactgttgtgccacccgccagggtgaggctgacagcagccaagtccagcctcagacgccataggaagctctgcctcgctcgaccccaggactcggactccacctcgacctcggaagacggtctccgtctcgcccgacccccagggctcggactccacctcgacctcggaagacgggactccgcctcgcccgaccccaggggctcgggacttaaacctcgacctcggaagacggtctctgcctcacccgacccctag

SEQ ID NO: 14750 - DNA, 573 bp, Zea mays
  Peptide Sequence Number=SeqID_58125
atgttggtgatggccgcaattttctccgggttggcctcgatgccccgctcggagacgatgaaccctaggagcatgcctcgggggactccgaagacacacttctcgggattgagttttacgcctttcgccttgagacacttgaatgtcgtttcaaggtcggagaggaggtcggaggctttcctcgtcttgactacgatgtcatcgacccatcaacttgtggatctcctcgcatatggctctgcgcttttcttcgtcgaatcggcacagaggctgcttcacgggtcgggctccaactcggatatccaacgagtgctcggcgacatccctcggtatgccaggcatgtccgagggactccacacaaaaacttcagcgttcgcgcagagaaattcgacgagcactgcttcctatttggggtcaagctcagagccgatccagacttgcttggaggcgtcattgctggggtcgagagggacaaccttaaccgtctcggctggctcgaagttgccgacgtggcgcttctgtcacacccggttttaaggaacaaagccgggtgcatctcatacatgcgctaa

SEQ ID NO: 14751 - DNA, 777 bp, Zea mays
  Peptide Sequence Number=SeqID_58126
atggcggctgtcagcctcaccctgacgggtggcacagcagtcggagcagcgcagacgacgctgttttcctgtcaggttagccagtggaggggcgaagtctacatgtctcaagaacgtcttaagagttcgacaactttatgtattggaaaacaattgttagttgaggtcaatatcagaccatcattgatgactttacatcacaaaatgcgaagacgtcaccctccgctcgaagccttcgctgtggccgtcggtccaacagagacaagacgacgggcgaagacacccttcaccacatacgacatcagacgaagacctgcgacggagtcattcaaccgtgcggcctcgtccaacacagaggcccaccagagagcaagttccaacatttggcgcccaccgttcgtgctacgagaaaaccacccgcgatggcacccaagaaagcaaacccgaaggctgacgaggctgcgaaggcagcactacttgctgcaaggaagggcaaggcccctcgcccttacccaatccacccaccaagaggccactgaagacgacgtttgccgcacctgcgaagacgacccactccgcacctgcggcgctgaaggacaatcgcagcagcccccaggcttcgccccactggagggcgcggacctcactgaggacggggaagtcctcggcgtctcagcggaagaacagctacagctgcgcgccctgcgcctcaagaaccgcaatctccagaggcagaaagaggcctggaggccaagcgccagcgcgtgtccgcactag

SEQ ID NO: 14752 - DNA, 483 bp, Zea mays
  Peptide Sequence Number=SeqID_58127
atgacgtggcagggggcaccggactgtccggtgtgcaccggactgtccggaaaacagcgccgcctcactgctccgactgttgtgccacccgccagggtgaggctgacagcagccaagtccagcctcaggcgccataggaagctccgcctcgcccgaccccaggactcggactccaccttgacctcggaagacggtctccgtctcgcccgaccccagggctcggactccacctcgacctcggaagacggactccgcctcgcccgaccccagggctcggactcaacctcgacctcggaggacagtctccgcctcgcccgaccccagggctcggactcaacctcgacctcggaggacagtctccgcctcgcccgaccccagggctcggactcagcctcgacctcgaaggagtcacggcctcgcccgacctcgggctcggatcgaccacgccgcaggggggtacatcattaccctacccctagctag

SEQ ID NO: 14753 - DNA, 1170 bp, Zea mays
  Peptide Sequence Number=SeqID_58128
atgggagagaagcacgcgtctattgggagatttgtgttttttccagagggcatgaacagaagtcagcatggtagcttcctactgcccatgctaacaataatcttgacaaaggaagaagggcacacagttcaacgcaacgaatattgttatgctggtggccttgttgaatatgttaaatggttgaatactgacaagaaacccctgcatgacccgattgcgttcagaaaggagttggatggtataacagtggatgtctcccttcaatggtcctctgattcctactctgatacagtgctaggatacgcaaacagtatccgcactattgatggtggtactcatattgatggtctaaaggcttcattgacgagaaccattaataaccttgcaaagaagtcgaagactattaaggataaggatattaccttgagtggggagcatgtaagagaaggaatgacatgcatcatttcagtgaaggtccctagtccagagtttgagggtcaaacaaagacaaggttgggaaatccagaagtacggagaatagttgagcagtctgttcaagaaaacttaacagagtacttagagcttcatccagatgttctggattcaatcctatcaaagtcccttaatgctctcaaggctgcgttggcagccaagcgtgctagggaactagtcaggacaaagagtgtgttgaaatcttcatcactccctgggaaacttgctgattgtgcatcagctaatcctgaagaatctgaaatctttattgtcgaaggtgattctgcgggcggtagtgcaaagcaaggacgggatagaagattccaggctattttgcctctaagaggtaaaattctcaacattgaaagaagggatgaagcagccatgtacaaaaatgaagagatccaaaaccttattcttgcacttggattaggagtgaagggtgaggattttaagaaggaggctctccggtatcataagatagttatacttactgacgctgatgttgatggagcacatatccggactctcctccttactttcttcttcagatatcaacttagaataggtgctgagaacaggtcaaacatgaaggaaagtctatggcggtttttcatgggaaagtccttccagtactctattggcaatgtagaaaaatccacaaataaaacagggtga

SEQ ID NO: 14754 - DNA, 288 bp, Zea mays
  Peptide Sequence Number=SeqID_58129
atggcgtcgtacgttgctgaagcggtggccgtgttcttggatgtcctcactcccttagcaaagatgggagtgaggacctacaagtgtgctgaggcaaccgtcgcccaccggtgcaggggaagacgggggcgaggtcctacccgcaacggcgttcatgctgagatgatcgccgctgctggcgagtcgtcggtgcagaggcggccgtcaccgtcggtgctgatgcggttgtctccgctggcgagctgctcggggcttgttatcccacggcccttactggtgtggaggtag

SEQ ID NO: 14755 - DNA, 996 bp, Zea mays
  Peptide Sequence Number=SeqID_58130
atggacaatattgatgaagtgaccgacaagagattgatagctctgggagaaatagagaaagacaagatcatggtcgccaaagcttacaacaagaaggtcaaggctaagtcattccaggtagggacctacgctcgacgcctcatgacacaccctgcccggcgacccacgacctccacggacaccgccgagatcgccttcctcggcgccactgctatccccgacccgcagtccacgctggccaccccgatgccgctgccggagatccccttcctgcacacatcaacgccgcccccgcctcctccgccggcgccagtcacacaaaagcagaagcacggcagcggcaagcagcggtcgcgaccggggcgcctcatgcggtcggtgcgcgccgcgttccggtcgttcccggtcatccaggcgccgtcctgccgcggcatgccgtcgctgcacctctcgggcctgcagggtgccggtgtccggagccacttccatggcgcaacgcacgccacggggacgttgtacggccaccgccgggcgcgcatcaccatcgcgttgcacgagagcccaggcatgccgccatgcgtgctgctggacatcggcgtgccaacggccaagttcatccaggacgtgagcgcggcggggatggtgcgcgtcacactcgagtgcgagaagcagcatcacgcggtcgacgcgggcatgcggcggctgctcgacgagccggtctggacgaccgaggtgaacggcgagagcgtcgggtacgcgtcgcggcgggaggcgacggagcgcgacgagtgcgtgatgcggatgctgcactccacgtccatgggcgtcggcgtgttgccggccgacatgacccacccgtccgacggtgagctcacctacatgcgcgtgcattttgatcgcctcgttggctccaaggactccgagacgtactacatgcacaaccctgagggcagcgcaaccgggccggagctcacaattttcttcattagaacttag

SEQ ID NO: 14756 - DNA, 795 bp, Zea mays
  Peptide Sequence Number=SeqID_58131
atggcgcttcctgttgacgtggcgggcctgtgccctaggtcgggcgacgtgggggctcctccgaagccggggtcgagtctgtcttccgtggccgaggccgagcccccgggtcgggcgaggcggagattgttcggccgaggccagggcggagtccgagccctggggtcgggcgaggcggagtttcgtcgtcttctggggctgagcccgagtccgagccctagggtcgggcggagcggagttcgccgtcttccgggtcttagcccgagtccgagccctggggtcgggcggagcggagttcgccgttttccgggtcttagcccgagtccgagccctgggtcgggcggagcggagttcgccgtctttcgggtcttagcccgagtccgagccctggggtcgggcggagcggagttcgccgtcttccgggtcttagcccgagtccgagccctggggtcgggcggagcggagtttcctatggcgcctttggcaaggcctgactgcctgtcagactcactctgtcgagtggcactgcagtcggagtggcgcaggcggcgctgtccttccgtcagattggccacctttgcgttaaatgctcctgcaacctggtcagtcggcacggcgattcagtcagggttgcttctaagcgaagccaaggcctcgggcgagccggagctttatgctgatgggggttaccagctgagaattaggcgtcttgagggtacccctaattatggtccccgacaaatcctttctctaggagatcttgcaattgaatcttcaactctgccaactcattag

SEQ ID NO: 14757 - DNA, 519 bp, Zea mays
  Peptide Sequence Number=SeqID_58132
atgccgcgcgctgctagggcggcgttcgtgttctggggtggccctgctttttcaccgggatggcgcccttcggcagaggccggcgccccactcgtctgggaggatttgagtggggatctgccggggggccggcggcccccgctatcagcgccgaggcggaggcggcccgagaagtccccgtcgccgatgggatcactgccaccatccgcgccccgggcctccggttcttcgtacttgtcctcgcccctcgagcgtcggggtgggcgagggcaagattgcagcagcgcccaccctgaggcctgcactgccgtggctcggccatctgaggcggagttggctcgaaaatgggaacctggttggccggagcctagccgggttgcccatcagcgggggtcgacgtcggagtcgatcagccgaggcctcgggtcgggctggcgcccttggaagatgcttggccgaggccccaggggtaaccggccgagccgcctgctcgggccggattcctggagaagtccctag

SEQ ID NO: 14758 - DNA, 255 bp, Zea mays
  Peptide Sequence Number=SeqID_58133
atgcccagtctgtatgggcagtcactgtatgggcagtcactcaatctgaactcgtacggtccaaaccccaaggttatgaaggctggggagcaccgggaggataagaagggggaatgttttgtccggtttggacatggcggtggcctgactccttccggtataaccgctaagcctcctgggactagtaattgtatcacatttgagtcccagaggatctggggtgcttcatgcgccaacggtcgtctgcaaaagtga

SEQ ID NO: 14759 - DNA, 216 bp, Zea mays
  Peptide Sequence Number=SeqID_58134
atggcgcctttggcaaggcctgactgcctgtcagtctcactctgtcaagtggtactgcagtcggagtggcgcaggcggcgctgtccttctgtcagaccgctttatgctaatgggggttaccagctgagaattaggcgtcttgagggtacccctaattatggtccccgacaatatataaatagggaaccaaatggaaggaaaaagttgccatggtga

SEQ ID NO: 14760 - DNA, 1908 bp, Zea mays
  Peptide Sequence Number=SeqID_58135
atggcgtctccccctcccttcgacctctgcggcgatctcgacgacgacgacatcgatgaacccgtcaccgccgtccccaaggatcgccatctccctgccgccgcccctacgccgaacggcctcaacgaccacctcctccgcttcacccgcagcctccagcgccccacccaaaaccctaaccctagccccaatccgccaccgcctccgcccccagccgccgccgaagaacaagtcgagaaggtcaagctcgccggccgccgccgcctatgcaagcttgccaccaccaccaccgccactcagcgagtggatgaagaggaggcggagtgggacaaccaggacgacggtgaaagcatactcgacatcctagacgacctcaccacacgatttgactctctatccgtccagaagcccagcaccgccgcgagctctgatgaagctagggctcccaccagacgctccgaggtcaagatcgaaactgatttagtctcctcagcctgtacccattatgcctgtgatgacgtccgtggcaaggggaagaacaaagggaccaccaaggatgttgggaggctaaatagggtatcaaaggcctcatcctttgttgattcttattccgattctgattatgacgactgcgaggaggaccaaggaacaagaacagattatgctgttaagcagctaagaagcaagggattcacaaggagaccacccaacaccccaacattcaggaaccatggtgtcagcgacgatgagctgggtcaggagaaggagaaccttggagctgtggagaacaatgctgaggatgttggatgggagaagacagaggacttcaagatggatccaactggaactgctgcaacatccaagccatacaagctcccaggaaagatattcaagatgcttttcgcccaccagcgcgagggcctccgatggctctgggttctgcactgcaggggaacaggaggaatcctaggggatgacatgggtcttggcaagacgatgcaggttgctgcatttttggctggactgtttcattctcgtctagtcaagagggtgctcattgttgctccaaagacacttctggcccattggacaaaggagctttcaattgttggccttaaagaaaagatcagagactactctggccccagcacaaatattcgcaattatgaactccaatatgccttcaaggagggtggtatcctcataaccacctatgacattgtcaggaacaactacaagctcataagaggcaactcctacaacaacagcaatgatgatgatgatgaggaaggaactttgtggaattacgtaattcttgatgagggacatctaataaaaaataataagacacaaagggcccaaagtttgtacgaaataccttgtgcccatcgcattgtgatcagtggaacacctattcaaaataacttgaaggaaatgtggactctgttcaatttctgttgcccagatgtcttgggtgataaacagcagttcaaaataaggtatgaaacggctatccttcgaggaaatgacaaaaatgctaccgctcgagagaagcacgtaggctcaaatgtagcaaagttatacatcaagaaattgttttttctctcgaacgatgcaggagagctgcgtgtcatttcatttaagaaagaaaaagtactacatgagggggaagtaagacaacctccccctttgatcactaagaaggattacaacgtgccacccacgagaatgggcatgaccacaaacagcaactcaggtgttcagcctttgagccctactgagcagctcctggagaaccttgtctccagccaaacaccagagcctgctctgatcctgcacttcctgacaggccgaagacacacaaggactccgaccctcaaacacatgcattcctatgcttccaaatag

SEQ ID NO: 14761 - DNA, 411 bp, Zea mays
  Peptide Sequence Number=SeqID_58136
atggggcacatctacctaaactgcattgaatcatgtttaaactctgccaaaaagcaacagttctatggcctggatgtacccaactctttgcgcaatattcgaaccctattaaagaaaatcaacaatactgggcactataatctgtgcaatgaagtccaggttgacagatctcgtgccaggtttcataccttgtgcctgaaatgtgtatcgccgaggacgagcatgcgctgccaggagatgtcgagcaccgccgacgcttttgaccatgctccagcgccacagatgggggcgacatccttcgacctaggagacaaaactcgagaacttgagcgcgaggccgacaacttggaggaagaaagtagatctcgtgttgtcgtaccgacgaaggaaggaggaagcaaacctggttaa

SEQ ID NO: 14762 - DNA, 309 bp, Zea mays
  Peptide Sequence Number=SeqID_58137
atggcgcttcctgttgacgtggcgggcctgtgccctaggtcgggcgacgtggaggctcctccgaagccgaggtcgaaggccagggcggagtccgagccctggggtcgggcgaagcggagttcgtcgtcttctggggctgagcccgagtccgagccctgggtcgggcggagcggagttcgccgtcttccggggcctagcccaagtccgagccctgggtcgggcggagcggagttcgccgtcttccggggcttagcccgagtccgagccctgggtcgggcggagcggagttcgccgtcttccggggcctag

SEQ ID NO: 14763 - DNA, 75 bp, Zea mays
  Peptide Sequence Number=SeqID_58138
atggggaaaaaggtgtccatcgctcacttgcgagctcataaccgtttggatcttcaccgggtggatgaagaatag

SEQ ID NO: 14764 - DNA, 1605 bp, Zea mays
  Peptide Sequence Number=SeqID_58139
atggatctcaatcaagctgctaactgcgtgcctgtagatcttgctgaattcattcctgtactgtccgtctctccgatcccttctctgataaaatcgaagagaattcttgcagccggccaccttcccaagaacaatggcatcaagtggcgcgggaactctggcctgtcagacggctccgacgccaaggacgtcaagggtggcctcgtcggcggctactacgacgctggcgacaacatcaagttccacttcccgatggccttctccatgacgctgctgagctggtcggtgatcgagtacagcgccaagtacaaggccatgggggagtatgaccatgtcagggagctcatcaagtggggcaccgactatctgctactcaccttcaactcctctgcttccaccatcgacaagttatacgcccaggtgggtgctgctaagatcaacggcagccggccggacgaccattactgctggaaccggccggaggacatggcgtaccctcgcccttcactgtccgtgagctccgcccctgatctgggtggcgaggtcgccgctgcacttgcggctgcctccatcgtgttccgtgacaacgccgcctactccaagaagctcagccagggcgcggccaccgtgtacaagttcgcgcggcagtcggggcggcgcaccccctactcgctccggcagccggacatcgagtactactacaactccaccagctactgggacgagtacatgtggagcgcggggtggatgtactacgccactggcaacagcagctacatcaccttcgccaccgacccgcggctgcccaagaacgccaaggccttcttcagcatcctcgacttctccgtgttcagctgggacaacaagctcccgggcgcccagctgctgctgtcgcgcctgcgcatgttcctcaaccccggctacccgtacgaggagtcgctagccggctaccacaacgccaccagcctcaacatgtgcatgtacttcccgcgcttcgccgccttcaacttcaccaagggcgggatggcgctcttcaaccacggcagggggcagccgctgcagtacgtcgtcgccaactccttcatcgccgcgctctacgccgactacatggaggccgtcaacgtccccggctggtactgcggcccaaacttcatgaccaccaacgacctccgggagttcgccaggtctcaggtcaactacattctcggtgacaaccccaagaagatgagctacgtggttgggttcggcagcaagtacccgcggcacgtgcaccaccgtggcgcgtccacgccgcacaacggcgtcaagtactcgtgcaccggcggctacaagtggcgcgacagcaagaaggcggaccccaacctgctggcgggcgccatggtcggcgggcctgacaagaacgacggcttcaaggactcgcgcaacaccttcgggcagaacgagccgacgctggtgggcaacgccggcctcgtcgcggccctggtggctctcaccaacagcggtaggggagccggcgtcaccaccgtcgacaagaacaccatgttctccgccgtgccgccaatgttcccggccacgccgccgccgccgtcatcatggaagccgtga

SEQ ID NO: 14765 - DNA, 321 bp, Zea mays
  Peptide Sequence Number=SeqID_58140
atggcagacaatctttggtctccgcaaaatgagaagggccacatccttcaaccacaattgatggctcaatcaactctccatcagtacagcttcaggagcagatgtaacatggggactggggtgctccagcctcctatgtttttgcacacaatggagaaatatacgaaagaggtacgtcatgatgacgaagaaaaacttgattttaaaggcggaaatgttcatattataacaagcaaagagggttgggaccagaagattgcaggagcaaacagagataagaaaattagcaactccaagagcttacatataaattctagttaa

SEQ ID NO: 14766 - DNA, 375 bp, Zea mays
  Peptide Sequence Number=SeqID_58141
atggggcctgtggccgcagccactggccagcatgtctctgcgtcctcgtccgacctcgacgtgcatggaaagcagtcggacgccagcaccagactattacgacacgggtctctgaagagcccgccacctcgagagatccgagccctgctactggtggtggtaatcattttcgttgcgctgacacggagagccagaggccagaaatttattgcgatgacggatgtggcaggcacgctatcggaggttgcggcgtggcagatccgcaaaaaggccaacaattggcttatatttacatggaaacattcatggtccaaaagtgatggtgctcttgataggtgcgcaaaagcaaatacatgtgtacaaaggagagattga

SEQ ID NO: 14767 - DNA, 387 bp, Zea mays
  Peptide Sequence Number=SeqID_58142
atgtaccttcggcttgatagaagacacaggacgcagcctccgaaactcccttgcgcttggcttcggagcaactccaaccttcgtcacgatcacactttttacatcgtacatgcttttaacccgagtccgaagtttttcaagctttctgagcttcggttaaaaagacgcattttcatcatttctgaagaagaaatgtctcaagacaagaaagttcctgctgagacgaagctgactgaagaggagaagctttttgaggagaagaaggctgtgaatccttatattgctagatttattgagtcaatggaaaaaacaatacaaagaagattactaaggagatactggagggcctatctgaagatactggtgacagcgatagttatgatgtag

SEQ ID NO: 14768 - DNA, 795 bp, Zea mays
  Peptide Sequence Number=SeqID_58143
atggatgtaacttcgaccgctgccgcctccgcctcaggcgggggtaggtggtacacgggcatgtccgcggataacatcaagggcctggtgctcgcgctctcctccagcctcttcatcggcgccagcttcattatcaagaagaagggactcaagaaggccgcatcctccggcgtcagagcgggggttggtggctattcttatttatatgagcctctttggtgggttggcatgataacaatgattgttggagaagttgcaaatttcgcagcttatgcatttgcaccggctattttggtcactcctctcggtgctcttagcattattatcaggcacgaattctcagtcatagaactcgctgtgcttgcacatgtaatgctgcgggagaagctgcacatatttggaattcttggatgcgcgctatgtgttgtgggatccaccacaattgtccttcatgctccaccagagcgtgaaatcgagtcagtgacagaagtgtgggatctggctacggaaccagccttcatgtgttatgcagcagtggtaattgctatagctgccatacttgtttatcggtttgtcccactttatgggcagacacatgtcatggtctacataggtgtttgctctctcgttggttccatctcggtcatgagcgtgaaagctcttggtatagcattgaagctgaccttttcaggaacgaaccagcttatttacccacagacatgggcttttagtctggttgtcatctcatgtatcattacccaaatgaattacttgaacaagaaaaaggtattttga

SEQ ID NO: 14769 - DNA, 708 bp, Zea mays
  Peptide Sequence Number=SeqID_58144
atggacaaggatcatcacgaagttacgcaaaagcgctgggcggtcatcaggctgcccgaggctaggccgaagagggcgcgggggaccgcgaaggctaccgcccccggcggtagccagccgacgctggcggcgaagtcggccgcccctgggaccagcaaggtgccggatgtcgtgaaggcagccggcgccggcggagccaagtctgcctcggccggagccgcgaaggcccgagaattgccttcgccggggaagcgcattgccgatttcgacactgatattagtgtggatgattatctcactggatcgggcgaggggcgacttgttgttgttccgcctgcggtggcgaacacggtgtctggggcgaagggtagcgctcttagcgctggtggtgagatttcggcgctccccgttgtcaaggacgaagcgggcactgtgtcccgccggctgagggaagtgtcgcagcggctaagtcaggcggctgacttcgctgaccgcgtggcgttggaggcccttatggcagttgtgtctgccgaagtcgagagacttcgggcgcatcatgctgacgccgtccgggaaaagtcggccgccgatagcaagtgccgcaagctgacggagaaggtggccgcgctggagggtgagaggattgacctccggcgccatctggcggaggagaggagggaggctaatcaggccctcgccaaggcgtag

SEQ ID NO: 14770 - DNA, 1731 bp, Zea mays
  Peptide Sequence Number=SeqID_58145
atgacgactcaaggaggtttgcagccgacaagcaatgaagctaatatgtgcaccaacgacaatggtagccaacttggtacacggattgtggacgagattatggccgggaagaacgtcttctttgatcttcctgacaagttgactggtgagatatggaccttgaaattccattgcattggagcacaacctggaaaagaaattgtcacagtaaatattgataaagcttatgttgccttttacaatgtggtgtacataaaatcgaaacttggatattctgggagggacttcttgttttacaagaaacgatgtggcattgatcgatccaggctattggcacttgattacatccaccaagaagaggccatgctgtctgataacatggatgagagaacaataagttttgtgctcacaaaagatccacccagtgatctagaggtaagcataactcccatcaagcgtccaaggcagcgaacaaatgttgatgaagaaactatagaagtgtcgattgatgcatataaggagtggcttgcaatactacaacatgataatccagaatcggtattgtatgaacgacaaagcaatgatgacctaatattatcagatgaagaaattcatggcagcagcaaacctactgctaattggccatctcatgctagacgtcataggaaaagagatcctgatgttattggtatatatgtagataacgatggagtctttaaaaaggaggggcgtggtacccttaagggtatagcagcagccaccaagcgaatcaagaacggtgatcacaaacttaagattgaattttcatctaagcttggaggtcctgtaggaccaaacgctcgcacttttgtggatgaaatcgtattgtttacaaagaaaaaggcaccactcattggagtgaaaaagtggaaagatatagagctcaatgttagatcttctatagcctctgacgtactgcgaaggtgggagtttctaaccaatgaggacgcgcatgaaaagatctggtctattgctaaggagagatacaaaggatggcgatcaacgttaagctcaacatacaaggcatacaatagttatgctgaaaggatgaaaaacaagcctgaagatgtagacatcgtcgagtggcattacatgatgttgtattttggatctgagaaattccagaaaataagcagccagaactcggaaaaccgtcagaaacaaagaacgaagcatataatgggttctagaactttttcccaaataagctttcaacagagagatccagaaactggtatagaaccaaccgatctatccctttggatgattactcattgtaaaaatgatgaatggtcggaagaggcttcacgtggcatttatgagaaggcagctgagaaaattgttgagaaaatatatcaaacagaaagatttaagctaacaagagaagaggaaaatgctattttccaaacaacattcaaggaaacaacaggatgtaaggcaaacagacttcatggtcatgggtacctatcaagatatccaacaagaagtcaagtgatggaatcaaagttcctcgaacaagctcgtgccacggttgcaaccaaccaaaagaacattgaactcaaaagtcaggtccagttgttaaatgaaaacttgcgtgtgaggttgcagaacgagaaagaatactacaggaaaaaatgcaagcactgcaagaagaagaagaaagaaaaagacaagtgcttagagaagaaatga

SEQ ID NO: 14771 - DNA, 1350 bp, Zea mays
  Peptide Sequence Number=SeqID_58146
atgcgcggccccgggggaaggatgtcttcgcccgagctccgggagtcttcggcgcggatgctgagggttaccgggggttggtggcctaagaatgttcctatcccccgcgcggccggcgaagacttttttacatctcgcatggttcgtgaatggaaagtgtttccttacgggcggaatattgctgctgttgtgtcggcagtgatggacaaggatcgccagggagcgacgcagaagcgccaggaggtcgtcaggcttcatgaagccaggccgaagaggcagcggggggctgcgaaggctactgcccccagcggaggccagccgccgctggcggcaaagtcggccgtccctgcgtccagcagggcgccggaggctgcggctgccgccggtggttccaagtctgcgaaggctgcacctgcgtccggcagggtgccggaggctgtgaaggcggcccgagagttgccgccgccgggcaagcgcgtcgccgacttcgccatcgacattagtgtggacgactatcttgttgggtcggacaaaggccaacttgttgttgttccgcctgccgcggcgaccacggcggctgccgtagtgccaaaggcgaagggccggcggctgactttcgcagaccgcgcggcgtcgggggccctcacggcagttgtgtctgccgaagttgagagacttcggacgcaacatgctgacgccgtccgggaaaagtcggccgccgacattaaatgccgcaagctggcggataaggtggccgtgctggagggtgagaagactgtcctccggcgacaactggcggaggagaggaaggaggccaatgaggccctcgccaaggcgcagtctgcgcaggcggaggccaatctaacacgggcggagggcagtcttgccaagcagcgcgccaagcagttggaggagcggctccgcgctctgcaggctcgcgtggagagggccgaggcctcgacgcgcgtggaggctgagcggacacgcaaacagctcatggattcatacaatgagctgggcgcgcggaccgctgatttcgaagtgccggaccgagagcccggacttcgctgccttgagtgggtacaggaggagttgcaggcgctccccaccatcgtggaggggtttatgtcttgtgcctccctggtcacctgcgagggggcggtgaacgcgctctctcgcaaagggtgccggcactatgaggtcttcgaccaagctgatgaggatttcgagcgtgatatctacaaggttgaggaccctatagtgaaggaatccgccgaagccctatacgaccggatgtggggcacccacggtcgagaggtgtcagggagcgggccagacgggaggggtcag

SEQ ID NO: 14772 - DNA, 618 bp, Zea mays
  Peptide Sequence Number=SeqID_58147
atggcgcgggggatcgtgaagtctgccgcccccggctccagtatgtcgtcgctgggcgtgaagtccgccgcccctggccccagcaagccgctccctactgtgcccacacaggagcgaaggcctccatctccgctgcatactgctgagatggaggtgggcggggctgaggtctccatggatatttccgtggatgactatcttgtgggcggcgacacaatgttcgatgcccatacagggcaaggaccttttggtgagtttttttgggactgggtgtttgacgagactatggtgcaggatcgaaggctgggcaactgggctgttgtcccggcgttggtggtggctgggtctgtcgccgtggcgactggggcgaaggggtctgtgcaggacccatgggccaagttttgcaccaatggcaagatcgcttcggcagccgctgctaaggacgtgacgggctcagttgcgcagcagctgaagcatgcggccgccttcgccaaacgaattgcgtcgagggccctgaccttggagttcgctgccgaaaggcaacaactcgaggggaggattgagcgcctccaggcgcagcacactgaggccgtgcgggacaagttagccgcaacttga

SEQ ID NO: 14773 - DNA, 1863 bp, Zea mays
  Peptide Sequence Number=SeqID_58148
atgttggacgaggtcgcgggatgggacgacctcgtcatcggcctttgtcctgcgacgcgtgggggcaaagggcttcccgaagcgtcgcgccctgtgtatataaagggggcgggggcggcgcggattgaaatttacctttctgcgcgccgcgaaaaccctaccctccctttcaaactgctcgcttgctcgtctgccctccttgctcctattcgtcggagaactggctcatgtgaagcagaccgcgcgccgccgtcgacgccttcggtggaggtcttcgccaagcaatactatcagcactggcagaagagaaaaattggacataagattgcgcaattcggatcgtgcactttcacgccgaagtccaggaagacttcgatggaagttgtggagctggtcccctgtgcccgaaataagtggggcaactggtgggactactggttttatgtttcgaaggctgaagtcgaagatcacccagggctccctgccgccattatgtgttctcattattatgtggcgtacccgccatttgaagtggcggaggatgatgaaaatgagagggcccttcggattgctgcccgcacgagtagtgggcgtgatctagttgaggaattcatagggtatgaggtgtggcccttggcgcatggatgggcgctgggcgaagtatgccctcgcgatatgccctccctgggtggacggaaggtgcgaagtccgctttttgctttggatgtgcgagggcgggatcctgccgcggttgtgcatgaggcggaggatggggcggtgagaattgttgggcgctatgtgccgaagacggaggcccagcggagttgggatatacgtggatccaacgaccgcctgaatagggtcttcgagttaaattgtttgccgtatggcggttatcccggggaggacgtcgtcggccgccgcgggaaaaaaccagcggctgtgactgaggatgaccccgcgccggaggccgccccagccactaaaaagaggaagctaggtactgcggtgggagaactggggatctccgatagctttgctatggagttgatggggacatgcgcggcccccgggggaaggatgtcttcgcccgagcttcgggagtcttcggcacggatgctggaggttaccgggggtcgatgtcccaagaacgttcctatcccccgcgcggctggcgaagacttctttacatctcgcatggctcgtgacttgagagtgtttccttacggacagaatatttttgctgttgtgtcggcagtgatgaacaaggatcgccaagatgctgcgcagaagcgtcgggcggtcatcaggctccccgaagctaggccgaagagggcgcggggaactgcgaaggctaccgtccctggcgatagccagccgacgctggcggcgaagccggccgcccctgggtccaacaaggtgccggagagcgcaaaggcggtcggcgccggcggaaccaagtctgccccggatggagctgcgaaggtccgggaattgccttcgccggggaaacgcgttgccgacttcgacacaaatattagcgtggacgactatcttgttgggtcgggcaaggggcaacttgttgttgtcccgcctgtggtggtgaccaccgtgtaccacgatgtgtctgccgaagtcgagagacttcgggcgcagcacgtggacgccgtccgggagaagtcggttgcggatagcaagtgctgcaagctggtggagaaggtggccgccctggagggcgagaggacggacctccggcgccagctggaggaggaaaggagggaggccaaccaggccatcgccggggcgcaggcggcgcaggcggaggccaaattggcgcgggcggagggaagtctcgccagctag

SEQ ID NO: 14774 - DNA, 402 bp, Zea mays
  Peptide Sequence Number=SeqID_58149
atgcatatatcttactcattacattcgttatattgcaatctcgctgatggagagtacgtgctcatccacgagcaaggagctgtccacgaggaagaccaggagcaagctcccgagactgccatcgaggatctccccgcagccccagctattgaaggcaagccccgtctatggacttggatccagggaggatgccttgtccatgagacgggaaaaaaggaattaaggattatgtgtggatacttgagtcaagcatttgaaatggtactaagcacatgtcgggaaatatgggtaacgggtacgcttcaggatatggttgatgatgtgacttggcctaccaccctgccactgggttggacggtcgagtgggatgctgctccggcaggagaggagcaggaggagtag

SEQ ID NO: 14775 - DNA, 330 bp, Zea mays
  Peptide Sequence Number=SeqID_58150
atggccacgaaggaagaaaggggcggaggggcttaccagcggcgagactgctccggtgaggtggtcgaggatgtagggaaggtcctgagggtcatagcaatgtgcgggtcaccatcgggaatggccggagtcggctggtccacgcttgcaggtttctctggctggatcaagagatatggaggggtgaagttgggtttgtctcactaccaagcacagagagaagatctcgggtttgacgtgtccagagcacgcgtcccgatgccatcttctggtatgaggttcgaagggcaggaggaggggttgggcatgattacgaaccaatttccttag

SEQ ID NO: 14776 - DNA, 264 bp, Zea mays
  Peptide Sequence Number=SeqID_58151
atggccaagaaatgcaagcgcgagccaactcctccgtctgaggactttggtgattcggagtattcagaggagttctcctctgaatctgaggggtctccggctcccatccctctgcatagccgccgagcaactgaagacattggtgataacgtcagcgtcttagaaatgacagccgagttaaaacgggccgcgtcggccacttttgaggataatagcctagtgatgatgtggtacatcggggttttagaggtaaccgccgagtga

SEQ ID NO: 14777 - DNA, 594 bp, Zea mays
  Peptide Sequence Number=SeqID_58152
atggcagtcagtaggatccagccgctctccggtcacctccacccacgcgccgctactgatccggctgcggctgccgggaagcagcagcagcagcagcaggtgtacacggtgtggatgaagtcgctggtgctgagcgggcacgggtgcaccgtctacggggaggacggccgcgtggcctaccgcgtcgacaactacgcctgcagccgcagccgcgaggtgtacgtcatggacagtgacggcaggacgctgctcaagctgctcaagaagagcttcgcggcggtcgagacatggacgggctactcttacggttccgccggcactgcgccggcggcaggcctggggcaggagggctccgccaggccatggttcagcgtccggaaggcgccccaccggatcctgaagaagaagatgaagaaaggagggcagcaggagcagaacggtggcgctggcggggctgtggcgacggcctgcgtcgtcggcggggacgtcgtctccaggtttgtcggcgcgccgcgcaagtcggagttcaggattgtgccccacggcgaggtcgtggcggagacgaagcggaagcagacggagacgaatctctag

SEQ ID NO: 14778 - DNA, 825 bp, Zea mays
  Peptide Sequence Number=SeqID_58153
atggtggggagaagcaagtcgggctgcggcctctgccccgccctcagcttcaaggatcttcatcatcctagctggggcggagggcgagctgagccggagctctacctcctgcgcgggttcgtgggccaccttctccttcagcatttaggggagaaggcgctcaccggcctagcgaaaggggcggacctcgacaacgaggggccgagcggccgcaagcgtcgtcagctccagcatgcctggctcactggctcagctggctctggcacagcttccggtgccacctcccaccgctgggcggagcgtggctatctgcccgccgtacgggcggtcgttgcgccgtgcgcaccgggggaccgcccaagacgtcgcacgctgctagggcggcgttcgtgttcttgggttgtcctgcccttgctccggtacgacgcctctgcgcggaggctggtgctcgcccgtccgggagaacccgagtggggatctgccggtgggcagacggctgccgtcgttggtgctgagatggtggcggctgaagaagtcctcttcgtcgacgagatcaccgccaccatctgcgctccgggcctccggctctttggctttgatggcttgtcctcgcccctcgagtggggacgtgggcgaggaccttatcgcagcagcgtctgccctaaggtcatcgctgctgctgtttggccgcccggagcggaggtcgttgtcactgctgccggagtgggcggcggcgagccacctgggattctgtcgtcccgcaggccctccaatgtgggggtttgtgtgggggatagatatcccccgggtccactaaaagagtaa

SEQ ID NO: 14779 - DNA, 384 bp, Zea mays
  Peptide Sequence Number=SeqID_58154
atgggcaagaacaacaaacgcaagcgtgagccaactcctccatcggaggagtttggtgactcggagtactcagaggaggagttctcctctgagtccgaggggtctccggctcccatccccctgcgtgagtcgtctgacgactcagacgactcccaggggctcgcggcggaggactcggacggcggcggcgaggacgaggacgacgacgacgacgacgatggcgacggtgacggtgacggcagcggtaggggcagcggcggcggcagcaaggacggtgacggcggcggcagcaggggcagcaccaggggcggcagcggcaaggatggtgacggcggcggcagcaagggcagcaccaggggcggcagcaacagggccagtggctag

SEQ ID NO: 14780 - DNA, 1410 bp, Zea mays
  Peptide Sequence Number=SeqID_58155
atggagccgcccgcctcctcgccggcaccgccaaaccctaacccagtccccgacgatcggccgctgcagcagcaggtggaagaggcgcgggcgccggagccggagccggagcgggagacgtcgccgacgtccctgaccacctcaatcgatcccaccccttccggcggcgaggagagcgagagcgatgactcctcgtcagtctcgtcggcgccctcctccgcctccgctcccgcggccgctgcgcccttccccacggccaaggacctcctccacatctccttcaaccaggactacggctgcttcgcggcgggcaccaagtcgggcttccgcatctacaactgcgaccccttccgcgagatcttccgccgggacctcgccgccgatggcggcggcgccgggggagggggtatcggcgtcgtcgagatgttgttccgctgcaacatactcgcgctcgtcggcggcggcgataacccccactacccgcccaacaaggtgatgatctgggacgaccaccagagccggtgcattggggagctctccttccgctcccccgtccgaggcgtccgcctccggcgcgaccgcatcatcgtggtgctcgagaacaaaatcttcgtctacaactttgcggaccttaagctcgtgcaccagatcgagacggcgcccaaccccaagggcctctgcgctgtgtcgcagcagcccgggtcaatcgtgcttgtttgccccggtgcccagaaggggcaggttagggtggaacactatggggcaaggaagaccaagtttatcaatgcacacacttcccgcgtctcgtgcttcgcgctgtcgcaggacgggaggctcattgcaactgctagcaccaagggaacacttgttagaatctacaatgcagctgaaggcaatctcttgcaggaagcgaggccactccggcgcgatgttcaggtggagagcaggccacgcgggcacgatggcatggaggccctcggcgcgtctgtggaggaggggcatctgcgatcgtcagagcgcctacctagcagacgcatggcacacgtcgaccggccacggagccgcgccgtgctcgcggtcgccgtcgccgtcgccgccgcggcgctcctcctttttgccgcagcgggcgtcccgcgtgcggccggccagacgacgacgacagcggtggtggatctggacagctgggccgatcgcggcgcggcgtgcacgggcgcggtggaggcgtgcggcggcatcggcgcgacggccaggagggagctgggttccggcgggtacatcagctacgacgccatgagccgcgggcgcgtgccgtgctcgtaccgcggcgcgtcctactacaactgccggccgggcgcgccggccaacccttactcccgcggctgctccgccatcacccgctgcagaggctag

SEQ ID NO: 14781 - DNA, 402 bp, Zea mays
  Peptide Sequence Number=SeqID_58156
atggcgtgcgtcgtggacattggactgctccggcgtgctgctgctcgcatagagacaagaaggggtgctgctggggaagaaatagaagcagtgaaggcgaagtcgccatggggagaggagtttatgcatccgggggctcaagttggatactcgacagcgggtgcaccaaaccaccatgacaggggagaagaagaatgttctccttctatgaagaaaaacccagatcccccacgaggcaatcacattccgggattggaaatcaagaatcttagatacaaattggtttccggttccccaatatggccaaatggcctcaaatgtctattacctgtagtgaagggtcactgcttcagagtgtgtgatcctatgcttaacgatgttgaggcgactactatgatttga

SEQ ID NO: 14782 - DNA, 381 bp, Zea mays
  Peptide Sequence Number=SeqID_58157
atgggaaccacggtgatgactatgtgcagtcgttgttgcttcttcccaccctattgcgaggcataccatccggcggcgaggccctttttgatggagcggtgtggtagtcgtgaaggccgaggctgcattgcgagggcagtggaggagctgggcgacgtggtcagacgaaggcagggcaaagccacctccagcagcgacgaggctgcatcgcgagggcggtggaggagctgggcgacgaggtcagacgaaggcgagcttggcctctttgtctcgttcattgaacggtgggttgtgccattctcgaactgggttcccttgctgctgtcatttgagcaaccattcagtttcttcggatcagaggacattcaagcttctgagtag

SEQ ID NO: 14783 - DNA, 225 bp, Zea mays
  Peptide Sequence Number=SeqID_58158
atggcaggcgtccggtgcacgctcggaggagaacggggatgtcaggttgtgcgggtgggcatgggtccggcgtctacttgcgggagcggcggcgccggagacgggatgtgtggggcgcggatggcgcagagtgggtggggtggaggcgggggcatacacagcacagacatgagaagcaggagctcttctcaagtggcgacgatggaaggtggtgtgaagggctaa

SEQ ID NO: 14784 - DNA, 399 bp, Zea mays
  Peptide Sequence Number=SeqID_58159
atggataacttgcaggactattataatgcactacatgaagaagttcatgtgttgtatttacaactgtacccgaacgtccctgcgaatcctgttgggatggaagccggaccttcttgtgtaacaggagaagcacttgatggtgaaccagaccttttcaggccccctccctctatgaagttggttgacgaatggtcttctatgcccaacagtaaagctaccaacagtaaaaaaatggcttaccaggtgcccttaacattggccagacaggactttcctactaatatggttgttctgaaaagtcaagacatagatgtcattttgggcatgaactggttagtccagcaaaaagcaattctcaaccctgatctgagaaccatcaggttgagttatgaccaatag

SEQ ID NO: 14785 - DNA, 342 bp, Zea mays
  Peptide Sequence Number=SeqID_58160
atggcggacgtgaccggcggcgcgtcggtggcatcgggggcttgcgggcgacgcctcggcaggacgcgggcgggcgacgccgctagggcggcgacggcgcggcgggggcgggcgacgacagaaacgcggctgaccgggagtggaatagagaaggagcgagagagaacaaagaaggagtcgacggttttaaatacactattttcggcggatgtgccagtggccgccgaaaataacggattttttggggggggtgtgctcgtgccgccaaactgttacatggccaccgaaaatggtatacagtgctgttgtgagatatttatagaggaaagcgtgggatggtga

SEQ ID NO: 14786 - DNA, 950 bp, Zea mays
  Peptide Sequence Number=SeqID_58161
ctaagaaagagaagcaaaagctgcaagtatggtctcgaattatgccttgtaaagagtcatttgcatgggccatgattcctctgtttgaagctccgattctaacaagaaccttcctattgcagttgaaacggaaacataacgacagaacagaaaatgaagctaccgaatcaaatgactggatgagccctggatatgctaatgctggcagcagcccagttcctacacccccttcagggaaaggtttaaaagcatccaccaagcctaaggctacgaagggccagaaatctggtcctcggacccctttgggttttggttctccgggcaatccttctactcctgttggtggctgccgctatgatagctccctcgggctcttgacaaagttcctgaacttgctaaaaggtgcacctggtggcattgttgatctgaataatgctgcagaaactctagagagccacactaagggcgtcgattccgtgtgctgggatcccaccggcgagtacgtggtgtctgtcagcgaagacacggtgaaggtgtggtctttgaacgacgagagcttcgtgaacgagcttagctgcggcgggagaaaggctcggactctggctaagtcccggaagacggcgaactccgctccgcccgacccagggctcggactcgggctaagtcccggaagacggcgaactccgctccgcccgacccagggctcggactcgggctcggccccggaagacgacgaactccgcttcgcccgaccccagggctcagactccgccctggcctccgccgaacgacctccgcctcgcccgacccagaggctcggcctcggccacggaagacagactcgacctcggcttcggaggagcctccacgtcgcccaacctagggcacaggccagccacgtcaacaggaagcaccatcatcaccctaccccgagccgcctcgggccgtag

SEQ ID NO: 14787 - DNA, 1149 bp, Zea mays
  misc_feature (1078)..(1078): n is a, c, g, or t
  Peptide Sequence Number=SeqID_58162
atggatccctcatccggatccacgtcccgccacgggcgtctcctcatctcgccgtcgctatccaccccgaccttctccacccactccccgtccccctcatcggccgcgtcccccgcgccgcaccgcaactccacatcctctccgaagcccctcgtatctttcccctcaccctcttccgccaacaggccccgatcctcctacgtcggcgctggaccgcgcgctgccaccgcagcggcctcggcctcgggtccggcgttcgcccacaacgcgcgccttgcggcggccctggtccctgccgcggccttccttctcgaccttggcgggctccccgtcttcgccgtcctcgccatcggcctagcggcggcataccttctcgacgcgctccagctgcgccagggctccttcttcaccgtctgggcggcgctgctcgcggccgatgtcgcttttttcttctccgcctccctatcgtccgcggccgctgcctcgctgccgctgaccgtcctcgcgctgcttctctgcgctgagacctccttcctcattggcgtctgggcgtcgctgcagttccgatggatccagctcgagaacccgactattgttgctgccctggagcggctgctctttgcctgtgtgcccattgccgcccccgccctcttcacgtgggctctcgtgtctgcggtcggcatggccaatgcatcctactattttgccacgttctgcatggtgttctactggctgttctctataccccgtcggtccagcttcaatagccggaagcaggatgctccaatgctggacagtgatggcattcttggtcccttggagagctgtgtgcattctctgtatgtgctgttcgtgccggtgttgttccatgccgtgtcccatcgtgcaacactcttcacatcgttggccagtctgtatgcatccactcgtggtgcactgtggtggatcaccagggatgcacgcaccatggaccagataagaattgtgaatgggttcgtcgcactggtcgtggtggtgctttgccttgaggtgagagttgtgttccactcgttttggaagcacatgctgcggggcaggntgggggatgctgctagttctgtggcttttacaggatttggcagtgctagtcagtggagcagggagcggtag

SEQ ID NO: 14788 - DNA, 543 bp, Zea mays
  Peptide Sequence Number=SeqID_58163
atgggcatagatgctgaggcggatgacgataccaccgaggctcctgtcgttcgacgaaggggcactcggaagggccactttgtcctacctccatcagcgcctgcacaatctgaagctcgggtactgatcatcccggttggtgatagccaatgggatgacacgtctttcgacgaccgaggtcaccatagacaagttaatcaagtcttagctcaaggcgccgtcaagcacgacttttggagacgctatcgtgtggaacctgaggctcaagagcatgcagaccgagtattagagaaaaatgcaaagaaggttgtgaacgcgtacatgaagcgccgagggcattctatcaacaactttcgacaatattcggatgtctacttgactgtagaccagtacatggaagaggctcaaactggagttgtcccgagcccaatcgatgtttataggagagggcatagagcgaaaaacagtgaaatctctgatgagctatgtagtcaagcgatcgttgagcgtatggtgtcaaaggttcatctacaactatactaa

SEQ ID NO: 14789 - DNA, 645 bp, Zea mays
  Peptide Sequence Number=SeqID_58164
atggcgctttcccccctcctccttgcggaaaggcgacgcaggggcgtatgtaaaaaagtcgagtctgtccctgaccgtcctctcgccctgtgcagaggctcgggggctgctctcgcaaacctggccccggccaaaccgttgacagcgtcaacataccagcccgagaacttgggacccgacccctcgggcaaggacagccgaccccggaggatctccgtctcgctcgaggccccctccagcgacgaacatacttccagctcgcccgaggcccagtcttcgccaagaagcaaccctggccaaatcgccacgccaaacgaccaaatcgcaggggcatttaatgcaaagggctcggactcgggctcagcccggaagacggcgaactccgctacgcccgacccagggctcggactcgggctcagccccggaagacgacgaactccgctccgcccgacccagggctcggactcgggctcagccccggaagacggcgaactccgatccgaccgaccccagggctcggactcgggctcagccccggaagacgccgaactccgcctcgcccgacccaggggctcggactcgacctcggccacggaagatagactcgacctcgacccggaggagcctccacatcgcccaacctag

SEQ ID NO: 14790 - DNA, 366 bp, Zea mays
  Peptide Sequence Number=SeqID_58165
atggcgaagaggctgctcccgtcgctgaaccgggtgctggtggagaagctggtgcagcccaagaagaccgccggcggcatcctcgtcccggaaacatccaagcagagtttggtaatcttcttcttccgagttatgcagattaggttgatgtctttcctgagactgttgcctcaaaggctaccccaacttatcaggcaggtggagcaagatgttgagactgtaatccacgttctccaaccgggtccaataggaattgtggagcacaaattcacagacgcggagatcttagaggccagggctacagtgaaaagagcagtggataattggcgaagaaattggacccttgagagaaatgttagcagataa

SEQ ID NO: 14791 - DNA, 375 bp, Zea mays
  Peptide Sequence Number=SeqID_58166
atggcaatggcaatcagcatgcttggggtctccgaggcctttgctcttggccagaaccttgggatcaaagcaaccactgtcacagacattttcaactgttcaagcgctcgctgctggagtagcgatacatataatccagttcctggagttatggaaggtgtaccatcatcaaggaactatagtggtggtttcacttccaaactaatggtgggtggtcttgaggaagcgtatttagcagccaagtccttacttcaagtaatgggagaaaaacaatctactgtggtggtgctggaaatggctcggcaagtttttttaaccttcattcttcacaaaaattctcagtgtgacgatgattctgactcactcttgatatag

SEQ ID NO: 14792 - DNA, 1596 bp, Zea mays
  Peptide Sequence Number=SeqID_58167
atgtccatagacggagagacaagtagagtgatgaaaggtgtacatcatggtgcgtgtgactatctcctcaagcctgttcggatgaaggaactccgaaacatttggcaacatgtgtataggaagaaaatgcacgaggtgaaagagattgaaggtaatgacagctgcgatgatctcccaatatttagaaatggtttagatggattggatgagaggggcctatttatgagagctgacactgataccatgaggaagagaaaagaagtggataaggaccatgcagaccaggactcaagtgatggagctactgctaagaaggctagagttgtctggtctgttgaccttcaccaaaagtttgtaaatgctgtcaaccaaattggatttgacaaagtggggccgaagaaaatacttgatcttatgaatgttcatggcctgacaagagagaacgtggccagccatcttcagaaatatcgcctctacttgagtaggttgcaaaagcagaacgaagaaaggataatgggtgcggctaggcaagatttcaatcaaaaggggccatcagataatcttaacctccgaagttccttccaagagcagccaggaaaccttaccaatggatttcagcatagttctcagaaggtccaatctcagaccaacattctcgatcctcatctggacgacacgaagacttcagtgcccttgaaagtgccagataaaaatggaacttcagcaagtgatgctgctgaccatcagaacatcaccggtgtttcacctttaggtgggggtggggtgttctcttttgaaagaatgccagtgaatcaggacacgaagctatcggaagccatgatcttggaatgtcagtcctggagtggtggtgtgccaccaaagcagttcatgcagtatccaaagcataaccatgagcgctgcgaccttctaggagactattcttgcctgcccaaaccggacttagagcacccaattgcgcctagccatctttatgccccaccacctgtaatatcgatgagttgcagtgtggagggagatgtcagagacttctcagatgtaaaaccagatcttcttggctgtatgaagtccttatcaccggcactgacatgtacagttgagtcagtttctgctcaactcagtgacagtgttgtgagctcaactaacaatgacaagaagatttccagtgtggaggggttgtccagcgttaaagattgtgactttgatcaggaaaggaaccaagccattttgcttacttcagaagaggcaagtatattatgcagcactgatttgacttgtctacctgatgaactgtccggctatcaacttcaaggcgtctccttcggggatataggactgaatagcatcgatttattccagtgcaatgatacaatggtactacctggactgcagaataactggtatgatgatccagattttagcaatgaaactatggagttcccgttgctagacggagctagcgcagtagtggcgaagatgccacggtcgttcctcgtgctgctcgttactctcgtatccgcagctgccacacttccatccgaggcgctcaacgtgcgagaccagttgctcaagttctag

SEQ ID NO: 14793 - DNA, 885 bp, Zea mays
  Peptide Sequence Number=SeqID_58168
atggccatggagaccagcagtgcgcccgccgccgccaccgaggccggctggtacgtgcttggaccgaaccaggagggtgtcggaccctatgcgattgttgagcttcgaggtggttgtttccttcactctcctagcaattcaacgcgtttcaaggctgctaggtcagggcatggggcctctatcccgcaattatcttctcagagcagcgcacctcagtactcctcttatggtggatatcagggtacaagcaaaaagattgaaattccaaatggaagggttggtgttatcattggaaaagccggggaaactattaggtatatccaacttcaatcaggagcaaagattcaagtcacaagagaccatgaagctgaacctggtgcactgacaaggcaagttgagctttctggcaaacctgagcagctaagcaaagctgaacagttgatcaaagaagttctggcagaggtattactcattatgctcacagccttttgttttgttctggtgatacttcaactgatcagtgaggttaccagtgaggttaccattcgtgctggtgatacttcaactgaaagaactgtgcatattgatgatactcaagaacaaattgaagctgcaaagcaactgatcagtgaggttaccacatacaaggagaagggcaaggtccccgacaggttcaggaagctgcagcacgcgcaccatggcagagccgagttcaccggctgcgcgtcgcccaccggattgctggattccagggacccctacgatctccaacaacctcagatcggtgtgtcgcggaccataattaggggtaccctcaagtctcctaattctcagctggtaacccccatcagcacaaagctgcaaaggcctgatgggtgcgactaa

SEQ ID NO: 14794 - DNA, 270 bp, Zea mays
  Peptide Sequence Number=SeqID_58169
atggagtcttcggcgaagacaaggcttccactcaactctatcggtaccatttatccttcgccatcaatccatactatctctccacactggtgccaaaggttcatctacaactatactaaatcgactgtccggaataccgtagattattccggacaggagaagctttttggaaaatcagaccacgcgcggaccgtccgggcccttgtcgcggaccgtccgcgacaccgctttgacttcgaccaggaactaaatcaggggcagtccgaataa

SEQ ID NO: 14795 - DNA, 520 bp, Zea mays
  Peptide Sequence Number=SeqID_58170
atgagggaaaaatctgcaggaacaccaggaacaattcgctcaccagtggttctcgcggcggagatggacctaacgcggaggcaaagcggggaaaaaaagaatgtctctaaggtattcagatgcaaacgtgttcttgtttgtcatactgcccccgccctacccaaagcctaccgcacgccagccccgcgcgaaacctccgcacgcccgcatgtcccccgcatccgccgcggatctcgccccccccccccccccgcggatctcgcgctagcccacaaccgcgtcccctcccacgcgcgatggaatgcccctcccaccacaaccgcgcagcaccatcctgggcacggcgccccgcgcggggcctcgacgaagaggagctcggcggaggctgcggaggggagcggcgagaaggagatgagcagcgcgggggaggaggagaaggagagcgacgcggagatgaggagcgacgagagcaggaccgatagcagcggcgccgcccaccgtcgaccccgcgggaggcgag

SEQ ID NO: 14796 - DNA, 354 bp, Zea mays
  Peptide Sequence Number=SeqID_58171
atgacctgcggcaatgtactcggcttcggcggtggaaagagcgaccgaattttgcttcttagaagcccaagacaccaaggatcttcccaagaactggcaagttcccgatgtgctcttcctattgattttgcaccctgcccaatcggcatccgaataaccaatcaaatcaaatgtggaaccccgagggtaccgaagcccaaacttaggagtataatccacatatctcatgattcgtttacggccgtaaggagcagtggagggctggaggctatggagcatgcgacgcagcagcaggatacaggccaggccaccgacgtgctgcgcggcgcggtcccagcgcaggcacggttctga

SEQ ID NO: 14797 - DNA, 273 bp, Zea mays
  Peptide Sequence Number=SeqID_58172
atgggcatgcatggtggtggttggctccagcgagcagggcggcgcgctcaccagacagccttgtcggtggagatggcgtggaagagcggaagcgatttgacggcggcggcgacgcaaaagcagatgcatgctagcttatatggtactctaagcgacaaacttgatgagaatttgaagctcgcaacaagcacaactttggattttggggcaaatttgttgaagaaattattgaggtttttggtaaaaatacttgcagcctccaaatcaagatga

SEQ ID NO: 14798 - DNA, 666 bp, Zea mays
  Peptide Sequence Number=SeqID_58173
atgtcggggggtctaagaaacgaaggtgcttctaagcttgaaaaagttgagattgtctcgacttcatcttttggtgcagatgttgatcctagggcaatagatcttgccatgagaatcgccgaaaggatgttcctcaaaatgaaggaagatgaggcgaagaaaagtattgaagaagaagaaaatgatcgatggagaccaaacgacgaatccacctcttcacaaggttcgtctttcaaatccacttctcatatgtgctttgttgctaatgagagtgacagtgaaagcgaaagtgaggatgaggaggagcatgaaagtgatagtgaagatgaggatgatcttcaaaaattcttcgctcaactaagcaagaagaaccggatgagcttgctcaaactcatgaaaagagcggaagaacaaaaggaaatgcttcataagcaagaagatatcctcatcgaaaaaatcaaagacttggagaagttgaccaaagagcatgagaagctaaagtgctctcatgatgatttggtccaaagcgtcctccacgcctggggtggtagcctcggcgcaccctctcgtcgaggtgggcccgacggtcgcggtgatggtgctcgttgccgaggcgtcccggggccgcaggcgctgtgttgcgtgtacgcccgtgagagcacctag

SEQ ID NO: 14799 - DNA, 411 bp, Zea mays
  Peptide Sequence Number=SeqID_58174
atgccaactgagcacatcggtcatgggtcggtccgccgcgggagaagacgcgacgatcgatatggccaaaagtgggccgacagtaatggtggcggcaggcgggcggaagcagcgggcaggcgacacctttggcaggcgaagcgggcgacgcttcaccttcgccataatgaccgcgtcaaaaaagggaccgggaaaggggatacaccaaaagggacccttctccgcgaaggaagcgggccccgagccctcctactgatcagaggttcgaaggttggcccctcggaagggttcgatagccgcctcagagcactcgggctccgcgccctcctactgatcagaggttcaaaggctggcccctcgggagggttcgacagctgcctcagaccactcaggctccgcgcccactactga

SEQ ID NO: 14800 - DNA, 450 bp, Zea mays
  Peptide Sequence Number=SeqID_58175
atggggaaaagaaacgcagctttacaacacgacgatggccccgacagccgcaatgaacaaaacgccggcactcaaggtgccattacaaacggaactccggttccacccccgcaggtacgaacaaccccccacattggagggcctgcgggacgaccaaaccccaagtggctcgtcgccgtccactccggcagcagcgacaacgacctccgctccgggaagccaaacagcagcagcgatgacctcagggcagacgctgctgcgacaaggccctcgcccacgtccccactcgaggggcgaggacaagctaccaaggccatagagccggaggtcagtccgcgggtggcaccgactatctcatcggcagagaaacctcttccggctgcctcaatgggaggtggcaccggaagcagcgctgaagccgctcgggccggagagccagacacgtggtag

SEQ ID NO: 14801 - DNA, 321 bp, Zea mays
  Peptide Sequence Number=SeqID_58176
atgtgccgctatgtacgacaagctccagcacagccgccgcttggacgcggtgcagagcggctgctccgcactgtccatcatcaagcaggggacctcatggtcgtcgccaacgtcggcgactctcgggttgttctgagcatcgcattcgacgacgacgccatcaatgtcgtccaactcatcatccacctaaagcctaacctaccaccccagccaaaagtcatcagtactcggtatgtcgcgcgtgttcgacgactactatatcgaggactgtggcgtcatcttggcgccagaggtgacgcagaggaggaccaacaacaatga

SEQ ID NO: 14802 - DNA, 573 bp, Zea mays
  Peptide Sequence Number=SeqID_58177
atgggggtgcgcaaaaacagcaaacacccggcgggcatcccggtgggctatctactggcttcacaaaacagcgagccgacagcgcgcggagatgtcggggctgctgcgcacaacacaatatttcccacaggcatttcgtcgaaaacctatgacgcgtcgatgttgacaggaggttcgtcgatctgcatgacatctagaaaggggagccatgggggaagagtgcagggctgggtgccatggaacaggaagggcgcggctggaggagatgggagcagagagctgagcggccaccatggctgggctgtggagcagagggagctcgcaggggagaacgccggtggtaccctgcgcgcgatggggaagaagccagcagagagttccgcgacgagtagcagcaaggggaaatggaggtccgagtggggtggattgctggtgagctcctggcagggaggtgagcttgtccatgggaaatggcgcccacgccttggctggagatggagctgccgtcgggaaaccagagaggaagaaggcatgtgggagaagaagacagggaggaaaggttgtggcggctga

SEQ ID NO: 14803 - DNA, 846 bp, Zea mays
  Peptide Sequence Number=SeqID_58178
atgaagttactgaagaagtacgtcaccttgctcaagacgagcaagaccgaaggtcccagcacagggagcttcatcaagagggcttgttcaacgacgatggatgaactcaagactcccgaaacggagtatcgtcccgggttgaagaggttgctggagactacccatctggagcttgacgggaagctgttcgtcaacacgcagcaggcccctacctggcgcgccaactgtcggcgtttcgacaccggggggtccctggaccgacgaggcagatgcgcttgcagtagggggttacaagcgttcgcgagggagagagagagactgtctgccagcccgttctcccgcgcggccaccttctcgtacgagagccctggtccttccttttatagacaggtttcggcgccctgttcatgtgatgttgtggccgtcgaaggagtgcttgagccctatggaaagtccgagccctggggtcgggtgaggcggagtccatcatccggcgccgaggttgagcccgagccctggggtcgggcgaggcggagcttcctatggcgcccgaggctggacttagctgctgtcagcctcactctgtcgagtggcacagcagtcggagcagggcaggcggcgctgttttcctgtcaggtcggtctgtggagcggcaaagtgactgcggtcacttcggccctgttgactgaggagcgcgcgttaggacaagcgatccggctaaggttgcttctcggcgaagcctgcccgagctgggcctcgggcgagtcgaagcttagtgctgatgggggttaccagctgagatttaggagtcttgtgggtacccctaattatggtccccgacagtag

SEQ ID NO: 14804 - DNA, 420 bp, Zea mays
  Peptide Sequence Number=SeqID_58179
atgaggaaaaaacacggccccgtgccaaaaacgcatacatgttcaggccccgacagccacaatgaacaagacaccggcactcaaggtgccattacaaacgaaactccggttctgtctccgcaggacaggcggcacctttggcaggcgaagcaggcgacgcttcacctccgccataatgaccgcgtcaaaaaagggaccgggaaaggggatattccgaaagggatccttctccgcgaaggaagcgggctccgagcccccctactgatcagaggttcgaaggctggcccctcggaagggttcaacagtcgcctcagagcactcgggctccgcgcccattactggtcagaggttcgaaggctggccccacggaagggttcaaatggccgcctcaggccactcgggctccgcgcccactactga

SEQ ID NO: 14805 - DNA, 1452 bp, Zea mays
  Peptide Sequence Number=SeqID_58180
atgcaggcggtatgcaaccgcaccaagggggcgcaccctttcagcttcgacgcgtctagcatggaggcccaggcccacacgtcatgtaaccggcgcgccggttactacgtgcaagaaaactgcaccgccacttgcgccagtaccacgcctcctcgactgcggaaccagtgccgcgactcgaggcgaccctgcgcacggcccaacagtgccaaccgagcacatcggtcacgggtcagtcagccgcgggagaaggcgcgacggtcgatatggccagaaatgggccgcagtaatggtggtggcaggcgggcggaagcagcggtcaagctggcccctcggaagggttcaacagtcgcctcagagcactcgggctccgcgcccattactggtcagaggttcgaaggctggcccctcggaagggttcaaacgaccgcctcaggccactcgggctccgcgcccactactgatcaggggttcgtaagactggcccccgaagggttcgacagccgcctcagacgcagagcgagggatgacactgggtatgttcgatacataaccaaggctcgggctacgctcccgagctcactggagacaccatgttcggcgcccttcgagggcaacatggcgctttccccctcctccttgcggaaaggcgacacatgggcgctcgggggctgctctcgcaaactcggctccggccaaaccgttgacagcgtcaacataccagcccaagaacgtgggactcgactgtgcacccgggctacggccaggctcggcccccggactcggcctcggctccggaagacgacgaactccgcctcgcccgaccctagggctcggactcagcctcggccctcggaagacgacgaactccgcctcgcccgaccccagggctcggactcagcctcggctccggaagacgacagactccgcttcgccctgaccccagggctcggactcagcctcggtcccgggaagacgacggactccgcctctcccgcacgcaaggctcggattcagccctggcttcagacgacggtctccgcctcgcccgacccggggctcggactcgacctcgacctcggaggagcctccgccttgcctgacccagggctcggaccgaccacgtcacagggggccatcattaccctacccctagctagctcaggctatagggaacaagaccggtgtcccatctggcgcgccccgaaatgcttagcagaccaacatagaagactgtcacaaaatggaagtggacttgtgttcatgtacctctcggcttgcctcatgagccagattggtgccctctcaacctttttccctctgattgcgctcaccagcagtggctcctccaccgtctcgggcgaggcctcctccattaccgtctctgaaccgtaccatcacgtcaaaagagcagctaaattaacttctcagcccaagcctcgcaacctatga

SEQ ID NO: 14806 - DNA, 744 bp, Zea mays
  Peptide Sequence Number=SeqID_58181
atggatttttatttgtggcaaatcctaatgttcaattacttttcgagtttgatagatacaatttccaagcttgggttgcagatatcatctgtcctgcttcatatgactattgtgattgataaaatcttggagaaaggtaccgttgagtacttaatagtgcacacggccatattggactactttacaattgcagataagacctcagcctcggatgctatttgtcaacttatcccccttcttactcaaggggcattaatcatagatggagatgaacctacaaacgctccagaactaccaaagaaagcaaaagctaagaagaaaaggtcgaaagagccacttattgttcggatcatgcagacaagggaaggattaaaactaggaattagttgcctcaagtatggcagtgcaaagatgatcgcaaagattgttgtggtttgtaatgatgcaatcattggccactctgagcatcaatatgttgctacagggatgcccacaaaagctgctctgaagggtgctgttatagttaagttgtttttctactgtgaaattatcttccatgtagctttggagcaggaaatgtatatctgcaaaagagacggtaatggaggaggcctcgcccgagacggtggaggagccactgctgtgcctcaagattctgaaggtttccgtcaacctgacatgcaccacggaatggaggttcgccttggtttgtccaagggacctatctgccctagcttcagttga

SEQ ID NO: 14807 - DNA, 315 bp, Zea mays
  Peptide Sequence Number=SeqID_58182
atggggatgctgaaaaacactgttgccctaatccaatgtgttgttaagcatcaaagcatttccgttctctcactgtttggattcgctcggccacgtgtcagtgagttccaacagtcaccgatcaaaaaggatgcaaataagatggttacaattgaaatcaggaatgaagacgtcgttggcgagtttagacctcaatggtggcctaaagccctgaagagctttgcaagtacgatacaacatttcctgaagatccttggaactagaggtacacatgttgttttgatcttactgaaggaactagcagcgagtcactga

SEQ ID NO: 14808 - DNA, 864 bp, Zea mays
  Peptide Sequence Number=SeqID_58183
atgaccaaatttgttgccatgactcaaaagcgtgattttaagtatgaatcgacaagaaattgcgcaacacgaggatgcccagctgattgcccgatttggttgtcctctccctctgtagcctgttccctctccgcgccatacggccatacccagagcaaccgcccgcgcccgccccgtgtggggctgcgcggcgcgcgggtcgccgccgcggcgcaggggccgtcctgcctctacgtggggccaatcgagaccgccagccaggagaagctcgaggcgctctaccaccaggccagggattcttactacagtggtcagccattgatcatcgatgacatgttcgacaaagtcgagcttaagctccggctttatggctccaaatccgtcgtcaaatacccccgttgtagcctcataaggcattcaacctacgccgacgccgaggaggaccaatcgatgttcatggcgttatcaagcatctggatgctgctcctcctgtttggtacctctgcagttcttgttcctactctgtacactctgagcatcgcgttcggggatgtgtttggggcaaggcaccttctgtacggtgaaaagtccctcgatgcggtaacaagagttaacgacttggctttggttggattggggtatctggttggttatcccatcgcatctgcgtccgttggcgcgctgcaaggcttattgtcaaacaatttggttgccctaaaagggtcctgcccaaattgtggcgagcaggtatttgcatttgtcaagattgaaaaaaccgtgagagcacctcatcgagcagaatgccatgtctgtcagtgccctttggagtaccgcacgaaaattgagtacaatgacatctgctga

SEQ ID NO: 14809 - DNA, 399 bp, Zea mays
  Peptide Sequence Number=SeqID_58184
atggagcccaaatgtggctttttgcaaataggcccaaaacttagggtttcatttgcaaatctccaaatatgtgaaccatatgacctaagccaggcccaggcctcggtcatcccggtgtcaacacgaggcatcggcgtcagtgcactcccctcggtgagggccgcaccgactgagggcctgagggtggagctcaaccgtcggcgtgcggaagaggacgctccagtctctctggagaggtctaatgacctacagacagaactcaactgtaggcgtgcgggcgaggatgcccgtgtctctctggagagggcgcgtgagcaccgacaaaacgtcgagggtcgcaacctcgactacgacttcgttgcggttgcaccacagactccaacgggcgcccagatctag

SEQ ID NO: 14810 - DNA, 612 bp, Zea mays
  Peptide Sequence Number=SeqID_58185
atggctctcagcaacaagaatatgctgagggtggtgccggcggtccgcccccagctgctgccaagacagccagcggcttcccatgccctagtcggggatccggtggcagcgacaccagcgtcgggtggcgtagcagcgacggaggaggtcccagctgggggatccgcgcccactcccgaccctgggggtgacgtaggaggtgcgtccagctccaaccccccgcttgctccggaggagatggaggtggtgttcgggcggcgactccagtcgggtgctgaacaagaagcggcgccagtccccctccctcgcatgttgtcccgtgctcaccaggtccttagtgacactgggacagtaatcttgcgggagtgggaggtgcttgaggctgagcaccagcgcctcagtgactggtgcacccaactagaggagcgcaccaggacgacgtcccgtcaattcatctccgagcggtcccaacttgagtgggaccacaaggagtacaagagggacctccagagggtgtgcgccagggagctagaggcatctcggtgggagaagaaggtgaccaagagggaggaggccgtgacccagcgggaggccctcacaatagagtactag

SEQ ID NO: 14811 - DNA, 543 bp, Zea mays
  Peptide Sequence Number=SeqID_58186
atgttcgtaggtgtggccccctgtacttccctctttcgctacttcttcgtgctggtcaagtccgggaagactagggaccacatcggtgcctactacttccagacgaggccagatccagccgtcgtctacatccccacctttggcggtgcgaggtgggaaaattggcgcagcgactgggtgattgccagcgccgaggccaacgaccgcctcgtcctgccgagcgatggccagcgctcgaccgcaagcctgaggacggcgatcttggccacgctgccgacccttgacgacagcggcgtggcagttcgccagaccggaggccaggacccccaccgcgggatccggatctccgatgcaccagttggaggtccccagcccgccggtgtagctcgcagcgccaaccctgccgtggcccccagccccttggacaagggcaaaggggctacaagcggtgcctctaccccatgtagctccagggggtcggaggaggagaggcgacacaggctgcgtcgcgctgatgagtcgctcgcttcggagcccccatag

SEQ ID NO: 14812 - DNA, 116 bp, Zea mays
  Peptide Sequence Number=SeqID_58187
atacttcggtacaggtggatatgagaattgatggttttgattatgattatggtgctggcgaagatgaagctgtggaaggagacttccaggagttccaagattacgacgagttctag

SEQ ID NO: 14813 - DNA, 117 bp, Zea mays
  Peptide Sequence Number=SeqID_58188
atgagggtggaatggggtggcaatgagattgatggttctggttatgattatggtgctggcgaagatgaagctgtggaaggagacttccaggagttccaagattacgacgagttctag

SEQ ID NO: 14814 - DNA, 972 bp, Zea mays
  Peptide Sequence Number=SeqID_58189
atgcctgccgaggggtctggttcccatcggcatacacctgccgggaacgtcgccagcgatccatcagcagctaccacagatgctccttcctcgtcggccgccatgtccgccggcgggtctggtccccatcagcatacatctgctgggaatgttaccggcgatctgccaatggctactgcggccccattagtgtcggcgccaagcccaccatcaacggcggccaagggggttccagctgcatctgcccccaccgtgcaggatgacgctggtgttgtggcaacacctttgggttcccatgttccagccgggggtccagaagcggttgcgcagccaacagctgttgcagaccgaacaacggtgataccgtcggacacaccaccggtggtaggagtggggggcacgtccagctctgccccccagccaactccagaggctccagaggttattcttgggcatccactctggtctggtgtcgagcctggagcgacactgactcctctccctcaggtgctgactcacgctcaccaggccctccaggaaaccgaggcggctatccgacgagagtggaaggcgctcgagaccgagcaccagcgccttggcaactggtgctcccaactggagaggcgcactaaggcgacattctgccaattcgcctcggagcgggccgagcttgagcaggagcgtgagaacttcaaggaggacatctggaaggtgtctgaccaagaggaggaggaactctccgacaaggccagtggtattgctcgcattgagggaaacctcaaggcgagggaagcctccctagcgaaacgaacaactgacctcacttggcaggaggaggacctcgccttcagggaggagatgtgggcaaggcagaacaagctgctggatgagcttgagctcgaggtagaggagaaagtgaagtgtctagaagggaaagtgcgggcgctggaggggcaagtccgccagttctag

SEQ ID NO: 14815 - DNA, 648 bp, Zea mays
  Peptide Sequence Number=SeqID_58190
atgaagggtccttgcacaccaacatgctgtacccttctctgtgcttccttcttctgtttcttgttagctggctctgaggacgagccacctatgatcgggagcaccagcttcgggtccgaagcagctccagcttggtcgttgaacgaagccatcagctcaaaaagtggaagtgagttcaccggaggtggctatgagatcgatggttttggttattactatggtgctggtaagtggtattctttccgtttggaaagggggatttcgccgctctacgacaatcctgggctgcggtcagcggtcctggcccgtctgccaaccctcgatgagagtggtgtggcagttcgccaaaccggtggtcgggatccccaccgggggatccacattcccggtgcaccgggcggcggcccccaaccagctgatgtggcccccagagtttcttctgtggcccccagtccctcggacaagggcaaggcgcccgcaagtagctcctccactccggatgccaccgggaggtcggaggaagtaaggcggcaccgactatgccgcgccgacggatcccttgttggggatctccctcgagattcgggctctccccagaagcgtcagaagacagctggtggggctaaggagcccgaacctcggttctag

SEQ ID NO: 14816 - DNA, 312 bp, Zea mays
  Peptide Sequence Number=SeqID_58191
atggctgggcaacaccagatctggaagcacaatttacatgatggaataaccaaagttattagcggtgatggctatgagaggaatctgaatggctcaagatcgaaactcggtgaatacactcgacggcagccccttggtgaagatgtctgcgaactgcgacatggtcgggatgctgagaacgcgaacatcgtcggcgacgacacgctcgcggacgaagtgaaggtcgatctccacgtgcttcgtgcgttgatgctgcacgggattggtggagaggtagaccgcgccgacattgtcgcagtagacaaggattga

SEQ ID NO: 14817 - DNA, 2844 bp, Zea mays
  Peptide Sequence Number=SeqID_58192
atgaccaggcgtccttgtgggctgtggctgtacaccttgtccatggtggacgagagttccgccaggatcctgtcgacggcagccttgaagcggagagcggacgcgagcggcgctcacactcagagtcacagtcaccaacaaactgccagcgcaccaccaacaaaccctaattattccattccccaccggcgaccgcatctagcggtccagtgtagcccaagcggcagccggcaggcgcccagcagcagcattgcaggttgcagcaaagcgagcgagagtgagacagagctcacaagcctaacaccctctctccttcacctcccacatgcgctgatgcgccgcaagaagcacttggaccggggtggcggcggacgcggcggtggcacggagctcttcatctgcttcacctcccggccctccgccgcctccgccgctcctgtcgccggcggcagcgcgcagtcttccctccgcccctccagctcctccaagctcctcagccccggccgcggtagtgccagcgcaagcggagctgagacagtgccggccccccctctgcacccctcactcagccgccgcctccgcaacagcggcagcctcaagggcggccagtccccaatgttcccgtccgggtccaccggcggtggccgccgcagccggggtggattcgaacctgccgagccgtcctctcccaaggtcacctgcatcggccaagtccgcgtcaagggcggtaagcgcaagcccaagcacacctcagccgccactctgcactcctgctccagacgcggcggagtcgggagcgcagaggtcagctttcgccgcgccggcgacgaccgggacggaccccagagcaagaaccagggctgggtgtaccagatcccggtcaacatctgcgaggcactcaagacatttggctcctgcggtggccgctcgctctgctcgccgtctcggcatggcggagccggcgagcggggcgcactccccaccgatgcaaactgtggcaagaagcggcggcagggcgctcctgctgggggtagctggctgtgcggtgctgccgtggcgaggtgccttctggcgatccaggaggaggacgacgacgaggtcggcaacggcaagggagctgcagttgtgccggcagaagagatgaggacatcggaagtggggctcgtcatggaagggtgggatgtcgaggaggagaaggctgtgatgatgggggatgtggaggtggagaagaaagatgagatcttggtagtggggaaggaagaagaggggagagtaagtgtctgcatccccccgaggaatgcactgctgctaatgcgctgccggtcagacccagttcgcatggctgctcttgccacccgcttctgggggtctccagctgcagctaccgtggagcaggtggacaatgaggtggctgggtgcctcaacgacaatgaggaagaagaagaaaaggaagaggaggctgaggctgagccactggagtgcaaagatggagctcgctgttcagctgtttctgtcaaagacttgaaatgtgaagagtgtggttctgatgaaaatgatggcgctgaagcaggggagataaatcaagaaaaggcagaagctgaagagagttctaaatgtggagatctagtggaagaaaaggagggtgcatcatgcagagtaggggtggaggaagcacaaattgttcggaaagatgccgagttggaggttcctttgggagaagttacagagatggaaaaccaagggccggacatggtggagttggtggtcagtgaggaagaagttccaggacatgagaaagttgacgaagagatgatggggaggagatcaatcaacagctattctccctcggcaactctgaaagaggaccgcaccaaattgcgacggttgagtagcaggatgtgtgttagcactagtagcagggcctcatcatccagtgatagggttggcaggcgacacagcttctcagctgagatggaggcacggcggtctagcttctcgagcttgaaggattcaaggagagctagtttctccattgatagagatggccggaggtggagcttctcaattgaacaggagcatcttgttgcgcagcctaaggtgctgatggcatccagaaaggggaagaagacgtcttctgaggcagagtcagaaaaggattgtgatgttgttgctccaaacagtgcagaggaaggtcaagaatcctatgacgatggaaaggaagaagacactactgagaatgtagcggaagaaggaaaaacaaagtctgcggaagcgaaccaggaagtagagaaagtagaaactagagcagaagagtgtgaaggtgggacagtaccagtgatacataggaggaagaagagtggtgagttaccagattgcctcctgttgatgatgtatgagccgaagctctccatggaggtctccaaggagacatgggtctgcagcaccgatttcgtccattggaagtcttaccagggcaagaataaccgcaatcactggcaacagaaggcttctgctgctggaacagtggagactaaggaaaaggagaatgctgaaggcaccaccattgcgaatgatgtacaagagagcaaagatccatcaacggtgaactcagctgtgcccatgccatgtccagttgtccagaagacaccaccactcaaaccagctaccacagaacagaagctgaagctggagttgccgccagttaccaatgcggcagcctatgctccatttgttctgaaaaggtgcaagtcagagccgatgcgatcatcggcgcgtttggcacccgatgcttgcttctggaaggaccgccatcggccgctgaatgcggctggagttgggttctga

SEQ ID NO: 14818 - DNA, 654 bp, Zea mays
  Peptide Sequence Number=SeqID_58193
atggaagtaggccccgagcccccactactgatcagaggttcgaaggttggcccctcagaagggttcgacagccgcctcagagcactcgggctccgcacccactactggtcagaggttcgaaggctggcccctcggaagggttcgacagccgcctcaggccactcgggctccgcgcccactactgatcaggggttcgaaggctggccccccgaagggttcgacagccgcctcagaacacgcagagcgagggatgactctaggtacgtccgatacatggccgaggctcgggctacgctcctgaggtcaaagctccgtccactcaagggacacgatcttgcctcgcccgagcccagcctcgggcaggaacagaagacccaggaaaacagcgccacctgccctgctccgactgctgtgccacccgctagggtgaggctgacagcagccgagtctagccttaggcgccatagaaagctccgccttgctcgaccccggggctcggcccctgcctcgacctcggaagacggtctccgcctcgcccaaccccagggctcggactcaacctcgacctcggaaaatggtctccgcctcgcccgaccccaggactcggactcagcctcgacctcggaagacggtctccgcctcgcccgaccctag

SEQ ID NO: 14819 - DNA, 273 bp, Zea mays
  Peptide Sequence Number=SeqID_58194
atgaagctgccaccctcctcaacctgcacacccagcgaggccaacggtcccaagtcgtcggtctcctctggcacctctgctcgtcctccacaccagcagcacaaccgccctccctcccagcattccgagggcggttacagtcatggcggccactctggacagcgtggcaagaaaggcaagcgcggtggcaaagcctacgaccataccagcagcggcatcatgggtcatgcgccctcgtccaactccgtcggctacaactactacaacccttag

SEQ ID NO: 14820 - DNA, 393 bp, Zea mays
  Peptide Sequence Number=SeqID_58195
atgcttcgttatcggttgcctgacgacatggattacatggggtacactaaacatgtgttccaatggaatgcaaagaagcgggtgaaggatgtaatatactatgcttacaaaggctttcagaaagcgtcggcgcatcacatgcaatgtcggggcatcgatcctaaccacaacttcgatggcgatgactacctccaaaaagctaaacgattggaagctacgagtggccagaagcctagcgacattgaggtgtttatggcaggccagaaagaaccagatcctagtaaccccgagcagatgtgcaaccagacggccatggatcggctgatagggcctgaggatcgtggagattacatgcgaagaaacataaatggtccatatggtttaggatcttag

SEQ ID NO: 14821 - DNA, 717 bp, Zea mays
  Peptide Sequence Number=SeqID_58196
atgccggggaaggcgaactgttgctgcccagctaggatgcaacatttcgtcctctgtcctcgctttcgtggcgaggacgggagtgaggacctgccggtgcgctttggagcggcctgcgcttgctggtgcggcgttggtggacaggcggacgccgccgtcagtgctgacgtggtggcagctggagaaagcttctccgccgtcgaggccgtcagcgccgcctacggaccgacctccggctctttggctttaatgtctggttcgcgtcccttgagtggggacgcgaacgagagccttccggtggctgcgtccgtcctgggaccatggctgctgctgcaaaggtcgctcgcgagtcgcctggagcttgtcgccccgcaggctctctggtgtggaggttgttcatacccgcgagggcggaaccggagttccgtttgtaatggcaccttgagtgccggtgtttgttcattatggctgtcggggcctgaacatgattctgttatcgatatagtcgagaaggcccgaaaaatcgttttggcagaagagtttccgagcattaagacttgttcggtcagcggaatcgcttatccgagcgtgagctacttatcgcagaaggtgatgagtgaggtatccgtatcccggaggcgtaggagtccctcggctcggtcggccttgtctgcatacgtgtactccgtcgttttcaggatcccactttcgaagtag

SEQ ID NO: 14822 - DNA, 699 bp, Zea mays
  Peptide Sequence Number=SeqID_58197
atgttggcgcgcaagccgccgcagaagatgacgacggcgcggaggagccgcgccgccgaagtgcacaacctgtcggagcggaggagacgagacaggataaacgagaagatgagagccctgcaagagctcatacctcactgcaacaagacggacaaggcgtcaatgcttgacgaggcgatcgagtacctcaagtcgctgcagctgcaagtgcagatgatgtggatgggcagcgccggcatcgcggcgccgccggcggtgatgttccccggcgtacaccagtacctgcctcggatgggcgtcgggatgggcgcggcagcggcggcggcgctgccgtccatgccgcggctgccgttcatggccccgcaaccggtggtgcccagcgcgccggtgagcgtgggcccggtgccggcctaccggggccacatgcccgcggtgggcatcacggagccgtacgggcactacatcggcgtcaaccacctgcagccggcgccgccgccaccgcaggtccagtctgggcagcactacgcgcagggcgtgagctactacccgccgccgctgggggcgacggcgaaggccgtgcagcaggctgcagagcttcaccacgtgccggggcccggcggcagcatcatgcccgccggcgccgcacccggagtgctgctcccggagagcgcgcaaggcagagggccagatggagggtag

SEQ ID NO: 14823 - DNA, 201 bp, Zea mays
  Peptide Sequence Number=SeqID_58198
atgacgtctcctgtccaggatcttgcttgcaccacacaaaagcctctgtttgaccccagatggagcaagcgctctgttccaacaagaaaaagagataggacgcgggaatacgataaatccgcaggccccacaacagggtacacggatcggggggaaagcagggcatgtgaacagtgggggtgcaagaacataacacgctaa

SEQ ID NO: 14824 - DNA, 827 bp, Zea mays
  Peptide Sequence Number=SeqID_58199
atggcgctgatcaaggcgcacaagcggtgcggcaaccactggtcgaccatcgccacgttcctgcccgggcgttccgagaacgccgtgaagaaccactggaacgccaccaagcggagcctcaaggccaagcgccggctgaagaagaagagcaacgcgcagcaggtgccggccgggcagtggtccgtcctggaggagtacatccgcagcctgtaccctgacctcgccgacggcgccggcgccgaccagaccccgccggcggccgaggactcccccccgtcgtcctacaacctcgggtcgtactcgtacggcgaggtgatcagcagcccagcgtccgccgccgcgccgcccggcagctttgaccagatgaccgccatggggctgtacctgggcgcgtcgtcgtcgtcgcccgcgccggccgagctgcaggggggcatgagctccgacatcgtggcgccgttcctgcacctggacctcaacgcctactacggcggcgcgccggcggcgacgatgcggcttatggctccgatggggggaatggcggcgcctgtgccgcagatgatggagcacgatcactaccagcaccagcaggcttcctacgccaccgccaaccagctgctcacgtaccccttcatcgacaacagcgtcatgtggcagcaggcgccgtacgccgcccatggcagcgccgcctacggcggtggcgccgacgcggcaggtgccggcccgagcaacgtcgtcgccgttccggcggacgacgtcgacgtcgtccagatggcctccagggagttcctgacgccgtcggaggacgaggtcaccctggacctggccag

SEQ ID NO: 14825 - DNA, 735 bp, Zea mays
  Peptide Sequence Number=SeqID_58200
atgaccaccagcctcatggtggagagaagcgagccgggctacggcctcccccctgccctcatcttcaaggatgttcatcatcctcgctggggtggaaggcaagccgagttggggtcctgctttccgcatgggttggtgactcgcttcttcctccagcattttggggagaaggatgttcaccagccttgtggaggaggcgaacttcggctacgcggggtcggccagctgcgggcgccgtcagctgccgcgtgcctggctccttggcttggatggctttggcgccacctccagtgccacctgccaccgccaagcagggcgcagttgttcgtccaccgcacgggcgacggtcgcgctgagggagggagcaaggacctcttcgtgcgcggtgaggcggtcgccgtcgccggtaagccactggtgtggaggtcgctgttgtcggtgctgaggtggtcgccgccgctgaccagcatacctgagaaagagtttggcggtggcccccaggagagtggtggagtgtttaggcccacggtacggaaccaggctgagcggctacacgggctccggaccaccccaggagacaaatgtccattctctagttctggaccccaggcttttgggtatggaaccaggctaagcggccacataggctccggaccaccccatggaacagggtcccgttctccaaagccggctcccaggctgtcgggccatcctgcttttgtagagaggtcctag

SEQ ID NO: 14826 - DNA, 309 bp, Zea mays
  Peptide Sequence Number=SeqID_58201
atgcccagcaaggttccaatgatgctgtcaaaaacattttttgttacatgcatcaaatcaatgctgtggcaaatttccatatccttccagtatgggagggtcaatcgtgaggatgttcctaaatccaagatcaatgctgaatggttagaaagagatatggtttccgtcggcgtggctaaggttgtaaaagacttgttttactttatgcgccgtgaagttcttcatcaacaagggctattctacaatacaaatggaaatttgcaacaattcccagaactaagtttgtacacgatatcacacagtgtttag

SEQ ID NO: 14827 - DNA, 411 bp, Zea mays
  Peptide Sequence Number=SeqID_58202
atgaagggcataagtcgtcgaccgagtgctgcatccatctgtggatgcaaatctaagtttcaagatgaaaattctcctccaatggatctcgagaagtctgttccaagagtggacccgttcgaaggtgttgatgttaccttgagggaaggcaagttggagttaatgagtagcgcttgccaagctggcacaaacgggtcttctcgcaagaatgtgttagagatagggaatgtcaccttagagaatgaccaccatgtggctggagctggcacaaatgaatggagggaaaaggaagaggagtccctggacgcaccactgaaaccatggaagataagcactgtagtagtggagtccatgagagaaccatcagttattgagtacctgagcaattcacaagtagcttgtggatgttag

SEQ ID NO: 14828 - DNA, 213 bp, Zea mays
  Peptide Sequence Number=SeqID_58203
atggcgctgaaatcatgggctttgagaggcggggggcaggggcacactgtgggtgcgggcgtgggagggggcaggcgggggcaccacaagggggagattgaaagtgcattcatcccttttgtgagttttggtgatttggataacaacacatttaaaggtccaacaggtttgctaagtgttgaacaggaaattcagtatgataaacatatttga

SEQ ID NO: 14829 - DNA, 450 bp, Zea mays
  Peptide Sequence Number=SeqID_58204
atgggcaagaacaacaagcgcaagcgtgagccgactcctccatcggaggagtttggtgactcggaatactcggaggaggagttctcctccgagtccgaggggtctccggctcccgtctctcccccggcgtcgtccgatgactcggacgactcccaggggatagccgcggaggtctggacgtacatctgggccgtcgagcgcgccgggctcgaaggctcggatgagtcggagtgctcctcggatgaggaggactcggacggcggcgacgagggtgaagacgacgacgacgacgacgacgacgacggcggcggtggcggcagtggcagtggcaggggcggcggcgacggcagcagggacagcaccaagggcgacagcaggggcagcaccaagggcagcagcaggggcagcaccaagggcggcggcggcggcaggggcagggccagtggctag

SEQ ID NO: 14830 - DNA, 123 bp, Zea mays
  Peptide Sequence Number=SeqID_58205
atggggctcggtgtatgcggctcgctctgccaaggttgcctttggtgcaatttatgctcacgtaaagaaggtgtcgaggcgaatctccaggagttccaggacttcgacgagttcgaggattag

SEQ ID NO: 14831 - DNA, 474 bp, Zea mays
  Peptide Sequence Number=SeqID_58206
atgaccggtacgggccatgccagggatgaacggcgagcgtgccgtgaccagggagatgatgtggcaaaagtgggtgggatgttttcgaaaataaaacttgatggtggatctgtcaaaggccttgatggattcaacatcggaaaagatgtacctctgccaggcttgatgaccgaggaccctttagctggtcacatgcctcgtcatgggatctactttagtaagcatttctgcaaaacagagtctttgattattgaaaagccttaccttgactcccttaaccagcatacccttgagagtcttttctttagtcgggtgaggaagcaacaaatttttgttgcttttgctctaaggtgtttatgtaatcgcttccgtatttctatatctccgatgttctgtaatgtctgcaagacgggtaaaacgctcttgggaaaggagaaggggtgctcaagttctgacaaattatcaatcgactga

SEQ ID NO: 14832 - DNA, 1875 bp, Zea mays
  Peptide Sequence Number=SeqID_58207
atgaagatgatgggtgacactgcaagctcgcataagctgggcgatctggtggcggaggcatggccggcggcgactgctgtcacgcggttgggaaaggaaaggaggtggcgcaagacgggcgcggtgctcgtcgccgccggcctggtaacgctgcccttcctcgtgttctttaccagcgggcaggagagcttgtcacgagcttgggagagcgctgccgccaagctgaccatgatggctggagcaggttccctggaagcctctgatgccaggacaacgaccggcggtggcgcaaccaaggtcggcgccgacgagctcctcggcgggctgctggtgcgcggcggcttcgaccgcggctcgtgcctgagccggttcgaatccgcgcagtactacaagcactcaccttacgcgccgtccccgtacctcctgcgcaagctgcgcgcctacgaggcgcggcacaagaggtgcggccccggcacgccgctctacgccaagtccgtggagcagatccggtccggcggcggaggcggcggcggtgcggagtgcaactacctcgtctggctcccctacaacggcctcggcaaccgcatgctgtccctggtcagcaccttcctctacgcgctcctctccgaccgcgtcatgctcgtccacttccccgccgacttcaccgacctgttctgcgagccattcccggacgccacgtgggtgctcccgccggacttccccgtcgccaacctgtccgacctcgggatgaaccccgagcagtcgtacaggaacctcctcgccagcaagaagatcgcgaacgacccgacggtgcagtcgtccgtaccaccgtgggtgtttctgaacctgtgccacgagcaggatatagacaagctgttctactgcagcgacgaccagctcgcgctcgccaaggtgagctggctgctgctgttcagcgacatgtacttcgtgccgtcgctgtactcgatgggggagttccacggcgagcttcaccggctcttcccggcgatggagagcgtgtgccatctcctctcccgctacctgttccaccctacgaactccgtgtggggcttggtcgcgaggtactacaactcgtacctagcccgggcggaccagaggatcggcatacagatcaggatcttcgagtacttcgccaggatctcggcggacgacatgtatagccagatccttgcgtgctcccggcaggagcacatactgccggaaaccgaagatgacaacctcacgacgacggaggcggcggcggcggccgggaacaccacgtccacggccatcttgatcgcgtctctgtacccggactactacgagatgctcaggtcgcggtattacgagcaccctgccaagggcggcgtaagggtcagcgtgttccagcctacccacgagaaggtgcagtggggaatcgcgcagtggggagaagaggagttggatctgaaatgcgacacggcgtggtggggaagaggaagaggaatcgcgtcgcgcagtggggaagaggaagactggaagagcagtcgtgcagacgtaccgtgttcctcgttcccgttcctcgttcccaacgttccgggaaccttgtcactaaggatcttcctgctcagcttctccgaggtgctggtcacgtcggggacctccacgttcgggtacatgagcggcagcctcgccggcatccgcccgacgatgctgtactccgcgcgtcagcacacggtccccgacccgccgtgcgtgcggatggtgaccatggagccgtgctcgcacaggccggccagcatggagtgccaggcgaaggccgtggcaaaggaggatctggcccagcacgtcatggcttgcgaagatgaaggggtgggaattaagctgtttgattag

SEQ ID NO: 14833 - DNA, 384 bp, Zea mays
  Peptide Sequence Number=SeqID_58208
atggattctcggtcggtattcgttggaaattggcctgtggttgactatgcatgcactccagaagaagtgcagcagcatttcaattcttgtggaactgttaacagagtgacaatcctgactgacaagtttgggcaaccaaaaggttttgcttatgtggaatttgttgaagttgaagctgttcaggaagctattaagttgaatgaatcagaattgcatggtcgccagctcaaggtggcaccgaagaggactaacgttcctgggatgaagcaaccccgcggtcgaggtttcaatccataccggccatatggttatagtccttatggttatggctatggctacgggagattccccagattccgccgcccgcgaagaccttatttttga

SEQ ID NO: 14834 - DNA, 174 bp, Zea mays
  Peptide Sequence Number=SeqID_58209
atgcagctccagacttgcgccgccaacgagccggtgctatcccccagccatcccgggtcgacaatggtacagagttcagaagcaacgttcaataggtgcacctttggagcacccatcaccaaaatgaaaatcaagccacagaatcgcaagctggacctagaatctttgggctga

SEQ ID NO: 14835 - DNA, 201 bp, Zea mays
  Peptide Sequence Number=SeqID_58210
atgaagattgaggctgaagatagcttcggcgagcctctgtgttattttgccaaaggtgtttttgccttgaggaccttcggtaaagaagacccccaacagtggctaacagaaaagcaggcagaaccagaagccagtgcgctcgcaaagcgatctgagctatcagctgtgcctaaaagaaagactcctgagtcctggtactga

SEQ ID NO: 14836 - DNA, 831 bp, Zea mays
  Peptide Sequence Number=SeqID_58211
atgtccggtggttcaccagacagctattgcgtgctgtccggtgtgcaccggacaggcactgaaggctgtctggtgcttgctctctcctcctcgccgctggcaatctccggtgaggtgcttcggaaagcactatctctcccacctcttgagctcaatccaattctgtgtgcaaatcttgtaactcaagtagtttctagtcaggatggtgtggacgaagaatgtctcatcgtcaggggaggagacgatgaggaccctcctcgccccttcaggcaggtcaaggggaagactatctatatcgagcagcaggagggcaagaagaagcgtcgtatggacagagccgctcgtgcagcacttgcagcggctatagagttcgtcgcctcgcatctcggcctcgctccactgctccctccacaccttacgccattgtgtctactccacctcccacttcaccagctcatatcgttccagagccatccaccacttccgctatacccaccacctccaccactccaccttccactgttccccctcctgctcccatttccgctccacccattcctccacctcgctttagggagcgtgacaagactgagcccgggtatgtcggttcagacacgtacccgtggagtcctggttgccagcttagagggaccctacgactacgcttctcttcagtaccaggactcaggagtctttcttttaggcacagctgatagctcagatcgctttgcgagcgcactggcttctggttctgcctgcttttctgttagccactgttgggggtcttctttaccgaaggtcctcaaggcaaaaacacctttggcaaaataa

SEQ ID NO: 14837 - DNA, 420 bp, Zea mays
  Peptide Sequence Number=SeqID_58212
atgggcatcacgctagcgcaggggcacaagagagcgcagaccacggcaaggcaggctaattgtggcactggattgctccgacgagaaatcgcgcgagcaacagagcatggatttaccgaattaaggggacaggcgggttgctcacccttgaggggaagcgctcgtgtcgcgaagcaacggcggaggcgcaaggactcgacggggcgacgacggcgggactccggctgcgcgaagactgctctagtgagcacggaccggacgaaacagagagtgagagggtgcaccgaagggtgtcccgagcagctgacagtaaagcggagctcaccgtggcactggacggggcatggacgcgacggtggccaacaaaacaggcagcagtcgacggcgggcggtggcggagctccctacacgcatgggtag

SEQ ID NO: 14838 - DNA, 660 bp, Zea mays
  Peptide Sequence Number=SeqID_58213
atgccgcacgcagccgagctcgccctgcgcgtccatctcctattgctccagctcccacgcacgctccgctctgttgccacgcgcgcccctgcccctgcttccatgactggccgcgagctccagctcggccgatcgcgctgctcccctacgcttgccgcggtgcctctctccctgcttgcgcgtgtagatgtgccctctgctcggtcctgcccaagctcccagcttcctgcgcgcgtgaagctctctgctcgccgtcgtttttcccctgcgcgctcagttcctgctcgccagcgcgccctctcggatcgctcagccttaatcgccatcacgtccgaggttttgatatgtcttcctgctcgccgtcaaacttgggttccctgctcagcctttagagctagcgcgtcgccgtggtgttaccgtctggccgtgattcactggtggtccacgtctccgcatgttcaaatcgtcaaccccatgcaccacctgcttgctaaatgggaaaccaacagttctctccctgctcctgtcgttcactatcaacttcagcatgttggtcatgctcgccgagtctccaagctggccatcaagttctgctttcgctcccgtgccgcacacactcatctttgcttgctggccgtgcacctcactccgctgttctga

SEQ ID NO: 14839 - DNA, 281 bp, Zea mays
  Peptide Sequence Number=SeqID_58214
actcagaacagcggagtgaggtgcacggccagcaagcaaagatgagtgtgtgcggcacgggagcgaaagcagaacttgatggccagcttggagactcggcgagcatgaccaacatgctgaagttgatagtgaacgacaggagcagggagagaactgttggtttcccatttagcaagcaggtggtgcatggggttgacgatttgaacatgcggagacgtggaccaccagtgaatcacggccagacggtaacaccacggcgacgcgctagctctaaaggctga

SEQ ID NO: 14840 - DNA, 132 bp, Zea mays
  Peptide Sequence Number=SeqID_58215
atgaactcttggtttccagagcaggcacagcagcaaccatttgttttccctcaatttcagtcgccgatgtctcagtggggattacatgctccgccacctccacctccacctcaggcgcttcaatttagttaa

SEQ ID NO: 14841 - DNA, 432 bp, Zea mays
  Peptide Sequence Number=SeqID_58216
atggcgaggacggacttcggtgcggcggtttcgacggtgagctccgaacgctcgtcggggatggcgaggggaggattgggcggcgattttggaggcatcgggtactggcgattggggaaatggaggaagagaggatgtgcagaggctcggataggagagcgtaggcatggacgtcgggtttctcggcgtcgtgggcgagtgccgcagcgcgtagagcggagagaaagcagttgggaagaggaacaggagagtttactactgagcaaagctttgaagatgcaacaagatgacgaagaccggaaaaacgtagtcattatcaagggattagaggataaaatcaaagagcttgaagactctttaaaggagaaagaaaaatgctatgtacagccgaagggtctctttccaaagcgcaaactcagaacaaaaggctaa

SEQ ID NO: 14842 - DNA, 675 bp, Zea mays
  Peptide Sequence Number=SeqID_58217
atggaggcggtgacagcagctcgagcttcagcaccgacctttccgccgaccaggagttggaaggatgggttacccgacccatcactcatgacgctgctcacgggtgtcacttccacgacgcgctcgacaccctactacgctaggcactcgaccggcgtacttggtccatcgagtatcgctgtgtggtcttccagcacagtcgcagggtttacccggaccgttgggaggcgacctgcttggtgcgccgtccggggaatagtctccagggactccgctgaggcggccatgcaagatgtcgcacgacgtgcgctttcgcactactgctcagtgctcggcggggtagccgatggtctcaacctgatgtactaccctcgtcgcccatctagcagcacaggaggcgtgattgtctcacccattggcgaggacaatcctaggttgagcaacacagtcaacctagccgttatgctaaacacagagctggaccatgcattagacgagctgagtagggctcgttctaagatcgcccagctgcgggctaagcgcacggagcatcatcacctggaggatggctcccccgctcccgtcgagactcagcacccgtaccgctcacctcggcgtggacaccagtcttatggcgaccccgactgtaggaccaagataaatttggaaccatag

SEQ ID NO: 14843 - DNA, 1695 bp, Zea mays
  Peptide Sequence Number=SeqID_58218
atggataatattgatgaggtgaccgacaaaagggtgatagctttgggagcaatagaaaaggacaagatcatggtagccagggcctacaacaagaaggcgctagaccacttcttggatgcgcaccgccgccagggcaggtgtgttggcggtggggcactgttaggcatcatcaaaatctgtgggtcagtgccagacagagtactggggaagcagctgcatgcccggtgcgtcaggtgtggacatgatcatggcgacatcagggtcggcacgtctcttgttgacatgtacatgaactggtacagtgttctaaacggcaggaaggtgtttgagggaatgctcaagaggaatgttgtcacctggacatcgttgctcactgggtacatccaggctggagtgttattggatgttatgtcactcttcttcaggatgcgtgctgagggggtctggcccaatccgttcacattttcgagtgttctctcagtggtggcgagccagggtatggttgatctcgggcatcacaccagggacatggtgtcgtggaacacattgatggcgggtcttgtgttgaacgggcgtgatcttgaagccctaaaactgttccatgattcacgatccagtattaccatgcttacagagtcaacatactcaacagtgataaaattatgtgcaaatcttaaacaccttggcctggcacgtcaactccacagtagtgttcttaaacgtggttttcattcgtatggcaatgtaatgacagccctcatggatgcctacagcaaagcaggtcaactggataaggctctggatatatttttgttgatgtcaggatctcagaatgttgtttcatggactgctatgattaatgggtgcattcagaacggtgatatacctcttgctgctgctctttttagcagaatgagagaagatggtgttgctccgaatgatttaacctactcgacaattctgacagtgtcagaggccagctttcctccccaaagtcatgcccaggtgatcaagaccaactatgagtgtacaccaattgttggaactgcacttatggtctcttactctaagctttgcggcactgaagaagctctttctatattcaaaatgattgaccagaaagatgttgtttcatggtctgcaatgttgacttgctatgcccaagctggtgattgcaatggtgccacaaatgcattcatcaagatgtccatgcatggtttgaagccaaatgagtttacaatctctagtgctattgatgcttgtgctagtccggcagctggagttgacctgggtaggcagttccatgctatttctatcaggcacagatgccattatgcactctgtgtgagcagtgcacttgttagtatgtatgcaagaaaaggaagcatcgagaatgctcagtgtgtctttgagaagcaaacagatagagatttggtgtcagggaactcaatgctatcagggtacgcacagcatggttacaaccaaaaggcccttgatgtatttcgacagatggaagttgagggcattgagatggatggtcttacattcctttctgtgattatgggatgcactcatgctggtcttgttgaagaaggcaagctggatgaaacaatgagccccatagaaggcatgccattcccagcaggtccaacaatatggcgcacattgctaggagcttgtaacacccggctttaa

SEQ ID NO: 14844 - DNA, 366 bp, Zea mays
  Peptide Sequence Number=SeqID_58219
atgggagattacctacacgtcgcgtcgcagaagaactccctgaccacggaagcaggcagtctgcggcggaaggaggtccgcggcgaggaattgccggggcccatgcgagcaaacccaagcagcgccacccaaggaagctttcccccactccaagggagcctctgggcaacacttctagggcgcggtcgacggcattcgacggttcacgcacggcggccggttcctttcgcggtggcgaaaaatgtgctggaattatcacgggggcatctgggggtgaaaatggcggtcccgacccccgggcctataaggctgaattggtttggtaatgggaacccggttctccgaaaatctcgccccgtcatttaa

SEQ ID NO: 14845 - DNA, 837 bp, Zea mays
  Peptide Sequence Number=SeqID_58220
gcagtccgcggcggaaggaggtccgcgacgaggaattgccggggcccaggcgagcaaacccgagcagcgccacccaaggaagctttcccccactccaagggagcctctgggcaacacttcgagggcgcggtcgacggcaatcgacggttcacgcacggtggccggttccttccgcggcggcgagaaatgcgctggagtatcacgggggcacctggtggtgagatggcggccccgacccccggtcatatagggctgactggttcggttattgggagcgcggtgcccggagatctcgcgccgtcagttgagctccagcagccggccatggcgctaccgaggctgacaaaacggccccgcgtgacagtgcaaccgaagagcgcacggcgcagagggaagtggaaagagaaggatgaagtgaggaagctaatggacactaaaaaggttaagaaagaagctggatgcagctggattcagatcaagaacaaagttcatttctttatagcttcagacaagtcgcatcctttatcagaacaaatatatgcaaagctcaggtcaatgacagctaagttaaagcaagaaggttattgtcctgatacaagctttgtgcttcatgatgtggcagaagaccagaaagaagctatgctggcaatgcacagtgagcgcctagtcctcgcatttggtttgatagctataccaccaggggcaccccttcacattttcaagaacctgcggggttccaccacttcaaatcaggggtctgctcttgtggcgatttctggtgaatggattttgaacaaaatggttgtgcattcaatactcagccagtgtcccccttga

SEQ ID NO: 14846 - DNA, 252 bp, Zea mays
  Peptide Sequence Number=SeqID_58221
atggatggcggcaacctcccccgccgcggtgagccttccgtctcgcagctcctgcaaggcctccagaaggggctggagattcttctgtctctcgcgtggagccccatagcgccagttgctgccggcggcggtcaccactcgttgagaaaacgacgggagcctcccgtcgtcgttccggagggactgggaaaggggatactccgaaagggatccttctctgtgaaggaagcgggccccgagccctcctactga

SEQ ID NO: 14847 - DNA, 225 bp, Zea mays
  Peptide Sequence Number=SeqID_58222
atgtccaaactggacaaaactttccccctccttatcctcccggtgctccctagccttcttaaccctggggttggaccgcacgagttcggattgagtgactgcccacacagtctcaagtggttgtacgtcaaaggagtacagaagatctacttccggaagttcgggctccggcccttcttccggggctacgggttccggatctgcggtccccgcttcttctattaa

SEQ ID NO: 14848 - DNA, 96 bp, Zea mays
  Peptide Sequence Number=SeqID_58223
atgtcaacgtcttcttactgcaccagctactacgatccgcaagccaagaagaagaagaaggatgggaagaagggaaacaacaatggggagaaggag

SEQ ID NO: 14849 - DNA, 369 bp, Zea mays
  Peptide Sequence Number=SeqID_58224
atgtccaaaccggacaaaactttccccctccttatcctcccggtgctccccagccttcttaaccctggggttggaccgcacgagttcggattgagtgactgcccacacagtctcaagtggttgtacgtcaaaggagtacagaatgtatatgttaatgcgggccatctctcactcataatgcaatattcccccataattcccggcctaggcagtggtagagagaataggtacttcatgcatcaagggaaggatggacttgccttcgtcgaagctttcttggcacagaagatctacttccggaagttcgggctccggcccttcttccggggctacgggtttcggatctgcggtccccgcttcttctattaa

SEQ ID NO: 14850 - DNA, 231 bp, Zea mays
  Peptide Sequence Number=SeqID_58225
atgggggtgctccatctgctgctgatcctaatgggtgtgctccatccgatgctgatcccaatggctgaggggctttcagccttagaggcggctactgcagagaacctggcccccaaggatggtgttgacgcttacccagcccccgagggtgttgccgagggtgactcggctcgggtgggaagtgcaggctactgcccagcccccgagggctttggtggacgggatggctag

SEQ ID NO: 14851 - DNA, 954 bp, Zea mays
  Peptide Sequence Number=SeqID_58226
atggagagtcatgatctccgggtagaaagggaatcacggcttgtggagacattttggtttacaggtggcaatgagactgatggtttggttatgactatggtactgcactatgtgatgatgtccatgttatgtaactgctgtgtatgtgaattgctgatcttggcacgtacatggttcgcattcggtttgccttctaaaaccgggtgtgacataaggtctgctggaggagacccagacgacggaggtggcgacgacagctcgagccacgacatcgacttctctgctgaccaggagccggaaggctgggttgctcgacccatcactcgcgacgctgctcgcgggtgtcacttccacgatgcgctcgacaccctgctacgtcgggcacttgaccggcgtacttggtccatcgagtatcgctgtgtggtctaccagcatagtcgcggggtctacccggaccgctgggaggcgacctgcttggtgcgccgcccggagaacagtctctggggtgctgagatctgctcggagcactattccatctctgagagggactcagctgaggcggccatgcaagatgctgcatggcgtgcgctttggcactactgctcggttctcgatggggtagctgacggtctcaacctgaagtactacccccgctgtccatctggtagcacaggaggcgtgattgtctcacctgttggtgaggacaatcctaggttgagcagcacagtcaacctagccgtcgtactaaacacggagctagaccatgcgctagacgagctgagtagggctcgtgctgagatcgccctgctgcgggctgagtgcgcggagcatcgtcacctggatgatggttcccccgctcccgtcaggactcagcacccgtaccgctcacctcggcgtggacaccagtcttatggcaaccccgactgcaagaccaagataaatttagagccatag

SEQ ID NO: 14852 - DNA, 234 bp, Zea mays
  Peptide Sequence Number=SeqID_58227
atggcgccgccgcctcggcaccggtcgccctcgccccgtgcgcgccgctcggccccgcctcggccccggccgcgccgccccgcgccgcccggcccccgtctcggccgcgctgccccgtgcccggcccccgcgcccggccgtgccgccccggccccggccgcccccgccccgcccgtgccccgcccgtgctccgtgctcgcccgcccgccccggcgtgccttgctcgtgtcgtga

SEQ ID NO: 14853 - DNA, 456 bp, Zea mays
  Peptide Sequence Number=SeqID_58228
atgaaggtaatagctgcctacctgcttgctgttctgggtggaaacacttccccgactgctgatgatgttaagagcattctggaatcagttggtgctgaagctgatgaagaaaaactagagttcctgctcacagaactcaaagacaaggacataacagaagtgattgcagctggaagggaaaggttatcctctgtgccttcaggtggtggtgcaattgacatgggagctccagcagctgtagctggcggtggcgcagcacctgctgaagaggcaaagaaggaagaaaaggttgaagagaaggaagagtctgatgaaaatttaaggatacgaaagtcaaactttggtcaaaaaacgggtattgaaaattttggaacaaaattgaaatccttgactacatatgaggaaggagatactactttggaaggtcaggatatgggtttcagcttgttcgattaa

SEQ ID NO: 14854 - DNA, 381 bp, Zea mays
  Peptide Sequence Number=SeqID_58229
atgaagccatggaaggagactttcaggagttccaagactacgacgagttctaggcgtgggttagcggtgacccccagtcggctgcctgtgaaggccgcggttatctacgtttcgttttcgcactttgatttattgccaataggccgggcttatgagggcggacctcaccgggctggcgtacacgcaaaagggagaaaaactcaacccctcagacttgctcctatggatagaacttacagagacgctccaagggttaggaagaggtactccagctgtggcaaggtggttacccctgggtcggcacatttccgtcaccttgaagggtccttcccagctaggggagagtttacgggacccttctcggttcagtactcgccatag

SEQ ID NO: 14855 - DNA, 348 bp, Zea mays
  Peptide Sequence Number=SeqID_58230
atgggccgtgacctcggcccaaacccggcccgatataacgggccgtgccggcccgacactaaattatttcgggccgtgccgtgcctgggccgtgcttttttttccgtgcttcgggccggcccatcaggcccggcccaaatgtacacctataccctggatgcacagcccgaacctccgggcgaggttcaagacctccacaagtacaaaccagacccctgggacgggtcccggacccctcaggaggggtccgggctacccacagttgggtcccgggattccaaggcaaagaatactcaggccttaatcaaggccaggcgggggtccggtgctgacatgtgtccggactga

SEQ ID NO: 14856 - DNA, 2265 bp, Zea mays
  Peptide Sequence Number=SeqID_58231
atgcggtggctcctcctcttggcgttcgccgccgcccccgccgccggcgagatggggtacgcgcattgcggctgcgacggcagcggcggcgctggcggtggaagcgggttctggagcctggacaacatcttcaagtggcagaaggtgagcgacctgctcatcgcggcggcctacttctccatcccgcttgagatcctctacttcgtcgcggggctccgccacctgctcccgttccggtgggtgctggtccagttcggcgccttcatcgtgctgtgcggcctcacccacctgctggcggccttcacctacgagccccacccgttcatggtcgtgctgctcctcactgccgccaagttcctcacggcgctcgtctccttcctcaccgccatcacgctgctcacgctcatcccgcaactgctgcgcgtcaaggtccgcgagagcctgctgtggatcaaggcccgcgagctggaccgcgaggtggttctcatgaagcggcaggaggaggcgagctggcacgtccgcatgctcacccaggagatccgccgctcgctggaccgccacaccgtgctctacaccacgctcatcgagctctccagggtgctcgcgctcgacaactgcgccgtctggatgccatccgaggacaagtccggaatgtgcctcacacacgagctccggcggggcagcgacgacggcgaggccgtagtgggcgctgacgacgcggacgtcctcgaggtcaagggcgccgacggggtcaagctgctgccgccgggctcggtacttggctccgccagcggcggcggcaaggaggggaccggcacggtggcggcgatccgaatgccgatgctcagggtcgccgacttcaagggtgggacgccccaggtgatcaaggcaagctacgccgtgctggttctggtgccgcccagcggcaggaagtgggcgccgcacgagctggagatcgtggaggtggtcgccgaccaggtggccgtggcgctctcgcacgcctcgctgctggaggagtcgcaggcgatgcgtgacaggctggccgagcagaaccgcgagctgctgcaggcgaggcgggacgctctcatggcgaacgaggccagggacgcgttccagcgcgtcatgagccagggaatgcggaggcccatccactccgtccagggactggtgtccgtggtgcaggaggaggagggactggcgtccgagcagaggctcgtcgtcgacgctgtggcgcggaccgcaaccgtcgtctcgacgctcatcaacgacgtcatggagatgtccgcggccaccagccaggagcgcttcccgctggagacgcggccgttccgcctgcgctccatggtgagggacgccgcctgcgtggccaggtgtctctgtgacctgagcgggcggtttggtttcgcggtgcacgtggagaacgtgctgccggaccttgtcatcggcgatgagcggaggatcttccacgtcctgctgcacatggtaggcaatctgatcggtcgggtcgacgagggggacgtcacgttccgggtgcgcgccgatgatgaggcgacggaggaccagaggtgggatccgtggaggccgagctactccggtgggcactcgtcggtcaggtttgtggtcggggtgaagaggcagcagaacgcaggcgactcgcttccgcggttcttgcggcggccaaggacccatgacgggttggatctcaggctcagcttcagcatgtgcaggaagcttgtgcagacgatgcaagggaacatctgggcagttctcgacggccaaggactcccggagagcatgaccctggtcctgaggttccagctccaaccatcgctggcgagctccaacctcctcggagggtcgtttgatcaggagcactactcatcattgccatctaaccaaatagccgggctgaaggttctgctcatcgatgacgacgagatcaacctggtggtggcccggaagctcctggagaggctaggctgcaccgtttcctcaggctcgggactcatggactcttcctctgcctgtgcctcgttccagctcgtcatggttaacctcgagatgtcagcgatagatcccctggatgctgcctcgaggatcaggcagcagtacaggagctcgcactggcccctggtgatggccatgacgtcggagcagaacgtgtgggagaagtgcgcgcagtccgggatcaacggcgtcctgaagaagccgcttgttctgctggaagtgaaagaagagctcgagcggatccttcagaacacatga

SEQ ID NO: 14857 - DNA, 183 bp, Zea mays
  Peptide Sequence Number=SeqID_58232
atggcgagactggggagcgggagggaggggagcgacatggatacatcaaggggctttctctctggcaccgtgggcaaattcaagacggtgttcgagaccaaatctactggtttactacttgaccaggtagaatcatccacggtgaaagttttgtggggctgggcgtgttcaagaacattctga

SEQ ID NO: 14858 - DNA, 891 bp, Zea mays
  Peptide Sequence Number=SeqID_58233
atgaccccacctctggcgatagtggcggcttcgaccctgccttctgcgcctggagctggtgcggggacctcagggttgggtggagaagccgatgaagcggatgatgaagacccccctaccagcacaagcccaccccagaccccagacctttccccttccgtccccggccggcgccaacgccactccagtgagctgagggcggagacggtcacggtgggcagaatgacacgccgcacgcctctccgccccgctccacaccagattgcgcgcacccacccatgggcgctcgccgcttcccaccacggcctcctgcccttcgcccccgctgccacgcctaccccgtcacgggggcacctgcgcttccgcgccgcgcgccctctgccccgccccgcccggagaccgtctaattcagcgttgttcgatggtctcgtagagttgtccgttgatgatttgttagattggtattctttcaaggcaatcaacgatgaaggcatgtccatgtatcagaggcccttcatgaagggcaagctgtacatccacttctcggtggagttcccggactcgttgagcctggagcagtgcaaggccctggaggctgttctcccgcccaagccagtatcacagtacactgacatggagctggacgagtgcgaagatacgatgccctatgacgtgaacatcaaagaggagatgcggaggcggcagcagcagcaccaggaggcctacgacgaggagatgatgtgccaggcggtgggcagagggtgcagtgcgcccagcagtaggcagcttgcggcaaatttgttgtttcgctttgggcgactattgagtttgcccgcttgtattggtctgatgatacttctgttacaagagtgcagtattactaaggattag

SEQ ID NO: 14859 - DNA, 1443 bp, Zea mays
  Peptide Sequence Number=SeqID_58234
atgtcgctcgatttcaagctcatccttgacgagctcaaccggcgattcgacgagctggaggttcgctgggaccggcgcttctcgccatctgtgtacctcgaccttccacccacactgctcagcgtccaccaatcctccgacgcatccgccagcgcgccgcccaccccgactgcggccgttggggccgtcgtcatcgccgacaactggggcgggtgcttcgatgacggcaagcagtactacgtagcgccatctgtcgtcgccgacaactggggcggactcttcgagggttgtgatgctggcggcgatatctcttcgaacctgctcgactccgaccccgacgaggcgttcgtcacctcccactcggacaaggcgctgctcgacaaccaccacgccggtgagctcatcgccaccggcatcgaatatggctcatacagctccgtccatggtagcggcggcgctgcgctgtctcacctcgcgcacagcaacaccaacttcgccatgcccaccacctgttcgacttgggggctcaccgagcatgctatggccaaggccgtgcaccgtcgcgcgctatggatgctccgacgcgagccacttccgcgcctacttcgtgccagccgcgacaacctggtggtggtgcgcttcggcttcggcgacatggagagcacgctcaaggggattcgcggcagcgacacgccgttcgtgatggacctagacgacgcagccaccgtggcgggcggcgtcgaggacacttacggcgaggaccgcgccaccgaggagcagctcgccacgcccttggacacgctcatgtgcgcccgcctcgaccctgtcaagtcgcacatcgggtgcctgctgctgcagcacctcaagctttcgcctaccttgattggtgccaaggtggtattcgaggaaatgcagcaaagcaccatcctcagggacgcgcacaccactatctgcaccacgcccgacccggcactcgacgcccacttcgccaacaagtggcggatgcgctgctcccacaacagcaccagtacggcggaagcggcattggagttcgatcccgacaactgcaccacctgcaacaccagttactaccaccacgtcgcacagccacgcggactgctgcgttccgacgcatcgctcctggaccaccgcttcactagggtctacgtgatgcaagttgccttcggcaggttcgacggacacttcttccacgacttcaccatcatcaagtcaaagacagacaacagcagcagctcgcccctcgagtgttcgaccaaatgtctcagcctcgatattggactattctctgaagctcgtgctgtgttaaatgcagcaagaccgcaagcaatgaagattgcaccaaacatgccacaacaccagacctgcattgctgtgatggaagaaggcatattatgtggaggccaacctgggacatttcactga

SEQ ID NO: 14860 - DNA, 651 bp, Zea mays
  Peptide Sequence Number=SeqID_58235
atggccaacggaggggccgccgctgccgctgccgctgctgctgccgcgacgggcgcggggtctccgtgcggcgcgtgcaagttcctgcgccggcggtgcgtgccggagtgcgtgttcgcgccctacttcagcagcgaccagggcgccgcgcgcttcgccgccatccacaaggtgttcggcgccagcaacgcctccaagctgctgtcccacctccccgtcgccgaccgctgcgaggccgtcgtcaccatcacctacgaggcgcaggccaggctccgggaccccgtctacggctgcgtcgcccagatcttcgccctccagcagcaggtcgccatcctgcaagcgcagctgatgcaggccaaggcgcagctggcgtgcggcgtccagggcgccgccgcgcactcgccggcgagccaccaccaccaccagtggccggacagcgccagcatcagcgccctgctccgccaggacgcggcgtgcagtgccaggaggaccggcgggcccctcgacgacttcttcactccggagctcgtggccgggttcagggacgacgtcgccgccgccgccgggcagcattgcgcaggcaaggtggatgccggagagctccagtacctggcccaggccatgatgaggagccccaactactccctgtag

SEQ ID NO: 14861 - DNA, 1380 bp, Zea mays
  Peptide Sequence Number=SeqID_58236
atggccgctaccaagatccttgacaggctcaaggtgggggcttcacctccagcgcccggcggcgcgctcccgctcaccttcttcgacgtgccgtggctcttcacgggccccgtggagcgcgtcttcttctacccctacgcgcacacggcggaccacttcgccgcccacctcctgccgtccctcgtctcctccctctccgccacgctgcgcgcgttctacccgctgctcggccgcgtccgcccgtgcccggacggcggcggcgggtacgaattcttctgctccgacggcggcgaggccgtcgagctcatcgtcgccgagagctccgacgacttcgacgagctctccgccggcgggccgagggacgtcgcccggctctacgcgctggtgccgcggctcccgtcgcccggggccgacggctccttcgccctcgcggcggcgcaggtcaccgtgttccccgcccgcggggtcgccgtcggcgtgtccatccaccacgtggcctgcgacgactccagctacacgcacttcatcaggacctgggccgcccagtgccgcgtggctagcggcggcgcggacgcggtgccgccgccgcctttcctggaccgtggcgtggtcgccgaccccgagggcctcgccggcaggacgctcgacgaaatgcgccagctggcaggcaacggcccgcctccgcctccgccgccggcggcaggcccacagccgaagcttgtcatcgcgtcgttcgcgctcacccgcgaccgcatcgacgcgctgaagcggcgcgtggccgccaaggtcgcggcggacggcggcggcacgggccgcgtccactgctcggcgttcacggtggcgtgcgcgctggcgtgggcctgcctggcacgcgtgggcggcggggagcggccccgcgcgcacctgctgttctcggtggagtgccggcgccgcctggcgccgccgatcccgcaggagtacctgggcaactgcctccggccgtgcttcgtggaggtgggcacgggcgagctgctgggcggcgacggcgtggcggctgcggccgcggcgatcggcgcggccgtcgcggcgctcgacggcggcgtgctggatggggcaggcgggtggttccacaagatcctgtcgctggtcccggagcgcccgatgtcggtgggcgggtccccgcggtacggtgtgtacgagactgacttcgggttgggccggccggccaaggtggagctggtgtccatcgacaagacgcccggcacggtgtccctggcggaggcccgcgacgccggggtggaggtcggcgtcgtgctgcaggaggccgagatggcgcgcttcggctcctgcttcgccgatgcactggaggtgctctgtgacagtgtgactgaactgaactga

SEQ ID NO: 14862 - DNA, 93 bp, Zea mays
  Peptide Sequence Number=SeqID_58237
atggcgcaccggacagtccgtgaacagtcactgtctggtgcacaccggacagtccagtgcgatgtccggtgcgccactaaaattcaactctga

SEQ ID NO: 14863 - DNA, 1893 bp, Zea mays
  Peptide Sequence Number=SeqID_58238
atgccatcctcttcttcttccgccaccgccacgccgccggccgccgcctcgtctgaggagacgttgagtaacgtgatggtggaggagttgcgcgccggcgactctgttgaatttggtgtgtcacggatgacgtcagcccgtattgaagatatgcagcggttgggctactttggcggcggagtcgcccgtgctccggggacggaggaagtccccgagccggagggcgagttggttgttttcgaggcgttcttcgccgccggactccgcttgcctgcgcaccgggtcttcgaattaaatcaactgccgtacgacggctaccctggtcaggacgaagcagaccgccgcgggaagaaaccggcggtggagaccggaggcgaccctgcgctggcggccgccacctcttcgaaaaagagaaaattagtgatggacaaggatcgccaaggggcggcgcgaaaacgccaggcgaccgtgagggttcacgaagcccggccgaaaaggcagcggggaacggcgaaggctgaggcctccggcggaggcaagccgcctttgccggcgaaggtgggcgcctccgcgcctggcaaggcgccggaggcgacggtgggcgccggaggccccaagctgtcgaaggtggtgccgtccgtcagcggagtggcggaggctgcgaaggcggcccgatcgttaccgccgtctggcaagcgcgttgccgacttcggcaccgagattaatgtggaggattatcttggggggtcggacgagggcccgcttgctctagttgtgcctggcgcggcgatcgcgacggctgcgccagcgccgaaggcgggggtagagacccttggcgttgggggcgaggtgtctgccctcgcgctggtcagagacgaggcgggcgtggcgacccgccggctgaagggagcgacggaggcgctgagtcgtgcgacggaggcgctgagtcaggtggctgacttcaccagccgcactgcgtcgggggcccttacggcggcgttgtctgccgaggtcgagagacttcggacgcaacatgcggacgctgtccgtgagaagtcggcctccgacagcaagtgccgcaaactggcggagaaggtagccgcccttgagaaggagaaggcagacctccggcgccagctgacggaggagaggagggaggccaacgaagccatcgccaaagagcaggctgcgcaggcggaggccaggctggcgcgggcggaaggcaatatcgctaaggagctcgccggagagctgcagcggcggcttgctgcctttgagagccgcgcggagggggccgaggccgcggcgcgagcggaggccgaacggacgcgcacgcagctcatgacttcatatcgcgagctgggtgtgcggacgggtgacttcgaggcgatgaacgcgctctctcgcgaaggctgccggcactatgaggccctcgaccaggtggatgaggattttgggcgagatatctttgaggtcgaagaccccgtggtgaaggagtccgccggggccctctatgaccggatgtggggttcatacggtcgtgaggtggtccgggcgcgggccgaggctgcgagggctcaggcggagcgcggcgagcgggtggacgactttggggcgctgaacagcgcgctgcctgagccggagacgacccctgcggaggccgcgactggagtcgccccgggactgaccccggtgactgcggaagatgcaccaggcgcccctgcacctgctgcggccggcgaaggccttcccccaaaggtggccgaaggcgcacctgatgcccccgcagctgctgtgccgagcgctgaagatcaagcggaggtgggggcggaggcagcgacggaggcggcggcggaggctcccgcagcggcagggccttcgcaggtggcatag

SEQ ID NO: 14864 - DNA, 138 bp, Zea mays
  Peptide Sequence Number=SeqID_58239
atgtccggtgcgccagccacgtcaccaaagccgttggattccgaccgttggagctctgacttctgggcccgcctggatgtccggtggcgcaccgggacatgtactgtagagtgtccggtgaccgttggcgcgaagtag

SEQ ID NO: 14865 - DNA, 1149 bp, Zea mays
  Peptide Sequence Number=SeqID_58240
atgacggtggcaggcgggcgggagcagcagtcacgtcgtcagccaggctcgcgtcccatccaggggcagcgaaagagcctcctctcacggcgtgaagacggcacgcccgtgatccgttcctcgaacggctcgcgcacgcgcaacggccgccccgccaaccactcgccccgtcgcattaactccacggcgggacaggcggcgctcctggcaggagaagcgggcgacgcttcgccttcgccggaccgggaaagggggataccccgaaaaggatccttccctgtgaaggaaccgggctccgagccccccctactgatcagaggttcgaaggctggccctccgaggggttcaacagtcgcctcagatcgcgtgggccctacacccactactggtcagaggcgccgagcgagggatgaccaggggtacgttcgatacataaccaaggctcgggctgcgctcccgagctcaccggagacaccatgttcggtgcccatcgagggtaacatggcgctctcccccctcctccttgcggaaaggcgacgtaggggcgtatgtaaaaaagccgagtctgtccctgatcgccctctcgccctgtgcggaggctcgtgggctgctctcgcaaacccggctccggccgaaccgttgacagcgtcaacataccagcccgagaacttgggccccgaccgtgcacccgggctacggccagttcgcatgagggaacaaccagaccagccgaagcattacggctcggactcgggctcagccccagaagacgacgaactccgcttcgcccgaccccagggctcggactccgccctggcctctgccgaacgacctccgcctcgcccgacccaggggctcgggctcggcctcggccacggaagacagactcgaccccagcctcggaggagcccccacgtcgcccgacctcgggcgcgggcccgccacgtcaacaggaggcgccatcatcaccctaccccggggccgactcgggccgcagagaacaagaccggaggacgtcagcaaggactcgaccgctccgacagctgtccctccgccgggctccgccactcctccgacagccacgacatcacaccgactgggtgccaagatctctccggctgccacatcggcatgtacttagggcgctag

SEQ ID NO: 14866 - DNA, 1269 bp, Zea mays
  Peptide Sequence Number=SeqID_58241
atgagacgccacggcggggcggtaccggcaaggacgttggttaagggggggaggacagggcggtgccgaactcttcctgtgcggcgaggagacggcggtgaagggacggcggtgaagggacggcggggcgtcgtatgcggggaggacgatgaagcggctgaccggtggggccggtctgccagtgggagcgagcgcgcgagagagggcggctggcaggtcagcttgtatgacgtgtgggacccagcccccacgtcggaggggatgatcaccagccttgtggtgtggagaagcaagccgggctgcggcctctgccccgccctcagcttcaaggatgttcatcatccgggctggggaggagggcgcgccgagttagggcctgcctccgcgtgggccgatgacccgcttcttcctctagcattcgggggagaagggcatcctccagccctacggaggagacgtcctctagctatgcgggggaaggcgaactgctgctgcctggatagggtgcagctatccgtcctccacccgggcggcggttacatcgtgcgcaggtggctgctgttgccggtgctgaagtggtggccgccgctggtgaggcttcccaccgcagcgatcgcctccggcgacgagaccgtcagtgccacctgcgctccggacctccggctctttggcattaatggctggttctcgtcccccgtgaggggactggtcgtcgacgagcctcctggagcttgttatcccgcaggccttccgatgtggaggtcgggaaaaccgctgagggtgctgccgacgtctaagtccagataccactattaccccaaaatcacttatccgagcgtgagctacctctcgcggaaggtgacgagtgagcccggtctgcccgagccatggcttcacagcagcgtgcccgggccgaagttatgttttgcccgctttgtgactttgtttttatctccattcttctccttgcgtctgaagaatgttgtcctgctgtctgcagggttcgagacggctcttgacgaggccgtcaagaactgcaaggcgcttgccgaggcggctgggcagaaggaggccgagcgtgtggccatgtccgaggctatctcggccctggaggccgagcgtgtggccatgtccgaggccatcttggctttctgccaggcctttggcctcgacggtgtcccctcgggtagctcccccctagagtcatctgcgggccttgggcggccatgtgcgcaacagactccgcggggcactgcaccccggcgttag

SEQ ID NO: 14867 - DNA, 324 bp, Zea mays
  Peptide Sequence Number=SeqID_58242
atggccggttcaaaggatagctctgaagtttccgctagcaatatcatcaagccgacatgggaaaccttgtcggctgaagaacaactcctgttcgaggagcgccaggagcagctgatccaggaagcaaaggcaaaattcctggccgacttcaaggaccagtctgcactaaaatggacgcccaggatgcatctggactccgattgtgacggacttaatatggttggaaagataaggagattatctaaccaacccaactggttccaccttaaaattcatccggagtcaacgcagccgcccccacatgaggttttgggttttgcttag

SEQ ID NO: 14868 - DNA, 264 bp, Zea mays
  Peptide Sequence Number=SeqID_58243
atgacgacgatcatccataggagtagtgcaggactgggactgggactgggactggtatatgacctagtacacaagccagcaggacgacaaatcccccacggcaacgacgagaagaagaaggagcacgagaagcaggtcgagcaaagcaagaccgacaggacgcgcgagaagaacccaatcaaggagccggagcccaagccgaagaacgaattcgaagtcccaaaacccatcccgagaatgagccgccaaggcatgagggagtaa

SEQ ID NO: 14869 - DNA, 210 bp, Zea mays
  Peptide Sequence Number=SeqID_58244
atgcaggcggcatgcaaccgcaccaagggggcgcaccctttcgacttcgacgcgtccagcatggaggcccaggcccacacgtcatgtaaccggcgcgccggttactacgtgcgagaaactacaccgccacttgcgccaggaccgggaaaggggatactccgaaagggatccttctccgcgaaggaagcgggcctcgagccctcctactga

SEQ ID NO: 14870 - DNA, 402 bp, Zea mays
  Peptide Sequence Number=SeqID_58245
atgccgccgtttccgttggggttgttgggatcgatcgggctcctctcatgtgcggactcggctcgctgggggtataaaacctatgcaatgccccctcctccatcggcatcaaattcactagaagaaatcgccaccgagattgggaggaggatctccgccacaacaccgtcgctcgccgtggttgcttcgctgccgcggcgccgcggaacaccgtcactgctcgatccgtctgccgatccaagggcggaaatagaataccggttcgcgttctgttgtgggtcgtggatcggtgatctgacggctcagatcacatcataccccttcggccgcaagatttgcaaaagagcccttcgtgtattaggaaataaacccgccatccagttgttgttcactgagtcttag

SEQ ID NO: 14871 - DNA, 288 bp, Zea mays
  Peptide Sequence Number=SeqID_58246
atggccgagattggcaagccagccgagaaatccctagatgacgtagagtcgaagagcttgacagaagattatcatgggccgatcggtcttttcatctttaagtcggtgcaacccttcgcctcaaggcttcggaatgccgaaggtccgaaaaacacattccctgagctcattgccgagaaacgattaaaatatttcgagtgcgaggtggccccaccatgcggcgggtacacgcgatctggcgattcatctcccacgcgccgtggtccaccgttcagtgggtgcgggtga

SEQ ID NO: 14872 - DNA, 435 bp, Zea mays
  Peptide Sequence Number=SeqID_58247
atgcgcgtagcccagaggctttatgccaggctccacccgttggcttacgccgcgcgtagtaggccacgtggcagcatcgggtctccgcctatgcggggagcaggagtgtgctgcaccaaacttggaggcccggaccgtatatacagggatccggcaccttcccatgggggtacagacttgctggtgatacctcagatagtaacgggtaccctagtttacgggtaccgacagtcgcgttccaacgtgactcctgctcagccactctgcgatcccactggagtcatgttcagagaaatgtcgcgactactcatccaggatgagttgagtgtctggattcatgagaatacgtgggaggcgagcacgggtgaagtaatgctgctggtcgccgcgatgcagcgcgccaacacccacaagtcaaggatcggctacctctga

SEQ ID NO: 14873 - DNA, 750 bp, Zea mays
  Peptide Sequence Number=SeqID_58248
atggccttcttccttggattctgcttgcgctctcgccttgcagcaggaagaggtggccacatcaaacccacgtttggagcatcgacgtccagaatgggcgtcgtcaagaaagaggaactctgggaattatatcaaggggatgaagacaccatacctgaggatgttgtgatcgaggatcagatcacagagactgaatgtttggccatctccattgctactgttaaaggattggagttgaaccatactctgaagttgtgggcccactcgtcgcgtgcggcccacctcagctcgcgccccccccctcccgcggcctggcggcccaccccgtgcggccagcccaccccgcgcagcccagcagccgctcgcgacccagcgcgcaccacgctgcaggtcagctgccccgcgcgctcctgctcgcccaaccctagcgctgccaccgctgtgggatggggtccacctgtcggctgccccggcatcttcttcaaccgctcgaacgccccgcgcccacgacgccctcaagtcgtgtcccatctcctctccgctgcgctcgctctccccctccaaaccgccagtgcctccctctccctcgtcccgctcggcgcgacggctcgtcggcctgcctacgcgacacgcgcggcggccagccctggcggcccccggcatgacggcatgctgatgcggccttggtgcgcggtgcgcagccggcgtgggcgcgtgaccccggctctgcgtgcgggcgctcggacctag

SEQ ID NO: 14874 - DNA, 651 bp, Zea mays
  Peptide Sequence Number=SeqID_58249
atggagcaggaagcgagcaacgacgaactccggcaaggtggagttgccgacggtgacggctgtgctcggtcagatgcggtgggcgagagtagcggagacaggagcaagcaacagggcaaaaagaagctcgacacggctcaccaggataaggaagcggaggaagtagtaatccgtgcggcaaataacaaagaaggtttgactgcaacaacaggagatgggccatgttgggctaaaaggctgaggaagcgcaacccaaaggtctttgggccggcgagggagctgtatgtgggaccggaccatgacttgctccaagcctcgggcgactactctagccagcaacagcacctgaccccaccacatgggcaggcccggtgccgccacgtgtccagaaaaaagagacatactctgaggtatcaccagcaagtctgtacccccatgggaaggtgccggatccctgtatatacggtccgggcctccaagtttggtgcagcacctccacatatgcgaatcggaccactggaatgggatccggaccccctgtatggggtccaggccgtccacagtggggtcccagggtcccaggacagagcatactcgggccttaatcaggacctaggcaggggtccgatgccgacacatgtccaggcctga

SEQ ID NO: 14875 - DNA, 234 bp, Zea mays
  Peptide Sequence Number=SeqID_58250
atgcaggatgctgcacggcgtgcgctttcgcagtactgttcattgttcatcagggtagctgacggcctcgacctaaattactactcccgccattcaaccaatagtactgtagaccccatggacgccgaagactggttgcgcacagtggagcgggagctgcataccgctcaatgcaatgaacgggagaaggttctgtatggtccccgtctgctaaggggagcagcacagtcctag

SEQ ID NO: 14876 - DNA, 576 bp, Zea mays
  Peptide Sequence Number=SeqID_58251
atggcggcgataatcacgacgtggagctcacaggcggcaggttctctgtatctgaagatctttatttactataccatcagcaccatcgccgtccgccgtgacctcgggaccgttccgcggccaccgtcgagcctctacaacgttcgttgcctcggtgagctccgcctcctcgccagcaactcaagacaccgcttgcttttcccccaccgcctctattcccctctactcgcgctcaccagactcctcgacgtgcagccatgttgccgccgccgtcgacccggggccccgctgtattctcgccatcgctcaagcgctccagagctgtctctcgagaccggtgccctccggtgcttctgcgtcggtgtcgtgcccatgactgagtccgttgtgccatcccgaacctgcctgagcccttcccagcgcctaggacccccgatgtgcccgcgccctcacctctggtggagctccgccacggagtcggacagcgccgccgctggcagccagggaagatcctacccaggcttaccgtgggatgtcatgcatccatctgagatcaagcgacccaaatttaattag

SEQ ID NO: 14877 - DNA, 468 bp, Zea mays
  Peptide Sequence Number=SeqID_58252
atggcgagagtagcgtgtaccctccgtggcaagaggctggacagtggtgtatctgtgctctcggttggcgtgaacccggtctgggtgtgggcagaagatggtcagcgtataaatgagttggcagctgacgtcagacgcctgcaagacgagcttgctgaacgagatctggcggtcgattgggtcatcaacccatgttcgtttgcttgggatagggaagccaaagctcatgctcgtgtgactgagcttagtgcggcccttgacaacttgcagatgccatcaaggactcgtgcacaggacggtgtgggtacttcccgtggtcgggaagatactcctaatccaccacctataccaccaacactggtcgaggctatcgctgccttggttagtgcggctactgataatacccgcttcctacgcgaaatggcgggtaaccaattccagcagcaaggcggaagggctcctccctag

SEQ ID NO: 14878 - DNA, 76 bp, Zea mays
  Peptide Sequence Number=SeqID_58253
gttaaacgattcgcccttccgaggaacaggcggcgggaaaaccaagtgctgcaacggcctcgcatatggccactag

SEQ ID NO: 14879 - DNA, 480 bp, Zea mays
  Peptide Sequence Number=SeqID_58254
atggtcgactccaacggaaacctgaaaagcgctacagtgcgcggacagttcgcgcagagtcagagcaggcgccagaaggcgcaccggacagtgaacagtacctgtctggtcagaggcacggcaaggcgcgaatttatcggattttggaatccggtgaatagtcctcacatgccggcggaagcccccaggtacgccaacgggaacggctcggcggccgcaccggacatcttcgagagccccgccgttgtgtccctcacccgcaccgggatggagaacctgctgcgcttggagaaccacgccgagccgtggctcgtggtgcggacaggaggccgtagcgtggatcttgagaagcgcgccgcggagctcgggaagcgcaccgcggacgagcggacggaggcgggtgtatctttggacccgaatcggtaccacagtgggagaagctcaaagaatacgaaggttgatacagcgccgaaggagtga

SEQ ID NO: 14880 - DNA, 213 bp, Zea mays
  Peptide Sequence Number=SeqID_58255
atggcggtggcgaccagtggctcgggcaagcgcgggtttgaggctgaggcggcgtgcgacccgaggcttggccgtgtgttggagaatattttgggcgaaagccccggcaatggtgacactagcgggtgtagctttctgttgagggttcgagttcggttcctatatgtgctatatttcgggggtgtgggttcggattcgattcctaacctttaa

SEQ ID NO: 14881 - DNA, 1629 bp, Zea mays
  Peptide Sequence Number=SeqID_58256
atgcacgtgatcggagacttcctgaagcgccagatcgcgtcgctacagcagagggcgcgcctgtgctgctggttcactggctcaaacgacatcggtcgggtgcagcgcgggctagggaccgacctatcctgggacaagctggaagtcctggtgaaggggattaccgattctgacgcgccggccggaggcccccagtctgccggcgcggctcccagcgcccccgccagagcttcccgcgcctctgccgcggctcccgccccttggataagggcaaaggggctgcaagcagctcttccgccacaggtggcactggggtgtcgggggaagagaggcgacgccggctgcgtcgcgccgacgaatcgtttgtttcggacccccccccccccccgttggggccgaggaggtcggctcccagaagcgttagaggactactggtggggccgaggagaccggctcccaggcccagggcgcgtagaggcacgtcagtcctccgccaccacaaccatcgggtcctccgccaccacaaccgccaccaccgtcgggtccgccgccgctaccaccacccgggggcgatctcccccaggggcacccagcggcagcagcagcaaaagcagcggtcgccccgcttccagggtcgtcggaaggtccagggccccaagtgagtggagcccctttcttttgattagacttatttatcatgccgacggggtcttaacccatcctttgtctgtcagggcttcctccccctctactcccaaagccgtgtctcccccgcctctggctgctgccgccgagacagcgccaccgggcccccaggctctcgctgggggtccggcagcagcggcgccaacgccaagcggtgccgcagcggcggagggggtccccactactccgacggctgccccagcctcaacgacggcgatgccatcgagtacaccgtcggcagcggcaggggaggccccagctgcgcccgcccccaccatcaaggtcgacgcggggggcgtgtccagctccatcccgccacccactccggaggagacggaggtgatttttgggcgatggctccagtccggcgccgagccagaagcaacgccagttcccctcccccggctggaggagcgcaccaaggcagtgtcctgccagttcgcctctgagcattctgagcttaagcgggaccgcaaggactacaagaaggacctccagaaggagaagaagcgggcgctggaggagctggtccgccagttcgaggcggcgcaagcggcacaggcagcaccgggcccccagacggtggaggcaatgaagaagacacttgaagatctccaggcagagcagcgcgccagggtccagcgcatcgccgcatgggtcggcgaggcgagcacgacactggtgccgctaggggtgagtcccatcccggtgttggagttgccgacgtccatctccgacgcgctcacggtgctggactccgccgccgacctcctccgacgcctagaccagatccttggcgcccgcctggaggccgaaggtggcaggctttgccgggcggtgatcgagtatatcctgacgtgcttccggagccacgacctggccatctccttggagccggtgatcgctggtccgttccgacactga

SEQ ID NO: 14882 - DNA, 486 bp, Zea mays
  Peptide Sequence Number=SeqID_58257
atggtgacctccagcttgatggtgggggaaagcgagccgggctgcggtctctgcccctccctcagcctcaaggattttcatcaccagggctggggaggggagtgtgccgagttgagcgtgcctggcttttggacgcgagtggcttcggggccgctcgcggcgccggcgtctgccacggcagccggaagaggttcttccgccggcgtgatagccaaggctggccacggaccgacctccaactctacggcctcctgcccgtccttgccttacgagttttggcatgggcgggggcctcctagcagcagcatctgccctgaggtcagtgccgccgctgttcggccccccggagcagaagtcgtcgtcgtcgccgctgctggagcaggtgacggcgcgccgttcgtcggtcttccgttgctccgcaggccttcccccatggagtggggttgttcgtacccgcggaggggggaaccggagttccgtttgtaa

SEQ ID NO: 14883 - DNA, 612 bp, Zea mays
  Peptide Sequence Number=SeqID_58258
atgcaggcggcatgcaaccgcaccgaaggggcacaccctttcggcttcgacgcgtccagcatggaggcccaggcccacacgtcatgcaaccggcgtgccggtcgctacgtgcaagaaactgcaccgccactcgcgccactaccgcgcctcctcgactgtggaaccagtaccgcgactcgaggcaaccctgcgcatgacccgacagtgccaaccaggcacatcggtcacggactcacgggccagtcagccgcgggagaaggcgcgacggtcgatgcggccagaaatgggccggcagtagtggcggtggcaggcgagcgaaagcagcggtcaattcgtcagccaagctcacgtcccctcctgggacagcgggagagccctctcccacggaaccgggaaaggggataccccgaaagggatccttctccacgaaggaaacgggccccgagcccccctactgatcagaggttcaaaggctggcccctcagaggggttcaacagccgcctcagagcgctcgggctccacgcccactactggtcagaggttcaaaggccggcccctcggaagggttcaacgaccgcctcaggccactcgggctccgcgcccactactga

SEQ ID NO: 14884 - DNA, 545 bp, Zea mays
  Peptide Sequence Number=SeqID_58259
atgaatcagtcatctgcctatgaagcagcgccagggcctgttggaacggaagtaaagcctgttaacgaagatcaagagcgtagttcatccgatgcactgctcatgtctgaccactttgtgtttccgccgagtgaacacgagaacctgccaatacaaaccagttttgatgagatacatgctgagaaggatgtgcagaaacctagtaccagtgtggaggattatagtatcaagaatgatgttgggtctgagagagttcagtttgacgatgaagggaaacacctctcagatgatgatgtggagatgaaagatgacacccctgggtacggttcctctcacgctgaagatgatgcacatggttttgttgcccatggtgatggcattgagtctggtgaagattttgatgaaaaatcaggccaccctttagagctctcagacagcaagagctgtgatactgctgcactagttggtattgtgatcttgggacgttggcacaaagataaattccaccttaaccagcttaagtggtgctctggctcagcagtgag

SEQ ID NO: 14885 - DNA, 816 bp, Zea mays
  Peptide Sequence Number=SeqID_58260
atggcggtggcaggcgggcgaaagcagcagtcaagtcgtcagcaagctcacgtcccctcctgggacagtgaggaaaccttctcccacgacgtgaagacgacgcgcccgtgttccgttcctcggacggctcgcgcacgcacaacggctgccccgcgaaccactcgtcctgtcgcattaactctgcgacagggcaggcggcacctttggcaggcgaagcaggcgatgcttcacctccgccatgatgaccgcgtcaaaaaagggaccgggaaaggagatactccgaaagggatccttctccgcgaaggaagcgggccccgagcccccctactgatcagaggttcgaaggctggcccctcggaagggttcaacagccgcctcagagcactcgggctccgcgcccactactggtcagaggttcgaaggctggcccctcggaagggttcaacggccgcctcaggctactcgggctccgcgcccactactaatcaggggttcgtaggctggcccccaaagggttctgacagccgcctcagagcacgcagagcgagggatgaccctggagtgaggctgacaacagccaagtccggcctcgggcgccataggaagctccgcctcgcccgaccccagggctcggactcagccttggctccggaagacgacgaactccgcctcgcccgaccccagggctcggactcagcctttgcctcagacgacggtctcgacctcgacctcggaagacagactcgacctcgacctcggaagacagactcgacctcgacctcgacctcggaggagcctccgcctcacccgacctag

SEQ ID NO: 14886 - DNA, 822 bp, Zea mays
  Peptide Sequence Number=SeqID_58261
atgtccacgcactcccttcatgcatcacgtccttccaccttccgagcccccggatggggagcgcccgcggttcttccgccttgtcgtcgttggaggaacgcaacttcgcggaagttggtacctttcagccatcgctcggcttcaaggattttcatcaggcagcccgaccggatcccctcgccggtggtcacccaagacggtgaccaccagtcccagggtggggagaagcaagccgggctgcggcctctgcccctccctcagcttcaaggatgttcatcatcagtgctggggaggggagtgcgccgagttggggccggtctccgtgcgggcagcggcccgctccttccctcagtgatcgaggggaagggcgttcgccgttcgtggcgctggcagctgccgcgtgtctggctctccggcctgagcggcttcggcgctgcttccggtgccgcctcccaccgagacagccggaagaggtttctccgccgacgagatagccgacgccacccgcgggctgacctccaactctacggccttctgttgctccacatgccctccaacgtggggggttgttcgtacctgcggaggcggaactggagttccgtttgtaatggcaccttgagtgccagcgtttgttcattgtggctgtcggggcctgaacattatcaggacttgtttgtcggtaacagaattgtttgtccgagcgagagttacttttcgcggaaggtgatgagtgagccgagaaaacccgaaaaaccgtttcggcagaaaggtttccgagcattaagacttgttcggtcagcggaatcgcttatccgagcgtga

SEQ ID NO: 14887 - DNA, 1026 bp, Zea mays
  Peptide Sequence Number=SeqID_58262
atgactgccacacgagcaaggagcaaatatgatggtcctcaggaatcagggtctttgtttgacggcgaggacagtgaaggctctgagcaagaggaagattcccatgttgcaaaaggtgtacatggccacaaccccactcatgttgctgacaaaactacgcaaggaacacgaggatctaagagggttgtggcccctgatgttcctggacaagaaattagattcactaggcaaaggagtgctgccataaaccaacaatcctccttaagcctaactactactacacatgctagttcacgagccaccacaaaccaagcatccacacagaacttgactaccgcaacacatttcacttcaagtgttgccactgaggaagattacaccgaaggcctgaatactgctgcacagcctacttctcccatacaagctgaggcggcaaagtttgcatcggagggtgggatcatactgaggcaacacattccaatatttccgcactggaaggagtacaagaagcaagagaacgagggtaaaattacagactacattgggaagcttgctaacaattgtgtgaagaacaaacttaatcgtgagaaggtgcaatttccacagtgcacaggatctcaatcatacgttgcaaaagcttatgtagtgggtgatatggaagcaatggtggcaacaccagtagaagatggacagcttgcaaagtctgcaacagaagttgttttcaatgttctgcctggttcaagtaaatttcttcacaatgctggctttttgccctcctccaagagaagcaacacagggactgtttcagcaagaatgcatgaacttcagtctcaattggacaatgagaggcgagaaaaagatggacttcgagaagatatggataccttaaaggccaagtcagaatcatctgaggcaaccattgctaatcaatcaactgagattgcagatttaaagaagtccttagcagaaaatagcatcctactgcgacagatattaagtattagtcgtgatcaggccaatccttaa

SEQ ID NO: 14888 - DNA, 267 bp, Zea mays
  Peptide Sequence Number=SeqID_58263
atggacttccctataccttcttcagatgtgaataactcatgcaccatttctgcaagggaagaaaacttgacggttaatcctggaagatggcgagtgctctatcttggagacttggaagatggcgaatcttggaagaacatcaaaaggatggaaacaccttgccacggtaatagcgccagaacagccgtcgacggcttcaagctcctacttgtgtttccggcgtttggctgttgcggctgtatggagtcagcaagcatgtccggctga

SEQ ID NO: 14889 - DNA, 1137 bp, Zea mays
  Peptide Sequence Number=SeqID_58264
atggtgtctccggtgagctgcaagcgggtgatccgagtggacgtccgtgccccgttcgttgggggtcggctaggggcccagaggcacgcccaaaagtacctgcggcaactggcgcgctggttgcgtgacgcgtgggcctgggcctccaagctggcgtgtcagaagtcggagaagcgcgtccacctggcgtggttgcatgccgcctgcatggctgcccgccccttccgcccgttggtctgggcaaaagtggggggtcgcttcccggccgcacccctccaccggcggtcacccaagatggtgacctccggcttgatggtgggggaaagcgagccgggctgcggcccctgcccctccctcagcctcaaggattttcatcaccaaggcgggggggactgcagcgtgcccggctttcggacgcgagtggcttcggagccgctcacggcgccggcgtccgccacggcagctggaagaggttcttccgccgacgtgatagccagggccggccacgggctgacctccaactctacggccttctgcccgtccttgccttacgagtttcggcatgggcgggggcctcctggcagcagcacccgccctgaggtcagtgctgccgctgttcgaccccccggagcagaagtcgtcgtcgtcgccgctgctggagcaggtgacggcgcgccgttcatcggccttccgttgctccgcaggccttccccctcggagtggggttgttcgtacctgcggagggggaaccggagttccgtttgtaatggcacttcgaatgccagtgtttttgttcattgtggctgtcgaggcctgaacatgggtaaccggccgagccgcctgctcgggccggattcccggagaagtccctggatcgcgtcgccgtccgaggctgggtcggaccttgctgaaggcgtcgtcgatgccgagggtgctgcagcccccttcagcgtgaagacccgagccctcgctgcgttggatgtttgtgcgggcgagagttgcttctcgcggaaggtgatgagtgagaaggtgatgagtgaggtatccatatcccggaggcgtaggagtccctcggctcggtcagccttggctgcttacgtgtactccgtcgtttccaggatccgcttttcgaagtag

SEQ ID NO: 14890 - DNA, 51 bp, Zea mays
  Peptide Sequence Number=SeqID_58265
atggcgaacttggatcaccgtggcatgtgctgttttggcccgcgcacccgg

SEQ ID NO: 14891 - DNA, 258 bp, Zea mays
  Peptide Sequence Number=SeqID_58266
atggtgactcggcgagcgggcgaggggccgatagccgagggcgactgggcgcgcgagacgatcgacgacgtgagatggttgtgcgactgcgagggctgtgtgcatgtgtccaaagtccaaaccctagcaggggctgccgggctgtgtcgtggtggcctggacgcctggtgccctggtgaactggtctgtctggtggctggtccgccgggggttcaagacgtcatgggctcatggcccatctgcgccgatctgccctga

SEQ ID NO: 14892 - DNA, 666 bp, Zea mays
  Peptide Sequence Number=SeqID_58267
atgtcgcgcgtgttcgatgactactatatcaaggactgtggcatcatctcggtgccggaggtgacgcagaggaggaccgacaacaatgaccactcaccatcgtcgggccaagggagtccctgtcggtgttttgggtccgaccgcacacccggggttgcccctcaaggttcgggccgcttagagatgcgtaacaccctacgtcctggtgagtatgctttgtgtaatgggttacaagtggacccgggggatatctgtcccccacaagcccccgatctttgggttgattttgaagtaatcagcccaaagatcgcaggtccagcttgcaggtcggcatttcgtattgtgggaccctggacttcattgggtgcgccggaggtctggacttacatccgggccgtcgagcgttctgggctcgagggctcggatgagtcggagtactcctcggacgaggaggactcgtccgagggcgatggcggcgatggcgacgacgacgatgacgacgacgacgacgacggaggcggtggtggcaatgacggtgacgacggcgatgacggtgacggcggcggcagcgacggcaggggcagcagcaaggatggcgacgacggcagcagcaggggcagcaacaggggcggcagcggcagaggcagcaacagggccagtggctag

SEQ ID NO: 14893 - DNA, 327 bp, Zea mays
  Peptide Sequence Number=SeqID_58268
atggttcgtgcctgtcgcacgagggacaatggacaagatttacagaatagaattgggattcaaatgggtcaggttaagatgatagaaatcaaggaggccacggaaaaagggggaaatgggaagaccgagatcgcggagaaggaaaggaacgtaaattacggactcatgggtatcctctgtcgggacagtgaccccatgacaaatccgccaagaacacagctccctcgggggaaggaccccgatggacaaaaggtggagaaggtcgggctcggagacaacagacatgtggttacctgcgaaaggcaactgactgttggggtcgattag

SEQ ID NO: 14894 - DNA, 222 bp, Zea mays
  Peptide Sequence Number=SeqID_58269
atggggtccaggcacagtgcttgctctgccgaggctgggtgccgaggttctttcgttttgcttttgttagtcacccgcctgcggggagagagatacttgatcagagatggttggtttacagatgatgatgatgatgatggttatgactatggtaatggtaaagaagaaggcgtcgaggcgaatctccaggagttccaggacttcgacgagttcaaggattag

SEQ ID NO: 14895 - DNA, 564 bp, Zea mays
  Peptide Sequence Number=SeqID_58270
atggcaaaaaatgttggtgaaaaaactggcatggatgatatgagaaatgcaaacatggagggccccttagctcatggtaaagaatctggtgtccaggctgataagtcagaaggaatggatgttgaaattttttttgaaggtgataaagggtttatggataatctaggtaatgaggaagatggttttaatgaaagtgatgatgatcttttgggttcccaagatttggaagagtttgccaaagatgaagaccatgttctatccccctttcaagagaaggaaaaaatgaatctaagtgccctccaatctgaagacgttagcaaagaagttggggataagaaaggtggttccatggaaggggagcatgtagagggaatccgaaggagcaatagtctggaatccaacgatgagatgaagattgcggataaggctacaacgagagcaatggctaaagacgcgttcatcaacaaaggtacatcttctaacccattttctgttcttaatactggtaatgttgttcttatggatgttgcgcaaaagttgggtgtagaattaggttcttcttaa

SEQ ID NO: 14896 - DNA, 513 bp, Zea mays
  Peptide Sequence Number=SeqID_58271
atgaaccagacaccggcactcaaggtgccattacaaacggaactccggttccgtccccgcgggtatgaacaacctccacgccgggaagccggcggggcgacaagctccgggcgactcaccagcgacctctgcagcagcagctatggtcccaggacggacgcgaccaccggaaggctctcgttcgcgtccccgctcaagggacgcggcgctgacggcctcgacggtggggaagctgcccccggctgccaccacgtcagcactgacggcggcgtccgcctctccaccaatgccgcaccggcgaacgcgggccgctccaaagcgcaccggcaggtcctcgctcccatcctcgccatgaaagcgaggaggaggacgaaatgttgcatcctagctgggcagcaacagttcgccttccccggcatggctggaggacgcctcctccgcagagctggaggatggtttccaccaccagaagctggaagaggaggtggcccagctgacccgtgcgggaggtag

SEQ ID NO: 14897 - DNA, 234 bp, Zea mays
  Peptide Sequence Number=SeqID_58272
atgggtcagaggacacttgccttcaccaagctactgctcatggacttcttctgcaacttcctcgagaaacacagactgcccgttgtctacgcaaagtccgaggacctaactgcgaagttccagggacggcgggttaatttgcagaaaaccgggggtctctttaagaagtttgcgcgggcgaaggggtatcgggctcctacggtcgttggatcccggatcaacgctcaggattag

SEQ ID NO: 14898 - DNA, 138 bp, Zea mays
  Peptide Sequence Number=SeqID_58273
atgaacaagacaggcggcatctttggcaggagaagcgggcgacgcttcgccttcgccataatgaccgcgtcaaaaaagggaccgggaaagggggataccccgaaagggatccttctccatgaaggaaacgggccctga

SEQ ID NO: 14899 - DNA, 1260 bp, Zea mays
  Peptide Sequence Number=SeqID_58274
atgccattgatgcaaatatttataggaccgaaagttaagattgtttctaaactgctgcatcttcatagtattttccttggatctgtcatatcttggggctttctttggccatttattagtgcacaagctggtcattggtacccagataaccttggtaacagtgatttcagaggcctatatggttataaggtcttcatagccatttcgattatacttggagatggcctatacaacttggttaagatatttattgtcattgctagagaattatgcagcatgcaatcgaaacaacatgagctgcctgttcaagctctggaagatgacgggagttgtgaacaactagcagatgagaaactacaaacagagatattcctcaaagatagtatatctccttggtttgctgcttctggttacattgtcctggcagcaatatccaccgccagtgtgcccgccatatttccccagctcaagtggtaccttgtcctcctgtgctacttcttcgctcccgtggttgcgttctgcaactcctacggaatgggcctcaccaacctgaaccttgccccgacctacggcaagatcgccctcttcgcgttggcctcgctcgtcggcagtgatggcggtggagtcatcgccggccttgcagcctgtggcatcgtaatgtccgttgcctgttccacagccgatctaatgcaggacttgaagagcgggtacctgaccctctcgtcgccgcggtcgatgttcactgcccagctgatcggcatcgcgctcgggtgcgtcatagctccgctcacgctgtggctcttctggacagccttcgacatcggcgaccctgacggggagtacaaggccccctttgccatcatgttccgggagatggccatcctcgggatggagggcttctccgcgctgccactgcactgccttgacatctgctatgccgccttcttcctcgccttggccaccagtctcctcaaggacgtggcgcccgcaaacgtgtccaggttcatccccataccgatcgctatggctgcgccgttctacgttggcgcctactttggcgtggacatgttcataggcacggcgatcttgtacgcctggcagaagctgaaccgggagcaggctgatggttacgcggtggctgtggcgtccgggctgatctgtggagatgggatctggagcatcccttctgctcttctgtccatcctgggagctgttccacccatctgcatgtcgttcgaggcttcctctgctcccaggtga

SEQ ID NO: 14900 - DNA, 363 bp, Zea mays
  Peptide Sequence Number=SeqID_58275
atgctgacagtgtacaaccaggtaaggaaaaggaagaagaagagaaagagaaggctagagattaacagaggttgggcagaaattggagttctgtttcatttcattcataaaccatctacatcgtatggcgatgggtgctccgcctcctacatctttgctatggacaggaagacttatgagctcgtgggaccagactatcccggtaatcgagccgaagatgttaaggatccttcacttggctggatgatcagtttcttgttcctcattgctctcgttgggccatttagcattgtcttgcttcgaaaggtaatgggggatgattaccagcttgcctttccctggggggaccagctacagctttga

SEQ ID NO: 14901 - DNA, 381 bp, Zea mays
  Peptide Sequence Number=SeqID_58276
atgcatctgggtgccaaaggaaatactttcaaccatgaaaagcaccaagaaggtttggatcccgaaaaggaagtgagtagtctgaaggacgacaggaaatttggagacttggcaaagttgggatgtatatcatgggatacatcatattggatcaaggttattgccaatgtttgtgtttatagttcacaggatgctagaattacttggaccaaggaattgagaaaaagcaacacctcaaaagaagacattaagaagatcaaagaaaagtccaagaagaaagaaaatgtgttgccacaggtggactgtctggtggcacacggactgtccggtgccacacgccggactgtccggtgcaccaggaattgtagccctaacggctag

SEQ ID NO: 14902 - DNA, 234 bp, Zea mays
  Peptide Sequence Number=SeqID_58277
atggatgctgaggtgagaagcaagaggatgcctcagttattaggggcagcttacgttcatcatgcaggagtagtagttattaccacaacattaaaggagataccttcactccagaaagcattgcctccagaacttgctgataatgtgctcaggttatatcgtgaatgcttacagagggcgaagtatattggccatcagtgctgcaaggggtcttatcaatcatattctatatga

SEQ ID NO: 14903 - DNA, 354 bp, Zea mays
  Peptide Sequence Number=SeqID_58278
atggcggtcgtgtactccgaggtcgcggcgatgatgtctcagggtgttgcgcagtgggaaatttataccgtgtacgcggagtcgaagcggtgcaccgggttctcatcgccatccatcattagagatggcaatgggtacccgctacccgaaacccggtgggtttttgctctattagggtatgggtttgggtcaatttctctacccatgggtttgttaatgggttcaaatggaaacccaacggtgggtatgggaaacccgttgggtacccgaaacccgcatgggtatgggtttgggcaaaattttatacccgtcacggcggccgccgaaaattacattgaccgtcgaaagttctag

SEQ ID NO: 14904 - DNA, 693 bp, Zea mays
  Peptide Sequence Number=SeqID_58279
atgacgtcgaggctggagagcggcgggttccagctcccgaacaccgagcaggagaacgcactcttgctccgcgcgctcatctccgtcgtgtccggtgacaccgccgccgcgtcgttggtcccggaggcggccgccgcagaggcccctgccgccgcggcgtcagcgtgcgggtgccccggcggctgcgacctcgccgccgcgtcgagcagcgacagcgatggcgcggagtgctccgcgagcggcggaggcgcgggcaagcggaggcggaggcggagcagggcgagcagttacatgggcgtgcggcggcggccgtggggcaagtgggcggcggagatccgcgacccgcgccgcgccgcgcgcaagtggctcggcacgttcgacaccgccgaggacgccgcccgcgcctacgacgccgccgcggtcgagctccggggccgccgcgccaagctcaacttcccggacgccgccgccgccgcggcggcgcgggatgtgcagccgcgccgcccgttgcccggtcagagcctccgcgagaactgcgggtccaacgccgcgtcgccgctgcacgtggcggtggcgcgggcgccgaccacgctgcagggaacagggccggcgccgcccaaggaccaggacatctgggacggcttgaacgagatcatgacgatggatgacggcagcttctggtccatgccgtga

SEQ ID NO: 14905 - DNA, 1770 bp, Zea mays
  Peptide Sequence Number=SeqID_58280
atgcagcaacgcaaggccaaggttgtctggggtggcgccgagagcgcggcggcgcaggagatcccggcgtcgtcgcagctggcgatggcacacaacagcagctggcctgagggcgaaggggctccggagcactcaccagtgccgcggaagaagaggctttccctggacgagaagcgatggaacacggtggtcaacgtcatgcttgtcgccttcgtcatggccgtgccgccggtcgtcgtcgttttcgctgggggcggcattgcgcccgcggtctggatcgcggccgccaaggcccagctacgccgaggttccggcgatggcccaccagacagacttctcggcggcctcctggccgatggactcgatgagagaacgtgccgcagcaggtacgagtcctccctgtacagccggaggccggcacggcgaccttcaccgcacctcatagcaaagctgcggagacacgaagagctccagagacggtgcgggccgaacaccgacgcgtacagccgcgccgtccagcagctgagggccggcaaaagcgtgggctcgcccgagtgcaagtacgtcgtctccatctcgtaccgtggcctcggcaaccgcatcctggccgccgcgtcggcgttcctctacgcggtgctcaccgaccgcgtcctcctcgtggaccccagcaacgacatgggcgagctcttctgtgagcctttccccggcacgacgtggctgctgccgcgggagttccccctcgcgagctacactaacttcagcatcgacaccgccgagagctacggcaacatgctgaagaacagggtgctcagggccgacgtgccgccgccgccgacggagacgcagttgccggcgttcgtgtacctccacctcgaccacgactacggcgacgaggacaagatgttcttctgcgacgacgaccagcggctgctgtcgagcgtgcagtggctggtcatgaggaccgacatgtacaccgtgccggggctgttcctggtcgcggcgttccaggaggagctcgacgtgctgttcccggagcgcgacgccgtgttccaccacctggcgcggtacctgttccatccgaccaaccgcgtctggggcctcgtcacgcggtactaccgcgcgtacctcgcgcgggcggagctccgtctgggcgtccaggtgcgcaacttcgatccctgggcgcagcagtcgccggtcgttctccggcagatcacgtcgtgcctgtggagggagaaactgctcccggaggttcttgacacggaagagcacgccgtgccggcgccgggcggcgccagaaccacggccgttctggtcacctctctccggtcgtggtactacgagcgcatcaaggggctgtactgggatcaagcgacggcgaccggcgaggacgtgagcgtgcaccagcccagccacgaggggcagcagcagtacggcaagaagtcgcacgacgaccgggcctgggcggagatgtacctgctgagcctgtgcgacgtgctggtgaccagcggctggtccacgttcgggtacgtggcgcaggggctcggcggcatgacgccgtgggtgttgcacaagcccacgaatgccacgtcgccgccggacccgccgtgcttccgggatgtgtccatggagccgtgcttccatgcgccgcacgtctacgactgcaagctcaagcgtggagccgacacagggaaaatgctgccgcacgtcaggaactgcgaggatgtgagctggggactgaaacttgtcgatacaaagttgtacagatcttga

SEQ ID NO: 14906 - DNA, 1035 bp, Zea mays
  Peptide Sequence Number=SeqID_58281
atggcgctctccgaccgctcccgcgagtcgctcctcccgagcttcctctacgcctcctcggcgcgctccttcgccgccacaggcgccgccgcgcgcctccatgcctccgccccggcgcctgccgcggctggagcaggaggcgccgtgccgttctcgatccaggcgcccaacgagaagatcgagatgtactcgccggccttctatgccgcctgcaccgtcggaggaatcgccagctgcggcctcacccacatggccgtcacgccgctcgacctcgtcaaatgcaacatgcagattgatccagcgaaatacaagagtatttcatctggatttggtgtcctattaaaggagcaaggggctaggggctttttcagaggatgggttcctacattgcttggttacagtgctcagggggcttgcaagtttggcttctatgagttctttaaaaagtattactcagacattgcagggcctgagtatgctcagaagtacaagactctaatctacctcgcaggatccgcatctgctgaggtaattgctgatgtggctctctgtccttttgaagctgtgaaggctttacaagggaattgttcctctctggggtcgtcagattccttcgtgtggctcattgatgataccatgatgaagtttgcttcctttgagaccatcgttgagcttatatacaagcacgctgtgcctgttccgaagtctgagtgcagcaagactacccagttgggtattagttttgctggtggttacattgctggtgtcttctgtgctattgtttctcacccggccgataaccttgtgtctttcctgaacaatgccaaggatgctactgttggcgatgctgttaagaagcttggtctctggggtcttttcactagagggctgcctcttcgtatcgtcatgattggtacccttactggtgctcagtggggaatttacgatgctttcaaagtgatggttggactcccaacaacgggaggtgttacacctgccccggcagcgaaggctgaactgaaagccagtgcttga

SEQ ID NO: 14907 - DNA, 1155 bp, Zea mays
  Peptide Sequence Number=SeqID_58282
atggcgaagagcagacgggagatctcgtttggtttggccgtcgtcctgtccctaacggccgccgcactcgtgcgaaccggacacggcgccgacgccgccttcgcgagggcgagcgggacacgtttcacgatcggtgggcggccgttctactcgaacggcttcaacgcgtactggctcatgtacatggcgtcggacccggccgaccggagcaaggcgacggccgcgctggacgaggcggcccgcctcggcgccacgctcgtgcggacgtgggcgttcagcgacggcggctaccgcgcgctgcaggtgtcgcccggggtgtacgacgaggaggtgttcaggggtctagactatgtgatatccgaagcaaagaagcgcgggatccatttgatcctgagcctggtgaacaactgggacgggtacggcgggaagaagcagtacgtgcagtgggcaagaacccaggggcacagcctgaattctgatgacgacttcttcaccgacagcgtgaccaaagggttctacaagaaccatgcagtcctcacgagagtgaacaagatgacgggagtggcgtacaaggacgagcctgccatcttcgcgtgggagctcatgaacgagcctcgctgccagagcgacctctccgggaagacgctgcaggcctggatcacggagatggccagctacgtcaagtccgtggatcccaaccacacggtagagatcgggctcgagggcttctacggcgatcgagtccacgcccgaccgcaagcgccagttcaacccgggagggtacaccgtcggcaccgacttcatctccaacaacctgatccccggcgtcgacttcgccacgatccactcctaccccgaccaatggtggcgttcatgcggcggtggatggcgtcgcacgccggcgacgccgcggcggtgctgcggaagccgctgctggtggcggagttcggctggtccgcgcgctccaacagctacacggtgtccatgcgggacgcctacttccgcatggtgtacgaggcgatctacgcgtcggcgagagcgggagggccgctcgcggggggcctcttctggcaggtcatggctgaacgccatccatcgcttccacgcaccgcctcctgccgcagcgtcatggcgctcctccgcgtcgacgcgtga

SEQ ID NO: 14908 - DNA, 459 bp, Zea mays
  Peptide Sequence Number=SeqID_58283
atggggtacacgaaggaccagcttctcgcgcacctccagaagcttaagattgatttcacgtgctacgatcacccggttgtgttgacagtggaggaacaggccaaacatgttggccatttaggaggtgctttgagcaaaaatttactcttgaaggacaagaagcatcggttatatgttatttctgcccttgctggcaccaaagttgacatgaaaattctttcccaacgtcttgggttgggaaaaggtggtctacgaatggctcctgaggaaaatcttctagaagtacttcaggtgcccttagggtgtgttactccttttgctttaataaacgagtctgcgagtgctgtttcacttttacttgatcaaggtttcaagtctaaacagagctgctacttccatccactgacaaatgatgtgacaattggtatggttcagaataacaacacttctttttactga

SEQ ID NO: 14909 - DNA, 738 bp, Zea mays
  Peptide Sequence Number=SeqID_58284
atggccgggggcgtggacggccgccgcggcaccggcgccggcggcggggaaggcacgcgccgtcgtcgaaccagcgccggtgcaggagcaggaggcgtggcaggtccctgtgccggcgcaggctggcggaacgcacggcctggtaccgtcgtcggctcctcgccgtatatgacccagcggcgcgggcggccggcgtactggtgctgcgggtggaacgggtgcggaaggaagtgcgccggcgggaacccgtggcgcgccgtcggcgggtcgacctcgtggaggaagcggccgaagcagcgcgggcagaagacgtcggtggacgggcaggagatgatgcggagcgcgcggccgcactgggggcgtgctgtgttcggcgacggtgacttgtgcgtggcgccaaagcgcgtgttgcttgccgggcaggaggtggtggagtcggccagccggccaggcggatccttggccagcttcctttgtcatgttgaagatgttttgggcagtcgcgtagacgctccccaaaaacctaattgccgatcccccgtgcaaggtctcgaacggcaccggcttcggaggcacctgccctctcgctactctgtgcgcgcagagtcacgagatggaaataccctcactcggcggctggattctgagactgaaagtgtttctcgcgtgtaccgagtgacaggggtgctcctctatttaacctctcgcagagggaagctgaaggagaaaggtcgctga

SEQ ID NO: 14910 - DNA, 1053 bp, Zea mays
  Peptide Sequence Number=SeqID_58285
atgaagtccgttgtcgtagcgtcctcggatccacgtccaccgcgtcgcagaccaaggccgaccgggccaagctcgacgtacgagtgcatcctctgcgcctgctgctccacctcctgcccgtcctactggtggaacccggaggagtacctcggcctggccgcgctgctccacgccaacagttatactccaactcatgatttattctgtgatgtactggcgtgggaaacgaaaccattaattcttgagcgcccagttctaggcatgagaggacctacgggaggctacccaggaaaggaaaagattagaatcgcaaggccagattctcagggtggttgtttagatctactagagcttaatttagtcagactagagacagttcgccatatgttgatgatcaccgtgacactgtcgaagaagcctctggatacatcatctccaggctttcctgcttatccctactactctataagcacgctgactggaaatctcagcttaggggccctgatgctcggggaatcaaggaaatatggcacaactattgtccctggtctgtatgcaccagttcatctacatttctttgttgctcgtatggacatggctgttgattgcaaattgaatgaggttcataaccaggtggttgaggttaatgttaaggtggaaagtgcaggcacacataacatgcacaataatgatttctatgctaaagagaagttgctcaaatcaatgcgtgattgtgatccttcgtctttgcgccattggattttgtggcaacggaagttccaggccccattgcagcactacactgcgctaatggaccttcaggactattctgagaatggaactgtaaccgtggtatatcgagtgatacttaaaggaactgatggagaggcatatagagatgccacgggcacaacacagttccatgaggggcgcagggaagatgctgttgcagccgcagaggaagctgcattcagcaaagcttgcgcatggttcggttttggcctgtatctgtaccaccaggatgaatctcattacgacgaccacttccattga

SEQ ID NO: 14911 - DNA, 387 bp, Zea mays
  Peptide Sequence Number=SeqID_58286
atgttgacgttgctgtgtgaggtgatgacttggcgcattacaatttgcaacacttcttgccggattctggccgccagaagccgaagcgtctcccaaacgcctaaattctcgacccgcttttgcgcgccgcgcttcgacgagaagccagccacctacgcgacgccagaagcggccctcacgccgcctctcctccccatcgcatctcccgccccagcgctcgtcgttggccgaaagccggccccattcgcgacgcccgcggcgctcgtctcgtcccccatcgcatctctcgccgccgcgctcgtcgtcttcgcagagcactttgaaaacttctggggtctagaatatgactcggaccagatgccttcgtttagtgacaatgaggtttaa

SEQ ID NO: 14912 - DNA, 558 bp, Zea mays
  Peptide Sequence Number=SeqID_58287
atggggttcccggttcctggacagctccttcaactgggaatgggggcggctggaagtgagcgaggatggaaggggagtgtggttaggggcggggatgggaggcgccgcgaccgccgccgccatggcgaggtgggtctgcggcggctccggtcggtgcaggcggccgcccttcatcgacggcgagcggggaactgggtggacaccgggacacgtaatcgtggattcgatgggagaggggatgggaggaagcagcggagggtgaggaggcgtcattggatccgctgcgggacggtgtgcgagaccggcgccaaggcggacgccgccgcggacgcgtgcggtgtggcggtgctacgggaggactgcgcggcgaggcatgagcggcctgggtcggacccaacacgggcgatggtggggacggcggggatccggcgtgcagggagaggtgggcgagggggcacaggggggcggatgtgcgagggagggaatgggggagaggcaggggcggcggggttcgcgatcggcagaacgtgggtgtgcacgcctacattagatacataa

SEQ ID NO: 14913 - DNA, 648 bp, Zea mays
  Peptide Sequence Number=SeqID_58288
atggctgattcattgaagaggtggggagggacatcatttaatgaatctcctgaagccagaagtatttcgagttttattgagaaatacaacatgtatgatgctattcatgataagattgtcaatcttatgatagtggacaataaaagaacagttcacctacggacccaacatcgtgatatcattctcccatatgaagttgtggagcagctgttgcataccagtaaaaaatgtgacaagagatatttgttacacctgtatttgcatgctttatttgagatagatatacacgctggaaaggattttcatgatatgcaggtggagctttatgcagactacgagacaaggatgctactacccttccttctaaccagtcagcattacaggcttgacaaggcatatgaaatctttgcacaaaaagaacttgctgttgaatttgttacggaacagcatgatgatgaactgtgggaggaactgattagacaatgcctccagaagcctgaaatggtagggaatctattggaacatacagttggcaatcttgatcctctgtacattgtcagtttggttcctgatggcttagaaatacctcggttgcaggatcgtcttgtgaaaattgtgacggattaccggacagaaacttcattgtga

SEQ ID NO: 14914 - DNA, 426 bp, Zea mays
  Peptide Sequence Number=SeqID_58289
atggtgactccgacgagagggaagaaacgtctggtcgttgacgtcgatgtcgaggtcgacagtgaggccgaagtggctgccgccttcagtcgattgtctgtgtcaatcgtcgccaagcctacaggcgatgggagcggcaaggagtactccatcggcaaggacgtcacctgcgcgaccacatcagtactatgttcaattccaatggcattgtttgtggtttcacagttaacccgatttgaaacggttcgtagtgacctcgcccacgccattgcaaagatgcaggtagttgggaaggagttgaaagaattggccggagacgagattatggattcgctagatacgaccaaagaggtgtcagtgaacttcgcaatgtggcacgtgtatgagcttgctcagtcacttgaggaagaagcacaacgtttataa

SEQ ID NO: 14915 - DNA, 1350 bp, Zea mays
  Peptide Sequence Number=SeqID_58290
atgttacaaagccaattaactctgctggtgctcttggaaacccccgcgggtttcgcgctattcaaggtgcttgatgaggggaagctcgacaaggtcgaggatctgtggaaggagttcacgacgtcggactcagcgagaaaggtggttgagctgaaggcttttaacaagtttgagaacacatctgacgccctatctgcagcaaccctgattattgacagcaagcctagcaagggtctgcacaagttcttgcagaaacattgtcagggtgaaacattagctgtggctgattctaagcttgggaatgctataaaagaaaagctgaaaattgactgccttcataatagtgttgtgatggagctaatgagagggctgagaaatcagctcacagagcttataactgggtttggtgcacaagaccttggtccaatgagcttgggattgtcgcacagcttgtctagatataagctgaagttcagtcctgagaaggcgtgtcttatatcggttgataccatgattattcaggccattggcttattggatgatcttgataaggatcttaacacttttgccatgagagttcgtgaatggtatggctggcactttccagagctcacaaaaatagtttcagataatattcagtatgccaaagttgtgaagatgatgggtaacagagctaatgcagtcaaccttgacttctctgagatattgtctgatgaagagctagaaacacagctcaaggaggctgcagtaatatccatgggaactgaagttagtgaacttgacttgttaaatatcagagagctatgtgatcaagtgttggccctttctgagtacagagcccagttgtatgactatttaagaagcaggatgaacactatcgccccaaatctgcagcactggtggctttctccactaagaactaaaggttgtgtttctctatatgctttattcaaagctctaaagacaaagcattctacacccaactatgggctcatctaccatgcatccttaattggtaaggcttctcaaaaacataagggaaaaatctctcgttctcttgctgcaaaaactactcttgccatcagatatgatgcccttggtgatggtgaggacaactccattggcactgagagtctactcaagcttgagacacggcttcaagttctcgaaggtagagaacttgggaaatctgctggttccacaaaaggaaagccaaagatagaagtgtatgaaaaggacaggaagaatggtgctagggctttgacgactcctgctaagatgttgagactggatcgaaagtctataaatacactcgacggaagcccattggtgaagatgtcggcaatgtag

SEQ ID NO: 14916 - DNA, 222 bp, Zea mays
  Peptide Sequence Number=SeqID_58291
atggacgagtctggtgtggattgggacgcttcaggtggtatcgaagctgttaggttcagcagtgatgctgaggaagtggtggagggcccccaggtccttcaccgcgaactcccgcttgagggcaatgatcgtgcaccggaggagatcagcggtggatgtcatgagcacaatgtcgtcaacgtagagcagcaggtgcggtgtcgttgccgcaccggtagatga

SEQ ID NO: 14917 - DNA, 192 bp, Zea mays
  Peptide Sequence Number=SeqID_58292
atgaggctgggagctatagtgctacccctgctgcccctcatgctattgaccctgcacttgcttcgattcttcagacactcactcagcatatctgtgaccacttcagttccggcagcttctgcagcgcggcctcagtccgagtcagtaccagctccagcttctaccgcagatcctgtatccgagactgactga

SEQ ID NO: 14918 - DNA, 345 bp, Zea mays
  Peptide Sequence Number=SeqID_58293
atgatgaggcatgtggtctactcatctattgatggtcgaaatttactggaatcatcgaagatggcattggataaaggaaaattagatgatgctaatctcaagttgcagcaaatcaatgtacttgatgatgaggctgtcatgaggaaacaactccacgaggcgagagaacagctggtgagacaaagatatttcttcacgatagctctctgctcagcaaccatctctcagcagagccgccacgccatctccctgaccatcaccagttgtgccctctcggcatttgcaagatttcgttgtattttgttctacaaccagtgtgaccatcattgtaaggacgcattttga

SEQ ID NO: 14919 - DNA, 441 bp, Zea mays
  Peptide Sequence Number=SeqID_58294
atgggcaagagcaagaaaggcggaagttcgtcgcaccactccggcgacaagcggaagcgcgagctgagtcccccctccgaggacttcggtgactccgagtactcaaaggaggagttctcctccaagtccgaggggtcgccaacctacgcctctcccccggtgtcgtccgatgactcagacgattcccaggggatcgccgccgaggtgtggacgtatatccgggccatcgagcgctctgggctcgagggctcggatgagtcggagatctcctcggacgaggaggactcctccgactcgtccaaggaggggagcggtgatgacggcgatgatgagggcgacgacggcgacaagggcgacgatggcagcggcaagggtgacggcggcagcagcaaggacgacggcggcagcgccactggcttaaatattagtatagataagtag

SEQ ID NO: 14920 - DNA, 276 bp, Zea mays
  Peptide Sequence Number=SeqID_58295
atggcgagagtagcgtgtaccctccttggcaagaggctggacggtggtgtatctgtgctctcagttggcgtgaacccgatctgcatacccttgagagtcttttctttagtcaggttacgagtcattttgattgtgattggtgttaagcgccggtgggcacggccttcttacaaagagctagcagggttagcttttaatgggttgctgttgggtctatgctttgtcgccgaaggtcttcaagggagaagcagctttcggctgaggctgtttgcatga

SEQ ID NO: 14921 - DNA, 747 bp, Zea mays
  Peptide Sequence Number=SeqID_58296
atgacttcccacggatcctcagaggacggaaatgcactatcccacactgacgggcttgcacgagagggctttccccgcattttgtgggagcagttcgagaagcaccgagtgccccgctgtagggtgaggatgaccttagagcctcatcctctacagccaggctggcgctcattggactccgagtcttttggataccgagcggaggacacgatcgaggcgatcgctctgcatggattgaccactttctgcggattccatcctttggagctggctacccaccccattggcttgttccccgccgaaagggaggacgacccaatgtggaaggatagggtggagcatgccaaggatatctgggccatctacccaggacagacggcgcacttgaccgtacggtgcatgaatgctctgtaccgtctgcaagtgatgtgcggtgaggcgatgtcccatctgatggcactattggaggcgacaaagattacgttggacaacagggaggagcttgtggttgatttgtctactgaaatggtggagaaggacttgcaggtggagcagctatccactgatatccaagagttggaggaactagtgggcaccagggagaacaccatcgaggagatccaggacatggaggccaacgaggacgtcgacatcgagggaggagatgagcctgcctctagtgtggacactgctggctcagggagaccaccttcccccgagtcgagtgttgcctcgttcgctcactag

SEQ ID NO: 14922 - DNA, 342 bp, Zea mays
  Peptide Sequence Number=SeqID_58297
atggcacaccggacagtgaacagtcactgtccgggccctagatgctttcagcatgttgtggatgaggcattaagagcaactcaggctcttcgatgcagaaacatgccaagaatagctgctgcaggtgctggttcgtcttctcagcctcaacgaacatatgttaggacaaaaaagcgttcaagaaatacaacagctcaagatattggagaagaggatagtgatgatcaagatggtgttgctacagcacaagcagaacaacaacaaacccaagaagcaaatgaatacatggacgaagatggtgttgctgctgatgcattttgtttggatgctgatctgctttag

SEQ ID NO: 14923 - DNA, 1002 bp, Zea mays
  Peptide Sequence Number=SeqID_58298
atggcccgcagtgccaccggatttggtccacgccgtcgcgttgtctggagctcacgcctcctcgccgcgcccctccttgtgctgttcccgtccacgacgcctcctttcccggcgtgggcgccctccacgacacaggcttcctcgactctatgggcgagccggctgccgcgccgccgcgcgggcgtgcaggcaggccgccaccgcctctcgggcgtgctggcaggctgcttgtcatgtggggccaccaatataccaggcaccgacgagcgcgcgatgtgtgcctcgcggccgagcgtgctgcgcggctacgagttgcgtagtcgcggtccggcgtcgttgggtgccgagtcacttgatattgccgccgcctcgcgggtgcgcgtgcagtccggatccgcgcaggcattgctcaaaggcaccccgccaccgaccctcgccttctgcgtcttcggtgtgagcagccttcgtgcgggccgccgttgcgagccagccatgcgcgggctagccaccgtcctgcccacatcgacgccttacaacaccttcctattcttcgcgcttctcccgttgccggcgtcaacccctcctgccaggcccgtcgtagtcccctgcccggctggacccgccccgtcgccctcccccttcatcgctattgtcacattggagggcacggaccgggcgacggaactgggtggagatccaagcgaagaagtgggtgagggtggtgaacatgtcggacttcagccggagtggaagagtccaaagaaaaggctgaagacggagaagtccagagatcacaatggacaaaatcaaagggcagagcatccctggacgtggaagtggaaaaaggaagacgtgagtgacgacccagctggcaagcatgacagaggcgctcagaggagccccgactatcggagatatctaagtagctggagagctgggacatcacgtcatgtccatggtgcccgagacaatgatggcaaaggacggaggtggtggtggtag

SEQ ID NO: 14924 - DNA, 963 bp, Zea mays
  Peptide Sequence Number=SeqID_58299
atggggtctaggaacatgtcggacaacctgagggtggagctcgacccaatcacggagaacagggttcatggctcgatcgaaggccacaaaaaagccctggatagtctgactgtcgtgaagagtgacgcgcacaacggtcatggtgacaccgggcgaagtcgggaaagcggtggcactggaggccagggcaggccccctggtggtaggaggaacaccatggaaagtcggggcatgtgcgctggggtacttgcaggattatctgctgatgatatgattgtagtaaataatatgcgctgcttacgtggagctgattctaagaagtcttcagttggggcttttactttgaaatttgatcttcagaagaaaaagcctggtatcaggaaggagcggactggagaagagtcaacatggatgctatctcgattttatcccatcctggagtgcacagagtatcacttcttgtgttctattatagaggtgttgcatgctttgatgactgtccaatacctatcttcattcactgaggacttgattgagaaacttagtaagggtgagctaccaaaagatgagtaccactgcatgaatgatcctagtcctagtttccgtggaattccagggagcacatctgctcgaacgagcccagctcatcagccagcccaatccatgagatctagacgaataggtggcacatgggctagacctcggaactccgatgatggttattcgagtgactctgtactgaagcatgcatcaagtgacttcagaaagttgggccagcgcctatttatctttgtaattggaggtgctactcggtctgagttgcgtgttgcccataagctgtcaggcaaactgaagagagaaattatccttggctcctctagtcttgatgacccaccgcagttcatcactaaactgaagatgttatcaaccgaggaactgtcgcttgatgatttgcaaatataa

SEQ ID NO: 14925 - DNA, 90 bp, Zea mays
  Peptide Sequence Number=SeqID_58300
atgacgagcaggcgcgggccgaggccgtggagaggccgcccgcggccaacatgggggaggagatctgcgtatcattccattaatagatag

SEQ ID NO: 14926 - DNA, 846 bp, Zea mays
  Peptide Sequence Number=SeqID_58301
atggtgccggcacaggagagagggagaagcaccaacgggagagagggagaatctccagcgtggagagagctgggagaggcggctgggaggagggagtcgcctgggacagggaggtggctaggaggaggcgtcgcctcgccttatgccttgccccttaaaagatttaagtcaacgatacctgaatttccacaaacagaaacatgtgaactacttattgttgaccggtcaatagatcagattgcaccaattattcatgagtggacgtatgatgctatgtgccatgatctattgtgtatggatggcaacaagtacgtgcaagaggttccaagtaagaatggttcagcaaatgagaaaaaggaggttttgttggaggatcatgatccagtatggcttgagctgcggcatgcacatatagctcatgttaatgaaacgctacatgaaaagatgaccagttttgtatcaaagaacaaagcagctcaactacagcaggcaagatctggtggagagttatctaccaagcagttgcagaaaatggttcaagctcttccacaatacagtgatcaaattgacaagctcacccttcatgttgagattgcaggaaaactcaataacataatcaaagaacaccaccttaaagatgttggacagctagagcaagatcttgtgtttggtgatgctgggacaaaagaactaatcagtttcttacgaacccgcatggatgtaagtcgtgaacataagctgcgtttgctgatgatttatgcttccataaacccagagaaatttttcgaaagtgagaaaggtgcaaagctgatgcagaagtacaagcatttacttttgctgacttga

SEQ ID NO: 14927 - DNA, 1140 bp, Zea mays
  Peptide Sequence Number=SeqID_58302
atggcattagattcacaatttcttcatttatcctttctttctcttgttcttgagaggcaatatctccctgcttcttcatattttagtcactacaaaaataatggtagtaaatcagcaatcaataggacaaaaatcccaaatcctaaaccagcaggcagcaactcgtaccaatcaccagcaagcaggcagcaggcagcagtagcaatcagcaggcagcgccgcagcaactcgccagctgccaaggagcaggcaggcaccaggcggtctgggcctgggcgttcaatagcagcagacaggagacagcagcaactcgccagcagcagcagacagcaggaggcggcaggcggtctgggcctgggcgttcagccgcgcagcgacgacagctggcagcgcgcacacgccaggactccactagaccactactccggccgccagcgccaggaagccagccagccacgcagccaccaggagttctttctcgcagagtcgcagtcgctaggtgccaaggtatccagccgccagggcgccaggaagtcaggaacaggcacacgaacagtcgcaaggatcggagagctggagaagttgaaacggccttcggtcttctgcgcctggcggctgaacaggtggtcgggtggggtccccgatgggcctggcttagggtgtgccagggcccacccagacccccctgtaggtccgcccctggccagaaggtgcaggaagacggagctgaaaaatatagcttcaaccctcactcctactcaggcctatatggtcactaagcatggagaagccgccagaccagggcacatggcatatgttgtgcagcttcaggttggggagagaaattggtcgaattttgcagcaatccatacaaaaaagagcaaccgactagaacaccagaggcttaataaattggtctatatcagttacaacaagaagatggaaaataggtttcaaacactaagagagctgggattcaaaggaaaaagaagcaacccactagtgcttgaagagttcatgtgggaaaatgaatgggttgaagaaaatgaagatgatggtgacaacatatggcatgtgaaaggatcacgatgcccaagaggggcggtgaattgggcttttctaaaaatcaacactaattaa

SEQ ID NO: 14928 - DNA, 462 bp, Zea mays
  Peptide Sequence Number=SeqID_58303
atggacgagatcgagagcctcatccacgccgcgccatctccggccaccgttctccccgcgcggccaccgtctccgacgcgggcctccattcccgtatcctcctctccggcgttggcgccggcgcccgtccccacgaagccgcctctccccgccgcctccattccgatctccgtctctgtctcccccgttctaacgtccgtctccgttcccatcggcgctgacgggtttggacctccacccaacacgctcacagagccggtatgggacaccgtaaagcgagacttagcacgcatcgtcagcaatctcaagctcgtcgtcttccccaatccctaccgcgaggaccccggcaaggcgctcagggactgggacctgtggggtcccttcttcttcatcgtcttccttggcctcacgctctcctggtcagcttccgttaagaaggtacccatttcctctcgcaactag

SEQ ID NO: 14929 - DNA, 1086 bp, Zea mays
  Peptide Sequence Number=SeqID_58304
atggcggcggacgagcggaaaacacgcgagcgcgccggcgaggggaggcggatctggggggcggtgactccggcgtgcacagccacagcgttctgccgctcgcgcgagacgcaccccgcggccgcatcccggccaaccctcccgcggccaccaatcaacgcccgtggccaccaatcaacgtcgcgccccacccgcgaccttccttcaacggggcatcccgcccgcgaccgcatccaccccgcgtccttccttcaataccgcatcacggaccggcttccttgccgtgggcggcgctcctccgccgcggcatccgaccttctctctcccgcgccctccctcaagtcccgcctcgccgacggagacaccctgtacgttctgttcctcctctccttctcccgtaccctcgccgccctcgccggctacgactacgtcgtcgtcgacatggagcacgggttgggcaggatccccgaggcgctcgcctgccttcgcgtgctggacgccgcgcgcacccccgccgtgctctgcctcccggaggccagcgcctgccgctacccgccgcgcggggtccgcggcgctgcacaccccatcgtccgcgcctccgcctacggcttcgatgactcctacctctcccgctgcgaggacgataccctcgtcatctgccaggtcgagaccgccaccgcgatcgcgaagatcgacgccaacgccaccgtcgacggcgtggacgtcgtgcagatgggcccgctcgacctgtcggctagcatgggatacctaaagcagaatgacccgtcggagcagctcaaattgaggggttatcatatggtagctggcgcagtggacattgctatgttccggaaggcgacattggatgatgtcaggctgttccgagaggcagtgatggagatcgacgaggaggatgatgaggatgagaaatgtgagaaggaaaatgacgggtactggagtgaccgaattcttatcaaagctcgtgatgttgctaggagcagtgctcagaatagcttgtctgaaaggaataatttgaaggctatgggtcactacggtctcaagggtagtttctttagcattttataa

SEQ ID NO: 14930 - DNA, 299 bp, Zea mays
  Peptide Sequence Number=SeqID_58305
ctctggccacgatggccgtgagcagcgcggcaagaccgacgcgttcccggcgaccagaggctactccgagcaaattaagggcggtggtgctcaatttggccgagccacacggcggtcggaggggaagaagaaacactggccgcgtgagttcgtggccaacagcgtggcagtaactccggtgagccacggagacttcagagaaggtcacggcgacacggtaaaagagttaagccacgcggcgcacggccgggaggcggcggtcgacggtgaacatatccacatccgccgcggtaaagatg

SEQ ID NO: 14931 - DNA, 78 bp, Zea mays
  Peptide Sequence Number=SeqID_58306
atggcgaacgacacgaacgcgcacggggttagacggggggagggggcggtagacggggataacaaagattataattaa

SEQ ID NO: 14932 - DNA, 321 bp, Zea mays
  Peptide Sequence Number=SeqID_58307
atggacattcagtggtcgatgcctcctagaggacaaattcttcctcctccacaaccaggtatgggatattggccgccaccaccatggggatatcctacacatccaatgggccttggggacgcccccatggccaacacagccacttccatcaccagcgattcaatgtgtgtcaatacaaacatggggcagcaattaactcttaaatcacttttgaaaagggttaacattaagaacgtgggtaccgtcgaacttaatgggcagccctcgccgacgcacgcaggacccataagttcgacggccacgtggccccgtcgaacttaa

SEQ ID NO: 14933 - DNA, 453 bp, Zea mays
  Peptide Sequence Number=SeqID_58308
atggacaacctcgacgccgaggaaaatttggcggcggccttaaagtataggagcaccttgcggcgaggcttggatttcaatgcgttcctggaagacgaagaaagtgcggcaacttccccgacaccgacgccggctacggatggcgagctcgcaggcacgggagggctcggcactaccactggcgtgcggcgagggggacacgacgtcgcaagcgttggcaggggccgcggccagaactacccgaggtcgtcgatcgacgttgtcgaggacgagcgcagggctgggcgaggactcgccaccgctagcgttggcatggtgagcgctgggcgcggcctcaccaccgcgaacctcggaatggcgagggctgggcgtggtgtcgccacacaggacgaagctatggatcgtgtcacagggcaactctcactggaaaaaactgaaaaaaggtcctcctga

SEQ ID NO: 14934 - DNA, 642 bp, Zea mays
  Peptide Sequence Number=SeqID_58309
atggcgcctcccgttgacgtggccggcccgcgccctaggttgggcgatgcgaaggctcctccgaggttgaggtcgagtccgtcttccgtgaccgaggtcgagtccgagcccctaggtcgggcgaggcggaggccgttggctgaggccagggtggagttcgagtcctgggctgagcccaagtccgagccctgggtcgggcggaatggagttcgtcgtcttccggggcttagcccgagtccgagccctgggtcgggcggagcggagttcaccgtcttccggggcttagcccgagtccgagccctgggtcgggcggagcggagttcgtcgtcttctggggctgagcccaagtccgagccctgggtcgggcggaatggagttcgccgtcttccggggcttagcccgagtccgagccctgggtcgggcggagtagagttcgccgtcttccagggctttgcccgagtccaagccctaggtcgggcgaagcggagcttcctatggtgcctgcggccgggcctaactgcatgtcagcctcactctgtcaagtggcaccgcagtcggagcggcacgggcggcgctgtcttcctgtcagaccggtcagtggagcggcgaagtgacggcggtcacttcgcctctgtcggctga

SEQ ID NO: 14935 - DNA, 399 bp, Zea mays
  Peptide Sequence Number=SeqID_58310
atggcgcctcccgttgacgtggccggcccgcgccctaggttgggcgatgtggaggctcctccgaggtcgaggtcgagtccgtcttccgtggtcgaggtcgagtccgagcccctaggtcgggcgaggcggaggccgttggctgaggccagggcgaacccgagtccgagccctgggtcgggcggagcggagttcgccgtcttccggggcttagcccaagtccgagccctgggtcgggcggagcggagcttcctatggtgcctgcggccgggcctgactgcctgtcagcctcactctgtcaagtggctccacagtcggagcggcacaggaggcgctgtctttctgtcagaccggtcagtggagcggcgaagtgacggcggtcacttcggctctgtcggctga

SEQ ID NO: 14936 - DNA, 702 bp, Zea mays
  Peptide Sequence Number=SeqID_58311
atggtgaagtcgttggagacgaggcaggcccgaattctagggggtctggggccatctgggcagactagggtcgttggggggaacctggcgaaccttgtggtggggtttcggtcgtgggaaagggactataagtgggtaaacgatggagaggagtgctccggcgagcaatcccggtcgcggtgggggagaatctggtgcaccaatgtcggtgtgagcttcggtgaggggtcgggggcatccgaggccgagatttgggcacaggggaaggctacattaggcgggcaccatggaggcacgatggtccgacacgcagcggctccggcgagttcaaatccaccgcgtttagatggaattaagggagaagaagggcgaggtggggttccttacccagggggtgctcagggaggcttggcacggcgtcgggaggcttcggggcatgggtggctcggcgggtacgcgtcaccggcgagcttggggcggcgacggttctgcgcgaggtggactgcgggcgaagaaaatgaggaagggggagggagcagatgcgtgcagggctcaagaggagctagggtcacgacggatgcgcgagaggaggggcgacatgggccagcttcctcggtgtgcgtgcgcgtcgggcggaggggcggttccacaggaggagggggaaggcgagggaggttgacaagcgaggtcgcgcgtgtttga

SEQ ID NO: 14937 - DNA, 96 bp, Zea mays
  Peptide Sequence Number=SeqID_58312
atggaacagtctgagtatagcagttcgaatatggtggtggatagtgtttctcttaactgctggtggtggaatagatttcagaaaaaatggatttaa

SEQ ID NO: 14938 - DNA, 900 bp, Zea mays
  Peptide Sequence Number=SeqID_58313
atggcggagaggaaaagggaggagacgaggagcagtcgcgccgcctcggtggacgcaagagcaaggccagagctacacttggacatacgcgaggaagctgccaagaagaacagggaaccaccgaccgcgtccaacatacgccggcattcatcgtcactgcaggtctgccactggctgctgccatccaccgcgggctcggtcgccacgtcgacgccatccctgtcctcgagcgcgccgtcacagtcgtggcgccggcacaagaatcgtctgccgacagcgagcctgaggccggtgcagccggcggcgacgactaccagcagctgcagcctgtcgagcccgactagaggggtgagtggtgctgctcctgatgagatcgctggaggcttaatggagattcctatcatctatgatgcacttggcgatctcgatgaggcccaaaagcttcttcatatggcactcaggttgctcgagggctcatcgagggagtggagcattattgccggtgttgtggcacaaatgggcgttctgtactacatggtggggaggtatgcaaattcggggaactcgttcaagagtgcagatgcaaattctagggccattgatgaggttgcacagttgtttgaggaggcaagggcggttctggagcaggagtgtggcgcttctcatcctaatactcttggtgtgtacaacaaccttgctgcaatctataatgccatgggaagggctcatattacaaagcttgaaaacaagaagactcatctccaatctaaacttacagaggaggagaaagaaaatacagtcctccaggcaaatttagaaaaacgaaaagaagcattacacaagcgccgtgttgaaagggaaatgtgcccttgggccatttctaagtattttggtgattga

SEQ ID NO: 14939 - DNA, 315 bp, Zea mays
  Peptide Sequence Number=SeqID_58314
atgctacttctcaataatgggacaaagaaaacagaacgagaagtaactggtcgaacagagatcgctacagtcgagtactttgacgtcgaggtccttgagaggggagttagagttaagttaatctaccactgtgaattggtccaacaatctgtggacaactaccttgatgtttggactttttatccttcaaaactatgtttttctaaggcagttgtttatgcatcgatctgcgatatagaccagtgctgggaaaatggtcgaacgaagatggtcatatcatctctaaagggctgggaagaaagtggagctaccgag

SEQ ID NO: 14940 - DNA, 318 bp, Zea mays
  Peptide Sequence Number=SeqID_58315
atgggccgcgcgccttggctgcggatggccagagacgtgagagggatgggtggaggccagtgtgtccacaagagcacaaaaccacggcgcgccagcagccgggataggagcaggagctacccagcttcagggtcaggcaatgaaacttacgggagagcccactataaatatgcttctatgtgtcatgatgcttggctgtcgatgtggacatgttatgggatgggaaaccacacaaaaagtggaaatatagtgaatctaactagtgaaatagctagccattgggaatgccctaaggttattgggtctattcgggtttaa

SEQ ID NO: 14941 - DNA, 921 bp, Zea mays
  Peptide Sequence Number=SeqID_58316
atggccaggaagtgctcccactgtggcaactacggccacaactccaggacctgcggactaggactaggactaggacacagagaaataatgctctgcgaaggtggcgacgacaataatggccgcagcggcctaaggctcttcggagtgcaggtccgtatcggcggcggcggtggcgcagggtcggcgtccatgaagaagagctacagcatggactgcctgcagctcgcggctcctcatgcttgttcgtccctcgtctcgtccccgtcgtcgtcgtcgttgtgctcgtcctcgtccccgtcgtcgctgctgctgtcgattgatgatgggttgcagagaggggcggccgatggatacctgtctgatggacctcatggcagagctgtgcaggagaggaagaaaggagttccatggagcgaggaggagcacaggcagttccttgccggcctggacaagctgggcaagggcgactggcgaggcatcgccaggagctacgtgccgacgaggaccccgacgcaggtcgccagccacgcgcagaagttcttcctccggcagagcagcatggggaagaagaagcgccggtccagcctcttcgacatgcggcaggtgccgatctgcgagaacagtgcgagcatctccgatccgctggacgtggcacgccatggcgtcgcctcggcagactccgagagggcggccgtggacgtggacctgatgaattcgacgacggagggtgacgacggcaggagcagggacgtcgtgtcgtcggcgtcaggtgcagggaccgcactgcggttcccggcagcggcagctcagacggagccgctgcatccttcgtcatcgcatggccatgggcgcggccaccactgctctccgttggacctggagctgggcatgtccctgcccgccccatccgtcggaacgtga

SEQ ID NO: 14942 - DNA, 324 bp, Zea mays
  Peptide Sequence Number=SeqID_58317
atgaccatctcatcgaagtttgagttcctccccaactctagctacaactccgacaaggaatttctctccatctattcatcttccggggcaacccggaacatcgccgtgaccggctccgcgagagctttgtcaccgcgcttttggttcgtcgattggatctcttattcattgttaatatgcgaaacaaacaagatgtccaacagcaacgtgagattgaagggcttagttggaagattatttattgctcatgataaggtcatgttggttaattggaatatgaagaactacccgagaaaacagtgctatcacaagggtggaatgtga

SEQ ID NO: 14943 - DNA, 2061 bp, Zea mays
  Peptide Sequence Number=SeqID_58318
atggccgccggcgaaggcggaggtggggacatcggcgccgactcggagcggcgcctgcaaaaggctatggataagctctaccacttccccaagcccaagtcgagtagcaccggtggctccaagccctcttcgtcgacctcggctccaagctccgggagagcggtggggaaggcagcggcggaggcagcgaggaggttcggggtggtgcgcgggtcgcgactcccgcatcagatgttggccatggcagcgatctcgccgccaccgccgtgccgcccctgggaccgcgccgacctcatgcgtcgtctcgggtcattcaaagccatgacctggttcgccaagcccaaggtgaagtatctgcggtttgtagtggtggttgataactatttgctttcttcagttgaaaaggctgctgctgttttcagcctgaagctggactctggacataaactactttgcccgtggattgataacatatgtgatgaatcacttgctttatttccaccaacacctcctcctgttttagttgggaactactatgagcttttgtcctctctgctgcgacttttagcactcccaagaatttcctgctcttctcttgagaccatgaaaaagaggaatccacagctagagcagttcctatcagaaccattctcttcatcagttgttctcaaagggggacttatgcttactgaggactctacaattaaggatttggatgatgcttttcaagatgctgacacatattatcagcaggcacttaagataataagtttgtgtggatgggaacccagactacttccttatgctgttgactgtggaactgagtttcactccgatgcaaactctacctctaaattggctcaaccagagcaatcaagtaagacaatggaggatcgggtaatactttactcgcctgatggtgctcgaccatctgttgatgttaatcaagaagatcagcattatgatccactatcagttgttttagattgccagttttgtggtgcatgtgttgccttgtggcctttttctcttgtgcaacgacctcttcaactctttaagctgatttcagattctaatagacaagatgaccaggataatggacatgccaacatagtgagtggagtaggacattcaaaggatgccaacattagttttaacttcactattgctgggggtcctccaccaactagacaaagtttccgaccaaaagtttcatttcctgtcgttagtcgacatttgaaagctgatttgaactcccgtgtgaatttgctttcctccagaagtgattgctacatggttcctgttgcttcgcatgcttcaggttccatgaaacgtaaaagaagcacagatgagcctcatttgttggaaggtgatgccgatgatgttgatacatccaccataggggcaaatcatgaccagccaggagaaaattctgaaaagagcatatcaaacttagtagtgagcactgaacagaaacaagatggttcacattccaatgcagctaaggatactgaattggatgaagcttccaatgaaacacaaccagaaacaggttctccattaagaaaaagtataacaagcacatatgcagatgctgatcaacatggattggaacctagattttgctcagtccagggtacgaatgaagaaccttctggtggagtgaccctgacagagatgcatgcaaacaattccaggtcaactgagggtcatctgtgtccatcacagttagccctcattaaccctaactgtgaatttatgctttctttgacagaaaaacaagggctgtatgacagaatgaatgagtttgatcctatcaagcagcaccggacgttctgcccttggacttcccctgattacggcgaacccttgcctggatggaggcttactctctcggcattacttgctggggacaagagatctgatggggacttgcaagtggatattcagaccagccttctcgatgaggtagaggaggatgaccctcttacctctgttaggaagcttttcatgacaccacctccgaaaaggcggaggatacagcaatctgaaaagagctga

SEQ ID NO: 14944 - DNA, 180 bp, Zea mays
  Peptide Sequence Number=SeqID_58319
actgtctgccagtctgactgccagactgactggcagactgacctgcaggcgggacagacagatcagaagtcagagggtcagagaccagttgagctgccccccaggaccagttcagctgctggagttgaaagttcaactcagctgaagtccagctcagctgaaaagctcagctgcagctga

SEQ ID NO: 14945 - DNA, 378 bp, Zea mays
  Peptide Sequence Number=SeqID_58320
atggtgattcctcataggttcaaagacacacggagtcaccatgccgcggagcagaaggagcagcagcttcgcactgtgagggctgcttttgggctagaccgcgagaatgtgcacaagagaggagagaaggaagaggggcgacgtttaatcttggatcggactaatctgcgttctgtcaaacaaacgcaatgcattcaactggaaggtaaacgccatcggctgatcggccgttgcccactcatgctctaccgcatacgcgctgtcgcctggaccctagaaggagaagctgctcctccgttgtctggaaggagaagaccagagaagaagctgctggaggaggacgccgacgatggttggttggccgaaccaaagccgtag

SEQ ID NO: 14946 - DNA, 603 bp, Zea mays
  Peptide Sequence Number=SeqID_58321
atggcccagtctctgacacgggggcccgggcccacgagtcatactccttgggcgtcggtttccgagtgcaaaaagagcgaaccaccgctcgcgccagtactgcgcctcctcggggccgccgcagaagacagagaagcaatatcgaggcgcctcacacgtggcccggcgaaaccatcaggcgtgggggccacgggtcagtcagccgcggggacagacgtggcagttggcgtgaccgaaggcggactggcagagattacacgcggtgcccgcacggctatctctagtcgcgtggtaaacaacactcttccccgccacgtggacggctccaaggccgccatgtggccagagaagacgatatcctcaaaggtatcaacagtgggtccggaccccatgggaaggtgccggacccctgcatatacagaccggacctccgggcaaggtccaggacctccacgggtgcaaaccggacccctaggatgggttccggacccctctgtgtggggtccgggccacccacagcagggttccgggatttcggggcggagccctgatgctgccacgtggcctaccgcccatgacgtgatgtgccgcctcggcatttaa

SEQ ID NO: 14947 - DNA, 612 bp, Zea mays
  Peptide Sequence Number=SeqID_58322
atggtccacatcgtcgagcaccatgatttcatgcccgaggacttcctggtggaggaagaggctgcatcttccacaccgcgggccaccaaccgccctgcgcctggtgcagctgctgctgtgcactatgcgcggcagcacactcctgcgcaaacgtctagggcgtcgagggctgcgcctggggcgctgcctgcggccagagaattgttgcgccaccctcctagctccacggcctcaccgggggccatgaagcagtggcgtaatgatgtcgaccgtctgctcggcatggcgcattctggctcagccaggcccagacctcggtcgtctcggcgtcaacacgaggcgtcagcgtcagtgcgctccccctcagtgagggccgcaccgactgaggacctgcgggcggagctcaaccgcaggtgtgcgggggatgacgctccagtctctctggagaggtctaatgacctgcgggcagaactcaactgcatgcgtgccggcgaggatgcccgcgtctctctggagagggcacgtgagcgccggctaaacgtcgagggacgcaacctcgactacgacttcgctgcggttgcaccgcagactccaacgggcgccaggatctag

SEQ ID NO: 14948 - DNA, 138 bp, Zea mays
  Peptide Sequence Number=SeqID_58323
atggggctcggtgtatgcggcgcgctctgccaaggtggtgatgaggatgacggttttggttatgacaatggtaatggtaaagaaggtgtcgaggcggatctccaggagttccaggacttcgacgagttcgaggattag

SEQ ID NO: 14949 - DNA, 594 bp, Zea mays
  Peptide Sequence Number=SeqID_58324
atggcttatgcccatgcgatcgaatgcgtgcaagaaaatgatgtctacctcactaccattatccacgagtaccttatgcagatcccatcctgctactcggcagtttatcaccatggcatcggcatggggtgcactatggagatcgatgtctcttatgtcgaaggtgaatggtatttgggaccactttgtttgaacgactggcccagtgagagctacatgattgactcttcgatagtggtctttcttctgctgttttgtgtcgatctcgaagctggatcctccggtaatcatgcgatagagctaggatctcttggtgttgctagtatgtgttgtggttttgctggtgaggatggtaatgttcattgtagaattggtgctggttgtattgctggggatgacttcgccatggaaaagataatagagccttcgctgttgtgggcctcagtctctgcccctgcttctggttgtgttatcgacacggcgggctgcggaggtcttatataccatgtgagggctgggacttcgagggctataatgaaggatttggccatggtggtggcgtctcctccggatgatgcgactgcaactaattag

SEQ ID NO: 14950 - DNA, 363 bp, Zea mays
  Peptide Sequence Number=SeqID_58325
atggacacggattacaaggaaaaagaaacaaagacccatcaagctgcccttctggggggagagtggaatcgtcccccatctctgacgacgaaccaaccgtgcctgggaaagaaccacctcagcgggaagctcgtcgatgaaggaaccgacaccgtaacgcctggcgacatcatgaagccggagaacgagacccagcgcagcctgtgtcgcgagatgagatctcggaggtgggagaaactccagatgaacgagtcttcagggagaggaggaactcccgccgacgtgatcatcggcaagctcaagagcaggccgagcaggaggcgagacaacgtcgagagaaccctctcctcggacgaaatctga

SEQ ID NO: 14951 - DNA, 252 bp, Zea mays
  Peptide Sequence Number=SeqID_58326
atggagatgcgggactcggcagaaggtaagccgcgacccgcaggaaatctaaacgtcgagcgccatgaacgagcaaggagctgggcacacggcggtcggaaccaagaagcagggaacggagagggagtgagggaccggaatgcactggagatggccggcggccaagcagactcggcccggcagctcgacgaccagggccatggaggcgagcagggagattcactgggagaggatcatggccggagtggatga

SEQ ID NO: 14952 - DNA, 435 bp, Zea mays
  Peptide Sequence Number=SeqID_58327
atggccgccccgcgaaccactcgctccgtcgcattaactccgcggcgggacaggcggcgcctctggcaggagaagcaggcgacgcttcgccttcgccataataaccgcgccaaaaaaggaaccaggctccgagcctccctactgatcagaggttcgaaagctggccccccggaagggttcgacagccgcctcagatcgcgtgggccctacacccactactggtcagaggttcgaaggccggcccctcggaagggttccacggccgcctcaggctactcgggctccgtgcccattactgatcagggggctcggactcggactcagccccggaagacggcgaactccgcaccgcccgacctagggctcggactcaggctcagccccggaagacggcgaactccgcaccgcccgacccagggctcggactcgggctaa

SEQ ID NO: 14953 - DNA, 348 bp, Zea mays
  Peptide Sequence Number=SeqID_58328
atggccaacatgttagacactatcctgaggccctcgaaagcggctacacctgctcctacaaagattttcaaggataaaactgaagaattggtaaaggctattgacgaaagtaaaagtaaaagctctaggatggaacaatggtcgaagttacaaaatcctccaaaagagcaagagctgccgaagatagtgtccgctccatcaatagctcctaagaaagggagaaggatggccaacatgctagacgctatcctgaggccctcgaaagcggctacacctgctcctacaaagatttccaaagataaagatgaagaattggaaaagactattgacgaaagttattgctcctga

SEQ ID NO: 14954 - DNA, 114 bp, Zea mays
  Peptide Sequence Number=SeqID_58329
atggcggatcacctattcaccccctctctaggtgctctcaattggtatcagaaccgtactcttcatttagggactaaccgcccaaagagatggatcctcaaggcaaggggatga

SEQ ID NO: 14955 - DNA, 384 bp, Zea mays
  Peptide Sequence Number=SeqID_58330
atggggttcaacaaggacgcctgccacccaatgaggtattttgtcggttttggctatagtggggaagaagtggtgggtggcatcatctgggtgtcctttgaggagaatgagggtgccgtcgatgtattggaggaccgcacaaggatcatggagagagaaagggtgtctgatatgttgtacatgggtgatgattgcctagagcacatcaacaacgagggtgaagaggaatccagtctggtcaaggttgatgagggagccaatgattggtttaaggtggtttgtgaggattttagagatgatttttacactacaattttggaggcagatggggtggtaatctcctgtggttcaggcatcaagttttttgggagaagattgacataa

SEQ ID NO: 14956 - DNA, 360 bp, Zea mays
  Peptide Sequence Number=SeqID_58331
atgaccggaatggctcaccggagttactccggcccgcccgagaccttctcaccgtcgttctcccttctctgcccgtggattcatggccccttccccgccattaagttcgtcatggcgccctcttcctctctgcccaactcaggtgaccccagaacccccgtagctcacgcctgcctcaaccccggcgacctcaccgccgcggagaggagcagcaccgcccgcagccgttcacccctctccgacaacgagcagctcgtggttcctgagtgtgttgccgaagatccctttgagcaacaacctggaggtgaagttggcaacatggatgactttgaggagttccaggactacgacgagttctag

SEQ ID NO: 14957 - DNA, 198 bp, Zea mays
  Peptide Sequence Number=SeqID_58332
atggcgcttgcgctagcgggtgcgacgaggctgggacgcgggccaccactggccaggtgggccgagggggtgcaggcgctaggcatgggcgatcctggtgatcttcgaccacgacttgaccatggacgtgtccgtcgtgacctcctcaacatcactgtaccctcacccggagctctaccaccgccgaaagtaaaatag

SEQ ID NO: 14958 - DNA, 1311 bp, Zea mays
  Peptide Sequence Number=SeqID_58333
atgcggagctccgtcgcctcggctgcgctgctggtgacctgcctggtggtggcggcggcggcgaggtcgacgggaaggacaacgctcagcgtcctgtcgttcggagccgcggggaacggggtcacagatgacgcgcaggcacttgtagcagcatggcaagtggcatgccgagtcccccgcgccaccgtgctagtgctcccatcagggcaccggttcctcctctcgccggtcacgctgcaaggcccctgcagcgcaaaactcacccttcagatcgacggcaccgtgttagcgccaccggaaatgggctcctggccgaagcccaggaggcctctgcagtggctcaacttcaagtggctgcaaggcttcagcattcagggaaccggcgcggtggacggtggccagcagaacctagaccttgacatgaagtgttgtctctccatcactcacttctatctgcagacatctacgggtaccgggcactggcattcgccaggagtcaagcctacgctgataaggttctacaacagcttcaatgtcagcgtgcgcaacatccggatcagcaacagcccgcagtgccacctcaagttcgacagctccggaggcatcagggtgaagaacgtcaccatctcctcccccggagacagccccaacaccgacggcatccatcttcagaacaccaaggacgtcgagatcaggagctcgaccatcggctgcggcgatgactgcgtgtcgatacagaccgggtgctcaaatgtccacatgaagaacgtggtctgcaatcccggccacggaatcagtctaggaggactcgggaaggacaacagcctggcctgcgtctctgacgttgttgcagagaacatcgtcgtccagaacgcactgtacggggtcaggatcaagacgtggcagggtggcgtgggctcggtgcggaacatcaccttctccaacgtcagggtggcgaacgtggccacgcccatcgccatcgaccagttctactgcgacaggggcggcgcgcggtgcgccaaccgcaccggcgcggtggccatcgccggcgtggcgtaccgccgcgtggtcggcacctacacgttccagccgctgcgcctggcgtgcagcgacgcccggccctgcaccggcgtcaccatgctggacgtgcgcctgtccccggcggcggccgggggcaccgtggcgccgctgtgctggaactcctacggcgaggcgcggggcacaatcatccagccgctcagcgtcggctgcctgcagaggagcaacggatacgcgatgcctctcacccagccttttaactacacatgttga

SEQ ID NO: 14959 - DNA, 355 bp, Zea mays
  Peptide Sequence Number=SeqID_58334
atgtccggtgcgccagccacgtcaccaaggccgttgggttccgaccgttggagcactgtcttctgggcccgcctggatgtccggtgtgaccgttggcgcgaagtagccgttgctctcctggttcaccggacagtccggtgtacaccggacagtccggtgaattatagcggagcaaattcccgaggttggcgagttccagagccgctcatccttggggcaccggacactgtccggtgtacaccggacagtccggtgaattatagcggagcgcctctggattttcccgaaggtgacgagttcagcgtgaagtcccctggtgcactggacactgtccggtggcacaccggacagtccg

SEQ ID NO: 14960 - DNA, 1293 bp, Zea mays
  Peptide Sequence Number=SeqID_58335
atgcctcctggtcgtgagaaggttggagtcaaaaggccacatggacctcagctatcagaaccaccattgcatccatacgaacaactgcgtctaagacaatgtatgaggaataattcaaggctacaacaattaggaatccctgctttatcaagcatgcttgcaagcacaaattctatttctcagaggaataggccaagtcatagaaatagtgaggactctgagtctgattatgatatttcacaagatgagactggtgatgacaatgttaaggtgggctcaaaggaatgtaacataagaactactgataattcgcttggtgcaatcaagctctgctctaagagagtttttgcgcagcaagaaactactagaattacaaggtcaaagaaaaatattgctcaacctgatgcaactcttacaccaaggcacaacattgattaccacacacaggctaatggccatgcccatttggatgagaacactaacatgaccaatgaaggtcatgttgctccttttgatgggaagaaccctacaggcaatgaagataatgtggatgtcctagctgataacaacaggacgattggaggtcaagttgatgacactaatcagatgtcgaacagagatttagaattaggtcagaatgatcggtgggaaaggggaatcaatatgggacatggtcttcatagaattaaccgaggtttgcgtggaaagttgcaagttgttattcctgaagggaagataaggcctatggcaccacttgttgctgctaagtttgcaactgaatgcaacatttctgtgaggaaccatgtgccagtgttcaaacattggaaggattacaagaaccattcaggcctattcaatctatttacaggaaaacttagtgcaaagtttgacattaacacaagtgatgcaccagttcaaaaggcttgttcccagatgatgaagagtgcggttcgacaacaacgataccggctcaagaaaaagtactttgatccttttccgctacatctagtggcaaaaaaatctccaatcagatctatgactgatgaagagtggaatgaacttgtggagtattggaagagtccaaaaaagtggtatgagacatctcaaaaaaacaaagagaatcgatccaaagttaaattccatcaaacaactggctctcgtagctacatggttcatgtagaaaatttgggagataaatacattgatcaagaacctgatgcactggatttatttaaagagtgtcactacagcaagataaagaaatgctattcatcttctgttcaacaagttata

SEQ ID NO: 14961 - DNA, 267 bp, Zea mays
  Peptide Sequence Number=SeqID_58336
atgatgctggtagactacacaacggtactcgatataccaagtgtgtcggtcgaaggcccgacacaacagggtatcgagcacgtcgtggaagtgacacccacgagcggcgtcacgaatgatgggtctagcgatccatccctctggctccagctcctccgagcgctccgtgtcgtggctcgaactgccaccggcgtcatcgtcgtcgtctccgtctccgtcggggtctctgaaagtcgcctagagggggggtggataagcggaatctga

SEQ ID NO: 14962 - DNA, 81 bp, Zea mays
  Peptide Sequence Number=SeqID_58337
atggagatctcggcggggttcatttggacacatccaactctcgcggagaatgttcgccggtttccgcgctgcggtagctag

SEQ ID NO: 14963 - DNA, 438 bp, Zea mays
  Peptide Sequence Number=SeqID_58338
atgggcaagagtaacaaacgcaagcgcgagccgactcctccgtcggaggacttcgacgactcggaatactcggaggaggagttctccttcgagtctgaggggtctccggctcccgtctctcccccggcgtcgtctgatgattcagacgactcccaggggattgccgcggaattctggacgtacatccgggccgtcgagcgctccgggctcgagggctcggatgagtcggagtactcctcggatgaggaggactcggacggcggcgaggacgaggatgacggcgacgacgacgacggtggcgacggcgacggtgacggtagcggcaacggcaggggcagcggcggcggcgacgggagcaaaggcagcaccagaggcggcagcagcaagggcagcaccagggtcggcggcggtggcagcagcagcaaggccagtggctaa

SEQ ID NO: 14964 - DNA, 189 bp, Zea mays
  Peptide Sequence Number=SeqID_58339
atgacaaagggcatggtcatcacggaggtgctcgggtcagttgggcgcgtgctcgacgggcctcccgagctggtgttgcagccgctccgcctcgccgtcgagatcaaatcagacaaaggccaaggacaaaattggaacgctaatgatggttggttgcatgagtctgtcgattacttgcaagaaatgtga

SEQ ID NO: 14965 - DNA, 141 bp, Zea mays
  Peptide Sequence Number=SeqID_58340
atggccatgatgggttcaacatcagaaaagatgtacctctgccaggtgaggaagcagcaaatttttgttgcttttgttccaaggtggtgcctaaggaagaaagtcgagactgaagcctcgggaggaagtgtcctcctttaa

SEQ ID NO: 14966 - DNA, 150 bp, Zea mays
  Peptide Sequence Number=SeqID_58341
atggttggtttacaggtggtgacaaggatgatgtttatgattatggtaatggttgcctttggtgcaatctatgctcaggtaaagaagaaggagaacggtgtcgaggcggatctccaggagttccaggacttcgacaagttcgaggattag

SEQ ID NO: 14967 - DNA, 174 bp, Zea mays
  Peptide Sequence Number=SeqID_58342
atgggtaaccgagtagcaaacccatcaaagctaagcgtcaatggtggtgacaaggatgatgtttatgattatggtaatggtaagtggtattctttccgtttggaaagggtaaagaagaaggagaacggtgtcgaggcggatctccaggagttccaggacttcgacaagttctag

SEQ ID NO: 14968 - DNA, 1989 bp, Zea mays
  Peptide Sequence Number=SeqID_58343
atgacgactcaaggaggtttgcagccgacaagcaatgaagctaatatgtgcaccaacgacaatggtagccaacttggtacacggattgtggacgagattatggccgggaagaacgtcttctttgatcttcctgacaagttgactggtgagatatggaccttgaaattccattgcattggagcacaacctggaaaagaaattgtcacagtaaatattgataaagcttatgttgccttttacaacgtggtgtacataaaatcgaaacttggatattctgggagggacttcttgttttacaagaaacgatgtggcattgatcgatccaggctattggcacttgattacatccaccaagaagaggccatgctgtatgataacatggatgagagaaaaataagttttgtgctcacaaaagatccacccagtgatctagaggtaagcataactcccatcaagcgtccaagacagcgaacaaatgttgatgaagaaactatagaagtgtcgattgatgcatataaggagtggcttgcaatactacaacatgataatccagaaacggtattgtatgaacgacaaagcaatgatgacctaatattatcagatgaagaaattcatggcagcaacaaacctactactaattggccatctcatgctagacgtcataggaaaagagattctgatgttattggtatatatgtagataacgatggagtctttaaaaaggaggggcgtggtacccttaagggtatagcagcagccaccaagcggatcaagaacggtgatcacaaacttaagattgaattttcatctaagcttggaggtcctgtaggaccaaacgctcgcacttttgtggatgaaatcgtattgtttacaaagaaaaaggcaccactcattggagtgaaaaagtggaaagatatagagctcaatgttagatcttctatagcctctgatgtactgtctattgctaaggagagatacaaaggatggcgatcaacgttaagctcaacatacaaggcatacaatagttatgctgaaaggatgaaaaacaagcctgaagatgtagacatcgtcgagtggcattacatggtgttgtattttggatctgagaaattccagaaaataagcagccggaactcggaaaaccgtcagaaacaaagaacgaagcatataatgggttctagaactttttcccaaataagctttcaacagagagatccagaaactggtatagaaccaaccgatctatccctttggatgattactcattgtaaaaatgatgaatggtcggaagaggcttcacgtggcatttatgagaacgcagctgagaaaattgctgagaaaatatatcaaacagaaaaattttatctaacaagagaagaggaaaatgctattttccaaacaacattcaaggaaacaacaggatgtaaggcaaacagacttcatggtcatgggtacctatcaagatatccaacaagaagtcaagtgatggaatcaaagttcctcgaacaagctcgtgccacggttgcaaccaaccaaaaaaacattgaactcgaaagtcaggtccagttgttaaatgaaaaacttgcgtgtgaggttgcagaacgagaaagaatactccaggaaaaaatgcaagcactgcaagaagaagaagaaaaaaaaagacaagtgcttagagaagaaatgaggcaagaaatggttgctgcccttgctgttgtagcacaacagagcaaccgtgaaagcaccactccaatcgatccttcttccgttgtccctactaaacctcctgaattcatcccagctgattctcctgcacctgcaccaagtagtgcaaacaacgttcgtacaccagacacaaacaataagaaagacaatatgccagcaaactatattagctcttacactctaaggaatgctgtgacaagacgtgtgcaggcaaggggcaacaaaagaagcgaatgtgtatggaatgcaaatgttcttgtattatga

SEQ ID NO: 14969 - DNA, 234 bp, Zea mays
  Peptide Sequence Number=SeqID_58344
atggctcactggagttgctccggcccgcccaaggctttctcaccgctgttctcccctctctgcccgtggattcatggccctttccccgccatcgagttcgtcgtggcaccctcttcctctgtgcccaactccggcgaccccagagccaccctagctcacgtctgccttaactccggaggtgaagctggtaacatggaggaccttgaggagttccaggactacgacgagttctag

SEQ ID NO: 14970 - DNA, 990 bp, Zea mays
  Peptide Sequence Number=SeqID_58345
atggcccgtatcaggtgcactgcacgtcagtccagtcacttggagagactacatcgtcgcctacacgaggagcaggagcgccgacgccaggagcaggagcagcaggactctttcccctcgcctcagcgggaggtggagtctgagaggccgctttcccctgcacctcagctagagatgccccctgcaccaccaaagggcatcccggctgctggaggtgaccctgacggagacggagacgacgacgacgccgtcggtggcagttcgagccacgacatggagtgctcggaggagccggtgctggagggatggatcactagacccatcactcataacgctgctcgtgggtgtcacttccacgacgctctcgataccctgttgtgtcgagactttgaccgagacacttggtctatcgagtaccgctgtgtagtctaccagcatcgtctcgggttatacccggaccagcgggaggctacttgcttggtgcgccgtctgaacgatgatcttcgaggtgtagaggccttctcagagcactattctatcactaagagggacactattgaggtagccatgcaagatgcagcacgacgggcactttctcagtattgctcgttgttcagcggggtagctgatggccttgacctgaagtactgccctcaccgttcgaccggcagtgccagaggtgtgattgtctcgccagttggtgaggacaatcccaggctaagcagcatggtcaacctggccgccgtgctcaacacggagttggaccacgcccttgacgagttgagcaaggttcgggcggaggttgcggaattgcgtgctgaatgcgtggcacgccactatcttgatggtggttctcccacccctgtcgggattcaacacccttaccgttcaccgccctgtggtcgctttgactatggtaccctagactgcaggacccgcatagatttagatccattggtcggtggagtcgaagtctgtaataatgtttaa

SEQ ID NO: 14971 - DNA, 767 bp, Zea mays
  Peptide Sequence Number=SeqID_58346
ggcaccgtgcaagcaacaagcgacgacgactagcagctgaggcagagcacaccaaacggcccgggatgtcaaccagagcgcgcggcggcgggaggcagttgcagttcccggtggggcggcgccgccggtacgcgccggtggtcgacgccgagtgcgggtgccggccgcgccgcccgaggctgctcagcctgccgtccttcctcagacggccctgcagccagctgatggacggtgttaaggcggctgcgacgacgacgacgacgaggggcggcgtcggcgagcagtactcctcctgcgcctccacctccaccgccgcctcgtcggcggccacacgcagcaccggcggctacgcgtcggcctactcctccgactactactactgctacccctcgcgcgtcgcatacggagctggagccgcagccaaggcgcagcaggcgaccaagaagaagaagaaggagaaggagaagcggggcgagaaggcggaggcggaggcggacggcttgggcgtggcggtggagaaggagtcgtcggacccgcgcgcggacttccgcgacagcatggtgcagatggtgttggagatggggctgtgcgactgggacggcctccgcggcatgctgcgccgcctgctcgccctcaacgcgccgcgccaccacgccgccatcctcaccgccttcgccgaggtctgcgcgcagctcgccggcgcggcggccgctgccgctcctcctgcgcacccgtcgccgccagcgccgtgccagtaccggcgctag

SEQ ID NO: 14972 - DNA, 279 bp, Zea mays
  Peptide Sequence Number=SeqID_58347
atggaggccaagtcacaccatcaaccaaatcaaggaggtacctgcaaaaattatgccacaagcaaggctgagtatactaatactcagctagacttgtccgtgaccgcacttgtacccaccataaccggaatgggagaccacgtctcaggtcgcgtgaggagggcaatctgcgggcaggttcattcagacaacgcatccctatggaccgttgtccacagaccaccatcattacgatatcaaaatggatacaaccaattcctgacctcgcacgagtgctag

SEQ ID NO: 14973 - DNA, 447 bp, Zea mays
  Peptide Sequence Number=SeqID_58348
atggtgttgcaacaacacatccccctcgcaggcattgcgtcgaacaccttgcgcacatcggaaaggagcaagggaaggggctgtcctaggaaggcgacaagggtgctgttcttgggaggggctcgagcaggggcgctgcgcagggctgttgctgcgttccaggcgctgcaacaaggagaggagcagggggagaaaggggaagattgcaggggcgccatgggagctagagcgcagggctgcagctggccatgcctgaaggggaggccagccagaggaggggtgcgtgcgtccaggtgcccagggagaaaagcagagggcaccgagcagctggaggagggaggtcgctgccattgggggaagcttcagcgcgccgaggaagaaggggcagagagcacgcagggaggtggagctgttgctgaacaccggtcagaggtggaagaaggctga

SEQ ID NO: 14974 - DNA, 486 bp, Zea mays
  Peptide Sequence Number=SeqID_58349
atgcagcagccctatagctcgatatccccttccattggccatgtgcgggtgctgctcgacctcccccatgtgagcacgcacaagcccttgtgttcccccttccggtcgtggagcacctctctgcatcttccccgccatggctcgcaactcggcatcctccctgcttgcgtggtgctgcgtagtgccccgtggtgcttgctaggtgctcgacaaaatgcacagcaagccacgcgctacagcaacatcgattgggtttgtttgtggtcgggcgacgtgggagctcctccgaagccgaggtcgagtctgtcttccgtggccgaggccgaggcccgagcccccgggtcgggcgaggcggagatcgttcggccgaggccagggcggagtccgagccctggggtcgggcgaggcggagtttcgtcgtcttctgagcccaagtccgagccctggggtcgggcggagcggagttcgccgtctttcgggtcttag

SEQ ID NO: 14975 - DNA, 723 bp, Zea mays
  Peptide Sequence Number=SeqID_58350
atgggcgtgaccgaggaagagccttcgcaggtggctgccccggccgataagaagagaaaactaggtactacagtggggggactgggggtctccgatagttttgctatggagttgatggggacatgcgcaaccctcgggggaaggatgtcttcgcccgagctccgggagtcttcggcgcggatgctggaggttaccgggggtcaatggcccaagaatgttccgatcccccgcgcggctggcgaagacttatttacgtctcgcatggctcgtgacttaaaggtgtttccttatgggcggaatattgttgctgttgtgttggcagtgatgaacaaggaccgtcaggatgctgcgcagaaccgtcgggcggtcgtcaggatcgcagatcctaggcatgaggcaaagagggcgcgggggagcacgaaggctcctgcttccggcagtagccagccaatgccggctgcgaaaccggccgcgcccggacccagcaaggcgtcggcgggcgcgaagactgccgcctctggcggaaccaagcctcccccgggtggatccgcgaaaggacgggagctgccttcgccggggagacgtgttgccgacttcggcacgaacatcagtgtcgaggatttttttgttggtccttacggagaggcactcgagaaactgctcgagccccctaaagtatcaccagtccaacatcataatcataatgacaacatcgtatcataa

SEQ ID NO: 14976 - DNA, 1371 bp, Zea mays
  Peptide Sequence Number=SeqID_58351
atggctgccgaagtcgagaggcttcgggcgcagcatgcagatgctatctgggagaagtcggctgcggagaaagagaggagggaggcgaatcaggccatcgctgaagcgcaggctgcgagagcgggggccaaagtggcgtgggcggagagcagtctcgccagtcaacgcaccgaggagctggaggaaaggttcaacgccttgcacggccgcgtggacaaagccgaggcctcgacgcgctcggaagttgagcggacgcacgcacagttcgtggacgcgtaccgcgagctgggtgcgcgaactgctgacttcgaagtacccgaccgagaagcaggccttcgcttcctcgaaaggttgcaggaggagctgctggtgctcctgaccattgtggagggtttcatgtccttcgcctccctcgtcacctgtgagggggccatgaatgcattgtcccgcgagggctgcaggcactacgaggtcttcgaccaatcatatgagaactttgaacgtgaaatttacaaggtcgaagaccctatggtgaagcagtcagcgagggcactctttgataggatgtggggtccgcacggtcgggaggtggtcagggagcggtccgaccgggcgatagagcagatggtgcatgccgaggacgttgaggaccttggagctctggtcggcgcgccgcccgaggctgcggaggtcaacccggtgccgcccctggatgccggcgaaggctcctctgctgctcccgtgcccacggtggccggtgaagaccctgtgtcggcccctgcgccgatggccgaagatgctttgaaggtggtggctgagcaggcagccgaagtccccacggtcgcggccgggccttcgcaggttcagggttttgggcctgcgcacgcaaccgctactgacaatgctaattttgtggcggctttgaccgtggttgctgaaggcgattctgatgattctgtgtctaagttttttgagtctgatgattctgggagttcgattgtgtggatggaggggtcttcggaagaggacttggattattttgcggcagtggatgtggctgcgatggagactcctccgcttgtgatgggtgctaagaatcatccgggtgcgagtgctgggcgtcggcggcgaagagtggtggcgaaacggagagtgggtgagttgtcgcgtggtgaaaggcgtcatcatggtgagatggagggtggtcgtcttcgtgcggatgggactggcaaatgggaattgttgtccttgtcggctggggcgagtgtgggtgagggggagctgcgaagtctgtttgcgagtgaggaattgaggataatgttgttcaactatagggagatgggtatcatcccgaaggttgagccgatgtaa

SEQ ID NO: 14977 - DNA, 714 bp, Zea mays
  Peptide Sequence Number=SeqID_58352
atggcgccccgcaagctctgtgacgacggcggctctcagctctcttacggaagcagggcaaccgcgtggcttgctgtgcattttgtcgagcacctagcaagcaccacggggcactacgcagcaccacgcaagcagggaggatgccgagttgcgagccatggcggggaagatgcagagagatatggagggaagggcgtcgacaaatgggcttcaatagtggagcgctcgcccagggagctggatggcgcggggaagaatggttctgcgcacagagacgaccgagcaggagatagggtgctggctgggagagggcagaggtggacgagctgctgctcgcctgaagggggcgccggccatggagagcctgctggcggccatggagcaaggagcaaagaagggcgcgaccaaggggagagcaggggcgtcggcgtgctcccagggagctcttgctcctgcggcaagaaacagagggaggaagagcgtagagcactggggcagagggtggggaacagcaggggaaaaggaagctcggccatggctgctggaggtgctcggctagggagggagcatggagagggagccgacttccatggggaagaaggcccctgcgttggtggcttgacggaggaagctgcaggggagagtttcctgcgcaagaacagggaaatagatgagtggcatgtgggagaggaggatgaaggctgtggcgactag

SEQ ID NO: 14978 - DNA, 159 bp, Zea mays
  Peptide Sequence Number=SeqID_58353
atggcgagagtagcgtgtaccctccgtggcaagaggctggacggtggtgtatctatgctctcggtgaagaagcagcaaatttttgttgcttctgttccaaggtggtgcctaaagaagaaaatcaagactcaagccacgggaggaagtgtcctcctttaa

SEQ ID NO: 14979 - DNA, 375 bp, Zea mays
  Peptide Sequence Number=SeqID_58354
gcgaccgagcaggagatggggcgctggctgggagagggcagaggtggacgagctactgctcgcctaaagggggcaccggccatggagagcctgctggcggccatggagaaaggagcggagaaggtcacggccaaggggagagcaggggcgtcggcgtgctcccagggaggaggagcacagagcactggggcagaaggaggcgcttgctggcttgaggaagaagaaggggaggagggaaagacgccatggctactggagaaatcagggcgctatggttggagcagaggtacccgcgcccatggtgaagcctctatgcgcaggggaacaacaggggaaaaggaagctcggccatggctgctggaggtgctcggctag

SEQ ID NO: 14980 - DNA, 261 bp, Zea mays
  Peptide Sequence Number=SeqID_58355
atgacgtcaaccggaaaccgtcatcgtgcttctgactatcgcgtcgaagtagtcaggtgggtgggaatgttttcgaaaagaaaaacttatgatggtgaatccgtcaaaggccttgatgggttcaacatcggaaaagatgtacctctgccaggttatagttttgtgctgctgatgatggtgttaagtgccggtgggctcggccttcttataagtctaagtaactcttctatacttcttattgaggatggtcacttaagctag

SEQ ID NO: 14981 - DNA, 213 bp, Zea mays
  Peptide Sequence Number=SeqID_58356
atggcgcgtaccttgctagacgacacattccatggcggatctgtactgcgctgctgtcgactccaccggccgatccgtgatcgaaggaacgttatcgcgggtcggttcgatagggttgaatctaatctgatccgctcgatcgtgatccaacggtccacagacgaagataccctttcgaccgtcaatgttgcatatgagccctcgtccttttag

SEQ ID NO: 14982 - DNA, 246 bp, Zea mays
  Peptide Sequence Number=SeqID_58357
atggagctaggagggtggcgtagcaactccctggccgcagacaacgccccaggagctgctcttgacggagcccgagacgtctgcacagctcaagggggcacgcacaaggatactgagccccgacatgtgggcccaagggcaaaatgcaaggaaataactaacgcctgtaacgcctgggcgaactccgagcgccataatgtccacagtccatacagtattgttatgacgccactgcttcctcggtaa

SEQ ID NO: 14983 - DNA, 2178 bp, Zea mays
  Peptide Sequence Number=SeqID_58358
atgatttctcttggccaacccgaccgcttccagactgaggcgacactcaatgtggcggccatcattgcccacctctgcgagatgttcgtgggggtggcgccttgcacttccctcttccaccatttcttcgtgctggtcaagtctgggaaggctagggaccatcttggtgcctactactttcagacgaggccggactcggccgtgtcctacatctccaccctcggtggcacaagctgggagaattggcgcgccgactgggtgatcgtcagcgtcgaagccaatgactgcctcgtcctgccgagcaacgggccaaccctcgaccgcaagctctggaggacccagccgtcgctatcgccagagctcctgccatgctggacaggattgagtggccggtggcctgacctccatgcatgtgcgctctgtgatgaccccatgctgcgaacgacgatgctggcctcgctgccgaccctcgatgagagcggcgtcgcggttcgtcagaccggcggtcgggacccccaccgcaggattcggatcttcgatgcaccggccgggggcccccagtctgccggcgtggctcccagcgccccttccggagcttccagcgcctctgccgtgggcccccgccccttggataagggcaaaggggctgcaaaagcgccagagggccgctggtggggtcgaggagaccggctcccaggcctagggcgcgcagaggcgcgtcagtcctccgcctccacaaccatcgggtccgccgccaccacaaccaccacaaccatcgggttcgctgccaccaccacctcccgggggcgatctcccccaggggcaccaccaccagcaacaacagcagcagcagcaacagcagcagcggttgccccgtttccagggtcgttggaaggtccagggccccaaggcttcctccccctctgccccaagatcgtgcctcccccgcctccggctgctgctgccgagacagcgccaccgggctcccatgctccagctgggggtccaacagcggcggcgccaacgccaaggggcaccgcagcggcggagggggccccaactgctccgatggctactgcagccccaacgacggtgatgccgtcgagtacaccgtcggtagcggtagaggaggccccaactacgctcggccccgccatcgagggcgacgcggggggcgcatccagctctatcccgccgcccactccggaggagacggatgtgatctttgggcggcagctccggtccggtgccgagccagaagcggcgccagttcccctctcccggctgctgtttcgtgcccatcaggctctccatgagactgaggcggcaatcctgcgggagtgggaggcgctcaaggctgagcaccagcgccttggcgattggcgcacccagctggaggagcgcaccaaggcggcgtcccgccagttcgcctccgacggcggcgcaggcggcactgggccccaggtggtggaggtgacgaagaaggcacttgaagatctccaggcggagcatcgcgccggggtccagcgcatcgctgcatgggctgacgaggcgagcacggctctggtgccgctaggggtgagtcccatcccggtgtcacagctgccgacgtccatctccgacgcgctcccggtgctagactctgtcgccgaccgcctccgacgcctggaccagatcctgggcgcccgcctggaggccaagggcggcagactctgccgggtggtagttgagtacgtcttgacgtgcttccagagccatgacccggccatatccttggagctggtgatcgctggtccggtagccgacactgaagacaccgcctgggagggcattaaatacgccgtggagctggtggccgagcgcttccagcgggatcccactgatgacgagctcgacgtgttgaggctggataccagtacacctaagaaagagttggtgacccggctcccaggaggtagcctcaactgggacctagacctgacctacaggattgactctgggaagccaagcctgatgtccggacctacaaggccaacaggccgggcttatgaaggtggacctcaccgggctgacgtacacgcggacacatccgggtcggcatacttccgtcaccttgaagggtccttcccaactggcggagagtttgtggagcccttctcggttcagtactcgccttag

SEQ ID NO: 14984 - DNA, 1101 bp, Zea mays
  Peptide Sequence Number=SeqID_58359
atggacgccaccgaggacgagctcttccgcctcaccaccaaggaggggaagctcaccgtggagcgcgagaaggtgaagatcgagatgcaacccttctcccccgtggagtcgctcgctagcgagctcgccgcccggatgagcgccatgagcatcgcctccgactatgccatccagctccacaatgcacgttcgacagagtataagagcaatgaaaaccaaggatctattcatgctaatgtaagaactaacaagtcatcgttccttggtattaagacatttggttcattaagaaaaagaaatgacgaaagaatcctagaagaacattaccacgacctgtcccagttcgagatcgtcgcgcacaggacgtgccgtgtcaacaccgtcccatccaggcttgatcgtgcctactgcgacgacggcgcctccggtattatctcatcacccaaccccatcttggtccacgcgtcactgacccgtacacgtgcggacgtggggacgacggctggacgcattttccacctaaaaccaggaccagcacggccgctcggcagtggcggggaggaaaccaggaaatctccatctggccatctcccgcccccctgctcacgcatgctcctcaccatctttagcctgggtcccacctcccgtgccctcctctgggccgctcctcccagcttcctcgttccaccgaccagatccaccctactcaggccagcaatgtcggcgctaccgctgacgtcgggggagccgttccgtgtgttcgtggggtacacccgcgggagcacgaggcgtacgaggtgggccgccacagcctgcgtcctctctcgtggatcccgctggacgtgcgccccatccgacaggatgcgtgatttgggaaataccttccctggcgtggaggttatttgggaaggactgacctgtcgcgactgccatgaaggggagcggggcacgactgccatggatggaagtgtgagcttgcgacctggcgcgatttgtgggcgattcgtggcggatccatctcgcgccagggaagggggagcggggcgcgcgggcggcgtcaacaggcagaacacggtgcacgactgtggacgcctacaataa

SEQ ID NO: 14985 - DNA, 546 bp, Zea mays
  Peptide Sequence Number=SeqID_58360
atgcgcctaggggtctcttttatagccccaaggcagctaggagccgttgaagaccaacttggaaggccaatcttgccttctgtcgagtggtgcaccggacagtccggtgcaccaccggacagctactattcatgtccggtgctcgatttctttccatacaaagagcagccgactgttggtcctcgggatcggttggcgcaccggacagtccggtgtgcccaaccgaccgttggcgcgaccacgtgtcgtgcgaagattgcacggctgaccgttggcgctggcgaccgttggctcaccagacagtccggtgcaccaccggacagtccggtgaattatagccatacgccgccgtcgaaacccgagagcggcaagttcacagtggaccagcatggcgcactggacactgtaagagtagtggtaatgacctctttcccgttaaaggccattctccacaactctaacgccatgggcaacatcgccaagtggccagcggaacttgccgagttccaactggacttccagcctcgccacactatcaagagctag

SEQ ID NO: 14986 - DNA, 480 bp, Zea mays
  Peptide Sequence Number=SeqID_58361
atggcgtcaatggcggcgcacagcagagaccatgaaggcaaaggagcgcagagagctcagaggcgaaagggcatagcaattgggagagaatgcgaaagcgtaactgctgctcgtggggcgaatccctcttcaaggcagactctcccgctcgtgccccaagacgctacaggaaatcccgaccagcgcacacctgacgcccagaccacggctcgcaccagcctcgggcgactactctgggccagcaatagcacccgatcccacaacgtggacggctccggggccgccacatggccagagaagataatataccccaaggtatcaactgtgagtccgaagcctcatgggaaagtgccggacccctgtatatacagactagacctccgggtaaggtccaggacctccatgggcgcaagccggacccctaggataggttccggacccctctgtgtggggtccaggccactcacagcagggtcctag

SEQ ID NO: 14987 - DNA, 1053 bp, Zea mays
  Peptide Sequence Number=SeqID_58362
atgccaagtatttaccgaacgtgcattgtggagctggatggcatagtcggaggcgatgctcatggcgctcatccgggcggcgagctcgctagcgagcgactcctgcgggacacggaggagctggctgttgaggtagagcgggagcagcgcgtccaggatctacacggggtcctgctcgaactgcaccacgggggagaagggttgcatctcgatcttcaccttctcgcgctccacggtgagcttcccctccttggtggtgaggcggaagagctcgtcctcggtggcgtccatgcagacggtggcgccggcggcttcacgaggatggctgccgcggcgggggaggaggcgttgtctagcgccaccaagcagaaggtggcggcggtgaagcagtacatcgagaaccactacatgtcgcagatgatgtcgcttcaggatggcaaggagagcttgtctatgccatttttaggggagccgggttctagtccatgtcatgcttcccagcaggatcaaggtcgttgccgtctccaggatttgttttctgtctctccagcatatatatttggagccattctgcctgcttttatggtcgctggactttacttctttgatcacaacgtagattcacagttggcacaacaaaaagagtataatttgaagaagccttctgcctaccactataacattttggtccttggattcgtggtcctgctctgcggtttgcttggtatccctccatctaatggagtgcttcctcagtctcccatgcacacaaaaagtcttgctgtcattaagaggcagtttctaagcaaaaagatggttgatactgccaaggagagcataggaggaagtgctaccagtttggaaatatatggcaagatggaagaagttttcatcaaaatggatagcgaagagaatactgattctgttgaaagggagttgaagaacttcaaggatgttgttctgcaagaaggcaacgaagaagggagattggctagagaatttgaccctcgcaaacatatagaagcccacttgcctgttcgagtgaacgaatag

SEQ ID NO: 14988 - DNA, 414 bp, Zea mays
  Peptide Sequence Number=SeqID_58363
atgaaggctcttgaagatctccaagcggagcaccgtgccggggtccagcgtattgccgcgtgggccagcgaggcaagcacgacactagtgccactagggatgagccccatcccagtatcggagctgccagcgtcgatctccgatgcgctctcagtgctgtactctgtcgtcgatcgcctacggcgcctggatcagatcctcggggcctgcctggaggcagagggcggcaagctctatcgggcggtggttgaatacgttctaacgagcttccggagtcacaaccctgccatatccttggcgccggtgatcgctagtccggtagccaccacagaagatgccgcccgagagagtgtacaagacgccgtggagctggtggccgagcgcttccagcgcgatcctgctgatgacctgtaa

SEQ ID NO: 14989 - DNA, 183 bp, Zea mays
  Peptide Sequence Number=SeqID_58364
atggcgagattggcactgcgagccacaccggcgggctggggacctccaactggtgcattggagatccggatcccgcgggtcggtagtgtggccaagattgccgtcctcaggcctgggtcatcgcagagcgcagggatgttctggggagtatcagggactcagggacaaaagtttccccagtaa

SEQ ID NO: 14990 - DNA, 330 bp, Zea mays
  Peptide Sequence Number=SeqID_58365
atggagcagagaagcatgaaggcaaaggggcgcaaccgattgggacagaatgcgaaaaggaaatcccattcgacgggcaccaaggacctaggcaacccagtctgtgacacgggggcccgggttcacaagtcatacggcttgtgttccgaatttcaggcctccaggtctagcccaagacccccacgtgtgcgaaccggacccctagaatgggatccggaccccctatatggggtccgggccgaccatagtggagtcccaaggttccaggacagagcatacccgaaccttaatcgggacccaggcgggggtccggagccgacacgtgtctag

SEQ ID NO: 14991 - DNA, 936 bp, Zea mays
  Peptide Sequence Number=SeqID_58366
atggggagcacccgtgtttcctttgtcttgctgttgttggaggagcacgacctcgcgggggttggcacccttcagccatcgctcggctccaaggattttcatcatgcagcccggctgcattccctcaccaatgcttcaaggatcttcatcatccgtgctggggaggagggcggggcaagtcggggcctacctccatgtgggccggtgacctgcttcttcctccggcattcgagggagagggcactcaccggccttgcggagggggcgaacttcgacaacgcgggaccggtcggccgcaagcgtcgtcagctccagcgtgcctggctcactggctcggctggctctgtcgcggcctccgacgctacctcctgccacttgatccgggcatggccgtctgtccaccgcacgggcgactgttgcgccgtgcgcaccaggggatcgtccaagacgccgtacgccgcatgggcggcgttcgtgttcttggattgtcttgtcctcactccggcacgatgcctccgcgcggaggtggccgctgtcgtcggtgctgaggtggtggtcgctagagctgaggctgccttagtcgaagcggttgcttccgccgacgacaccgcggaggtcattgtcgctgctggtgcagtggtcaccagcgagccacctggagtttgttgtcccgcaggccctctgaaccttcggccgctctgcgatgagccggagccggaggcagtggtgtcgtcgtggacagaggcagagtcggcttcaaaaagaggcttcgtcggcccaggagcgggtggcttcctaggccgaggaggctgcgatggcccaagcgcggtgctggcatcctccttcgaggtggagatccttccgcccgtgtcgccatccgaggccgggccagattctgccgaaggtggaaacgatgccgaggccgccgaggcctaa

SEQ ID NO: 14992 - DNA, 948 bp, Zea mays
  Peptide Sequence Number=SeqID_58367
atgcaggtggcgtgcaaccacaccgtgggggcgcaccccttcggctttgtcgcatccgacatggaggcccaggcccacacgtcatgggttcgaaggctggcccctcggaagggttcgacaaccgcccagagcactcgggccccgtgcccactactgatcacgggttcaaaggctggcccctcagaagggttcgacagccgccccagagcacgtagagcgagggatgactctaggtccggcaaatcacctacagaggcttggggctgctctcgcaacccggctatggccaaaccgttgacagcatcaacaaaccagcctaaaaacttggaacctgaccagcctcgggcgggaactgtagtcccggatgaagttacgtctcgcccgagggcctcctcggacagtgggcgcaccctcggcacgcccgaaggcccaactcgggcaggcttcgtcgagaagcaaccttggccaaatcgcctctccaaccgaccgtatcacaggcgcattcaatgcgaggatcgcctgacaccttatcctgacacgagcgcctcagtcggcaaggtcgaagcgcaacaggaagctctgcctcgcccgaccccagggctcggcctcaacctcggcctcggaaggtggtctccgcctcgcccaaccccagggctcggcctcaacctcggcctcggaaggtggtctccgcctcgcctgaccctagggcttggcctcaacctcggcctcgggaggaatcgcgtcctcgcccgaccccggcctcggcctcaggaggagtctccgtctcgcccgaccttgggctcggaccgaccgcgccacgggggatgcatcattaccctacccctagctagctcaggctacggggggacaagactggcatcccatctggctcgccccgggctcaggcgctcctccgacggccacgttaccgcgtacacaggggtctag

SEQ ID NO: 14993 - DNA, 402 bp, Zea mays
  Peptide Sequence Number=SeqID_58368
atgggtaaaagtaagaagggtagcggttcttctcctcgctctggcgacaaacgcaaacgtgagccgactcctccttcggaggacttcggcgactcgaagtactcgaaggaggagttctcctccgagtccgagggatccccggctcccgtctctcccccggcgtcgtctgatgattcagacgactcccaggggattgccgcggaggagtactcctcggatgagaaggactcctcggactcatccgaggaggacagcggcggcgacggtggtgatggcggcgacgatgggggcgacggtgacggcggcggcgacagcggcaagggcagcgacggcggcagcaacggtgaccatggcggcggcagcaagggcagcaacaagggcagcaacaagaccagtggctag

SEQ ID NO: 14994 - DNA, 1404 bp, Zea mays
  Peptide Sequence Number=SeqID_58369
atggcgaggagggacaggaggtcaggggtgagattcatcgaggacggtagggaccggagcctcacgttcttcaagaggcggtccgggctcttcaaggcggcgtccgacctgtccaccctcaccggcgcgagggtggcggtggtgctggagtccgagagcgggaggttctcctccttcggcaccccggaggccagccccatagtggacgctttccttctcgggagcgcgccgacggaccttgacaccagcgaagcagacaaggcttccatcaccaacctgcagaacgaggtgttccagctggagaaagacaaggccatggaggacaagcggaggaaggagagcctggcgcggtccagcaggaaggtccagcaggcctcgaaggtggccaggtatgtttacggcagcgtagacgatcttgacgccaccgagctcttcgagatgtaccgtgagctatcgcgggtgcagcaagagatcagcgatcgcttgccgacgaccttgctccacgacgcgagcaaagcagacgccggtggtggccgtggccgtcttagagacccgtcgctgctgcggcccacttggtggcgtgcaagtgcaatgccattgccgcccctgcaacaagctgcgacgccaccgacgaagtgtcctccatgggctccctcgcaggctcgcttccagttccagcaacatccatgggcggcgtcatccacgtctcctcccgctgtgctgccaaggtcatctggctccccgcttccgagctcggcgatcctcccgtcaccgctggcgccgcagaatccgtccttcttgcgacatcatcaccctctggcaccgcataccacccctcccacatcggccggcgtgcaattccaagcacccaggacgccggcacctacggaagcccagaacccttacacctactacatccgtgggatcgacatcatcagtggtaacagctcgcacccgtcgtcactatcgcctgtcatgccgtcgtcttcaccgacgccccaccagcagccgtcgtcgttgcgagctccaccgtcagatgattcgtctcctctatctttgtcgccgcgagtttcatacccgctgcacgtagggtcgccgtaccaccaacagcttcctttgagtgcgcagaatcacaactccgtgcagcagccgccgccgccgcctgagagctgtgcacatgttgttggctcacctctgatcgtccattctcaccaagtgttctacagcaacttgtcacctgacctaaatgctgagctgggaagcgtcgatgatggtggagctggagccacccatgctgacggtggacttggtttgtctagccctcagcaaagtgatggcttcgacggggtgacgcccaacaagtccttctctgcaggacaaagctctggatctggatggtggtga

SEQ ID NO: 14995 - DNA, 306 bp, Zea mays
  Peptide Sequence Number=SeqID_58370
atgtcatgctcaacctcctcaagatatccacgaacgcgtggggaagaagctgagaaagaagaaacagcagcaagcgtcaaactccacaagaaggatgctcctaaaacaataaatgaagcaattcagcatgaacaaggaaaaagcacaaaaaagggaagaggcaaaaggagatgcttcaagtgcaaggagctagaccacttcattgcgtcttgtccacacaaagacaaggaggaaaggatgaggagatgctttcgatgcaacaatgaggaccgtatgatcacttcatgcttgctcatgaataattaa

SEQ ID NO: 14996 - DNA, 315 bp, Zea mays
  Peptide Sequence Number=SeqID_58371
atggccgattccaaggaccactctgatgtttctctcagcaatattatcaagccgactatagagactctatcgactgatgatcagcgggactttgaggagcacatagagcagctgatcaaggaggccaaggcgaagtatctggccaatttcaagcctagatgggtcggcgcgaggccgagcgtgaaggggggaaaaaggcggccggagacgggcgtgagagaggtggaaatcccgcggccttcgtgttcgtcccgcgcccaggtcgggcgtaaggagaggatccaggtgtacaatgggggtgtagcagagtgctaa

SEQ ID NO: 14997 - DNA, 885 bp, Zea mays
  Peptide Sequence Number=SeqID_58372
atgcattgcgctcttccaccttgtgagcccccggatgagcagcgcccgcgttgctttcgtcttgctgctgttggaggagcgcaacttcgcggaagttggtacctttcagccatcgctcggcttcaaggattttcatcaggcagcccggctgcatccccttgccggtggtcacccaagacggtgaccaccagtttgatggtggggagaagcaagccaggctgcggcctctgcctcgccctcagcttcaaggatcttcatcatccttgctggtgcggagggcgagctgagccggagctctacctcccgtacgggctggcatcccgcttcttcctccagcttctgggggtggaaaccatcctccagctctgcggaggaggcgccctccagccatgccggggaaggcgaactgttgctgcccagccaaggtgcaacattccgtcttttgtccgggcgacggacgggagtgaggacctgccggtgcgctttggggcggccggcgcccgctggtgcggtgttggtggacaggtggacgccgccgtcagtgctgaggtggtggtagctggagaaagcttcttcgtggatgagaccgtcagcgctacccgcagaccgacctccggctctttggctttaatgtctggttcttgtcccttgagtggggacgcaaacgagagccttccggcggcagcgtccgtcccgggaccatcgctgttgctgcagaggtcgctggcgagtcaccaggagtttgtcgtcccgcaggctctccgatgtggaggttgttcatacccacgggagtggaactggagttccatttgtaatggcaccttgagtgccggtgtctattcattgcggctgtcggggcctgaacatctgtgtatttgggtgtaa

SEQ ID NO: 14998 - DNA, 426 bp, Zea mays
  Peptide Sequence Number=SeqID_58373
atggctcgtgagggcggggaggtggtctgcccgcagctgccgcaggcctgtgagcatgggaaccaaggcccggggcagggcagccatgtaggagtggagaattgcagtagccgaagactgcagaagggtgagaacccagtagggtccacaggcttagacggtcagagaggcagcatcacggagtttctgttcgtcggaagacaggcttatagttcgatgagaccagctgagttgatgaagtcgttgaattgggaacaaagggaggcgccaattactcaagaagaaccagcggcggtgctctctgcacaggggcggacggtccgcgcgcgggggccggacggtccgcggcctgaggcggcggaagttgccgacggcggcctcgatctcgctcccgggagggaccccgtcggagaggagagatcctaa

SEQ ID NO: 14999 - DNA, 507 bp, Zea mays
  Peptide Sequence Number=SeqID_58374
atggcggcgaggcgtggattgcgtttggggcgcaaaggatatgggcgaggcatccgcggtgcattggaagaacgatttggcagggtggtcctgcgcgtcgtcaacgatgggattcctgctgttggattgctgcgaggcgtggatagcggcgaggggatgggtagtggggagagggcgtgcacggggaagaagggagacactaacatgttggtcgtatgcatcgtgaggaggcagaaccgatgccctagagccgtcgggtcggaggagaccatcgtcgaagcatgtccgaagcgcgccggattggaggatgtcacggggccaccgccgtcgtgcctccggatccgggaaccgtcgctgccgttttcggatcagggaacccccgccactgtgcttccggatcgaggagccgccgccgccacacttctagatcggggagccacgacctcggatcagggaattgccactgctgcgcttccggatcgaggagccttcgcgcctcgcctctag

SEQ ID NO: 15000 - DNA, 939 bp, Zea mays
  Peptide Sequence Number=SeqID_58375
atggaggagtcaatgtctcctttggcatcatcgacaagcctagctactagggcatcatgttggaatgctgctcctgggcgggggctgggggtgggtctccctgtggcacgaaccagccagtcacggatcaacagcttctgcttaagctttcgccctgtcgtcgttcggtttccagtgactactgactacacaggcgcagacatgctggaagacggcagagctttgtcagaaaaatggaaggttacattcgttcccactaggttgttgcttgttgggccatcatttgatgtccgtgcaattggtccggcccaccgcagcatagttgacacttcgtccggcccacgaaagaacctcggttcattcacggttctgccgacaaagtttaacctggtaatggtagttgtatctactggttcagaccgatggatcggttggttcttcaagctagcagaattttaccaagacccagagttcgacatggtcggagcggcagccacccgtgatgagcaaagcaggcagcggccccgggtccgacggggcgacggctgcggcggcgtccgccgcggtgcagaagcagaagtcgctgatgtagaaggcgggcccagccgtctccagcctcgtcgacaatttctcctccctcatcaacatcgctcgagtacatccgtgcgccatccacttgaatctggcagcctgaagcactccagactaatcctaactcgaaatgccatggttaggtcaacgatccgccagtgcacaactcacaggaggcctttcagatggagatgcgcgctgtccgcatgggggattgaagtgctgggtcagcaagctaagggaactgagagaatgctggaaaggattgggcaggaggtagcagcgagcctcaaggagctagaggcacactactactcatatgttgtgcgatcaccatcctatgattga

SEQ ID NO: 15001 - DNA, 1122 bp, Zea mays
  Peptide Sequence Number=SeqID_58376
atgaccgcagccaaagacaggggctccttcgctaaatgcagaatggaaacccgggggcggggcctaatcttacgaaagtaccaagccaaattagggctccgcaacactcccccggcagggaaggacccttcaagttcccatcatgtcaagcataatgacatccgaattgagcagccaggtttgcagtttagggcctctatgcgaaagcaggagggcccgacagcttgggggccagctctgaagaatgggaacccgttccatggggtggtccagagcctgtgtggccggagtaccatacaaaaacaggagaagcctgggggcggttctaaagaacagatgcccgttccatggtgtggtccggagcctgtgtggccgattagcctggttccatacccgaaatcctgcacactccatcgctccgtgatgagtgccctagtatttggaactataagtcctgtgcgtccaacaacttggggtccggaactagagaagcgatgcttgtctcctagggtggtccggagccatgtagctgctcagcctggccccgtgccgtgggcctgcacactccaccaccctgtggcaggtgtcctagtacctagaaccactatccagggggtccggacacacaacttggtttccagactgaaatcctgcgtacatgtgttattacattctgcttctgagcaaacatatgttattacattcccttacaagcggggccctagctccatttctacaggaatgaaccacgctgcgtcagtaagaatcgtgctggaagctggctccgggaaacctcaccggcggcggctgccacctctgcatcagcggatcgccagcggcagcaaccacctctacaccagcagcgacaacgaccaccactccgagtggtttgccagtagcagcgtccacctcagggaagaagcgggtcaccagcccacgtggagggcagggccccgacttggctcgccctccactccagcgaggatgatgaacatccttgaagctgaagctaggggggagccgcagcccgacttgcttctccccaccgcgaggctagtggtcatccttctggatggccactggcgggggactgcagccgggctgcatgatgaaaatccttga

SEQ ID NO: 15002 - DNA, 702 bp, Zea mays
  Peptide Sequence Number=SeqID_58377
atggcggtctacctgggagaaagccgaagctacccaaaccgccctcccttccaagtcaccttcatcgggcaccgcttcccagacacttgccaaagtgttgcccgaaaagcccttaaacagctatgccaaaactatagcagagagatctttgaaaccccccttcgctacttcccacctagcaacaaaaatacccccacctggaggaaaggacttcaggccctgtcagggagagaccctaccgaggatgaccccaccattgtctacatggcaggatacctccacactctcgataaccactacgatgatctctcctcccactgcacccacctaaactctcgggtggaaagcttagagcagcaggtcaaggaacttaagaaggagaaggcgtcccttcaagaatgtctcgatatagcagaaggcgaggaggccaacacccgtgaagcctatcgaaccctaaagatggattatgataagaagctaaagaagctcgcccccacgaagaagatccaaaagaagaccaagaaccacggaggccaagctgagcggaggaagaaggctcctccagcaccaactcccgccaggatagagaatttgtccgacatcgaggatatgtccctagctagccttgatgaccttctcaaggaatttggggacactttagaaaaagagttcggtagtacctcagagaacgctcgcgtgtag

SEQ ID NO: 15003 - DNA, 2752 bp, Zea mays
  Peptide Sequence Number=SeqID_58378
atggctgaggatctcgcgtcgagcgccggccacccgcgcgacgcggacgattctgttgaggaagggcgtctgactgcatgggcccatgtaccgggtcgccaccttctcttcgcgctcactgacaagggagggagggaggccacgcccacgctcgactctcttgcctccgtgtacctcctcgcggcgcgtgccgaggtggaggaggagcaggggaaggggagctacctgccgttgcgtgccagctactacaccttccagctcccggatcgaagcacgggtcggttaaagcacggggccccgagcggcacggccgacttggcagcagccagcaggctcttctccccgcgtcgcctcctcccttcgtccctccgctcctcgtccccacgcaggctcccgtgcccgcctcctgctgcctcgccgccaccgccgacgctgccacatccggccgatggggccgccccgggcgttgtcgcgcgcctcatgggcctggagtcctggcccgccaccgccaccgccgcgccgccgagaccgcagaagcagaggaaggtggaggcgtcgcgcgcggacggcgctgactcggcggtcgtgctcgtgctgcctacgacccggagccgtcgacctcccgcgtccgcgcccgtgccgacggcgaggagccaccacggggccgacctgccagcgcggagcccgaggcggacccgtctcgtgcacgcggccgcggcgaagctgctgcatccgggcgcgcgcgccggctcacgcgcaagcgccaggctggccctcgcgtacgcttgctcttcgccgcagcaccgcaaggatgaccacgccggcaccttgtttcaaggctccggaatgaccgacgacttcctatctcgctctgagagcttgcccttggagcgttctgcactgctacaggtacagcctcctggtcttcctgcggagacagattgtgacaccgctgttgtatcgcgtaggcacgaccattgttccactaataacgtcgatgcagcgatcagtgccagtacggtagtgttgcctagaatgggttttggtgatggaaacaggagtaaacggagctctgatgtggatgctaagcacaaggggagtggaattagaaatgacgtaacgcgcacttgtgccagggctagatcgagcggtgctgccgttcaaactggagatgagaggttgttgcgcaaacgagcaacacctactcggccggaggtttctgggatgccagagtctggggacttggctggttcgacgcgcctagctgggggtgctcgtgacttggtatctgctactaggaagtttgcacacggtggttctggtccaagaagagagttcgcgggatcgatcagtggacaagggagcacgacccacagggatttgaacagccaaaatgggttagcatccacaagtaggatttcaagcaatggatctgggcataaaaggggatcagggagaaaggtggggcatgatagagcaataagtaacagagatgacagaaatgcaattgcatttacttctagatcatctacaaagccagtggccagagcttcgtcacagagcaatctattgaagagtggatccccaaatagactagcacctgatacaactcgcacacgagttctggctcctgaaaaaagatacattgaagcttcaccttcttttatgtctacttccgagaaaggtgaatttagcaggctgttgaaagcaaaaatcaatgagcttggcatgtcggacaggattgagtgtacaccagatgattcaccttcaggaaaactgactgtacctgtgttgcaagagctcatttctgcccttacaaacgacatgagcactccaatctcccaatgtagcaactactctgctgcatcagcacccttaagttgcaatggaaatgttgactgcatcaatgaaccacattgtatattctccaatgatcaatcacctgatttccagaaatgctttaagggtgaacaagatgttgattcttctgccgcatcattaaacaatgagcccaatcagccaagtccaacgtcagtccttgaagcatccttctcaaatgatacttctttaggaagtccagttgaaaaaaatgaaggaaaagacttaatcatgtcaattgagaacaaaatggaagatctctttaatttggagtctgacattgtcgatttagcaatgtcaattgacacgaggaaaactgatgctgaagaaacacaccgtgacaatgacaagttatcatgtttacagaattttcttgcacatgatttcaacatcttagaatccaggctctgcagcattagagaagctatttcaaatgctgaactgcttgtgggcagtagcctctcgcgtagcacagcatcaggtctcccactccaccctttcattgtcgaaatgctggaaaacaccatggatatgtttagtggaggagagtattcaggtttcactgaagataagaagtatcaacgtaccaacttcctgtttgactgcatcatagagtcactggattcaaaattctgcaatttcggcaaatgtggatacaaggcctggctgagcctgcctctcagtttgagcgaggacctgctgaagcgccaggtattggaagacatcggcaactggagggagtcgagtgggactgctcttagacaagtctctgacaaagaagtggaccaagtgactgacaggtgggatgcaagccaggttgaagcatttgacataagcattgcaatcgagaacgacattcttgaggcgcttgccg

SEQ ID NO: 15004 - DNA, 336 bp, Zea mays
  Peptide Sequence Number=SeqID_58379
atgaggcacccaggggttaacagcgcggtgaccggcgttgttcctatccacggcggcggggttgctggagattggacagacgcggcctccgagggtctgaggtcgccagggttggccaggactggcgaggagggcctgcgttattataagagtgaaggtggacgtgctgctacttccctcattcccaacatgaatcaagtacctgcattgagtaatgcaagactaattgaccccgcaaaaaccctagaaacagtcgacactactgttgtctgcccgccaccaaaaatcaggacagcacccccgccaattcgcctaggggaacggataacccaatga

SEQ ID NO: 15005 - DNA, 447 bp, Zea mays
  Peptide Sequence Number=SeqID_58380
atggctggagagcgcctgctccaagggagctcggccatggcggctgatggagatggaagccgtcggccatgggagggaaaacctcctgctcgccatggacagaaaaagggaggaaggaagggcgccgtccctgctacaagggtgccgagcgccatggctggccgaggggaggaaggggaggagctgagctccctgtgcgctgccgtgtgggaggactgctgcgcgagggagaagaagacagggaggagagtggcggctaggagaattagaggggatgatgctcgagaaggcttggcgtggcgtatgtcgctctggatggccgacatggtgggtgctttactccggcgagcactgacggcggcggcgacgtggtcggggtactcggcgtgcgcgctagtcagcagcatttacaagaaggtggagctgacaggggggcccatggcgtag

SEQ ID NO: 15006 - DNA, 1002 bp, Zea mays
  Peptide Sequence Number=SeqID_58381
atgatgaccaccaacttcgtggtggggagaagcaagctgggttgtggcctctgccccgccctcatcttcaaggatgttcatcatctgggctggggaggggggcgcaccgagtcggggcctgtctctgcgtgggttggtgacccgcttcttcctctggcattcgggggagaagggcatcctccagctctgtggaggaggcgtcctccagccatgcaggggaaggcgaactgctgctgccaggacaaggtgcagctgtccgtcttccacccgggcgacggtggccggctgcaccggggggtctcacaacacgtcgtacgccgcgagggcggtactcgtgttctgggacagtctcgttctcgttcttgtggcgagagcgggagtgaggacctgccggtgtgctttggggcggccggcactcgctggtgcggtgttggtgggcaggtggccaccgtcgtcggtgctgaggtggtggtcgccataggtgaggctgcctctgccgaagcggttgcttctgccgacgagaccatccgtgccacttgcgctccggacctccggctctttggctttaatggctggccctctggtgtagaggttgttcatacccgcgagagtggaaccggagtcccgtttgtaatgaaccttcggccgctctgcgatgagctgaagccggaggcagcggtgtcggcgtggaccgaggcggagttggcccgaaaagaggcttcgtcggcccgggagcatgtggcttcccaggccgaggaggtgcagcagcggcggctggagcttggccaggtcatccgcgggtgggaccaacctcggagtcacgctgccgaggccatgagccgggctgaggtcctcgggggacaactggctgaggctacggagtggccagccgaggcgtccgcccgggccggaacccttgcggagaacctgactatgagggcccaagcgcggtgttggcgtcttcctcggggtggagatccctccgcccgtgtcgccgtctga

SEQ ID NO: 15007 - DNA, 240 bp, Zea mays
  Peptide Sequence Number=SeqID_58382
atggctgcttacaacgcacaggtgcaacaagtaatgaacggatccggggttatgggccacaacacgtcaccgccgatgaatccaaatcagttaaacgacttcgttaacgacttgttcacttctgtaggaaaacagcgccgctcaacccgcttcgactgctgtgccagccacccgggcaaggctgacaacagcaagttcagcctcgggcgcaacaggaagctccgcctcgcccgaccttag

SEQ ID NO: 15008 - DNA, 879 bp, Zea mays
  Peptide Sequence Number=SeqID_58383
atggctcgtcttagacacactgcacgaaagtctgtcatccccttcttaccctcccgccttgctgagcgtccgcttcgccgtcccgtggccggacagtccagccacttggagaggctacaccaccgcctgcatgaggagcaggaacatcgacgacaggagcaggagcagcagggctcttctttctcgctccaacaggagacagagtccgtgaggagctgctcccctgtgcttcctctggaggcgccccctgcaccaccactgggcgccccatcctctggagtagctgctggaggagacccagacgatggaggtggcgacgacagctcgagccacgacaccgacttttctgctgaccaggagccggaaggatgggttgctcgacccatcactcgcgacgctgctcgcgggtgtcacttccacgacgcgctcgacaccctgctacgtcgggcacttaaccgacgtacttggtccatcgagtatcgctgtgtggtctaccaacatagtcgcggggtctacccggaccactgggaggcgaccttcttggatgctgcacggcgtgcgctttcgcactactgctcggtgctcggtggggtagctgacggtctcaacctgaagtattacccccgccgtccatctagcagcacaagaggcgtgattgtctcacctgttggtgaggacaatcctaggttgagcagcacagtcaacctagccgccgtgctaaacacggagctggaccatgcattagacgagctgagtagggctcgtgctgagatcgccctgctgcgggctgagcgcgcggaacgtcgtcacctggatgatggttcccccgctcccgtcgggactcagcacccgtaccgctcacctcggcgtggacgctag

SEQ ID NO: 15009 - DNA, 660 bp, Zea mays
  Peptide Sequence Number=SeqID_58384
atgccctgtttccaacctgagctggtgctgcctgattgctctgctggtttgctggggcaggaagacgaggtgcctgttgattctgcctctggaactgacctcctcctggctgattattctggcgattctaatgctgatgctgaggatactgcctttgaaactgctgctgctgctgaggtggatgctggttggggtccactgatcttgcgcctacgatcctccatctccttacgcttcctctctgtcatgattgctctgtcaatcaggtgctggaatgtcgggaaggaacatggtactgacgaaagttcctctgaactcttcccaggtgatggtctcggggtgggcatgggtggcgagcacgcttgtctctgggcatctgaggcatcagaggctgaggtggtgcctgctgctactgctgctgaatggcggccagagtctgatcgatgtcttgaactgcctgagtcagcatcagaaacatctgctcgatcgacatcgggggcgggggcggtaggtgctgttgctggggcacctcatcctgctgagcggctcgctcttgctgagcacgccttcctcctctgcgcctgttctctgacatctgcagaatgcaaccacacatcagaactgatctggcaaatcttgcagcataagaaaagagtatag

SEQ ID NO: 15010 - DNA, 172 bp, Zea mays
  Peptide Sequence Number=SeqID_58385
atggcgcccgcgccttggggaagaagggctctgcgcttgggagcttccactgctagcgccctcggaagcgaggctgagcagggagatggcgtgggggagaaagaggagagggtgggctgccatttattgagctggagctctcgacatggcagactgcaccagcaggtggcag

SEQ ID NO: 15011 - DNA, 1338 bp, Zea mays
  Peptide Sequence Number=SeqID_58386
atggcagttacagctctactgaactacaacatcgacaatgaactggacatggcagtgagtagcatgctaaatgggaagcatccgctagcagcacttaacagaatgacaaataacatgacatcattcctgaagcattcgaacatacttgacaaaataccagaggatacacttaaatggaaaatgaagctgatcaaacgggctgcttcttacgccaattatcgtctacaatcggttcaggccgatgtgctactgttagtcaggttacttccaagcaaagacgaagctgacaggctgcagaggttgttaccaaagtgtaaaatctacttctttgagaagcacgggcacagcttactactggaatacggtgttcatgttgcaagtatcatcaagtgcactgacctctaccgccactcgaggcagcaccaccgggtgttcgactacatccctccatctgcaactgaactaaacgaagtagacaaagctacgtgtgatctgagattcaggacttgcccagcgatgtactccactctggaggacggcacagtggtgaggggcctcgctggagtgccccaggacggcccagtgctgctggtcggcaaccacatgcttctggggatcgagctcatctcgctggcggcggagttcctgcggctgaagcgggtggtggtgcgcggcatcgcgcacccgctcctgttcccaaacaagaagagagcgtggtctgagggccatgacttcttcgacttcctcaacctgtggggcggcgtgcccatgaggtacaagtccatctacgacctgctgcgcgccggcgagttcgtgctcctctaccccggcggccaccgggaggcgctgcattgcaagggcgaagagcacaggctgttctggccaacccagacggaatttgttaggctggcagcacagtttaacgcaacgattgtgcctttcggagtcgtcggggaggatgatctgttagaactgctctgtactttcgacgacatcaggaatgcacccttcggcaaggaaatgatccaagcgtacagcaaccatctgaagctaagggacgttgaccatgaggtgatcttcccgggaatgtatctgaaaatgccgggccggttctactaccaattcgggaagccgattccgactagagggaggcaggacgtcctgaccgataagcatgctgcgcatcatctctacatgcatgttaaatcggaggtggagcgtatcatctcctacttgctggagaagagggtggaggacagatacaggaacctcatcccaagaatgttgtaccaggctgctcggggaccgacgtgtgaagtcccagcgtttgatccctaa

SEQ ID NO: 15012 - DNA, 363 bp, Zea mays
  Peptide Sequence Number=SeqID_58387
atggcgttcatcaacggcgggagcgtcggggttgcggcgcttcgtcttcgggtccggtcggtcgggtcgctgcctggtgcaggggccttcggcgcaggtcgctcggctccacggatggatcctggggcgcgtggcacttggggagggcgcagctcggtgtcgcggggcacagggggcatgcgcagggtcggcggctcggcttcctgcttggggcgcggtgtcgatggggcgcagagcgcggcgcggtcgaggctcctggcatggcggtcgggtcgcaggtggtgcagagaggcagggggcgcgcgcgagtgggagaggagagcttgggtggcgacggatgcaggggagaaggggagcggctag

SEQ ID NO: 15013 - DNA, 1059 bp, Zea mays
  Peptide Sequence Number=SeqID_58388
atgaagaaacaatctgacgcgtcggaaaggaccttctctttaacattgaaaggaaaaggcaaagaaagagaggatgcttcgcatgcggggagaagggccacttcagggacaactgtccaaatatggccgaacccacaaaggggaggagcaaagacaaggcgcttacaagtgtcaaaacttgagatgactcttcaagcggagatgaacctccaagtacgtgtagccaccgatcctcatcacgctcatcacgcaagtgctttatggcaagaggttcaactaaaaactttgaaaaataagttgattagctctcaagatgattataattgtttgctagaaaaatttgaaacatttggaaatttaaattgtgagctatcaactaaaattgagcaattagagtctaatgctccatcctcagctaccgatgatgaccctattaaaaagaatgaaaaacttatggctaagttagctagctcccaagaagccattgaaattttgctagaaaaaatggaaattcttagcatacacaataataagctaactactaagctagaaaacattggtagcaccccaggagcatcattggttgaaatgcctgaaattattaagaaagatgcttctacttcttgctttgatttaattaatgattccaacccctgcaatcatgtttttgtcaagaatgttgttatagaaacatgttcggatgagattgcaatggagaatgagcaattaaagcaagaggtggctcgccttggcaaggctttatatgataagaaaggcaaagccaaacaaatccaacctcctcaggataacaccaatgtgggagtgaacaaacctgtggaggaagaaactgtgatttgtaggctatgccacaaggaaggccacaagtcttaccaatgcaaggctaagaacggggataagcaaaggcaaaagctcaagcaaaagccaacaagcaaaatctccaacacctacatcaacaaggtgaacaaaaaggctgctacaccatacttaatcaagaagaaaaagaatggaaaggcgatagcaataaaggccaataagtaa

SEQ ID NO: 15014 - DNA, 327 bp, Zea mays
  Peptide Sequence Number=SeqID_58389
atggtggaggcgagcgagctccgccagcggggtaagcccagatacaaccacatggcgtcgtatggggccgacgctgaggaggatgaggcggtggcactatcgttcgtggagcgagcgttcgcggaccagctcgtgccgtcgtggcgggagcagctgacggttcgtgcattcgttgtcaggttcttcctagcagtgatgtacaatgtcaccaaggcccagaagacagtgccactagagatcgacgaccaggccgcagtcaaagactggagaagcaaacgcaccaagaagcccaatgccaagtacgttggaggcccatgggtgaactag

SEQ ID NO: 15015 - DNA, 972 bp, Zea mays
  Peptide Sequence Number=SeqID_58390
atggcggggagcattcgagaggagccggaagcagagcatcacttgcgcgtggagaaggcccatggctcttgtcggcgtttcgagacagggggggtccctaagccgacgaccggagagatctgggcatcctgctggcgtgatgtcgtggctatcggtggtgcggcggagcctgatggagggacagctgttggagcggtcgagtccctgctgacgttgtcctgctgccttgccgtggccgagcccgagccagggggtcgggcgaggcggaagtcgtccggccgaggccagggcggagtccgagccctggggtcgggcgaggcggagtttcgtcgtcttccgggtcttagcctgagtccgagccctggggtcgggcggagcggagttcgccgtcttccgggtcttagcccgagtccgagccctggggtcgggcggagcggagttcgccgtcttccgggtcttagcccgagtccgagccctggggtcgggcggagcggagttcgccgtcttccgggtcttagcccgagtccgagccctggggtcgggcggagcggagttcgccgtcttccgggtcttagcccgagtccgagccctggggtcgggcggagcggagttcgccgtcttccgggtcttagcccgagtccgagccctggggtcgggcggagcggagttcgccgtcttccgggtcttagcccgagtccgagccctggggtcgggcggagcggagttcgccgtcttccgggtctagcccgagtccgagccctggggtcgggcggagcggaagtcgccgtggcgcctttggcaagcctaattgcctgtcagactcactctgtcgagtggcactgccgtcggagtggcgcaagcgggccttgtcttctgtcagactggccagtgaagcggtggaatgacggcgggcacctcggttctgccgggggcgcgtgtcaggaagaaggggcaggccccctcttgcgttaa

SEQ ID NO: 15016 - DNA, 810 bp, Zea mays
  Peptide Sequence Number=SeqID_58391
atgggcaccgaacatggtgtctccggtgagctgcaagcggcaactggcgtgccagttgctcgacgcgtgggcctgggccccaggctggcgtgtcagaagttggagaagcgcgtccatctggcgcggctgcatgccgcctgcatggctgctcgccccttctgcccgttggtttgggcggaaatggggggtcgcctcgccgggtcttcccgtcttccaagcccccggatgggggatatccgccgcctttccgcctcctcgttggaggaacgcaactccatgggagttgctcctggatggggagagacagaccaggctgtggtcccgccctcagcgtcgggtgcgttcgtcatcctcgctggggcgggggccgaggcgagccagggctctaccctcacgtgcgggtcggcgaaccacctcctcttccagcttctggtggtggcaatcgtcctcccgcgctgcgacggagtcgtcctccagtcatgccggggaaggcgaactgttgctgtccagctaggatgcaacattccgtcttccccctcgcattcggggcgaggacggcagcgaagatctaccggagcgcttgggggcggcccgctctttggctttgatggcttgttcgcatcccttgagtgggaccgcgaacaaaagccttccggtgactgcgttcacctggggccatggctgccgctgcagaggtcgttgccccgcaggcccgaggtcgcttgtatcctcggggacggaaccggagtctcgtttgcaatggcacttcgaatgccagtgagttcgttcattgtggctgtcgaggcctga

SEQ ID NO: 15017 - DNA, 765 bp, Zea mays
  Peptide Sequence Number=SeqID_58392
atgacgctgttccccgccgtctcccccgctgttgggccgagtgggctgcctgccgcgcccgcgcccggatggaaggctcttgggtcattaggacatcctactgctcagaggaggaaggatttcctcacctcctacggagttgagaaagccgaagctacccaaaccaccctcccttccaagtcaccttcatcgggcaccgcttcccagacacttgccaaagccctgtcagggagagaccccaccgaggatgaccccaccattgtctacatggccggatacctccacactctcgataaccactacgatgaccttttctcccactacacccacctaaactcctgggtggaaggcttagagcagcaggtcaaggaacttaagaaggagaaggcatccctccaagagtgtctcgatatagcagaaggcgaggaggccaacacccgtgaagcctaccaaaccttaaagatggattatgataagaagctgaagaagctcgcccccacaaagaaaatccaaaagaagaccaagaaccaaggaggccaagctgagcggaggaagaaggcccctccggcaccagctcccgccaggatagagaatttgtccgacgtcgaggatatgtccctagctagccttgatgaccttctcaaggaatttggggacactttagaaaaagagttcggtagtacctcagagaacgctcgcgtgtacagatggcttcggataaaaccacgcctaccgcctccgggattggagcagggtttcccctga

SEQ ID NO: 15018 - DNA, 186 bp, Zea mays
  Peptide Sequence Number=SeqID_58393
atgaccgtctgtaaggatgacaaacccagatggaaggacgaaacagtgatcctttttgacctgaggggatcacagaggatattctactcgcacacggtcctcacgcagaagagcccgctgggcaccatgtggatcgtcacgcacttcgagctcttcgagcaacgtcaggtccgtcggctccgctag

SEQ ID NO: 15019 - DNA, 519 bp, Zea mays
  Peptide Sequence Number=SeqID_58394
atgacgagcctgatgcgcccggaaatgtgccaatcggaaaaggacacagaaaaaacaccatcctcggagaatgatgtaaaaaagattaagaagctcatagaaatcacctacccttcccgcgttggacgactcttgggctggccctaccgaggacactccgcgacgggacgcttgccacgatccatggtcagcaaaagggtcctcaaagggctcaggtggagcagctttctgacaggatgcagttttcgggaaaacaagaaaatgacgatgaaactggttggaggggctactatcgaggaaaagatccctggggcccaccagtcagaaagagctcatgggacaagagccaccagattgctggggacctccggtcagtgggtgaataagggaaccgtctaccttagaagcgcccgcccccagataaaccataaggcaccgagcctagggtcgggcgtggcagagctagaaaggggtccaggcagaccgaagagaagtcatttgagtggattcctcacctag

SEQ ID NO: 15020 - DNA, 2706 bp, Zea mays
  Peptide Sequence Number=SeqID_58395
atggcggcgcgcggcggcgaggcggcggcgtttggcgcggagaccgaccgcggcgacttcgaggtgtttcgcagtggctccgcgccgcccactgtcgagggagccctgggcgccgccggggccgacggcggccttctcgtggacgacgacctccgcgccgacccggcgtaccagagctactactactccagtgcgcacctcaacccgcgcctcccaccgccgctcctgtccaaggaggactggcggtcctcgcaccaccgcctccgctccgcgggcttcggcgggatcggggacggcaggaggcagcagcagcaggcgtcggctgccgaggggactgtcggcctgcccgggatcgatcttggtcgccagaggagcttctccaccatctttcaggaagactcgtaccagcgtgatatggataggcatactgccagccacaatagtaatgacttactaggttcttctggaatacagtatggtctaaatcgtggatctggaactattggaggcctgcactctagcaatagtctacggagcttggatgaaattcagaacaatgatctgccatcaaacacatttgcttctattttagggtcatctctttctaggagtgcatctccagaccctgaacttgtgaggagggcccctagtccatccctgcctccaattggtgtgaaagttggtaacactgataagaagatcaatggtggttccacttctttccgtcgtagctcatccgcaatcggagaatctgatgatttggtggctgctttatctgggatgaacttatcatctagggcaatgagtgggcaaactatggaccagtctcagctctatcaggatgtcgataatgtccagaagttcctttttgatcgacagggtgaccaaacaactggaaatcagcagcactatatgagacgtcctgaacaaggacaatctaagttacccgatggatattctgccaatttggccaattcatctacaatgagaaaccagattaatgctggcagtttcacatcttttgacagtttgtctcttggatctgggtttgcttcccctaggattggttctagatcccctggagggactgtatcttctcgacaaaatttagctggtatgtctaacatgctaaactataatggaattggaagtccaactgcctcaccttctcttcagacttctattgatccggcatatatccagtaccttgctcagcttgcagctacctgtgatgatcctctaatggacaggggccatctaggaaattcttacatggacttacttggtactcataaagctaacattggccctttactccagtctcaaaaacaatatggttactatggcaatcttggatttaaccttggttatcctggaagtccattggcgagtcctgttcttccctcttcacctattgcgccaggcagtccacttaggcatggtgagcgcaacatgcgctttccatcaggcatgagaaacttcggtaattcctttggttcatggaattcaggcatgggtggaaagatggatgccaatttgatgccctcacttctggaggaattcaagagcaacaaaagtaaatcatatgagctctccgaaatagctggccatgttgttgagtttagtgccgatcaatatgggagccggtttatacaacagaagctagaaacagccagtactgaagaaaaggacatggttttttcagaaatcatgcctcaagctctcacattgatgactgatgtatttggaaattatgttgtccaaaagttttttgagcatggaagcactgcccagataaaggaattggccggtcagcttattggacgtgtccttgctcttagtcttcagatgtatgggtgccgggttatacagaaggctatagaagttgttgatttggagctgcagactaaaatggttgcggagctggagggccatgtcatgcgctgtgtgcgtgatcaaaatgggaaccatgttatacagaaatgtatagagtgcattcctcagcatgctattgagtttattatctcgacattctatggccaagttgtaatgctatccactcatccatatggttgtcgagttattcagagggttctagagcattgtgatgatcctaaaacacagcaaataatgatggatgagattctccagtctgtttgcttgctggctcaggaccagtatggcaactatgttgttcagcatgttctggaacatggcaaaccccatgagagatcagctattattgagaagctaattggccaaattgtgcaaatgagccagcaaaaatttgcctcaaatgtcatcgagaagtgcttagtctttggaaatcctgtagaacgtcaggttctgattggtgagatgcttggatccactagcgaaagcgaacctcttgaggtaatgatgaaagaccagtttggaaactatgtggtgcagaaggtgttagaaacttgtgacgatcagcagagagagatgatcctaacaaggataaagacacacctgaacacactcaagaagtacacatatgggaagcacatagtagcacgcgtagagaagcttgttgctgctggaggtatcttcattcacttatgtctccaggacttgacattatctgtgtatcatgttggtctagggactaataatgatgtatatgttgtcgtgcccacagagaagcgccttgggcttcaaccagcatgcaccgccgcctga

SEQ ID NO: 15021 - DNA, 378 bp, Zea mays
  Peptide Sequence Number=SeqID_58396
atgaacaaggcaccggcactcaaggtgccattacaaacggaactccggttccacctccgcaggtacgaacaaccccacacgattggggggcctgcggagcaacagaaggccgacgggtggctcgccgcctcccgctccaacaacgacgacgacgacttctgctccgaggggccgaacagcagcagcgatgacctcagggcggatgctgctgccatagggccctcacccacttcctcactcgagaggcaaggacgagcagaaggtcgtagagttggaggtgccaacttccgcgaagttgcgtccctccaacaacaaggcggaaggattgcgggcgttccccatccgggggctcggaaggaggaaagacgcgatgcatag

SEQ ID NO: 15022 - DNA, 735 bp, Zea mays
  Peptide Sequence Number=SeqID_58397
atggaggttcagtgccaaaccagcttctgccagaatgaagatggtttccccaagttgctgagagcatgcacagtccgcctcggaatcaggagccagccagagtatgatggtcgtgagttcgtcgagcatggcacagagaagtgtgtcgtgactgtatacattggatccagtccacaccatgtggaatggagtgtcactgctgctgggcacagattcaaagacacctgccaagtcgtcgctcgcaaggcattgagggccctgtgtcagatctatgaagaagaagtggctgacactccgctcagattctttccgccctttcagagagaccgtcccgcttggatggccaggatgcgtgcattggaagggcagcagctgcttgaggatgaccccacagtcgtgtacctcactgcatacctgctcacccttgatgcacagtatgatttcttggctcggcaccaccgtcagatgattgcccgagcagaagattcagagaagcgcaatcgtcagctgcatgtggatctcaccacagctcaagcccgtgtagctgccttggaaagtcgtgaagtcattgctgtggaagccctgtcacacccggctttaaggaacaaagccagatgcatctcatacatgcgccaagaagacaacatatataataacagagtgtatagagataaatgtcacaataatcagagtatttattacatagcggaagacttattacaaaataaaagataa

SEQ ID NO: 15023 - DNA, 530 bp, Zea mays
  Peptide Sequence Number=SeqID_58398
gtgtaaaaaggttcacactcagccaaataaaaagaccaagttttggattcaacaaaggagcaaaggggcaaccgaaggcacccctggtctggcgcaccggactgtccggtgtgccaccggacatgtccggtgcaccagggggactcagactcaaactcgccaccttcgggaatttccagaggcgactcgactataattcaccggactgtccggtgtacaccggacatgtccggtgctccaaggaaggtcggcctcaggaactcgccagcctcgggttttctccctcgccgctccgctataattcaccggactgtccggtgtgcaccggactgtccggtgcaacctcggagcaacggctacttcgcgccaacggctacctgcaacggcatttaatgcgcgcagcgcgcgcaggagtcagaatcgcccatgctggcacaccggacagcaaacagtacatgtccggtgtgcaccggacacccaggcgggcccacaagtcagaagctccaacggtcagaatccaacggcagtga

SEQ ID NO: 15024 - DNA, 1029 bp, Zea mays
  Peptide Sequence Number=SeqID_58399
atggtggccgccggcgcgtgcgggttcctgcagggcctggtcgccgccgaggtggaaggagccaagcggctcgccgagtggctcggcaaggggaagatgctgggcgtgttcccgcggaccttcattgtctttgtttttttgggggacaaagaaagcagattcagttggctactgttgaccagtgatctggagaagcaaatgcgcatctacgcctgttcgataacaatatggccagcgatttctccggtgcaaagtcagtggctctgcatccgctgtcactgtcccgggccgatagctgcggatcggaatgagtggccaacagtaaggcgttcaacagcaaaggaggcagcactccagctttgccgcatgaatcctcgatgccttgaggtacacagcgacttgaatgagatgggcttgtacggctggctggacttgattatgataaacggttctgatttactcttttcttttccaattggtgaccttctgctatggaaagattatgcagacgtatcagctgttcaagaactgcagcatgcgttagagggagtacttttgccggttgttcttggtttaacaacaacgaaagagagccgtctcgaatcgtcagtgcagttcagctggaagaccttagatgatgaccaggctaatctattactccttccaaagaacagccaaggtggtggtgaaaggaaggtgtcagaagatggaaagaaggatgccgtcggttcattgctcagcgcgtcaggatgcttacactactccgtgcacggcatactcgttcaaatacctgcacaagtcaagtatgcactcaccctccaatgcacattagccaggggtagggtacctcctccttggggtgtcatgaaaaacatgcacaaggaaatcccagacgtcgcgtgcaagaagttccaagtgtatcggcagggtacgagttgccgagcactgattcattctgggagaatgctaatggccagcctcagattcagagtgccgaggagcatccgaacgatgacgaagatgaagtag

SEQ ID NO: 15025 - DNA, 273 bp, Zea mays
  Peptide Sequence Number=SeqID_58400
atgcgcggggtgcctcgataccgttgcattggttttgaaaattcaccttctcagtcttctacggcggccccgaggaggcgcgggactgggttgttggttttggcggaggtgaagaggcgcactactgtaggcggaggcgcgctcttcacacggcggttcggcttcttcgtactcaggaactggcacgccagtgaagatgaagcggcgctcctaccgtggggcggtagcacgctcctcgcgcggcgattcgccttcttcgtgctttgggactag

SEQ ID NO: 15026 - DNA, 282 bp, Zea mays
  Peptide Sequence Number=SeqID_58401
atggcgcgcacgctgaggtggtcgccaccgctggagaggctgcccggcgcagaggtggttgccaccgctagcaagccgtcggtgcagaggtggtcacctccgctggcgagccgctcggagcagaggtggctgccgccgctggcgagccgtcggtgcagagataaaataacatccggaaaactgcaagaccaacaggtcgggcttatgaggacggacctcaccgggctggcgtacacgtatgcgttatctagttacaaaagggagaaaaattcgaccccttag

SEQ ID NO: 15027 - DNA, 1059 bp, Zea mays
  Peptide Sequence Number=SeqID_58402
atggggctaaaaacgtggcccccgccagccccaatttcgcgcgccccacgcgcttgggtatttttctcccgctgggcgctgggcagatgggcccccaggaaaccagaatcttttcttctctttcctgtaacaacttcaaacgcccgtgatgcgcgctttctacgttcgtcgctccccaccgcgttgaacgggatcccgtccccttcaagccgtcggacccgggggaaaccagtcagccccgttcctccccacctcccgtggggggtcccgtttgtcgggggcgcggttttctccgtggatctcgccacccgtccacgcagtttgctcgccgccagctcggccatcccgcccgagtctccaggggggcaggccacgtgcggcctgggttataagtcgtgccccggccttgattaccgcatgtcgccaatcgccttccggccttccccctcgagctttcacccgcaatacgtgctacgtcgtgtgcttgcgcgggtgagatgggtggatccgccgctggccggtccggggctttggaattcttcgccggtgtcaattctccgacgtgcgccttgggaaggatatttgcgtccctgggacctcgaagagcccgtgaccgaggatcctggtgagcagcaggttgaagtagctgagcaggagctcattgaaggcaagttctcggagacaactgatcaagccaaggacggaggcaagaaaagcttcgaggtaccaagtgcacgggagaaggtcaaggaggctgaggaacccaaagccaagggtgaagaagaaggcttgcaaagtcaaggccaagactctgctcagtctgggtgcaccggactgtctggtggctcaccggacagtgtccggtggtgcaccggacagtgtccggtgcgccaggctggctcgagcaaactggccgctctcgggaattcaccggcgacgtacggctataattcaccggactgtccggtgtgcaccggactgtccggtgagccaatggtcggccgggccaacggtcggccgcgcgatctgcgcgggacacgtggccgagccaacggctag

SEQ ID NO: 15028 - DNA, 236 bp, Zea mays
  Peptide Sequence Number=SeqID_58403
actgtaacctcgctgacggagagtacgtcctcgtgccggagcaaggagctgctcaggaggtagccccggatccagcaccagagcctgcaccagaggatctgcctgccactgctttggaaggcaagccccggttctttggaggacatggttgctggagtgacttggcctccatcttgccaccgggttggactgtcgagtgggaccccgcctcggccgaggaggagcatgaggagtga

SEQ ID NO: 15029 - DNA, 480 bp, Zea mays
  Peptide Sequence Number=SeqID_58404
atggcgctccacgagctctatgacgacggcggcccccagctctcttacggcagcaggacaacgctccgccgcaccaccgatagccacgacatcacgccagcaggatgcccagatctctccggctgccacatcggcatggccttctcagagaaggttggccgcgcgggaccgaggacgggacaggcgctctcttggggccgctcgcttccctcacccgcgtggacgcttgtaacccccctactgcaagcgcacctgacctgggcgcgggacgaacacgaaggccgcgggacttccacctctctcacgctcggctccggccgcctcgcctctcccccctccgcgctcgcccacgcgctcgacccatctgggctggggcacgcagcacactcactcgtcggcttagggacccccctgtctcgaaacgccgacactaaggaacatccatacaggattgaatatgcacttagagatccagactag

SEQ ID NO: 15030 - DNA, 663 bp, Zea mays
  Peptide Sequence Number=SeqID_58405
atggctgaaaggtaccaactcccgcggagttgcgttcctccaacgatgaggcggaaagacggcgggtatcccccatctgggggcttggaaggtggaaagacacgatgcataagggagagcgaagacatggtcgccttccaagggggtcaccctccttttaaaggcgactatccctacttgcgtccccagccgtcacgggctgagtcttctccaacacgctccaaggccctcccctgcggcgcgggggctgggtcccacatgtcatgcaagccggctcagagcagaagaagccaaaccgccgtgcgcggcggcgcctctggcagaagaagcaggcgacgcttcgccttcgccgtaataaccgcgccaaaaaagggaccgggaaagggggataccccgaaaaggatccttccctgtgaaggaaccaggctccgagccaccctactgatcagaggttcgaaggctggccccccggaagggttcgacagccgcctcagatcgcgtgggccctacacccactactggtcagaggttcgaaggtcggcccctcggaagggttccacggccgcctcaggctactcgggctccgcgcccattactgatcaggggttcgaaggctggcccccgaagggttcacagccgcctcagacgccgagcgagggatga

SEQ ID NO: 15031 - DNA, 579 bp, Zea mays
  Peptide Sequence Number=SeqID_58406
atgaccgcgtcaaaaaaggctggcccctcggaggggttcaacggccgcctcagagcgctcgggctccgcgcccactactggtcagagggctcggactcgggctcagccccagaagacgacgaactccgcctcgcccgatcccagggctcggactcgggctcggccctggaagacgacgaactctgcctcgcccgaccccagggctcggactcgggctcggccccggaagacgacgatctctgcctcgcccgaccccagggctcagactcagccctggcctcagccgacggtctccgcctcgcccgacccaggggctcggactcgacctcggcctcggaagacagactcgacctcgacctcggaggagcctccgcctcgcccaacccagggctcggaccgaccacgtcacaggaggcgccatcattaccctaccccaagctaactcaggctatggggaacaagaccggcgtcccatctggctcgccccggctccagcgctcttccgatggccacgacaccacacaaacagggtgccaaaacctctccggctgccacgacagcatgtacttagggcactag

SEQ ID NO: 15032 - DNA, 2361 bp, Zea mays
  Peptide Sequence Number=SeqID_58407
atggacgccgacggcaagaaagattttagcacggcgatcctagagcgcaagaaggcgccgaaccgcctcctggcggacgacggcgagggggaggtggccatagacaactcaatggtggcgctcagccccgccaccgcgttccagctcgagatcttcacgggggacctggtgctgctccgcggcaagcgccgccgggagaccgtctgctacgcggtgttcgacgcctcctgtcccgacggcagggtgcgcctcaaccgcgctgtgcgcggcaacatccgcgtccacctcggggacatcgtctctatcaaccgtatcgacgaggtcccgaccggcgcgcgcgtccagatcacgccgttcgatgacactgtcaacggcatctccggcaacctcttcgacgtctacctaaagccctacttcggcaacgacgcgctgcggccgttatgcaagggcgaccgcttcatcgtgcacggcaacatgcacgccgtcgagttcaaggtcgtcgacgcggaacccgccgaccgcgtcgtcgtccggccggagacggcaatctactgcagcgaccagccagtcaagcgggaggaagaggagcggctcgacggccctggctacgacgacgtgggcggcgtccgcaagcagctggcccagatccgcgagctggtcgagctgccactgcgccaccccaagctgttccagacgctcggcgtcaagccgcccaaagggatcctgctttacggcccgcccggcaccggcaagacgcttctggcgcgcgccatcgcgtcggagtccggcgcacacttcgtggttgtcaacggcccagagattatgtccatgattgccggccagagcgaggctaacctgcgcaaggttttcgaggacgccgaaaagttcgcgccttccgtcatcttcatggacgagatcgacgccatcgcccccaaccgcgacaagacgcacggcgaggtggagcgccgcgtggtctcgcagcttctcacgctcatggacggcctccggccgcgcgcgcaggtcgtggtgatcggtgcaaccaaccgccccaacagcctggacccggcgctccggcgctttggccgttttgaccgggagcttgacatcggcgtgcccgacgaggtcggccgcctcgagatcctccgcatccacaccaaggacatgccgctagccgaggacgtcgacctcgagcgcatcggcaaggacactcacggcttcgtcggcgccgacctcgcggcgctctgctccgaggcggccctgcagttgatccgcgagaagatggacgtcatcgacgtggaagaagacactatcgacgtggacgtgctggactcgctgtgcgtctgcaacgagcacctcaagcacgccatggaggtgaccaagccctcggcgctgcgcgagagggggctggtggaggtgcccaaggtatcgtgggacgacatcggcggcctgcagaacgtcaagctggagctccaagagacggtgcagtacccggtggagcacccagagatgttcgagatgtttggcatgtcgccgtcgcgcggcgtgctcttctacggccccccaggctgcggcaagacgatgctggccaaggccatcgctaaggagtgtaaggctaacttcatcagcgtcaaaggccccgaactgctgaccatgtggtacggcgagagcgagtccaacgtccgtgacctgtttgacaaggcgcggtcggcggctccgtgcatcctcttctttgacgagctggactcgatcgccgtgaagcgcggcaacagcgtgggcgacgtgggcggcacgtccgaccgcgtgctgaaccagctgctaacggagatggatggcatcaacgcgaagaagacggtgttcgtaatcggcgccaccaaccggcctgacattatcgacccggcaatgctccggccggggaggctagaccagctcatctatatcccgctgcctgacgagccctcgcggctgcagatcttcaagtcgtgcctgcggcggtccccagtttcccgccacgtccacctgccagcgctggcgcgcatcacggccgggttcagcggcgccgacatcacggagatttgccagcgcgcgtgcaagctggcggtgcgcgacgtgatccagtggagcttgaaggtgggcaaggccgaggccatgcgcggcgcggagatcggagtatggcacctcacggaggccctgaaacatgcgcgacggagcgtcagcgacctagatgttatgaagtacgacttctttgctcagcgactcaagggaggaggcttcgaggacgagaccatcattgctgccccgatggggacgcagccgctcacgatcacggagatagaggaggaggacgacagctcgctctactga

SEQ ID NO: 15033 - DNA, 207 bp, Zea mays
  Peptide Sequence Number=SeqID_58408
atgtctctgatctcttggtccaactcctcttcctggagtgttggactggtggccttcttttctggctccgagcttctcgaagagaaagagtttcctggtttgggtccagtggctgcagtgcagcagcccctgtcgctgaagctttcttcggcgcccgagtccgaagtcttcgtcttgaggaccttcggcaaaagagaagacccctaa

SEQ ID NO: 15034 - DNA, 1296 bp, Zea mays
  Peptide Sequence Number=SeqID_58409
atggagcgcgaaggggggaaaaaccggagggagacaggcgtaaaaggggaaacccgcggccttcgtggcaatgatggcccctcctacgacgtggttggtccgagccctgggtcgggcgaggcggaggctcctccgaggtcaaggttgagtctatcttccgaggtcgaggtcgagtccgagcccctgggtcgggcgagacggagttcgtcgtctttcggggctgaggctgagtccgagccctggggtcgggcgaggcggagttcgtcgtcttctgaggccgaggccgagtccgagccctggggtcgggcgaggcggagttcgtcgtcttccgaggtcgaggccgagtccgagccctggggtcgggcgaggtggagttcgtcgtcttccggggccgaggccaagtctgagccctggggtcaggcgaggtggagttcgtcatcttccggggccgaggccgagtccgagccctggggtcgggcgaggcggagttcgtcgtcttccggggtcgaggtcgagtccgagccctggggtcaggcgaggcggagcttcctatggtgcccgaggccggacttggctgctgtcagcctcactctgtcgagtggcacagcagtcggagcggcacaggcggcgttgtcctcttgtcaggccggtcaatggagcggcgaagccatccttgcattaaatgctactgcgatatggtcggtcggcgtggcgatttggctaaggttgcttcttggcgaaggctgggcctcgggcgagccgaagctttgtgctgatgggggttaccagctgagattaggagccttggggggttgccttgagtcgcggtactggttccgcagtcgaggaggcacggtagtggcgccagtggcggtgcagtttattgcacgtagcaaccgcccccgtgtcgtagggggaggaccttggagcgtgttggagaagactcagcccgcgatggctgaggacgcaaatggggaacactcgcagtccttccgccttgtcgttggaggaacgcaacttcgcggaagttggtacctttcagccatcgttcggcttcaagaattttcatcaggcagcccggccgcatcccctcgccggtggtcacccaagacggtgaccaccagcttctgggtggggagaagcaagccgggctgcgatctctgccccgccctcagcttcaaggatcttcatcatccttgctggggcggagagcgaggtgagccggggctctacctcccacacgggtcggctggccacctcttcttccagcttctggtggtggaaaccatcctctag

SEQ ID NO: 15035 - DNA, 387 bp, Zea mays
  Peptide Sequence Number=SeqID_58410
atgcgtggcctcgtccttgcactggagctgttgggttgttctggttggttgctggggcaggaaggcgaggtgcctagttgttctgacgctggtactgatttcctccctactggttgttttgacggtgggatgctgcctcttagcggggacgactgctactcccggcctgagatccaccaatcttgtgtttcctgtcctccatctcctgggccttcctttcagtcattatggctctatcgatcaaatgctggaagggcacctgtggcatctgaacttgcacttgaggttgagctgggggttgctgctattgcacctgctgcattgctgctaaggtctgaccaatcgcttggactgcttgagtttgcattaggaacatctgctcaatag

SEQ ID NO: 15036 - DNA, 750 bp, Zea mays
  Peptide Sequence Number=SeqID_58411
atgccgtcgtggcagccggagaggttttggcaccctgttcatgagatgtcgtggccgtcggaggagcgttggagcctgggcaatgatggcccctcctgcgacgtggtcggtccgagccctgggtcgggcgaggcggaggctcctccgaggtcaaggtcgagtctgtcttctgaggtcgaggtcgagtctgagcccctgggtcgggcgaggcagagttcgtcgtcttccgtggccgaggccgagttcgagccctggggtcgggcgaggcggagttcgtcgtcttctggggccgaggccgagtccgatccctggggtcgggcgaggcggagttcgtcatcttccggggccgaggccgagtccgagccctggggtcgggcgaggcggagttcgtcgtcttctggagccgaggccgagtccgagccctggggtcgggcgaggcagagttcgtcgtcttccggggccgagtccgagccctggggtcgggcgaggcggagcttcctatggcgcccgaggccggacttggctgttgtcagcctcactctgtcgagtggcacagcagtcggagcggcgcaggccatccttgcattaaatgctcttgcgatatggtcggtcggcgtggcgatttggccaaggttgcttcttggcgaaggctgggcctcgggcgagccgaagctttgtgctgatgggggttaccagctgagattaggagccttaggggtacccctaattatggtccccgacagcggatga

SEQ ID NO: 15037 - DNA, 243 bp, Zea mays
  Peptide Sequence Number=SeqID_58412
atgttttggaatggtggtgctatatggggtaccttggatgttttgtttggagtggacgaattcgaggacgaattctttttaaggggggtagagtgtaatatccccaaaaaaatgttgccaaaggttgattttcggtttcatcaggtaaatgaagtattatttgaggttggtattgtatctgaagatgatgtggttttataccctcagaggtgcttgttgctcatcaagggaagtgggaagtag

SEQ ID NO: 15038 - DNA, 513 bp, Zea mays
  Peptide Sequence Number=SeqID_58413
atggagttgcgttcctccaacgaggaggcggaaaggcggcggataccccccatccgggggcttggaagacgggaagacccgacgcttaagggaggaagaagacatggttgccttacaaaaggagcccccctccttttaaaggcaactcccccttttgtgcgcccccaggcgccgcgggccgagtcttctccaacacgctccaaggccctcccctgcgactcgggggctgggtcccgcatgtcatgcaagccggctcagggcagaagaagccaaaccgccgcgcatgggaccgggaaagggggataccccgaaagggatccttctccgcgaaggaaccgggctccgagcccccccattactgatcaggggttcgaaggctggccccccgagggttcaacagtcgcctcagatcgcgtgggcccgacacccactactggtcaggggttcgaaggccagccccccgaagggctccatggccgcctcaggctactcgggctccgcgcccattactga

SEQ ID NO: 15039 - DNA, 888 bp, Zea mays
  Peptide Sequence Number=SeqID_58414
atgaggcgagtcggggggccgcctccgcgtgggtcggctgcccctttcttccccctgcgcccaggggtgaagggcgtccttgagccccacggagacttcctccagccatgccaggatatgcagggcgctaggggccctgggtccccgtctccctgcctgaatggctggttctcgtcctcagcgggggggagcccttctgccgcgacacctcccccaaagctgctgcttaagctgcttcgctgtctgggcagcactaagtctcgcctgtttgattatctgaaccgctttaccaagcatgagttgccccgtgccaaggtgacgggtgagccgacgccaaagtccgtcagtcgaggcctcggatcgggctggcgcccttggaagccggttgaccgaggccccaggggtaaccggttgagccgcctgctcgggccggattcccggaggagcccctggaccgcggcgccacccgaggctgggtcgggctttgctgaagacgtcgtcgatgccgagggtgctacggctcccttcggcgtgaagacccgagcctgcaggatcagatcatcttgtagcgtgtgctttctgcggccgccgaggccagaagaacacgccctcgccgcgctcgcgaagctgcgtcttttttcctcctgtttcgagcatcaggactctgtcggtaacagggatgagtccctcggctcggtcagccttggccgcttacgtgtacctcgtcgtttccaggatccgctttccgaagtagtcaagaagcacgaaagaaatcctgctaaaaagagatcctttttcgaggaaagattcgacgcagagggggtctccccccttttagcccccgagggagggtcgggctttgccgaggctaggccgacccttccttga

SEQ ID NO: 15040 - DNA, 801 bp, Zea mays
  Peptide Sequence Number=SeqID_58415
atggccatggagcttcctctcttcctcggggacggcccggacgccgccctcttctcctccctctggtcctccttccccgacgacctgcagccgccgccgcaacaagagagcgtggcggagctgaagcagaccctgctggcgaccacgctggagctggaggcggcgagggaggagctgaggcggaaggagcagagcatcgccaagctgtcggacctggtgcgcgaggtggccaaggagcgcgacgacgcgcgggaccaggcgcagagcctccgcctcctcgctgcccaggccgcgccgccgctcgtcacgtccagcgtcaccgactccgactgcagcctcgcgtcgtcccccgtggacccgttcttcgaccccgtcacgtccgccgacaacaggcggcgctgcaagttcagccccgccacgccgccggccgcgcccaggcagcagcagcagcgccagcccggcgccgggctcgggtcggcggccgacgccgcgctcgagatgctcgccgccaagaggcccctgccgcacaggggccgcctgctggccgccgtcatggaggccgggcccctgctgcagaacctgctcgtcgccgggcagctcccgcgctggcgcaacccgcccacggtgcgcgcaccggacacgctgccgctcggcgcctcccgcgccgccgggtacgccgacgacgcggtcacgctggccgccagcggctgcacgaagcggccgatggccgcggccttgcccgtgctgcccgccgccagctgctcgccgggcttcatcgccaagcgacagaggctgcactga

SEQ ID NO: 15041 - DNA, 552 bp, Zea mays
  Peptide Sequence Number=SeqID_58416
atggccgggagatccgcacccaccttgcctccgctcaacaaccgcacacccactctacatcccaatccactagctccggcctcgcccccccacccgcgtgttctcctcccccgcctcgttcgcccctaccgcaccatcaacgtgcctccccgccgcccttgtcctccccatgcccgccactcccacccgagatggttagcgcccctcctccttccggtcccttcccctgcctccgctctcaacgtggccggccagccatggagtaaggctaggggattcgccggattcaccaagcgggctctggtggcggccggcgccgccgtcgtgtccgccattctcgtcaacccccctcgacgtcgccaaggtacgtcgatgaccctatcgttacctctttcgcttcctcgcaacttccgccctcaaccatcgaggctcgcccgcaacggccgccacagcccgctcggcatggcgctcgcctcgcaacagccactgctggtccagcaccaccaacagctccccaccacccactcgcgaagccccctcagtctcccttaa

SEQ ID NO: 15042 - DNA, 471 bp, Zea mays
  Peptide Sequence Number=SeqID_58417
atgatgcagtgggacatcgagaacgtgcccatcagcatgacccgcccatgcattcttgatcccacctaccagctgacgcatgcgcggcggcgtccgctgacggagagcgaggtggctcggcagatccggtacgtccgcggcgagacggacgggagcgtgaacgagggagcctggaggacgatgcagctcaacacccacaacctgatgcagctgcggctcacgctggcgtgccgcctcggcgccagcatggacgtcacccgcaccaccctctgcgtccgcgccggccgctacgcccacctcagcccgctgctcgtcgacctgcccatcggcaacgaccccatcgacattgtcatcctcaaccacggcacagaaggtggcactctcagctcagaatcctcagatcagatcagattagttgacaggggtagtgcagatatgattcataagctgcatctgtcgttgcccttctaa

SEQ ID NO: 15043 - DNA, 969 bp, Zea mays
  Peptide Sequence Number=SeqID_58418
atgtttgctgacaagaagaacacgtccagtgatagcagtaaaccagctttccagtttggtggaaataatgtcatatttggtggcaagaaggatgcacctgttgacagtagtaaacctttccagtttggtccgaataatggcaaccgtgcagtttacaggcaaggaagttctattaaccccagcgagagaacatatccagaggagatgatccaaactggcatatccaccattgatgtcatgaattccattgctcgtggacaaaagattccactgttttctgctgctgggctccctcacaatgaaattgctgctcagatttgtcgtcaggctagccttgtgaagacattggagaaagaaaagcatgctgagcaattcaaatcttatgagggtctttactttttcttgggatcctatctgagctccagcgaggacccagatatccatttcaagtacatagaagcagcagcaaaaattggacaaatcaaagaagttgaacatgtaaccagagagtcaaacttatatgatgctgagaagacaaagattgacaggctcagtgatattgaggaattctcaaatttagtgaagtaccttctgatggtaaggcaaaaggcacgggtcaccaaagtcgatggagaactcatttttgcatatgctaagattgacaggctcagtgatattgaggaattcattcttatgccaaatgttgccaaccttcaaaatgttggtgaccgtctgtatgacgaagaactatatgaagctgcaaagatcatctatgctttcatctcaaactgggctaaactggttgttaccctggttaagctgaagcagtttcaaggtgatgtggatgctgctcgcaaggctaacagtgccaaaacatggaaggagttctgctttgcttgtgttgacgccgaggagttccgttttgcacaaatttgtggtctcaatattattattcaggtatacaagtag

SEQ ID NO: 15044 - DNA, 426 bp, Zea mays
  Peptide Sequence Number=SeqID_58419
atgtctgctcgtgctatttctggacattgcaaattgaagaagtgcactcaggttatacatccagtaaagagcaagacatttgaaagctcatgggtcagctgtgttgctattgatgcaagcgaaagttggctgccattttggattggtagggtcgatatgtttctcctcccctctttaaacagggcatgtacatcacgctttaaaaactacgcactatgtggtgctgatatatatagaggatcatggcagtccatgaatcaagagatcacaagctacaaggttgtgaccccatacatgcaattcaaggatttggaaaaggagaatgaagatgaccctgatatgttagagatgatagcttctgagctgaaggctctatctacccagcttgtagagcttgaagaaaaaatgaaggcgaatacaacataa

SEQ ID NO: 15045 - DNA, 219 bp, Zea mays
  Peptide Sequence Number=SeqID_58420
atgacctctcaagcaaaggccaagagtagctaccgctacaccacacatcccaaccaagagtcatcggtactcgtcatgtcgtgcgcgttcgacgactactatatcgaggattgtggcgtcatcttggcagcggaggtgatgcagaggaggatcgacaacagtgaccagttcgtcatcctcgccaccgtcagggtagcttttgtgatggtctgcctttaa

SEQ ID NO: 15046 - DNA, 423 bp, Zea mays
  Peptide Sequence Number=SeqID_58421
atggccctcgcctcatttgccaccacctcgttcgtcattctacttcttttctctctcccatcatgcttccaccttcgcgccaccccattctcgacagagagcgtaggagaaggcgcctccttcccttattcgtctaacaccagccccgacaccgactcgcgcagtggctattgcacgtccacgaggatgtttcacattatgcgtgcaccatcgttttcgtcatcgtcgaacgtcccgttcgtcttcccgggcctttgccctgttcttcctccccaacctgctgcccccgcccacggtcgcagccgagagccgaccgatgctcgtcgacgcgggtgcggggcgagtcggtcatgctcctgggctttctccgtgcgtgttgtcaaggaggacatagtggcgcctgccacgcttaggttatcttag

SEQ ID NO: 15047 - DNA, 2328 bp, Zea mays
  Peptide Sequence Number=SeqID_58422
atggcgacccccgacgacggcccggcgccggccggggggcgcaagttctggcgctccgtgtcgtggtccgaggcgcgggagccgccgccgccggccccgccggacgtcgcgggcgggcagtcccgccgcggcttgccgccgccgccgctcaccccgcggtcgatgagctccaaggcgcggtcgtgcctcccgccgctgcagccgctcgccatcacccgccgcagcctggacgagtggcccaaggcggggtccgacgacgttggcgagtggcccaaccccaccacgccgggcgcctccagggcgggcggcggcgggggcgggtcctcccccgccaagcccggggaggggctccgcctcgacctctcctcgctccggtcgcaggggcgcaaggaccagatcgccttcttcgacaaggagtgctccaaggtcgccgaccacgtctacctcggcggcgacgccgtcgccaagaaccgcgacatcctcaggaagaacggcatcacccacgtgctcaactgtgtgggctttgtctgcccggagtacttcaagtcggacctagtctaccgcaccctctggctgcaggacagccccaccgaggacatcaccagcatcctgtacgacgtgtttgactacttcgaggacgtcagggagcagggcggccgcgtgcttgtgcattgctgccagggggtgtcacgctccacgtcgctggtcatcgcctacttgatgtggagggaaggccagagcttcgatgacgccttccagtttgtcaaggctgcccgggggatcgcaaatccaaacatgggctttgcatgccagcttctccagtgccagaagcgtgtgcatgcgattccgctgtcaccaaattcagtgctcaggatgtaccgcatggcgcctcactcccagtatgcccctctgcatttggtgcccaaaatgctcaacgacccatccccagccacccttgactctagaggcgcgttcattgtgcatgttctctcgtcgctctatgtctgggttggaatgaagtgtgatccggtaatggaaaaggatgcaaaggctgctgcgtttcaggtagtgaggtatgagaaggtgcaggggcacatcaaggttgtgagagaaggtctggagccgcaggagttctgggatgcattttcaagtatgccacctaattcagatagtaatacaaagattagcaaggaccagatcgattcagcatccaagagtgacccaggaagccggaaaaatgagtcctatgacgctgattttgagcttgtctacaaagcaatcactgggggagtggtccctgcattttcaacttctggggctggtgatgagacccatcttccagctagagaaagtagctggagtttactgaggcacaagtttatctccaggtcgctagctcgtgtttattcagattctgctctaatgaaggattttgatccacgggtacaacacctggctgctgaggcatcaacctcacctcctttcctttctccaagctccttatcatcggattcaagtgtcagctcgaagtatagttcagactcaccctccttatcacctacaactggctctccaccatcatttggcctctcgcctgcttcatctaatctgacacatgctttggtgccatcatccaggtctcccctttctcaatcatctaatgaaggagcttcaaagccttctggcatggaatcaatacactctccttccaagacctcttctatagcagaaaggagaggaggcttcacacttctaaagctaccatctctccaaaaggatcttgtattgccaccaagggtgccgtctattgtattgccaccaagggcgccatctagtattcgcaggaccgaggatgcctcagataatagtacaaatggggttaaacagctgactagtgagttttgctcagaaaaatgcactggtaatagtttgagctcgcattctgaaactagattaattgagcgtactgacagtaactcagaagtctgcagtaatgcacaacttgtagtctaccagtggcccagcatgggaaagctaactacatttgcacgcaaggatcttgacccgaagtcggttttaatttttgttacttcgaatgccatcaggagaggagaagcagttaaaatggtgtatgtatgggtaggaggcgaaaatgagagcagcaagagtgttgactctgtcgattggcaacaggtcactagtgattttcttcatctaaagggcctcagcaatgttcttcctgtcaaggtatctgcagactgtgaaccacctatactttctgtacttcgttctgcttctgagcttttcgctactattgaagctgtataa

SEQ ID NO: 15048 - DNA, 1053 bp, Zea mays
  Peptide Sequence Number=SeqID_58423
atggcacctgtagatctaacccccaagcagcccaggaaggcctacggcggcgacggcggcgcctactacgagtggagccccgccgacctgcccatgctcggcgtcgcctccatcggcgcagccaagctctcgctcgccgccggcgggctcgcgctccccagctactccgactcagccaaggtcgcctacgtcctccaaggcacgggcacctgcggcatcgtcctcccagaggcgacgaaggagaaggtggtggccgtgaaggagggcgacgcgctggcgctgcccttcggcgtggtgacgtggtggcacaacggccccgccgcgccgaccccgctcacggtgctcttcctcggcgacacctccaagggccacaggccggggcaattcaccaacttccaagctgacgggcgcgaccggcatcttcacgggcttctccaccgagcggacgcggcggcgctggtgtcgagccagccggcctcgggcatcgtccgggcgtcctcgtccccgctgccggcgccgtcgccgcgggaccgcgagggggtggcgctcaactgcctggaggcgccgctggacgtggacatcccgggcgggggccgcgtcgtggtgctcaacacggccaacctgccgctggtcaaggaggtcgggctgggcgccgacctggtccgcatcgacgcccactccatgtgctccccgggcttctcgtgcgactcggcgtaccaggtcacctacatcgtccgcggcagcggccgcgtccaggtggtcgggcccgacggggtgcgcgtcctggagacgcgcgtcgagggcggcttcctcttcatcgtgccccgcttccacgtcgtctccaagatcgccgacgcgtccggcatggagtggttctccatcatcaccacccccaacccgatcttcagccacctggccgggaagacgtcggtgtggaaggccatctcggcggaggtgctgcaggcgtcgttcaacaccacgccggagatggagaagctgttccggtccaagaggctcgactcggagatcttcttcgctcccccatccaactga

SEQ ID NO: 15049 - DNA, 435 bp, Zea mays
  Peptide Sequence Number=SeqID_58424
atggcggacgaggcggcgccgaggctgctgccggtggcggcagacagggacaaggacgaccgccgccgctgggcggcccgctgcggcttcgccgtcctcggcatcatgagtaccctcctcgtctacggcgtcctccaggagaagatcatgagagtcccgtatggagtggagaaggagttcttcagatactcgcttttccttgttttctgtaaccgcatcaccacatccatggtgtctgcaatggtgttactggcaagtaagaaatccttggaccctgtggctccgctacacaaatatggtgttgtctccatatcaaatatactgaccactacctgccagtatgaggccctcaagtatgtaagcttccctgtccaaacgcttgccaaatgcgccaagatgatacctgtcatggtaatctctgcttctatactgtaa

SEQ ID NO: 15050 - DNA, 360 bp, Zea mays
  Peptide Sequence Number=SeqID_58425
atggccgagcccaccattgccgacgtcctcgctgagttgcgggcactccgcacggacgtcaacacgctgcagtccgacatggcggccatgaaggacaagtccgcgttggcctcggacaacgggggccacggtcggcgacccgagggacagcgcgaccacgatctgtacatccaacaccgcaagtgggacttcccccgcttcgacagctccgtcgatcgatgttgttcatcaacaaatgtggacttcaagctctcacttgctcctctatcaagacacggcttgatctttgagccaagtggacgagaaatcactcaatacctcgattccactaatgtcacctttgccgctccggcgaggtag

SEQ ID NO: 15051 - DNA, 726 bp, Zea mays
  Peptide Sequence Number=SeqID_58426
atgtctgacttcaagccatgttcgtcttcctttgatgacttttccactgtcagcagtttgtcgtatggcatcatgaggattagagagacagcaggacttagacatcatccttatgtgatcagcaaaattgccagagtccctattcttcccaagagtggggataagagcaaaaatgcgggacaaattctagaatattatccatcacatcatgaacgacatctcaatgatttgaagatggacaagaaccaaaatttagcgtatgctccttatattatggctctcatcaaagccaagaccagatttaaggggccctgcgagattgttcacacaccattcagaccctttaagaatgagatagggtttctcaccaggccactcactcccttcccagatgatgaggaagaccctggctataatgcaggagcaactcctgatgttgaggccgagcagatgcctcctcctccacctcctcctcagcctcagcagtattggcagcctggtccaggctactttgatccttattttcacaatatgcagcaggggcttgagactcatattgatactcgctttgagggcatgatgtcacatgtggatcaccgcctagatgacatgcagtctcgctttgacagtaactgggatgcgctcaactctgagttttctgagtttcgtgatcacattcacactaatgtcactgatcctatcatgacctggctgaataatatgtag

SEQ ID NO: 15052 - DNA, 147 bp, Zea mays
  Peptide Sequence Number=SeqID_58427
atgggcgatgtcgacagcttcctgctgaaggcggcgctcctcggcggcgcggtggtcgtcagcggcacgacgagcgtcctttcacggcgggcggcggcatcggcatcggaagaaactatcccatggtggggagatgggtgcggaagg

SEQ ID NO: 15053 - DNA, 159 bp, Zea mays
  Peptide Sequence Number=SeqID_58428
atggcggtgggtgcgctgcaaaaggggtgcgtgggtggtggtagtgcgctgcaaagggggcgtggggcggtggtagtgcgcatggaggcgagcacgcgtgcgaggggcacagagaaaacctttcttaaaaagaaagaaaacacacaaactcagcaatga

SEQ ID NO: 15054 - DNA, 303 bp, Zea mays
  Peptide Sequence Number=SeqID_58429
atggacaaggatcgccagggagctgcacaaaagcgccaggcggttgtgaggctccatgaagccaggccgaagaggcagtgggaggctgcgaaggctgcggcccctggcggaggcaagccgccgctggcggcgaagttgggcgtccctgcatctagcaaggcgccggaggcagcggcaggcgctggaggctccaaatcggcgaaggctgtgccgccgtccagcagcgtggcggaggtcgcgaaggcggcccgagtgttgccgtcgtcttggcaagcgcgtcgccgacttcgccaccgatattag

SEQ ID NO: 15055 - DNA, 321 bp, Zea mays
  Peptide Sequence Number=SeqID_58430
atgcaggaatcccttgcaggaccgccatcacagcaaaatcctcccgagggccttcccaggaatcccttgcaggaccgccatcacagcaaaatcctcccgagggcctccccaggaatcccttgcaggaccgccatcacagcaaaatcctcccgagggcctccctacactgaccactcccctactgcccttgcccctttcggcaatagcaagtactacccaaaaagtccagtggtaatcaagttctctggattgggcctcaaattatggaaagtgcaggggctacggtgcaacattcccaagactcagaaaactatgcagtag

SEQ ID NO: 15056 - DNA, 249 bp, Zea mays
  Peptide Sequence Number=SeqID_58431
atggaattaccactagacgcgcagagcagcgaaagatgtctcaatgtagatgaacgcgtcgagcagtgccgtgcagtcgccggcgtccttcacgtcctcgcacggttcgtccaagtgctccagatgcagcacctccgagcgactgcagcgaaggcctcgagcgaagggtggcgtctttgccttcgccccaacatttgccctccgagggaccagttcgacaaagtcacctggtgccgaagacgtcgctag

SEQ ID NO: 15057 - DNA, 573 bp, Zea mays
  Peptide Sequence Number=SeqID_58432
atggctccacggccagccgccaaccaccaggccacggccgagcagggcgccaagcacctaggccggccgagcggtgcgccgagcgcccgagcacccaggccaccgcccgccgcaccagagcggccaacggggcgccgagccgagcagagtttcaacagtgttcctgaccgtgtgttcttgatccaggtggctgccagcaagacgaagatctacatggtgcttgagctcgtcaacggcggcgagctgctggacaggattattgtactttacttggagctttatgcaagctgtgtggagtacatcacgccgctaagagacagcatgtcatcagtgtttccctcagcacatttagcttttgccagcatcgacctgaatgcacacactgtctttgcgatcacaacggccttggcaattctccaaacagtctgtctcaggaacctcagtctcctctcgtatctttctggctctgatactcccatgtgcgtgctacctctccatcaagaagggcgcagtgccattgtgggaggtaaacaacacttccagaatcccaaccccgaaatagctggacactga

SEQ ID NO: 15058 - DNA, 222 bp, Zea mays
  Peptide Sequence Number=SeqID_58433
atggagagccgccgcttttggggacttcttcagcaacagcgtatgcggcccgtgaatcatgccagtgacctacgcgggctccgccagggcttgtggaagccggatagggcgttcttgttatttattgttcatgttaagatcattatgttattggaacatggagaaccacccgggaaaacagtgctaccacaagggtttaatgggacgcccttggccgattaa

SEQ ID NO: 15059 - DNA, 429 bp, Zea mays
  Peptide Sequence Number=SeqID_58434
atggcgcatcgagcacagggtggcgattcggcgccagggttggatcgagatcttcacagcggggtcgtgttcgctgtggtgacatccagggagattgaaggccatcagagtacctgcaatttctcgccgtcgtttgccttggccgcaaaatccgagcagctcgtggacagctacaaccgtctcctaatctccagtgagttcgtccccaaccgttccgctttcgtctgggctccagcgtgccgaaccatggtattccgcgaggccaccgcggcggagctgggcgcgctgccgtatggtttgggcgaagatgagagttggttgtcagccgttgatcagttaatgggcgcccgagattacaacccagcgtaccgtttcgggggagcgatcatggtcgttgatcggttgactgacgggtgggagcgatcctag

SEQ ID NO: 15060 - DNA, 750 bp, Zea mays
  Peptide Sequence Number=SeqID_58435
atgaaagtgatcaagggcacaacttgcctggcacttgagattccagttaccaaggtttttcctccctgtctggactgctcctcaaattccagagataacagggaagatgcatacgacaccgaaatcactgggatgatccccaacccgatttgtccaacgacgatggtcccacacctatggcggagcggcaacgtcgatgcgcccaccaaccgactccctcaagcgctccccatcctccctgaccagtcgtcgaagctggaccctagacgacggtggcgtcatcatgcagaccccgcggtagtgctccttgagcgagtagaggaggagggaggtcacggtagaggaggtcgtcgcggtgcggagagagggtggcgtggcccgagaagtcgactggagaggacgtcctgcgccttgggtcttatgggggagggcgaccccgggtcggtcagagcggccacggacgacgcgcggaagaagctccggcggattcggctgggtgtttgcgtcgcttggccaccgggccccacccaccagagacataagcctacgccgggtatcggctgcccgtgggccccgcagtcggttggaggaggagctagcacacgaacgcccgcggtggttagcggtggaagcggggcgagtaactgggccgagccggacgcgggagtgggccagaaggagaagggaatgggccggccaggggaggaaatggcccacgcacagattttgggcattacacatgtcacatga

SEQ ID NO: 15061 - DNA, 235 bp, Zea mays
  Peptide Sequence Number=SeqID_58436
atggacaaggagcgcgcgtgggtgggcgaggagggcacatgggtggccgaggagagggagcagggaagaggagctcgtggtggaggagggcatggggcgggttcatcggtggaggatggcgcggggcggcgtttggagactgggcgcacaggcggcggcgaaacccacacccccacgtcagctgccccgccaccaccaccgtctacacccaccgtcggtatctcgcccgccatcg

SEQ ID NO: 15062 - DNA, 663 bp, Zea mays
  Peptide Sequence Number=SeqID_58437
atgggccggatcacacgtgggcctctgagctggacgaggccgcactgtgagatgactccgtcgcaggccttcgtctggtgccgaatcgagcggaggaccagcgactgcagcgaaggcctcgagcgaagggtggcgtctttgccttcgccccaacagaggggtgggggggacgctgagaacccgaacgtcgccggcaaccacacgctcgcggacgaagtgcaggtcgatctccacatgcttggtgcgctggtgctgcacgggattggtggagaggtagacggcgctgacgttgtcgctgtagacgagggtgacacgctgaagggggctgtggagctcgtggagaagctgatgtatccaggaggcctcggccacgccgttggccacaacgtggtactcggcctctgcactggagcgggagacgacgggatgccgtttggcggcctaggagacgaggatgcgcttgagagcggtaagatggggctcccgtggagtgtgcatatggaggcagacctgttggacggtgatgttgacggtgtactggcgctgctgaaggaagataccctagggccggtgctcggcagtgatgccgaggaaatgctggaggggccccaggtaatgatgtttgctatagctcaagttcccaaattcaaaagctatttttga

SEQ ID NO: 15063 - DNA, 345 bp, Zea mays
  Peptide Sequence Number=SeqID_58438
atggacgggaaacacgcgctacaagacaatcagatcctgcaggctcggatcctgacgcttgaagggagcagcagcgccctcggcgtcgacaacaccttcggcgagggtcttctccgggaatccggcctgagctggcggctcggccggtcaccccggggcctcggccagccgtcctccaagggcgtcagcccgacccgaggcctcggctggtcaacaccggcgtcggtcccgctaacggacgacccgaccaggcttcggccaaccaggtttcattttcgagtcgactctgcctctgtccgtgctgacaccgctaccccaggcctcggctcatcgaagagcggctaa

SEQ ID NO: 15064 - DNA, 1092 bp, Zea mays
  Peptide Sequence Number=SeqID_58439
atggcggcgggcgcgttggaggcgaagaaaccctacctgatcgccctcgccgtgcagatcatcggcaccggcatgttcgtcatctccaaggcagccttcgacgacggcatgagcaccttcgtcttcatcttctacaggatggccctcgcctcgctcatcctcgtgcccacagccattgtgcagcagaggaagaatctgcggcccatcatgtctgatcccaggctgcttctcaagctcttcttccttgccttgatcgggaacactttcagcttgaacacgtacaacctgaccctgaagctgacgtctgcgacggtggggtccgcgctggccaactccgtgcccgtcttcaccttctgcctggtgctgctgctgcggatggaggcggcgaacctgaggacggtcgccggcgtggccaaggccgccggagtcgcgctctgcgtcgccggagtgctcgtcctcgccctgtacgccgggccggcgatgagccccgtcaaccaccaccgcgccttcgccgccgccgccccgccgcgtgcctccaccagcagcagcaggatgacgtggatcacagggacgctgctcatggtgctcgccaacgtcacgtgggcgctctggatcgtcctgcagtcggcattgctcaaggagtaccccaacaggatgcttgtgacggcgacccagtgcgtgttcagcatgctgcagtcgttcgtcgtggccgtggtggcagagaggggtgacttgtccaagtggaggctccgctgtgacattaccctcgtagccgtcctttacgtgggtttcgtggtgacgggactgtcccattatctccaagcgtggtgcatggagctgaaaggcccggtgttcctggcgatgacgaacccgctctgcttcgtcttcaccatattcagctcctccttctttctgggagagatcgtgcaccttggcagcgttctgggtggagctctgcttgttgccggcctttacagcgtgcactggggaaagctcaaggaagaagacatggcatctgatcaggaaaagaccaacaagcaggaagaagaagcagcagcagcaggggcatcctcagcgctccaacaaccgtga

SEQ ID NO: 15065 - DNA, 933 bp, Zea mays
  Peptide Sequence Number=SeqID_58440
atgtccgagcaaatgttatctatgttccagactattcaggaccgccaggacactctccagcagcagctattggcagacagggcagagcaccgggctttcatgactcatattcttcagcataccggtgttctaattcctctagtgcagtttgctccacctcctgctcttcaggtcgcagtggtgccagccattcagtcaggaccccagctccactcctttggtccaattatttctccgctcaggccagtctcactagacctctctacccaggtcgtcggaccgatcagtactcagccaccagtgcctttagtgtctgctgtagccactcctgtcgtggctgtctctgtgtctgttctagctccagcggatccagcaccggatccagcgtccgagttagcaccagctctagcttctaccgcagatactagatctgagactgacttcgacaccttacttgtgtttgcactacttcctcgacctcgacctggttataggtcggagatcaagtctcccactctccggggatataacggcgatccgaatcgatttactcaactgaggatctctaaccacacgacatatgtagcacttaacccttgcatatgtcaaccgttcccacagatcctccacaatgtgaaccggtccgcgctacccgggagcacagtactcctccatccagcctctagccaggagggtacacgctactcccaccatctcccacgcccagtgcgcggttgtcttttcacgtatggaatagccgggttcaagcttaccctgtcccatttccagggcatgtggctagttaagatagtccttgatcaacaggcctacatacgcatccaatccttaattaacctgggcggagcatcacctgttcctagcccaagtctcgagttaagtagttccatccttaggattgtttgtattccttaa

SEQ ID NO: 15066 - DNA, 240 bp, Zea mays
  Peptide Sequence Number=SeqID_58441
atggaggagggcaccttgggggccggtgctgaggtattcttggggccattcaccgagttggaggtgatgatggcgcctcctgttgacgtggctggtctgcgccctaggttgggcgatgtggaagctccttcgaagccgaggtcgagtctgtcttccgtggccgaggtcgagtccgagcccctgggtcgggcgaggcagagttcatcgtcttctggggctgagcccgagtccgagccctag

SEQ ID NO: 15067 - DNA, 1035 bp, Zea mays
  Peptide Sequence Number=SeqID_58442
atgagcttgacacaactaaaagggaagtgcactgctcaaccttctcaagataatcatgatcacatggtgaagaagcttgagacgggatcaaccgtggcatgcaccaaatcccttgaagaaaatgtcaaggacttgaggattgccaagaggaaggaacaaaagaagaaaaccaatacctctgccaaaagcctcaaccgtgcctccatgcaaaacatccaagtgtgcctgcttgcccgcctgcgagactcctctcctgcctggttcttctccctcgagacgtacccagccactcatgtagcaattgccgcaacagcagatcaggaagagcagggtggtcagttgaggatcgcctccaatcagattgccttccgagtccgtcgcctctcgtctcgggctcgctccacacctgctcgcttcgacccttcagtcctagtaaccaccactctagcttcctccactatgccagctcctgccgctctcgagccttccaccacacctactgtgccccctgcctccaccacaccagcttccactgctcctgctccctcttccgctccacctattcctccgcctcgctttcgggatcgtaatgagactgaggtgtgtccccttgctgtggacccatgcctgctcgttcttcagagagccacagctactagggtgcgtcagttccgacatgtaccagtggagtcttggttgcctactaagcgtgatccagcagttgcgcctctcttccacaccaggacccaggagtccttctacagagcacaattgacaacacagatagctccaaggattcaccggtgtcttgatctttcgtccttccgttcaatagccggtgcagagtctgagggccacattacatatctgccaggtctgtactccctgctgagttttggtggctggtatgttgaggagtggatccgagtcttctatgctatagtatggatcgaccctgaccatcagtggatgaggtttcggttcgagcatgaggatgtcacactgcaaacagctcagatccggaagctattttaa

SEQ ID NO: 15068 - DNA, 1323 bp, Zea mays
  Peptide Sequence Number=SeqID_58443
atgaaaatccttgaagccgagcgatggatgaagggtgccaacccctgcgaggtcgcgctcctccgacagcagcaagacaaaggcagcgcgggcggctctccccactcgcgtcctcaagcgtcgcgggcaaagtcttcgccgacgtgctccagggtcctccccctacgacatgggggctgggtaccacacgtcatgcaagctgacccaaaacggaagaagccaaactgccgcacgcggagcatcatggaggcccaggcccacacgtcatgtaaccggcgcgccggttactacgtgcaaggaaccgcactgccacttgcgccaatgtcgcgcctcctcgactgcggaaccggtgccgcgactcgaggcaaccccgcacatggcccaacagtgccaatcgagcacaacaatcacgggctggcccctcggaagggttcgacagccgccccagagcactcgggcttcaagctcattactgatcaggggttcgaaggctggcccttcaaaagggttcgacaaccgcctcagagcactcgggctccgcgcccactactgatcaggggttcgaaggctggcccctcggaagggttcgacagccgccccagagcacgcagagcgagggatgactctgggtacatctattacatggccgaggctcgggctgcgctcccgagttcaggtcaaggcttcgtctacccaaggggcgcgatctcgcctcgcccgagcccagcctcgggcgggaactgtagccccggaggaagttacgtctcgcccgagggcctcctcaggcagtgggcgcaccctcggcacgcccgaggcccaactcgagcaggcttcgtcgagaagcaaccttggccaaatcgcctctccaaccgaccgtatcgcaggcgcattcaatgcgaggatcgcatgacaccttatcctgacacgtgtgcctcagtcggcatggtcgaacctcaggcgcaacaggaaactccgcctcgcccgaccttaggcctcggccttggaaggaggtctccgcctcgcccgaccctagggctcggcctcaaccccggcctcggaagggaatacaagctggtcgggagagggaaagggtcccaaatccttgggttgattgaggcaagtgccaatatccacgtggagtcgaaaaccgtgaattgttcctcctccttctcggaagccctaggcacttctatttatagcatcaaggagggctaccaggagcgctgggcttgtcccatatgggagaggagagagccgaggccaagatttagggctcggtcacgtgcccgagcctgcccgatggaggagttgtctgagtcgtag

SEQ ID NO: 15069 - DNA, 378 bp, Zea mays
  Peptide Sequence Number=SeqID_58444
atgcaggcggcatgcaactgcaccaaggggacacaccctttcgacttcgacgcgtccagcatggggcccaggcccacacgtcatgtaaccggcgcaccggttactacgtgcgagaaactgcaccgccacttgcgccagtaccgcgccttctcgactgcagaaccggtgccgcgactcgaggcaaccctgcgcatggccccacagtgccaaccgagcacatcggtcacggggtccgggaaaggggatactccgaaagggatccttctccgcgaaggaagcgggccccgagccctcctactgatcagaggttcgaaggctggcccctcggaaggtttcgacagccgcctcaggccactcgggctccgcgcccactactga

SEQ ID NO: 15070 - DNA, 924 bp, Zea mays
  Peptide Sequence Number=SeqID_58445
atgggtagcaccaattggaaaaaggcttgtccaacaccggttgagatggtgaaccaaaagaaatgtagattacataagctagataaatcaattcaagacacaaagaatattgaggagaggagcttggagcaacatgctatgaacaaactggttgaaagggcatacagaaaactcaagggtgggcgcattggctctagtcacaaggccggtgtcagtaaatctgccaataaagctgcgaaacagcttgccttggcttttgccaagcgtactcttgttcgatgccacaaatttgacgaaacagggaaaagctgcttcagtgagccttctctttggagtgtgctgtctgcacccttgccaagcagtgacgcgagattcacggagggtgtagagaggctgaagcatcagaagctcgacagaactccatttgatcaaggtggtgcgaaatggaaaaagggcgacagggaacgggatcacagcagggatgcgtctgcaaagggctctggactgaaatcagggcgccattcctcaggcggcagcggcaggagcggcggcggcgagcgcaagaacaagacgaagccaaagcaaaagctggctcagctatcgacttccggaaacgtgctgggtagagtggttgagccattctcatctccagcggcgcaagcgcaagagccccctgaacctgcaagcgagaagaagactcagcatccctctaggaacgtggccccgcggctgaccgtggatgctggactgccagcattgcctggattagatgacatattggacgtccctggagggctggatgggcagggcaacgacatcagctcgtggttcacggatggccttgacgactcgttgcaagacattgatctttcaggcgccctggagatcccggacgatgacctcacccagctgggttttatatga

SEQ ID NO: 15071 - DNA, 888 bp, Zea mays
  Peptide Sequence Number=SeqID_58446
atgggctggccttcaactttgccgggccgcaccgacactgtgggaagccaccagggcacgaccgcacgacacgcaggaagcagtcacccagccacaccactcagcagtactgttccactgcccgagcaacggcagcagcacaagcggttcttgcaccacgagatcgagccaatcgagctctcgttttcgagcgtccagctaatcttgctcaccgtcttctctgctccgagctctcctctcgtcaccggtcgagcagctgacgcgtctgtgtgctctcctacgaaacaggacgcagctggtgcgcgaggcgaggcgatggccaacctcaaagacgcgtctgtctgcgtggcgatgggcatcgcccacattctcaagccgctgcttgacttccccgacggggtccggccgcgcgctcagccccgtcctcgaagccgccgtcgctttgctcatcacctcgctcccgcccttatacctcatatgcatcatcctcattggccccggcgccggccgtgctggcggcccccggtgcggcaaggagccgttcttgctgtgcttgccctggccctcatcgccttgatgttcctcaccggcgacgagctgccgtgggctcctgctactgccccgtcggtggcgactgcagcaccagcgcccgcgcccgcgccgacaacagcagcttctcgcccatcatgcactggctggctgacgtttatcggccacctgaagccacgacgccggcgcggccatcctcctcaggatccggcatggctgcctaggccgaggtcggagagatcaaagacggtgaacgtgtcacagtcactgcccaggccaatgcaaggtcgaagagaggaaggccgagggtcgacagcaggacaagcggaggccgactag

SEQ ID NO: 15072 - DNA, 426 bp, Zea mays
  Peptide Sequence Number=SeqID_58447
atggagcctggcggagggacagctgtcggagctgttgagtccttgctgacgtcctcttgcttccgtaagggggctgagagccgccgtcgtcacagagtatgcggggcgccatcattgcctatctggcggagcgagccagatgggacgccggtcttgtcccccgtggcccgagtcagctcggggaatcttgtttcttcccaacgtgggtgtgaccgcctgattgatttatatggcttgcatgtgaacgaagcaatccacatcctgaaaggtgagctcactgccttgaagagcacagcgagggcagcagggaagaggatgcaagtcatggtttgcgttggaacaggccaccacaccaggggctctcgcactgcgaggttgcctatcgctatggagcagttcctcctggatgaaggctctcctggatga

SEQ ID NO: 15073 - DNA, 775 bp, Zea mays
  Peptide Sequence Number=SeqID_58448
atgggcgtcaccgtcgccgagactttcgcccaagagcccccagcacaacgtctggccgaaacctcgagacacagcaagctgccttcgccgtcgctggtaccgacgcctgccggcgcaccaacgccaacctccaccccggctcatgcgctagcccgggaccagcctgccggcgcctccgacggatggcatgcggaggccgccaacctcgcgcgccagatccagcccactgcgcgtcgacgccgctccccctgggggcgccagatccaaccctccgcgcatccggtacgcgagcacacagcccaggcacacctccaaccccgagcagcagcgattgccgtcgcggcgcgcaggcgccgccaccgggccagcctcgcggacgcgcacctagccgcaggcccgttgcctgagtgggcggacgccgccaccgtgggctggacgcgcgacaaggcagcaagcacccgcccgacgccttcaccgctagatgtgcgagcaacccgccagctagctccggcggcggcaaggcaaagagatggggagggaggggagttggcagccgcccgagacgcgagggggcgaagccggggccgaccacgccgacgagcaactcacggcgaccttggcggccgcgcccgcccagatccgccggagggagacgaagatgccccgccgccgccctccccgcaagcagccggaccttccggcggccagctcaggcagcggcgcggcagggagaggcccacgaaggggcggcgacggctgctagggattatgggga

SEQ ID NO: 15074 - DNA, 288 bp, Zea mays
  Peptide Sequence Number=SeqID_58449
atgactgggggtccatcgtccttagaggttcgcctgagtgtcgacaggcgtggagtagggcttgaagttggacatgccagcccgcttcaggatgttgatggtgtactatggttggtggtggaagagaccctaaggccggcgctcggcggtgatgccgagaaagtggtgaagaggcccctgatccttcatcacgaactcccgctaaagggtgtcgattgccgacgggtcatcgggagccaagggagtggcccacttgcggcgatagtagacgagggcgggatcggcaaa

SEQ ID NO: 15075 - DNA, 283 bp, Zea mays
  Peptide Sequence Number=SeqID_58450
ggcggagtccgagccctggggtcgggcgaagcggagttcgtcgtcttccggggctgagcacaagtcagagccctgggtcgggcggagcggagttcgccgtcttccggggcttagcccaagttcgagccctaggtcgggcggagcggagttcgccgtcttccggggcttagcccaagggctgagcccgagtccgagccctgggtcgggcgaagcggagcttcctatggcgcctgaggccgggcctgactgcctgtcagcctcactctgtcaagtggcaccgtag

SEQ ID NO: 15076 - DNA, 300 bp, Zea mays
  Peptide Sequence Number=SeqID_58451
atggcggcggtgggtgcgctgcaaaggggaagtggggcggtggtggtgtgcatggaggtgcggcatgcgtgcggggagcatggcttattccaggcttcaaggggcttcaacaacaacgacttcatgattttccaaggcagctacacgggcttgagctgtggtgagatccacatggagctaacggtttctcttctctgcatcttctgctcgggcaatcatctaacggtggtgccgagccaagaaatcatactgtgcatccagggtgagcaggctaagggttacttcctgcggccaacctaa

SEQ ID NO: 15077 - DNA, 438 bp, Zea mays
  Peptide Sequence Number=SeqID_58452
atggccagggattcgagttccctgctgttcctgcaacaccctaaccatgttccccacctggccgattcgaacatagcacacacacattcttcgaaagcactcccacatgtttgcagcgtaacaatttatcataccatcttgtttgataggccttatctaatggttgttgatagtacacatggaactttcatcaatgttagcgatggatcaaggtgctccactttagatatgtgtgcaccagcgcctacgcttctcgcttctgaccatagatcagcacctcctaacactgcaaagctaatgttcttccgcgtcacagggtacttgcagatagatgtcggctctatggatgaacactcgaccaagtcagatgaggagtatgagggcctagccatgcacgacgtgatggcgactggtccgatgatgagcagcaagatgtga

SEQ ID NO: 15078 - DNA, 495 bp, Zea mays
  Peptide Sequence Number=SeqID_58453
atgaccggggataaacaaaggcaaaagctcaagcaaacaccatcaagcaaagtctccaacacctacatcaaaaaggtggacaaaaaggctgctacaccatatttgatcaagaagaaaaagaatggaaaggtgatagcaataaaggtcaacaagcaagccaacaaaggaaagggagccaaacgcatttgggtgccaaaggaaataatttcaaccatgaaaagcaccaagaaggaagtgagtggaccgaaggtcgtcgggaaatttggagacttggcaagttgggatgtatatcatgggatacatcatattggatcaagtttaattgccaagtggtctcattataaggaaaatgaggtccccaaagaaagacaacaatcttccactacaaaatctctaagaactctcatatctctcaagttcgccatagaatttcaatcggtatcttttgagactacatcaagtatcatttacatgtcttctccaatatttgattag

SEQ ID NO: 15079 - DNA, 705 bp, Zea mays
  Peptide Sequence Number=SeqID_58454
atggggagtagctctctccgggcagaatgggaatcacggcttgtgggtggttatgagattgatggttttggttatgactatggtgctgctagtccactacagccaaacaggatacttgctgagtatgttgatgtgtactcacccttgctctacacaccaaaccccccccaggttgtcagcattgcaaccactgctcaggcgaagatgaagctgtggaaggagacttccaggagttccaagattacgacgagttctaggtgtgggttagcggcaacccccagtcggctgcctgtgaaggccgcgttatctacgtttcttttccgcactttgatttattggttggtgaagcgggccacgctcaccaacggggcctcgcgtggtgcgggaagagacgcgagcgaaggtgtcgaggccacgcgtggcgcgggtagaggcatgagcggaggcatcagagccgcgcgaggcgcgagtaacgacgcaaagcggggcgtctggggcgcatgtggtggcgaagtggggagtggggtggctcaccgccttcgatgggatgcagttgaggagatgactgcccatgtgcaaggcctctgtcgagtagatggcaaggagagacacctggaagagaaggcaacagatcatattggtggtcgtgtgaaagatgtgttcggcccgaccgttcttgggagaggtgtaggggcacaagtgtaa

SEQ ID NO: 15080 - DNA, 702 bp, Zea mays
  Peptide Sequence Number=SeqID_58455
atggtcttggtctctctgcccggcgctctccctccaggcgctccagacagagggaattatcaggtgttcagttcagacctggggaattatcaggtgctcacttttctcctggcgccccttgagcagctcgtcgtaggttccttcgccgcggccatggataaatctccaagatcaattcctatcggatctggacctgctagggccgacacacgcaaagatgtcgtagaagctgtagatgggattaggcgcacaggcatcgtcgacacgagcaacattgattatggcactagtagattacgtccgcgccatcgattatgtaggacacatgattcggcgcagagatataatcgagtttgggatggtcttttagacgccattagacagatgcaattatctgccgatgagttgaggaagttgagccgccgcaatcatgtgcctgagtatttggatatgttgcacaagaattgcttggttaatgccatgagtgatgttactgaaattgcaaaaggtctagacactatgagcagggatttggaggaagttcttattggtccgcaacctctacttgaggattacgaagcccttggaatgtacgatgatttcaaatctgatgttcattgtgattgtactgagcagtgtggttcggaggaagacaactcttcttttgactcgaatgagatccctgatcgccgtatgaagtga

SEQ ID NO: 15081 - DNA, 540 bp, Zea mays
  Peptide Sequence Number=SeqID_58456
atggcgtgggcgcgtggccggctgggttcggtggcggccgaccgcgtggtggtgactcggcgccccgggagccgggatggcgggatcccctgcaaggctgcactgcgatgcgagccctggcggctggagcctggagctagacgatggcgcagcttgatggctgccggccctggcctaccacgaggttggaacttggaagacgacgaatggcgatttggcgaaggcgacggccgacgggcgtgcgcggtgtgcggggctgctgactgcggtaaccagacgggtaggtgtatccctaagtatcattatacccacggttacctgcttatccctagaataccccctacggggttattacagtggtttgaggtactgaaagggaaatgtgcccttgggccatttctaagtattttggtgattgagtgcaaacacaagtgcttaaatgtgaatctatgcccatggatgaacaaagtgcaaatcaagagtaaaggtatgtttctaggccttagtacattggttttgtatactaatatacttgtttaa

SEQ ID NO: 15082 - DNA, 75 bp, Zea mays
  Peptide Sequence Number=SeqID_58457
atggcgggcggaattaagctcgccagagctaaggaacggtggctggccggtgaggagaacacagatgatctttga

SEQ ID NO: 15083 - DNA, 603 bp, Zea mays
  Peptide Sequence Number=SeqID_58458
atgtgcatgacacacagagcagtgggggatagtgtggcgggggcagcacaaagcgaggcgagccagccggctagagtcaaggcctcgtggtgcaggcggatgcaacgcgacgcatggcagacacaacgcaaggagctggcggtggaaggttgggaggaaagagtgctggcggcggaaggctggggagaaagcttgtccggtaaaattcatcggactgtccggtgcatcaccggactgttcagtgagacaatagagcaacggtcaactgtgcgactacgtgcccagtctgcagtaccagaagtcagaagacaatctgcgacgacaggtcacaccggactgtccggtgtgccaccggactgtctggtgccgcaagaagacagaagacttcaacggtcaacagctccaaaccccaacagtcggctgatgtggcactcaccgggcagtgaacagtatagtgtccggtgcaccaccggagtgtccggtgtgcccatcgacagcaaaggctggaatagtggttggggctataaatacccccaaccaccaccatttaagccattttcaagcattccaacttcctcattcaatactagagcaaaagaatag

SEQ ID NO: 15084 - DNA, 1590 bp, Zea mays
  Peptide Sequence Number=SeqID_58459
atgccttccccttcctcggcccactggctgagcctcgtcgggagcatctggctgcagaccatcaacgggcccaacgcggacttccccgtctactcgtcgcagctcaaggacctgaagcacatcacgcaggtgcagctcaacttcctggccttcgcgtccgacgcgggcaagctcttcggctggttctccggggtggcggcgctgcacctgccgctgtggctcgtggccttggtcggcgcatccttcggcctcgtcggctacggggtccagtacctcttcctcgacagcgccgccctccgctactggcacctgttcctgctcacctccctggccgggaacggcatctgctggatcaacaccgtctgctacctcctctgcatccgcaacttcggcagcagccgcagccgcgtcgccgtgagcctcgccgccagctacctcggcctcagcgccaaggtctacaccagcctggcggactccatacccggccaccaggccacctccaaggccaagacctacctcctcctcaatgccgtcgtgcccatgctcgtcaccgtcgcggtggcgccgtcgctcagggcggtggacctcacggtcacgggcgagggccaggcgggggccagcacggacgcggcattcctcgtcatgttcgccatcacgctcgccacgggggcctgcgccgtggttggcagcatcggctcctccacgtccggcggcgggctgtcgtcgagggagcacgtggtcagcctcgccgtgctgctggccacccccgtgctcatcccgctggcgctcagggtccgggagagcctggacaggatacgggagaccaagcgggagaacaggatctacgacctcggcaccgacgacgatggcgtcgtcgtcgacgtggccgccaccgccgagagcaaggacggagacggcggcgtcacggagaaaccgcaggaggaggtcgacggcctccggctgctgaggaagctcgacttctggctctacttcttcagctacatgttcagtggcaccctgggcctggtgttcttgaacaacctgggacagatagccgagtcgcggcggctcggccagacttccacgctcgtctcgctgtcgtcttcgtttggattcttcggccgcctgctcccgtccttcttggactactactccgcgaagagcggctactccatctcaaggacgggatccatggcgtcgctgatggcgcccatgtccggcgccttcctcctgctcctcaaccggagccacttcatcctgtacctgagcacggccgtgatcggcacgtgcacgggcgccatcacgtcggtggccgtgtcggcgacgagcgagctgttcggggccaagaacttcggcgtgaaccacaacgtggtggtgagcaacatccccgtgggctccctctgcttcggctactccgccgcctacctctaccagcgcggggcgcggggcggcggccaccactgcgtcggcgccgcctgctaccgggagacgttcgtcgtgtggggcgccacgtgcgccgtcggcacgctgctctgcgccgtcctctacgcgcggtcgcgccgggaggctaccgggaccggcggcggatga

SEQ ID NO: 15085 - DNA, 1260 bp, Zea mays
  Peptide Sequence Number=SeqID_58460
atgccgtcctcttcctcttctgctgctgatacgccaccggccagcgaatcgtccgaggagacgctgagcaatgtggcggcggaggagttgcgtcccggcgacacagtggaattccgcgcgtcgcggatgtcctcggtccgcgtgcatgacatgcaacagcttgggtattttggcggcggagtggcgcgtgtgccgggggcagaggaggtccccgagccagaaggcgagctggtcgtcttcgaggctttttttgccgcaggccttcgtctgcccgtgcatcgatttgtgggagaagttctgcacagattcgaagtccaggtccaccagttgacaccgaatgccgtggtggccctggcaaagatcgacagaaagctgcgtagaagcgccgggcggtcgtccggctccctgaggccaggccgaagagggcgcgggggggggggtgcgaaggctaccgtccccggcggtagccagccttcgctggctgcgaaggcggccgcgcctggatatggcaagttgccggagagcgcgaaggcggccgacgctggcgggaccaagtccgccccggagggagctgcggaggtccgtgagctgccttcgccggggaagcgtcttgccgacttcggcacagacatttgcgtggacgactatctcgtcgggtcgggcgaagggcaacttgttgccgtctcgcctgcggtggcagccacggcgtctgccgcggtttttggggtgaagggtggcgctttcagcgctggcggcgaggtgtcggcggccactgccgtcaaagatgaggcgggcaatgtttcccgccggctgcgggaagcgtcgctgcagctgaatcaactggtggaggaaaggaaggaggccaatcaggccatcaccaaggcgcagacggctcaggcggaggccaaattggcgagggcggaggagagtctcgccagccatcgcgccgaggaatgggaggcgcggttcaacgctctgcaggcccgcgtggagagggccgaggcttctactcgcgtggaggttgagcggacgcgcaaacagctcatggactcgtaccgcgagctgggtgcgcggactgctgacttcgaggtgcccgaccgagaggcgggccttcggttcctcgaatggctgcaagaggagttgcaagcgctcccgaccattgtggcgggcttcatgtcgtatgcctccctcatcacctgcgagggggctatgaatgcgctgtcccacgaggggtgcagtcactatgaggtcttcgactga

SEQ ID NO: 15086 - DNA, 451 bp, Zea mays
  Peptide Sequence Number=SeqID_58461
atggcgcgtgctgaggaggtggaggacttcgggcgtctgaacagcgcgctgcccgaagcggaggccgacccggtgatggccgaggctgaggtctacccagcgccgctcccggaaactggtgaaggttcccacactgcccctgcatctactctgtctggtggaggctcgccggcagccaccgtaccgatggcggaggatcccccgaaggcggcgacggagccagcggcggaagatcccgtcgcggctgctgggtcttcgcagacggaagagtcttcggatgaaggcttagattattttgcggccttggatgtggttgaggcggaggcttctccgcgtgttacggatgctgaaattttgcatggttcgaatgttgggcgtaggcggcgaagggcggtggcgaaacgtagagtgagtgaattggatggtggtcgacttcgtgtgggcagggctg

SEQ ID NO: 15087 - DNA, 396 bp, Zea mays
  Peptide Sequence Number=SeqID_58462
atggcacgcaccggaatcagcagggtcgacgatgtcgaagtagcgaaatcagcagggtcgacgaggtcagcagatcacgagcagtcgcgtgaagacgcttcccaaaaaccttattcgccctctcccggtgcaggatctagaagacgaagggttccggagacctgctctcctgatcgcagatgcacctctgcggtcgtttttacagcagagactgttaagttgaacttccgcctagaactccaagctacaccaacccacaactttgacaatggactatgccttgaattgcaagttttgtgtgaatgggtttcacttgaagtcatgaccagtacttggctaccagtagtccccttctcgggtggagcatatacgtcgtactccaaggtctcttcatga

SEQ ID NO: 15088 - DNA, 456 bp, Zea mays
  Peptide Sequence Number=SeqID_58463
atggcactcggcaaagaaggaaacctgggaactggtaaagccatctttgccgagtgctgttgccaaggcactcggcaaagtgactggcaaaggggcccactggaggactctttgccgagtgccagtccactcggcacagagaccggcggtggggcccgctggacccgtctttgccgagtgccttggcaacagacactgggcaaaggatccgtcaccgtcacttggcgccgtgacggtgacttttctttgccgagtgtcaaatggcactcgtcaaattctttgtcgagtgcccgacaaaaagtactcggcaaagaggctgttgccgatgtacaatcattcctccgcagtggtgccgatgctaggagcaccttccacatcaagtccatcaataccttgccccaccatgccgatcagcgtcgcatcaagctgctccatacacaagtcatcaacgcctag

SEQ ID NO: 15089 - DNA, 495 bp, Zea mays
  Peptide Sequence Number=SeqID_58464
atggaggcccgggcccacatgtcatgtaaccggcacaacggttactacgtgcaaggaaaccgcaccgccactcgcgctaatgccgcgtctactcgactgcagaaccagtgccgcgactcgaggcagccctgcgcgggttcgaaggctggcccctcggaagggtttgacagccgccccagagcacgcagagttagggatgaccctgggtacgtccgttacatggccgaggctcgggctacgctcccgagcgcgcctctgggccactacccgacccttatcgaatggggctccggcgtccactcggatcacccgctagcaactcactggaaacaccatgttcggtgccccccgagggctcggcctcgagagaaggcctccgcctcgcccgaccccatgcctcggcccagccccagcctcgggaggagtctccgcctcgcccgacctgggcctcggaccgactacgctacaggggagacatcattaccctaccggtag

SEQ ID NO: 15090 - DNA, 339 bp, Zea mays
  Peptide Sequence Number=SeqID_58465
atgcccgcggacccgattgatggtgcacagcggagaatcgcccacgacaaccacggcggagctccaactttcaccctactaaacacaaatccgacggcgatagctggttttgggggtccaaggggtagatcaggggctggcaaattgggcccacttggccgagacctgaagcgcaccgcagtgtgcccctggagcctggtcgagaggccccacgcgacagtcacggacgccaacgcggtgatgggctgggttaaggaaatttgggcccaaccgtactgcgggttcaaccaatcatcaaacgaggaaaacagtcgactcgagtcaaacacaacagagtag

SEQ ID NO: 15091 - DNA, 87 bp, Zea mays
  Peptide Sequence Number=SeqID_58466
atggcgcgacggtggcccggggcgacggtggcggacctccgcggctgcacggaggacggcgggtatgaaatgggccacctttgttaa

SEQ ID NO: 15092 - DNA, 216 bp, Zea mays
  Peptide Sequence Number=SeqID_58467
atggggaactgcgggacaaagcccaagaccagcgacggagacgacgcgcctccgcccgtcgaggcgcaggtagcggcgggggcggccgagggggagcgcaaagacgacgaggaggtcgcggcgccggaagggacgagccaggcccttgtggcgccacaaactgaggtgcgcaaaaatgatctcagcttttctgaaccatttcggccttttctgtaa

SEQ ID NO: 15093 - DNA, 561 bp, Zea mays
  Peptide Sequence Number=SeqID_58468
atggatccagaaattgtcgattctttgatgccaccgtcagctgcgccgtcgtcgtccaatctaactccaacgtcccataattttgagctgatgaggcccgtcgctcggggccttgccctgaaaccgctgaaccccatcgcagccgcagcgaagggcacggttccgaacagggcgtgctacgggctcctccggcccctcctccttccccgcaccagccattcgtctccgctgcccgcgccctcctgtcgtcgtagcgtgcgaggaacggggcgccgccagtgcccggcgccgatggcgaaggctcgcgacgagacagagcgtgagccccaggcgccgccgccggcgatgatggcgaagcaaggcgaggaggagaaggaggccgcgccagagcgcaagccggccggggagcgcagcatggcgtaccagatcttcgcgggcctctacgtgtgcgcctacgtcttctgctggaggacaggcgagctcatcttcctgaatgcgcaggatgctctcgacaggctccggcgacacgttcgcgacaagctcttcaaccgaaaacgatga

SEQ ID NO: 15094 - DNA, 948 bp, Zea mays
  Peptide Sequence Number=SeqID_58469
atgcatcgcgtccttccaccttctgagcccctggatggggagcgctcgcgtcgcttttgtcttgctgtcgttggaggaacgcaactttgcggaagttggtacctttcagccatcgctcggcttcaaggattttcatcaggcagcccggctgcatcccctcgccggtggtcacccaagacggtgaccaccagtttgatggtggggagaagcaagtcgggctgcgacctctaccccgccctcagcttcaaggatcttcatcatcctggctggggcggaggccggactgagtcggagctctaccttccgtgcgggtttgtgggtcaccttctccctcagcattcaggggagagagcgctcaccggcctagcgggagggtcggacttcgacaacgcggggctggtcggtggcgagcgtcgtcagcttcagcacgttgggctcactggctcaactggctctggctcggctctcggtgccccctcccgccgcgagagcggttgtcgcgccgcgcgcaccaaaggaccgcccaagacgtcgcacgctgccagggcggcgttcgtgttcttgggctgtcctgcctttgctccggtacggcgcctctgcgcggagatggcttccgtcgtcggcgctgaggtggtggcggctgaagaagtcctcgtcgccgacgggatcaccgccaccatccgcgctccgggcctccggctctttggctttgatagcttgtcctcgcccctcgagtggggacgtgggcgaggagctcgtcgcagcagcgtccgccctgaggtcatcgctgctgctgtttggccactcagagcagaggtcgttgtcgctgctgccggagcgggcgtcggcgagccaccaggggttttgtcgccccgcaggccctccaatgtgggggttgttcgtacctgcggaagtggaaccagagttccttttgtaatggcaccttga

SEQ ID NO: 15095 - DNA, 330 bp, Zea mays
  Peptide Sequence Number=SeqID_58470
atggaccacgcggcggaggcgcagcggacggacctgatgacgatcacgcggcacgtgctcaacgagcagagccgccacccggagtcccgcggcgacttcaccatcctcctctcccacatcgtcctcggctgcaagttcgtcgccgccgcggtcaacaaggccggcctcgccaagctcatcggcctcgccggagagaccaactgtgtcctcgtgtctgaagagaacgaggaggccatcttcgtcgacccggccctccgcgggaagtactgcgtctgtttcgacccgctggatggctcctccaacatcgactgtggtgtctcaatcggaacg

SEQ ID NO: 15096 - DNA, 132 bp, Zea mays
  Peptide Sequence Number=SeqID_58471
atggcgcaccggacagtccggtgcgcccaccggtgcgccaccggaagaacactgccgtggaccagcctggccccacctggcagagggtgcactggacagtccggtgcacaccggacagtccggtgcccctaa

SEQ ID NO: 15097 - DNA, 387 bp, Zea mays
  Peptide Sequence Number=SeqID_58472
atgtctttacaaactaggcccgtaacacaaaggcggccacgcggggcccgttacaatgggccagatcacacgtgggccttagagcaggacgaggccgtgctgcggggagacgtcactgctggccttcgtctggtgctgaatgaagcgaagggtgtccctgcccgttttgtctttgacagactagcgactgcagcgaaaggcgtcgagcgaagggtggcgtctttgccttcgccccaacaaaattgtaatcttgccgacggagagtacgtgctcatccccgagcaaggacctgtccaagaggaggaccaggagcaggcttcagaggctgcttttgaggatctccccgcagccccagcaattgaaggcaagccccggttttatgcataa

SEQ ID NO: 15098 - DNA, 297 bp, Zea mays
  Peptide Sequence Number=SeqID_58473
atggccggttcaagggatagctctgatatttctccaagcaacatcatagagccgacttgggaaaccttgccggctgacgagcagctccagttcgaggagcacaaggagcggatgatccaggaggcgaaagcaagattcttggccaacttcaaagtggacaggaacaacaaggtcgtccgacatcgggcgacggatccggcttcgctccaacccacgtcagatatccccaatccggttcaaaagaaacggcaagaggaggttaagtttacatttaatgttgattcaatcggccattaa

SEQ ID NO: 15099 - DNA, 204 bp, Zea mays
  Peptide Sequence Number=SeqID_58474
atgtcctcctcgacgacacgcatggagaaaggccaggagcatgaccgactcgccccgtaccgcgtcgacgagcgtcggttggctcgcggctgcgaccgtgggtgggggcagcagccattgcgcgagtcggtgtcgaggctggtgtcgaacgattacagggaggaggcgcatgctcctatgccctctgtcgagaatggggcgtag

SEQ ID NO: 15100 - DNA, 1539 bp, Zea mays
  Peptide Sequence Number=SeqID_58475
atgaacaaggatccccaggaagctgcgcagaagcgccgggcggtcatcaggctccccgaagctaggccgaagagggcgcgggggactgcgaaggctaccgctcctggcggtagccagccgacgctggcggcgaagacggccgcccctgggtccagcaaggtgccggagagcgagaaggcggccggcgccggcggaaccaagtctgccccggacgaagctgcgaaggtctgggaattgccttcgccggggaaacgcgttgccgacttcggcacaaatattagcgtggacgattatctggttggatcgggcgaggggcaacttgttgttgttccgcctgcggtggcgaccacggtgtctaccgcggtgcctggggtgaagggtagcgctcttagcgctggcggcgagatttcggcggtcactgccgtcaaggatgaagcgggcactgtgtcccgccggctgagggaggcgtcgcagcagctgagtcaagcggccgacttcgccgaccgcgtggcgtcgggggcccttactgcagatgtgtctgccgaagtcgagagacttcgggcgcagcatgctgacgccgttcgaaaaaagtcagctgcagatagcaagtgccgcaagctggcggagaaggtggccgccctggagggcgagaggatggacctctggcgccagctggtggaggagaggaaggaggccaaccaggccatcgccaaggcgcaggcggcgcaggtggagtccaaattggcttgggtggaggggagtctcgccagccagcgcgccgaggaatgggaggtgcggttcaacgctctgcaggcccgcatggagagggccgaggcctctacgcgctcggaagttgagcgaacgcgcaaacagctcgtggactcataccgcgagctgggcgcgcggactgctgacttcgaagtgcccgaccgagaggcgggccttcgcttcctcgagtggctgcaggaggaattgttggcgctcccgatcatcgtggagggattcatgtcctttgcctccctcgtcacctgcgaaggggcgatgaacgcgctgtcccgcgaggggtgcagtcactatgaggtcttcgaccgatctgatgaagattttgggcgcgagatttttaaggtcgaagaccctgtggtgaaggactccgcgggggccctcttcgaccggatgtggggcccctacggtcgggaggtggttagggagcggtctgaccgggcaagggatcagatggcgcgtgccgaggacgtggaggacttcggacccttgaacagcgcgcagcccgaagcggaggccaactcggtggtggccgaggctgaggtcgacccggcaccgcccccggaaaccggtgaaggctccctcgctgcccctgcggctattgtgtccggtggaggctcgtcgccagccactgtgccgatggtggaggatcccccgaaggcggcgacggagctggcagcggaggatcccccgaaggcggcgacggagctggcagcggaggatcccatgtcggcggctgggtcttcgcaggtggcttag

SEQ ID NO: 15101 - DNA, 153 bp, Zea mays
  Peptide Sequence Number=SeqID_58476
atgttggacgaggccgcgagatgggacgacctcgtcacatgccttcgtccggcggcgcgtgggacgaaggcgaggctggcgaaggcatcgagcgaagggtggcgtcttcgccttcgccccaacatttgccctccgagggaccagttcgactaa

SEQ ID NO: 15102 - DNA, 1962 bp, Zea mays
  Peptide Sequence Number=SeqID_58477
atggcggagggcgtagcggtcgccgtggccgtcgccgtcgcgcgtcgctttcgtatcgaacccacacgatcgcgggcgacgttgaccgacgctaacgtttcctcgtcggcgcttgcagacgaccgcgcggagagcagggtggagtacccggagcccatctacgtgtcccgggacgaggagttcgaggagggcaagaacgagatgctgtcggaaggcgcgctcaaggcgctgctccacaacttcatgccgctgctggtgagctccgtgtcgccggacttccgcgacttcgccggcttccacgacgtggacaacctcttcaaggagggcctcaggctaaagcaggccctgcaggaccagctgttccagaagatccccttcgtgcgcaaggtccaggagaacagcgagggcctcctccgctacgacacgcccgacatcatcaagagagacaagtttgcttggctgcgggacgacgagttcgcgaggcaggcgctggctggcattaaccccgtcaacatcgagcgccttcaggcgttcccgccgatgagcaagctggacccggccgtgtacggcccgccggagtcggccatcacggaggagcacatcatcgggaggctcgacggaatgtcggtgcagcaggcgctggaggacaaccggctgtacatgctggactaccacgacatcttcctgccgttcctggaccggatcaacgcgcaggacgggcggaaggcctacggcacgcgcacgctcttcttcctgacgggcgcgggcacgctgaagcccatcgcgatcgagctgcgcctcccgccgatgaccgacgggtgcgcgcgcgccaagcgggtgctcacgccgcccgccgacgccaccagcaactggctgtggcagctcgccaaggcgcacgtctgctccaacgacgcgggcgtccaccagctcatcaaccactggctgaggacgcacgcgtgcatggagccgttcatcatcgctgcgcaccggcagatgagcgcgatgcaccccatcttcaagctgctgaagccgcacatgcgctacacgctcaagatcaacgcgctggcgcggcagatcctcatcaacggcgacggcgtcatcgagtccgggttcacccctggccgctactgcatggagatgagctcgttcgcgtaccgggagctctggcggctcgaccaggagggcctccccgccgatctcatcagaagaggaatggccgtggaggacccgacgaagccgcacggtctgcggctgctcatcgaggactacccgtacgccaccgacgggctgctcctctggtcggccatcacgcggtggtgcggcgcctacgtggccacgtactacccgtcggacgagtcggtgcaggccgacaccgagctgcagtcgtggtacacggaggccgtgcagacggggcacgcggacaagcgcggcgcgccgtggtggccgcgcctgacgacgcccggggacctggcgtcgctgctcacgacgctgctgtggctgacctcggcgcagcacgcggcgctcaacttcgggcagtacccgctgggcggctacatcccgaaccggccgccgctgatgcggcggctggtgcccgccgagggggacccggagcacgcgcacctggtggccgacccgcaccgcttcttcctgtcggcgctgcccggcctgacgcaggccaccacgttcatgaccgtcatcgacacgctgtccacgcactccgccgacgagcagtacctcggggagcgccccgacgaggcgtggacggccgacccggccgcgctggcggccgagcgcgagttcgcggacgaggtgcgccgcgccgaggaggagatcggccggcgcaacaccgacgcgggccgccgcaaccgctgcggcgccggcgtgctgccctatgagctcatggcacccacgtccggcccgggcatcacctgccgcggcgtccccaacagtgtcaccatttag

SEQ ID NO: 15103 - DNA, 885 bp, Zea mays
  Peptide Sequence Number=SeqID_58478
atggagctactggggagatcgttcgcgccgggccatgccgccgcggcgccgaggcggggaggcgggccctgcttcgcggcggtcggaagggaggggagtggtgcgcacaggaggagatcgtcgtcgtcgtcgtcgctgaggtcgactgcgccggtggacgcgctggccgagcgagtcgtggcgccgccggagagggccgaggcggtcccgccggagccgagcgtggccgcgcgggccgtggtcaccgtgcggcggagtcggaaaagggacgccaagtgccgggtcgccgagcggctggacgcgtgcgccgactgggtcggccgcagcgtcctcctcgagctcatcagcaccgagaccgacccaagaaaaggggggccaaagaagagcaggcggtcggcgctggtgggctggtttggggagaaggacgtgaaggcggagcgggtggtgtacaccgccgacttcaacgtcgacgggtccttcggcgagccgggcgcggtcgccgtgctcaaccggcaccagcgcgagttcttcgtcgagagcatcgtggtggagggctttccctccggccccgcgcacttcacctgctactcgtgggtgcagcccacgcgcgtgcaccgcgacccgcgcgtgttcttcaccaacaagccgtacctgccggcgcagacgccgccggggctgcgggagctccgccgcctggagctcagcgacctgaggggcgagggcgctggcaccggcggcgagcgcaggaccaccgatcgggtgtgggagtacgacgtgtacaacgacctcggcaacccggacatgggcgccgagttcgcgcgcccgatcctcggcgggcgaccagcagctgccgtacccgcgccggatgcggacgggccggcctaa

SEQ ID NO: 15104 - DNA, 528 bp, Zea mays
  Peptide Sequence Number=SeqID_58479
atggaaataaagatgcaggacctaagtaaaaaggagaaagaactgcaggcaaaggaagctgagctaaacaaacgggaaagtttaggtaattcaggatcccttccagcattgttgcctgaccaggtccgaaagctaaagcaactcagtgtgctaactctggtagagtcaactaagatactaccatatgatcagctcatgcaagagttggatgtttccaacgtaagagaactcgaagattttctaatcaatgagtgcatgtattcaggtattgtcagaggcaaactagatcagctgagaagatgctttgaagtacaatttgcagctggaagagatcttacacctgatcagctaaataacatgatagagatcttatctgactggtttatgggaggtatagatgaatctgcgttggatcgtctctcgctggtcacagatatgacaaagcacatacgtgtccgggcctcaggtggaaggtccactgcatccgaacttgggcagggaatggtcaaagaaactggggccttctga

SEQ ID NO: 15105 - DNA, 246 bp, Zea mays
  Peptide Sequence Number=SeqID_58480
atggctggaatagccaagactcagcgcagtctgggtgcaccgaactgtccggtggtgcaccggacagtgtccgtcggtgcaatccttcgtcttgagacatgccactatgctgaagctttatggatgatagcttcggcgctgcttttgagaggatctgccgaaggtgtttcttcttacaggatcttcggcgacgaagcataccccaaacacagtagccccttcgtggtgctagatcatttttcgtaa

SEQ ID NO: 15106 - DNA, 342 bp, Zea mays
  Peptide Sequence Number=SeqID_58481
atggcgcggtcggtccgagcccaaggtcgggcgaggcggagactcctcctgaggccaaggtcggggtcgggcgaggacgcgattcctcctgaggctgaggttgaggccgagccctggggtcgggcgaggcggagaccaccctctaaggtcgaggctgaggccgagccttggggtcgggcgaggcggagtcctccttccgaggccgaggttgaggccgagccctgggatcgggcgaggcggagattcctgttgcacctgaggctgaacttggctgttgccaacctcactctggcgggtggcacagcagtcggagcggggcgagcgacgctgttttcctgtcag

SEQ ID NO: 15107 - DNA, 423 bp, Zea mays
  Peptide Sequence Number=SeqID_58482
atggtggtggagaccatcagcgtcaccccgcggcagctacctaccaggagttccttaatacccaacctccattgttcacaagggcagaggatccacttgatgcagatgtgtggttgcgagtggtggaatccaaattcccactactccatggagcttgctcagaagtcaccaaagtcagacacggatgaaaagaagagggacaggttcaggagggggctcagcactaagctccgtgaccgtctcaacactgtcagggccaacaactacaatgagttggtcaacatggctatctcccaggaggactgcattatagctcgacaggcagagaagaagaggaagacccctgtggcaggaccctcagctcagccacagcgctttaggattgtgtccgacactcagaacaggggaccacagcagcagtaa

SEQ ID NO: 15108 - DNA, 885 bp, Zea mays
  Peptide Sequence Number=SeqID_58483
atgtcttcgcgctcccttatgcaccgcgtctttccaccttccaagcccccggatggggggtgcccgccgcctttccgcctcatcgttggaggaacgcaactccatgggagttggtacctttcagccatcgttcggcttcaaggattttcatcagccagcccggttgtacccccccgccggcggtcacccaagacggtgaccaccagctcctgggtggggagaagcaagccgggctgcgatcttggtctcaccctcagcttcaaggatgttcatcatcctcgctggggtggaggccgggctgagccggcgctctacctcccgcgcgggttcgtgggtcaccctctcctgcggcgttcgagggagagggcgctcactggccctgcgggcggcccggacttcgacaacgcggggctggccgacggcgggcgtcgtcacccccagcgtgtcaggctcgtcggcttggctcccagcggcccctcctgccggagggtggctgtcgcgccgtgggcacgggagggccgccctagatgccgcacgctgctagggcggcgttcgtgttctggggtggccctgcctttgcaccggtatggcgcctccacgcggaggccggcggaggcggctcgagaagtacccatcgccgacgggatcaccgccaccatccgcgcctttgggcctccggctccttactcgcctgttgattatctgaaccgcttcaccaagcatgagtcgccccttgtcaaggtgacgagtgagagtggagatcctcagaccgcgtcaccgtccgaggctaggtcggacctcgctgaaggtgtagtcgatgccgagggtgctactgcccccttccagcgtcaagacccgagcctgcaggatcagagtgtcttgtag

SEQ ID NO: 15109 - DNA, 243 bp, Zea mays
  Peptide Sequence Number=SeqID_58484
atggcgtcccctttcttccacctccggcagcagggatcggctcccatggcgccctctccgagctccatggccatggcgctccctgcctcgcccatagctcagcagcaagctcgcctctggtactgcgcgcgtgagggagatccctccatggccgcgtccaagctcgtcctaaaaattcatgagctaagaattgatggtttagatgttatgtctttcacaagatcattaactgaatttgtctaa

SEQ ID NO: 15110 - DNA, 1107 bp, Zea mays
  Peptide Sequence Number=SeqID_58485
gctctggggctggatccggggctacctcctgagcagctccttgctccggcacgaggacgtactctccgtcaacaagattacagtctatcgaaatgcaatgaacattatccgcggcatagattacggcggcgaggcttaccagcggcagaagagctccggcggggtggttagtgacgtccgggaggtcacgacggtcacgtcggtgtgcgggtcgacgtcggaggtggtcggagctaccctggccacgaacacaggcggcgggggtcgtcggcggctcctgttccggccaaaccacgacggtatagttcaattaaggcttacccggtccacgtgcgccggcgggtttttgaactccggcgagcacgattgtgctattccggtgatgcgggtcctcggttcaagcttgagcaagcttcacggcctcaccaggaagctatctgagggcttggatcaaacggaggaggacgggaaaggggctggccacggtggttgctctcgggcgtcactggcgggtcgcggggaggccgccagagctaagggccggctcgggaagatcaggcgaggtacggaggaggcaacggggaaggcagctgagcactggggcgggctttatagccgtggcgcgggcgtggtcacgggcggccgcgggcgcgtgggggttcgcgcacgggcgtgcactgagcgcgcccccggatgtcagctcgcgtcgaacacgtggaagctcgcttctgccatggttcaacggcgatcgggcgagatctattcaaaacttcgcccgaactcgccgccaaattcaaattccaagggcaagcgacacctttggcaggcgaagcaggcgtcatttcacctccgccatgatgaccgcgtcaaaaaagccgccccaaagcactcaagctccaagcccactactgatcaggggttcgaaggctggcccctcggaagggttcgacagccgcccaagagcgctcgggctccgcgcccactactgatcaggggttcgatggctggcccctcggaagggttcgacagccgccccagagcacgcagagtgagggatgactctgggtatgtcttttacatggccgaggctcgagctacactcccgag

SEQ ID NO: 15111 - DNA, 1143 bp, Zea mays
  Peptide Sequence Number=SeqID_58486
atgtcttcgcgcttccttatgcatcgtgtctttccaccttccaagcccccggatgggggatacccgccgtctttccgccttgtcgttgggggaacgcaactccgcgggagttggtacctttcagccatcgttcggcttcaaggtttttcatcatgcagcccggttacgcccctccgccggcggtcacccaagatggtgacctccagcccctggatggggagaggcaagccgggctgtgatcttggtctcgccctcagcctcaaggatgttcgtcatccttgctggggcggggagcgaggtgagccggggctctacctcccgcgcgggccggctggccacctcttcttccagcttctggtggtggcaaccatcctccagctctgcggaggagacgtcctccagccatgccggggaaggcgaactgttgctgcccagctaggatgcaacattccgccctcttcctcgctttcgtggcgaggacgggagcgaggacctgccggtgcgctttggagcggcccgctctttggctttaatagctggttcacgtcccttgagcgggaacacgaacaagagccctctggcggccgcgtccgtcctgggaccatggctgctgctgcagaggtcgctggcgggtcccccggtgctcgtcgccccgcaggctccccggagtccctcggctcggtcagtcttgttgtccgaggcttcccttgcttagttaaaggaacccctcggccgctcctcgatgagccgaggctaggggtagcggtgtcagcgcgaacagaggcagagttggctcaaaaagaagacctggtcggtcggagcctggacgggtcgtccgttagcgggaccgacgccgggattaaattgccgaggcctcgggccgggctgatgtccttggaggccagctggccgaggccccggggtgaccggccgagcctcctgctcgggccggattctcggagaagaccctggcggcgatggcccgggcttggtgatgacattgtccttcagagcagagacccttggaccgtgtcgccgtccgaggctaggtcggggctcgctgaaggtgttgtcgacgccgagggtgctgctgctctctttagccgtcaagatccgagcctgcaggatcggattatcttgtag

SEQ ID NO: 15112 - DNA, 408 bp, Zea mays
  Peptide Sequence Number=SeqID_58487
atgacgatagtggttctcagccccctacagaagcaaggagacgtcagcaggatcccagcggcatcgatagttgtgcttctacagggctcaggcacttcttcgacggccacgttatcgcatacacagggctctagcacctctccgacagccatgttggcatcatttgagaacaagtccccaacattggcgcccacctccggtgaactcattcgaccaccttcggcaagctgtgaccttcgtcatgtcgccgaagaaagcttcagcgctggggctgcattgcagccattggatgtcaaccaagaaacactgcgtgaagctagaagccaaaaaaaggaaggctacaagtccaatgccttaggaggaggagtggaccaagaaataaggaacctcgaagccatccatcaatag

SEQ ID NO: 15113 - DNA, 420 bp, Zea mays
  Peptide Sequence Number=SeqID_58488
atggctgaaaggtaccaactcccgcggagttgcgttcccccaacgacaaggcggaaagacggcgggtatcccccatccgggggcttggaaggtggaaagacacgatgcataaggaagcgcgaagacatgggaccgggaaagggggataccccgaaaaggatccttccccgtgaaggaaccaggctccgagcctctctactgatcagaggttcgaaggctggcccctcggaagggttcaacagccgcctcagagcatgtgggctccacacccactactggtcagaggttcgaaggcctgcccctcggaagggttcaacggccgcctcaggctactcgggctccgcgcccactactgatcaggggttcgaaggctggcccccgaagggttcacagccgcctcagacacagagcgagggatga

SEQ ID NO: 15114 - DNA, 327 bp, Zea mays
  Peptide Sequence Number=SeqID_58489
atgggtcgacgcgaggccgagcgcgaaggggggaaggggctgagagccgccgtcgtcacagagtatgcgaggcgccatcattgcctatctggcggagcgatccagatgggacgccggtcttgttccccgtggcccgagtcagctcgaggtagggtgatgatggcgcctcctgttgacgtggctggtctacgccctaggttgggcgatgtggaagctcctccgaagccgaggtcgagtctgtcttccgtggccgaggtcgagtctgtcttccgtggccgaggtcgagtccgagcccctggttcgggcgaggcggagaccgtcggctga

SEQ ID NO: 15115 - DNA, 414 bp, Zea mays
  Peptide Sequence Number=SeqID_58490
atggcagagaaagcaagaacagggagccgccgccgatggaaccgaagctacacggtgtcgtcggacggcctcgctttcacctctgctagcgataaaccaccctctatcctatttgctttcatcttcgtccctattcctggcagcagcagtcggattagggccctagatcactggtgggccgagcgcagtgtcggcaccgccatggttttcgacctcagtggtgtccagacgttggagatcatcatgttaattggaacatggagaaccacccgagaaaacagtgctaccacaagggtggaatcggacgcccttggccaagtaattagcaaagctagggagagattaccttacccgcaaggggcaagcggggaggcatcgctgcaagagtatagggtggttctcggatcgaattga

SEQ ID NO: 15116 - DNA, 483 bp, Zea mays
  Peptide Sequence Number=SeqID_58491
atgtgcagatcggctaatttactgccgatttgtggttgctcaggctttaagagattggagctcattggtgttacttacattgggggtatcagttatgagtcggagcgaagccagatcagtcgcccgttgccaaacgaccttgttgttcctgtccaccttgaagttggccaggaactttgcctttgcttcttggatcagctgctctttgtgctcctcgaactggagctgttcgtcagccggcaaggtctcccaagtcggctctatgatattgctggggaaacatcagagctatcccttgaaccggccattgagggccgatttgatgggtctttatgtgttttcctcagcggagttgccaaaaagtgtgttggtgcctttttgggcgccaatcactacgtgagaaccgcgcggcggtgctctctatacaggcgcggacggtccgcggccaggggccagacggtccgcgacctggggcagggctag

SEQ ID NO: 15117 - DNA, 204 bp, Zea mays
  Peptide Sequence Number=SeqID_58492
atgctgagacatgcctggccaaaactgcgtgatacacctatcgctctacaacggagtaccgatgaagagaaggacgaggaggaggaggtgcaacatcatgaggaggaggaggtgcaggcccatgaggaggaggaggaggaggaggtcgcgggcatagatgctgaggcagatgacgataccaccgaggctcctgtcgttcgatga

SEQ ID NO: 15118 - DNA, 219 bp, Zea mays
  Peptide Sequence Number=SeqID_58493
gaggagcaaaatgtcgtcgattggggtgatctcgagctatctccattggctgcccctagtggagccaaagccgccaagccgcacgccgccgccaagccgagccatcgccccgccgccaagccgcaccgccgcgcgcgccgcccccagcaacgccacccgtgccccgccgacgcgccgcacgcaagccccgacgctcccatcgacctcggctccattaag

SEQ ID NO: 15119 - DNA, 363 bp, Zea mays
  Peptide Sequence Number=SeqID_58494
atggaccccacatgtcattggctcatgtggacccacatgacggtgtcgccgactgtagcaaaatggttcgtgccagatgcacgagggacaatggacagtgtttacagccaagaatctgctgagtctgggggcaccggactatccggtggtgcaccggacagtgtcctgtggtgcaccggacagtgtccggtgcgccaggctggctcgagcgaagtggccgctctcgggaattcaccggcgacgaacggctataattcatcggactgtccggtgtacaccggactgtccggtgagccaacggtcggcagggccaacggtcggccgcgcgatctgcgcgggacacgtggccgagccaacggctag

SEQ ID NO: 15120 - DNA, 258 bp, Zea mays
  Peptide Sequence Number=SeqID_58495
atggggagtagctctctccgggtagaaagggaatcatggcttgtgggtggctatgagatcgatggttctggttatgactatggtgctgctagtccactacagccaaacaggatacttgctgagtatgttgatgtgtactcacccttgctctacacaccaaacccccccatccccaggttgtcagcattgcaaccactgctcacgagagatgagtcgtggaatgagaccttcagagttctagactacgacgagttctag

SEQ ID NO: 15121 - DNA, 105 bp, Zea mays
  Peptide Sequence Number=SeqID_58496
atgggggtgctctacctgctgctgaccccaatgggtgtgctccttctgctgctgaccccaatgggaagaaaaacgtatccttgctgcttctcgcgacaatcttga

SEQ ID NO: 15122 - DNA, 468 bp, Zea mays
  Peptide Sequence Number=SeqID_58497
atgggcaagaacaacaagcgcaagcgtgagccgactcatccatcagaggacttcggtgattcggagtactcagaggaggagttctcctctgagtctgaggggtctccggctcccatccctctgcgtgagtcgtctgacgattcaaacgactcccaggggcttgcggtggaggtctggacttacatccaggccgtcgagcgctccgggctcgagggctcggatgagtcggagtactcctcagacgaggaggactcgtccgagggcggtggcggcgatggcgacgacgacgacgacgacggaggcggtggcggcaatgacgatgacggcggcgatgacggtgacgacggcggcagcggcggcaacaaggatggcgacggcggcagcagcaggggcagcaacaggggcggcagcggcagaggcagcaacagaggcggcagcggcagaggcagcaacagggccagtggctag

SEQ ID NO: 15123 - DNA, 2607 bp, Zea mays
  Peptide Sequence Number=SeqID_58498
gtgcggggtaaacaatgtggtgttgctgcaagtcatgacaatgatacactctttgtcggcaatatctgcaaaacatggacaaaagaacatttgaaggataaactgaagagttatggagttgaaagttttgacgacttactactggttgaggatacaaacaatcctgggatgaatcgtggctatgccttgcttgagttttctactcgacctgaggcaatggatgctttcaggatattgcagaagagggatgtagtctttggagttgatcgtagtgcaaaggtttcctttgctgattcctaccctcaagttgatgacgaaataatggcacaggtcagaacagtatttcttgatggccttcctccctcatgggatgaagaccgtgttaagaaatatctcaaaaagtatggagctattgagaaacttgaacttgctcgaaacatgccagctgccaagagaaaggattttgggtttgttacatttgatacgcatgataatgctgttgcatgtgctgaagggataagtaactctgaaattggtgaaggtgatcacaaggcaaaagtaagggctagactgtcgcgaccactacagagaccacctagaatgaagcatggattgagaggaaattttagagtcgggcatggtgccccacggggtggccgtttacagtacgctcgtgctcctccacctcgcaggcctccaccacgccttgttcggcctgctggtagtcgcttaccaccaatcaggagccatccattgaaacgacccatatacatcagagatagacgtcctgctatgccaatgctagatagagctaggcgtttacctccttcagggagatcttatgacaggaggcccccagctccagtttacctgaagaaaagtccaaggagagaatacgggaggcgtgatgaacttcctcctccaaggagcagagctatgattgattacagtcctagagttccagttgatagacgtccctctttgagggatgattatttaccccggggatcaggttattcagacctaggtcctcatagtgctccccatctttctgataggcgagcttatgctgatgatagttatggggggaagttcgaccggcctttaccggtctatagggagggtcgtggccatgattatgacaccgtttctggatcaaagcgtccatatgcagatatggatgatgcgcctcggtatcaagaaattggtgttcgtcagtccaaggcacgcttggactatgacattggtggcagcagtgctcgctatggagatacatacaacgagaggcctggacgaccacatgcgggatatagcagtagtcggtctatccctggtcatgattcagcatatggtagcagccgtaatggcatgagttatggaggttctgctagcagtgctgatgctggtggtatgtacccaccgagttacagtggtagctatgggtctcgtggatctgatgttggtgggagttcatattcttcgctttactcaggccgcaatttgggtagcagcagtggtggctactatggagacgtgacgaccaccgttcacccaccgtccccgctaggccgctacagaggccaaattccatttcggcccccgaaaccaaaacattattaccaagaagaggacgcaagcgactatttgaagtccagtgtccacggcccacggggggcggcccaccccgtgatccgacggccgtcgcccccgctcccgacgcatcgtagccgcccagcagccgagaaggaggacggaaggccaccgcgcaattttacgagtcgtcgcacgccccgcgccccgcgcgcggggtgtcgggcaaggtgccccccacgcgcggcggttggcgccgccgtcgtccaccgccgccccgcgtgcgcccaccgccacctgttaccgcctaaggggaacgcctccgttataacccacggcaccatccatgccgtcctccaccaccgcttcaccatccccgccaggcccaccaccaccatggcctctccttcccccgcccgcgcctccggccggcgcgtgccgcccccgtgctggacgaccgacgagaccctcgcgctcgcgcgggcctacaccgcgcgccgcctcgccgtcggccgtgagcacctgacctccgctgactgggccgccgtcgccgcggccgctccgtccaagacggccaggcagtgccgccacaaggtcgagaagctccgccgacgcctccggtccaaccgccgccgcccgtgcccgctcctcgacgccatcgacctcctcgacgtcccttccccgcccttcttctccaagtcccagtcccgatccacgtcccggtcctcgtcgccgccgccgccggcggcggcgatctcttcgccgtctcccccttcccctcccgcatccccgcccagaaagaggcggcgggacgatgccggggacgaggacggtgtgagcgatgtggtgggggctctgagggccatcggagagggtttcctgcgagcggaggagaggaggatggaggccgcccgggagacgcagaggatgcggatggagatggcgcttcggcaccttgatgcacagaggaggctcatggacgcgcttgtcggccgcatcgtcgacgccttggactga

SEQ ID NO: 15124 - DNA, 489 bp, Zea mays
  Peptide Sequence Number=SeqID_58499
atggatgaatgcactttcagtgaatttgtcgagcttggaatagagaagtgtgtcgtgactgtatacattggatccaagaagcgcaaccgtaagctccatgtggatctcaccacagctcaagcccgtgcaactgccttggaaagtcatgaagtcattgctgttgaagccctgaagcaagccaaggatgagcatgtccagaagttgatggaggcctacttggctatggataagcaagagcacctcgagtcctcccaagattccccgccggagttgtttgagcccctcaccatgaagaagattccagcaccctcccttgaggtcaaggaagaagctacaagcaccccaccagcaccgtcgccctttgaggagctacaagagccagtctcgcttgaagaagagttcaaccccgtcctgccatctcagtcgccgccagaagaagtcatcaaccttagctccctcttaacccatccagaagatgtctcaaattga

SEQ ID NO: 15125 - DNA, 552 bp, Zea mays
  Peptide Sequence Number=SeqID_58500
atgccgccgaagtctaagaggggtggcgctgccgccgcgaggaaggcgccggggacgaggagccggatggggagggcgcaggctgctgcggcggaggcgccggttgtggaggcgccggctgctgcggtggaggcgccggttgtggaggcgccggctgctgcggcggaggtgccggctgtggaggcgccggccgaggaggccccgaaggtggcggaggagctgaagcagcagccctcgcctctgctgccgcaacagccggtggtggaggagaaaggctccgatggcgcagccaacagtgtcaaccgcggcgaagaggacaaaggtgaacggcttgagtttgaggatgaaccagaatatgaagaggaggctgctgtagactatgatgagaaagatttggagcagtatgaagaacaatacgaggatggtgatgaagaggtggagtatactgaagatgtggttgaagtggagactgatattgtgggtgaggaacttgatgaaggtggtgttgatgccgtgggggagggatacgaaaatgatgatgaagaacatcat

SEQ ID NO: 15126 - DNA, 1218 bp, Zea mays
  Peptide Sequence Number=SeqID_58501
atgggggatgttgacccaagctatcggtctagttcaggatctgcagtatcatactctgagagttgtgccccatatggtgctgctgatgcaagtgaaatgactggttcagcacagtcacatgcttgggagtccctagtgccatcaagaaagaggagctgtgtcacccgtccgaagccttcacctgttgaaaagcttgcaaaagagctgaactatatcatgcatgaagagaagttatattacctttcagaatcatcagaggaagacctactataccatagtgaaactcctatcggttcctttgaaataggctctggaagtgtgcttctaagacatccaaactcgaaatcactggaggaagaatcaaaaacaagctcaattcctgcagataataaatcatatattacaagtgaatcctattcagactctgcctcatttgtcgttcacagtggaaacaaggcagcaattaacttaaatcttccaactgcaaggccgaagaagtcgccgctgcatatggaagacaatgctagaagggataaacttcattatgagaatcagcatgtcctggagagtgttgattcgcctttagtttcagtagatttagaggatgttataaactatactaacttcatgaaatatctaactaaagaggatcgacgtcagttgctcaaatttcttcctcctgtggactccttaacacctcctgaaagccttagaagcatgttcagttgtatccaattctctgatgctattgacagctaccagatgctgcttcgagagggaattctcgacccatccttatgtggtgatgaggaatggaagaaagtgaagacgcttgccttaactaatttaacaaaatgcagttggctggagtgctataaacagaaaaagacgtggcccaacccgctctgctcacgtggcaacctgcgggcgaggccttacaacatgggccggcttgcacacgggccccttcttgcattgagggagacaaagccttctaacccccgcggcctcggtcatccggtccctgaagtctgtgatggtcttcgcctcggctcgtcggagcgaaggggggcgctcgggccttcgcatgggcgacgccagcggcctggctggcagagcctgctgacggagccttcggtctgtggaacgttgatgtggaaatcctcgagcgaggggaacgtgttcgtcttcgctccaacagaccctaaccctaattag

SEQ ID NO: 15127 - DNA, 729 bp, Zea mays
  Peptide Sequence Number=SeqID_58502
atgtcttctccctcccttatgcatcgcgtctttccaccttccaagcccccggatgggggcccggctgcacccctccaccggtggtcacccaagatggtgacctccagcttgatggtgggggaaagcgagccgggctgcagcctctgcccctccctcagcctcaaggattttcatcaccagggctggggaggggactgcaccgtgcctggctctcggacgcgagtggcttcggagccgctcgcggcgccggcgtctgccacggcagctggaagaggttcttccgccggcgagatagccaaggccggccacagaccgacctccaactctacggccttctgcccgtccttgcctcacgagtttgggcatgggcgggggcctcctggcagcagcacccgccctgaggtcagtgctgccgctgttcggctccccggagaagaagtcgtcgtcgtcgccgccgctggagcgggtgacggcgcgccgttcgtcggtcttctgttgctccacaggcccaccccaatcgagtggggttactcgcctgttgattatccgaaccgcttcaccaagcatgagtcgccccgtgtcaaggtgacgagtgagagtggagatcctcggactgcgtcgccgtccgaggctaggtcggacgtcgctgaaggtgtcgtcgatgccgagggtgctactgcccccttccagcgtcaagacccgagcctgcaggatcagagtgtcttgtag

SEQ ID NO: 15128 - DNA, 327 bp, Zea mays
  Peptide Sequence Number=SeqID_58503
atgtcctcctcgacggcacgtacggacaaaggccaggagcatgaccgactcgctccgtacgcgtcggcgagcgtcggtcggctcgtggctgcgaccgtgggcgagggcagcaggttggggaggaagaacaaggcgaaggccgggaagacgaacgggacgtccgacgatggcgaaaatgatggtgcgcatgatgtgaaacatcctcgtggacgtacaatagccactgcgcgagtcggtgtcgaggctggtgtcggacgaatacggggaggaggtgcatgctcctacgccctctgccgagaatggggtggcgcagaggtagagccatga

SEQ ID NO: 15129 - DNA, 288 bp, Zea mays
  Peptide Sequence Number=SeqID_58504
atggccggttcggccgcctccctgcccgccggttcggccgccccgccccccggctcggccgcccctgcgccgccccctgccccgccggtggttatgagattgatggttctggttatggtgctggtaagtggtattctttccgtttggaaaggatacattgggttaataacttgggttaatgttaaaacctggctttctactagttgtcagcattgcaaccactgctcaggcgaagatgaagctgtggaaggagacttccaggagttccaagattacgacgagttctag

SEQ ID NO: 15130 - DNA, 384 bp, Zea mays
  Peptide Sequence Number=SeqID_58505
atggcgctttcccccctcctccttgcggaaaggcgacgcaggggcgtatgtaaaaaagtcgagtctgcccctgaccgtcctctcgccctgtgcagaggctcgggggctgctctcgcaaacccggctccggccaaaccgttgacagcgtcaacataccagcccgagaacttgggacccgaccgtgcacccgggaacgaccagaccagccaaagcattgtgcaaggcattaagacctcggaggagtcaaaccactcctccgaggcctcgggggctacacccggcggtcgacagagccgaagtgaccgcagtcacatcgccgctccactgaccgacctgacagaaggacagcgccgcctgtgccgcaccgactgcagcgccacttga

SEQ ID NO: 15131 - DNA, 984 bp, Zea mays
  Peptide Sequence Number=SeqID_58506
atggtcccggtcgagaaaaccctcaaaccctggccccccatcactaacaggccgatcaactgtccactctgcaatggcccagccgatatctctgttgatattcgtcctgacataaactcatttgatcattttttaagcatgcgatacattgcaacagatagaccctggctgaaattatatggaataagagttcagcctgtgccaccattcagcagtttgagctacaaacctgatccagcgctcattcatcattgcctacctgatgaactaatgctcgagtttcatgttcttatgttctcaagcatccaattttatgttgtgaagaggagtggaatggaggcaaactacatgatggttcggtcgttgtatgattcctcttggaggagaatgtggctacagagaccaagaatccgaattgatggtctctatgtgagcaggaacacatacattcatactggagttacagaatggcaattcaagaaaactgtcaatgtggtttgctactaccgttacttaagatttttcccgagcgggaagtttctctataagatctctccagataaagttaaagacgctgttaagtgcatgcatttccgggcatcaaaggctgattgtgtatttaaaggtgactacgtgctgtcagaggatggccagatagaaatggctctcctgtacccagggcatcggtacacgcttgtcaggatgcaccttaggcttaggggcaccacagttggtgcaaataacaggttggatgtactgaagattctaaccaccggagtgaatgcaactgagctgcaaaactggaaaggaagcatactagaactcgttgagggctgggaggaggatgagacgcatgacccggatgtgcctgccgtttcccacagcaggggtttgtcaccctttgtgtttgttccgtttgaggaggctgatacttcggtgttaaacctccccgtggagaagatggactactacgtccctgggtga

SEQ ID NO: 15132 - DNA, 183 bp, Zea mays
  Peptide Sequence Number=SeqID_58507
atgagcggccaagggagctccaatgatttagtgatacttgatcagagacattgtggtacaggtggttatgagattgatggttctggttatggtgctggttgtcagcattgcaaccactgctcaggcgaagatgaagctgtggaaggagacttccaggagttccaagattacgacgagttctag

SEQ ID NO: 15133 - DNA, 471 bp, Zea mays
  Peptide Sequence Number=SeqID_58508
atgcgtgccttctctcccgggcccggtagtaaccggggtgccgccggcagccgcaaggaggaggaccaggggtctaagatccgagatagcctggatccctcttcacaggtgctcaccctggcgcgggccctctgcggctctgcccgcggcagcgagggtgatcaagagcggcgagctcccaagtcgctcgctgccttctcctcgaaggatgtcgtggacatcgctaggagcggcgagctgtccaaggcggtgactggcgctgagctctctaaggtaactacaagaaccgctcccctatacacgacagacatgacaacctcaaggagacgctgcagtggtccagggactctgcgtccctctttgtggagaggatgcagcacacgtggtgtcacacccggttttagaaggcaaaccgaatgcgaaccatgtacgtgccaggatcagttattcacgtacacagcagttacataa

SEQ ID NO: 15134 - DNA, 705 bp, Zea mays
  Peptide Sequence Number=SeqID_58509
atggcgagagtagcgtgtaccctctgtggcaagaggctggacggtggtgtatctgtgctctcggttggcatgaacctgatctggtcttacgaaccccgatggcgagttgacatatgcaagggtaacagagtgcaatgtataggaggttgggaatcaacgaaggctgattccgtaattatgcatgcatcatgtttaaaaactatactaataaagtttcccccttatggagatatgccaccacgcacgaggaaaaccgcgcgtaagtccactggacctattggcctacctcggcatcagttggctccaagacatgaagggagcaacagcgacagtaacgaccccatcagagaccgagaagcccaagtggagcagcttcggatggagctacgtcaccgaaacagggtgtgggtagaagatggtcagtgtatgaatgagttaagagctgacgtcagacatctgcaagacgagcttgctgaacgggatttggcaatcgattgggctgtcaattcacgttcgattgcttgggaccaggaagccaaagctcgtgctcctgtggcagagcttagtgcggccattgacaacttgcaggtgtattgcaatactttacatgaggaagtccatgtactatattcacgactacacgcagacgtacctgccaaccctgttgcaatgggagccaaaccctcgggaacaacaggtgaatga

SEQ ID NO: 15135 - DNA, 165 bp, Zea mays
  Peptide Sequence Number=SeqID_58510
atggccatgatgggttcaacatcagaaaagatgtacctctgtcagaataagacaacacgcactgggagtggagagatggcgagagtagcgtgtaccctccgtggcaagaggttggacgttggtgtatctgtgctctcggttggcgtgaacctaatctggtcttaa

SEQ ID NO: 15136 - DNA, 309 bp, Zea mays
  Peptide Sequence Number=SeqID_58511
atgagcttgacggcatctactcgtcgggaacgccttgatttggtctcagtgatcgccgtcatcgtggacaggcaaatccaggaccggattaacccaattaaagcttgttctaggttcacctcggaaaacgaagaagaagtagaagttgaagaagcaagagctacaccaccaccacctgaagaacccccggccgggaactgcttttattttgacatctgtggagcagagcccgactcacctataacacaaggcaagccccggtgcatttgccacctcctttctattttaaaatctttctcacttgcttga

SEQ ID NO: 15137 - DNA, 528 bp, Zea mays
  Peptide Sequence Number=SeqID_58512
atgggtgtgaccgagggacgtcttgacgatttgaattgcttattgagtacttgcgactgttcggtgatcgtgggcaagaacaagaaaagtcgaggttcgtcgcaccactccggcgataagcggaagcgtgagccaagtcctccctctgaggactttggtgactccgagtactcggaggaggagttctcctccgagtctggggggtcgccagtctacgcctctcccccggtgtcgtccgatgattcggacgattcccaggggatagccgccgagggctcagatgagtcggaggtctcctcgaacgaggagaactattccggctcgtccgaggaggagagcggcactgatggcgacgacgagggcgacaacggcgatggcggtgacggcagcgatgacagcgacgacgacggaaagggcgtcgaaggcgacggcggcaagggtgacggaggcaacggcgacaagggcgacggcaacgccaagggcagcggcgacagcagcaaggccaggggcaaagcaccactggattaa

SEQ ID NO: 15138 - DNA, 330 bp, Zea mays
  Peptide Sequence Number=SeqID_58513
atggccggagccggcgactccacgcagacgaagaaggcacggggcgatcgcggtttggagggcagtctcggttctacggcgcgggacctgtaccgacgatcaccggtgactaatcgacgaaacagagaaaatgggagagagagaagagaagattcggcggggaaattcacctcgggtggggcagggacaagggcgaggctgggcctgacggtggcggagcacgatcgcggacggcgaccgagctctaccggcgacgaattcgggtgcagggggtctggcgacagggaagctccggcgagcttgaagatcgggcgcgcgcagctcgagtga

SEQ ID NO: 15139 - DNA, 201 bp, Zea mays
  Peptide Sequence Number=SeqID_58514
atggcccaagcccacccggacgatcccagacccccaagaactcgcgcccgcctcgtctccagcgacatcatcgtcgcgggcatgagtggtgccgcccaaagccggttggagccgttaaaccgcctgggcacccaatctctcctgcccaccaatgatctaatggcccagatccttgggtaccgattcgcgtcggttcattga

SEQ ID NO: 15140 - DNA, 2193 bp, Zea mays
  Peptide Sequence Number=SeqID_58515
atggagcgagtcgaggaggtggaggaggcggccgaggcaatggagcgagtcgaggaggtggaggagggcggcgaccccgccgaggcaatggagaggaggcggaggccgaagagaggatcgttgagtgaccgcctgcggcacgagccgagctacaagttcctgtccttcaactccgggcccaggagctgcatcggcaaggacgtcagcctcagcaacatgaagatcacggccgcgtccaccattcacaacttcaaggtcgagctgcttcaagaaagcggagcaatggagatggtgccatggcttctcggcttcctcggcaggtacccggagctcatggtgtccctcgcttgcttcctcctgctgtttcgtaggctgaaccagcgggacgggctgccgacgaactggccggtggttggcgcgctcccggcgatcaccgtcaatgccgggcgcatgcacgagtgggtgacggagttcctgcgcgccgcggggctgtcgtacgtcatgaagggcccgtggggatcgccggtggacgtgatcatgacggccgacccggccaacgtggcgcacgtgttcacgtccaacttcggcaactaccccaagggccaggagttcgccgcgctgttcgacgtgctcggcgacggcatcttcaacgccgacggcgagtcgtgggcgttccagaggcgcaaggcgcacgcgctgctgtcggacgcgcggttccgcgcgggggtcgccgccagcaccgcgcgcaagctccgcgacgctctcgtgccgctcctcgacggcatcgccgcgtcgggcgcggtggtggacctgcaggacgtgttcgtgcgcctcaccttcgatctcaccgccatgttcgtgttcggcatcgaccccggctgcctcgcccctgacttcccctacgtcccgttcgccgccgccatggacaccgtcgaggaggtcctgttctaccggcacgtcgcgcccgtgccgtggctgatgctccagaagtacctcaggactgggcacagcaagaagatgtggaacgctcgacgggtgctcgacgcgtccatcgccgagttcatctcgctccggcgagagcgcgccgccgaggccgaggccgaggccgacctgctcacgtcgtacctggcgtgccacgacgagataggcaagtccggcgccgagctcgagcggttcttgcgcgacaccacgcttaacctcatggtcgccggccgggacacgacgagctcggccttgacgtggttcttctggcttctgaccaagcacccggacgtggaggccaaggtcctcgaggagctccgcgcgcacccgccgttgtccggcgcgggaggccatcgcaccgcggctgagctgaagcagctggtgtacctgcacgcggcgctgtcggagtcgctccggctgtacccgccggtgccgttcgagcacaaggcggcggctcggacggacacgctgccgagcggcgcgcgcgtggggccctcccggcgtgtgatcgtgtcgttctactcgatggggcgcatggaggcggtgtggggcaaggactgctcggagttccggccggagaggtggctgaccgcggcggggcggttccggcacgagccgtcgtacaagttcgtggcgttcaacgtggggccccggacgtgcctcggcagggacctggcgtactcccagatgaaggccgtggtcgccgccgtgctgccgcggttcagggtggaggtggacgccggcgccgtggtgcggcccaagttgtccatcatactccacatgaaggacggcctcaagcgggaacaccctcggctctcccgaggcccggctcgggcaggcttcgctgtgaagcaaccttggccagaccgcctcaccaaccgaccgcttcgcaggcgcattcaatgcaggggttgcctgacgcagtatcctgacacacgcgactcagtcgaccaggccgaagcgaagctgacaacaagtcacgatcaaccaccaagttcggcctcgggcgcagcaggaagctccgcctcgcccgacctcaggctccggcctcggaaggaagtctccgcctcgctcgaccctcggtctcgagaggaatcgcgtcctcgcccgaccccgggcctcggccttaggagaagtccccgcctcgcccgaccttgggctcggaccgaccgcgccaacaggggatacatcatttaccctatccgtagctag

SEQ ID NO: 15141 - DNA, 306 bp, Zea mays
  Peptide Sequence Number=SeqID_58516
atgagaagtcgcgctccgccgctctggtcgttgcagctgcgactgggggccggggcgaccgcaataaacacccacaaccacattagggtaacaacggctcatgccctgtgcaccccaatggtcgccacagcgccgcatagtgtcgcgagatcatcgacctcgcgaaacgcgtcaacgcgcgacgcgagcagtcttccggggatggctccccacctcgtcgccgacctggcaaggaaaggttcaacgacgatcaggtggccgtggctgaaccggacctcgggtatcagtcaccagaaggggtcctga

SEQ ID NO: 15142 - DNA, 777 bp, Zea mays
  Peptide Sequence Number=SeqID_58517
atggcccgcgcccgcgcctataaaaccctcccagacttcggctgcactcttccgcgcaccctcaagcctcaccggagtccagctcgccgtcgtttgctcgtgcgcagcgtgtccgcggccgcccaatccctctgtcaccgtagaccggccagtagagccattcccaactccgtccagccctcggagaagactgtgcacacctccgtgaagctccccgagcgaggaatcggagtttgcttcgccggagaggccagtccacgctcgccggagctctcaaccccgccggagtacgtggaccgggtaaaccactccaccatccttcgattccctgtgcacacggtcgctacgttaccccgtgaggctcaccgtgccctcggattgaaccagttcgccgtggtttggccggtatactcgccgccgacgaggacacccgcctgcgtgcgtggaccgggcgattccggccatccccgacgtcaagccgtacctcggcgtgactgccagagcctccccgagccaaccccacccttcgccggacctccctcgccgccggataacttagaaaaaccctacaaaaataaccccaagacaatacaaatccactatgttatcctaaaagaaaacctaagcctaaaagactgtaaccttgctgacagagagtacatcctcgtgccggagcaaggagctgctcaggaggtagccccggatccagcacccgagcctgcaccagaggacctgcctgccactgctttggaaggcaagccccggttttatgcataa

SEQ ID NO: 15143 - DNA, 342 bp, Zea mays
  Peptide Sequence Number=SeqID_58518
atgcagggtggagacacaacccgctcggacgccgaggcggcaacggggcgcatgcgaggtgccaaaggttcacaacaaaccaataaaaagaccaagaaggggttcaaacaaagagagcaaaagacaaccaaagatttctgggagccgctccgctataattcaccggactgtccggtgtgccagcggagcaatggctacttcgcgccaacggtcgtctgcagagagcagttaatgcgctacaatgttgatcctagggcaatagaacttgccatgagaatcgccgaaagggtgttcctcaaaatgaaggaagatgaggcgaagaacagtattgaagaacaataa

SEQ ID NO: 15144 - DNA, 843 bp, Zea mays
  Peptide Sequence Number=SeqID_58519
atggcgggggagaggacggggcgagctcgaatgttgttcttccaccacgcggggaaggcggcgtcgattccgccgccggcgggcgggtcgtcggccgccattgtcgctgtcgcgcggcggtggaaggagtaccatgccgtagccgccgtcgagggacatgaactcaaggctcccgaaacggagcaccgtcccgggttggagaggttgttggagactgcccatctggagcttgacgggaaactgctcgtcaacacgcagcgtgcccctacctggcgcgccaactgtcggcgtttcgagaccggggggtccctaagccgacgagtgagtgccgcgtgccctagcccagatgggtcgagcgcgtgggcgagcgcgaaggggggaagcgaggtggccggagacgggcgtgagagaggtggaaatcccgcggccttcgtgttcgtcccgcgcccaggtcggaggatccaggtgtacaatgggggtgtagcagagtgctacgtgtctagcgggggaagagctagcgccctaggtacatgccaatgtggcagccggagagatcttggcaccctgctgctgagagccgccgtcgtcacagggctagcggggcgccatcattgcctatctggcggagctagccggatgggacaccggtcttgttctctgtggcccgagtcggctcggggtagggtgatgatggcgcttcctgttgacgtggcgggcctgtgccctaggtcgggcgacgtggaggctcctccgaagccggggtcgagtctgtcttccatggccaaggccgggcccgagctcctgggtcgggcgaagcggagttcgtcgtcttctggggcctag

SEQ ID NO: 15145 - DNA, 780 bp, Zea mays
  Peptide Sequence Number=SeqID_58520
atggcggcgcgaagggcaggaagggcggttctctcttctctggctagatctctcgggttgcgaaaacctaaggggcaggcaggaagcggagcaaagaaccgtcaccgggccctctctgggggatataaagaccaaggcgaggacggttccaacgttccgcccggaccggacgcgggattcaaaaacgcgaagcgaaacggccgctcctcaaacggctcgcgcacgcgtaacggcggccccgccaactactcgccccgtcgcattaactccgcgactggacaggcggcgctttctggcaggagcaacgggcgacgcttcgccttcgcccggaacaaacgcgccaaaaaaggggttcgaaggctggcccccaaagggttcacagtcgcctcagacgccgagcgagggatgaccaaggaatcccatcggagggaggcatcgagccctcggaccccgtcgctaggggaccgggtccggcagatcacccgcagctcaccggagacaccatgttcggtgcccatcgagggtaacatggcgctctcccccctcctccttgcggaaaggcgacgtaggggcgtatgtaaaaaagccgagtctgtccctgatcgccctctcgccctgtgcggaggctcgggggctgctctcgcaaacccggctccggccgaaccgttgacagcgtcaacataccagcccgagaacttgggccccgaccgtgcacccgggctacggccagttcgcatgagggaaccaccagaccggccgaagcattacgcaaggcattaa

SEQ ID NO: 15146 - DNA, 888 bp, Zea mays
  Peptide Sequence Number=SeqID_58521
agcgagggaagggagatccacgccgccaatcctacgccctcgccctctgcgcggagaggccgccagatccacgacggggctactccagagctcgccctgctcctcttcgccctcgccttcgccctgctcccttcgcgcgccgatctgtcaacggggttgaggacggtggggttgcgaggacgcacactgagcgagggaggagggcacgacccgtcggtggcatgggggggggcgtcgccggcgggatctaccgacagtggccgacgacgggaggactgggacctcgccctgctcctcttcgcctatgtagaggtggggtgtggcgacgggccgacggggggacagtgggcggcgacggctggactcctacacctcccagcgcgacggcgggaggactcctccacctcccggcgcgtgaagatcctggaacaacctccagatgttactctccttgatggatatttttttggagacgcagaagcagaacagcacgtaccagtccaacctggggttcgtcaaccccggaacgacgcctcctcgccgtcgctcttcgccacgtgcacggtgggcgccataccggacatggtctacgccctcgcgctgtgccgcggggacgcggccgccaacgcctgcgccgcggccgcgttccaggacgcgcagcagctatgcgcgtacgccaaggacgtggccatctactacgacctctgctacctgcgcttctccaactgggacttcaattcctggccggcgacagtacttgcgggcggcaggcgccccgctgctgcgtctcgcggcgccggcttcttcgccgccggtggcacgctggcgaactctcgtctaaaagattttatcatctatatttccttcctctccaacaacgtcctctaa

SEQ ID NO: 15147 - DNA, 1188 bp, Zea mays
  Peptide Sequence Number=SeqID_58522
atgtcggtggggaagggtttgcaccgcccaatgaagaaggcgcagtggcttgcgtccaggacaaggcggatacccaggacgtcaaaggcagacaccatatgggatcaagtcatggtgaccttgatgaccagactttggtatacaccagcgatagatatatggagtattggttgtatatttgcggaactattaactggaaaaccgcttttcccggggaaaaatgtggtacatcaacttgatataattacagatctcatgggaacaccttctccagaagcaatatcgaggattcgtaatgagaaggccaggcgctacttgagtaatatgaggcggaaaaagcccataccttttacacagaagttcccaaatgcagatccacttgcattaggtttgttagagcgaatgctagcttttgagccaaaagacaggccaagtgctgaagaggctcttgctcatccttattttaagaatatagccaatgtggatagagagccttctgcacaagctgtcacaaagctcgaatttgagttcgagagacggagagtcactaaagatgacataagggaacttatatatagagaaattcttgagtatcatccaaagatgttgaaagaatttattgagggaactgagtcaagtggtttcatgtacccaagtgcagtagataattttaaaaagcagtttgcataccttgaggaacattatgccaagggatctacgggaactccacctgagaggcaacataactcattgccacggccttctgttgtctattcagacaaccaatcacaaagcacggccaatataacagaggatctttccaagtgtataatcagagaaaatgcacagaagtcacagcaatataatgcttcagttgcaaataaatttccatcccatgttcctcaaggtgctgctgcaaggcctggtaaagcagttggttcggtgctgcagtacaacctctctcaagcatctgctgctgagcaatatgagcagcgaagggttgctaggcacccagcagttgccccaaacaacatcccttctggaagctcataccccagaagaaatcagacctgcaagagcgagacaggcgacactgagaggatggacgtgaaccaagctgggcagccgaagtcctatgcagcaaacaaactacctgcaactgttgatggtcgcggcggccattggtag

SEQ ID NO: 15148 - DNA, 408 bp, Zea mays
  Peptide Sequence Number=SeqID_58523
atggctcagatcaagctaggaagccaggaagatcgtatatgcaaaaaatattttctcacttattataatatagggagaattacatgccgcacccctgcatggcacacaacctcagatttcaccttagcaatgaaaattcctcagttctacccttgtattcggagcaacgcatcactaaacctctcaccgtcagcagttaccgtttgccgtcacctgcagttgggccccacacgccacatcccaaaatccccaatcgaacaacagaatccatcgcaaaaagggaggcacgcggcgctgcccctgccgtggctccagacgccctcggccacgcggctgctcctcacccggagcccggtagacatcgcggccgctggtggtcgtcgtggaggcgcacggcgctgcccctga

SEQ ID NO: 15149 - DNA, 315 bp, Zea mays
  Peptide Sequence Number=SeqID_58524
atggagcctggcggagggacagctgttggagcggtcgagtccttgctgacgtcctcttgcttccgtaagggggctgatagccaccgtcgtcacagagtatgcggggcgccatcattgcctatctggcggagcgagccagatgggacaccggtcttgttccctgcggcccgagtcagctcggggttgggtgatgtggaagctccttcgaagccgaggtcgagtctgtcttccgtggccgaggtcgagtccgagcccctgggtcgggcgaggcggagttcttcgtcttctggggctgagcccaagtccgagccctag

SEQ ID NO: 15150 - DNA, 348 bp, Zea mays
  Peptide Sequence Number=SeqID_58525
atggaggcccaggcccacgcgtcatgcaaccggcacgccgaatgcttcgtgcatgcaaatgcacctccacttgcgccaccaccgcgcctcctcgactgcggaaccaataccgcgactcgaggcgacccagcgcacgacccagcagcgccagcctggcgcggcgggaccgggaaagggggataccccgaaaaggaaaggccggcccctcggaagggttccacggccgcctcaggctactcgggctccgcgcccattactgatcaggggttcgaaggctggcccccgaagggttcacagccgcctcagacgccgagcgaggggatgaccatgggtacgttcaatacataa

SEQ ID NO: 15151 - DNA, 549 bp, Zea mays
  Peptide Sequence Number=SeqID_58526
atggtcaacaagccgctcattggcctcctctcggatgttgtccccatgccctacgtcgccatcggcggaaatgaacttccatcggacttgatagacacactactaaagtggatctcaagcaatgatgaggagcttaggcttcgactgtcctcccgtagcaccgccacaccgcacgcgtccgcggcggcgtccgcctcggcgccggtctcgcacaccgctccctggctagggaagttcatctcctccgagtccttcaacgtgaggggattcgactgggcgatctacttctaccccaatgggaagagcggcgaggatggcgctgcctacgtctcgctcttcatagccctggtcagcgaaggcaccgatgtgcgcgcgctgttcgagctcacgctcgtcgaccagagcggcaaggggcaagacaaggctataatagtaggtggggcagacactgatgggacacctattattgcagggattgcaaagttcatggatatattaactactggacttgttacatccccattatattgtaacactaaattacaatga

SEQ ID NO: 15152 - DNA, 795 bp, Zea mays
  Peptide Sequence Number=SeqID_58527
atgggctaccccgcccccaacgggaaccccagcgcctacttcgccgccgcgccgcccgccgccgccgccgccaacggctccgctccggcgaccttcggcgtcgcgtacccctaccccgcccctcctcaccaccatcacccgccgccgcaccaccactacccgtatcccccgcccccgccgacgcaccaccactacgcggcccacccgccgccgccgcccacctgcctgcgccgcctcctcgccgccgtcgttggcgccttccttctcctcggcgccgccaccttcatagtctggctcctcctccgcccgcgcgccccggccttctccctcacctccctggccctctcccgcgtcgcttactcccccgccaactcctcactctccgcctccttcgacgctgccctcctcgccgccaaccccaacgccaagctctccgtcgcctacttctcacccctcgcatccgtctccttcgcgccctcctccccgctcgccgtcgcctcgctcgcgcccttcggccagggccccggcaacaccaccacgatcgccttccgcctcgtcgtagaggatgcctacgtcgggcccgacgacgccgcagcgctcaagaccggcgccgggggcgctgtcgacgtcgaggtcaggctcatggccgtcgccgtcttcgacagaggtggctggcgcacgcgccggagggtcatgagggttatgtgcgatggcgtcaaggtggttttccgcgggaagaattccactgaggcggccttcgatgggccgccaagaaggtgcgatgtcgtgttgtga

SEQ ID NO: 15153 - DNA, 1089 bp, Zea mays
  Peptide Sequence Number=SeqID_58528
atgggatatagggaggctaccacccatattcagctctggctccttggtgccctggtctctcactctgagtttgacgttgttgatttcctcatttgtgagatcgagaacactgtattggatggtatgcgtgctcgtcgtcagctgccatatgctcactacttatgccacatttttgctcagctgattcggcctccacagttccagggcacacttgaggcctcacgccttgtttttggatcctaccgtccagcgcctgaggatccagtgccagcttctgctccagtttttgacactcaggccgaagatgctgctcttcatcagttcgatgctcaggatgcaacagttgatgatgatgattatgatgatgatgattttgggattccacctccgcctccgcctcctatgcctccacgctcacatgatcatgaggctgggagctctagtactacccctgctgcccctcctgctattgaccccatacttgctttgattcttcagacactcactcagcagcaggctcacttggcagccgagcagactcgccaggcagtagctcatcagcagttatccgagaggatgctcttgatgtttcagaccatacaggacaggcaggattctcttcagcagcagcttctccaggatcgagctgagagcagggcattcatggctcttatgctacaacattctgttgtctcggttcccccggttcagtctgcaccacctcctccgcttcaggctcctgttgtgccagcgatccagtcaggaccccctcttccttctgttggtccttcttcctctccgctccggccggtcactctggttttcacgtcaccggttctcagctctgtctgccctcagctaccagtgccaccagcttctgctgttaccactactgctgtggcagtatctgtgaccacttcagttccggcagcttctgcagcacggcctcagtccgagtcagtaccagctccagcttctacagcagatcctggatccgagactgactctgaccccccgccggcgttcgttctgctgcctcgaccgcgaccggatgcgcccccgccgcctcctcccgcttcaggtgtgtag

SEQ ID NO: 15154 - DNA, 348 bp, Zea mays
  Peptide Sequence Number=SeqID_58529
atgggcaagaacaacaagcgcaagcatgactcccaggggcttgcggcggaggtttggacgtatatccgggccgtcgagcgctccgggctcgagggctcgaatgagtcggagtactcctcggatgaggaggactcggacggcggaggcgagggcgaggacgatgacgacgacgacgacgacgacggtggcgacggtggcggcgacggcagcggcaggggcggcggcgacggcagcaaggacgatgacggcggcggcagcaggggcagcaggggcagcaaccagggcggcagcagcaggggcagcaccagaggcggcagcggcggcggcagcaacagggccagtggctag

SEQ ID NO: 15155 - DNA, 372 bp, Zea mays
  Peptide Sequence Number=SeqID_58530
atggacatcaagcttgcaccattggctgtgactttcagaaaagctatttttggggaccctgcatttgatctgggcatatgcaaagggttgtatggagtctcctttccttactatgatgaactttcaatggtatattccaaggacatggccacaggtgaaggtgcggaagacatgacagatgttgttcaaaatttggaagaagagttagttcgtgtaaatgctaatgatgaagaggatggagaggatatgacatctgtagagacaccaaggagttttgttgactcaacatcatctagctccaagaagcggaagaaagagtggtgttggaacttgctaccaggtgcaaggggatccaatgggggtgagagttga

SEQ ID NO: 15156 - DNA, 456 bp, Zea mays
  Peptide Sequence Number=SeqID_58531
atgctggacgaggtcgcaagatgggacgacttcgtcacaggtcttcgtccggtgacgtatggggcgaagggtgaatctgcccgttgtcttgtctccgttggtccgacgattacggccaaggcatcgagcgaagggtggcgtcttcgccttcgccccaacaagtggaaaggaatgaatacttcatcaagtgacccacttcttgatgtgttcaatgaagtgagtggtgatctcaaggttgccaccatgtcaattggaaaaatggcgcaagctatggatcttgaggcatccaaccaagagaaggcaagagatgaggatccacaacaaaagctaagagagaaggcgatcaatgaggtccggagacttgaatttactggctcagaagttatcaaagcagctggtgtgtttgtcaggatgccagatcaaatgggaatgttgtttgcattccaaaaccactga

SEQ ID NO: 15157 - DNA, 1398 bp, Zea mays
  Peptide Sequence Number=SeqID_58532
atggagctagagtacggttacccgaggatcaaggctatagcgatgagcaaagcaacaacagacatgcaactcgccatggacctacttgataaggcacgttgtgatgcggacattgtaaggaagattatctccctgctaccacaacaaagatacgggagcatcatcactattcttcacaacatggaggacttgagtacaatgaccccgaccattgtgattgggaaaatcgcggcctttgagatgtcacaaaaaatgtgtcacggagaggagccaactttctcaaggccatatgcttttgcatgtgatgaaaggaagggtaaaaaaaggctcccacaccaagttcctcaagtgaaaaagaggaagaggaagaaagtgatgatgaaggagataatcaaccatcaacatcatcctccgaagacgaagaaacaatccaacacgtcggaaagggaaaagcaaagaaagagaggatgcttcacatgcagggagaagggccacttcagggacaactgtgcaactatggtcgaacccaaaaaggaaaggagcaaagccaaggcactgacaagtgtcaaaacttgggccgattcttcaagcgaagatgaacctccaaggatgcgcagccaccgatcctcatcacgctcatcacagtcatcatgcaagtgccttatggcaagaggtttgctagaaaaaattgaagcttttgcaaatttgaattgtgagctatcaactaaaattgagcaattagagtctagtgctacatccacagctaccaatgatggccttattaaaaagaatgaaaaacttaaggctaagttagctagctctcaagaagctattgaaaagttgttagagaaaatggaaattcttagcatacacaacaatgagctaactactaagctagaaaacatcagtagcaccctagaagcatctttagttgaaattcctaaaattattaaaaaggatgcttctacttcttgctttgatttaattgataattctaacccctgcaaccaagttcttgttaagagtattgttgtagaaacatgttcgaatgaggctttgtataacaagaaaggcaaagccaaacaaatccaacctccacaggataacaccactgcgggagtgaacaagcctgtggagggcgaaactgtgatttgtaggttatgccacaaggaaggccataagtctttccaatgcaaggtgatgaccggagataagcaaaagctcaagcaaaagccatcaagcaaaatctccaacacctacatcaacaaggtggacaaaaaggttgttacaccatatttgatcaagaagaaaaagaatggaaaggtgatagcaatcaaggccaacaagcaagccaacaaaggaaagggggccaagtgcatctggtgccaaaggaaataa

SEQ ID NO: 15158 - DNA, 186 bp, Zea mays
  Peptide Sequence Number=SeqID_58533
atgacgaccgacaggccgcttgagctactccacattgatttattcagcccggacgcttacataagcatcggcgggagaaaaatctcaaacccaagaaactttaaagggattcttgagacgggctcaaaacgagtttggattgacacgggctcacaacgggacggagttcaagaactctcaaattga

SEQ ID NO: 15159 - DNA, 324 bp, Zea mays
  Peptide Sequence Number=SeqID_58534
atggggagtcatgatcctcgggcaaaatgggaatcacgactcatgggtaaatatttcctctctgaggagcactgtgtgatgatgttcatttatgtaatcgctgtgtacgtgaattctgatcctggcacgtacatagttcgcattcggtttgccttccgaaaccagatggctcgtcttagacacactgctcgtaagtcggtgatccctttcctgccgtctcgccttgcggagcgtcctctgcgccgcacagtgtccggtcagtcgagtcacctggagaggctgcaccactgcctgcgtgaggagcaggagcgccagcgtcagtag

SEQ ID NO: 15160 - DNA, 435 bp, Zea mays
  Peptide Sequence Number=SeqID_58535
atgtccggtgcaccagaggactccgacttcaaactcgtcaccttcgggaaattccagaggcgactccgctataattcaccggactgttcggtgtacaccggacatgtccggtgctccaaggaagagcggcctccggaactcgccagcctcgggaattcatctcagctgctccgctataattcaccggactgtccggtgtacaccggactgtccggtgtacaccggactgtccggtgtaacagcggggcaacggctatttcggcgcaaacggctacctgcgacgcattaaatgcgcgcgctgcgcgcgcagaggtcaggcacgcccatgctggcgcaccggacaatctacagtgcatgtccggtgcgcccacccgggacatcaaggcaggcccagaagtcagaactccaacggtcggaacccaacggctttggtga

SEQ ID NO: 15161 - DNA, 156 bp, Zea mays
  Peptide Sequence Number=SeqID_58536
atgttggctagccatgcacagaagtacaccatccgcctcaactccgacgtcaaggacaagcgccactccagcatccacggcatcaccaccgtcaacctcaccaataacgacatcagcgacaacccctcggccttgtcgtcccctctgcacaaatga

SEQ ID NO: 15162 - DNA, 555 bp, Zea mays
  Peptide Sequence Number=SeqID_58537
atggccgcctcgcgaaccactcgccccgtcgcattaactccgcggcgggacaggcggcgcctaaggcaggagaagcgagcgacgcttcgccttcgccataatgatcacgtcaaaaaaggaaacaggccccgagcctccctattgatcagaggttcaaaggctggcccctcggaggggttcaacagccgcctcagagcgcttgggttccacgcccactactggtcagaggttcgaaggccggcccctcggaagggttcaacggccgcctcaggccactcgggctccgcgcccactactgatcagggcgggaacgatcttgtaacggaatcccatcagagggaggcatcgagccctcggaccccgtcgaaaggggaccgggtccggcagatcacccgcataggctcgggggctgctctcgcgaacccggctccggccagaccgttgacagcgtcaacataccagcccgagaacttgggacccgaccgtgcacccgggctacgaccagctcgcatgagggaacgaccagaccagccgaagcattgcgcgaggcattaa

SEQ ID NO: 15163 - DNA, 894 bp, Zea mays
  Peptide Sequence Number=SeqID_58538
atggccggcgcggtgtcggcgctcttcctgctggacatgaagggccgcgttctcgtctggcgcgactaccgcggcgatgtctccgcgctccaggccgagcgcttcttcaccaagctcctcgacaaggagcacaacaatgtcttcctcctcaccgccgctcgccagaactgtaacgcggccagcatcctcctcttcctccaccgtgtaatagatgtgtttaagcactacttcgaggagctggaggaagagtcgctcagagataacttcgtcgttgtgtatgagttgctcgatgagatgatggattttgggtacccacaatacacggaggcgaagatattgagtgagttcatcaagacagatgcatacaggatggaggtcacacagcgtccacccatggccgtgacaaatgctgtgtcatggaggagcgaggggatccggtacaagaagaatgaagtcttcttggatgtagtggagagtgttaacattctagttaacagcaatggccagattgtgagatcagatgtggttggggcactgaagatgcgaacatatttgaggtgtgtacgtttggctagatttgagaatgatagaactatatcgttcatacctcctgatggatcttttgatctaatgacatacaggcttagcactcaggtaaaacctcttatctgggtcgaagcacagattgagaaacattctagaagccgtatagaactcatggtgaaggcaaggagtcagtttaaagaaagaagcacagcaacgaatgttgaaattgaagtgcctgttccttcagatgccacaaacccaaatataagaacttcaatggggtctgctgcatatgctcctgagagagatgcaatggtttggaaaataaaatcattccctggtggcaag

SEQ ID NO: 15164 - DNA, 963 bp, Zea mays
  Peptide Sequence Number=SeqID_58539
atgacgtcggttgctctcaaccccctacggaagcaaggaaatgtcagcaggatccatgtcgcatcgccagctatgcttctacagggctcaaggcacttctccgacagccatgttagcacacgtaaagggctcaaagcacttctccgccagccacatggcaactcaattaaaggactaacaagtatgctaagtgttgaacaggtgcttaatgcaaagctaactgagttcaacacaaagacgaccgatcaagccaaggatggaggcaagaagagcttcgacgtaccgagtgcacgggagaaggtcaaggagaccaggaacccaaaggccaggggtgaagaagaagacttgcaaagtcaagctccctcgtccccgcgtaaccgccctcccgagctgcgcgcacaccgaggactccgcgcccacgtcgcgcgtcgagctcgcaaccgccccgccctcggccacttgagaccccagagccccactcactctccccccctcatttgcacacctgtagagcctcatttcaaccccccgcgctgcgcgcccgccagggaggagccgtcgttgtccgctgccgtcccaagcctgtttccccgtcaaagtcggagccctgccgtgccctctgccacggtgagctctgcctcgacgtccgcaactcgggacacgctccaatttctcctctccctccctgatttcctctacccgcgctcacccgccgtcttccgcgcagtcccggtgccgccaccgttgacccgagccatcgtcgcgccttcaccgccaccgagagtcggttggcgccgccgccgagccgtctcgccgtgggctgccaccctccggtgcccctatcgcgacttagccctcgccattgggttccccgcgccttccccaacctcccagaccatcccggtcgccctaagacccgcggagcccccgcgccccttgtctccggcgagctccccgccgcgg

SEQ ID NO: 15165 - DNA, 234 bp, Zea mays
  Peptide Sequence Number=SeqID_58540
atgttggactacaatgtgctcggaggaaagtgcaatcgcgggctctctgtcattgatagctacaggatattgaagggtgttgatgttctgagcaaggaggagacatttcttgcttgcacccttggctgcttcaagcttattttcttgtgcttgatgatattatggacaactcccagacacggcgtggccaaccttgctggtttagagtgccacaggtcttacactcttacttga

SEQ ID NO: 15166 - DNA, 741 bp, Zea mays
  Peptide Sequence Number=SeqID_58541
atggcgccccgcacactctgtgacaacggcggctctttgcccccttacggaagcaagaggactgccgctggaccacatacaattgttgatggtaaagaagttgtgaactttgcattagcaaactacctcggtttaattggcaacgaaaagattgttaaatatggtgttggttcttgtggtccacgtggtttttatggaacaattggtctgtattatcatcctcagacaatgactttggttgaaaactccattctttattcatatgggatttctacaatattcagtgtgatacctgccttctataagaaaggagatatcatagtcgctgatgagggtgttcactgggcagtgcaaaatggtctccatctatcaagaagcactgtggtgtacttcaagcacaatgatatggcttcacttgcaagcactttggaaaaacttactcgtggaaataaacgtgctgaaaagattagacgctacattgttgtagaatccatttaccagaattctggccaaattgcccccttggatgagattgtcaggttgaaggagaaatatcgattccatgttattctggaggagagtcattcttttggggtgcttggcaagtctgggtgtggtcttgctgaacattatggagttcctgacttacctcctttgtcgaggtccaagtgtctgttagttcccattggcgttttcgtgggcttagcgtccttcatcccaaaccttttgagcaactcctaa

SEQ ID NO: 15167 - DNA, 909 bp, Zea mays
  Peptide Sequence Number=SeqID_58542
atgcagcccggctgcgccccctcgccggcggtcacccaagacggtgaccaccagcccctgggtggggagaagcaagtcgggctgcatcttggtcccaccctcagcttcaaggatgttcatcatcctcgctggggtggaggccgggctgagccggagctctacctcccgcgcgggttcgtgggtcagcctctccttcagcgttcgagggagagggcgctcactggccctgcgagaggggcggacttcgacaatgcggggctggttggcggcgggcgtcgtcagcttcagcgcgttgggctcgccggcttggctcccggtgtcccctcctgccgcgagggcggttatcgcgccgcgcgcacgggaggaccgcccaagacgtcgcgtgctgctagggcggcgttcgtgttctggggctgtcctgcctttgcaccggagtccctcggctcggtcggccttgttgtccgaggcttcttttgcttagttaaaggaacccctcggccgctcttcgatgagccgaagccaggggtagcggtgtcagcacggacagaggcagagttggctcaaaaagaagactcggtcggccagagcctggctgggttgtccactggtgggaccgacgccggaattgagttgccgaggcctcgggccgggctgatgtcatcgggggacagctggccgaggcctcggggtgaccggccgagccgtctgctcgagccggattcctggagaagaccatggcagcgaaggcctaggcgtggtgatgatgtcgcccatcagagtggagatcctccgaccacgtcgccgtccgaggctaggtcggacctcgccgaaggtgtggttgacgccgagggtgctgctgctcccttcaactgtcaagatccgagcctgcaggatcggattatcttgtag

SEQ ID NO: 15168 - DNA, 975 bp, Zea mays
  Peptide Sequence Number=SeqID_58543
atggcgcctcctgttgacgtggtcggtccgtgccttgggttgggcgatgtggaggctcctccgaggtcgaggtcgagtctgtcttccgaggccgaggtcgagtccgagcccctgggtcgggcgaggtggagaccgtcggctgaggccagggctgagtccgagccctggggtcgggcgaagcggagttcgtcgtcttccggggttgagcccgagtccgagccctggggtcgggcaaaatggagggctgagcccgagtccgagccctggggtcgggcggagcggagttcgtcgtcttcagggactgagcccgagtccgagccctggggtcgggcggagcggagttcgtcgtcttcaggggctgagcccgagtccgtgccctggggtcgggcagagcggagttcgtcgtcttcaggggctgagcccgagtccgagccctggggtcgggcggagcggagttcgtcgtcttcaggggctgagcccgagtctgagccctggggtcgggcgaagcagagttcgtcgtcttccggggctgagcccgagtccgagccctggggtcaggcgaagcggagtttcctatggcgcctgaggccgggcctggctgcttgtcagcctcactctgtcgagtggcacagcagtcggagcggcgcaggcggcgctgtcctcttgtcaggccggtcagtggagcggcgaagtgactacggtcacttcggctctgtcgactggagggcgcgcgtcaggataaaggtgttaggccacctttgcattaaatgcccctgcgatttggtcggttggcgtggcgatttggccaaggttgcttcttggcgaagactgggcctcgggcgagccgaaagtatgtccgttgctggaggggggcctcgggcgagacgtagatcctccgggctttgtgctgatgggggttaccagctgagaattaggagtcttgagggtacccctaattatggtccccgacaataa

SEQ ID NO: 15169 - DNA, 1167 bp, Zea mays
  Peptide Sequence Number=SeqID_58544
atgtcttcgtactcccttcatgcatgcgtccttccaccttccgagcccccggatggggagcgctcgcatcgctttcgtcttgctgtcattggaggaacgcaacttcgcggaagttggtacctttcagccatcgttcggcttcaaggattttcatcaggcagcccggctgcatcccctcgccggtggtcacccaagacggtgaccaccagtttggtggtggggagaagcaagccgggctgcgacctctgccccgccctcagcttcaaggatcttcatcatcctggctggggcggaggccggactgagccagagctctacctcccgcgcgggttcgtgggtcaccttctccctcagcattcaggggagagggcgctcaccggcctagcgggagggtcggacttcgacaacgtggggctggtcggcggcgagcgtcgtcagcttcagcgcgttgggctcgctggctcagctggctctggcttggcccccggtgccccctcccgccgcgagagcggttgtcgcgccgcgcgcaccggaggaccgcccaagacgtcgcgcgctgctagggcggcgttcgtgttcttgggccgtcctgcctttgctccggtacggcgcctctgcgcggaggtcggtgctgcccgtccgggaggatccgagtggggattttccggtgggcagatggcttccatcgtcggtgcggaggtggtggcggctgaaagaacagcgtccgccctgaggccatcgctgctgccgtttggccaactagagcggaggtcgttgtcgctgctgccggagcgggcggcggtgagccacctggagtctcgtcgccccgcaggccctctgatgaaccctcggccgctctgcgatgagccggggtcgagggcagcggtgtcagcgcggacagaggcagagttggctcgaaaagaagacttcgtcggccggagcctggccggactgtccactagcgggaccagcaccggaatcgagttgccgaggccacgagccgggctggtgtcctcgggggacagctggcttgaggcttcggggcggccggccaagccgtctgctcgggccgggttcctggaggagaccctggcggctcggtcggacttcgccgaaggtggagttgacgccgagggtgctactgctccccctccatcgacgtcttag

SEQ ID NO: 15170 - DNA, 1068 bp, Zea mays
  Peptide Sequence Number=SeqID_58545
atgggacaaacccgaatgttgttcttccgccacgtggggaagacgtcgttgattccgccaccggcgggcgggctgacggccgccattgtcgctgtcgcgcggcggaggaaggagtatcatgtcgtagctgccgtcgagggacatgaactcaagactcccgaaacagagaatcgtcccgggttggagaggttgctggagactacctatctggagcttgacgggaagctgttcgtcaacacgcagcaggcccctacctggcgcgccaactgtcggcgtttcgaccccgggggggtccctggactgacgagtgaattgtcgccgcgtgccccagcccagatgggtcagcgcgagacggagcacgaaggggggaagaaaacaggcaaagggggaaacccgtggccttcgtattgccctgcgcccagagcgcgcgtcaggataaggtgtcaggcgacccttgcattaaatgctcctgcgatacggtcggttggcgtggcgatctggccaaggttgcttctctgcgaagactgggcctcgggcgagccgaagattcctcgagtgatgacaaagcttcaaggccatccatatggtccgcagcgtcaacgcaggcgagttacccgtgcgtcggtcatggtgccccgatctaacaccggtgacgaattcgttggttttggtagctcctctgctcctgtagacgcttcgcgtgggttttcgaaaccccgacctatcccccgaggaccgaacgtagccagggcacgacttctacagcggcgtcgatcatccttctctctgtcacatgacgaggtgtgctcggggcttgctcggtgttttgtgatgatgggttgggaaaggtcgatcgtgacacttatacctgtgaggattgaatctgaggcggtgggggaaaacttgtccagtgccctagcgaatgcggaggagtttgttacgcgcagcgaggagttcggttacgaggtcaaagctgatagcccgaacccaccaggtagacacggcaccaggcttcaggcgactgtgcggggtgtggagctggagaacgggccccatatgtcagcgtga

SEQ ID NO: 15171 - DNA, 135 bp, Zea mays
  Peptide Sequence Number=SeqID_58546
atgagatacttgatcagagatggttggtttacaggtggtgacaaggatgatggttatgactatggtaatggtaaagaagaaggcgtcgaggcgaatctccaggaggtccaggacttcgacgagttcgaggattag

SEQ ID NO: 15172 - DNA, 867 bp, Zea mays
  Peptide Sequence Number=SeqID_58547
atggtgctggcggtcgtggtgctgctgggcgccgtggccgtccttgtggtggtgctgctggtgcagccccgcgcgccgtacgtggcggtgcgggcggcgagcctgtacgcgctggtgtacgggcagacgggggcgctggacgacgtgcaggtcacggtctgggtggaggcccataatggcaacgtgcactcggcggcctacttctcgcgcctcgagtgccgcctcgcgttcgccggcgcgacgctggcggtgctccgcgcctacccgttccgcgtgcccgccaggggcgtcctcccgctggcgtacgtggcacgcgcgcagggcgccccgctgggcgacgccggcagcgccgccatggaggccgcgctccgcgacggcgtggtgccgttccgggtggagggggaggcccggacgcgatggaaggtcagcaaaaaagattttgtctttgggttctttcttattgcattttacgcttccactaaaaagcaaattattctggacaggagaagctttttggaaaaacaggccaagcgcggaccgtccgggctcttgcggcggaccgtccgcgacatcgggatacccctcggacagaaccaatgcaaaaacacaagtttccactacagactgtccggaggaaaagcaaagaccgtccgagccctcgcacggaccgtccggcctcaggcgcggaccatccggtcgccgttgatctacaggggcggaccgtccgcactaggagggcggaccgtccgcgctcagcagaatggcccaacggctaggaagtggttggtggctataaatacaaccccaaccacctccattgattctaccccaagcattccaaccttcaacattcaatacaagagctag

SEQ ID NO: 15173 - DNA, 1644 bp, Zea mays
  Peptide Sequence Number=SeqID_58548
atggcgcatgcttgctctgcccctcgcccgtctcccgctcaccatttgtgtgtgcgcatcctactagcgtacctgcttgcggcgcggtggctcgtgccatcctgctcggcggcttctttcttccgcttcccttggcccgccgagcggcacgactaccgtgacgcgctggccaagtccatcctcttcttcgagggccagaggtcggggcggctgccgcctggccagcgcgcgtcgtggcgcggggactccggcgtgtcggacggcgccgcggccggggtcgacctggagggcgggtactacgacgccggcgacaacgtcaagttcggcttccccatggcgttcaccaccaccatgctggcctggagcgtcatcgagttcggcgactccatgccgcgcgacgagcgccgccacgccgccgccgccgtccgctgggccaccgactacctcctcaagacgctcgcccaccccggcgtcatcttcctgcaggcaagcgcgcggcattgctgcgcacgcactgccacgttcgttcatgtcgcactcgcagcagagcagggggtgggcgatccgtggaaggatcacgactgctgggagaggccggaggacatggacacggaccgcacggtgtacaacgtcagcgcggggcgcccgggctcggacatcgcgggggagacggcggcggcactggcggccgcgtccatggtgttccgagatgacgacccggagtacgccgagacgctgctcacgagcgcaaggaaggcgttcgagttcgcggacacgtacaagggcgcgtacagcgacgacccggacctcagggcagggggctgccccttctactgcgacttcaatggctaccaggacgagctgctgtggggggcagcatggctgaggagagcctccaaggatgacacgttcctccagtacattcagaacaacggcaagaccctgggtgcagaggacagcagcaacgagttcgggtgggacaacaagcatgccggcctcaacgtcctcgtctccaaggagttcatagaaggcgccgcgctgcctttgcagtcgtacaaggagttcgcggacagcttcgtatgcacgctcatcccggagtcgtcttcttccccgcacatcacgtacacccccgggggcatgatctacaagcctggaggcagcaacatgcagcacgtcacctccatctctttcctgctcctgacctacgccaagtacctctccaagtcctctcataccgtcgactgcggagacgtttcagttggccctgaaactcttcagctgcaagccaaaagacaggtcgattacctgctaggagacaacccgatgaagatgtcgtacatgatcgggtacggcgaccggtacccgcagcggatccaccaccgggcctcgtcgttgccctcgatcagggaccatcctcagccgatggcgtgcaaggaaggcacgccgtacttcaactcatccggtgcgaatcctaacccgctggtcggcgcggtggtcggcgggccgggggaggacgacgcttacgaggatgaccgtgcggatttcagaaaatctgagcccaccacctacatcaacgctcccttggtaggggtccttgcgtacttcgttggcaacccgaatcctggtcataacaccagacattga

SEQ ID NO: 15174 - DNA, 1095 bp, Zea mays
  Peptide Sequence Number=SeqID_58549
atggggtcgtattcttggctaaggtacttcacccagggggccaccaccatcgtctttagaaaccttagcgggttgcttcgtattaagatggttcgcactctccaaaccacccgcgtcaacaccagctatgcccctcagccccggcaggtcccggtctacccagtggtagtcgaggaagctccagcgaatctcccttccgtccaagtggagaacgtgatcaacctggaggacagctcggaggagcagctgccgacccccaccccgttggccgagtccctggccttcgcagctgggtcatcgacgtcagcatcgtcggcaccagccttccaagcacctgcacctggaggcaacgaccccgacgactccggagacggcgatgacgaggatgacgacgacgacgatggagaggatgagcacgtcaaccaggaagctgactacgcccagcaggaccacttcatggggattggtccagttgtcgaacattatacatcaatgttcgagacaggacacttccccaacctgctgcaggcagtgctgcatgagctaggagcctacgtccgccccctgtacgagacgaggcgagtgagcgagcctccccgggcttgctattacatcactcgcatccatgtcagggtaatggatgcaggtgacaggggattcaggactctgtctgctcaagagtgcctgataccgctgtccacctacgctgcctcggtcagcgatgctgcccgtcggaccctgtggtcgctcagccacacctaccggcagcagctgcagaacacgaggttcaggcaccttcctcagtgcctgcgtggagaaagccagaccaacattgtcccaggtgaacctggtgaggatcgcctcaacaccctagctggtgtagtggccggtctcaacaccgacctggacagtgccactctggacctctacagtgtgcacttggagctggagaatgcccacgccaggattgcagccctggaagcccaactgcaaggactggatccgccagaagctcaggtccccaccgtggcgttgtctcctccccgcaagaggctgcgctatggagagcccggatccgtcactaggctgctttag

SEQ ID NO: 15175 - DNA, 1404 bp, Zea mays
  Peptide Sequence Number=SeqID_58550
atggcggggttccctctaggtggaggaggccacagccgcgacgcccccgcgtcgtccgtcccgccggtgcacccctccgacgcagcgtccttcctctacgccgcgcgcgcgggagcgggcctgcagctatggcagcagcacgagcagcaacagcagcacccgttctacacctccaacatcatccgcttctccgatgacccgaccggcgccccgccctcgctcacgggcgccgcgtcgtcgtcgtcttcgcgcggcacgaggggcggcgcgggaagcggcggcggaggcggcggcggggtcagctgccaggactgcggcaaccaggccaagaaggactgcgtgcaccagcgctgccgcacctgctgcaagagccgcggcttcacctgcagcacccacgtcaagtccacctgggtccctgccgccaagagacgcgagcgccagcagcagctcgccgtgctagcggcctccgccgccgccacaaccgccggcgccggcccatcccgcgacccgaccaagcgccctcgcgcgcgcctctccgtcgccacccccgccacgtcctcgggggatcagcagatggtcacggtcgcggagaggttcccacgggaggtgagctcggaggcggtgttccggtgcgtgcgcctggggccggtcgaccaggccgaggcggaggtcgcgtaccagaccaccgtcagcatcggcggccacgtgttcaagggcatccttcacgacgttggccctcacagcttgcctgccgctggagtcggaggcggcgccatcgagtaccacttccgccacgccggggacggattgccgccgagcacggcagccactggcgaagcaggcggcggtggcgtggggagtgtcgtcgtgtcatcggctgtggtgatggacccgtacccgacgcccggaccctacgccgccttccccgccggcgcgccgttcttccacggccacccgagacagcgaccgacggtggcgctccaccatgatcgagcgacggtggcgctccacagggagctcgctcgcctcgccgccaggtccgtcgcgcgcctgcctgctggggctgggctcgacgggagcggaaccgccgaggaggccgagatggccgccgcgctcaatgacgtcgcggccgccagcgccgccgcctccgccgccgtgttctcggccgccacgtccgtgtctgccgccgcgtcgtcgtgctcgaacaagaaggccccgacggccttcgtggctgctgccttcgccaagaagccggagacgccgacgacggccgatgtcgcgcaggagaagcacgaggagcttgagcgatgcatcgacgagtgcgagagcggcagcgaggtggtgttcagtagcattgttcggaatagggtttcgttgctcaacatccatagtccgacgatctag

SEQ ID NO: 15176 - DNA, 504 bp, Zea mays
  Peptide Sequence Number=SeqID_58551
atggcgcttcctgttgacgtggcgggtccgtgccctaggcagggtgacgtgggggctcctccgaagccgaggttgagtctgtcttctgttgccgaggccgagcccgagccatgggcccgagtccgagccctggggtcgggcggagcggagttcgccgtcttccgggtcttagcccgagtccgagccctggggtcgggcggagcggagttcgccgtcttccgggtcttagcccgagtccgagccctagggtcgggcggagcggagttcgccgtcttccgggtcttagcccgagtccgagccctggggtcgggcggagcggagttcgccgtcttccgggtcttagcccgagtccgagccctggggtcgggcggagcggagttcgctgtcgcgcctttggcaaggcctgactgcctgtcagactcactctgtcgagtggcaccgcagtcggagtggcgcaggcggcgctgtccttctgtcagactggccagaggagcggtggagtga

SEQ ID NO: 15177 - DNA, 117 bp, Zea mays
  Peptide Sequence Number=SeqID_58552
atgacggccaaggcgtcgagcacatccagcgactattggcagctgcggagcaagaagctggcggcctccagccactccacctcctgggaggaagtaggtgtcgccgcatcttcctaa

SEQ ID NO: 15178 - DNA, 609 bp, Zea mays
  Peptide Sequence Number=SeqID_58553
atggctctcggggaacagacgcctcggcctggctccccggggtcacctcaactcccccggccgaggggtcaagtaccctctcggcgtttccggcgacggctccctcgggagcccctccctctcctgtcgacgacggagcttttccaaggcgtctcgagcccgcctccgctcgcgggcccgggccttctccgcgtccttctttttcttcttctcctccgtggcaacccgccgcgctgctcggtccaccgcatcctgcgggacccgtggcagggaaggcttgtgccaccctacctcctggagacggatggaaatcccgaccgtaagaaccaggggcaacccgacgcaagaaaaaggaaggagcggacactcaccagagtcacgcacccttggtcagggcgcatcaagggctgggagaaggcgctggtgtccggttttcccaacgcgacggccacccgcccgtggagaacgtcgaagggaagaggatccgaggacatccgcgagccctccaagtcagcctccgtcgtcatctcccaaaacggcaaccgtcgctccgccaagggaagcaccctccggcggtggatggcggcaatcactcccgcggcggtgtaa

SEQ ID NO: 15179 - DNA, 1107 bp, Zea mays
  Peptide Sequence Number=SeqID_58554
atggcgcctcctgttgacgtggtcggcccgcgccctaggttgggcgatgtggaggctcctccgaggtcgaggtcgagtctgtcttccgtggccggggtcgagtccgagcccctgggtcgggcgaggcggagaccgtcggctgaggccagggctgagtccgagccctggggtcgggcgaagcggagttcgtcgtcttctggggctgagcccaagtccgagccctgggtcgggcggagtggagttcgctgtcttccggggcttagcccgagtccgagccctgggtcgggcggagcggagttcgccgtcttccggggcttagcccgagtccgagtcctgggtcgggcggagcggagttcgccgtcttccggggctgagcccaagtccgagccctgggtcgggcggagcggacctgagtccgagccctgggtcgggcggagcgaagttcgccgtcttcaggggctgagcccgagtccgagccctgggtcgggcgaagcggagcttcctatggccacctttgcattaaatgctcctgcgatttggtcggttggcgcggcgatttggtcagggttgcttcttggcgaagacagggcctcgggcgagccggaactatgtgctgataagggttaccagctgagaattaggagccttgaggttggattctcctgcgtcccaatcacgcagcctcttggcctccgcgaccgtcccctcccctcccctttcgacgagcgaggggctgtatgctgggcgccgtcgtccgtgtcccgggcccgatcctacctttcctgcccgggccgacgcgcccctctcctccgccgccgccactacctcccgcccgaaacgcccatggcctcggccaccccttgcgatggcggcaccgggaagcccgacgccgcgccggctcccacgcccgcgccaacgccgctgccgcccgagaagcctctcccgggcgactgctgcggcagcggctgcgttcgctgcgtctgggacatatatttcgacgagctcgacgcgtacgacaaggccctcgccgcgcgcgcggcctcctcaggctccggcggcaaggacgactctgctgataccaagcccaaagaaggtgccaaatcctga

SEQ ID NO: 15180 - DNA, 2220 bp, Zea mays
  Peptide Sequence Number=SeqID_58555
atggctgccccgctgggctttttctgcatgctgctgcttcttcttcttcagctgggccactcttcttgtaacaatgtgtacattgtgtacatgggggcgaggaatcccgagctgcacccggcgctggtccgggacgcgcaccacggcatgctcgccggccttctcggcagcgagcaggcggccaaggacgccatcctttacagctacaggcacggcttctccgggttcgccgccgtgctgacggacagccaggcggcgcggctcgccgtagcaactgggattaggactgacatttcagttcgaagactgaggtgtcctggtggtccgcgctttgcaggaatctggccagagtcggccagttttagagacgacggcatgagcgaggctccgcggcggtggaaagggcaatgcgtcgccggggacaggttcaatgtttccaactgcaacaggaaaataataggcgcgaagtggtacatcaaagggtacgaagccgagtacgggaagatgaacaccaccgacatctacgagttcatgtccgcgagagacgccgtcgggcatggcacgcacacagcctccaccgccgctggtgctctggtagccggtgcaagcttcaggggactcgccggtggcgtcgcaaggggaggggcacccagggcgaggctcgcggtctacaaagtgtgctgggccaccggagactgcacttcggcagatatcctcgctgccttcgacgacgcgatacatgatggcgttgacgtgctttcggtgtccctaggccaagcgccaccgctccccgcgtacgttgacgacgtcctgtccattgggtcctttcatgctgtcgcgagagggattgtcgtggtctgctccgcaggaaattctgggccttattcagagacggtgatcaactcggcgccgtggctcgtgaccgtcgctgctggcaccattgataggactttcctcgcaaagatcatccttggcaacaatagcacctatgtgggtcaaacactgtactctggaaagcatcctgggaatagcatgcgcatattctatgctgaagacgttgcatctaataacgcagacgatacagatgcaagaagctgcactgcaggatctctgaactcgactctagtgaagggaactgtggtactttgcttccaaacaagggcacagagatcagctgcagtggcagtggagactgtcaagaaagctcgtggcgtcggagtcatcttcgcccagttcttaactaaggacatcgcgtcttcattcgatattccctgttttcaagtagactaccaggttggaacagctatactcgcatacaccactagcacgagaaatccaacagtccagtttggctcagcaaaaacgattcttggagaactgatgggcccagaagttgcatatttctcatctcggggtccaagttctctgtcccccgctgttctgaagccagacattgctgctccaggtgtcaacattttggcagcatggactcctgctgctgccatatcatcagccattggatctgtgaagttcaagatcgattcgggaacctcgatgtcctgtccccacatctcaggagttgttgctctcctcaaatcaatgcatcccaattggagtcctgctgcagtaaaatcagcacttgttacaacagccagtgtccatgacacatatgggtttgagattgtatccgaggcggcgccctacaatcaggcgaacccatttgattacggaggcgggcatgtggatccaaacagcgctgcacaccccggtcttgtgtatgacatggggacatctgactatgtgcgcttcctttgctccatgggctacaacgtctcagccatcagctccctggctcaacagcatgagacctgtcagcacacaccaaagacgcagctgaacctgaacctgccatccatcagtattcccgaactgaggggcaggctcactgtgtcaagaacggtcaccaacgttggctcagccttgacgaagtacagagctcgtgtggaagctcctccaggagtggatgtcaccgtgagcccctcactcctgaccttcaactcgacggtgagaaagttgacgttcaaggtgacattccaggccaaactgaaggtgcaagggagatactacttcggcagcttgacatgggaagatggcgtgcacgccgtgaggatccctcttgtggttcggacgatgatcagtaagttctatgccaattcatga

SEQ ID NO: 15181 - DNA, 378 bp, Zea mays
  Peptide Sequence Number=SeqID_58556
atggacatccatggaggtgtgggaaggagagctcacctgaacaccctcgggggctgggttgcagcttgcgctacccaccagagccggatcactaccggcaacaccctcggggactgggttgcaacttgcgctacccatcagagccggatcactaccggcgacaccctcagggggctgggtaactgccagcaccaccctcgaaggctgggttttctacagcagccgcctctaaggctgaaggctcccctgtcacctccatgggagtcgagcaactcggaccaacgtcttggcattgaagattgctttccaaagtcgatgatgcacgagatactactcgggatacctccaatcccacgtctggaatttctgaacaaatag

SEQ ID NO: 15182 - DNA, 315 bp, Zea mays
  Peptide Sequence Number=SeqID_58557
atggcgacttacatggaattacacggcgatgggctccaggcacggtatggtgcggacttcatggtggtggcgccctccgatgaggaattccgcctcaccggtcgcaccaccagcccggacgaggagcagccatccaccagaggtcccgcacgagcacccggggtccccaagtgtgtttcgaacagccacgtcggcgcagatccatggtggcggccctcttcccctggtagcgctttcggaggcgaggtgcaaggctatggggaagacatggctaggttttatacttgtggtcggagtctggccaagggagcatag

SEQ ID NO: 15183 - DNA, 117 bp, Zea mays
  Peptide Sequence Number=SeqID_58558
atggagagtcatgatctccgggcagaatgggaatcacggcttgtgggtaaagcaggagaagaagacgtcgaggcggatctccaggagttccaggacttcgacgaattcgaggattag

SEQ ID NO: 15184 - DNA, 450 bp, Zea mays
  Peptide Sequence Number=SeqID_58559
atgtcagatcaatccacaactctagttagagtgaggacaaaggaaaccaatttcaaaggccacaacatagctcacagtcttaagggcaacagcaaagctccttcaggccaccagctccaagggccagaggcagctggggcttcggaggaagatatggggatcaacccaggaaaatctattgcttattctgtggtgaagactagggccacactacaagaacgtgccagattaccgttcagaagcaaaaagagattgccgaagcagaagcccggcagaaccagtcgaagcaggttttacatactgcttcatgctactctccctacattccagaatatgtgggcaatcaacctgcagcttctgttgcttcggcaagccattcacaagcttcctggcctcagcttccactaccaccaccattgccacctactcatacccaaggccagcagctag

SEQ ID NO: 15185 - DNA, 432 bp, Zea mays
  Peptide Sequence Number=SeqID_58560
atgggcaagaacaacaagcgcaagcgcgaaccgactcctccatcggaggatttcggtgactcggaatactcggaggaggaattctcctccgagtccgaggggtctccggctcccgtctctcccccggcgtcgtccgatgactcggacgactcccaggggatagccgcggaggtctggacgtacatccgggccgtcgagcgctccgggctcgaaggctcggatgagtcggagtactcctcggatgaggaggactcggacggcggcgacgagggtgaaggcgacgacgacgatgacgacgacgacgacggcgacggtgacggcagcggcagtggcaggggcggcggcgacagcagcagggacagcaccaagggtggcggcagcaagggcagcaccaagggcggcggcggcggcaggggcagggccagtggctag

SEQ ID NO: 15186 - DNA, 1460 bp, Zea mays
  Peptide Sequence Number=SeqID_58561
atggaggcgcgggcagcgtcggtcccggacctttcgctgcacatcagccttccgagcagcgccgcgtctccgtctcccgccccggggctgggcgctggaggagtagggcgtggtgcgcagccgtccggaggggacccgtggcgccgtctgaacggatccacggcgtcgaccgagctgtcgctctcgccgccgccgccgcggcaggaggcggctgccggggacgtccttccatggcggctccggccgccagcggcgaattactcctcgtccaccgcggaggcaacgttcttgccggtgaccgtgccgcggctttcgttcgacgccgcggcggaggcggcgccggcaaggccaatcaacggagtgcccgtctacagcagcccgcggaccggcgccgcccatccttttcttggcgccggcggcgaataccggcagtgccaccaccacaaggccgccgtggggctatacaatccctaccactcctcgtcgtcgtggccctcgtccctgcggtcgacgacgacggcgccccttggcgccgtggcgccgccggcgtccgaccccacggcgtcgtcgtacctctcgccgtccgcgtaccaccggatgctgtcgagcaccggccggctccacctccagggcgtgctcgccgacacgctccgcggctacggcagcgggcaccaccaccgccagcacttgggcagcctggccgcggcccgctacatgccgaggctcccggcttcccggcgcggcatgcgcgcgccgcggatgcggtggacgagcagcctgcacgcgcgtttcgtccacgccgtcgagctcctcggcggccacgagcgggcgacgcccaagtcggtgctggagctgatggacgtgaaggatctgacgctagcgcatgtgaagagtcatttgcaggttgagttccggccgatgaggaccgtgaagagcactgataagccgcctgcagcaacctcatcaggagggggagggccgcctgtggacggtggtggcgggtccggcgacgacgaccacccgagcgattggcggcgggctccatcctcatcagctggtcgggacgtcagcccgcaggcgttcactggacaccggtcagcctcctcggacggcgcggcaagccatgcgggcggcgacgttgaatgctcctccgccgacgattccgacggtggcaggccgcgcagtgcttctccgccaagggaaggagccacccttgcagcgaggttgcggaccgttcgtgccgccgcagagggcatcgccaggcggtacaccgctagggacgaaggttgcagatctacaaaaatctcaagaaaaggtctcaacgttgtttctccagacagtgacacaaggttgactaatttaccgatcgctaagcatgaggaattagaagactacagggagaaggtggacgaggagttccagcaacaaaaagctcagtggcgcgaggtggctgagaagtg

SEQ ID NO: 15187 - DNA, 435 bp, Zea mays
  Peptide Sequence Number=SeqID_58562
atgggcaagaacaacaagcgcaagcgtgagccaactcctccatcggaggattttggtgactcggagtactcagaggaggagttctcctctgagtctgaggggtctccggctcccatccccctgcgtgagtcgtctgacgactcagacgactcccaggggctcgcggcggaggtctggacgtacatctgggccgtcgagcgctccgggctcgagggctcggatgagtcggagtactcctcggatgaggaggactcgtccgtggaggacggtggcggcgacggtgatgacgacgacgacgacgacgaaggcggtggcggcggtgacggtgacggcagcggcaggggcggcagcagcggcggcaaggatggcgacggcggcagcagcaggggcggcagcggcggcggcggcagaggcagcaacagggccagtggctag

SEQ ID NO: 15188 - DNA, 344 bp, Zea mays
  Peptide Sequence Number=SeqID_58563
atggctaatcccaaagatcacaacaatgtcgtcctagacattaacacaaggctgactaactcgccggccaatgaggatgagaaattagaagaccacatgaaaaggctggacgaggaattgcaacgacaacaggctcagataagcaaggtggcgaaaaagtggtacctctcgcacttcaaggtagatcaccaccagaaggtcgtcaagaagagggaagtaaaggaagacaccgctcctgcgcccaggtcgcggaccgtcggcgccgtcgcagagggcactaccaggcgatccggcgacctgacgcaggccgccactactgttcaccttgcggagccgaacccaag

SEQ ID NO: 15189 - DNA, 615 bp, Zea mays
  Peptide Sequence Number=SeqID_58564
acggctgctgacggccctttgccgagcaccgccttcgccgagtgtttagcactcggcaaagatatctttgtcaagtgtaattctttgccgagagtccttctctcggcaaacgagttcgttaccgagaacaagactttgccgagtgcggcacttgacaaatgtttttttgccgagtgcccgacaaaaagcactcggcaaagcgccgagcactcgacaaagccacagattccgaccacagtgaacgcgcctcaccgtagaagtattcaacgtactccgtggaatgggatcgaaggaaactgtgcaatgtggatgagggtgaagcaaaagatcgttcagctctgcaggcagttgaacaagccggtcatcgtcgcctcccagctcctcgagtcgatgatagagtaccccacgcccaccagggccgaggtcgcggacgtctccgaagccgtccgccagcgcgtcgacgccctgatgctttccggtgagtcggcaatggctgaacctgcagtgggatctgacagaggagggaggaaggaaatggcgctgcatgcgagaggaagacagagaaggaggagaaatgggaaacagacggcgtgcgttgaggccgtaagggcataa

SEQ ID NO: 15190 - DNA, 150 bp, Zea mays
  Peptide Sequence Number=SeqID_58565
atgggaaccaatggccatctcaacctcgacacgggaggtaaatccgtagatcaaaaggtcgtgcaggaagaagcagcttcggctgaagctgtttgtacgagataccgaaggatgcagttcatgaagcttcggaaatgcaaaccgacttaa

SEQ ID NO: 15191 - DNA, 390 bp, Zea mays
  Peptide Sequence Number=SeqID_58566
atgagcagccatgatgccaaagtgctgcaaaacttggtcctcaatcttgcatcctcagtggaaactggtgcattgaatattagaagctttctagaagaggctttcctgcatttgggtgacgagcattaccttctgaatgcactacttgtaattcgaaaggaggtagacctgatggagcaggatgcgctagagagcaaagcaaggtcagacccagagaaggagaggatggaggaagaaattaaacttgtggagcctgcgaacccagtgggtagacaatttcctttcaccccccttcctcaccagaattgtatgaggcgagtgacaatgactcgtacgactccgacaggtccactaggtatagcatttggaaccagtaattgtggtacctag

SEQ ID NO: 15192 - DNA, 832 bp, Zea mays
  Peptide Sequence Number=SeqID_58567
atggctgacaacaacacaaacacacctattcgacctactactgccggccccaatacaggtaaccagattttccccccacccatgtgggatgctcagttctggcagggccaaggattagacccaacccatcctggtacaattactggtactacatcccagatgatcaatcctacctggtcccagggagctaatgacacatcttcatatccctttcggaatccatggaacccattttttggtatgatgaatccagggggtcctccaccacaaacatcattcggtcaagcccagtttgtaccacctactccatatccccaggttgatacccatgtcaccaaccgtactgaccctataaatttggaatcagaagcaaagcacagtgtccaggaagtaaacagccctaccaaaccttcagacacacgtgggacagttaggaggacaaaggaacagaacttcaaacctgatgaagaccttttgctttgcaaaacttggctagagattagtagtgacccagtcattagcacagggcagaggaaggagggtttatgggctagaattgagaaaaggtacaataaacttagaggtgagtttccaatgagacttaatagggctttgagcagcatatgggacaaaataagggctaaaacaggcaaatttgcaggattctacgctagagtcctaagggaaaaccagagtggcctaacagacaacgacaaggattccatggttcatggaagcccctggagaggcaatgctgggatggagcctgttggtagtgggacaccttcaggttctgttaatgatctggaaaatgaggaatcaggttcaaaag

SEQ ID NO: 15193 - DNA, 93 bp, Zea mays
  Peptide Sequence Number=SeqID_58568
atggcgagctccgaactcaactaccctgacagcttctacgccgcgatctacgctgggtcgggagacaccgcccctgatggtagaggtgcataa

SEQ ID NO: 15194 - DNA, 1488 bp, Zea mays
  Peptide Sequence Number=SeqID_58569
atggacggcgaggccgagccttcgtggatcacgatccctcccgatctattgattcatgatgacggtgacaagatcctagcacttataactgaagtgtacccaaattttattgcaaatcacagaaactatgattacctagctgtgcgggctatcatttgtcctaataattcaactgttgatgacatcaacgagcgtattgtttcgatgatggcagaggttctgattggtagccttatgattgggaattgcagtgacaggttgtgtgtccgtgtctcccgtatgtgggaattttatgatcctcaggatgagtcgaagctcctccacgctgatatggtcctcatcgatgaggagggtggcagtgctcatgctcaaatataccctccactcgctgccgttttcaagcccatgataaaggagggcaatgtctacaacatctcctacgttcagatcaggaaagcaaataggatgtacaagcctgttgacaacgatatcatgatcggtttcacaaaatggacgacaatcgaggcgcttattgaagtgccaccggcttttccagagattgtttactccctcactccctttgaccagcttacaacccttgtggacattagggagtatttcatagatgtcattggcgcggtcaccatgatctcggatgtcgcaaccattcgtacaaagatgcgccagactcaaacagcaaagagatccatcactatacaaaatgagagctgtactccccttgaggttgtgctgtggggtgagcaggcaacctccttcccggctgatcagattagtattgccggccaggactcactccagattattatctttgttggtactcttgctagatcctatgctggttccagaggcaacaagccttgcagccagaaagttgagtggttggtaacagttaccgttcttaagattgatcaactatggtggtacgagtcctgtagaaagtgcctcaagaaaacaaagtctcatggtgatgcttataaatgctcggactctggttgtggccatgttggtccgcctaatccaaggtacaggttgctcatcacagcaggagatgagacaggcgagactgatttcatagtatttggacgtatggcacaacgcattgttaagaaaccacttgacatcttgatcgtggataatccacccggatttattcctgatgaaataactaagctgatggaaaaggtgtacacattcaacgttaacacggttgtcgccgagattggtgatggaggtcaggttccaatttcacccagtggatcccaaccttcatcaatttcgtctgcgcgggctgcatccaagtctacgtcagcagactctgtcccaactggaggtatctcttctcagacaccacagagcaccaaaaactacggcaaggataagacttggctaaagtttgcaacactcgatctccagatcattactttgcaacctaatgtgcccttttgccgatatacgcagttggtgtga

SEQ ID NO: 15195 - DNA, 765 bp, Zea mays
  Peptide Sequence Number=SeqID_58570
atggagagctgggtccgcgcggtggtggaggccatccactcctctcgctcccagacagtcatctacctcgccggcggtgcatcccaggcgctcggttggctcctctccgtgcccggcgcttcgggcaccgtcctcgaggtcgtcgtgccctactctagggcctccatggcgcagctccttggcaagatgcccctgcaattcactagcaagcaggctgcagaggacatggcactggccgcatacaatcgagcactcaagctttctggaccaggtctgcaagttatgggtgttggatttactgggtcactggcgagctcacgtccaaaacatggtgaccacaggttttacgtgtcaacatggacacataattgtctcaggacatcacatgttaccttgtcgaagggtttacggagtagggaggaagaagacaaggtttcaagctactttttgcttaaggcaatagcagatacctgcagagtttctgcaaccattcagtcagacattcacaaatctgaaattccagaagaaatcatggaacaatttgatgaagatcaagaactccagcaagttattaatgggcaagtttgcatgaaagtatataattttgctgaaattaagaggcgtgttgagcaatttagaaaagcagggaagaatgtgattatatctaaccagccatacttctataagaaagcagaacttttcccaggaagcgcttttataattggtgcagacactgcagcaaggcttgttaacttgttttattag

SEQ ID NO: 15196 - DNA, 498 bp, Zea mays
  Peptide Sequence Number=SeqID_58571
atgggcaagaacaacaagcgtaagcgtgagccaactcctccatcggaggagtttggtgactcggagtactcggaggaggagttctcctccgagcccgaggggtctccggctcccgtctctcccccggcgtcgtccgatgactcggacgactccccaggggatagccgcggaggtctggacatacatcccgggccgtcgagcgcgccgggctcgaaggctcggatgagtcggaggactcctcggatgagggggactcggacggcggcgatgagggtgaagacgacgacgacgacgacgacgacgatgacgacgacgacggcagcagtggcaggggcggcggcgacggcaggggcagcaccaagggcagcagcaggggcagcaccaagggcagcagcggcggcagcggggacagcaccaggggcagcagcaggggcagcaccaagggcggcggcggcggcaggggcagggccagtggctaggtgccactggtcttcttag

SEQ ID NO: 15197 - DNA, 912 bp, Zea mays
  Peptide Sequence Number=SeqID_58572
atggggtgcaccagcgtcgccttgctcttgttgtcattggaggagcgcggcctcgtggagatcggcgctcttcagccatcgctcggcttcaaggattttcatcgtgcagcccggctgcattccctcaccaatggatcttcgtcatccgggctgaggcggaggagcgcaccgagtggggggttgcctctgcgtgggccggtgacacttttcttcccccagcgtttgggggagaaaggcatcctccagccctacggaggcgtcctccagccatgcgagggaaggcgaactgctactccctggacagggtgcagctttccgtccttcgtccgggcagcggtcgtgccgtgcgcgggccggccacgtccaagtcctcctcgcaccgtcagccgcgccggggggtcgcccagcatgtcgtacgccgcgagggcggtgctcgtgttctggggcggccttggcgaggacgggagtgaggacctgccggtgcgctttggggcggccgctgttcgccggcgcggtgtcggtgggttcgaacccacggtcggcgccctccgactctttggccttaacggcttgtcctcgcccctcccgcccaaggtggaggtcgttgtctctgctgctgcagaggtcgccggcaagccgcttggacttcgtcatcccgcgggctccctgaaccctcggctgctctgcgatgagccagagccagaggcagcggtgttagcgcggatagaggcagagtcggctcaaaaagagacttcgtcggcctgggagctggtggcttcccaggccgaggaagatgtggcagcagccgctggagcttggccaagacatccgctggtgcggtgctggcgtcctcccttaggtggaggtcctttcgcccgggtcgccgcccgaggccgggccaggttccgctga

SEQ ID NO: 15198 - DNA, 576 bp, Zea mays
  Peptide Sequence Number=SeqID_58573
atggcgctttcccccctcctccttgtggaaaggggacgcaggggcgaaaacagcgccgctcgccccgctccgactgccgtgccaaccacccaggcgaagactgacaacaagtcacgatcaaccactgagttcagccctgggcgcaagaggaagctccgcctcgcccgacctcaggctccggcctcgggaggaggtctccgcctcgcccgaccccccgactcgaccttggtctcgggaggaatcacgtcctcgctcgacccccgtcctcggcctctagagaagtctctgcctcacccgaccttgggctcggaccgaccacgccaacaggggatacatcattaccctatccctagcctgctcaggctacaaggaacaagaccggcgtcccatctggcttaccccggcgacggcccaacaacggtgctcctgctcctcgcggtggtgctcgcaaccactcaggtgactcaggtgctccggctacgcagatctaaagtgtggaacgactttgatgaactgatccacatcgtcaatgcctttgtctcagagttatcttcatatctggacatgaagacttaa

SEQ ID NO: 15199 - DNA, 981 bp, Zea mays
  Peptide Sequence Number=SeqID_58574
atggtacatgggttatttttcagctcgcttcgcccctgctcaccgccgccacatcctcctcatccgacacctccgccgccatcgggtgctctggacgctacttaccgccgtatcaaaagtgactcaccagcgcgcgccacccaccgctgcctcgacaatggcttggaacccatctacgccgctgctccagactcaccgccatcacatcctcctcatccgtcacctccttcgccgtcgggtgctccggacgtttcttgtcactgtctcaatagtgactcaccaccacgtgccacccaccgccgcctcaacaatggctcgaaacacatctacgccgctgctccagcctcaccgccgccacatcctcctcgctcgtcacctccgccgccgccgcagccggtttctccgggcgctacttgcagccgcctcaacaatgactcggcaaccatccgcgactccgtcgccccaacttcaacgccgcctgttgctccgcgcgccgacgccggcgaccatgtcatgatgttgttcccaggggcgactgagcgacccgcgcagcacggcactctgcagagtctgctgagccggggcgtcacgtcagtcgagggccaagcgcagtgcaagcgctgcggcgccaggaaggccatcgcctacgacctggagtccaagttccgggagctgcacgactacatcgtcatgaaccgtcacgccatgtacaaccgcgcgcccaaggcgtggcggttaccggtgctgccgaactgcgacgcgtgcgggcagaagggctcgatgtggccggagatcgcgagcgacaagcgcgagatcaactggctctttctcttccttggcgagatgctcggctgctgcacacttgagcagcttaagtacttctgcatgaacaatggacaacaccaccgcaccggtgctaaggacagagtgctttattacgcatatattgagatgtccaaccagcttttctcgttcgattga

SEQ ID NO: 15200 - DNA, 201 bp, Zea mays
  Peptide Sequence Number=SeqID_58575
atggggtcgtggcatgatggaactagctcgccgtggtggggccgtggtgaggcagcagcagcaccggacgccgggtttgtggcgagcctgttcgactccgtcatgttcaccggccgcctcgacgacctccagctcgccgccgccacgctcggcaactcatgggcgttcacctgcaggcgtcgctgctcacctccacgctag

SEQ ID NO: 15201 - DNA, 66 bp, Zea mays
  Peptide Sequence Number=SeqID_58576
atggagttgatgtcaagtagaagtcctggtgattcaagtcttaggatagctgcagttgatgaatga

SEQ ID NO: 15202 - DNA, 240 bp, Zea mays
  Peptide Sequence Number=SeqID_58577
gccgcggcggcggcggccccggcggcggctcgcgccgggtgggtcctcgtcgttctcggacgccgaggccggggagttcctgcagggcggcgcccgcgggcgcgcaatggggcgggaggggacgcggccctcgccgcgtgtcggccggactgcctcgccgccggcgtcggatcgggggcggaggaactggttttggcgaaaccaaaatggtttcgtcacgccgatcctaccaggtggcag

SEQ ID NO: 15203 - DNA, 294 bp, Zea mays
  Peptide Sequence Number=SeqID_58578
atggcgaagcctggccacgctactccacctggtcctctcttgcggaagcaacaacccactcgaccgtctatcccggtggcagggatgaaggccaagtcacaccatcaaccaaatcaaggaggtacctgcaaaaattatgccacaagcaaggctgagtatactaatactcagctagacttacccggcctcaccgccttggcatacaatgctccactgaccccgactgccgtcgtgcagtggccgcacttgtacccaccatatctagaatgggagacccagtctcaggtcgcatga

SEQ ID NO: 15204 - DNA, 321 bp, Zea mays
  Peptide Sequence Number=SeqID_58579
atggcgcctcctgttgacgtggctggtctacgccctaggttgggcgaggtggaagctcctccgaggccgaggtcgagtttgtcttccgtggtcgaggtcgagtccgagcccctgggtcgggcgaggcggagttcgtcgtcttctagggctgagcccaagtccgagccctgggtcgggcggagcggagttcatcgtcttccgaggctaagcccgagtccgagccctgggtcgggcggagcggagttcgccgtcttccgggacttagcccgagtccgagccctggtttgggcggagcggagttcgtcgtcttccgggacttag

SEQ ID NO: 15205 - DNA, 1023 bp, Zea mays
  Peptide Sequence Number=SeqID_58580
atgaacaaaaagaccggcattcaaggtgccattacaaacgggactccggttccgtccccgcggctgggcagcaacagttcgccttccccgacgtggctggaggacgcctcctctgcagagctggggggtggtttccaccaccagaagctggaagaggaggtggccagacgacccgtgcgggaggtagagccccggctcgcctcgctctccgccccagcaaggatggggctggtggtcaccgtctttgtgaccaccggcgaggggatgcaaccgggccgcgtgatgaaaatccttgaagccgaacgatggctgaaaggaccatcttccacgaaccgtcgtgggctaagtcttctccaacacgctccaagttcctccccctatggcgcgggggctgggtcccacgcgtcatgcaagctggcccagggcagaagaagccaaaccgccgcgcgcggtgcatgcaaccgcccagcggttacaagcattcctccacttccgcccagaccagcgggtgaaaggacggacagccgtgcaggcggcatgcaaccgcgccaagtgggcgcgcccctccgacttccaacgcacccagcatggaggcccgggcccacgcgtcaggcaaccggcgcgccggttgctacgtacgagcaactgcaccgccgctcgcaccactaccacgcctcctcgaccgcgggaccagtaccgcgactcgaggcaaccctgcgtacgaccaggcagtgccagccaggcgcgacggtcaatacggccaaaaatgggacagcagtaatggtggtggcaagcgggcaggagttgcggtcacgtcgtcagccaagcttacgtcccatccgggggcagcgagagaaccctctctcatggcgtgaagacggcgcgcccgtgttccgttcctcgaatggctcgcgcacgcgcaacttccacctcgcgaaccactcgccccgtcgcattaactccgcggcgggacaagcggcgcctctggcaggagaagcaagcgacgctttgccttcaccataa

SEQ ID NO: 15206 - DNA, 1137 bp, Zea mays
  Peptide Sequence Number=SeqID_58581
atggacagcgcggtgcagctgctctggaccgcgtccaagcggcggcttcgcgggagcttgtcgtacacagtggcgcatgcgaccacgcaaacccgcgtcgataggaagaaaaccccagtggtcgcgcagtctttcctttcgtctgaggcgactcgtcaggcgattttcgccgctccaatccagcgccgctccaatccagctgagctccttcaatcttcgagcattggagcccgattcaagagcgtccaatgctttcccagaagttccaggagccccgatattaggtcatctgcatttcttctagatccagtgtatctctcgacattcatagacctagacgaaggcagtggatcagctcaccaagatgacaacccacataatcagaagcaaaatgagccacaaccaacaccagtccatcgttttcgcagaaaggctttagcttgtcgtgtaaaaacaaaacctcctgctccattcacactgtccgacgacgatttcatggatgctcctgcgttgaagcgccaattcagatcaacacactaccggacacagctcctttgccgtgtgtctcagacactcggcaaaggctattttacactcggcaaaggctttgccgagtgtaacactcggcaaagaacgctcggcgaactgtacatcggcaacagtctctttgccgagtactttttgtcgggcactcggcaaagaatttgtcgagtgccatttgacactcggcaaagaaaagtcaccgtcacggcgccaagtgacggtgacggatcctttgccgagtgtcttctttggcactcggcaaagaggccaattttgccgagtgcctgctatcatggccctcggcaaagacgggtccagtgggccccaccgctagtccctgtgccgagagctctcgtaggcactcggcaaaggaggactctttgccgagtgtctagtggaccggcactcggcaaagagtcctccagtgggcccctttgccagtccctttgccgagtgccttggcaacagcactcggcaaagatggctttgccggttcccaggtttccttctttgccgagtgccatggtcagcactcggcaaagatggctttaccggttcccaggtttccttctttgccgagtgccatggtcatag

SEQ ID NO: 15207 - DNA, 1473 bp, Zea mays
  Peptide Sequence Number=SeqID_58582
atggcggatcctgcgcgcgaggcgaatagggcgcgggcgagcgcgaaggctgctgcctctggcagtagcaagccggtggcgcctgcaaaggcagctgctcccggacccagcaaggcagcggcgagcgcgaaggctgccgcctctggcggaggcaggcctcccctgagcgaacctacgaaaggacaggagctgccttcgccggggagacgtgttgctgacttcggcacgaatatcagtgtcgaggattatcttgttggcggcccgacttcgccgaccgtgttgcgtcagggcgtcctgactgcagacgtcgctgccgaagtcgagagtcttcgggcgcagcatgcggatgctatccgagagaagtcggctgcggagagcaaaaaccgtaggctggcggagaaggtggctgccttggaggccgagaagacggacctccagtgccggctggcgaaggagaggagggaggttaaccaggccatcgctgaagcgcaggctgcgcgagcggaggctaaagtggcgcgggcagagagcagtctcgccagccaacgtaccgaggagtgggaggcaaggttcaatgccctgcgcggccgcgtggacaaggccgaggcctcggcacgctcggaggtcgggcggacgcacgtgcagttcgtggatgcgtaccgcgatctgggtgcgcggactgcagacttcgaagtgcccgaccaagaggcaggccttcgcttcctcgaatggttgcaggaggagctgctggtgctcccaactattgtgcagggtttcatgtccttcgcctccctcgtcacctgcgaggggaccctgaatgcgttgtcccgcgaggggtgccgacactacgaggtcttcgaccaatcagacgagaactttgaacgtgaagttttcaagaccgaagaccctgtggtgaagcagtcagcgggggcactctcgacagatgtggggttcgcacggtcgggaggcggtgtgctacagatggcacgtgccgaggatgtcgaggaccttggagatctggtcggcgcgccgcccgacgctgaggtcaacccggtgccgccttcgagtgccagtgaaggctcctcgtctgcacccgtgcctaccgtggccggtgaaggccctttgccagcccctgcgccgacggccgaagatcccctgaaggtggtggctgagccgggttcagggatttttgggcctgcgcacgcaatctctactgtcaatgataattttgtggcggctttcgaccgtggtttgctgaagacgatttttgatgattctgtgtctaagtgttttgagtctgatgattctgggagttcgattgtgtggacagaggagtcttcggatgaggatttggattactttgcggcattggatgtggctgcggtggaggcttcaccgcgtgtaatgggtggtgaggatcttacgggtgcgagtgttgggcataggcggcgaagggcggtggcgaaacggagg

SEQ ID NO: 15208 - DNA, 1269 bp, Zea mays
  Peptide Sequence Number=SeqID_58583
atggctacgtaccgtcggcggcggcaggcggtctgcttgacgcgggccagatcttcgacgagcaggagcaaggagggcaggcgagcggacgagcggacgcgacgcttcgggaaacccgcagtccaacagtaccgcgtccgtcaacgggcacatcaaaaacccccgcggaaccatttcgagcgagggcagcgtctccaccatctagcgacgtcttcggcaccagatgactcagtcgaactggtccctcggagggcaaatgttgaggtgaaggcgaagacgctacccttcgctccagccttcgtctttctcgctgcgccaacggaagcagaagaaccagcgaggtccacccttcgccttgtacactatgaggcgaaggcctacggcgacgtcgccccgtcccactctgtaaccctcctttataggaatattccggggatagtccaggtgcctgaggccgaccccggagggtttacgtctcgcccgaggaccccctacggcaacgaacgcaccttcggctcgcccgaggcccagtcttcaccaagaagcaaccttggccaaatcgccacgccaaccgaccaaatcgcaggggcatttaatgcaaagggctcggactcgggctcagccttggaagacgacgaactccgcttcgcccgaccccagggctcggacttgggctcagccccggaagacgacgaactccgcttcgcccgaccccagggctcagactcgggctcagccccggaagacgacgaactccgcttcgcccgaccccagggctcagactcgggctcagccccggaagacgacgaactccgcttcgcccgaccccagggctcggactcgggctcagccccggaagacgacgaactccgcttcgcccgaccccagggctcagactcgggctcagccccggaagacgacgaactccgcttcgcccgaccccagggctcggactcgggctcagccccggaagacgacgaactccgctttgcccgaccccagggctcggactcagccctggcctcagccgacggtctccgcctcgcccgacccaggggctcggactcgacctcggcctcggaatacagactcgacctcgacctcggaggagcctccacctcaaccaacctagggctcggaccgaccacgtcacaggaggcgccatcgttaccctaccccaagctgactcaggctacggggaacaagaccggcgtcccatctggctcgccctgccaaacaagtaatgatggcgccccgcacgctctatga

SEQ ID NO: 15209 - DNA, 1344 bp, Zea mays
  Peptide Sequence Number=SeqID_58584
atggctgaaaggtaccaactcccgtggagttgcgttcctccaacgacgaagcggaaagacggcgggaatcccccatccgggggcttggaaggtggaaggacacgatgcataagggagcgcgaagacatggtcgccttccaagggggttaccctccttttaaaggcgactctccctacttgcgtccccagccgtcacgggctgagtcttcttcaacacgctccaaggtcttcccctacggcgcggggcctgggtcccacacgtcatgcaagccggctcagagcagaagaagccaaaccgccgtgcgcggtgcgtacaaccgcccagcggttacaagcgactctccacttttgcccagaccagcgggcgaaagggcgggcagccatgcaggcggcatgcaaccgcgccaactgcaccgccacttgcgccaccaccgcgcctcctcgactgcggaaccaataccgcgactcaagggaccgggaaagggggataccccgaaaaggatccttccccgtgaaggaaccaggctccgagcctccctactgatcagaggttcgaaggctggcccctcggaagggttcgacaaccgcctcagatcgcgtgggctctacacccactactggtcagaggttcgaaggccggcccctcggaagggttccacggccgcctcaggctactcaggctccgcgcccactactgatcaggggttcgaaggctggcccccgaagggggaccgggtccggcagatcacccgcaggaacttttgggcgcgcctctgggcccctagccgacccctaacgaacggggcacggacctccactcggattacccgcttgcagctcaccggagacaccatgttcggcgcccatcgagggcaacatggcgcttcccccctcctccttgcggaaaggcgacgcaggggcgtatgtaaaaaagtcgagtctatccctgatcgccctctcgccctgtgcagaggctcgggggctgctctcgcaaacccgactccggccgaaccgttgacagcgtcaacataccagcccgagaacttggaacccgaacgtacacccgggctacggccagctcgcatgagggacgaccagaccagccgaagcattacgcgaggcattaagacctcggaggagtcaaaccactcctccgaggcctcgggggctacacccggcgggcaccataggaagctccgcttcgcccgacctagggctcggactcgggctaagccccggaagacggcgaactctgctccacccgacccagggctcggactcgggctaagccccgaaagacggcgaactccgctccgcccgacccagggctcggactcgggctaa

SEQ ID NO: 15210 - DNA, 607 bp, Zea mays
  Peptide Sequence Number=SeqID_58585
atggcgtctcctgttgacgtggctggtctgcgccctaggttgggtgatgtggaagctcctccgaagccgaggtcgagtctgtcttccgtggccgaggtcgagttcgaacccctggttcgagcgaggcggagaccgtcggctgaggccagggcggagtccgagccctggggtcgggcggagcggagttcgtcgtcttccggggctgagcccaagtccgagccctgggtcgggcggagcggacccgagtccgagccctgggtcgggcggagcggagttcgccgtcttctggggcttagcccgagtccgagccctgggtcggacggagcggagttcgccgtcttccggggcttagcccgagtccgagccctgggtcgggcgaagcggagcttcctatggtgcctgcggccgggcctgactgcctgtcagcctcactctgtcaagtggcaccgcagtcgaagcggcgcaggcggcactgtctttctgtcaggccggtcagtggagcggcggagtgacggtggtcacttcggctctgtcggctggggggcgcgcgtcaggataaagctttatgctgatgggggttaccagctgagaattaggagccttgagg

SEQ ID NO: 15211 - DNA, 723 bp, Zea mays
  Peptide Sequence Number=SeqID_58586
atgtccactggtatggacgagtctggtgtgatggaagactctctggtcattaggacatcctactgctcagaggtggaggggttcccacacctgttgcgaagttatacttgccaaaatgttgcccggaaagccctccgacaactatgccagagctacaacaaggtgatctttgaaaccccccttcgctacttcccacccagcaacaaaaatacacccgcctggaggaaaagacttcaggccctgtcaggaggagaccctatcgaagatgaccccaccatcgtttacatggctggatacctccacaccctcgataaccaatatgatgaccttgcctcccactgcactcacctaaactcccgggtggaaagcctggagcaaaaagtcagggaacttacaaaggaaaaggcgtcccttcaagagagcctcgagatagcagaaggcgaggaaaccaacacccgtgaggcctaccgcacactaaagatggattacgacaagaagctgaagaagctcgcccctgcaagaaaaatccgcaagaagaccaaaagtcaaggatgtcaggctgagcagaaggaagaagcccctccagccctacctcctaccaggataagaaactcgtccgacaccgaggaaatgtccctagccagccttgatgaccttctcaaggaatttggggacactttagagaaggagttcggaagtaccctcgatagcactcgcgtgtaa

SEQ ID NO: 15212 - DNA, 447 bp, Zea mays
  Peptide Sequence Number=SeqID_58587
atgggcagcgcgggggcgaccttgaggacaggtacaggaaggggcagggcccaagtcaggcaggcggcagctgaggctggtgaggtgggcccacgtgccgaggaatctggccagggttcatcggcggtcgggtcaactgggttcggaaaatttatcccggcgacggtggccgagaacagacacgtgccgccactgctttgtgtaatcatgtcatcgagaagatatccatctggaagtgaaaaagggaaaaggaaaaaacgtgtggatgatctcatagactcacagagaggagctattgacaagtttttcaagagcaatactagtgcttcgacgaatccaaatgatgtgtttgtgttggcaatagttcccgtggggacagaggaaccaaccaatgagaaaattctagagaagaacatgttgatatcaacgccgatgataacaatgtaa

SEQ ID NO: 15213 - DNA, 630 bp, Zea mays
  Peptide Sequence Number=SeqID_58588
atggcgaagctgcccgtcggagcaccactgcccgagaccacgagcccaactcccacatgggcaattccgcaggcattcaacgaagcatcccgagcatccatgcgccaaggcaacagcacaacgagctgcaccgcggcggagctttcttcccggctgtcgtgctgcggcgaggaggcccggtccaccaaacggcacaagcacaggaaagttcccgggcgcctatggtgctgcgaataccctaggactccgcaccataatcaatcgcgggggaaaccgagacaagcacggcggtggccatctactctctcctggcggtctctcttcgctctctcccataatggcgcttgcatgaggatgcagaaaacaacgttttttggaagaactggggattgggagggatggctcggctggtcgtataaatacaccaaaggtgtcgagtcccggccgaggcggatgtcagttaggtggttacaactactcgggttgttacgatctctggagcttctgttgatgtccgtttcgctgcacgagatgaacgatgacgtgagcaacaggagccccacgcgcactcgccaacatgctgacctgaatttgcatgatgacgtcactacttgcatcagcatgacataa

SEQ ID NO: 15214 - DNA, 2778 bp, Zea mays
  Peptide Sequence Number=SeqID_58589
atggggtgcacggcgtccaaggtggagcaggaggacacggtccggcgctgcaaggagcgccgccgccacatgaaggacgcggtagcggcgcgccagctgctggcatccgcgcacgccgactacctccgctctctccgcgtcaccgccgccgcgctctcgcgcttcgcgaagggccacccctcgctcgccgtttcgcaccacactacccccgtcctcctctccgctgccgcaccgccgcctgcccccagcgccgcccgtgcgctccccacaccggcgccgtccaccgccgcgtcgtcatcgctcccgcctccgacgccgctcgcccagcacccacacccgccgccgcagccgccggcggcgatggcggcgccgcaaccggcgccggcgagggcaccgcgtccgcggcggctcagggtgccccacatcctgtcggactccagcgtggccagccccgcgcggtcgtcgttccgcaagcagccgccggtgggcacgccgtcctcctcgtccgcgtgggactgggagaacttctacccgccgtcgccgccagactccgagttcttcgaccgccgcaaggccgaggtcgagcatgccagccgtctccgggagctcgaggaggaggagaaggcccgggcctacctccagcaccacacccagtacaacctcaaggaagaagacgaggccgccgaagacgacgacggcgaggtggaccatgaaccggaggggatgcattgcggcggatgggaggacgacgagcactacgcgtccacgaccacatcggagaccagatcggaggatgagggcgagatgggggacagatcagaatgcgggttcgcggccagatcggagtgcgggttcgtggccagatcggagtacggcgggacggcaccgtcagagtacgccgccgtcccattgcccctgaggagggatgagaggtcggaggctggcgactcctccacggtcacggcggcgacagagatgcggatggtggtgcgccatcgcactctcgaggaaatcgtggcggccattgaggagtactttgtcaaggcagccgactccggcaacgatgtgtccgagctcctggaggccagccgcgcacaactcgaccgcaacttccggcagctcaaaaagacggtgtaccattccaacagcgtgctatcagcattgtcgtcgacatggacatcaaaaccgccattggctgtacgatacaagttggacactaatgcactggagatggagtcgacggaagggaagagtcatggatccactctagagcggcttttggcttgggagaagaagctctacgaggaggtcaaggctagagagagtgtgaagattgagcatgagaaaaagctttctactctgcagagcctggagtacagaaggagggatagcgcaaagctggacaagaccaaggcctccataaacaggctgcaatccctgatcgtagttacgtcgcaggctgccacaaccacatcatcagccattgttagagtccgtgacaatgagcttgcaccacagcttgtccagctctgttttgcgctactgggcatgtggaggtcaatgaaccatttccacgagatacaaaacgagatcgttcagcaagtccgcggcctggtggacaactccatggccgagtcaacatccgacctccataggcttgcgactcgtgatctcgaggccgctgtcgcggcatggcactcgaacttcaaccgtctcatcaagtaccaacgcgactacatccgctctctgtacggctggttgaagctcacgctctgccaggtggacagcagcgtgccccaggaagtccatgcctcgatgatctcgcgcgagctcaccagcttctgcgacgagtggaagcaggcgctggaccgcctcccggacgccgtcgcctcggaggcgatcaagagcttcgtgaacgtggtccacgtcatctacaccaagcaggccgaggagatgaagatcaagaagcgggcggagacgtactccaaggagctggagaagaaggccaactcgctcaggtccatcgagaagaagtactaccagtcctactccatggtcggcctcggcctccccggcagcgggcgcgatggcatcgaaagccacgctgcgtacgatgcccgcgaccctctcgcggagaagaagaccgagatcgcccagtgccgccggaaggtggaggacgagatgacgaggcacgccaaggccgtcgaggtcacgcggtccatgacgctgaacaacatacagaccggcctgccgggtatattccaagccatagctgggttctcggggacagtggtcgaagctcttgatgtggtctgccgccgagctggggggctgggagccgccgtcgtcatagagcgtgcggagcggagttcgtcgtcttccggggctgagcccgagtccgagccctggggtcgggcggagcggagatcgtcgtcttccggggctgagcccgagtccgagccctggggtcgggcgaagcggagtttcccatggcgcttagggccggacttggctgctgtcagcctcactctgccgagtggcacaacagtcggtgcggcgcaggcggcgctgtcctcttgtcagagcgataagtggagcggcgaagccacctttgcattaaacgcccctgcgatttggtcggttggcgtgacgatttggccaaggttgcttcttggtgaagactgggccttgggcgagccgaagctttgtgctgatgggggttaccagctgagatttaggagccttgagggtacccctaattatggtccccgacagtag

SEQ ID NO: 15215 - DNA, 1593 bp, Zea mays
  Peptide Sequence Number=SeqID_58590
atggtgtgtttgggcctcggcggccgcagaaagcacacgctacaagataatccgatcctgcaggctcggatcttgacagttgaagggagcagcagcaccctcggcgtcaactacaccttcggcgaggaatccggctcgagcagacggctcgaccggtcaccccgaggcctcggccagctgtcccccgaagacatcagcccggcccgaggcctcggcaactcaattccggcgttggtcccgccagtggacgacccggccaggctctggccgaccaagtcttcttttcgagccaactctgcctctgtccgtgctgacaccgctacccctggcttcggctcatcgaagagcggccgaggggttcctttaactaagcaagagaagcctcggacagcaaggccgacccagccgagggactcctacgcctccgggatacggatacctcactcgtcacctttgcacgggcgactcacgcttggtgaagcggccccgacagccacaatgaccaaaagactggcattcaaggtgccattacaaacggaactccggttccgtccccgcgggacggacgcggccaccggaaggctctcgttcgcgtccccgctcaagggacgtgaaccagacatcaaagccaaagagcgggctgctccaaagcgcaccggcagcaacagtccgcctcccccggcatggctggaggacgcctcctccgcagagctggaggatggtttccaccaccagaagctggaagaggaggtggccagccgacccgtgcgggaggtagagccccggctcgccttgctctccgccccagcaaggatgatgaacatcattgaagctgagggcaggaccaagatcgcagcccggcttgcttctccccatccaggggctggtggtcaccgtctcggccgtcgtgggctgagtcttctccaacacgctccaaggtcctccccttatggcgcgggggctgggtcccacgcgtcatgcaagctggcccagggcagaagaagccaaaccgccgcgcgcggtgcatgcaaccgcccagcggttacaagcgtccctccactttcgcccagaccagcgggtgaaagggcggacagccgtgcaggcggcatgcaaccgcgccaagtgggcgcgccccttcgacttccaacgcacccagcatggaggcccaggcccacgcgtcatgcaaccggcgcgccggttgctacgtgcaagcgactgcaccgccactcgcaccactaccacgcctcctcgactgcggaaccagtaccgcgactcgaggcaaccttgtgtacgacccagcagtgccagccaggcgcgacggtcaatacagccaaaaaggggctggcagtaatggcggtggcaggcgggcaggagcagcggacacgtcgtcagccaagctcacgtcacctcgtgggacagcgagagaaccctctctcacggcgtgaagacggcgcgcccgtgatccgtccctcgaacggctcgcacacgcgcaacggccgccccgcgaaccactcgccccgtcgcattaactccgcggcgggacaggcggcgcctctggcaggagaagcaagcgacgcttcgccttcgccataa

SEQ ID NO: 15216 - DNA, 669 bp, Zea mays
  Peptide Sequence Number=SeqID_58591
atgaagacgccgcacccatgcaacacctcaaggccacgcggagaatggcgcctaacccctccacatgggcaggtccaagggcgccacgtggcaaggaaaggtagtacatcccagtattcattgttgggtccggacctccacagaaggacaccggacccccatgcgtacaagtccagagcccccaagaaggcacgctgggtcccttgggagggccctagtccccctcctaacggcgtcagggtcatccagcaggcggcgcgcctgaccggtctattggcaaacagtgcgaccgtgccgagcggcgcactgtactcatcatcccttctacaagaagcctcccctgcacgccgaggatacgtagatctcgagtgtcagggcactagaagatcgccccaacagcaagcatttgcggctccaagtgctgtattcgctatgtccctgggccccatgatggtgcagatcatcgagcaccgcaccgaaacttcagaagatttggtgatggagcaagaagttgcatccttcgcgccgcgagtacccgaccgccctgagtctggggctgttgctgtacacgcagtgcaacagcacacgccagcacaggtgtcccggactccgtcgagggcagcacctacagcgctgtctgtggccagggagttgctacgccacccctag

SEQ ID NO: 15217 - DNA, 807 bp, Zea mays
  Peptide Sequence Number=SeqID_58592
atggcactcggtcccacaaaccgggactacccagacaggtggctcaggtgccgcccccgggacggcaaacagaaaaagaagggccgcggctacgaaaggccgcagtctaccgtgctagtcgttgcagctacgaccgggggccagggcgaccacaacaaacgcccacgaccgcaaataggtaacagtggctcgtgccctgtacaccccaacggtcgccacagcgccacggagtgtcgcgagatcattgatctcacaaaacgcgtcagcaaacgcatcagcgagcggcgtgagcagtcttccaaggatgactccccacctcgtcgctgccctggcaaggaaaaggtcgacgacggtgaggacctctatgcgaaagcaggagggcccgacaacctgggggccagctctggagaatgggagcctgttccatggggtggtccgaagcctgtgtggtcggttagcctggttccgtacccgaaatcctgcacactccaccactctatgaagggtaccctactatttggagctataagtcctgtggctacgacaacctggggtccagaactagagaagagacacttgtctcctggggtggtccggagccgtgtagccgctcagcctggtcccgtactatgggcctgcacactccaccaccctgcggcaggtgtcctagtacctagaatcaccatccaggggtccggatacacaacttggctcccccaggctagaccctgcaagtcccgagcatgtatcgaaggatggctagtgtcagatgacgggtcctacgggtatactgctaacgctccttag

SEQ ID NO: 15218 - DNA, 669 bp, Zea mays
  Peptide Sequence Number=SeqID_58593
atgaactgcgctgcactagcaggagtcgcgctggaagctagctccgggtggcctcaccggcggcggcggccacctctgcaccaacggttcaccgacggtagcgaccacctctgcactagcagcgacaaccacctccgctccgagcggcttgctagaagcggcgaccacctcagggtgtgtgccattgcgaggaggtcctcgtccccgtcctcctacgggggcgacaacgaggccattaaagccaaagagtcagggactcgacggcaggtggctttgatggtcccgctagcggaggcaaccacctctgcattgggtagcctcaccagcggcgacgaccacctcagcaccgacgacagcgcccacctctgcaccggtggacggcggctgcctcagcacgcacgaaggggtcctcgctcccgtcctcccaaaggagtggggacaagaccatccaagaacgcggccgccgcccccgcggcatacgatgccttgtacggcccccccaggatggccagcggcgcgggagaagctgtggatgtggcggaccctcgcacggcgcgaccgtcgcctgtgcggtggacggacagccgcgctccgaccagacggcaggaggcagtgtcggaggcagcaccaaagccgtccagcccaaagggccagacatgctgcagctga

SEQ ID NO: 15219 - DNA, 930 bp, Zea mays
  Peptide Sequence Number=SeqID_58594
atggctgaggagcatgcaaccgccccgtgtttatacgcccttcattttcggagcaaccaatggtccggaagacgaaccaccgcacaaggaacgtgcaaccgccccgcggttatgcgccccttcattttcgccaaaaccagtggtcaagaaggcgaactgccacacaggaagcgaacaactgccccacggttgtgcgctccctcagcttcgctgcaatcggcggtccaacatgcggacccaggcccacatgtcatgcaaccggcgtgccggttactgggtgcgaaaaaatcgcaccgccgcttgcaccaatgccacgtcccctcggggccatcacagaagactgaaaagatgagttttcagaaccggtgcagcgactcgaggcaccccgcgcatggcccaacagtgacattaagtacaaaggtcatgggccagtcagccgtgggaacgggcatgacagtcggcgtagccataggtgggccggtagtaattgcaccaacaggcacgcaggagcagcaggcagattgccaatcagattctggccccacctgcaggctcgcatcctcccttgaggtgggcccgagggccactgtcggtacccaggatcaggggtaccctcttctacagcatgaagacaccgcacccgtgcaacacctcaaggccacttggagaatggtgcccaaccccaccacatgggcagacgacgtcagggtcatccagcaggcggcgcgcctgaccggtctgttggcaaacagtgcgcccgtgccgagcggcgcactgtactcatcatcccgtctacaagaagcctcccctacatgccgaggatacgtagatctcgggtgtcagggcactagaagatcgccccagcagcaagcatttgtggctccaagtgctgtattcgctatgtccctaggcctgtatgtcggggcttag

SEQ ID NO: 15220 - DNA, 429 bp, Zea mays
  Peptide Sequence Number=SeqID_58595
atggcgactagacgaaccaccggcgggaccccatgtcccccggcctacgaagctgaagcctgccttcctccggaaaccattctgggtcccccacgggacctcttcgcgaaagcaggagggcccgacagcctgggggccagttctaaagaatgggaacccgttccatggggtggtccggagcctgtgtggccgcttagcctggtcccgtacccgaaatcctgcacactccaccgctccgtgacgggtaccctagtacttggagctataagtcctgtgggtccgacaacctggggtccggaactagagaagagatacttgtctcttagagtggcccggagccgtgtagccgctcaacctggtcccgtaccatgggcctacatgctccgccactctgtggcgggtgtcctagtacctagaaccaccatctag

SEQ ID NO: 15221 - DNA, 57 bp, Zea mays
  Peptide Sequence Number=SeqID_58596
agacattgtggtacaggtggcatgagattgatggttctggttacgattatggtgctg

SEQ ID NO: 15222 - DNA, 729 bp, Zea mays
  Peptide Sequence Number=SeqID_58597
atggagaacccgcacatcaccgacacgctcttggacgaagtggagatcgagctcgacatgcttcgtgcactgatgttgtacggggttggtggagaggtacatggcactgatgttgtcaaagtagacaagggcgctccgcgtcagcggactgtccagctcctggaggagctgacgaagccacgccgcctcggcgacgccgttagccacaacgcggtactcaaccccggcgctagagcgggagacgacaggctgccgcttcaaggaccaggagatgaggctgtcgtcgtggaacacagcgaaaccgaaggtggaccgacgcgtgtcaggatagccgacctagtcggcatcggtgtagacaacgaggtcggtggtagtagaccgtcgaaggaggaggccgaactcggtggtgccccagaggtatcgcgggatccgcttcatagcggtgagatgtggctcccgtggggcgtgcatattgaggcacacctgctggacgacgtaggtgatgtcggggcgagtgaagacgaggtactgcagggccccggcgagactccaatagctggtcggatcagctatcggagggccatcatcggaggagaccttgccctaagtgtccaccggagtcgtgtagggcttacaatcagccatgccagtgcgctcgaagttattgatggtgtactggcgctggtggaggaacaggccctagggccggtgctcggcggtgatccctag

SEQ ID NO: 15223 - DNA, 961 bp, Zea mays
  Peptide Sequence Number=SeqID_58598
cggagaggagccagagccctatgtacatgccgacgtggctgtcggagaggtgttggagccctgttcatgtggcgtcgtggccatcggaggagcgcttgagccctgtagaagcacagctgtcggggctgtcggatccttgctgacgtctccttgcttccgtaaggggctgagaaccgccgttgtcatggagcacgcggggtgccatcattacttgttttaccggggcgagccagatgggacgctgggtcttgttccccatagccttgggctagctaggggtagggtaatgatggcccccccttgtggcgtggtcggccggagcaaggtggtggctcctccgaggtcgaggttgagtccgagcctgggggccgggcgaggcggagaccgtcgtccggaggtcgaggttgagcccgagcccgagggtcgggcgaggcggagaccgtcgtctgaggtcgaggttgagtccgagccctggggtcgggcgaggcggagaccgtcgtccgaggtcgaggttgagtccgagccctggggtcgggcgaggcggagaccgtcttccgagtcgaggttgagcccgagccttggggtcgagcgaggcggagaccgtcgtccgaggtcgaggttgagtccgaaccctggggtcgggcgaggcggagattcctatggcacccgaggctggacttggctgcttgtcagcctcaccctggtgggtggcacaacagtcggagcagcgcaggcggcgctgttttcctgtcaggataaggtgtcaggcgatccttgcattaaatgctcctgcgatccgatcggctggcgaggcgatctggccaaggttgcttctccgcgaagcctgcccgaactggcctcgggcgagtcgaagctttgtgctgatgggggttaccagctgagattagaagcctcgggggtacccctaattacggtccccgacaaatgcaattatctttga

SEQ ID NO: 15224 - DNA, 714 bp, Zea mays
  Peptide Sequence Number=SeqID_58599
atggcgcaggccctggcgcagacccgtggcctccggccaggcgcggcccagcgcgagtgcggcctggggaaggggagccgccggcgggaggggagaggcgggcgctgcgcgcaggggcggcggcgcgtaggaaggccgcggacgccgagcgcgaacggccgccgtcaggggaggcagcaggcgcgggtgggtaccatttttgttgtttgcttcatagttaccagcagtttatgggcttcagcaataattttaactgtgctagcaatgatagtcttggatatgatgggggtgatggccatccttggtattcagctcaatgcaatttctgttgtaaaccttgttatgtcgataggaattgctgtcgagttctgtgttcatatcacgcatgcctttatgattggcactggggacaaagaaactcgtgcaaggcaggctctatccacgatgggtgcgtctgtattcagtggaatcaccttgaccaaacttgtgggagttattgtcctacgttttgcgaaatctgaagttttcgtggtttattacttccaaatgtatttggcacttgtcatcattggattcctgcatgggcttatcttcctaccgaatcccgtaaaagaacttcaccgaaatctttcaggtccttttgagtttatgtggccctcctacaaaatgggcgaagccaaaagaacaaagtcagccaccttcagcttcaagtga

SEQ ID NO: 15225 - DNA, 342 bp, Zea mays
  Peptide Sequence Number=SeqID_58600
atgacgtgtggcgaacccctccttcgtggactggattgtttcggaggttgggcgaatgccggggggcggggtggaggatcaagattggaagtcttgttggtgaagaatcggagctgcctcgcgtggggtgtctcatggcttgacaacaacggcgcactgcggtctttttttcttctgtgtcggtgtttgggtgtagatgtcgtcgagttcctttggacatgtgttaccgttcttggggagtcggagctgctcgtcccttgtgttgagctcgacaacgatgactctggatgggctctatgtgtggggttgttgatgtctgggttggttgtgcgctctgtgtag

SEQ ID NO: 15226 - DNA, 1038 bp, Zea mays
  Peptide Sequence Number=SeqID_58601
atggctgcccctagtggcatcgcccatggggacggagacgccgtcaacgaagatgatgtgatgaaatttggtgttgtccctggggatgggcacgccgtcgtccaggatgtggtgacaaaattggcaggcgatgctgcccatggagatagggacgacggttgccaggatggtgtgacgaaggtggcatgcggcgcaacccatggagatggggacgtcggttgccaggacggcgtgacgaaggtgacatgcgacgcagtctatggacatggggacgctggttgccaggatgacgccgcgaaattggtagcagaagccatgggatcagatcgaaacccaagctatccgataccaaatgttatgatcgctagatcggtgagggattggagaggggtatcgatgggcaggaacaccggccgggggcctctgcccacggccgagcaagaggaggggcccatggttgctgctgccgcagcccctccgtgggcctccttaggccctgacaaagattattttgatgaccttgcaaagtacatgaaagtaggtccaccattatactttgttgtgaaggacttcaattacagctctgcgtcggtggatacaaatcaaatatgttcaatcagccagtgtaattcaaattctcttttgaatgagatatcacgacaatcattatcccctgagactagttacattgctaaacctgctgcttcatggcttgatgacttcctaatttggatgtcccctgaagcatttggatgctgtagaaaatttgtgaatggaagttactgccctccagacgatcagcagttacaaggcacaatctctagactaccaaatatacttatacatttggcaatctacgagacacaatatatagactaccaaatatactctaagaagacagatgttgcgactggaccaacactccgagaaggccgaagacggaagccctttagtgaagatgctcgcgaactgcaacgatgtaagaacatgaagcacatgaatgtcaccgatgttcaccttctcacaaacaaagtgtag

SEQ ID NO: 15227 - DNA, 2502 bp, Zea mays
  Peptide Sequence Number=SeqID_58602
atggggtgcaaggggtccaagcttgacgaccaggaggccgtcgcgctctgccgcgcccgcgccgagctgctcgccgcggccgtccgccaccgctacgcgctcgccgacgcgcacgcggccctcgcggactccatcgactcggtcgccgcgccgctgcaccgcctcctccgtctgcaggctcagccgcgggggctcgtactgccctccgcgcgcaagggcggtggcgcgcccgcgaaccggttgctgccgcgctccttcgacccgtcctcggcgctgcctgcccacggccattcctcgcaaccccagttcggcgcgtcgccgggatccgagccggcgccgacggccgactcgcctccgcgccgccgccgccgcgtacccgagcagctgccgcacccgcattacgccgcgtacgggtacgactacgcgacgcagcccgcgtacgcgtatccggcgccggcgagctcgctgcagttctactacgctcgcagccgcccgccccccgcgtcagtcgccgtcacgcagcgcgcgccggggacgtcggagcgcgtgcactttggctcgttcgacgcggcgggcggctacccgcagcactacgcctacagcgcccagcgggcccaggccccgcctccggttgcgccgcagcggtctgctccgccttcgcctccgaaggcgagctcgtgggacttcctgaacgtgttcgagaactacgactcgtacgaacacgacagctactactacgactccgccacggcacctgctgcgcccgcggcgccgttcatgccgagccggagttcgcgggaggtgcgcgaggaggagggtattccggacctagaagacgacggcgaggaagacagcgtgggcgtggtcgtgaaagaggtggccgggcagtactcagcacctgggaatggcggtgcccgtagccggcgcaactcgctcggcggtgccagtagcaccgccgagctcgaccagccggagaatgctatcgcccataaggacgtcatcggcgagtttcggcgaaggccaacagcacatggtaatgtgtcggtgcacgcgccaccacctcccgcgcggagggtcgtcgacaatgcgagtgtagctggcgaaatcaaggcacagcttgtccgcacggccgaggcggctaggcagctcgcgccgatgctcgaagtcggaaggccaagctaccaaggccgcagctcagtctaccaatgttcctcaaagatgatgtcggctatctccgtggctcatttggggtgcaaagacatggacgtgttggacgtcggagtggtagggaagatggtggacacgcggagcctatcctcggcacttgacaagctctatttctgggagaggaagctgtatgctgaggtcaaggctgaggagaaaacgcgcctacttattgccaagaactccaagcgactgaaattattagatcaaaagggtacagagcctgaaaagatagatgaaactcgaaatttgttgaggaagctttcaacaaagataaggatagctgtgcgcgttattgccaagatttcaagaaaaataaacaaattaagggatgaggaattgtggccacaagttaacgctttgattcaagggtttgtactaatgtggcaagataaattggacgcgtaccatagtcagtgtcaagtgatatcagaagccaaaaactttacttcggttttgtcaggtggaaatggccaggatttggtgttagagcttgaggtagagctgattaaatggatcatcagtttttcttcttgggtgaattcacaaaggaactttgtaaaggcactgaatggatggctagcactctgtcttaactatgagcctgaggataatactactggagctccatcttactcaccaggaagcattggtgctccactggttttcgttacctgcaacaaatggtctcaagccatggatcggatttctgagaaggatgtggttaatgccatgcaagctctagtgtctagcgtgtggcacctatgggagcagcagtatcttgagcaaagtgaacaaataatctcgatgcgagaaagggaaaaatggatcaagattttagagagaagaacccaggatattaataaggaggctgatgagctaaacaagaagttggcgttaataccaagccggcaaaggatgcatgtgcctcggagagtacaactgtatgaggcgcactgtgttgaggcaagtaacttgcacataaatctgaggctggttcttgaagctttagagaactttgctgccaattcactgcaagctttccaggatgtggcaaaaagtgctgaagggacaagactgccaagagataatatgaaacttggatggggtcttgcattgtgccacagagcttttataaagtctgagctatctgatcttaagatgatatcaaccgaacctgtgaacaacgttggcccagttggcacaggcctagggcgtgacccattggcaaagaggctcgacactgatggcccaagagctgtccaaatagaatattga

SEQ ID NO: 15228 - DNA, 1728 bp, Zea mays
  Peptide Sequence Number=SeqID_58603
atgagatcagttcttttcttcgtgtgcatttgcttcctgttcgtgtcgacggcgagggcggaaggcccctaccagttcttcgattgggagatcacgtacggcagtatcagccctattggatctctacaacagggaatcctcatcaacgggcagttccccgggccgaagatcgagtgccaaacaaacgagaacctgatcattaacgtccgcaacaagttgcctgatccgttcttgctctcatggaacggtctgcagcaacgcaagaattcatggcaggacggcgtttctggcaccaactgcccgatcccgccgggccacaacttcacgtaccgcatgcaggccaaggaccagatcggtagcttcttctacttcccgtccttggccctccacaaggccgccggtggcttcggcgctatccgcatcgacagccgaccgatggtccccgtcccgttcccgccgccggccggcgagtacgcggtgctcatcggtgactggtacaccaccaatcacaagtctctgcaacgtatgctggacagcggaaaggaattgcctcgccctgatggcgtcttgatcaacggcaagggtggtgcggacgttgtagatttcgccgtcgagcaaggctttaagctgtctcgtactctacgagcaggaaagacgtacaggctgcgcatctcaaatgttgggctgcagaacacactgaacatccagatccaagggcacaagatgacgctggtcgaggtggagggcacgcacacggtgcagaacgcctacgcctccctcgacgtccacgtcggccagtcgctctcggtgctgttcaccgccaaccgccccgccaaggactaccgcatcgtcgtctccacccgcttcaccaacgccacccgcctcctctccaccgccgtcgtccgctacgccggctccagtggccctgctcccgggccactgcccgctgggcccggcgacgacgttgacttctccctcaaccaggcccgttccatcaggacgaacctgacggcgagcgggccgaggccgaacccgcagggctcctaccgctacggctccatcaacgtgacccgcaccatccggctggccagctcggccgggctggtccgcggcaggcgccggtacgcggtgaacggcgtctcgttcgcggaggccgacacgccgctcaagctggcggatcactacaacatcagcggcgtgttccggctcggcggcatccccgacgcgccgccgccggccaccgcggaggaggtgaggaacgagacggcggtcatggactcggaccaccgctccttcgtcgaggtcgtgctcgagaacggcgagggcggcggcgtccagagctggcacctcgacggctacagcgtgttcgtcgtcggaatggacgtggggacgtggagcaagaagagcagggatggctacaaccttgtggacgctgtctcgcgctgtaccgtgcaagcatgctgtgagaatgagatggccgggcaggcttactcgatcttgttccgtgaccgcgcgcaggtgtacccgagagggtggacggcggttctggtcgcgctggacaacgtgggcatgtggaacatgaggtcggaggtgtgggcgcgcaggtacctgggccagcagttctacctccgcgtgtacacgccgtcgcactcgttccgcgacgagctgcccatcccggacaacgcactcctctgcggccgcgccgccggccgtcaccacagccagtag

SEQ ID NO: 15229 - DNA, 1125 bp, Zea mays
  Peptide Sequence Number=SeqID_58604
atgacacgggggctgggccccacgcgacatgcaagctgccccaggatagaagaagccaaaccgccgcgtgcggagcgtgtaaccgcccagcggttacaagcattcctccgtcttcgcccaaaccagcgggtgaaagggcggaccgccatgcaggcggcatgcaactgcaccaagggggtgcaccctttcgacttcgacgcatccagcatggaggcccaggcccacacgtcatgtaaccggcgcgccggttactacatgcaaaaaactgcagcgccacttgcgccagcgccgcgccttctcgactacggaaccggtgccgcaactcgaggcaaccctgcgcacggcccagcagtgccaaccaggcacaccggtcatgggtcagtcatccgcgggagaaggcgcgacgggactgggaaaggggatactccgaaagggatccttctccgcgaaggaagcgggccccgagcccccctactgatcagaggttcgaaggctggcccctcggaagggttcgacagccgcctcagagcactcgggctccgcgcccactactggtcagaggttcgaaggctggcccctcagaagggttcgatagccgcctcaggccactcgggctccgcgcccactactgatcaggggttcgtaggctggccccccgacgggctcgggctacgctcccgaggtaccctaggacatttccgagaccagcaggagcgattctgtaacggaatcccatcagagggaggcatcgagccctcggaccctatcgaacgggaccgggtccggcaaatcacctacagaggctcgggggctgctctcgcaaacccgactccggccaaactgttgacagcgtcaacataccagcccgagaaatcagagctggtaacccccatcagcacaaagctgcaaaggcctgatgggcgcaattccggaaaacagcgccgcctgcgctgctccgactgctgtgccacccgccagggtgaggctgacaagcagccaagtccagcctcgggcgccataggaatctccgcctcgcccgaccccagggttcggactcaacctcgacctcggacgacggtctccgcctcgcccgaccccagggctcgggctcaacctcgactctga

SEQ ID NO: 15230 - DNA, 1476 bp, Zea mays
  Peptide Sequence Number=SeqID_58605
atggcggcgagggcggctgatgagaacagaaggccgggggtggggaggcccgcgccatgcgtccgagacatggggagccggcgcgcgctcacggacatcaagaacctcgtcggggttgccccgaacccctgcgccgtcgccaagaagcccgtgctgcagtactctcctgccccaagatcgtttctttgccatggttcttgggtccaggaagagcagaagggacgaaaagaagacagcgttgccaagcagccggccgatgacaaggttaggacgcgtgctagctgttcttgcgctctggcatttcttggaggctttgatttgatctgggtattgctttggttgctcaggaaattcgtcgcctccttggcgagcaaagggcaacctgaatgtcagccgaccggagctgatccagaacccggagttgatcaacggaaggaaccaatcggcgatggcatcattgatatcgacgtggaactggacgagccggtcgacgatagtgattgtgacgtcgacatgggtgatgagacagagaacaaggacattatgaaccaagatgaatcgctcatggatattgatagtgcagactcggggaacccgcttgcagcaacagaatatgttgaagagctttacaagttttacagagaaaatgaggctaagagttgtgtaaaccctgattacatgtccagtcagcaagatataaatgcaaagatgagagcaattctgattgactggctgattgaggttcactacaagtttgaactgatggacgagacgctatttcttacggtaaacgtaatagatagattcttggaaaaggaagtggttccaaggaagaagctacaactggttggaatcacagctctgcttcttgcttgcaaatatgaggaggtctcagttccagttgttgaggaccttgtgctcatttctgaccgtgcctacacaaaagggcaaattctagaaatggcttctacacagtcttgttttttagggtgtacacttgaccatgatgatatccatatccatatagaaaagttgattctgaacacgctgcaattcaacatgtctgttccaacaccttatgtcttcatgaagaggtttctgaaagcagcagacgcagataaacagcttgagctagtgtcatttttcatgctggagctctgcttggtagagtaccaaatgctgaattataggccttcacatctggctgccgctgcggtttatactgcacaatgtgctattaaccgttgccagcagtggacaaaggtttgcgagtcacatagcagatacactggcgaccaactcctggagtgctcgaggatgatggtagactttcaccagaaggctggaaccggcaagctcactggcgtgcacaggaagtacagtacctacaagttcgggtgcgcggccaagattttgcccgcgcagttcatgctggagttaggagggacagcaccgcctccttcaggtgcaatctaa

SEQ ID NO: 15231 - DNA, 276 bp, Zea mays
  Peptide Sequence Number=SeqID_58606
atgaatagtatgtccgcctcttcccttcccttcctgctctatgaaaccttggaagtggggaagcaagggatgggggtctctgatttgctgcctatggtacctgttcgatggctcaacttcgtctgtctacatggcctttcccttaccacggtgtcaactcgaccagcgactgaagcgaaggcgacgagcgaagggtggcgtctttgccttcgccccaacatttgccctccgagggaccagttcgacaaagtcacctggtgccgaagacgtcgctag

SEQ ID NO: 15232 - DNA, 960 bp, Zea mays
  Peptide Sequence Number=SeqID_58607
atgtcatcgcctaacaattctgtcagcgcggcactgtcagaaacgacccccgtgtttcagttgagagtatggcaactgattgccattgctgtcgggatagtcatggcgatcctgctcgtcattgcgctttgcctttcgctccagaggaaaaagaagacagtgaaagggtttgacaacagttcgctggctgagatccctatcgtttctaaggaaatcaatgttgacagagttggtgctcagagtctacatgacagtgaagcgcccttcatgccagtgcgggataagtatacgcagaccaaaggtgcagggcagttgggagagagtagatccgtcgacgccgataccttcagccagttcagctcagtgtacaacgtagagaagggtgggagctcatactctgaagattacagtcacagcagctctggtccagctaggaaaggtagctcaccatatgcatattcagcatcaccgctggttggcctgcctgagttatcacatctaggctggggccactggtttaccttgagggacctggagtgtgcaacgaatcggtttgcaaagagtaatgttcttggggagggtggctatggagttgtctacaagggtcgtctggtaaatgggaccgagattgccgtgaagaagatccttaataatctctatgtcctcctggatcccaaggaaagagctgaactgtggccttcacgttggatgaaaggtgggctgcatacccagatctcgacttctgcagggggttcaaaaagtatagacgatacctggtggttgggcgcgcaggctgcgagttggtgcagcgatgagctgatcagcaagtgcagcttccgcaccgcccgcctaacaaggaagccgcgtgtcacacctgggtttcaggggcaccaagacccgggcgcgaacataatcaccaggtgtgctacgatcaagtatcacacatatgatgaatcatga

SEQ ID NO: 15233 - DNA, 879 bp, Zea mays
  Peptide Sequence Number=SeqID_58608
atgccgacacaggggagaggagcgcagggtatccatgccggggaagaggtggtcggcactggtgaggacggtggcgcacgcaggaaggccgcggggcgctgcgcgtgggggcgcggacgtcgggaagggcgctgcgctgggggcgcgtacgccgagaaggggcgcgaacgtcgagaagggcgctgcgtgtggggccggcgaacacatggaggagcggcgcggacgccggggacagcgcggatgacgaggaagggcgctgcgctgggggcgcgaacgcagggagggcgttgcgcgtgggggcggcgaacgcagaggaggggcgcggacgccgggaacagcgcggacaccaaggaagggcgctgtgctgggggcgcatacgccgaggaggggtcgccgggcatggccggcagtggcgaggagtggccgccaggggagggcggcgcgtggaccacccctgcagcggcaccacgatgtgcatcccgccgtcggcgcgtggccgcgaccgcgggtcgcgtgacggcttcctctccgtcctcgtcgcgcggcgcaggcgagtcccgcctgttggggagctcggatgggggcgccgacgacgcggatccggaggtcgacgacagcggaggccggggcgccgcgtatgccgcctgcagcgtcgggctcgtcggcggctgcgctgctgcggggcgcgcgagggtgaggcgctgggcgcggtgcaggagctcgtcggcgcgccctgcggtggcttcctggcggcgcctggaggggaggcagccggctggggaaggagtgggggtgcggctgggaggagagaggccgcccccgggagggaaggatgagcctcccggggggcggcggttgaggagtgggtggcggctgtag

SEQ ID NO: 15234 - DNA, 792 bp, Zea mays
  Peptide Sequence Number=SeqID_58609
atggtgagagaacgaagaacacaaacaaacacaatgaacaagaacacaagagacacaagatttatcccgaagttcggtcacaccaccaagatgccctacttcctcgttgaggcgcccacaaagagccgggtctctttcaaccctaatcctccctttgccgaccacaaaggtcaagcccacacaataatctttgctcaaacgagcggttatcagagcgttcgtgccgtctcgtggaggccagatctgcaagtctacgccaggctatggagccagaagccagttccgcgagctctcaccccctttcgccggtgtgagttttcaaaagaaaatgtttttcaaaatgggtatgatgaagggttgtcaccattatcaccttttgagcgggatgatcagggactccctggtttatgggagggcctaagccctaggttgggcgaggcggaggctcctccgaggtcgaggtcgagtctgtcttctgaggtcgaggtcgagtccgagcccctgggtcgggcgaggcggagaccgtcggctgaggccagggctgagtccgagccctggggtcgggcgaggcggagttcatcgtcttccggggccgaggccgagtccgagccctggggtcgggcgaggcggagttcgtcgtcttccggggccgaggccgagtccgagccctgggtcgggcgaggcggagaccgtcggctgaggccagggctgagtccgagccctggagtcgggcgaggcggagttcgtcgtcttccggggccgaggccgagtccgagccctggggtcgggtga

SEQ ID NO: 15235 - DNA, 606 bp, Zea mays
  Peptide Sequence Number=SeqID_58610
atgatgaatctacaaatcaggacgaggcgtgttttgagtacgccgcatgcgcgcgaatctctcgccaccaccacccgctacgcccgctctcaacaacctccgccttcatcgcccaagaactcctcctcccgcctcgtgggccgccgcaacccctcctgcctgcagatccactccgtcgcgaacctccccatgcctccaccgccccttccgtacctcctcctcctcctcctcgggacacacggccaagcaccaagcgaaccaacgcgcgccggcttgaactcgaagcaagcaagcgactgggctgggcattttcttcaggtgtttggaaaggccctaatggcggggacgcgctgggggctgtggctggggctggtgacggcggtgtgggtgcagtgcatctccggcaacaactacaccttctccaactactcgcacgcgctgaagacgctcatgggcctcacgcagctgcagctcaacggcctctccgtcgccaaggacgtcggcaaggcgttcggcctcctcgcgcggctggcgtccgaccgcgtccccacctggatcctcctcgccgtcggctccctcgagctgcgttcactggcacttggataa

SEQ ID NO: 15236 - DNA, 2310 bp, Zea mays
  Peptide Sequence Number=SeqID_58611
atgaggcagcagactggtaagcgtccctcccaacacagggaatatgaaagagaagaaaggaaggaccaacacaagaggtcgtttccccgtgttcaggaaagctctaataatgatgggctggtgctttaccgtatactctgtccaaacagtttgattggtagtgtcataggaaagcatggcaatgtgataaatgctatcaggcatcagacaagtgccaaagtcaaggttgttgacccgtaccccggtgcagacaaaagggttaccttggtatattgctacgtcaagcatagagacattgatgctgagggtgatgacaatgagcctgtttgtgcagctcaagatgcattacttacggcatcaaatgttataggaaaatctggtgttgtcatcaagcatcttcggtcaacatcaagagcattcattaaagtgagcccaaaagatccaagtgaccctacacattcatgtgctatgagttttgatttgttcaggcgtgcacaacccgtggttctgccttcgcactcgcgacaccttgccccccgcacccgcttccgtcaatcacgcagcgctcacaccccgtccgccccagatccagatcccgccaccatcatcggcgcgacctccccgcccgccccaaacccggatcccgtggctcccccgtcaagctctccagtctcccccgttcgtcgtctctcctcaccttccttccctccccctccctgctcggtgctcgcacacgcccgccaccgccgccgtcatacagacccactcctttgccctggtgcgagcaggcttcagcagcaaaccccgcaggctgctcccgaacgagggagaacgcgcgggtctgggctagccgctagccagggggctgggggcggaggcagcgaggaggcggcggtcgcgtcgttgccgaaccctagcagcttctcccccggtgtcggcggggagagggagaaggcgaccatcgcggcgcacccgctgtacgagcccctcctggaggcgcacgtcccctgcctacgcgtcgccacccccgtcgaccagctcccccgcatcgacgcgcagatcgccgcgcgccccccgccgcttgccacggccgccggggccgcgaccgcgggagggccgtccggcggggaggagctcgacctcttcatggtacgacttgacccccctacaggctccttcctatcccacctgctctgcagctgtgcgctgcagttgaactgctataggtttgcggatttagggtgtggggaatttgggatttgggattcaaggaagggaaaccgtgtgatgctgttccggactgctcttgcaccaatggagttgtatgaagaccagtcaaatgacttgacagatggcgataagaaccaagaagccaattgtagtaatgtggatgatatgtatcatggcctcactatcaactctgactctgagattgattctctgcctgatcctaaggaccaggcggcggcgcttgcggcgctggccggctgggtgtgggcggcctccttctacgacctcacgcaccgggcgcgcgcgctcgtccagccgtgggtcacgcgccaggtgcacgccgagacgccggccatcctcaggttccagaagttggagcacaagatgctggacaatttcttctctgtgttgtcatgtgttgtctccgtgcccttctacacgggattcctccctctcctgttctggagtggacacgacaggctggctgggcagatgaccctcctcatggctttctatgactacctcggcaactctgtcaaggatatggtgtcagcccctcgaccatgctctttgcccattagaagagtgacagctacagaagatgagaaggaaaatgccatggaatatgggctaccgtcatcgcatgctctcaacactgtttgtttgacggggcaatcgaaagatgtcgtcaaggcactgaagaaacggattggccacaagaatccaaaagttcaacttcttgcgctaactgaggacgggtggacaactcgtcctcatccttgcaaacgagtagctccataccgagaggcccttttgcttgccgagaagcatcagaatctggagactgacagtgacaggtcggctgcggtggttgcagatgctcctccgcagcaggaaatggtagcagcaaacagaacgggccaaccgcagctggtggtggacgaacacaagacgattcttgaagaggtccccagagaagaaaatggcaccctttccgccgccaattatgctggtaatggcagcatcaacgacgacgacgctaccttatcggcacaacaagaacgtgatgttcagctttag

SEQ ID NO: 15237 - DNA, 1224 bp, Zea mays
  Peptide Sequence Number=SeqID_58612
atggactttctaaaaggcgaggacgcttgtcgacaattagaggctcttccattcttggatacactgaagcattttagaggtgctctgttctactatcaaaggatgcaaagattcttcgaagaaactatgattgatctattaaattacgaggacaattcatgccgctatgccatccctgcaaatatacaacagagacttatcaatatctctacaaaggaatatattagtccaggatcaccaatggattacaaaatattttctcataacaatataacatatttagagagcgagttgttcctcaagctaattaccctcagtagtggacaactttacagggaagcgggcaactcaccatcgagcctattggtggctaggtttacggactctagcctcctcatctctccaaagacatcagggaaagagaggttaccaaggtcactaccgagtttgccagtttttttttgcaaaaaaacgaaagagtcgactcttgacgaaggaacggttccagaccgcggctcgagaacgaagcaacgaaggcgtatctgccttgtacgtgaggagtcgttccttcccgatctattgtgcccattcaccatttctcccgtcactttcctcaccgtcgccacactcggactcctccgcagtgtgccgccgccgctgtctactaccaaattcgtcggccatcactcctctcccggcaatggtacgaccaaggaagagctggccgggcctttcccctgctgccgacggccccaatctcacccgcgcggcagagatgaaccgctcggtgccccggcttcctgcctgcttctacaacagcggcaacctctggatcctctccgacagcaacgtctaggacacctcaccggtgggcactcgacgaccattcacccccctgctcgtgcttcacccacaacaagcacattcagttctctcaacactggatcttcaccatcgttcgctgaactgctgcacagttctgatggttttatgcgatacatggtggaagagcaaccacaaaactgctcagagaatgaacacctagttggagcaacatcacatgttattcagattgatgataaacctgatgaaattaggaaggagacaagactaatatggaaatcagatgaagatgttagagtgatgagtgcttggctgaagcattccattgattcattgagtggaaacaataaaaaggagataagtattgggaggatgtggtga

SEQ ID NO: 15238 - DNA, 375 bp, Zea mays
  Peptide Sequence Number=SeqID_58613
atgtaccccgtcaagcagctccagtgcaccgacaccttcctcggcataagcttgtcaccggatccggatggagtgagagcaaagcgaccacctgacaagcacagcggattgacagaggtggtgctcagcggcagcgtcacactgctccgctcagcagctggttgcgcgggacgctgtcgcctgtcgtggaagaaaacgcctttgtcccggctcgcactggacccggagcaatgctatggcgccaaggtaacacatctcggcgccatagtctatgacgccgaggtacatgctgcgctggcacaacccgtacgacgtggcgccgacgtggcaccgagctcggcgccaagatctatggcgtcgagcacagttgtataa

SEQ ID NO: 15239 - DNA, 1200 bp, Zea mays
  Peptide Sequence Number=SeqID_58614
atggaggcccaggcccacacgtcatgcaatcggcgtgccggttgccacgtgcgagcaactgcaccgccactcgcaccactaccgcgcctccttgaccgcggaaccagtaccacgactcgaggcaaccctgcgcgtgacacgacagtgccagccaggcgcatcgatcacgggctagtcggccgcgggagaaggcgcgacggtcgatgcggccaaaaatgggtcggcaataatggcggtggcaggcgggcagaagcagcgggaccgggaaaggggataccccaaaaagggatccttctccgtgaaggaaacgggccccgagcccccctactgatcaggggttcaaaggctggcccctcggaggggttcaacaaccgccttagagcgcttgggctccacgcccactactggtcagaggacatttccgagaccagcgggaacgatcttgtaacagaatcccatcagagggaggcatcgagccctcggaccccatcgaaacgggaccgggtccggcagatcacccgcagagtgaggctgacggcagccaagcccggccccaggtgctatgggaaactccgcttcgcccgaccccagggctcggactcgggctcagccccgaaagacgacgaactccgctccgcccgaccccagggctcggactcgggctcagccccagaagacgacgaactccgctccgcccgaccccagggctcgggctcgggctcagccctggaagacgacgaactccgcttcgcccgaccccagggctcggactcgggctcagccccggaagatgacgaactccgcttcgcccgaccccagggctcggactcgggctcagccccggaagacgacgaactccgctccacccgaccccagggctcggactcgggctcagccccgaaggacgacgaactccgcttcgcccgaccccagggctcggactcagccctggcctcagccgacggtctccgcctcgcccgacctaggggctcggactcgacctcggccttagaagacagactcgacctcgacctcggaggagcctccacctcgcccaacccagggctcggaccgaccacgtcacaggaggcgtcatcattaccctaccccaagctgactcaggctacggggaacaagaccggcgtcccatctggctcgctccgctatacgagtaatgatggcgccccgcacgctctatga

SEQ ID NO: 15240 - DNA, 720 bp, Zea mays
  Peptide Sequence Number=SeqID_58615
atgaacaaaacaccggcattcaaggtgccatcacaaacggaactccggttccgtccccgcgtgtatgaacaacctccacaccggggagcctgcggggcgacaagttccgggcgacccgccaacgacctctgcagcagcagctacggtcccaggacggacgcggccaccggaaggctctcgttcacgtccccgctcaagggacgcgaaccatacatcaaagccaaagagccatgtggcgtccgcctcttcaccaacgccgcaccggcgaacgcgggccgctccaaagcgcaccggcaggtcctcgctcccgtcctcgccacgaaagcgaggaagaggacggaatgttgcatcctatctgggcagcaacagttcgccttcctcggcatggctggaggacgcctccgtagagctggaggatggtttccaccaccagaagctggaagaggagggggccagccgacccgtgcgggaggtagagctccggctcagcccggcctccgccccagcaaggatgatggctggtggtcaccgtcttgggtgaccaccggcgaggggatgcagccgggccgcgtgatgaaaatccttgaagccgaacgatggctgaaaggtaccaacttccacgaagttgcgttcctccaacgacaaggcggaaggattgcgggtgttccccatccggggggctcggaaggtggaaagacacgatgcataagggaacgctaa

SEQ ID NO: 15241 - DNA, 525 bp, Zea mays
  Peptide Sequence Number=SeqID_58616
atggctagaatagtggttggggctataaataccctacaaccaccaccattcaagccatccaagcatctcactctcttcattcaatacaagagcaaagagtacactccaaagacatattcaaagcctccaatcctctccaagtgccaaaatcaagttaagtgctctaaagtgtttagtgacttgagagagggcgactttcagaggcacctcgagaggaggaaggattggagggatcaacaggggttggctcacgagaaccagctagagaaccatgccatgtcggggcgcatgggatccaatcggatagcatcacgccaatacgccaccgtggcaggcggcgtccactcgcctcctcccttctcatccatagcttgcggtcaaggcgcctgcgcggggtcctcggtcaaaccgagccacaagatgcagcctcatcggcaaccttatctccatcgtgcccggaagaggcactggcaaagggttcagtccccgtgcctgcgcgccgcgccgaggatggtggtggattag

SEQ ID NO: 15242 - DNA, 477 bp, Zea mays
  Peptide Sequence Number=SeqID_58617
atgcggcggtcaccctccggcaggaggggccgccggaagcccggccgacgactccgacacgctggaggtgacgacgcccgccgtcgatcagccccacgttgtctaagtccgcgccgtccgcagggccagcgagcgcctccacccccaaacgccgtgggaaggggcgacccgcggaccctcgcggaagggaccgggaaagggggataccccgaaagggatccttctccgcgaaggaaccgggctccgagccccccactactgatcaggggttcgaaggctggccctccgaagggttcaacagccgcctcagatcgcgtgggcccgacacccactactggtcaggggttcgaaggccagccccccgaagggttccatggccgcctcagctactcgggctccgcgcccattactgatcaggggttcgaaagctggcccccgaagggttcacagtcgcctcagacaccgagcgagggatga

SEQ ID NO: 15243 - DNA, 1422 bp, Zea mays
  Peptide Sequence Number=SeqID_58618
atggcgccgccggagccggagatgttcgacgtcgtcatattcggggcctcgggcttcaccggcaagtacgtcatccgcgaggccctcaagttcctcaacgcctcctcatccgcctccccgctccgctccctcgcggtcgccggccgcagcagggaccgcatcgcagccgcgctccgctgggccgcggccccggccccgccgcccgaggacgtgcccatcctcgtcgccgacacctccgacccggcctccctcgcggcgctcgcctctcgcgcccgcgtcgtgctctcctgcgcggggcccttccgcctccacggccacgccgtggcggcggcctgcgcggccgcgggcgccgactgcctcgacatctccggggagcccgagttcatggagcgcgtcgagtccgagctccacgagcccgccgccaggagcggctccctcatcatctccgcctgcgggttcgactctgtccccgccgagctcggcttcctgttccactccaggcagtgggagcccccgtccgcgccggccaccgtagaggcgtacgtgagcctgcagtcgaccaagaggatcgtcgggaacatcggcacctacgagtcagctgtgctcggagtggccaacgctggccagctgcaggcgctgcgccggtccagacccaggcgaccccggcccaatattccaggccctccacctcccaaagggtcgctgattgaaggtcacaatcctctgggaatgtgggctatgaaactgccttccgctgacacagtggtcgtgaagagaactctatcaaccttgactgagcatcctgagggccttcctggcgcagaagaaaccccagagtacgctgatcataggaagaaattatggtcttctgtcaaacctgcccattttggcgtgaagatcgcctccagatccctgctgatccttgtgcgcttcatcttcaccggaatcttcatcggcctgctcgccaacttctccttcggcaggtccctcctgctgaagtaccctgagtttttctccgctgggctgttcagcagagccggcccgaccgaggaagaggtgaagagcgcctcgttcaagatgtggtttgtcggtcacggctacagcaacgtggatagctcgttggagctcggaagaagcaagccggacaaggaggtgatcaccaaggtttcgggacccgaggtcggttacgtcacaactccgatcgtgctggtgcagtgcgccctcgtcctgctgagccagcgtgccaacctgcccaagggcggggtatacacgcctggcaccgtctttggccctactgatctccagcagcgcctccaggataacgggctgtctttcgagagaggatcatatgggttgcaatgcgcaatgccagactcggcgtgctgtggaaggaaagatgctattcgtgccacacaaacgtaa

SEQ ID NO: 15244 - DNA, 288 bp, Zea mays
  Peptide Sequence Number=SeqID_58619
atggagcaggccgacaggggaccgagtagaggaagctccggcgcgtgtagaggagcctggccgggcgcgacagcgggcgcggccatggaggcagagcgcgcgcagcagctagaggccgagctgggaaagtccaggtcgcagggaaggaagagcgctggcgcgccagcagtggagcttcacgatattttgatcatgatttctagttataacaaaaagttcgacagtacttgcgacacagttcggtttaatccaaaatctgataaacttacctgcggtctgaacatctag

SEQ ID NO: 15245 - DNA, 2358 bp, Zea mays
  Peptide Sequence Number=SeqID_58620
atggaggcggcgatgcagacgattctcgtcgggatggcgcacatggagttccgcttgactgcggcgctggcgggcagtggcggcgaacaggcttccacctcctcttccttcgcctcgctattcggctcgttcgagtcagagtccgctcctcctcccgtcctctacgactgctacgacgagccgaacgacgacgagattgccgaggtgctcgcgctactagagtacaacgaggggacttcgtcggccacagtcctcgtcgactgtaacaccaccagcaagtcgcctaccaagtgttcgacaatggagttctccgacgccgacagcagcgccaggactcgcgctgtcacctacgatgagcctagcttccaccgcttcattccgccgcccttccgtgccggggaaaccaacgaggaagaggactcctctgccgaggaggccatggcggcgatgggagcggccgcctcaccatcccctttccttctcaccgtggggaatctgctactgccctacctcgcgctaccaccgacgcatgctgcggtggtggacgagccgtaccgtgacgctaaggctgctcgggcactggccgagacggacaaggccaagggttgcgcgaccatggaggcagccgcggcggtgcagaagctggccgagtccgccgtaccgcttcacctcaccacggagctcgtccagcgtggtcccgtcgacatcgaggccaacagctattctgttctggacgacgcggcaccatctctggctccttctattctacagttggcggtgcacgcagaggaggagcaggttctcgtcaccacgccaaccaagtgttcgacaatggacctcaaccgcggcgcctactccgtccccaacctccccgtgaagcctcagttctttgatgtgggcaaggactgtaactgggcgaggggcatccggagaaccgagatccagctcgctgatggcaagaactgtgagctacataggtgctggacagatatcttggatgctataagcaaggctcaacatttgatttacatcactggctggttgactatattggtgagggatgatatcaattctgtcgacctgcttacgaaggagggcttgctgactacccatgatgtggagattgcaaaaggagagcaggaaatcatgaatgaagtacttccagcagagagccggtcatctcggtttggtgtggctatggatcttgcagacatatggccttgctatgaatccaaaccatctgatgcgcaaggctatgctatcaaagggataccaaatctcagaaacacatgctatcggagtgcagtattgcagtgcctgttgatgctcggtaagctgctagaaaggatactaccatcgacatggaccaaggtgggggcgggctggcggcgggtgactggcccggaacgcccacgcttgtatgaccttcgcccccgctctggtccttccgtcgctgccgctggtgttgccaaagtcccaagactcgtcggcgcccgcaacaagaagatggcaagcctctgctcgccgacgagccaccatggtctttccgctgcagccaacaccagaccgcaccgggaggccggaggcaacgagatggtgcctgtccgtttctgcacatcaaacccgccgtgcaagttggcgggcctggcgcagaaggacctccggaagctggcctgctacgcgtcagcaacagtacgcttcagcgccttctgctcatgcccaaaccccgaagcggaagccccccgaccccaaacctcgcaagcgaccccagtaatggcgaccaaggcgctatccgtctcctcgctcacctccacggcctttgcctccttttccttgccgcggccccgcaggccttcaccttcgcctcccctcctccgccttctcggtcctcgcccccgcgcctccactctctccgccgccgctcccgacgacgaggacggcgtcgacaccgtggagcagctcctccacccacgcccgcctgagacctcagcccccgccggatcccgcggccggatcgaccgcctcatgaagctccagcgccgcgccgacggcgacgccgtgcccggggggcggaggaggtggttcccttacctggacgcgttccggcccgcggccgggggcgcggagctgtccagcggggaggtcatagatgtgctggagccgcacatcctagaggcgcggcgggaccggattcgacaagccgttggcaaccggagctacgccgtttgcctcgtggtggaaggcctctccgacttcggcaacgtctcggccgcgttccgctccgcggacgcgctcggcgtgcagtccgtgcacgtcatttcctgtgatagcagcaaaaggtgcagaggtgaagagtga

SEQ ID NO: 15246 - DNA, 1563 bp, Zea mays
  Peptide Sequence Number=SeqID_58621
atgggggagggcctgcggagcaacagaagactgacgggcggcttgccgccgcccgctctgacagcaacaacaacgacccccgctccgggtggccgaactgcaacagcgcaggcctcagggtgggtggtgctgcaatcttgccctcgcccacaccgacgctcgaggggcgaggacaagtacaaagagccggaggcccgaagcgcgaatggtggcggtgatcccatcggcgatagggacttctcgagccgcctccacctcggcaccgacgacagaggctgtcagccctccagcagatccccactcagatcctcccggacgagtgggcgcgcttctccgactcccaacacgcccagcctggagtcccaggcccacgtgtcatgcaaccggcgcgccgaatgcttcgtgcatgcaactgcaccgccacttgcgccatcaccgcgcctcctcgattgcggaaccaataccgcgactcaaggcgacccagcgcacgacccagcagcgccagcctggcgcggcggtcggtgcagccaaaaatgggccggcagtaatgacggtggcaggcgggcaggagcagcggtcacgccgagaagcgggcgacgcttcgccttcgccataatgaccgcgtcggtaaagggaccgggaaagggggataccccgaaaaggatccttccccgtgaaggaacgaggctccgagcctccctactgatcagaggttcgaaggctggccccccggaagggttcgacagccgcctcagatcgcgtgggccctacacccactactggtcagaggttcgaaggccggcccctcagaagggttccacggccgcctcaggccactcgggctccgcgcccattactgatcaagggttcgaaggctggcccccgaagggggaccgggtccggcagatcacccgcaggtacttttgggcgtgcctctgggcccctagccgacccctaacgaacggggcacggacgtccactcggattacccgcttgcagctcaccggagacaccatgttcggcgtccatcgagggcaacatggcgctctccccccctcctccttgcggaaaggcgacgcaggggcgtatgtaaaaaagccgagtctgtccctgatcgccctctcgccctgtgcagaggctcggggctgctctcgcaagcccggctccggccgaaccgttgacagcgtcaacataccagcccgagaacttgggacccgaccgtacacccgggctacggccagctcgcatgagggaacaaccagaccagccgaagcattacgtgaggcattaagacctcgaaggagtgaaaccactcctccgaggcctcgggggctacacccggcgggtgcgctcgcgcgcacccaccggaacaaaacgcaaccgagaaaggctggtccccttgcaaaaaagtgcgacgaaagcctccaagcgagtgcaaacactcccttcgaggctcgggggctactgtcggggaccaaaattaggggtaccctcaaggctcctaattctcagctggtaacccccatcagcataaagctgcaaaggcctgatgggtgcgactaa

SEQ ID NO: 15247 - DNA, 249 bp, Zea mays
  Peptide Sequence Number=SeqID_58622
atgaacaacgagagctccgagatcatccagatactcaacgccaagttcaacgacattgctacgaaccttgggttagacctctacctagttcacctccgggcctccatcgacaaggtcaatgagctggtctatgatgccatcaacaacaacctgtcggggaccataattaggggtaccctcaaggctcctaattctcagctggtaacccccatcagcataaagctgcaaaggcctgatgggtgcgattaa

SEQ ID NO: 15248 - DNA, 372 bp, Zea mays
  Peptide Sequence Number=SeqID_58623
atggccggccgggccgaggggcggggcgggcgagcgccacgcgcaggggccggggcaggggcgggcgccgtctcgaggggaggccgggcgggggccgagcgccgccgcgaggggccgagcgccgccgcgagggggcgggcgggcgagcgctgccggggagggcagccgggcggggccgatcgctgccgcgggcgagaggctaggcgggggagcgccgcgcgaggaggccgggcgtttccgcgccgccgcaccgaggggtccgggcggtggttgcgccgtcgcgctgaggaggcctgtcgggggccgcgccgaggatgccgagcgagggtcgtgccgccggggaggccggctggggttgatcgccgccggtga

SEQ ID NO: 15249 - DNA, 174 bp, Zea mays
  Peptide Sequence Number=SeqID_58624
atggagagtcatgatctccgggcagaatgggaatcacggcttgtgggtggttatgagatcgatgattctggttatgactatggtgctggttgtcagcattgcaacctctgctcaggcgaagatgaagctgtggaaggagacttccaggagttccaagactacgacgagttctag

SEQ ID NO: 15250 - DNA, 347 bp, Zea mays
  Peptide Sequence Number=SeqID_58625
atggcccaaagtatgtcgctgatccaagcagtcgttggaccaagcgtggatccaggaagaggacgaggcacaagatggttatggatcaggttggtggtaggagtagaaggggaaggagaacaccatttcttaccgaccccgagcagtatgagtgtggcaagtgcggtagacttggtcataattcacgcacttgttgttggcagattagcgaggatgacacagttccacctcctcgacccgttctacgatgagagccaccgggggcaccttctgtcggaaggccaggacctagcagcgcttcgttctaggacacacaatgggttcctagacatggtgttcgacaacag

SEQ ID NO: 15251 - DNA, 1142 bp, Zea mays
  Peptide Sequence Number=SeqID_58626
tgcgcgcagaagttagagcagagccagaaggcgcaccggacagtctacaggacctgtccgacgaccgttggcgctgtagtagccgttacttcgcgggcacaccggacagtccggtgcgccaccagacactgtccggtgctacaccggacagtccggtgaattatagcggagcggctcccagaattcctgaagctttcccgtgggggtccggacccactgttgacaccttggagtatattgtttcctccgaccacgtggcggccctggagccgcccatgtgggtaccgatagtggcccccgggcccgcctcaggggaggaaacgagcttgcaggtggggccaaagcttgattggcaattggcacgctgcttctgtgcgcttgctggcgaaccggcgcccatggaggatgactcttgggcccgggcccccatgccagagactgggttgttggtttcggcggaggtgaagaggcgcactaccgcaggcggtggcttgctcctcacacggcggttcgccttctccactcacggaggtcgaagcccaaggagtatgactcatgggcccgggccccccgtgccagaggctggctcgttgctttcggtggagatgaagaggcgcactaccgcaggcgatggcgtgctcctcacgcagcgggcgtcagtgggggaatctttatttaaaaaggggactcccccgagtgcggtagccattctcatcactcacagcgccctttcgcccttgagttctctgcgctcttctgccatcgtagccgccatggtcttgctagaccctcccgagcccctccagcccgaggtagcactcaacttggtgcgcaacctgctcggatggggtgtgccagcgttcgccggaaggatccgtgttggcgcctctccttatggcgacctcgctgccgaggagttcgtgctcttcgtctccaacctccccagcgggttggcgctgccgatcttgcttttcttcgtgctgctgttggaggagcttgtcctccaacctgagcgcttcacgccctgcttcatccttcaggcggccatcatcacctacctttgcaagatgtccgtgggggcgacgctccttcctgcttcttcctccagcattcggaggaaaggatgttcaccagccctatga

SEQ ID NO: 15252 - DNA, 1426 bp, Zea mays
  Peptide Sequence Number=SeqID_58627
gtccacccagctgacgccgaatgcccgtggtggcccctggcgaagtatgtctgggcagcgacttcgtatggtggtcaagcccgtctgtggaggtcttcgccaaacattattgtctgcattggcagaaaaggaaaattggacacaagattgcacagtttggatcgtgcacgtttacgccgaggaccggaaagacttgaaggaagtcgtggagttagttccatgtgcccgcaataagtggggcaactggtgggatttctggttttatgtttccgaaggcgaagtcaaagaccacccagggctccctgtggccgtgatgtgctcccattattatgtggcgtacccgcaatttgaggtggcagaggatgatgaagacgaaggagcccttcgaagcgctgcccgcatgagtagcgatcgcgatttagttgaggaattcatcgggtatggggtatggcccttggcacatggctgggcgttgggcgaagtatgcccgcgtgagatgccctccttgggcgggcagcgggtgcgaagttctgccttcgcgttggatctgcatggccgggatcccgtcgcattcgtgcgtgaagcggaagatggtgtagcgaggattgtggggcgctatgtgccgagaacagagggtctgcggagctgggatattcgtgggtccaacgttagattgaatcgggtcttcgaattaaactgcttgccatacggtggctatcccggggaggacgctgccgaccatgcgggaagaaactggtggacccctcgggggaaggatgtcttcgcccgagctccgggagtcttcgacacaaatgttggagtgatggagagggaccgtcaagacgctgcgcagaaacgtcgggcggtcgtcaggatcgcggatcctatgcgcgaggcgaaaagggcgcaaaggagcgcgaaggctgctgcctctggtggtagcaaaccggcgctagctgtgaaaccggccgcccccttgcccagcaaggcgtcagccagtgcgaaggctaccgcctttggcgggagcaagccacccctaggcgggctcgtgaaaggacgaaggccgccttcgccggcgcgacgtgttgccgacttcggcacggacattagtgtcgaggattatcttgttggcaagttaaaactcctttttttgctcgacgaggtctttaacaagtatcatggtgcaggttcgggtgaggggcaactgattgttgtcccgcctccagtgacgaccactttgccaacggcggtggcgggggcaaagggagccgcatgggacccgtgggccactttctgcgcgagcggcgagattctgtctgctgctgccgctaaggacgtggcgggctccatgtctcagcgactgagggaagcgtcgcagcagctgtcacagcagctgaagcaggcggccgacttcgccgacctctaa

SEQ ID NO: 15253 - DNA, 459 bp, Zea mays
  Peptide Sequence Number=SeqID_58628
atgagcggcagtttgaggtcttccgggggcgaaagtgaggagggaaaggcgtccaaggagaaggagcagggcggcgtcgcgtcggggagccgcggtggccaccgaacagatcgaatagagtgttggatgggtcagagaggttcacgggatgccagagaagatatgggtgcaaggaatcggtcggagactcactggatagctcggtccacgcgcagcggcggaagaccgaagtccggtgaggtcgatcttgggcctccggtgaagtctggccgggtccgagggcttggcaagcttcacgggctactggcggagctagccgaagcactggctcgacttgaggatggctggagtgggctggccacggtggccgaagctctggcggcaatggtgggcggaattgagctcgccggagctaaggagagggggctggccggcgagggtgagtgcggggcgaagtga

SEQ ID NO: 15254 - DNA, 361 bp, Zea mays
  Peptide Sequence Number=SeqID_58629
atggaggccgagaagacggacctccggcgccagctagtggaggagaggagggaggcgaataaggccatcgctgatgcgcaggctgcgcaggccgaagccaaagtggcgcggggggagggcagtctcgcccgccaacgcgccgaggagctggaggcgaggttcaacaccctgcgcagccgcgtggacaaggccgagacctcgacacgcgtggaggtcgagcggacacacgtgcagttcgtggacgcgtaccgcgagctgggtgcgcggactgctgacttcgaagtgcccggccaagaagcgggccttcgcttccttgaatggttgcaggaggagctgctggtgctcccgaccattgtgacag

SEQ ID NO: 15255 - DNA, 531 bp, Zea mays
  Peptide Sequence Number=SeqID_58630
atggctttctccgaattcttccagatctgggatcttgttcgggaggttcgactgttatcagatgttccagatcagcacatatggacaccttcctcctcaggctcttactcgtccaaatcggcgtatgatcgttttatgatgggaaagcttcaagtagggctgccaggagcaccggggttggctgcgtacggtgaggaggcgaagacgagcccctgtagatgctctgcagttttcggtgacgtcgggtgcctttccgtcgctaatatcgaggacggagccgggctcaggcgaggcggaagtccgcccgaggccgtgaccgagcccgctccaggattcgtagacgtgtgcgacacagttgaaggagtggcctcctgcgggattcgcggggagcaggttcaagttatagctgatgaatgggtcaagatgaactatactattaacagaatatggtcattcactaaggagacagagaaaagggtggaaggtctatattcagatttaatgaaggagagctgcgcatcattaaattaa

SEQ ID NO: 15256 - DNA, 573 bp, Zea mays
  Peptide Sequence Number=SeqID_58631
atgcgcgtgacccaacagtgcccattaagtgcgacgatcacgggtcactcagccgcggagatagacacgacggtcaatatgatcagaggtgggccgacagtaattgcagcaacaggcgtgcggaagcagcggtccaatcacctacagggcaagctacacctccggcaagcgaagcgggcgccgtttcacctctgtcatgatgaccgcatcaaaaaagggaccgggaaaggggatattgtgaaaaggatccttctcggcgaaggaaacgggccccgagccctcctactgatcaggggttcgaaggttgcgccctccagggttcggcaaccgccccagagcactcgggctccgagccctttactgatcaggggttcgaaggctggccccttggaagggttcgacaactgccccagagcacacagagtcagggatgaccctgggtacatccgttacatggtcgaggctcgggctatgctcccgaggtaccctaggacatttccgagaccagcgggaacgatttgtaatggaatcccaccagagggaagcaccgagccctcggaccctatcgaatag

SEQ ID NO: 15257 - DNA, 246 bp, Zea mays
  Peptide Sequence Number=SeqID_58632
atggactcttggctcggcgccgtcatcattggcgccgagcttctgtgtgccggcgccaataatattggcgctcatacgtcagacggtggtgtgacctgggatctacgtggcatgtacctcggcgccatagatcttggcgccgaggtcgataagtctgaggatcatgacacctatcgacagaggtattggatgtgtgctaactttgcatttgagccaactattgttcaacgtcggatgaatttaatg

SEQ ID NO: 15258 - DNA, 537 bp, Zea mays
  Peptide Sequence Number=SeqID_58633
atggcacctaaaagagctaattcgaaggcaaccccatccgtcgacgaagcagcgaaggcagcactgctagctgagaaaaagggcaaggccctcgccgacaacacccaccaaggagctggcgaagacgaagcacatagtaagagacagcgcaacgatcaacacactccagaaggcaccctccgcacctgcagctccgaagggcagccacaagtgccacccccaggcttcgctccaccagagggcgaggacgcagcagaggacggcgaggtcctcggcgtctccgcagaagaacagctacagctacgaaccctgcgcctcaaaaaccgcaacctccagaagcagaaggacatcctcgaggccaagcaccaacgtgtctctacgcaggccaaggtgcgccaaatgatacgagatgaggagcagagggctcaagagcttgagcaggagattgcgctaatgcagcgcgaaggccaacatgatctgcagcacggcccgcccctccagcagcgcgcgctagtcggagacctattcgttccttag

SEQ ID NO: 15259 - DNA, 258 bp, Zea mays
  Peptide Sequence Number=SeqID_58634
atggggtgggacgacggcgagacggggttcatggggagggagagagggtggaggctggccgtacctgggctggagcgccgggcgacggcgagggatggcgctgctggtgagaatctgcggccaccggccgacccggctactgaccactgcgatcctgtcgtcgccgcctccgagccacaaggattcgttcccactcttgttgtaggcatcattcgtgtagtttgcataccggaactgcaggtgaacccactcgactaa

SEQ ID NO: 15260 - DNA, 432 bp, Zea mays
  Peptide Sequence Number=SeqID_58635
atggcgaggtgcggtccacggtggtgttgttcctccggtgaggaatccgtgcgccacagaggccccaacgccacaatcaccgcgaccgacgggtccgtcaggacccaaccacgcaccccagccgatcagcgacgccggagaaacggtatgtcgacggcgcacgagcgcgaccgcgacagcgggtttgttccgcaaggaatgcggcgcgagtggacgagtggaggagagaggatatgcctaggctccgatgactcggtacttaagtacccgcgagccggtccacgcgcacgaacgagctaccccgagatctccggccaaggagtccgtgtcgcgccggtcgtgcaagaaacacgggtgagtttgttggggagatctgacatgtggttccccggagcagcgacagaggagtccgttgaccacagggggtggtga

SEQ ID NO: 15261 - DNA, 252 bp, Zea mays
  Peptide Sequence Number=SeqID_58636
atgaagttcaccagtggcggcgccccatctcttgtttggcgaccagccttgctcgtccctggcggctcaatcgaaggtgtgggtgcacaagattggggtaaccagtcgtataaggtgggaatagaaaggttataccattcatcatggctctatgggttggatgtaattgtggacattactccacaacccatcacactcgatcaaagatccaaatcaaacatgtatcataagaacaagcattcaaacacatag

SEQ ID NO: 15262 - DNA, 639 bp, Zea mays
  Peptide Sequence Number=SeqID_58637
atgaggaagactttgatgaagatgttgatgagtaccgagtctagcgacgctctgactcctttctacccagttgtggtggaagaagtccctatagagctacacccccttcaagtgaggaatgatgtaatcttggaggacagttctaaggagattttggcaacacccactctattgtcagagtttcatgcctttgttgcgggaccttcatcttcagcaccacctgtactagtagctcaagtcccggctcctggaggtgatgacctggatgattctggtgatgatgaagacgaagaagaagaagaaaacaatgacaacattgtggatgccaacaatgaacaagaagacaacttcgttggattgtggcctgttgcagaacattacacttcaatgttcgagacgggacactttccaaacttgttgcatgatgtgctgcatgcactgggaacctacgttcgacctctatattacacaaggcgggtgtcggagccccctcaggcttgttactacatcactcgtgtgcatagcagagtattggatgcaggagatagaggtttcaggactctatcatcccatgagtctctaacgccgctatctacctacactgcttcagtcagcaatgctgctcggagagctttgtga

SEQ ID NO: 15263 - DNA, 372 bp, Zea mays
  Peptide Sequence Number=SeqID_58638
atggcgcagggcggaccggcggcagagactcttcaacggcaagaaattcacagtgccccatggcttggaacagggaagtccgcgcggggatcacgccatggttcacggagctcggagttcacggcgcgccatggttttatagccttgccatggaatctgatttcacggacttcggccagcagcaagctttacagcgaggtagtctgcgcggaatccgcgcgtttgttgcgctattgccgtggacgccgcacggtgtgtacgcctggtgcggaggaggtgaggttccaggtgcaattttccgcggcgaagttccgccacgatgcgcgtgaagcacaggactccctgcggccgaaggaaatcgagctcatctga

SEQ ID NO: 15264 - DNA, 54 bp, Zea mays
  Peptide Sequence Number=SeqID_58639
atggcctccgccgtggccctgtatagcgccgccgcctgggcatgtcgggggtga

SEQ ID NO: 15265 - DNA, 768 bp, Zea mays
  Peptide Sequence Number=SeqID_58640
atgccggggagggcgaactgttgctgcccagctaggatgcaacattccgtcctctgtcctcgctttcgtggcgaggacgggagtgaggacctgccggtgcgctttggagcggcctgcgctcgctggtgcggcgttggtggacaggcggacgctgccgtcggtgctgacgtggtggcagctggagaaagcttctccgccgtcgaggccgtcagcgccgcctacggaccgacctccggctctttggctttgatagcttgtcctcgccccttgagtggggacgtgggcgagggccttatggcagcagcatccgccctgaggtcatcgctgctactgttcggccgctcggagcagaggtcgttgtcgctgctgctcttcgggcagtggaaccctcagccgttcttcgatgagccggagccggaggcaacagtgtcagtggtggccggccgagccgtctgctcgggccgggttcctggaggagaccctggcggtgatggcccgggcgcggagctgacgtcgtccttcggagcggagatcctccgaccgtgttgccgtccgaggctcggtcggacttcgccgaaggtggagttgacgccgagggtgctgctgctccccctccatcgacgtctgagcctgcaggatcggttcgcctgtaacctcgccttgactgttggccagcttgtacgtcccgggcttcagaaccttggcgatgacgaacggcccttcccagggaggcgtgagcttgtgccgccctcgggcatcttgtcatag

SEQ ID NO: 15266 - DNA, 480 bp, Zea mays
  Peptide Sequence Number=SeqID_58641
atgcaggcggcatgcaaccgcaccaagggggcgcacccttccgacttcgacacgtccagcatggaggcccaggcccacacgtcatgcgggcggaagcagcggtcaagtcgtcagcaagcccacgtcccctcctgggacagcaagagagccctctcccacggtgtgaagacgacgcgcccatgttccgttcctcgaatggctcgcgcatgcacaacggctgccccgcgaaccactcgtcctgtcgcattaactctgcggcaggacaggcgacacctttggcaggcgaagcaggcgacgcttcacctctgccataatgaccgcgtcaaaaaagggaccaggaaaggggatactccgaaagggatccttctccgcgaaggaagcgggccccgagcccccctactgatgagaggttcaaaggctggcccctcgaaagggttcaacagccacctcagagcacccgggctccgcgcccactactag

SEQ ID NO: 15267 - DNA, 432 bp, Zea mays
  Peptide Sequence Number=SeqID_58642
atggatgcaggggatagggggttcaggactctatcagctcatgagtccctgacaccgctatccacctacgctgcttcggtcagcgatgctgccagacgaactctgtggtctctcagccacacctaccggcagcagctgcatgacacgaggtttaggcatcttcctctgcgcttgagtggaggaagccagaccagcatcgttccaggtggagctagtgtagtggccggtcttaacacggacctggacagtgccaccctggatctctctagggtgcacttggagctagaggatgcccacgccaggattgcagacctagaagccctacttcaaggacgggatccacctgaagcccaagtccccgccatggcgttgtcccctccccgcaagaggattcgctatggggagcctggatccatcaccagacagctttga

SEQ ID NO: 15268 - DNA, 189 bp, Zea mays
  Peptide Sequence Number=SeqID_58643
atgacccgcacggagttcggccgagctgttgaaggtgatcgcctcgacatgcgagccccagacgacagcgagagtgagatgtgtccgcgcgccgcatcggtcgctgttcctgaggatgacgacacgggcccactggtcggtgccaaaatgctgctgggccgtgcggaggaagaagcaagttgggcctga

SEQ ID NO: 15269 - DNA, 183 bp, Zea mays
  Peptide Sequence Number=SeqID_58644
atgccaagtggtgggggtggtggtggagaccaggatgagagaaaaaccggtagggtcaaactcaatggaacaagaattgtcggtggtgaaccgacggacagaaagaagattgtgagtgatgtgaggggctacgaaaacgtcgttgaggtagaacggtccaaggagtaccaaggcacctactga

SEQ ID NO: 15270 - DNA, 255 bp, Zea mays
  Peptide Sequence Number=SeqID_58645
atgcacgacttcctccttgcgctggagctgtgtggttattctggttggttgctggggcaggaaggcgaggtgcctggttgttctgacgctggtactgatttcctccctgctagttgttcggacggtgctgctgctgctgctgagggaactgcctctggtattgctgctggtgctaacactgatgctggtgctatcattatggctctatcgatcaaatgctggaaggtagggaaagtgtggttcctcaactggtag

SEQ ID NO: 15271 - DNA, 837 bp, Zea mays
  Peptide Sequence Number=SeqID_58646
atggctaaaaattttggcagcgaaacagtacaaatagcaatgaatgctgtggtaacttcacacctactcgtctgtttatatagtgctgcagcacttgagagcaagtcaccaacactgcctcaactggaggatgcagccggcggcccgcaccgccatgcgaactctcctttccctcgtcgtcaaggcaaaaggctccacggagaagagatgggtccacagatcccagtgggggtcaatccccaaaaacccttcgcaaattgtcgcgaagatggctgcttgcgcgatggagttagggctgagattgtgcagctccaccctgtagaaatgcagaatcgcccgcatgaagcgacttgctggcacttcaaacccccgctcatggaaagagacgaaactcagcacataccccgacggcggggacagggcggctccgctcggaggggccatccactccggctgcgggtcaccggagaggggacaaagcaaaccatcggcaacaagggcctccaaatcgtccgtcgtgacggtggagaaaggccacgggtcgcgcggcggaacgacggttacccggtcgaccatcaccaagcaaaggaggtggcggcggagcggacaagggacctggaaaggggatactccgaaagggatccttctccgcgaaggaagcgggccccgagcccccctactgaacagaggttcgaaggctggcccctcggaagggttcgacagccgcatcagagcactcgggctccgcgtccactactggtcagaggttcgaagactggcccctcggaagggttcgacagccgcctcaggccactcgggctccacgcccactactga

SEQ ID NO: 15272 - DNA, 948 bp, Zea mays
  Peptide Sequence Number=SeqID_58647
atggggctcggtgtatgcggctcgctctgccaagcttgggttcgccccttggggaggagtgcggtggcaatgagattgatggttcttggttttgactctggtaatgtactatttgagcaatgtgtgatgatgtccatgttatgtaactgctgtatggctcgtcttagacacaccgcacggaagtctgtcatccccttcttaccctctcgtctcgtggagcgtccgcttcgccgtcccgtggtcggtcagtccagtcacttggagcggcaacaccaccgcctgcatgaggagcaggaacgtcaacgacaggagcatcagggctcttgtttctcgctccagcaggagatagagtctgtgaggagctgctcccctgtgcttcccctggaggcgccccatgcaccaccactggatgccccagtccctggagtagctgctggaggagacccagacgacggaggtggcgacgacagctcgagccacgacaccgacttttctgctgaccaggagccggaaggatgggttgctcgacccatcactcgcgacgctgctcgcgggtgtcacttccacgatgcgctcgacaccctgctacgtcgggcacttgaccgacgtacttggtctatcgagtatcgctgtgtgatctaccagcatagtcgcggggtccacccggactgctgggaaacgacctgcttggtgcgtcgtccggagaacagtctctggggtgcgaagatgtcagaaaacagacacagaggaggaaggcgtgctcagcaggaagaggtaccccagcaagcaactaccgcccccgcccccgatgtccatcgagcaaatgttcctaatgcagactcaggcagttcaagccatcggtcagactctggccgccattcagcagcagcagcaatagccaccacctcaacctcagatgcctcagatgcccagagacaagtgtgctga

SEQ ID NO: 15273 - DNA, 633 bp, Zea mays
  Peptide Sequence Number=SeqID_58648
atgacagggaaagataaagactacagatatatggcaacatcagatctgcttagtgaattgaataaagaaagcttcaaagctgatcaagaccttgagccaaagttaacgattattgttcaacaacttgaggatgcttcaggagatgtttctggtttagctgttaaatgttgggttggggtttcgatcttacaagctctttttgttaaggaacacaatgcagtgtgtgatgcaataaaggatgaacatcccaacctatcagacgaagaattatatcggtatgctagattggtcacttctgttgtcattgcaaaggttcacactgttgattggactgtcgagcttctcaagactaagaccatgagagctggaatgcgcgcaaattgcatcgatattggagagttggttggtctcaagggggaagaacgactatcaaaaatagggtttgaaaagaaaatattatcaatgggatatcaagcttgtggtgcacttgaactatggaactacccaagtttcttcagggacctcataccacaaaatttggatcgtaccaatcgatctgacaggatcgaccttgctgccctagaaggtatgaaatttggacccaatttgtaccatatcagtagaggatcatga

SEQ ID NO: 15274 - DNA, 4611 bp, Zea mays
  Peptide Sequence Number=SeqID_58649
atggccgccactccggaccgagccaatgccgacctccgccatggcctctccgtcgacacccccctgccgccccagattgccagaggtttagtcaatgcttattcatttgatctctgtacagaagagaagcaaggccttgatactgaaatacccctttctcctcagtggcttatgaaggtgggggaaaacaaggatcctgtttcacatggtatccgctcagatgtttcaaaaacatcaggggctggtgaagaccaaggctacaatacgaagaaaaaggatgttttcagggcttcagttcttgatggtgaaactgggcgtcgtgaccgctggcgcgatgatgaaagggaaccaaattcaacccatcggtggagtcgctggagggagacagataaggaacatggcgatgcacgcaaagcggaaagatggtcagatgacacctccaagcattctgtggatggacgtcgtgttccgcaggagcgctggggcgattccaataataaggatggcagttatgaccaacgacgtgagaataagtggactgcacgttggggttccaatgataaggagtctgaaaattggcgtgataggtggggggattcaggcaaagagggtgatgcttaccgtgaaaaaggtttatctcaccatgggaaggatgccaacagttatgaaaaggatgacaatatttctcgttcatggaaacctagttattccgcaggccgtgggcgtggagatttgccaaattatacttctcagacactgccgaaatcacctgctccttctggatatggtagggggaagctagacaatgattttgcaaagtttccaaacagtcgtggaaagttcacatctggtacaagtgcaatcagtagtggatcttcacgaccattccatcttggtcttctttctgacagacctggtggtatatcagatcgttcggcattcagatacagtaggctgaaattgcttgacatataccgaaattgtgatgtcactgattttaagttatctgttgattgtttggaggaactctctgtgttcatgcaagaggatgttttagaacctttagcactatctgctcctgttgctgaagaagcgaccattttaaaagctattgacaaaggggatatcgtaaacagtggtgtccatcaggcttctaaagatggttctgttggaaaagctggtagagaagaccagccaggaggtgtggaagtctcaggtcttgctggaaatactgatttggcagcaagaggggaaccaatgcatcctgcgacatctacttatgttgttccacaaaggtcacagtttattggagaacataaacttggaccatctgaatttgggcatcaaatacctaatttcttaaatcaagaatcaaaaactgttggcatgttgggttttgataactttgccagtccagtgcattctcatcctaatccagaaaacctctctctatactataaagatccacaaggtcaaattcaaggccctttttctggtgccgatattattggctggtttgagactggttattttggcattgatttgctggttcgtccagtgaatgcaccccatgatgttcctttcttaatgcttggggatgttatgcctcacctgcgagcaaaggtaaggcccccaccaggatttgccacttcaaagccaagtgatatgctagctccagagaccctacctacagggaagtttgtcagctctagcatgcaagcaggatcaactggcattggaatatttgacagtgggccaatcaggaaagataatgctgttgaggctcaaaatcgtttcctggagtcacttatgtccaatagtgcgcggaatccttcggcaggcactatctctataactggaggtatgaatgaacttgttagtactagctttggcaacatttctgtgcgcggaggtgagagcggggtcaatctgaactatcttttggcacagaaaggactgttggagagacaaaactctttgcaaaaccctgtttcatattggacaggagatgctccagcatcaaaagtacatcccatggctgatacatctcgccaatctttgcaatctcaaaatgttgatttactagccatgctgcaaccaaaggagaagcctcaagttcctactggtaattcgggtctgccactatgctccaattaccctgaagcaagtatcgttaatcccaacttgcatagtggagatcttgctcaaggggctcttaatatgcgtcaagatatgcagaactcccagaacattggtattggagttcaacaacacaacttaatgccacaaaaccgaccagctttggctcagttgccatctgagaagcttgctgagatgtctcaagatccacaactgttaaatatgattcgtcaagatctgcagaactcccagaacattggtattggatttcaacaacacaacttaatgccacaaaaccgaccagctttggctcagttgccacctgagaagcttgccgagatatctcaagatccacaaatgttaaatatgcttcagcagcaatatcttttgtcacaactacagttgcagtctcagacaccttttacacctcagcctccactctctatgttggacaagatgttattgctcaagcagcagcagcagcagcagcaactgcagcagcagcaacaacaactgcaacagcaactggagcagcaacaaaagctattgttgcagcagcaactgctctctcagatggtgcctcacgcgcatcctaatcaacacactgatgattcttatgcattgaagtatacttctgtgccatctgatgattctaccagtcttggttttagaagaatgcaagaggctattgaagtagatcagaaattttctgtccatggtatgcaagtgggtcaacaacctagtcagtcaattatgaattttagaaatatggatggtatagctttattgcaaaatcctgtaactgcactgccggtgccccatgaaactgctgtgggtgcacttccaaaagaggaccactctcgtcctggaatgtcggaagattttgcaaatgtcgacttacaattgaaatcaactatggtacactcaaagctggtggaagttgcagataggaacgagggttttaaatctcacgaagtggacactgcagcagaaaaaaataaaatgtctgaaaaggagttgaattctggatctactataatcatggggagtgcttctgatgaagctaagaatttgcatgaaccaccactagatccaaagtcagaaaatttatcttctgatatttctggtcaggttcaagagtcaaacctgtctgcagaagatacgcctcctggcatcacagcagctgtggcaactgaagtaaaagttactgatacacaggagaccaaaaaagcagaaaagaaaaggaagcaaaagaaaaaacaggctgctgcagatgctggcaaaggaacatcaaaggcggttgtagcccagcagcaaaggcaggaaactgaggttgacaattctgatattggtggtaataagcatgatttaacagatgatacagaggaactattttggggttcacctatcagagtgcaaaatgagattttaccctccaaaagttttccagaggaacatgacgctgacaaagctgaatcgcagtttagttctctatcatctgatcctcatagcatggcaagccagcgtgcatggaaacaacctactcaaggtctcaggcctaagtcactgctagaaatccaagctgaggaacaactgcgtgcacagaaaggattaactactgaaactgctaagccagcagcttcagttccttcaatttcttggagtggcatgtcaatatcttccgagcaacattatgggggttcaaatatatcattgggaagtatggaaagtgctgttgagagaaataaaagaagccagttgcatgatttgctggcagaagaagttctggcgaggtcaagcattgcagataatgagaataatgccaacgatgcatttttctctcctctgtcgcctgctgctgttcaggctgatgctcctgcccttgatgataatgacttcattgaggccaaggacaaaaagaacaaaaagaggtcagcaaaaacaaaagcttctactgtgaaggctccatcacctgttgtttcctttgatccaccagctatttcgatgccttctgaaaagggaaagtctgccaagcaagcacaacaggagttagaaatattgccagctccaccaagtggtccatcgtttggagattttgttctttggaagagtgatcagactagctctgtgcctgctccagcatggtctaatgactcagcaaaggtgcagaaacctttgtctttgagagatattcagagagaacaagaaaggagaaccgcatctatccagcaacaagcaccctcaccaactccagcaaaggtggccccgaaccaaagaagtcatgtgaatgcttcttcctggcaagcttctggaccacctccatcacaggcagttgcccctgtccaaatgagttccaatgctcccagtcattccaggtcaagtgctgaagatgatttgttttggggcccttctgagcactccaaacaagatacaaagcagtatgtcttgcagcagctcttgcatttgaattga

SEQ ID NO: 15275 - DNA, 63 bp, Zea mays
  Peptide Sequence Number=SeqID_58650
atgtggccagagaagatgatatactccaaggtatcaacagggatgtgccgcctccgcatttaa

SEQ ID NO: 15276 - DNA, 465 bp, Zea mays
  Peptide Sequence Number=SeqID_58651
atgggtcagaggacacttgccttcaccaaactgctgatcagggacttcctctgcaacttcctcgggaaacacagactgcctgttgtctacgtaaagggcaccggagggggacggtccacagcgaagcggctcggcggcggcgctaaagggctccggcgagcaattaaacgcgacagggggcaatacaaaggtcgggagggggcgggagaggttccttacctcaaggcggactccggggaccccttgatggcgacggagacgcggcggcagcccgagtcgacggtggcggacctcggcggctgcgcagagaacggcggtgagcgagggcagaggaaattagagggggggagggggaattggggcgtgtcccgggttgcggacgtcgaggcgaagctcaccgtggcagagggcacggcggggctccgacgtcgacggagaaacgggctcgggacggcggcggtttaa

SEQ ID NO: 15277 - DNA, 57 bp, Zea mays
  Peptide Sequence Number=SeqID_58652
atggctattttcggcaaaatgggggttctgtggccattggtcatcgaccagaggctc

SEQ ID NO: 15278 - DNA, 285 bp, Zea mays
  Peptide Sequence Number=SeqID_58653
atggggcttttgtgtggattagggtttagggcgaggcgcgttgatggcgtggaggacacccggatgaacccgacggtgccaagtgcgccggggctagagatcctggtgtgcgagaaggtgatgatcattccagacagaagctttttggaaaattcacctgtgcgcggaccgtactggcccttctggcggaccatccgcgacaccaaaccgttgatgtgcaggggtggaccgtccgaaccagaggcacagatcgtccgcggttggcagaacaagggcaacaactag

SEQ ID NO: 15279 - DNA, 588 bp, Zea mays
  Peptide Sequence Number=SeqID_58654
atgggatccactttagtaagcatttctgcaaaaacagagtcattgatgattgaaaagccttaccttgactcccatataaccagcatacccttgagagtcttttctttagtcgggtggttccgaaagaagaaaaacaagactgaagtgcgggaggactcggtcctccacttaggatcttttgcttttagcttctcgggaggagtttgtgcctcccagacgggtgagacgttcctggtaaggagtgatctatgggtcgtggatgcagccatccgctacttgcaagaccaactcgcgaaacgagatttagcactcgattggatggttaactctcgtttactcgcctgggctaaggaagccaaagctcgagcccatgtggaggagcttagcttagccatggataacgtgcaggtctattataatacactacatgaagaagttcatgtgttgtattcacaactgcacccgaacgtccctgcagatcctatcggaatggaaaccggaccttctcatgtagcgggagaagcacttgatggtgaactggaccttttcaggcccccccttccctctatgaagttggttgacgaatga

SEQ ID NO: 15280 - DNA, 1326 bp, Zea mays
  Peptide Sequence Number=SeqID_58655
atgggatcggagggacgggtctggaatggcgcgggcgtggccgccggcagcggctatggcggcagcgtcgaggcgaaagcgaccaccgcggcgcccgcggacgttcccacgtcggcggcctccgtcgacatctcgctgccgctcccggagatgtcgcctcacatcatgcaagtacccccccctactctcctatctctcttcgatcctcttgcttccgctcgcacctcgggctggtctcgtgccgctgtgcgcctgtcagcagctcgtgtcatgttcgagcattcgcgagcgcgcggggcgtcgtacccgtgcccgcgaaccagccgaggtctctgcaaggagttggtcaaagggtggtcgtcgattgacagctcgcgcttctccatcgagaccgtgtctgggggcatcaccaatctattgctcaaggtttctgtcaaaggaaacaatggcaatgattcttctgttactgttcggttgtatggaccaaatacagacttggtgattgatcggaaaagggaattgcaggcgataccgtatctctcagctgcagggttcggggctcggctgcttggaatgtttgaaaatggagtagttcagtcattcatctatgctcgaacactgtcacctgcagacatgaaagaacctaaaatagcagctgaaattgccaaggagctacgcaaatttcatcaagtagatataccagggtctaaagaaccacaattgtggaatgatatattcaagtttttgaagaaagctgcagcattgaagtttgaggataacgagcagcaaaagagatatgtaaagatctcatttacagaaatacaagatgaagttaaagaacttaaggatctcttggacattctgcatgcacctgtggtttatgcacacaatgacttgctttcaggaaatctgatgctcaatgatttggaagggaagctatattttattgattttgagtatgggtcatacagctaccgtgggtatgacattgcaaatcatttcaatgagtatgcaggatttgactgtgactttaatttgtacccagataaagatgcccagtatcacttcttcaggaattatctgcatcctgatagacctagtgaggtgcaggcacaagatatggaagtgctttatgtggaaacaaacactttcagactagcatcgcacatttactgggcattatgggctcttattcaggcaaaggtatccccaattgactttgactatcttggatacttcttcttacggtatggtgagtacaagaaacaaagggactcctgcttcgccttggcacaaagtttcctctccgggctaagaaatggctag

SEQ ID NO: 15281 - DNA, 1365 bp, Zea mays
  Peptide Sequence Number=SeqID_58656
atgtacgccgccgtcgttgcaatcaggtttgcctgccccaccaagacaagtgctcaggtcaagctactcccctatctgccaggatcagatcaaagcaagtcaaaacggcccgaccccgacgacgagctactcctatactcccaccccaccaacgtccaaattcacgagccggcgtgctgtccgcgcggcaaacctggagcacgggctagagttcgcgcggtggtgatgatggcgacccaccacgacgcgctgtgggtgaagctgcacgagctggagctgcagctcgcggcgtacaagctcctgcgcgccgcgcgcggggacgaccacgcgggtgccgtgggcttcgcttccgcggacggggccgacacgccggggggcagcgcctgccgcggcaggcagtacgacgcctacatgcgccagcgcgacgccaggcgcgtggccgcgctcgcgcagcagcagcagcagccgccgcacccggcgaacaataaggctcagcgacctcggggcgtgcgcgccacgccgatgagcccgcgtgcgctcaggtgcgcgacccggaacgtgcaagaggcgggcgccacgccgcggctggccgtcaccccggtgaagaggacgccggccgcgtccatcccaagcaccccgagaagggacggcgccgcgctgccgaggagcaggacggcgagcggcggcggcggcacggcggggagccccgcgcggtcgtcgcaccaccagaggcggagcagcctcggcgtgctcgcggagttcggtgagtgcgccacgccgaggccgttcctgaaacgcggcacgggcacgggcggcgcggcggcgcccgtcaggctgcggacgacgcgggtttacgacctgccgtcgatcgacgtggccgtcaccccgaggccgctgcctcacgtgcatgcgcacacccatgcccatgcgccgcgccacgtccggtccctgtctgagctgccgttcgacaccgcggcgctggcctcgccgcagtcgcgggcgaggaggcggtggggcagcccggagaggccagcggcgatgttctcggctgctgctgcagcggcggccgactcgcacagggacctgtccaagggcctcaagaagttgctgagctacgtgaggaaaggcggccggagcggaggaggcggcggcggcgaccagcctttcccggcacccagcccgcgcgggagtgggaagcccgtgagcaaggggtggtctggttgctcccgcgtcgacgtcccgttcgaccgcgcaagcctggacgtcatgtggttcgacgagccagagcatcaccgctcactgcacttccctgtgcctccctgcttgctggtgcgaaacagagttcagagactggccccaaactag

SEQ ID NO: 15282 - DNA, 153 bp, Zea mays
  Peptide Sequence Number=SeqID_58657
atgcgggacgaggttgcaaggtctgacgacctcgtcacaggtcttcgtccggtgacgtatgggatgaaggcgattacggcgaaggcatcgagcgaagggtggcgtcttcgccttcgccccaacatttgccctccgagggaccagttcgactaa

SEQ ID NO: 15283 - DNA, 348 bp, Zea mays
  Peptide Sequence Number=SeqID_58658
gcggggctgtccttctgtcagactggccagtggagcggtggagtgacggcggtcactttggctctaccgggggcgcgtgtcaggatgaagctttatgctgatgggggttaccagctgagaattaggcgtcttgaggcccccgagcctctgcacagggcgagagggcgatcagggacagactcgactttttacatacgcccctacgtcgcctttccgcaaggaggagggggggagtgcgccatgttaccctcgatgggcaccgaacatggtgtctccggtgagctgcaagcggtgtctgaggcgactgtgaacccttcgggggccagccttcgaacccctgatcagtaa

SEQ ID NO: 15284 - DNA, 234 bp, Zea mays
  Peptide Sequence Number=SeqID_58659
atggtgcaccgcgacaccggctacagaggccagccccgtcttaagggccttcctgggggccagaccagtcgagccctgcctccgcttgctgaaagaaagagcaagatcaagacacatagaggaaaaaccaaacagaggcggatcggcctaactccccagagtcacctcgattacctcgaccaaggggtcaagtaccccctcggcctgcctccgctcctcggaccgggaccttga

SEQ ID NO: 15285 - DNA, 321 bp, Zea mays
  Peptide Sequence Number=SeqID_58660
atggctgggttgtggagcagaggacacgcccaagaggagcagcagggagggcgctgggaggagcctcagcgccgaggaagaaggagcaggggcgccaacttgctgctcgccatggagggggcgtcgaccatggagaggaaaggagccgtgctccctgttgctggcgtggggaatccagggaggaagatggcgtggagggcgctggagaacagggaagggcgccatggctgttgggggcgccatgggagcttggagctcggctccctgcgcgctggctgctgcgccgtgaagaagaagaggcagggaagctgtggcggctag

SEQ ID NO: 15286 - DNA, 318 bp, Zea mays
  Peptide Sequence Number=SeqID_58661
atgcaccaggggagtctttgtaaaggctacgtagtgtatccctggccattcaccttggtagtgaagatcaggtgtgacaacgacgatgagtgtgtctctcaactggaattgaaggagatgatgcgcgtgatgactgaagcttttaaaaaataccaggactctgcggcgacatcctatgagcagcttgaacgacaagttgctgaacttgttacacacatggacgtagtggaggctcgtcccccagcaccaaatccaaccctagctcactctcctgtggacgacgacgacgatgacgacgatgtttatgcaccgctgtga

SEQ ID NO: 15287 - DNA, 720 bp, Zea mays
  Peptide Sequence Number=SeqID_58662
atggtggaaaacagacggtacctcttggtcgatggacggtggggaagtcgcatcggggacggactgctccgttatctcaggtacgaggctaacgcccaacaagtccttcacgagagtgctggcatcatcagtccgcttggggttgacacgtcacggggaaacgacatccgtcgttgtctcgggtgcgaggacaacgcccgacatgtcccccgctggggtgccggcgttgccgactcgctcgacagccgacgaggtgccgcctcctgcctggccgcggttgccccgtctcctcctcatgcggcgaggagggtggcggggaaaacccggatgctcctcttccgccacggggggaagacgtcgtcgagttcgccaccgccgggcgagctgacgaccatctttgttgctgtcgcgctgcggggggaagagtaccatgtcatagctgctgtcgaaggacatgaactcgagactcccgaagcggagcaccgtcccgggctgaagaggttgctgaagactacccatctggaacttaacgggaagttgttcgttaacatgcagcaggcccctaccaggcgcgccaactgtcggcgtttcggaccccgggggtccccttgcccgggtggctggcacaacagtcggagcagggtgagcggcgctgttttcctgtcagatcggtcagtgaaagggcgaagtgactgcggtcacttcgaccttgccgactga

SEQ ID NO: 15288 - DNA, 294 bp, Zea mays
  Peptide Sequence Number=SeqID_58663
atgaacgtatgtgagctcactcttgctgtctcacatacaccacaggtcaagaccagaactcctgtgatatataatgttgtgacattcgatcctgtgccactatacatcatatgtgtgagacttggtcccagcatacctggtgtttatgttaaccccgggttttggacccctaaaatccggtgctttcatcttgattcttattgtaagggtgagagactccaagttgtggagattcctcgcaaacgggaaagagtaaagaaagaagaacactgtggtattcaagttgatcattag

SEQ ID NO: 15289 - DNA, 716 bp, Zea mays
  Peptide Sequence Number=SeqID_58664
gctggaggttctccagcagcagcgagcacaagaacaagaaccgttacattcttgctctcaagggacaaatgcagctgcaggccggagctgtcgattctcagctcacctttctcctggcgccccttgagcagctcgtcgtaggttccttcggcgcggccatggataaatcaccaagatcaattcctatcggatctggacctgctaggggcgacaaacgcaaagatgtcgcagaagttgcagatgggattaggcgcacaggcatcgtcgacacgagcaacattgattatggcactagtagaatccgtccgcgccatcgattatgtaggacacatgatccggcgcagagatataatcgagtttgggatggtcttttagacgccattagacagatgcaattatctgccgatgagttgaggaagttgacccgccgcaatcatgtgcctgagtattatgatatggtgcacaagaattgtttggttaatgccatgagtgatgttactgaaattgcaaaaggtctagactctatgagcagggatttggaggaagttcttattggtccgcaacctctacttgaggattacgaagcccttggaatgtacgatgatttcaaaactgatgttcattgtgattgtactgagcagtgtggatcggatgaggacaactcttcttttgactcggatgagatccctgatcgccgtatgaagggccctatctga

SEQ ID NO: 15290 - DNA, 307 bp, Zea mays
  Peptide Sequence Number=SeqID_58665
gaaacggaggccgaggaaaaatacaacaaaaaattggtttcctacacagcaggaacctgatagtaatcagcaggaacctgatagtaatcagcagcttgttggcatggtggcttctactgttcagctgccagcagtagaagaggcttcaactgttcaggaacctgtaaacaacatcccttcttcctcgctgccaataatagaagaggcttctactattcagctgtcaacaaccgaatgggcaccacctagaagacttcggacagctgtcaacaagaaacttactccgaagaagaagatctacttctga

SEQ ID NO: 15291 - DNA, 246 bp, Zea mays
  Peptide Sequence Number=SeqID_58666
atggaggaagacaacctgcaaggagaacacctggtcgactatggaggaaaccctaagccctatcccaggtcacagaccgtccggcccctggccgcggaccgctcgcgcctgtgcagcgagcaccgccgccggttcccacgcagtgattggcgccccaaaaaggcaccaacagtcggcgatggaacccatactgtggatagcctgacactgctcctctgttttgttgttttgttccgtgtgctgtag

SEQ ID NO: 15292 - DNA, 432 bp, Zea mays
  Peptide Sequence Number=SeqID_58667
atggcgctttcccccctcctccttgcgaaaaggcgacgcaggggcggctcggcccccgtcttggcctcgaaagatggacttcgcctcgcccgaccccagggctcggactcaacctcgacctcggacgacgaactccgcctcgcccgaccccaggctcggactcagccttggctccagaagacgacgaactccgcctcgcccgacccgagggctcggactcagccttggctccggaagacgacgaactccgcctcgcccgacccagggctcggactcagcctcggcctcggaagacggactcgacctcagcctcggaggagcctccgcctcgcccgacctagggctcggaccgaccacgtcacaggaagggccatcattaccctatccctagctagctcaggctacggggaacaagatcggcgtcccatctag

SEQ ID NO: 15293 - DNA, 1473 bp, Zea mays
  Peptide Sequence Number=SeqID_58668
atgcatcgcatccttccaccttccgagcccccggatggggaacactcgcgtcgctttcgtcttgctgtctttggaggaacgcaacttcgcggaagttggtacctttcagccatcgctcggcttcaaggattttcatcaggcggcccggctgcatcccctcgccggtggtcacccaagacggtgaccaccagcttgatggtggggagaagcaagtcgggctgcgacctctgccccgccctcagcttcaaggatcttcatcatcctggctggggcggaggccggactgagccggagctctacctcccgcgcgggttcgtgggtcaccttctcccccagcattcaggggagagggcgctcaccggcctagcgggagggtcggacttcgacaacgcagggctggtcggcggcgagcgtcgtcagcttcagcgcgttgggctcactggctcagctggctctggctcggctcccggtgccccctcccgctgtgagagcggttgtcgcgccgcgtgcactggaggaccgcccaagacgtcgcgcgctgctagggcggcgttcgtgttcttggactgtcctgcctttgctccgatggcttccgtcgccggcgctgaggtggtggcggctaaagaagtcctcgtcgccgacgggatcatcgccaccacccgcgctccaggcctcaggctctttggctttgatagcttgtcctcgcccctcgagtggggacgtgggcgaggggctcgttgcagcagcgtccgccctgaggtcatcgctgctattgtttggccacctggagcggaggtcgttgtcgctgctgctggagcgggcgtcggtgagccacctggggcttcgtcgccccgcaggccctccaatgtggggggttgttcgtacctgcgggggcagaaccggagttccatttgtaatggcaccttgagtgttggtgcttgttcattgtggctgtcggggcctgaacatgagtccctcggctcggtcggccttgccgcccgaggcttctcttgcttagttaaaggaaccctcggctgctctgcggtgagccggagccgagggcagcggtgcccgcgtggacagaggcagagttggctcgaaaagaagacttcgtcggccggagcctggccgggccatccactagcgggaccagcaccggagtcgggttgccgaggccatgagccgggctggcgtggtgctgacgtcgtccttcggagcggagatccttcgcccgtgttgccgtccgaggctcggtcggacttcgccgaaggtggagttgacgccgaggaaaggtttccgagcattaagacttgttcggtcagcggaatcgcttatccgagcgtgagttacttatcgcagaaggtgatgagtgaggatcccactttcgaagtagtcaaaaagcacgaacgacgttctggcagaaagactttttccgaggaaaattttgacgcagagggggtgccccccttctag

SEQ ID NO: 15294 - DNA, 288 bp, Zea mays
  Peptide Sequence Number=SeqID_58669
atggagtctgttctccactcttcaagtgtttatccagagctgaagcagcttcatcagtctccgtcaagcttcggattttcgaccttcggcatcgtcatcctgtacacaacaaagcattataaggttgaagttcggcctgtttacaatttttccgtgcgtgcaaccagccttcataaaagctacatctgtgccgcgagaagccatcagggcacagaagtcaccatgcccagctataacttcatcaagcgcctcaacttcgccctcaatatgttcgaaagtgcttggtag

SEQ ID NO: 15295 - DNA, 192 bp, Zea mays
  Peptide Sequence Number=SeqID_58670
atggcccccaagagagcaacctcgaaggccaccgcatccatcgacgacgcggcgaaggcagcactcctggcagagaagaaaggcaaagccctcgcggacaacaccccccaggaggccttcgaagatgacgctgtggcatgccagacaaacctcgaagccaagccgcacgccaggattcaggccattgactga

SEQ ID NO: 15296 - DNA, 213 bp, Zea mays
  Peptide Sequence Number=SeqID_58671
atgattttatctactggctgccctctgaaggtgccggagggcgcggggacggtgaaggtgcgggagggcaagatctgccgggcgctggagccgctgtgcctcagggtcgtcgccgccatcatcggggccgccggcgatgccatcgtccacgccatgttcgtcgaggtgaaccacaagattcgggaatatcattgcagactattcttgaattag

SEQ ID NO: 15297 - DNA, 210 bp, Zea mays
  Peptide Sequence Number=SeqID_58672
atggggaggtggaagtggttgcaacgtcgagtcctaggagcacgcgcgcaacggcgaccctctgaggggcacacgacaatgacgccatccgaggtgggagtgacggcggtggatttccctagacatgacggcggcggcctcccgttggcgcgagtggtggcggatcccagaggcgaggcagcggttccaacagcggtggccttgttttaa

SEQ ID NO: 15298 - DNA, 309 bp, Zea mays
  Peptide Sequence Number=SeqID_58673
atggaattactcaacaagtcttacccaactaaagaaaagactctcaagggtatgctggttatgtgggagtcaagggtttcaaggaaggtaatcaagttcaaggaaggtaatgcaagaattgttttatcaagcaactcctatcacctaatgcagcaagcaagtgagaaagattttaaaaacatcaagggaggtggcaaatgcaccagggcttgccttcgttcacaggtgagtctggctcggatccacaaatatcaaagtagaagcagttgcctgcctgagaatccgatggtggtggtgtcctctctttag

SEQ ID NO: 15299 - DNA, 444 bp, Zea mays
  Peptide Sequence Number=SeqID_58674
atggatagaggcggagtcggctcgaaaaggggcttcgtcggcccaggagcaggcgcggtgctgacatcttccttcgaggtgaagatccttctgcccgtgtcgtcgtccgaggccgggccagatcccgtcgaaagtggaaacaacgccgagggtgctgttgttccctctgttgatgacttgttcgtcggtagcagaattgtttatccgagcgagagttacttttcacggaaggtgatgagtgaggagtccctcggctcggtcggccttgccgcttacgtgtactccgtcgttttaaggatcccgctatcgaagcagtcgaaaagcgcgaaagatgttctggcagaaagactttttccgaggaaaattttgacgcagagggggttcccccttctagcccccgagggagggtcgggctttaccgaggcaaggctgacccttccttga

SEQ ID NO: 15300 - DNA, 1305 bp, Zea mays
  Peptide Sequence Number=SeqID_58675
atgtcgtcgtggcagccggagaggtttcggcaccctgttcatgtgatgtcgtggccgtcggaggagcgctggagccttgcggaaggacagctgtcggggctgtcaaccgaggctaagtccgagccctggggtcgggcaaggcggagttcgtcgtcttccggggccgagcccgagttcgagccctggggtcgggcgaggcggagttcgtcgtcttccggggccgagcccgagtccgagccctggggtcaggcgaggcggagttcgtcgtcttctggggccgagcccgagtccgagccctggagtcgggcgaggcggagcatcctatggcgcccgaggccggacttggctgctgtcagcctcactctgttgagcggcacagcagtcggagcgacgcaggtggcgctgtcttcttgtcaggccatccttgcattaaatgctcctacgatacggtcggtcggcgtggcgatctggccaaggttgcttctcgacgaagactgggcctcgggaaagccgaagatggaggtccgctgccaaaccagcttttgccagaatgaagatggtttccccaagttgctgagagcatgcacagttcgcctcggaatcaggagccagccagagtatgatggtcgtgaatttgtcgagcatggcacagagaagatgcgtgcattggaagggcagctgctgcttgaggatgaccccacagtcgtagaagctcaatcgtcagctccatgggatctcacctcatctcaagcccatgtagctgccttagaaagtcgtgaagtcattgttgttgaagccctaaagcaagccaaggatgagcacgtccagaagttgatggaggcctacttggtaacccgtaatcaacgtagagccctatggatccaagagcccgcttcatccaacccagttcaacccatgaggggtgaagatccccagattcttgaaggtcacctggtctctgtcagaggagaaaagaaggcttgggaactcccggaaggatccatagtcttggaaggaatgccagtctcccctaaggctatggataagcaagagcaccccgaatcgtcccaaggtcccctgccagagttgtttgagcccctcaccatgaagaagattctagcactgtctcatgaggtcaaggaagaagccgcaagcaccccgccaacaccgctgccctttgaggagctacaagagctagtcccgcttgaagaagagttcgaccccgtcctaccatctcagtcgctgccagaagaattcatcaacatcatctccctcttgacccatccaggagatgtctcagattga

SEQ ID NO: 15301 - DNA, 984 bp, Zea mays
  Peptide Sequence Number=SeqID_58676
atgggtcggcgcgagacggagcacgaaggggggaagaaaacaggcgaaaggggaaacccgcggccttcgtgttgccctgcgcccaggtcgggtgcgcttgcagtagggggttacaagcgtccgcgtgggagagagcgggagacttacgcgtcggcccgttctcccgcgcggccaaccttctcgtacgagagccctggaccttccttttataggtgtaaggagagggaccaggcgaggcggagaccgtcgtccgaggctaaggctgagtccgagccctgggctcgagcgaggcggagttcgtcgtcttctggagccgaggctgagtccaagccctggggtcgggcgaggcggagttcgtcgtcttccggagccgaggctgagtccgagccctggggtcgagcgaggcggagttcgtcgtcttccggagccgaggctgagtccgagccctggggtcgggcgaggcggagttcgtcgtcttccggagccgaggctgagtccgagccctggggtcgggcgaggcggagttcgtcgtcttccggagccgaggctgagcccgagccctggggtcgggcgaggcggagtccatcgtccgaggccaagacgggggccgagccctggggtcgggtgaggcagagcttcctatggcgcccgaggccggacttggctgctgtcagcctcactctgtcgagtggcacagcagtcggagcgacacaggcggcgctgtcttcttgtcaggcgatccttgcattaaatgctcctgcgatacggtcggtcggcgtggcgatctggccaaggttgcttctcggcgaagactgggcctcgggcgagccgaagctttgtgctgatgggggttaccagctgagattaggagtcttggggggcgccgaacatggtgtttccagtgagttgctaacagggctcgatgcctccctctggtgggattccgttacaaaattgttcccgtcggcctcggaaatgtcctag

SEQ ID NO: 15302 - DNA, 852 bp, Zea mays
  Peptide Sequence Number=SeqID_58677
atgcctcgcgtccttccaccttccgagcccccggatggggagcgcccgcggttcttccgccttgtcgtcattggaggaacgcaacttcgtggaagttggtacctttcagccatcgttcggcttcaaggattttcatcaggcagcccggctgcatcccctcgccggtggtcacccaagacggtgaccaccagttccagggtggggagaagcaagccgggctgcggcctctgcccctccctcagcttcaaggatcttcatcatcctggctggggcggaggccggactgagccggagctctacctcccgcgcgggttcgtgggtcaccttctccctcagcattcaggggagagggcgctcaccgtcctagcgggagggtcggacttcgacaacgcggggctggtcggcggcgagcgtcgtcagcttcagcgcgttgggctcgctggctcagctggctctggctcggctcccggtgcctccttccgccgcgagagcggtcgtcgcgccgcgcgcaccggaggaccgtccaagacgtcgcgcgctgctagggcggcgttcgtgttcttgggctgtcctgcctttgctccggtacggtgcctctgcgcggaggccggtgctgcccttccgggaggatccgagtggggatctgccggtgggaagatggcttccatcgtcggtgcggaggtggtggcggctgaagaagtcctcgtcgccgacgggatcaccgccaccatctgggctccaggcctccggctctttggctttaatgtctggtccgtgtcccttgagtggggacgcgaacgagagccttccagctgcagcgtccgtcctgggaccatcgcttctgctgcatag

SEQ ID NO: 15303 - DNA, 861 bp, Zea mays
  Peptide Sequence Number=SeqID_58678
atggccacggcgcacggcggtactggcccggccaaagtgctccggcgagcaattggtgcattaccggaggatatccccgcccggaaggtccacgaagacgtgcgggggattggagccttggaggggcgaggcgtgacacatcttatgcgcagcccgagatctaggcgaggtcttcggatcgagtggaaccactcggaaacaccggcaacacaactcatgcgaggatcagctggttgctacggccgaggtccacggagttcgcccttcaactaccagcgcgtggagcggagaggagaaagggaggggaagaagatacacctgactggtggggccaatcgcgcgcagggcgcagcgcagagggaattgggccgcgtgggtgaaatccccatttgggccgacagggaggggaatcggcccaggcgaccgacggtggcgctccaccatgatcgagcgacggtggcgctccacagggagctcgcccgcctcgccgccaggtccgtcgcgcgcctgcctgctggggctaggctcgacgggagcggaaccgccgaggaggccgagatggccgccgcgctcatggacgtcgcggtcgccagcgccgccgcctccgccgccgtgttctcggccgccgcgtccgtgtctgccgccgcgtcgtcgtgctcgaacaagaaggccccgacggccttcgtggctgctgccttcgccaagaagccggagacgccgacgacggccaatgtcgcgcaggagaagcacgaggagcttgagcgatgcatcgaagagtgcgagagtggcagcgaggtggtgttcaggagcattgttcggaatagggtttcgttgctcaacatccatagtccggcgatctag

SEQ ID NO: 15304 - DNA, 1437 bp, Zea mays
  Peptide Sequence Number=SeqID_58679
atgacgtcgcggaatcaccggaccctgcctggcctcgaagccacggagccggagaggccggcggcggccctcagcatcgatctcatggaagagatcttcctccgcgttgcctcccctgcagacctcgcccgtgcctccactgcctgcgtctccttccgccgcatcatcagtgatccgtccttcctccgccggtaccgctctatccacccgccgctgctcctcggcttaatcggcgttgcaggtttcacacctgccgacccgccccatccctccgctgctctatcccgcgctgtcgcccgcgccgccgacatctccttcgacttcctacctcgcagtcgcaccgccaattggcgccactcgcatccgtggtatccgtgcgatgtccgcgacggccgtgtcctcgtcaagtgcattcgcgaggaacccgtcgtatacttggacctcgcggtgtgcgatcctttgtcccgtagatacctgctgctgcctcctttggccgaggacctagtactcgcctccgtcgggctccaaaaaccaagtgtggtccattctggggtctcgtttatcccttctggaggcgtggaggagacatcattcagagtgatcagctggaaatattccaagacaaggttagcggtgtttgtcttcacttcgtcttctggcagctggagcgtcggtacatctaccaccagggatgatctaggcttggaccacgagtttgtcaggctttattcggtccagtgtgtgtatggccactgctattggagattatgtggcacaagcaagttaatcaagctcgacatgaacagcatggagttctccactgttgacctcccacctgatcacgaaaagaggaatgtcatcattgtggagtcatggggaagcaatgttgcaatgtttagtatgattgatgaaggcgcatctgtggattattacacctcttcgcaaaatgacagcgagaagtcccatgagtggcatatgatgattagcatccctttgcctgcagactatattattggcccctgctttaagggtccagctgaaggtgccagcctaggggtggctaggtgggcggccgcccaggatcctcgaaggcaacacccgcccgtcatccgcgccgccatcaacggaaggtgccgaggatctcctaccccgccatcaacggaaggtgtcaaggatcttctacccctgtactctgcaatccccgtcatccgaggccgccatcaacgccctcctacccacgccgtcgatggaaggtgcccgaggttccaccccatcgcgccctcctatctgctctgccccaccttcctccccacgccttcgatggcgcgcgcagatcccaggtggccgaggatccgccccaccctcctcccccaccttctaggcccctgccgtgcccccgcatgcgggcacgagcccgccatacgcgcgcgccgctag

SEQ ID NO: 15305 - DNA, 2569 bp, Zea mays
  Peptide Sequence Number=SeqID_58680
atggccgcggcagtgactcgccgggtcggtctccacgtcgaggcgaccaatggcggcgccgacgacgagagcaggcgcaatagctcggcagctgaccactcgccagtggccaagcggatcaacgacgccgccgccaacgccaagcgcaacgacgtctgggtggccgcccaggagggagaaatgcctgcagctgcaggcaactccagccagccgcccctgctgttccggaccatgaaggtcaagggcagcatcctgcacccttacaggtttgttattcttctgcggctggtcgccatcgtcgcattcttcatatggcgcatccggaaccggaaccgcgacggcgtgtggctctgggccatgtccatggtcggcgacgtctggttcggcttctcgtgggtcctcaaccagctcccgaagctgaaccccatcaagcgtgtcccggacctcgccgccatcagagaccagtacgagcagccttccgcctccggcggcgagtccaacaacaagctgcccggcatcgacgtcttcgtcaccaccgtcgaccccgtagacgagcccatactgtacacggtgaactccgtgctctccatcctcgccaccgactacccggtcgagaagtacgcctgctacctctcggacgacggcggcacgctggtccactacgaagcgatgctcgaggttgcgagtttcgccaggctatgggcgcccttctgccggaagcatagcgtcgagccgagagctccggagagctactttggagtgaagaggcgccaaccgtacacgggaagcgtgcagggagagttcacaagcgatcacaggcgcatgcgcagggaatacgaagagttcaaggtgaggatcgactctcttttcagcaccgtctgccaaagatctcaagcgtacaacagaaagcatgccaaggacgacgaagctggtatggtgatgaaggcgacgtggatggctgacgcaagcatcgacaatccatttgacttcagcaacactgacacgcgcctccccatgctcgtctacatgtcccgcgagaagcgcaccggctacaaccaccagaagaaagccggcgccatgaacgcgatgctccgggtgtccgccttgctctccaacgcgccgttcctcatcaacttcgactgcgaccactacgtcaacaactcgcaggctttccgcgccagcatgtgcttcatgctggacccacgcgacggccggaacacggctttcgtccagttcccgcagcgcttcgacggcgtggacccgacggaccggtacgcgaaccacaaccgcgtcttcttcgacggcaccatgctctccctcaacggcctgcaggggccttcctacctcggcaccggaaccatgttccgccgtgccgcgctgtacggcatggagccaccgcggtggagaacgactggcagcgtcaaggtgatagacgacgacgacgaccacaagggcaaggagtacggcagatcgacattgttcagaaacgcagtactagacgacgccgcgaaccaagaacgatctatcacgccagtgttcctcgatgacgacgagacgacgacgatcagcagcgaggtggcgtcgctgatgacgtgcgcttacgaggacgggacaacatgggggagagacgtcgggtgggtgtacaacatcgcgacggaggacgtggtgaccgggttccgcatgcaccggcagggctggcgctccatgtactgctccgtggagccggccgcgttccgcggcaccgctccgatcaacctcaccgagcggctcctccaggtgctccgctggtccggcggctccctcgagatgttcttctcccacagcaacgcgttcctcgccggcgctcggatgcacccgctgcagcgcgtggcgtacctgaacatgtccacctacccggtcgtcaccgtcttcatcctggcctacaacctgtttcccctgatgtggctcgtctccgagcggtactacatccagagacccttcggcacgtacgtcctgtacctcgtggcgaccatcgccatgatccacgtgatcggcatgttcgaggtgaggtgggcgggcatcacgctgctggactggtgccgcaacgagcagttctacatgatcggcgcgaccggtgtgtacccgacggcggtgctgtacatggcgctgaagctcgtcacggggaaaagcatccacttcaggctcacgtcgaagcagacggaggcctgctccggcggtgacaagttcgccgacctgtacgtcgtgaggtgggtgccgttgctggtcccgaccatcgcggttctggccgtgaacgtcgcggcggtgggcgtggcggtaggcaaggccgcgacctgggggctgctcacgcagcaggcgcagcacgcgctgcttgggatggtgttcaacgtgtggatccttgtgcttctgtacccgtttgcgctcggcgtcatgggacggtgggggaagagacctgccatcctgttcggtgtgctggtgatggccattggtgcggtcgctgtcgtgtacatcagcttccgtgccacgtactacccaacaggatggtcagaaatggaaactacttctgctcttg

SEQ ID NO: 15306 - DNA, 432 bp, Zea mays
  Peptide Sequence Number=SeqID_58681
atgtccggtgcaccagaggactccaaactcaaactcgtcaccttcgggaaattccagaggcgactccgctataattcaccggacatgtccggtgtgcaccggactgtccggtgtgacaaggaagagcggcctcaggaactcgccagcctcgggaattcatttgggctgctccgctataattcaccggacatgtccggtgactgctacgtgctcgtcgcggtggtgaacggaagtcttctcggcgtccaatttggtggtggcaggggcggtgctgggcgagccctcgccggacatcgcactccatggcagaatctgtgccaccataacctttcgaatcgtggcttgggggcgccagggcctcgggccatctactcgccggtgaactaccgtcgtggggggtttggcggcgccacctgtgccggccaggggtag

SEQ ID NO: 15307 - DNA, 465 bp, Zea mays
  Peptide Sequence Number=SeqID_58682
atggagggcagagatcgaccatgcgagaagggacccggatctaattgcagccgcagaatatccgatcgacggccacaacgcttaccttctacccctggccggcacaggtggcgccgccaaaccccccacgacggtagttcaccggcgagtagatggcccgaggccctggcgcccccaagccacgattcgaaaggttctacgcgcagtggaaagaatgcgaatcctgggaaggaagtctcagtttacccaagcacaggcatggctgcccacggtgcgcagcagcacgattcacggcacatggtggcacagattctgccatggagtgcgatgtccggcgagggctcgcccagcaccgcccctgccaccaccaaattggacgccgagaagacttccgttcaccaccgcgacgagcacgtagcagtcctgcgatccatccctcaacttctctcacctctgttcttgtga

SEQ ID NO: 15308 - DNA, 936 bp, Zea mays
  Peptide Sequence Number=SeqID_58683
atgcaggccccgccggcgccctcctccgtcgacctgccgctggcggtggcgccgccgccggtgaaggcgccgaccccgcggcccccgccgccggcctcgctgcagcccgagtccccgggggtcttcttctccgccgccgccgccgccgcgcccctgggcaccgcccaccgccgcatcgccatcgccgtcgacctctccgacgagtccgcctacgccgtgcgctgggccgtcgccaactacctccgccccggggacgccgtcatcctgctccacgtgcgccccacctccgtgctctacggcgccgactggggcgccgtcgacgtctccctccccaaccctagcgccaccgccgcctccgaggacggcgacggcgactgcgagaccgccgctgccgcgcgcaggatggaggacgactacgacgccttcacggccaccaaggccgacgacttcgccagcccgctcaaggacgccggcatcccctacaagatccacatcgtcagggaccacgacatgaaggagcgcctctgcctcgaggtcgagcgcctctcgctcagcgccgtcatcatggggagcaagggcttcggcgccgcgcggaggaccagcaagggcaggctcggcagcgtcagcgactactgcgtgcaccactgtgtctgccccgttgtggtggtgcgcttccctgatgacggctctgccgagggtggggaggccgctggtttgtccgccgcggttggtgctgaggatgtgctgcaccccgtgccggaggaagaaggcgagtaccatgacgctgcggaggagcacaaggagttcatggcgccgagctcggccacgtcggcgccgtgtcagccttcgtcgccagcggagcacgcgcctcggcgccaagatctgtggcgccgaacaaagggtccaaaaaagagattaagtcatccaagtgtctaa

SEQ ID NO: 15309 - DNA, 2706 bp, Zea mays
  Peptide Sequence Number=SeqID_58684
atggctcctaaggcgccggcgaataatggcgctgtcgtcgttgccggcggccatcacgggggcagcaccgacgtcggcggcgttgccgggggcgcgacgacgacgactgtgccgacgtctgtggcggcgaacggcaacggcaagcagcacggcacgaggaagcagaggaggcctgcagcggtagtcgtcagcccgatggacaagtactggacgcccgtcgacgacaaggaggcggcggaggccgtcgacgacggcggcgaggacgggcggcgcccgctcctgttccggacgtacaaggtcaagggaatcctcctgcacccctataggttgttgaccttgctgagattgattgcaatcatcctattcttcatatggcgtatccggcatccgcatgccgacggaatgtggctctggtggatatccattgtcggagatttctggtttggtgtcacttggttgctaaaccaagttgcgaagctcaaccctaccaagcgtgtcccagacctttccctcttgagacaacagttcgatctccctgatggcaactctaatctccctaggcttgatgtttttatcaacaccgtcgatcccataaacgagcctatgatatacaccatgaactctatcctgtccattcttgccgtagactacccaatcgataggactgctacctacctctcggatgatggagggtccataatccattacgagggcttgcttgagacagcaaatttcgcgacactctgggttccattttgccgaaaacatagcattgagccgagagcccctgagagctattttgctgtgaagtcgcgcccatacactggaaatgtaccagatgagtttgctgatgatcatagacgcatgtctaaggagtatgatgagttcaaggtgcgtttggatgcactttttactaaaatccctgaacgctcagatgcacacaatgcagaggccaaggaaggtgtaaaggcaacctggatggcagacggaacacagtggccaggaacatggtttgaccctgctgaaaaccacaagaaagggcaacatgctggaattgttaaggttatgttgaatcacccgggcgatgaacctcggtttggtggaccagcaagtgctgaaacccctctggacttcagtgccgttgacgtgcggctcccaatgctcgtctatatctcccgtgagaagagtccaagccatgaccaccaaaagaaagcaggcgccatgaacgtgcagctgcggatctctgcgcttctgaccaacgctcccttcatcatcaattttgatggtgaccactacgtcaacaactcacaggccttccgagctgcgatgtgcttcatgctggaccggcgggatggcgagaacaccgcttttgttcagttcccgcaacgctttgacgatgtcgacccaacagacaggtactgcaatcacaaccgtgtcttctttgatgccaccttgctcggcctaaatggcatccagggaccctcctatgttggcaccggttgcatgttccgccggatcgctgtctatggtattgatccacctcgttggagaactgatgccttcaagcttgtggacaaccccagcaagtttggcagctcaatgctcttcatcaactccataccatcggctgcgaaccaagaatggtccatggcgtcaccaccggcacatgaggagtcggtcatggaagagctgaataatgtcatgaagtgcgcatatgaagagggcactgagttcggaaaggaaatcggctgggtgtacaacattgctacggaggacgtggtgaccggcttccgagtacaccggacagggtggcgatctatgtactgccgcatggagccggatgccttccgtggcactgcaccaatcaacctcacggagcgcctctgccagatcctgcgctggtcgggcggctcccttgaaatgttcttctcacactgcccgctccttgctggccgtcgactgaacttgatgcaacggatcgcctacaccaacatgacagcctacccaatctcatcggtcttccttgtgttctacctcctcttccccgtcatatggatcttccgtggcgagttctacatccagaagccgttcccgacatacgtgctgtacctcgtcgtcatcatagcaatgacagagctgatcggcatggtggagatcaagtgggcaggcctcacgctgctggactggatccgcaacgagcagttctacatcatcggggcgacagccgtgtacccgttagcgacgctgcacatcgtgctgaagctagtccttcgcgggaacggcgtttcgttcaagctgacggcgaagcaggctacgagcgccgtgaacgagaagtacgctgagatgtacgtggtgcagtggacgccactgctgatccccacaatagcggtgatcgccgtgaacgtcggcgcgatcggggcggcgatcggcaaggcggtcgtcggggggtggtcgctcctgcagatggccgacgcgtcccttggactggtgttcaacgcgtggatcctgctgctgatctacccgttcgcgctcggggtgatggggcggtggagcaagaggccctatatcctgttcgtcctgttcatgattgggttcgctgtagtggcggcggtggttgttgccatccatgctgcgcgcactggttctgttcggttccattccggacattcaggcggtgctagcttccctacaagctgggggttttag

SEQ ID NO: 15310 - DNA, 345 bp, Zea mays
  Peptide Sequence Number=SeqID_58685
atggcgtcggtcggcgcgtgggcgtggcgatgccgcgctggtggtctggtcgcggccaagaaaattatacaacgctgcttcgctgaccatgcggagatgcgcgcgtcgctgcagcttgacgcaatgacgcgcccagccctgggttgcaagtggcaactccgcccgccggtcggagttggcaaccgctatgtctctggctctggctctggggctctggctctggctctggctctggctcttgttgctcgcttgtggatgaatgacaacagagaacaccgtgggtggtttgccctgcatcggtcaacaacagtggagtcagtgactcagtgccggcctcccgcgtga

SEQ ID NO: 15311 - DNA, 564 bp, Zea mays
  Peptide Sequence Number=SeqID_58686
atgagtcaacccaagtccggtcgcacctacaccgatgaccgtacccaacgcttagataatttttggaacacaacattgctccaaaaaagttttactgaagaaaaggtatcaatctgcagtttggacaaggatgaacaactgcattcattcacaagtagcacggaacagtaccatcatgagttggatgatcttagaacacatctgtcatttactcaagctacaggagaagcaggaacccaactgaaccttcaacttgcttgttctgggagatctgtgagcaagcgagtgctcctcataatgggtattcgacatgagccccatccctgccacagacttgggaaaggcacaatgatttttatgaatggcgacagtagtggtggaacgcctgacaatcatggtcaacaatattggtcgattctcttttggcatactgttctggtggatcatacacctgctatattcatgtatgagccttatgggaactctgcaactactatggatcctcttatacattgtgttcgacatgcagacaaggactattacaaagttctagagacaacttaa

SEQ ID NO: 15312 - DNA, 159 bp, Zea mays
  Peptide Sequence Number=SeqID_58687
atggggtccaggcacagtgcttgctctgccgaggctgagtgccgaggttctttcgttttgctttttgttagtcaccctcctgcggggagagaggatagtgaaactgatatatcagccgtgctcacggttatgagcagccttgggatcctctttgattag

SEQ ID NO: 15313 - DNA, 210 bp, Zea mays
  Peptide Sequence Number=SeqID_58688
atggagaacgcagaagtgcacattttgcacttgcacacagcgttcagggatcgcgtgcaccggtggaagcgctgcggcttgcccaacggtgaacgcttccaacatcgcatcatcaacaatgtgaagaacttcgcgcatacggcgtatgcgcatggaaacggtatgacggccctccccgacgtggtgacggaggctctgcaagggcattag

SEQ ID NO: 15314 - DNA, 320 bp, Zea mays
  Peptide Sequence Number=SeqID_58689
cacgcccagcggcccagccgcctagcttcctgctccagcggccagtggcggatgagttcacgagctgctccaactccaatgctggccggttggccgctggagaccgctggagcgccgtcgcagcccgcagcgtccacgagctagagcgtagtcgcagcgtccacgccactgcgtgcgccactgccatacctatcagcatgcatgcagagcttccacccgtcacctacaaatccctgtcgctgtcctcgccatcgccgtcgctcgtcgtcgttgtcatcgccaagggtgtcggtgtggctgtgtcggccacggccagctag

SEQ ID NO: 15315 - DNA, 639 bp, Zea mays
  Peptide Sequence Number=SeqID_58690
atggggaggagtacgattggaggagccagccaatcgaccctcaggcagcctatgctagcgcaggaggacaaagcccatggacggttgggtatttttgattctacgattgattccagagagctgagacgccgtggacgacaatccacatcgtcgtcttcacagtcgtcccgttcacgatcagcagcccatgagatagagcttgcagtgttgcgtcaacaggcagagtaccatcaatcagtcttgagggaacaattggagtaccagaggcaacaatctgaataccagagacaacaagccgagtaccagaagaagagggacgagtattatgcaagcctccaggcccaaaatcaagctcttctctcgcaactagcccaacaagcgggcgtcccgatgccgacatatgggatgccgcctccggactttgcactgccaatgccaatgttggcgcctccacctccgcctccgcctccgtcacaattccctatgggatttcagacaccacccgcttcagttgccgcacctggagatgggtctggtcaggacgacacaacaaattcgtgggtgaacaccattttcaacacgcagagtccagccggaggaggtggctactcgaaccatccagacgatggatatgattga

SEQ ID NO: 15316 - DNA, 162 bp, Zea mays
  Peptide Sequence Number=SeqID_58691
atggccgccccgcgaaccgcacgcctcgtcgcattaactccgcggcgggacaggcggcgcctctggcgggagaagcaagcgacgcttcaccttcaccacaatgaccgcgtcaaaagagggactgggaaagggggataccccgaaaaggatccttctctgtga

SEQ ID NO: 15317 - DNA, 234 bp, Zea mays
  Peptide Sequence Number=SeqID_58692
atggagggctggattggcgagatggcgaacgacgatcacgtggagggtatggtcgcacatacgcgcgatgacaccggggggtccctgggccgacgagtgaatgtcgtcgcgtgccccagcccagatgggtcgagcgcgagggcgagcgcgaagggggagagcgaggcggccggagaccggcgtgagagaggtgggaatcccgcggccttcgtgttcgtcccgcgcccaagtcgg

SEQ ID NO: 15318 - DNA, 306 bp, Zea mays
  Peptide Sequence Number=SeqID_58693
atgggtgctagaacaagcaacagaaggacacgaactaaccggaatcgagctggccgcggcgagctgttcttcacggcggcggagaccggatttggggagaatgggaaattcgcgcgtgctggtggaggattgagggtgggagcgggtgcaatagctgcttggatacatggcggagctgggggattcagcaccctcaccgttcaccgccccgtggtcgcttcgactatgatgtctgagaacaggcgtagaggtgcaaggcgtgctcagtctgaacaacaggcagcccaagaggaagcagcccagtag

SEQ ID NO: 15319 - DNA, 399 bp, Zea mays
  Peptide Sequence Number=SeqID_58694
atgcaaccgtaccgcgattatgcaccctttcggctttgtcacatccggtggaccagcacggaggcccggtcccacatatcatggaaccagcgcggcggttactacgtgcaaggaaaccgcaccgccacctgcgccaatgctgcgtcttctcgactgcggaaccagtgccgcgattcgagagcaagcgacacctttggcaggcgaagcaggcgatgtttcacctccgtcatgatgaccgcgtcagaaaagggaccgggaaaggggatatttcgaaaaggatccttctccacgaaggaaacgggcccccgagccctcctactgatcaggggttcgaaggctggcccctcggaagggttcgacagcctccctagagcactcgggctccgcgcctattactga

SEQ ID NO: 15320 - DNA, 648 bp, Zea mays
  Peptide Sequence Number=SeqID_58695
atgcgggggaaggcgaactgctgctgcctggcaagggtgcagctgtccgtcctccacccgggcgacggtcctccttgcaccgtcggctgcaccgaggggtcgcgcaacacgtcgtacgccgcgagggcggtactcgtgttctgggacgtcctcggcgagtacgggagtgaggacctgccggtgcactttggggcagccgccgtttgccagtgcggtgttggtgggcagccgcccgaggcggaggtcattgtcgtgctactggggcagcggtcgccggcgggctactcggggctcgttatcccacaggccttctggtcgggacaaccaccgattgcgctaccgacgtctaagtctagataccattgtcaccccaagcatccgctctgcgatgagctgaagctggaggcagcggtggcgtggacagaggcggtgtcggctcggacagaggctttcttggcacgggagcaggtggcttcccaggccgaggagatgcagcagcggcagctggagtttggccagatcatccgcgagcgggaccaatctcggagccgggctgtcgaagccgtgagccgggctgagatcctcgggggacaactggctgaggctatgaagcggctagccgaggcgttcgctcgtgttgccatctga

SEQ ID NO: 15321 - DNA, 1272 bp, Zea mays
  Peptide Sequence Number=SeqID_58696
atggggctcctcagctccctgccgccccatcgccggggcgccttctcgggtggcggatggcagtggtcgttcctcgacgtcgtatggggggtcttcctcatcgccgtggtcgtcttcctcgcgctcgtcttcactccgcggcgcggggaccccatcctaaccaccccctctgtcgcccgcgccggcggcacggtgccgccgtgcgctgcctctgaggtggacctcctcccctgcgaggacccgcgccgcagctcccgcctcagccgcgagatgaactactaccgggagcgccactgcccaactcgtggcgaggcgctcgcgtgccttgtgccgccgccccgaggttaccgcattcctgtgccctggcccgagagcctccacaagctgcaagtggtcatctcagaaatagacttcctgatctggcatgacaacatgccttatggtaagattgctgaaagaaaaggtcatcaagggtggatgaagcatgaaggttcgtacttcatttttcctggcggtgggactatgttccctgatggagctgaacaatatattgaaaagcttagccagtatgttccaatgaaaactggtgtcatcaggactggtcttgatatgggatgcggggagaaggaatgggatgaacttcaagcaatggcaggagctttgtgttacaaattgatcactgtagatggtaatactgccatttggaagaaacctgctgaggcttcatgtcttcctaaccaaaatggatttggccttgatctttgtagcaccgactatgatccagatgaagcatggtacttcaagttgaataaatgtgtcagtaaaatttcagtggcggaagagacagctataggttccattctcaagtggccagataggctgtctaaaccttctgctagggcatcagttatcaacaatggagcaaacttgtttgaagtaaatagtcagaagtgggttaggagagtgtcatattataagaaatcgcttggtgtgaagcttgggagcacaaacatacgcaatgtcatggacatgaatgcattctttggaggattcgcagccgctataatatctgatcctgtatgggttatgaatgttgttcctggtcagaagccattgacacttggagttatttatgataggggccttataggggtttatcatgactggtgtgaaccattctcaacgtatcctcgtacctatgatcttattcatgctgatgcaattgactccttgataagtggcccgatttcaggcactagcagtgtgatatga

SEQ ID NO: 15322 - DNA, 906 bp, Zea mays
  Peptide Sequence Number=SeqID_58697
atgtcttctcgctcccttatgcatcgcgtctttccaccttccaagcccccggatgggggatacccgccgtcttttcgcctcatcgttggaggatcgcaactccgtgggagttggtacctttcagccatcgttcggcttcaaggattttcatcatgcagcccggctgcacccctccgctggcggtcgcccaagatggtgacctccagcttgatggtgggggaaagcaagccgggctgcggcctctgcccctccctcagcctcaaggattttcatcaccagggctggggaggggactgcaccgtgcctggctctcggacgcgagtggcttcggagccgctcgcggcgccggcgtctgccacggcagctggaagaggttcttccgccggcgagatagccaaggccggccacggaccgacctccaactctacggccttctgcccgtccttgcctcacgagtttgggcatgggcgggggcctcctggcagcagcatccgccctgaggtcagtgctgccgctgttcggcccctcggagcagaagtcgtcatcgtcgtcgccgctgctggagcgggtgacggcgcgccattcgtcggtcttctgttgctccgcaggcctacccctatcgagtggggttgttcgtacctgcggagggggaaccggagttccgtttgtaatggcactttgaacgccaactcgcctgttgattatctgaaccgcttcaccaagcatgagtcgccccgtgtcaaggtgacgagtgagcgattgtccgggcgtgacgatgacttcgtcctccagagtggggatccttggaccgcgtcgccgtccgaggctaggtcggaccttgctgaaggtgtcgtcgatgccgagggtgttactgcccccttccagcatcaagacccgagcctgtag

SEQ ID NO: 15323 - DNA, 849 bp, Zea mays
  Peptide Sequence Number=SeqID_58698
atgtctgaaggctggaacattgccgtcctgggcgcaactggcgctgtgggcgaagccctgcttgaaacgctggctgaacgtcagttcccggttggggaaatttatgcactggcacgcaaagaagctaccgctgcctgggttgaagaagcgaccaactcaggttgcctggtgatcgacagcagtggattgtttgctctcgaacccgacgtaccgctggtggtgccggaagtaaacccgtttgtactgacagattaccggaaccggaatgtcatcgccgtaccagacagtctgaccagccagctgctggcggcactgaaaccgttaatcgatcagggcggtttatcacgtatcagcgttaccagcctgatttcagcctccgcccagggcaaaaaagcggtcgatgcgttagcggggcagagtgcgaaattgctcaacggcattccgattgacgaagaagatttcttcgggcgtcagctggcgttcaacatgctgccgttactgccggatagcgaaggagtatctgtactaatgtccgaccagcaacaaccgccagtttataaaattgcgctgggcattgagtacgacggcagtaagtattacggctggcaacggcagaacgaagtccgcagtgtgcaggagaagctggaaaaggcgctctcccaggtggcgaacgaacccatcaccgtcttctgcgccgggcgtactgacgcaggggtacacggtaccgggcaggttgtgcatttcgaaacaaccgcgctgcgcaaagacgcggcgtggaccttgggcgtaaatgcgaatttacctggtgacatcgctgtgcgttgggttaaaactgtacctgatctgtaa

SEQ ID NO: 15324 - DNA, 780 bp, Zea mays
  Peptide Sequence Number=SeqID_58699
atgtggaggtggtggccccgaatgttgaagattcttatcctgagcgaccaggggaaccagattgtcctatgtaagtttaaatctaaatgcaagttcaaccatccgaaggatatggtgaatgcattaggaacaggaacaaacaatgaatctctaattgctgatagcgctgtcttaccagtgaggccttctgaacccatttgtgtgttctatgcaaaaacaggcaaatgcaaatttggtgccatttgcaagttcaatcatccaaaagatattaagacatcacctttgattgcaaaggaaaccatatatacagcaacaactgatgcagcagatgccccgaccgaggcgtgtaacgcaaaggggcttcctataagacaaggtgaagtggattgctcgttttatatgaagacaggcagctgcaaatatggttctatttgtcgcttcaaccatcctgatcggccagggccagctgcggatatagcttttatggttccactggttcaagctactcttccttcatcagcacccattgtccctgcagtggttgaacctttgccaatgatctatcctcaaaggccaggagaaactgtttgtgatttttacatgaagacaggatcttgcaagtattctcagaaatgcaagtttcaccaccccatcagtcgttttgccccgcattccaaagaaaacggggatcctcaacagcctgcgacacttgctagcctgccaaggagagagactcaccctcgttgtaatgggtcaggtccaattactcaagtctattaa

SEQ ID NO: 15325 - DNA, 501 bp, Zea mays
  Peptide Sequence Number=SeqID_58700
atggggaagggaagggagctcgctggggcatctcctgcgccatgggaggaagcaggacgccatggctggggggcgcgtggagcagggagcctgctgctcgccttcagcaagggcgccgagttgggctggaagcagccgaggagggagctcgcccgcgccgtgaaggagagctcggcggcaagggtgcctggaggaaggagctcaccgcagggaaggctggcgccatgggagcagctcggcagagagcttctctgcgccatgagcaggagagaagagggaaccggctgggagaaatggcgccggggaggaacgcaggcagggcgtcggggcctgggcgtccatggctgcaagccttgctccctgcttgctgccgtgggagccagggaggaagaaggcagggggatgcgtgcgttggctggaaggagagggagaaatgttgtggcggctaggggggtagatgcaattttccaaattggcaaggggaggcacttctatttatag

SEQ ID NO: 15326 - DNA, 414 bp, Zea mays
  Peptide Sequence Number=SeqID_58701
atgaaggccaagtcacacccgcaaccaatcatcctaaggagtacctgcaaaaattgtgccacaagcaaggctgagtatactaatactcagctagacttacccgggctcaccgccttggcgtacaatgccccactgaccccgactggccgtcgtgcagtggccgcacttgtacccaccataaccggaatgggagacctcgtctcaggtcgcgtgaggggtaaagtctgcgggcaggttcactcaggtactaggcttaccgatttaccatatttctcgatagtgtttgctgggggagggtactcgctcggcgagtatccactggttaagtccaccatccttcagtacgtccaccatctgcatcttgtgggtggcaccacatcactggctcaatcatcatctcacggtcctatatga

SEQ ID NO: 15327 - DNA, 375 bp, Zea mays
  Peptide Sequence Number=SeqID_58702
atgaagctcagcacataccccggcggcggggacggggcggctccgctcggaggggccatccacttcggctgcgggccaccggagagaggacgaagcaaaccattggaaacaagggcctccagatcgtccgccgtgacggtggagaaaggccacgggtcgcgcggcgaaacaacggtcacccggtcggccatcaccaagcagaagaggtggcggcggagcggacaagggaccgggaaaggggatactccgaaagggatccttctccgcgaaggaagcgggccccgagcccccctactgatcagaggttcgaaggctggcccctcggaagggttcaacagccgcctcagagcattcgggctccacgcccactactga

SEQ ID NO: 15328 - DNA, 396 bp, Zea mays
  Peptide Sequence Number=SeqID_58703
atgggaagctccgcctcgcccgacccagggctcggactcagcctcgaccccggaagacagactctgcctcgcccgacccagggctcggactcagcctcggcctcggaagacggtctccgcctcgcccgacccagggctcggactcagcctcgaccccggaagacggactccgcctcgcccgaccccagggctcggactcagccttggcctcggaagacgttctccgcctcgcccgacctagggctcggactcagcctcgacatcggaagacgaactccgcctcgcccgaccccagggcccagactcgacctcgacctcggaggagcctttgcctcgcccgacctcgggctcggacccgccacgtcacagggaaggccatcattaccctacccctag

SEQ ID NO: 15329 - DNA, 228 bp, Zea mays
  Peptide Sequence Number=SeqID_58704
atgggagacctcgtctcaggtcgcgtgaggggtaaagtctgcgggcaggttcactcaggtactaggcttaccgatttaccatatttctcgatagtgtttgctgggggagggtactcgctcggcgagtatccactggttaagtccaccatccttcagtacgtccaccatctgcatcttgtgggtggcaccacatcactggctcaatcatcatctcacggtcctatatga

SEQ ID NO: 15330 - DNA, 129 bp, Zea mays
  Peptide Sequence Number=SeqID_58705
atgacgtcgatggttctcagctccttacagaagcaaggaaacgtcagcaggaccccgggccgcaccgtcagctacgcttctacggggctcaagcacttctccgacggccacgttagcacgattggataa

SEQ ID NO: 15331 - DNA, 534 bp, Zea mays
  Peptide Sequence Number=SeqID_58706
atggcccgcgcccgcgcctataaagcccagtcaggcgtcgactacactcttccgcgcacgctcgaacctcaccggagctcagttcaccgtcatttgcccgtgcgcgacgtgtccgcggccacccgagccactgccaccatagaccgggcagcccagcccttcccaaccctgtccaaccctctgagacgagttaagaaaaatagaaaatactgtaaccttggtgacggagagtacgtcctcgtgccggagcaaggagctgctcaggaggtagccccagatccagcaccagagcctgcaccagaggacctgcctgccactgctttggaaggcaagccccgtagactttgcccctcacgcgacctgagacgtggtctcccattccggttatggtgggtacaagtgcggtcactgcgcgacggcagtcggggttctctagaggacatggttgctggcgtgacttggccgtccatcttgccaccgggttggactgtcgagtgggaccccacctcggctgaggatgagcatgaggagtga

SEQ ID NO: 15332 - DNA, 432 bp, Zea mays
  Peptide Sequence Number=SeqID_58707
atgtattgtaatgtctgtgtgatgggtgaaacgctcttgggaaaggattggagggttttggaggtgaagggcttggctaccattgtgtcaccaaattatgataccctcactgtggatgagctattcagcaacctcaaattcacaaagattgattactatactcatgccaagattgagaatctggtgcacctactatggctcttgctacagtgtggtggggacaaggaggggagcttcaactatgaagaccctaaccacttcatctccaattgtcctaagatgaagggtaagcaaaaggctggcaagcgtgagtactattctgaccgggacaagggcaagcacaagtactcctctgacaagcacaagtctatgtggaggttagataaggaggcactcaagtataagtacctccgtaagggtaagctcaagtag

SEQ ID NO: 15333 - DNA, 861 bp, Zea mays
  Peptide Sequence Number=SeqID_58708
atgaatgaagattttctcatcataatactgcgtgaccttctaccaagacgtccagatcttcgccttgtactgatgagtgcaactataaatgctgaactattttccaagtgttctgagcaggggttcacttttcctgttgctgagttgtttctggaacatgttctagaaaagacacgttacaggatcaattccgaacgtgataattttgcaggtagttcaaggagaaagaagttttcatcagttaagagtgatccaatgtctgatgtttttgaggacattgacattactaaggagtatggaaattacagcagttcaacacggcagtcccttgaagcttggtctgctgctgaactagatttgagccttgtggaaagtacaattgagtatatttgtcgctatgaagcagaaggtgcaatccttgtgttccttactggctgggttgaaatttcgaagcttctagataagattaaagggaataatttccttggtagtcctaatagatttcttgttcttcctttgcatggttctatgccacctgtgaatcaacgcaaaatttttgacagaccaccagctaatatgagtttgtttgtaatttcagaaaaaattgttttggcaaccaacattacggagagtagtatcactatagatgatgttgtctatgtgattgattgtggtaaggccaaggagacaagctatgatgccttgaataagctcgcatgccttcttccgtcatggatatcaaaagcttctgcacatcaggattctagctctcatcaagtgactcctccccctcacgatgactttgcggacagatgtctcatttctagtggtggagctacgaacaacaatccgatgtcctga

SEQ ID NO: 15334 - DNA, 345 bp, Zea mays
  Peptide Sequence Number=SeqID_58709
atggttggaacggaccggcatcaggtcaagctttgcatctcatgccagttcaatgctatcacacctaggactagtagactggtgttttccaagtgtagttctctttgcatctcaggagaggtcgtgcaggccgcattcagccaggtttttgctatcggctctccaaagatcattcacgatgcaatgccacaatttcagttacctgaaattctcaggactcctttgcaagagctatgccttaccatcaaaagcttagagcttggagctgtatcctcctttttatccaaccttgttgacatattttgctcacttcagcctaccttaacacttgctgatgcaatttaa

SEQ ID NO: 15335 - DNA, 966 bp, Zea mays
  Peptide Sequence Number=SeqID_58710
atggttgccccgcctcctcctcctgcggcggggaaggtgacgggacaggcccggatgctgctcttccgccacggggggaagacgtcgtcgattccaccgccggcgggcaggctgacggccgccattgtcgttgtcacgcggcggaggaaggagtaccatgtcatagctgccatcaagggacacgaactcgagactcccgaaacggagcagcgtcccaggctggagaggttgctggagactacccatctggagcttgacgggaaggtgttcgtcaacacgcagcaggcccctacctggcgcgccaactgtcggcgtttcgacccctgggggtccctggaccgacgacccaaggtcgggcgaggcggtgactccttcgaggtcgaggctgagtccgagccctggggtcgggcgaggcggagaccgtcttccgaggtcgaggctgagttcgagccctggggtcgggcgaggcggagaccgtcttccgaggtcgaggctgagtccgagccctggggtcgtgcgaggcggagaccgccttccgaggtcaaggttgagtccgagccctggggtcgggcgaggcggagcttcctatggcgcctgaggctggacttggctgctgtcagcctcaccctggtgggtggcacaacagttggagaagggcaggcgacgctgttttccggtcggctccaccccgtctcccgcggcaaccgagagctccgtcttctcgccgcgctttactccccgtccgcaccgcggccgtggccgcgactgaggtgtaggaccggcctccctcccgcccacgcggggctcgtcctggtggagcccaaggcacgcatcctggtggccggcggtggcattggtggcctggccttcgcgctcaccaccaggcggaaggggttcgaggtgctggtgctggagcgggacgtgagcgccgtccgcggggaagggaggtaccgcggcccgatctag

SEQ ID NO: 15336 - DNA, 690 bp, Zea mays
  Peptide Sequence Number=SeqID_58711
tggtcctgtggcgactacttcaagaggtcggatataacgaagcacccaagtaccagtggtcacgcactgttcttagaggacaaccatgttgccttaagtgacccattggtgtatcatcaccaggcccgattaatggaaagcattcctattgggcaggattctgttgaatcggcatctgctcgagttttgatggccgtgctagagttgcaacttactcgggggcacagtcgtcaaaagtggcagcagttgtacactgggagttatgcagcatttaagatgatggaaatggccaagaatagtgcttgtactcaagcacaagaacgacttgaggaaacaaaggttcaagcggaacaggttattggactagagcatcaggtgacagaacttcagatgcaacaccaagctgatcagaatcgcattaaggagcttgagcatcagctaactaatgctcattctaaattaaaaattttgagtcagcaacaagaagaaatttgtctgtatgctgttgctgttagagaagaccttaaggaaaccatgagcttcataagccatcaggatcaggcgatcaaagaattgaatcgtgctcatcccatggagtttcaagtagcacaacggcttgtcaaccatctgcagcaatcagtgcataggctcaatgctgctttccatcctactcctacatcggcggactaa

SEQ ID NO: 15337 - DNA, 147 bp, Zea mays
  Peptide Sequence Number=SeqID_58712
atggccaactcttgctgcatggcttgcatcgtggctaacattgctgccgggactcatcgagtccccactaggaacttgcggactaccccgagccctacgaggcggcatagctgcttgccacaggggacctacaacctattcctctga

SEQ ID NO: 15338 - DNA, 534 bp, Zea mays
  Peptide Sequence Number=SeqID_58713
atgggcgctgacaggcgggccaggggcgcagagcgcgcgtgtgcgaagcggtatccgcgatctgggccgtgcgatcaagattggatgggggagatcagaccagggagggatgaacgactgcaggcggcgttgctcctctccgcggcggtgaggtcgctggagttggggcaggcgcgtgctagggtggctccggggtcgccggagttgggcagagagggagaagatgctacgacgaactcagtggcggggaaaaggccacgaatccgaggacagagaggggagaacggcgaggagaaggccttgggcggacagaagggactccgaagcaggggtgacacagggacctacaccggggcactggaacgagctaaactggctggccaccgcgcggacgcggcggaccgccacagtctagcaccggcgatgccaaaattggccgagcatagagctaaattggggaaattaagcacgggcaatggtatctcacctcggggcggagctcggggtggctttgtgcagtctccggcgagctag

SEQ ID NO: 15339 - DNA, 681 bp, Zea mays
  Peptide Sequence Number=SeqID_58714
atgccccctacaccaccacagggcatcccggctgctggaggagaccccgacggagatggagacgacgacgacgctggtggcagttcgagccacgacacggagctctcagaggagccagagccggagggatggatcgctagacccatcactcgtgacgctgcttgcgggtgtcacatccacgacgctctcgacaccctgctgcgtcgggccttcgaccgacacacttggtccatcgagtatcgttgtgtagtctaccagcatcgtcgtgggttatacccggaccagtgggaggctacttgcttggagcgccgtccggatgatgatctccggggtgcagaggccttctcagaggactattctattactaagagggatactgttgaggtagccatgcaagatgcaacacgatgtgcactttctcagtattgctcgttgttcagcagggtagatgatggcctcgacctgaagtactaccctcgccgttcaaccgacagtgctggaggtgtgattgtcttgccagttggtgagggcaatcccaggctgaacagcatggtcaacctagctgccgtgctcaacatagagttggaccacgcccttgacgagttgggcaagatgtctgagaacaggcgcagaggtgcgaggcgtgctcagctagaacagcaggcacccaagaggatgtag

SEQ ID NO: 15340 - DNA, 522 bp, Zea mays
  Peptide Sequence Number=SeqID_58715
atgggtgctactgatatattatgtgtttctacccatgatgcagtcacaaaagaatgcgttgctccagtatcaaataagacatttgcagaatggtactcaactgaaaacgtacctagtgccactcctggagtctcctggactgtgtcgacctccaagtggttcacctttccatactgggcacgaggctacccacgattgttgcctccttgctgcattgcattctgcctgactgtggcattgggagcggctgctgctgagctactttctttgggcaataattcgcccaatggtcttgttccccacagtggaaacatgcacgacttcctccttgcgctagtgctgcttggttgttctggttggttgttggggcaggaagacgaggtgcctggttgctctgacactgatattgatttcctccctgctggttattctaatggtactgctgctgctgctgaggaaattgtctctggtactgctggtggtggttctgatgctgatgttggtgttggtgaccctgcttga

SEQ ID NO: 15341 - DNA, 393 bp, Zea mays
  Peptide Sequence Number=SeqID_58716
atgcgatgtagagttccttcttcgtctgctacggatgaaatggttccgaagcagaacatggacccggggcgaaagacgatcttgtgctggaaagtgatggccattgagctagcttggatcagtgacacaccccctacttggcgcaccatctgtcggtgttttgggtccgaccgcgcacccggggttgcccctcaaggagcaaatggttgcagagaaggaaagagagctagaagaaagagaagcacacaagtcaccctccaagctcaacaggccacacttgaagaaaaccaaagtttgctgcgccagacccaagaggaagtgaaggggatgcataccaagtttgaagagaccaatgcactgctacgagctgtcctgaaacttcagaaagattga

SEQ ID NO: 15342 - DNA, 1092 bp, Zea mays
  Peptide Sequence Number=SeqID_58717
atggccactcgacgtctacgtccacagcctacaggtagtcagacagtcagtcatggtgttgacttggaggaaggaggtggtgggtgtctcctttccgaccctccccttcatcattcccggtcggtttcgccggcagattcagaatcgatgggacttcacgggtcaagaggctcacccgagtcgtggcagaggaagatgaaggtcacccttcgcttccttcgtcgggttagttatcggtggatatcgcagcttattgcactccttatttatgcagttctactcatgcctggtttcataaaagttgggtactactatttcttttcaagacatgttattagaagtgtaatctatggagaacaaccaagaaataggttggatttgtacatacctaaagataatagcaaatcaagttcagtagtggcattcgtaaccggtggagcttggatcattggaaatttccctcaaggaacaataagcgacatggtcagtgatgcttctgaggcgatatcattcatttgtaacaatgttgttagctttggaggggatcctaataaaatctacttgatgggtcaatcagcaggagcacatatcgcggcctgcgctctcttagagcaagcaattaaggaatctaagggagagaatacctattggaattctgacgatgaacgtgaaatgtgtgcaaggactatctaccgcacaaacattgacaagaaggtcactcaagcagatctaaagttattctttgagtccatatgtggtgagctaaaagtttgcagaaatggcaccatcaagatcgatctggagaccaacaagatcatggacttcatcaagtttgacgtcggcaacgtggtcatggtgaccggcgggaggaacaccgggcgtgtaggagtgatcaagaacagggagaagcacaagggcagcttcgagaccatccacgcgaactcaaagcctgaggaggacttcacagtacccgcgaatgaagctcaagccatgacctctatgcgtccgactgaggaaaccaagaggatcaacctcgagttcgctgatgaacgcaagaccgccgtcatcagctccagcctggatgacaaatag

SEQ ID NO: 15343 - DNA, 141 bp, Zea mays
  Peptide Sequence Number=SeqID_58718
atggcgaactgcagagatgccctcaccgcgattggaggcgaccgcgcgacatcgtttcttcgaggcgaggtgccggattcattgggtgcaccgcaggtgcacccaatgggtgtagcccccgagcttcgagtggattactga

SEQ ID NO: 15344 - DNA, 400 bp, Zea mays
  Peptide Sequence Number=SeqID_58719
atgggcaagaacaagaaaggcggaagctcctcgcaccattccggcgacaagcggaagcgcgagccgactcctccctcggaggacttcggtgattccgagtactcagaggaggagttctcctccgagtccgagggattgccagtccatgcctctcccccggtatcgtccgatgacttggacgattcccaggggatcgccgtcgaggtgtggacatacatccgggccgttgagcgctccgggctcgagggctcggaagggtcggaggtctcctcggacggggagaactcctctgactcgtccgaggaggggagcgacggtgacgacgacggtgagggcgacggcgacgactggggcgacgacaagggcgacagcgttcgggggcggcagtgtcagcggcaag

SEQ ID NO: 15345 - DNA, 948 bp, Zea mays
  Peptide Sequence Number=SeqID_58720
atggacttctcgtgctggcaggttccgcatgtgcagcaggccttcacctgggactacggcctcgcttgcgtgctcatggtgctcaggacgctagggattgattgctgcgatggcattgccgatctcgagaggctctgccgcaccacgagaggatatgtcaaggtcatgatcgacaaacagatggaggtgctccgcaagcagatctccatctatgccaccatctgcgagcagcttgttgagatgcatcgcatcctcaccgagcacgaggacaccattgcagaagaagatgaagcaaaaggcgtttttgagaaaaatctcatttttgctggggaattatcaaagacagtagctaaattagctgaagatggcaaggttgctataaggaacataagaagagatgcaatcaaagcttatgataaactagagaaggaaaagaagctttctgaggacaacgtgaaagatttatcagctgatctacaaaaagtcctagacgactacatgaaaaagatcgaatccatccagaagcagaaggaacaggttcttgaggaaggcgtcctcaacccagaatcaactgttgttgcgatctttccctctccaatgcattatgctgggccaactgaggtgcagtggcatgctaaggctcgtattaatgctggtgcaaatttctatattgttggaagggatcctgctggtatgagccatcccacggagaaaagggacctctatgatgctgaccacgggaagaaggttttgagcatggctcctggcctcgagaggctcaacatccttcctttcaaggtggctgcatatgacacaaagcaaaagaaaatggatttcttcgatccatcaaggaaagatgatttcctcttcatctctggcacaaagatgcgcactcttgccaagaaccgcgagagtcccccggatggttttatgtgcccgggtggctag

SEQ ID NO: 15346 - DNA, 531 bp, Zea mays
  Peptide Sequence Number=SeqID_58721
atgcgcgcaacgaatcgggaaatggtgaaggggtttacccggtccacgtgcgccggcgagttcttgaactccgatgagcgcgatttggcttctccggtgacgcgggccctcggttcaagcttgagcaaggctcacggtctcaccaggaagctatctgggggcttgaatcgaacggaggaggacgggagaggggtcggccacggcggttgctctcgggcggcactggcgggctgcggggaggtcgccggaggcaatggctggctcgggcaagacaggcgaggtacggaggaggcaatggggaaggcaaccgagcgctggggcgggttttataggcgcggacgcggccggggcgtcggttcgaccgtttggcgcgacgcgggcacgcggggcgcgcgcgggcgtgccctggcgagctcagagcgcgtcgaacacgtggcgcgttgcttctgccccgtgttcttcgctctgctgagcggccaggcgtacgaatcttgccctaccgcctgtgggagatctcttccctgcacctag

SEQ ID NO: 15347 - DNA, 852 bp, Zea mays
  Peptide Sequence Number=SeqID_58722
atgcaggcggcatgcaaccgcaccaagggggcgcaccctttcgacttcgacgcgttcagcatgagggcccaggcccacacgtcatgcgggcggaagcagccgtcacgtcgtcagcaagctcacgccccctcctgggacagcgagaggaccctctcccacggcgtgaagacgacgcggatcgggaaaggggatactccgaaagggatccttctccgcgaaggaagcgggccccgagcccccctactgatcagaggttcgaaggctggcccctcggaagggttcaatagccgcctcagagcacttgggctccgcgcccactattggtcagaggttcaaaggccggcccctcggaagggttcaacggccgcctcaggccactcgggctccgcgcccactactgatcagaggttcgtaggctggcccccgaagggttcgactgccgcctcatacgtagagcgagggatgaccctggtgtcaacacaagtgctaaaacgtgaatcaattcccatggatgaacaaagtgcaaatctagagcaaagtcaacaggctgtttcggtctggggcaccggactgtccggtggtgcaccggacagtgtccggtgcgccaggctacctcgggcgaagaagtcgctctcgggaatttgccgacggcgtacggctaaaattcaccggactgtccggtgtgcaccggactgtccggtgagccaacggtcggccagggccaacggtcggccacggattctgcgcgtgacacgtggtctggccaacggtcggaaggaggcaccggactgtccggtgtgcaccggactgtccggtgcgccagatctgcaacggtcggcaacggtcggctga

SEQ ID NO: 15348 - DNA, 702 bp, Zea mays
  Peptide Sequence Number=SeqID_58723
atgggtcaggcgacccatccctccgcctcctgcggctcagaggactcagtgttgtggtctgagccgtcgtcgtcatcgtcgtcgtcaggggggcgcctccagctggggaacaggggagcggcgcctcacggactccacctcctactcaggtggggaggaagagccctgctgctccctctgctgacgctggtgctcctgctcctcacgcaggcggtggtgcagcctctccaggtgactcgactgactggacacggtgcggcgcagaggatgctccgcaaggcgagatggcaggaaagggatcaccgacttacgagcagtgtgtctaagacgagccatctacaaaagacaccgcaggcggaagcagtcgtcacgtcgtcagcaagctcgcgccccctcctgggacaacgagaggaccctctcccacggtgtgaagacgacgcgtccgcgttccgttcctcgaacggctcacgcacgcacaacggccgccccgtgaaccactcgtcccgtcgcattaactctgcggcaggacaggcggcacctttggcaggcgaagtaggtatcgggaaaggggatactccgaaagggatccttctccgcgaaggaagcgggcccagagcccccctactgatcagaggttcgaaggctggcccctcagaagggttcaacagccgcctcagagcactcgggctccgcgcccactaa

SEQ ID NO: 15349 - DNA, 546 bp, Zea mays
  Peptide Sequence Number=SeqID_58724
atgcgcgcaacgaatcgggaaatggtgaaggggtttacccggtccacgtgcgccggcgagttcttgaactccgatgagcgcgatttggcttctccggtgacgcgggccctcggttcaagcttgagcaaggctcacggtctcaccaggaagctatctgggggcttgaatcgaacggaggaggacgggagaggggtcggccacggcggttgctctcgggcggcactggcgggctgcggggaggtcgccggaggcaatggctggctcgggcaagacaggcgaggtacggaggaggcaatggggaaggcaaccgagcgctggggcgggttttataggcgcggatgcggccggggcgtcggttcgaccgtttggcgcgatgcgggcacgcggggcgcgcgcgggcgtgccctggcgagctcagagcgcgttgcttctgcccgtgttcttcgctctgctgagcggccaggcgtacgaatcttgccctaccgcctgtgggagatctcttccctgcacctagagctacctagttcatgtgagttccaagagtag

SEQ ID NO: 15350 - DNA, 459 bp, Zea mays
  Peptide Sequence Number=SeqID_58725
atggctgaaaggcaactctccccacttgcgtcctcagccgacgcaaaccaagccttctccaacacgctccaaggtcctccccctacgacacgggggctaggtcccacgcgtcatgcaagctggcccagggcagaagaagccaaaccgccgcgcacggtgcacgcaactgcccagcggttacgagcattcctccactttcgcccaggccagcgggtgaaagggcagaccgccatgcaggcggcatgcaaccgcacccagggggcgcaccctttcgacttcgacgcgttcagcatgagggcccaggcccacacgtcatgtaaccggcgcgccggttactacgtacaagtgtcacacccggtttcagaaggcaaaccgaatgcgaactatgtacgtgccaggatcagaattcacgtacacaacgattacataaatgaacatcatcacacagtgctcgaataa

SEQ ID NO: 15351 - DNA, 168 bp, Zea mays
  Peptide Sequence Number=SeqID_58726
atgtcgtgcgctgctagggcggcgttcgtgttctggggttgtcctgcctttgccccggtacggcacctctgcgcgaagaagcagcagaaatctgctacttcctcacctaaaaacaacgaagggataaaccctgagtatggaattactcagcaagtcttacccgactaa

SEQ ID NO: 15352 - DNA, 537 bp, Zea mays
  Peptide Sequence Number=SeqID_58727
atgggcgagctgcaggtggttgcgatagccgtgttctcggcactggggttcgccttctacgtcttcttcgtgccattcgtggggacgaagccgttccagattgtggccatggctatctacactccattgattacatgtgttgttgtgttatacatatggtgtgcggcaacaaatcctagagacccaggcattttcgattcaacgaagaatttgaagttagataagaatgaaaagcactcctatgtgaattcggatcaggggattaatcatggaggaaggccattaagtgagacttttggtactgctgataacagtgagaagctgagcagcatgcttgagaggaacgattcgccttcgattttctggaattcttggcccagattttctggaattatttccctgatcgcaggttttgaagaacaacatgatagagcgaaggttgtagatattcttgtcaacgatcttaaagtcttttcgacattcaatgaggagttatataaggagacaacacaacttctcactcttgaaaatttttag

SEQ ID NO: 15353 - DNA, 213 bp, Zea mays
  Peptide Sequence Number=SeqID_58728
atggaattactcagcaagtcttacccgactaaagaaaagactctcaagggtatgctggttatatgggagtcaagggtttcaaggagggtaatcaagatcaaggaaggcatcttcggactcaagtcggtatcacagcagaccagaataatacgaaggttgatacggtgccgaaggtgtgagcaggaaagcttcggcatgatagcaacaaaatga

SEQ ID NO: 15354 - DNA, 159 bp, Zea mays
  Peptide Sequence Number=SeqID_58729
atggggctcggtgtatgcggctcgctctgccaagtttgggttcgccccttggggaggagtggcaatgagattgatggttttggttatgactatggtgctggcgaagatgaagctgtggaaggagacttccaggagttccaagactacgacgagttctag

SEQ ID NO: 15355 - DNA, 1758 bp, Zea mays
  Peptide Sequence Number=SeqID_58730
atggatctttcagttaccacacctacacaaattttgggaaagatcaatgcccatgaaatgtacatgcacatcaacgacaaagaagaatcatcttccaaaagaaaggatttggctctcaaagcaaatcatgaaagaaaaggaaaagcaaaaatacaagttgaggaagaatcctcaagtgatgatgaccttgatgcaaacattgccttgatggtaaggaagaccaccaagatgttgaagaagctaaatagagaaggcatcaaatttgattcaaggaagaagaaattcttttcaaacaaaagaaagcccatttctgagatggactgctacaactgtggtgagctcggtcatcttgctcatcaatgcaacaagcccaagaagaataagttcaagggcaagaaagaagatgaaagcgatgatgaaaagaaggaaaagaaattcttcaagaggaaggatgggaagcaaaagaggctccacaagaagaagaatggaaaggcatatattgttggcgactggctcaccgacatcgaatcatcaagtgggtcttcttcaagtgaagaagagaatgatgaaaaagttgcggccatcgccggggacttctcttcaccaccaccatcgccatcatccacttctcacctatgcctcatggccaggggtgaacggaaggtacaaaatgatattaatattgctgatgatagtgatagtgatagtgatgaagaatttgcttcaccttcatatgatgagttagctgacttacttaaagaatatactcaaatcattagaaagtcaaaagctaaatgtgataggttgaaaaatgaaaatgaatctttaaatgccaagtatgacatagttataaaggctagtgatgaaataaaagaagaaaataaaactatgtcatcaactgtaaatgagctcacaaactccctaaaagatgctaaggaaaaatatgacaaattaaatgaagctaatagggagttgcaaaatagactagtaaagatcaaggaagactatactcaaattaaatttgatcatgacaatcttcttgttgaaaatgaacttttatcttgcaaaacacatgaggctattaaccctgttgttaagcttgatgtagcaacctcatgtgatgatttgattcaagaagagcaaactagtctacatgctgaattgactgaaaaagttgaagtcctgactttagacaaccaaaaattgaagaattacttgactgatgcaactactagaggaaaagttgctattgagaacaatgatttcaacaatgagttggcagtggataatcaaaggcttaagaatgaggtcaagaaactaaaaagtgaaaatgaacatcttgcaacaagtgtgcaaaagttcaacaagggtcaatacctccaaaatgagctgcttatgaacactgttatgaaaaataacaagagtggtattggatacaatgcttttgtgcaaaagaaagctatcactcaatacaagccaaagcagactcacaagcctatcaaatgctttgagtgtggaaatgaaggtcattttgcccacaactgcaaagctaaaccaccaactcccttgcctaagcactcaagaccatttgctttcaatgctcactatgttctaagaaaggttgcaaatggaaagattaaggttacattcctaggtccaccaaataagagtagacctaaacaaatctgggtggcaaagtccttaattgagagagtcactggtcctatgcaatatagggccctcaaaactcaagcttga

SEQ ID NO: 15356 - DNA, 2847 bp, Zea mays
  Peptide Sequence Number=SeqID_58731
atggggaacagcatctaccggttcctatgcggcctgtgcgcgccctcgtcgtcggagcacgggctccacggcgcgcaccccgccgtcgccgcgctcggccgcgacgtcctcagcttccagagcacctcgcaggttccggacgagctgagccggcacgtcgtctcctccaagaaagcgcaggcgaattggtacgcaatttctctccgcttgatttcccttgcaccgacgctcaagaaccatcagaaagcagatgtggagggcctgttgtctttctacggcctgccgcatccgaacgcggcggcagcagcagcaggcgcgcccgccgctcgcccgccgcccaagaaggcccagcagggcgccaagttcgagctgcacacgctccccgtaagacatccggccggccggccggccagctcccgttttcctgaatgtttttccgtcgtctcgtcgcgtgcgtccacggggttaatgaaacgagtgtcctcgccggtttgccagattgaccccaagtctgtggccgacggcgacacggtgaacgtgtacgtcgacgcggcggacccgcgggaggccggcagcgtgccccgcgaggtgcagaaggctgcggcggagcgggccagggcgcgggctgccaaggactaccagaaggccgacgcgctgcagaaggtcatagtcgacgcagggtacaggccggttcctaacgcgagaggcgaggaggtgctggcgaagaagtacaggatcaggctgaggcccatcatgcttcgtgccaaacggtttgagacagtaaaacctaaaaaacttttaggcgtgtcgtaccagcccgaagccgtgctcgagctggctcgaaaagcccaggccatattcacagcactgtcaaggagcatggggatcgatgcgcccgagagcgcgatgccgtatggcaaggaagccaaggaggcgctgctcaaacttgtccaggggaagagcttgaaggtctacgtgtacgacgaggaccggtacggtagatgcgtcggagacatctactgcgacggggagcaaatgctgaagaagggtttcgcgtggcactacaccgcctacgatcaacgcccggagctggccaaggccggcgaactcaagtctcaagtgcggcagggcgaccgccgacgcgggcactctacgcaagccttcttctctagggcgtcgtttgccggcgacgagcaccacgaggatagcagtgctatgtcaaaagctccagatgatcatttacaagcaactgagcaggaaggaagtgtccatccaagtcaacaagcagggcaacaacatgtgaatgcagcataccagttctcgaaaacagaactaactgaaggttcaaaaaatgaacagcctgtccaagtagagcaactgagttcccacctacaacaagcatatccagaaattcaactacagcaggctgaaacagatagcttccagttagctgaaaaagaaacagggtattttggtcaacagagttttgcaggcgccaaggtggatgtagcccagccttcagtagttcagcagaatgtaaagcaaactgttggtcaacaagcatcatctggtacccaggatacaaggaaaggaccatcgataccatttaatatgttaattccaatcctacaggcacatcttgacagagacaaagatatgcagcttcaaactgtttgggcaaaacttaggcgtaatgaagtcaacaaagatgatttcttaagagttaccgtgaatattgttggggatcaaatgctcaagcaggcagctcataaagtttttgtacagatgcaagcacagatgcaaagaaatagccaggcaaattcaagtcagcagtctttattctctcaactttctgcacagcagatggcttccagtggttcagcacagttacatgatcagaaaattcggccacctggaccacccaaccaaggccagaaaaaccaggtgtcatcttcacctcaggcttttgcaccaccatcaggtacccaaccgcagaatagtgtacactatcttgctcatgataaccctaaccaaaaccctgatgcaaagggaacaaatgttgtaccaaatcaaccatctagaatgaacacatcagttccattgcaaacaaaggacaaacagcatcaaccaacacagttgcagcaggcctcacaacaaatatatggagcaaataatcctggtgcccaggcttaccctcggtcaatcactggttctcttagatcaccgagtcctgttccagaaacacagccatccatgcatgctcctggaatggctcctgcaaaaatggttcctcctcctactcatccaatgatgcagcacaatgcaactgcatggaaaatgcatcaaaacagggaattgaaaactaacgctccccctccaaatgctaatatgaagcaaaattctgaatctgttggcaaagtgcgcatggctggcacaggaaattcttcagctaaaggaaagcaggaggaggcatttacaagggtcctgagccccgacagatcttccgaccacgtgtgcctctgcgctatttgcccgctcgagtcggctacagagtggagtctgggaactcctaactctacaccgaatgctagtggaggtacaaagagtagcaagaaatcgggcgggcagaagaaatcattggaagcagcaggctctatgcaaccttcaagcaaaaagcagaagaaatctggagccccccaggaacaaagtatcgatgaactaaatgatgtcacagccgctagtggtgttaatattaggctgtttgtaacagctactaaggcgtcgcctaggcgccagcctaagtcgcctaggcggtcaggcggtggctcggcgcctagttccgcctag

SEQ ID NO: 15357 - DNA, 2907 bp, Zea mays
  Peptide Sequence Number=SeqID_58732
atgacgggcgttcggcgttcccaagggctacgtgcgagattcccacgtggtgcgcctagccttcagtcacggaaatgcccccaccgcgccacagggcagggcagggcaggcccaccccgtccgtcgcgccgcctgccgcgggcgcccgtcgcacaatcgcatttgcgtcggcggcggtgctcggacgaacagatagatgattatgcgctcgcgcggcagggacgatcgtgcggtgggcgcggtggtggtggggtgcggcgcgagcaaagacgcacacgaggcgcctgtgactctgtgagtagtaggtttgaatttccagcaggggacggcaacgcgaccaaaaggaaaagcaggctcctctcggctagtagttgtcacagctccacaacgggaaaaggaaaagggctccgtgatgccggcggctctcgacccaggacagcggcttctctgttggcccaagtgcacgcgactgactgccggtgctggtgccttgaaatgcggcagccgttctacggccggcctcccgtccagatgaaggtgcagctggtggaacaggaaggctccaaggggatgggttcttccgggtgcgcggagatagtcgagctggcggacgacccgaaagctgctcgtcctgctgcgcatctgagagtgagggtcaagcccgtggggcaggaggatggggcgcggtcgtgctcgctggaggatgaccttgaccagctcatcaggtcggtcaacgtgcgcacgtcggcgagggcttctgggcagaggagcaccgatagatggcttattgggctcgggaagtcgccggtgtcgggctcagagattgtggagtccgtgagcctgaagcaggcccttaggaagatgtgcatctcccaggcgtcggaaatggcagccatgaagaggctgtcaaaaccgacaggggcgtccaccccttctgattctggggcgaccaagaagctatatggctctgttgcagttcaagccaacggggagcaagatgacaagagtaaggtgggcaacgtttatatgctgcctgagaaactggcaggaagttcgattggtaaggcaaatgaaatcagcaaggggcagagtaagagctcagccaagaagaatttgagatcagcatctcctaccgcagtcaaggttcgcaaaaccagaatccaagatgtgatcagtaacaagtcatcagaggcggttgaagatgtttctgtaggagcaacactgccaaggcaaaggaaggggaaatctgtgaaaacgtctagcccccgggctgttccggtcggtggctcacggctggtgaggccaatgtttcggaacaaaacctcgaccaaaaagaaggtcaaacctgaacctgctatagtgcccgcatcgcacaagcattgtgagacgaaaggtcctaagtctcacgctagtaaacagaaggagtcccttcaggatgaacccagaaccccagcaccagctaacaagaaggctgctgtcagctccactgttgatggatctgattttggcaccaaagggtgtggcactggtgtgatccatggcccgaaggttggtgagctgtcaagatcaaaggagaagggtgaatgctcccaaagctctaagagtagcattggtgattatagcaccagcaccagcatcagtgaggacagttatggcagcttcagtgctaacggaagcaggcctcacatgtcaaaggatgtgagatggggagccatcaggtgcatggctatccaacaagggagcttgggattgaagaacttcaagcttctcaaacaacttggttgtggggatattggcactgtttatttggctgagttagtgggatcagactgcatgttcgctttgaaggttatggacattgagtacctcataagcagaaagaaaatgctcagagcacaaactgagagggagatactgcaaatgctcgaccacccgttccttccaactctgtattctcatttcacgacggacaacctttcttgtctggtaatggagttttgccctggtggtgacctgcatgttcttaggcagaaacaacctaccaaaaccttttcggaagcagctgcaaggttttatgtcgctgaagtcctcttagccttggagtatctccatatgttgggggtcatttaccgtgatctgaagccagagaacatacttgttcgagaagatgggcacatcatgctctcagactttgatctgtctctgaggtgctcagtgagcccaatgcttgtgagaatatcatccgtaggcagagatgagcccagcaggccttctggtccttgtgcacaaagctgcattgatccgctgtgtatccagccatcctggagcaattcctcttgcttcacgcctcgtctggtttcgtcacgaaggcctagagccgagcttctgaagaaaccatcacttccacagctcgttgttgaacctacggaagcaagatcaaattcgtttgttgggacccatgaatatcttgccccagagattattcgaggagatggccatggtagttcagttgattggtggactcttggaatcttcctttacgaattactctatggcaagacaccattcaagggacctggcaatgaggaaacactctcaaatgtgatctcacagggcttgaagttccctgataatccagctgtaagcttccacgctcgagatctgatcagagggctgcttgtgaaagagccagagtaccggcttggctcgtcgagaggagccactgagattaagcggcatcccttctttgaaggcctgaactgggccttgatccggtggaccgcaccaccagagaccctgaagaacattgacactgcaccaacacctgtaacgacacgcaagaaaaaggaaggcaaatgtctggaattccggctgaatggtgacgacatcgagttcgagctcttttag

SEQ ID NO: 15358 - DNA, 249 bp, Zea mays
  Peptide Sequence Number=SeqID_58733
atgcacccgggctatgatcagatcgcatgggggaacaaccagactggccaaggcatcacaaaaggcattaagacctcgaaggagtcaaaccactcctccgagccctcgggggctacacctggcggtcagcaaggtcgaagtgaccgcagtcacttcgccctcccactgactgacatgacaggaaaacagcgctgctcgcccctctctgactgctatgccacccgccagggtgaggctgacagcagctga

SEQ ID NO: 15359 - DNA, 669 bp, Zea mays
  Peptide Sequence Number=SeqID_58734
atgaccatatgtgtatgggacactaagaccccttccttggtagaaaatctccatagtgattggggcaacaagtctattgttaactaccaggataatcctgtcccgccacactatgctgtggtccaagttctagagatcacagacaatggttgtgaaggttgggagatagacttttcagttgaggggatcataactttgcaggaggcaatgaacgagttggtcctttggcatcgacgcgacatcaagttgggtgatgagctgatcttaagtcatctatcgcatcataagtcaccaacgccgaattcaacaccaatgcaacaaaaagatagttcgatcattccataccccatggtgcaggaaaatatagcaccaacctccacaaaaaccgttgaaacaatcatatcacctcttgcgaaggaactcgacgagggggacatagacaaaattgttcctcagaatgtcgacgcaaacatcaaaaaggaagcaaaggttgacaccaatgttgaagggccaactacttcaaagaaagttcatcagcgaatcgccactgacaatgtcaagaaaccgttagaagcagtgacacgctacctgcaaaaattgaagagagttatgacagatcaatcaaaagcggaatcagcatctcgtggagtacgcacacggtccaaatag

SEQ ID NO: 15360 - DNA, 822 bp, Zea mays
  Peptide Sequence Number=SeqID_58735
atgcaggcggaaggatctccacctcgaaggaggaagccagcaccaagctcgggccatcatagccaaggtctccgtaagggtcccggcccgggcaaacacctcgaccggccgctccgtagcctcagccagctgtcccccgaggacatcagcccggctcatggcctcggcagcctgactccgggggcaactcacactcggttaagcggttcagctagccgacaggcgagtcctagtgctcgaaatgaggaagaaacacggtattacactcaaatacctagatgttcaggcctcgacagccacaatgaacaaacaccggcactcaaggtgccattacaaacggaactccggttccactcccgcgggtatgaacaacctccatatcggagggcctgcgggacgacaaactccgggtggctcgccgccgaccactgcagcagcgacaacgacctccactccgggtggctaaacaggagcagcaatgaccttagggcagacgctgctgcgacaaggccctcgcccacgtcctcacccaaggggcgaggacaagctatcaaagccaaagagccggagatccctactcaagtcctcgcggacgggaaggcaccgacctccgcgcggaggcgtcgtgccggagtgagcacaagacaatccaagaacacgaacgccgccctagcggcgtgcgacgtcttggacggtcccccggtgcgcacggcgcaacagccgcccatacggcgggcagacagccacactctgccccagcggtgggaggtggcaccggaagctgcgctagagccagctgagccagcgagccaggcatgctaa

SEQ ID NO: 15361 - DNA, 231 bp, Zea mays
  Peptide Sequence Number=SeqID_58736
atgggtaagcttagcctcgactggaccaataccagaaaggccggctcgcaatgggagttgagagatggcgagagtatcgtgtatccacctggcaagaggctggatggtggggtactgagctctcggttggcggggacccgttctggtcttaagaaaaccagtggactagctttatgtggggttaaggtcaagcagttgcttttagttggtcagggtgaagcactattatag

SEQ ID NO: 15362 - DNA, 222 bp, Zea mays
  Peptide Sequence Number=SeqID_58737
atggctatagagagtcacggcgacgcgacggaggcaccaaggcacgtggcgcaagatcggaagacggctgtcgccggcgagcttatctgctcaagccgcaaagcttggggatacgacggtgtgtcaaacatatgcaatgctaatgtttatgatgttatgctcaagtttagtaacagtaacaccgggggtgttacagtggtggtattcttaattgtggaatag

SEQ ID NO: 15363 - DNA, 279 bp, Zea mays
  Peptide Sequence Number=SeqID_58738
atgagcttcggactattgaccttcgacatcgtcatcctgtacacaacaacacagtataaggcttcgggcctcgtcactagccaactctcaaccaccattcgcccaaatttgcgttatgaatctgcttcctatgcttcgggctatattggggatggcacaaaagtctccatgcccggctattacttcgtcgagcgcttctacttcgccctcgatatgttcgaatgtgttggaaatgttttcggccaaaggagtaaacttttcagcgctggccacaactga

SEQ ID NO: 15364 - DNA, 378 bp, Zea mays
  Peptide Sequence Number=SeqID_58739
atgtcagggaagccgaactgctgctgcccagctagggtgcagcattccgtcctctgtccgggcgacggtggccagccgcaccagggggtctcacaacacgtcgtacgctgcgagggcggtactcgtgttctgggacagtcccattctcgttttcatggtgaggacgggaatgaggacctgccggtggacgccaccgtcggtgctgaggtggtggcagctagagaaagcttctccgccgacgagaccgtcagtgccaccccgcgggctgacttctggctctttggatttgataacttgtccttgcccctcgagtgtggatgtgggcgagggccttgtcgcaacagcgtctgccctgaggtcatcgctgctgctgtttag

SEQ ID NO: 15365 - DNA, 369 bp, Zea mays
  Peptide Sequence Number=SeqID_58740
atgggttggttccttgtcattttagtcctgacaagccatggcgccgcacctagcagagcaggccagcaccaggcgacacacgggtggctgaagaaggctgtgcatgggtggccggagcggcggagccaggggcacacgaacgtccggaggcccgaaacaagcgagcagactgctggaggcctggagttagtggtgggggcgtggactgaaggcgaaggcgacatcgagtcggtcgacgagcgcgatggtgtggccagcgacaccactcgcaggagtgggcgccatggccttatgtttggcagccaccagcctgctgggcaggcccgttctgtcaacttcataacctcacagcccaacccatattcctaa

SEQ ID NO: 15366 - DNA, 939 bp, Zea mays
  Peptide Sequence Number=SeqID_58741
atggcactggggttactgagcccggagaaatcccaaccagagtcgggctcgtcatcttcctcggaacccgggggcccgtacgaggcaaacgctcagcaagtccttcgcgagcgtgctggcgtcatccgtctgcttggggttggcgtgttgcgaggaaacgacgctcgtcttcgtctcagacgcgaggtcaacgcccgacatgtcccccgctggggcgccggcgccgtcgactcgctcgacagccaacgaggtgccgcctcctgcttggccatggttgccccgcctcctcctcctgcggcggggaaggtgacgggacaagcccagatgtcgttcttccgccacgcggggaagacgtcgtcgattccgccgccgtcgagcgggctgacggccgtcgttgtcgttgtcgcgcggcggaggaaggagtaccatgtcgtagctgccgtcgagggacatgaactcgagactcccgaaacggagcagcgtcctgggctggagaggttgctggagactacccatctggagcttgacgggaagctgttggtcaacacgcagcaggcccctacctggcgtgccaactgtcggcgtttcaaccccgggggaggggagccagagccctatgtacatgccgacgtggctgtcgaagaggtgttggtgccctgttcatatgatgtcgtggccgtcggaggagcgcttgagccctatagaagcacagctgtcggggctgtcgggtccttgctgactgactcctccgaggtcgaggttgagtccgagccctggggtcgggcgaggcggagaccgtcttccgaggtcgaggttgagtccgagccctggggtcgggcgaggtggagaccgtcttccgaggtcgaggttgagtccgagccctggggtcgggcgaggcggagaccgtcttccgaggtcgaggcgggggccgagccctag

SEQ ID NO: 15367 - DNA, 642 bp, Zea mays
  Peptide Sequence Number=SeqID_58742
atgccgacaggtcttaacccatcctttgcttgtcagggcttcctctccctctactcccaaggtcgtgcctccactgcccctggctgctatcgccgagacagcgccatcgggaccctaggctctagctgtgggtctggctacggcggcgccaacaccaagtggtgccgcagcgacggagggggtccctactgccccgacggctgccacagcctcaacgacggcgatgccgtcgagtacaccgtcggcagcagcagaggaggccgcagctgcgcctgccgccgctatcgaggtcgacgcggggggtgcatccagctccaacccgccgcccactccaaaggagacggaggtgatttttgggtggcgactccgagggagaaggtcatctcgaagctccaggcgaagctgaatgcctacaacaagatgctggaggagcagcgggatcagcaggtcgcggctgtggagaacttgcggagggtgcagcaggggcttgatgacagggccagcatccttgccctatccgaagagaacctcaaggagaaggatgagaaggagcggatgctagaggagaaggagtggacgctaggggagcgggtccgccagttggaggcggcgcgggcggcacagacagccctaggcccttag

SEQ ID NO: 15368 - DNA, 324 bp, Zea mays
  Peptide Sequence Number=SeqID_58743
atgccgagcaggcggtcgacgtcgtcgtgccactacttcatggcccccggggaggccgtggagctaggagggtggcgcagcaactctctggccgctgacagcgccccaggcgcaaccctagacgtcctggacgtttgcgcgggagtgtgttgccgcacagagtgcacagcagcggccgcactaggcgctgggaggttggtggcccgcggtgtggaagaggcagccgcctcttcccaccatgaagtcctcgggcaagaaatcatggtgctcgacgatgtggaccatggcgtcgagcagaagaacaagcaaaaacctaaagcctag

SEQ ID NO: 15369 - DNA, 294 bp, Zea mays
  Peptide Sequence Number=SeqID_58744
atgtccggacacgtgtcggctccggacccccgcctggtcttgattaaggtccgggtactctttgtcccagaatcccaggaccctgccgtgagtggcccggaccccacacagaggggtctgggacccatccaaggggtccggttcgtgcctgtggaggtactggaccttacccggaggtccgaccagcctttagagctagtttgggaggcacaaaaccggaggggattggaggagttaaaatcccatccttcgggctactttgggaacctcaaatcttcttcggggttgaagtga

SEQ ID NO: 15370 - DNA, 288 bp, Zea mays
  Peptide Sequence Number=SeqID_58745
atgtctagtcagcacggatcggactatgactggagaacctcacctattgatcctcaggttgtgtatgcaagtggtggaaaagctcatggaagttacccaatgttcgataacgtcatcgactcgagccaggtgaggattcagcatggaggttcatcgaggtctgctgctcgtagctcccgtcgctccactcaagatccagcagaagtggagcaactgcgagaagaacttaggcaacataaggattacttgagccaacaagctgcacaacaagaatactatactacttag

SEQ ID NO: 15371 - DNA, 2310 bp, Zea mays
  Peptide Sequence Number=SeqID_58746
atgggaggacttggggtgtctgacagttttgctagagagttgatgaggacgtgtgcggccccgggggaaaggatgtcttcgcccgagctccgggagtcttcagctcggatgctgagggttaccgggggctgctggcctagaaatgttcctatcccctgcgtggctgaggaggactgttttacatctcgtatggttcatcggtggagagtttttccttacgggcgaaatatcggtgctgttgtgtgggcagtgatggacaaggatcgccaaggtgcggcgcaaaaacgccaggcgactgtccggctgcatgaagctaggccgaagaggcagcggggggctccgaaggctgcggcctccggcggaggcaagccgccgctggcggcgaaggcgggcgcctctgcacccagcaaggcgccggaggcaacggcgggcgctggaggctccaagtcaacgaaggtggtgccgccggccagcggagtggcggaggcctcgaaggcggcccgagcgttgccgttgtcgggcaagcgcgttgccgacttcggcaccgatattactatagacgactatcttggtgggtcggacgaggggcagcttgctatggttgcgcctggcgcggagaccgcgacggcggccatagtgccgaggacgaggggcgaggcccttggcgccggaggcgaggtgtcggccctcgcggtggttagggatgaggcgagcgcagcgacacgccggctgaagggagtgacggaggcgctgagtcaggcgacggaggcgctgagtcaggtggctgacttcgccagccgtactgcatcgggggccctcacggcatctgtgtctgccgaagtcgagagacttcgaacacaacatgcagacgctgtccgtgagaagtcggcctccgacagcaagtgccgtaagctgacggacagggtggccgccctggagagggagaaggccgacctccggcgccagctggcggcggagaggagggaagccaacgaggccgtcgccaaggggcaggctgcgcatgcggaggccaagctggcgcgggcgaagggcaatcttgccaaggagctcgccggacatcagcaaaagcggctcaccgccctggagagccgcgcgaaggaggccgaggccgcgatgcatgcggaggccgaacggacgcgcacgcagcttatggatacatatcgtgagctgggtgcgcggactggtgacttcgaggtgccggaccgagagcccgggcttcgctgtctgcagtgggtgcaggaggagctgctggaacttccagccgtcgcgggggggttgatgtcgtacgcctccctggtcacctgtgagggggcgatgaacgctctctcccgcgaagggtgccggcacttcgaggccttcgaccaggcggatgaagaatttgatcgagatatctataaggtcgaagaccccgttgtgaaggaatccgccggggccctttatgaccggatgtggggtctgtacggtcgtgaggtggtcagggagcgggccgagactgcgagggctcaggcagagcgcggcgagcgggtggacgacttcggggccctaaacagcgcgctgccaggcccggagccgaccctcgcggaggctgtgactggggtcgccctggagccaaccccggggaccgcagcgatcgcgacggctgcccccacatccgctgtggccggcgaagacctgcccccgacggtggccgaaggcgcccctgatgcccccgcagctgctgtgccgagtgctgaagatcccgcggcggtggcggcggagccaagggcggagccaacggcggaggctcccgcagcgtcagggcctttcgcaggtggcgtagttcaagattttgggcctgcgcacgcaaccgctactactgagtttttggcggcttcgaccgcggaaggtgggaatgaatatggtgggtctgtatctgagttttttgattttactgactctgggagctcggttgagtggactggggagtcgtcggaggaggacttggattattttgcggccttggacgtggctgcggcggaggcttcgccacacgccacggacgcgccagacgtgccaggccctagcaccgggcgccgacgacgaagggcggttgcaaaacgtagggttagcgcggaggagggggctcggcttcgtgtgagtagggctggccgtcaggaactgttgtctttgccggccgctgcgagtacaggggaaagggaactgcgaagtctttttgcgggtgaggagcttaggataatgttatttaattatagagagatgggacttattcctaaggttgagccgatgtag

SEQ ID NO: 15372 - DNA, 270 bp, Zea mays
  Peptide Sequence Number=SeqID_58747
atgttaaacccccgcgaaccgcccatccgatcgcgatccaacggtcggaatcaattgcgcaaactggtacacgcgctcaaatcactgccgtacgatggccatccaacgaccacagcattgtcttctacctcacgtagctgcccacatctatctacgacgccagtgttgggaggcagcgccggcactggcggcctgggagagggagagatactcaccgacgatggaggaggtcgaccgacgatggagcgcgcgatcccgccgaggtactag

SEQ ID NO: 15373 - DNA, 1275 bp, Zea mays
  Peptide Sequence Number=SeqID_58748
atgggcatgagcactgggcgcggcggcattggttttctggacggcttcagaaaggagcggcgcgcagcgaagttatcctccaccaattacaagttgggtattacacctgcggagcaacagaaggccgacggatggctcgccgccgcccgctccagcagcagcgacgacgacttctgctccgagcggccgaacagcagcagcgatgacctcagggcggatgctgatgcaataaggccctcgcccatgtccccactcgaggggcgaggacgagcagaaggccgtagagttggaggtcagtccgcgggcggcaccgactatctcgtcggcggagaaacctcttccggctgccgcggcggaaggtggcaccggaagcagcgccgaagccgctcggaccggagagccggacacgcggcagctgccagcgccacgaacggcgaacgcccttccccccgatcgctgagggaaggcgcgggccgctgcccgcgcggagaccgaccccaactctgcgcactcccctccccagcactgatgatgaacatccttgaagctgagggaggggcagaggccgcagcccggcttgcttctccccacccaggagctggtggtcaccgtctcggccatcgcgggctgagtcttctccagcacgctccaaggtcctccccctacgacacggaggctgggtcccacgcatcatgcaagctggctcagggcagaagaagccaaaccgccgcgtgcgaccagtgggtgaaagggcggaccgccatgcaggcggcatgcaaccgcaccaagggggcgcaccctttcgacttcgacgcgtccagcatggaggcccaggcccacacgtcatggaccgggaaaggggataccccgaaagggatccttctccgcgaaggaagcgggccccgagcccccctactgatcagaggttcgaaggctggcccctcggaggggttcaacagccgcctcagagcgctcgggctccgcgcccattactggctggccctcgaagggttcgacagccgcctcagacgcagagcgagggatgaccctgggtacgttcaatacataaccaaggctcgggctacgctctcgagagtgaggctgacagcagccaagtccggcctcgggcgccataggaagctccgcctcgcccgaccccagggctcggactcggcctcggccccggaagacgacgaactccgcctcgcccgaccccagggctcggactcagcctcggccccggaagacgacgaactccgcctcgcccgaccctag

SEQ ID NO: 15374 - DNA, 540 bp, Zea mays
  Peptide Sequence Number=SeqID_58749
atgtgccctcagacacctagtttatccccagaatattcccataaagcagggttacaagctgtaattacaagaatgcttttacaaactaggcccgtaacacaaaggcggccatgcggggcccgttacaatgggccagatcacacgtgggccttagagcaggacgaggccgtgctgcggggagacgtcactgctggccttcgtctggtgctgaatgaagcgaagggtgtccctgcccgttttgtcttcgtcaaaccagcgactgtagcgaaaggcgacgagcgaagggtggcgtctttgccttcgccccaacagagggctcggtggcggctgagcaatgggagccgagggtggcggcagacgggcgggcggcgcgacgggacggggccgaggatgggctgggggtggcagcggcggactggcggcggcgggattggggacgggtcgggggctgcgcgggtgcggcgaggatgggatcggggctggggccatgggcggagaggcggcagcgcgacgaggtggagtcggaacacgattagatga

SEQ ID NO: 15375 - DNA, 144 bp, Zea mays
  Peptide Sequence Number=SeqID_58750
atgacgaccgaaaggccacttgagctactccacatggatctgttcggcccgatagcttacataagcatcggcgggagaaaaatctcaaacccaagagaccttaaaaggattcttgagacgagctcaaaaatgagttcggattaa

SEQ ID NO: 15376 - DNA, 207 bp, Zea mays
  Peptide Sequence Number=SeqID_58751
atggctgttttaggtcagaggatcttggtgatcactgctgccacattgttgggggccttcggcttccgaaggtatcttcggactcgtatcagaaagggagaagctcaaaagatacgaaggttgacacagcgccgaagctgtgaagcaggaaagcttcggcatgttcgcagaaaagggaaccgacttaaagatgaaaaggccatttag

SEQ ID NO: 15377 - DNA, 186 bp, Zea mays
  Peptide Sequence Number=SeqID_58752
atgtcgcgctcgtcgagctcgaatggggcgccggcgtcggactctggctgcttcagcaggcccaggaagcggagatcggcgatgtacaacagtgaggtgcgccgttgggccaccagatgggcctttggtccacacgtaaattactgggccgcactaactgatggcacaggcgcgctgggctactaa

SEQ ID NO: 15378 - DNA, 477 bp, Zea mays
  Peptide Sequence Number=SeqID_58753
atgatggtcctcgcctcagttgccaccaccttgttcgtcattctacttcttttctgtctcccctcatgccaccacctccgcgccaccccattcttgacagaaggcgtaggagcaggcgcctcctccccgtattcgtcttacaccagtcccgacaccgactcgcgtagtggctattgcacgtccacgaggacgtttcacatcatgcgcgcaccatcgtttttgccgtcgtcgaacgtctcgttcgtcttcccgaccttcgccctgattttcctccccaacctatttcccccgcccacggtcgcagccgcgagccgaccgacgctcgtcgacgcagatgcccaggtcttcgtgtccttctctagcaacgaacaggtatgccgcatcttcccttcccctcctgctctacgaaaccttggaagtgggggaggcgagggatgggggtctgatttgctacctacggtacccatgcattcataa

SEQ ID NO: 15379 - DNA, 504 bp, Zea mays
  Peptide Sequence Number=SeqID_58754
atggcggcgcgaagggtaggaagggcggttctctcttctctggctagatctctcgggttgcgaaaacctaaggggcaggcaggaagcggagcaaagaaccgtcaccggaccctctccgggggatataaagaccaaggcgaggacggttccaacgttccgcccggaccggacgcgggattcaaaaacgcgaagcgaaacggccgctcctcaaacggctcgtgcacgcgcaacggctgccccgccaactactcgccccgtcgcattaactccgcgactggacaggcggcgcttctggcaggagcagcaggcgacgcttcgccttcgccgaaacaaccgcgccaaaaaagaggctcgggggctgctctcgcaaacccggcttcggccaaaccgttgacagcgtcaacataccatcccgagaacttgggccccgaccgtgcacccgggctacggcctgctcgcatgagggaacaaccagaccagccgaagcattacgcaaggcattaa

SEQ ID NO: 15380 - DNA, 531 bp, Zea mays
  Peptide Sequence Number=SeqID_58755
atggcgcttcctgttgacgtggcgggcctgtgccctaggtcgggcgacgtggaggctcctccgaagccggggtcgagtctgtcttccatggccgaggccgagcccgagctcctgggtcgggcaaggcggagcccgagtccgagccctgggtcgggcggagcggagttcgccgtcttccggggccttagcccgagtccgagccctgggtcgggcggagcggagttcgccgtcttccggggccttagcccgagtccgagccctgggtcgggcggagcggagttcgccgtcttccggggccttagcccgagtccgagccctgggtcgggcggagcggagttcgccgtcttccggggccttagcccgagtccgagccctgggtcaggcggagcggagttcgccgtcttccggggccttagcccgagtccgagccctgggtcgggcggagcggagttcgccgtcttccggggccttagcccgagtccgagccatgggtcgggcggagcttcctttggcgcctttggcaaggcctga

SEQ ID NO: 15381 - DNA, 84 bp, Zea mays
  Peptide Sequence Number=SeqID_58756
atggccgcggccaggggccggacggtccgcgacctggtacaggggctggtgttcctgcctgacgggccggacgcttcagcgtag

SEQ ID NO: 15382 - DNA, 573 bp, Zea mays
  Peptide Sequence Number=SeqID_58757
atggacgaggattgcactcaacccctttcaagtgatccaatgatcaacttgaataccacaactttcttccttatagtctttctcccgtttgtgaggaatctccacaagttggagcctctcgcccttacaaaaaagatctcaaagaatgcacaagaggtcccttttatagccccaaggcagctaggagccgttggaggccaacaagcaaggctatccttgccttctatcgagtggcgcaccggacagtccggtgcgccaccggacaaccactgtagcttgtccggtgcacgatttccttccaattcgagcagagtcgatcattgctcctttgggccagatggcgcaccggacactgtccgtgcacaccggacagtccggtgcacccagctgatcgttggagcagccacgcgtcgcccgcggattgcgcggctgaccgttgcgctgacgactgttggctcaccggacagtccggtgaattatagtcgtactccgccgtcgaatcctgagagcgacgagttcaccgcggaccaacctggcgcaccggacactgtccggtgtgccagactaagctga

SEQ ID NO: 15383 - DNA, 1464 bp, Zea mays
  Peptide Sequence Number=SeqID_58758
atgggcaaccggcgggcgaggtcgatcgccatgaagtccgtagcctttttcggcgtgtccacggcgactgggaaccacgcggcagctgccaccgcacacaacgaggctctagagcatagtgcagtgcagccgcggaccggcgcagccagcagtgacacaccacgttctccccacgcccccgtgtggggcagccctgcctgcctggttgcccctgcatttgcgacgcgcattcatggtgtttctccgtccatctctgttccccgcccgccacctaagtttctatgtaaaggccttttggttgagctggtaacggcagctgattcacatttgagtctgctctgtagtggagcacgaaagtccatcaacaacatcacggcccggcgaaatctcgggtacctgtcgtgcgggacaggcaaccccatcgacgactgctggcgctgcgactcggactggcacaacaaccggaagcgcctcgccgactgtggcatcggctttggccgcaacgccatcggcggccgtgacggcaagatctacgtggtcaccgacccgagcgatgacgaccctgtcaacccgcgcaagggcaccctccgctacgccgtcatccaggaagagccgctctggatcatcttcaagcgggacatggtcatcacgctcaaggaggagctcatcatgaacagcttcaagaccatcgacggacgcggcgccaacgtgcacatcgccaatggtgcctgcatcaccatccagtacatcaccaacgtcatcatccacgggctccacatccacgactgcaagcccacggggaacgccatggtgcgcagctcgcccagccactatgggtggcgcaccatggccgacggagatggtgtgtccatcttcggttccagccacgtctgggtggaccactgctcgctctccaactgcgccgacggcctgatcgatgctatcatgggatccacggctatcacagtgtccaacaactacttcacccaccacaacgaggtgatgctcctgggccacagtgactcctatgtgaaggacaaggcaatgcaggtgacgatagccttcaaccatttcggtgaaggtctcatccagagaatgccaaggtgccggcatggctacttccatgttgtgaacaacgactacacccactgggaaatgtacgccattggcgggagcgctgagccaaccatcaacagccagggcaaccgctaccttgctcccacaaacccgttcgccaaggaggtgaccaagagggtcgaaactgctcacactgtctggaagaggtggaactggagatcagagggtgacctcctgctgaacggcgcctacttcaccccctccggcgcgggcgcctcagccagctactcgcgcgcgtccagccttggcgccaagtcatcatctatggtcggcaccatcaccctggatgccggtgccctgtcgtgccacaagggcgcggcctgctag

SEQ ID NO: 15384 - DNA, 1080 bp, Zea mays
  Peptide Sequence Number=SeqID_58759
atgcgggggaaggcgaactgctgctgcttggacagggtgcagctgtccgtcctccaccccgggcggcagtcatgctgtgcgcgggtggctgctgtcaccggcctcgcggagggggtgaactttgacaacacgagcccgatcggccgcgagcgtcgtcagctgcagcgtgcctggcacgctggctcagctggctctagcgccgcctccgatgttgcctcctgccgcttggtccgggcgtggctgtccatccacctcatgggcgactgttgcgccgcgcgcagcacgacgcctccgcgcggaggccggtgccggcctgtccgcgaggacttgagtggggatctgccagtgcaggttggggcggccgccattcgttggcgtggcgctggcgcgcaggtggccgctgtcgtcggtgccgaggtggtggcagccagagaaggtttctccgccgacgagaccgtcggcgccacctgcggtcagacccccgacactttggctttgatggcttgtcctcgcccctcgtgtgggggcgtgggcgagggcctttccacaacagtgtttgccctgaggtcatcgctgctgctgtttagccactcgaagcggaggtcgttgttgctgctgaaccttcggccgctctgcgatgagctagagccggaggcagcggtgttggcgtggacagaggcttcgtcggctcgaaaagaggcttcgtcggcccaggagcaggtggcttcccaggccgaggaggtgcagcggcagcggctagagcttggccaggtcatctgcgagcaggaccaacctcggagtcacgctgccgaggtcgtgagtcgggctaaggtccccgggggacagctggctgaggctacggagcggccaaccgaggtgtctgcttgggccggggccctggcggagacccgggctgtgagggcccaagcgcggtgctggcgtccttcttcgaggtggagatccttccacccgtgtcgccgtccgaggccgagccagattccgccaaaggtggaaacgacgtcgagggtgctgctgctccctctgccgatgtctgaacctgcaggaaatgtttgtctgtag

SEQ ID NO: 15385 - DNA, 723 bp, Zea mays
  Peptide Sequence Number=SeqID_58760
atgggcgtgcctgacgcctgcgcgctctggcgcgcattaattgctgttgcaggcgaccgttggcgcgaagtagccgttgccccgctgttgcaccggacatgtccggtgaattatagcggagcagccgttatgatttcccaaggctgccaagttccagagccgcgtcttcttggagcaccggacactgtccggtgtacaccggacagtccggtgaattatagcgcgtcggctctgaaaattcccgaggccgaggagttctgggcgaagtcccctggtgcaccggacactgtccggtgcgccaccggacagtctggcttcgttgtgaagcaaccttggccaaatcgcctcaccaaccgaccgtatcgcaggcgcattcaatgcgaggatcgcctgacaccttatcctgacatgtgtgcctcagtcggcaaggtcgaaccaagttcagcctcgggcgcaacaggaagctccgccttgcccgaccttaggcctcggcctcggaaggaggtctccgccttgctcgaccccatggctcggcctcaacctcggcctcggaaggaggtctccgcctcgctcgactccagggctcggcctcaacctcggcctcgggaggaatcgcgtccttgcccgaccccggcctcggcctcaggagaagtctctgcctcgcccgaccttggggctcggaccgaccgcaccacgggggatacatcattaccctacccctag

SEQ ID NO: 15386 - DNA, 657 bp, Zea mays
  Peptide Sequence Number=SeqID_58761
atgcctccacctctgcgccaccccattctcgacagagggcttaagagcatgcgcctcctccccgtattcgtccgacaccagccccgacaccgactcgcgcagtggctattgcacgtccacgaggatgttcacatcatgcgcgcaccatcgttttcgtcgtcgtcggacgccccgttcgtcttcccggccttcgccctatacttcctccccaacctgctgcccccgcccacggtcgtagccgcgagccgaccgacactcgtcaacacgggtatggcgagcatgcgccttctccccgtattcgtccgacaccagccccgacaccgactcgcgtactggctattgcacgtccacgaggatgttcacatcatgcgcgcactatcgttttccccgttgtcggacgtcccgttcgtcttcccggccttcgccctgttcttcctccccaacctgctgcccccacccacggtcgcagtcgtgagccgaccgacgctcgtcaacgcgggtctgagatattggacaaccatagccctgatagcagtcgacatatgctacggagttggtggtggtgttgtgtcacttcggcgggtcttcgtcgtgtccttctccggcaacgaacatgtatgtccgcatcttcccttctcctgctcttcaaaaccttag

SEQ ID NO: 15387 - DNA, 1383 bp, Zea mays
  Peptide Sequence Number=SeqID_58762
atgggggttgaacaaaacaaaattaggcgactgaaggagcatttgttgaatgaactgccccccaagcggcgacaaattattaggttgaagctaaaggcaccagatatcagggcagccacatcttcatgcggcaaaagggtgaaccctaacagttgtaatggaactcttacaattgaattgcccagtaaaagcaatgatgatgaaaatacaaaagaggaagaagaagatgattgcaagaaatctccaaggagtctcaccccacaagagattggtatcgcaaagttatctggatttagtgaatggttctcaaatcatttcatcatgaatggatttgatgctaaccataacctggatccccagtctagctgtcagaaaacaataatatttgcacatcacttaaaggttctagatggaatacaggtgtttatctctgagaatgagatcagatttgttcgcattgatggaagcacacttcaaagggaaaggaaagaagctgttgattctttccgtttggatccagaggtgaaggttgcaataattggaattactgctggtggtgttggcttagacttctcatctgctcagaatgttatttttgtggagctcccaaaatcagcttcagaattgcttcaggctgaggatagagctcatagacgtggccaaagaaatgcggtcaacatatatatattctgtggaaagaacacattggatgaatcacactggctccagttaaaccagagtctgttccgtgtctcgtctttgatgaatggaaaaaaggatgctgtaagggagattgaggttgatcaagtgtgccaacttgaagaaatcaaggacaccgaggaaacacaacgcaaactgcatcctttggagaatcataatgcagatttgacccacgtaccaaaaaaacttctggaaagtgatgatttgtccattgatggttttcttggcatcgaagatttggaatttgacttggatttcaccattaggacaattcctcttgaatttgaggatgaaaaccccggcacatccttgaaaaataatccaactccaacagtacttgaagacagatcttgtattgatgtttctctttcaccagctgcagtcttttgctctgtactatctagttgtaaatcaataaagtctcgtaagaggctttctggaaattctgggtccttgagtcaagctgcatctgttccagattttccaattcaagtggagtctctgcgttttgaggttaaagcacttcttacctacttgtttattctatcttttgcctgttattgtgattgtactctttctactttcttgaggttaaagcactctgagacctatgctgtggggagaggaggggggatagctactgcaatgtcagccattccgtaa

SEQ ID NO: 15388 - DNA, 198 bp, Zea mays
  Peptide Sequence Number=SeqID_58763
atggccatgttcctagtcatcgcgaggtgtgggcgggtaagcaactacctcaacgagcgtagcgttacagagctgagagcgcgcacggcggccgccaccatgggacctctccggcgtctgcgattggagggaaagatctggtctgggagcttcgggaggtcgtactggtggtgcaaaagaaacttgtttaaaccctag

SEQ ID NO: 15389 - DNA, 438 bp, Zea mays
  Peptide Sequence Number=SeqID_58764
atgggcaagagcaagaaaggcggaagttcgtcgcaccattccggcgacaagcggaagcgcgagccgacccctccctcggaggacttcggcgattccgagtacttggaggaggagttttcctccgagtctgaggggtcgccagtctacacctctcccccggcatcgtccgatgactcagatgattcccaggggatcgccgccgaggtgtggacatacatccgggccgtcgagcgcactgggctcgagggctcggatgagtcggaggtctcgtcgggcgaggagaaatcctctgacttgtccgaggaggagagaggcggtgatggcgacgacgagggcgatggcgacgacggaggcgacggtgatggtgacggcgacgacggcaagggcgacggcaagagcggcagcagcaaggcctgtggcaaagcgccactggcttag

SEQ ID NO: 15390 - DNA, 663 bp, Zea mays
  Peptide Sequence Number=SeqID_58765
atgagcgagaggcagaagatgattagctgcccgagtgagcagtcgccgatagccctcaacgtccggagtccgggggaggccatcgcctatccgagccaatactccaccgacctcgctcggtgtgttcatggctcgggcgaagtcggggttcaagttcattccgagaagagggttctctcggcgttgtctcgcctcctgttcggcctgctcttgagcttgccgacgatcactctacgtcgggtcccgctctccggcttcatggtgtcgccggatatttcggcgtcggttccttcgtcggcgagattcccgctgaaagaggttcctccccccggcgcggtaccagaagagcagcttgacgagcctttcacctcgtttgcttcctttttccttgtgatccgtgtccatttttctgtagaggaggtggacagcggggttctccgggtagacagatcctctgctcctggcttgcaggaggtagtcttcgctcggagcgctggaggttgcgctttttcctgcttcgctctggctttcctgaagattatcgaggaaggttttctctccggcggatccgcgatgcgatgtagagttccctcttcgtctgccacagatgaaatggttccgaagcagaacatggatctagggcggagtatgatcttgtgctag

SEQ ID NO: 15391 - DNA, 162 bp, Zea mays
  Peptide Sequence Number=SeqID_58766
atgcaccgcgctaaggaacatgtcaaccttcatcctccattcaagcatctcctccaacttaggatgaagagcaagctcaagatgatggtgatcaagttcaatacaatgagcaaggaaccaaatgggtcttccgcaacaaataggatgagcatggtgtggtga

SEQ ID NO: 15392 - DNA, 114 bp, Zea mays
  Peptide Sequence Number=SeqID_58767
atgggcgttgatgactttgaattgctcaccattattgggagaggtgcatttggggaggtctctaaagagacaatgtatgttttctgtgtctgcctgcagcttaccccattataa

SEQ ID NO: 15393 - DNA, 894 bp, Zea mays
  Peptide Sequence Number=SeqID_58768
cggagggcatcgccgctgctgctgctcgagcggggacgcagaccggtggaggagcacgtgaggaggagctcggcgtgtgctccagcccggtgccgagggatggcagcggccagacttgccggagaagaaggtcggcgtggggagaacttgaactgcaagaacagcagggggaggaggtcgacggctactggctgagggagacggtggggaaaaaaagggagcctgcgctagtgcccacaggttcgagggaaggcagggagaggtgccgtgagcacatgaactcgccggtgagcagagcatgccgcacagggagcagagggaaaagaaaaaggagcaggggcgctgctgtgcagggctggacggccatggggaaagaaggggggaggaggaaagggagccagctggggcgtcggcgtgctcccaaggagcttctgctcctgcgcgcacgaagcagagggaggaggagctgccgccatgcctggagggggcgcgctagagaggaaaatctgggcgctgggaggtggaggcgccatggctgctggcttgaggaagatgaagggaaggaggggtgcacgcccatggaggaggggaggacctgcagcttgcccacacccttggagccgaggagaggaagggcgccatgggggggctctgtgtcctgctgcaagcgccatggagaggcttgctgccgtggagatggccagctggagcagaggggcgagaggaactcgtctgcgccaaggaagggagcagggagcgccagggttgggtgctcggctgctcaagcctcgtcggtgccatgggaggaagggagccgagctccctgcgcgctagggaagaaggggctgcgcgtgggggaaaaagccagggagaagaaaatggcggctaaggaaa

SEQ ID NO: 15394 - DNA, 256 bp, Zea mays
  Peptide Sequence Number=SeqID_58769
atggggggggctctgtgtcctgctgcaagcgacatgggagaggcttgctaccgtggagatggccggctggagcagaggggcgagaggaactcgtctgcgccaaggaagggagcagggagcgccagggttgggtgctcggctgctcaagcctcgtcggtgccatgggaggaagggagccgagctccctgcgcgctggggaagaaggcgctgcgcgtgggggaaaaagccagggagaagaaaatggcggctaaggaaa

SEQ ID NO: 15395 - DNA, 930 bp, Zea mays
  Peptide Sequence Number=SeqID_58770
aggaactggggtgtagttcgcttcgccatcgtgccgttaatagggctcggtgtggtgatgaggatgatggttttggtaatgactagtgatggtaagtggtattctttctatttggaaaggcaggagatagagtctgtgaggagctgctcccctgtgccctcgctggaggcgccccctgcaccaccactgggcgtcccgaccactggagtagctgttggaggagacgacggcagctcgagccacaacaccgacctttcagaggagcaggagccggagggatgggttgcacgacccatcactcgtgacgccgctcgcgggtgtcactttcacgatgcgctcgacaccttgctatgccaggcacttgaccggcgtacctggtcaatcgagtatcgctgtgttgtcttcctgcacagtcgtgaggtttacccggaccgctgggaggtgacttgtttggtgcgccgtccggagaacagtctccggggtgcggaggtctgctcagagcattactctatttctgagcgggactcagctgaggcggccatgcaagatgccgcacggcgtgcactttcacactactgcttagtgttcggtggggtagccgatggtcttaacctgaagtattacccccgccgtccatcgggcagcacaggaggcatggttgtctcacctgtcggtgaggacaatcctaggttgagcagcacaatcaacctagccgccgtgctaaacatggagttagaccatgccctagatgagctgagtagggctcgtgctgagatcgcccagttacgggctgagcgcgcagaacgtcgtcacctagaggatggttctcccacccccgccgggactcagcacccgtaccgctcacctcagcgtggacaccatgcttatggtaaccccgactgcaggaccaagataaatttagaaccatag

SEQ ID NO: 15396 - DNA, 186 bp, Zea mays
  Peptide Sequence Number=SeqID_58771
atgctcggctgccaggagagcctgctgctgggtgagagtctgctgctgctgggtgagagtctgctgctgctgggcaggagagtccgtctgacgagctcatacaagtacttcgctgcagtagtgaagtctgcgggagaacgtcgcgacccatctgtgaaaggcgggcggaacagagctgcgacgtga

SEQ ID NO: 15397 - DNA, 321 bp, Zea mays
  Peptide Sequence Number=SeqID_58772
atggcgcgatgcaggctggtacgtggccagcatccggcaatccccacgctctggatctgggaacgagcaatcagcgcctccatccgcaatcagcgtcttcccccagccgtagccttcgcctccactcgccccgacgcccccgcccccgcaatcagcgccttcgcctccacaagattggaccagaatctaacatggagagcggaatccccaccgcaatcagcgttcgcttccactcgccccgacgccccccgtcttcccccagccgcagccttcgcctcgacagaggacgcacgaccgttgcgcccgccctgctcgcggtga

SEQ ID NO: 15398 - DNA, 543 bp, Zea mays
  Peptide Sequence Number=SeqID_58773
atgtactgtttgatgtccggtgcaccggtatgggcgattctgacttctgcgcgcgctgcgcgcgcatttaatgcaccgcagggagccgttggcgccgcagggagccgttgctccgctgtggttctcgatgtactgcttcgccgccaccaccttctgcttggtggcgctagacagcgcctcctcccccgccgcggcggccatcctcgcggagccaccggcgccgccgtctacgtggacgccaccgaggacgagctcttccgcctcaccaccaaggaggggaagttcaccgtggagcgcgagaaggtgaagatcgagatgcagcacttctcccccgtggtgcagttcgagcaggaccccgtgcagatcctagacacgctgctcccgctctacctcaatagccagctcctccgtgccctgcaggagtcgctcgctagcgagctcaccgcccggatgagcgccatgagcagcgccaccgacaatgccatcaagctccacaagaacctctcccgcagatcgatcctgctgctgggtcgatctcgttga

SEQ ID NO: 15399 - DNA, 2274 bp, Zea mays
  Peptide Sequence Number=SeqID_58774
atgtggacgccgtcgcgcgggagcaacgcccggcgcagcggccaccgccgcatcgcggactacctggcggacgaccagaccaccaccacagccaccgacgcctccgacaacgagtcctacactaccgcctatggggaggagttcttcgccgccgccgccgccgggagcggcggcgccggcggcatgctgccggcattcctggcggaccagggggacctggtggaggtcatgctggagctggacgaggagtccatggtggtgcgcagcgtcacgcccaccagcgcggcgctctacggcgccgcctccctcccggcgccgccgtccgcgggggtcctcggggtgtcgccgtcgccgcgccgcgcgccttcggagggcggcggccgcctgagccggtgctcgtcgacgtcgtcgcggatacggaagaagttcgcgtggctccggtcgccgtcgccctccccgtccccgtaccgccccacgcccgccgagcttcagcgggaggccgccatggcggcgcgcgagcggcggcgggagcaggcgcagctcaaccggtcccgcgccggcgccaggcgcgcgctcaagggcctccgcttcatcagccgcaccacgggctccgtcgaggccgccgagctctggcgccgcgtcgaggagcgcttcaacgacctcgcccgcgaagggctgctctcccgcgacgacttcggcgaatgcatcgttcacattgttatcctccgcacacgcgaggaaacagctcgatcctactgtaattgcgacgtccttatccgcgatcttatggcgctccacgcccaaactgcaggaatggtggactccaaggagttcgcggtgggcatcttcgacgcgctggcgcggcggcggcggcagaacctggagcggatcaccaaggaggagctctacgacttctggctccagatctccgatcagagcttcgacgcgcggctccagatcttcttcgacatggtggacaccaacgtggacgggaggataacgagggaggaagtacaggagctgatcgtgctcagcgcgtcggccaacaagctggcaaagctcaaggagcaggcggaggagtacgcgtcgctcatcatggaggagctcgacccggagaagcttggctacattgagctgtggcagctcgaagcgctgctgctccagcgcgacacctacatgaactacagccgcccgctgagcacggccagcggggcccagtggagccagaacctcggcgtcggcggcgcgctgacgataacagggggaggaggagacggcggctgcggcgtggacggcgaccacccggggcctccgcgcgagcgtcgccggagctggggcgtgcggaaggcggcggcgcgggtgcgcgtggcggcggaggagaactggcgccgcgcctgggtgctggcgttgtggttcgcggccatggcggcgctgttcgtgtggaagttcgtccagtaccggcgcatggcggcgttccaggtgatggggtactgcctccccacggccaagggcgccgcggagacgctcaagctcaacatggcgctcgtgctgctccccgtctgccgcaacacgctcacgtggctccgctcctcctgggcccgcttcttcgtccccttcgacgacaacatcaccttccacaaggtaaattacgagcggactctactactgtactgtgtactccatgatgtccgtgcaagctccccaccgccagccgcttccgcaaatatcgtcgcgtccgacgtggcgagccacctacccacggtagattcgtcgcccatgatggccaagtctccatcacatgttccgtactgcactgcgggcagcggcgcggacacgcggtctaatgattctgtcccggcgatgatcgcgacggcgatcgtggtggggatcacgctgcacgcggggaaccacctggcgtgcgacttcccgcgggtgatcgcggcgagcccggaggagtacgcgctcgtcgcgggcgcgttcggcgcggacaagccgacgtacgcggggctcctgtcgggcacggagggcgtgacgggcgtggccatggtggtgctgatgaccgtctccttcacgctggccacgcacccgttccgcaagggggagcccaagggcgcgggcgcggccgccggcacgtcgcggctcccggcgccactgaaccggctcaccggcttcaacgccttctggtactcgcaccacctcctcggcatcgtgtacgcgctcctgctcgcgcacggctacttcctcttcctcgtccggaggtggtacgagaagacg

SEQ ID NO: 15400 - DNA, 246 bp, Zea mays
  Peptide Sequence Number=SeqID_58775
atgcgtccgtcagccagctatcccgttcccgtgggcaggcaccaccgcaccaggcaggcaggcaggcgggcggcactgcggcagcggctgggcggtggccggtgggcggcccacgcccgggcaagtgattccttcgcgggcgcggcctcctcgtgcttttttttcccctctcgtttgcttcgcggtgcggtgctccgctacctattggctattgcgttccgcggttctgccacggcgctcggctag

SEQ ID NO: 15401 - DNA, 177 bp, Zea mays
  Peptide Sequence Number=SeqID_58776
atggccgcgctcgacggcagcgtcgtgaggctgtgggacggcgacctgacggcgtcgccgagggggcggatgaggagtatatggggtgaggccccacaagtctgggggcctggtcgggggcactgctcgacccccgccagggccggcgctgttcctcgctccaccccttctccataa

SEQ ID NO: 15402 - DNA, 1062 bp, Zea mays
  Peptide Sequence Number=SeqID_58777
atggagcaccgtcccgggctggaaaggttgctggagactgcccatctggagcttgacgggaagttgttcgtcaacacgcagcaggcccctacctggcgcgccaactgtcggcgtttcgagaccggggggtccctgggccgacgagtgaaatgtcgctgcgtgccccagcccagatgggtcggcgcgaggccgagcgcgaaggggggagaaaggtggccggagatgggcgtgagagaggtggaaatcccgcggccttcgtgttcgtcccgcgcccaggtcgggtgcgcttgcagtagggggttacaagcgtccacgcgggtgagggagcgagcggccttacgcgagcgcctgtctcgtcctcgtccccgcgcggcccaccctctgtcagagggccctggtccttccttttataggcgtaaggagatgatccagcctgagtcagcttggggtagggtaatgatggcgcctcccgtcgatgtggccagtccgcgccctaggttgggcaatgtggaggctcctccaaagtcaaggtcgagtctgtcttccgtggccgaggtcgagtccgagcccctgggtcgggcgaggcggagaccgtcggttgaggccagggcagagtccgagccatggggtcgggcgaagcggagttcgtcgtcttccggggctgagcccaagtccgagccctgggtcgggcggagcggacccgagtccgagccctgggtcgggcggagcggagttcgccgtcttccggggcttagcccgagtctgagccctgggtcgggcgaagcggagctttctatggccacctttgcattaaatgctcctgcgatttggtcggtcggcgcggcgatttggtcagggttgcttcttggcgaagtcagggcctcgggcgagctgaaactttatgctgatgggggttaccagctgagaattaggagacttgaggaaggtgcacacgtggtggggtcgagttgggatatacgaaggtgggtcagcgtcgtgttcgctggtcgggtgggtccacacaccatcgtgattagcgcgcccacgaagctagaagttacc

SEQ ID NO: 15403 - DNA, 258 bp, Zea mays
  Peptide Sequence Number=SeqID_58778
atggctcaccggagtttctccggcccgcccgaggctttctcaccgtcgttctcccctctctgcccgtggattcatggccccttgttcgccattgagctcgtcgtggcgccctcttcctctctgcccaactccgacgaccccgaaacccccctagctcacgcctgcctcaactccgacgacctcaccgccgcggcgagaagcagcgccgcccgctgccgttcacccctccccggtctgatcccctccgtccgatcctga

SEQ ID NO: 15404 - DNA, 228 bp, Zea mays
  Peptide Sequence Number=SeqID_58779
atggccatgtgctgcacgcgtgctcttgggctctccggggtgggttgccaggaccaggagcttcgccgttatcccctgatggtgctttgttgtgccgctgcaatggagccactccatgcttcggactgccagaattgctcaccggagccgctcctccgccgtgtgctccgctcgcacgtgggcaaggtcctccgcaacctttctgcagttgctataaattcatattaa

SEQ ID NO: 15405 - DNA, 432 bp, Zea mays
  Peptide Sequence Number=SeqID_58780
atggcgaacgggccaaaaacggatttttggccacggccgcgaaaacgggcacgtggaagggcacaggaccctcccgtggtcaccccgcgtgagacgtggaagttcgggtccacccgacccccgctgccgtgcggccgactcccggcgcccgtgtcccatcgctcgtgcgggcatcctgtgcctactgcgttgagaagtgcttgcgtgctgctacccgtcccacgggaagccgtgctcgatacacgttgccttcgtcgagctcacccccccggggtgcggctcgtcggctcgagagcgcccgcgggcgtttgcctcgtgcccgccgtcggcctattgtccggcggcaccgaggacacctcgctggcgctttttggtcctcggatgtgggctcacgctgaaggccggagacgcgttggcgtcacgcgcccatga

SEQ ID NO: 15406 - DNA, 618 bp, Zea mays
  Peptide Sequence Number=SeqID_58781
atgcctaaccgcgaacgagtcacccgtgccgccgggctccggcccggcacgctgccccctccgaacctcccgcggggaaggggggtgccgcgaaaaagaacccacggcgccccgggcgccaaggaacaccagtactacctcctgccccgcggagcggtcggcccgccttccgctcccaggggcagcggttacaccttaatcgacacgactctcggcaacggatatctcggctctcgcatcgatgaagaacgtagcaaaatgcgatacctgggaagcggatgggggctggcgacgcgcaccggccgtatgcggaacggctcctgctggtccgccgatcggctcggggcgtggaccgttgtcgcccgcgccggcggccaaagcccgggggccctaggcgcccccggcagccgtcgtcggcgcggacggtatccgcgcgcctctggcgcgcccctcggggcgctgcgccgcaacggcctgcgagctccccatccgacccgtcttgaaacacggaccaaggagtctgacatgcgtgcgagtcgacgggttcagaaacctgagatgcgcaaggaagctgacgagcgggaggccctcacgggccgcaccgctggccgaccctga

SEQ ID NO: 15407 - DNA, 552 bp, Zea mays
  Peptide Sequence Number=SeqID_58782
atggcgaggtgtatggggtctgatcaactccatggcaaatgggtaacacgacttgtgggtaaagatgtgcaacctctacagagtgtaaaactgatggtcaattccaggcggggtgatggaattgatttgcctcctaatcgacacactcggtggatatatagacaaccccagccacaaccagcagagatgaatcctcctaatcctccaccaggcgaaattgacccactgattgtagctcagatgaggatgatgcagcaaatggcggacactatggcagatatgcgggctcagatgcagcaagggcgccaggagatgcgtcaggaaagagaagagatacgccaggaattgcgccaggagcgagaggagatacgccaggaaagaagggcgcaacagcagttgcaacagcaattccagcaacagcagcaacagcaacaagtgccattgcctccaccaccaccaccagttccacctcatgataagcaccgagaatttatgagtcataagccaccgaccttcgctagttcaccagatccacttgatgcagatgattag

SEQ ID NO: 15408 - DNA, 1551 bp, Zea mays
  Peptide Sequence Number=SeqID_58783
atggcgtcggtcaggtcgtgcgcgtccgtgaagtccgccgtgaggagtcctgtcagttacagatccacgagggccgtggcggccggctcgggaaggctgcgcgtacgctcctcgtcgctgcaggcgctcgccggctgcgccagcggcggcggcggcttcggcttgctcggcagcgatgatgggccgagggtcaggcggggcgggcgggaggtcctcgccacgtgcagcgcgagcttcgacggggtccgccccgccgtcgtggcgggcgccgccgctcagcccgggtcggcggcgttccccgagcgggccaaggtggtggcgctggtggccaccatcatgctgctctgcaacgccgaccgggtcgtcatgtccgtcgccgtcgtgccgctcgccgcccagcacggatggtccagctccttcgtcggcatcgtccagtcatcgttcttatggggatatgttttctcatccatggttggaggagctttggcagacagatatggcgggaagaaggtgatggcaggtgctgctgcgctatggtccttggctacaatcctcactccgtgggcagcctctcgctccaccatcatgttgcttgctgtacgtgcactatttggcctcgcggaaggtgttgcatttccgacgatgagcaccttcttaccgaagtggttcccaacacatgagcgtgctactgccgttggcatttccatgggtggattccatcttggaaatgtcataagcttcctagcaacaccaatcatcatgtcacacataggcctctcgggaacatttgccttcttcgcatcgcttggttatttgtggatctctgtatggatgatgaacgtagaaagtgacccacttgacagccatactataagcaagtctgagttgcaattaattctagctggaagagctggatctaaagtccaaggcagtaataaattcccatcccttagggaattgttctcaaggactgaattcttggctgtcactttggccaatgtggtcaacaactggggctattttgtcctattgtcgtggatgcctgtgtacttcaaaacggtttataacgtcaatctgaaacaagcagcgtggttcagcgccataccttgggcagtcatggctatgtccggctatgttgcaggagcctctgcagatttcctgatcaaatctggtttccccataggactagttcggaaaattatgcagtccattggttttatggggccttgcgtggcattgctatgcttaaggtttgcccaaactccatcagttgctgcagttctcatgaccattgccctgagcttgagttctttcagccaagccggatacttttgcaatatacaggacattgctcccaaatacgctggatctttgcatgggatgacgaacggcatagggacggtggccgccatagttagtaccatcgggaccggctacttcgtccagtggctagggtccttccaggcattcctcaccctcacggctgcgctctacttcagcgccaccgtcttctacaacgtctacgcaaccggagacctgatttttgactga

SEQ ID NO: 15409 - DNA, 1959 bp, Zea mays
  Peptide Sequence Number=SeqID_58784
atggccgcggccgcaaccacgtccacgaccacggcaaccatcccacccggcccgcaccgcaggcgccagcccaacgacatcgagcgcgacgacgacacctgctgcggcggagccggcgtcgatcgccgcttcccccacgcctgcggcgcgcaacacgacgacgacgccgagcgcggcctccaccacgccgccgctgccacgccctgcggcgggactagggcgctgctgttggcgcggaggaggcgagcgtgggccaccgcggcagcggcagcagcaggcgcgccgccccggacggcctgggcctggacgaggggcgtcgtgctctgcctcctcgccctcgccgcggtcgtcgtcgggttccagctgggctcgcaccggggcggcgggagcacggacgcgggcgccggcggtgacggcggcgtcaggctcttgcacttgcacagggtggagacggccgacgccgatgtcgtcatggagtggacggaggagaacctgtcggcacttgcgcgccgctcgcctcagccgccgataagtgatatggttgcagtggcgaagatcatgaacgcgtcgctggtgatccctactctggatcatcagtcattctggaccgacccaagcgatttcagagatatattcgacatcgaccacttcaaggagtcgttgaaggaagacattgtgatcgtggattcgctaccactggattatagaagggcgaaaccctacgtgagagcacccacctcctggtccagggcttctttctatagagactgcgcgaaagtcctgaggaagttcaaagtggtgaggtttacccacacggattcacggatcgtgaacaacggcctcgctccttctctgcaaaagctccggtgccgcgcgaattacagggcgctccagtacaggaaggagatccaagggctcggcagcactctggtggatcggctgaggaatgggtccgccgagcattacatcgcgctccacctaagatacgagaaggacatgctggccttcaccgggtgcaaccacaacctgacgctgcgcgaggcagcggagctgacgggcatgcggttcaaggtgcggcgctggaaggagaaggacatcgacagcgaggagaagcggctgcagggcgggtgccccatgacgccccgcgaggcggccgtgttccttaaggctatggggtacccctccgccaccaacatctacatcgtggccggcgagatatacggggagcatagcctggacgcgctcaaggctgagtaccccaacacctacacgcactacagcctcgccacggtggacgagctggagccactggagctctaccagaacaggctcgccgccgtggactacatcgtcgccctgcagagcgacgtgttcgtctacacgtacgacggcaacatggcaagggccgtgcaagggcacaggagatttgaagggttcagaaaaaccataaaccctgacaggctgaagtttgtggagcttattgacaagctggatgaaggttccatgtcctggagtgagttccagatcgtggtgaggaagcaccatgagaacagactgggaggtccatatgagaggttgcgtggtgcaagtccaaggcaggaggaatacttctactcaaatccgaggacgaaaggtgggctcgccggtcgtattgcctccgttggtgcaacgagattgatgaaggctggagcgaagggtggcgtcttcgccttcgccccaacaacagtcactgacccgctgtgttgtgatgtaaaggccgaggcacctcgcgaattggacgctctcaggttttctgagagtcacttagctataattcaccagactatccggtgtttaccggactgtccggtgagccaacggagcaacggtcaactgcgcccaacggtcgactacgctgacgacggtacaataatcatagcagaagtcagaagtcagaactacaaagtcagaacgcactag

SEQ ID NO: 15410 - DNA, 321 bp, Zea mays
  Peptide Sequence Number=SeqID_58785
atggcgaactcgattagagcacgtaccgcagatggaggtcaacgggacgaaggggccacggcgaatggcggctcgcaggctacggcgagcgatttgccgcgaaaccgcactgtcccgagccccgatgcccacggtatggtctcagcgacgcttgatgatgctcccaaacccgagagcgagatcccgacgagggtcccggtaacggagtccgaggttaccggcgagcactgccgcggatttcgcgagcgttctgttggggatctggtggaagaggcggagctgacatgcatggcccaccggtcagtgaccaagcgcgtgtga

SEQ ID NO: 15411 - DNA, 1341 bp, Zea mays
  Peptide Sequence Number=SeqID_58786
atgcaggcagcatgcaaccgcgccatggggatgcaccctttcgacttcgacgcgcccagcatggagtcccaggcccacacgtcatggatcgggaaagaggatactccgaaagggatccttctccgcgaaggaagcgggccccgagccctcctactgatcagaggttcgaaggctggcccctcggaagggttcgacagccgcctcagagcattcaggctccgcaaccactactggtcagaggttcgaaggctagcccctcggaagggttcaacagccgcctcaggccactcaggctccgcgcccactactgatcaggggttcgtaggctggccccccgaagggttcgacagccgcctcagaacacgcagagcgagggatgactctgggtacgtccgatacatggccgaggctcgggctacgatcccgaggagcattcaatgcaaggatcgcctgacaccttattctgacgcgcgctcctcagtcgacaaggctgaagaaaacagcgccgcctgcgctactccaactgctgtgccacccgccagggtgaggctaacagcagccaagtccagcctcgggcgccataggaagctccgccctcgaccgaccccagggctcggactcaacctcgaccctggacgacggtctccgcctcgcccgaccccagggctcggactcaacctcgacctcggacgacggtctccgcctcgcccgaccccagggctcggactcagcctcgaccccagacgacggtctccgcctcgcccgaccctagggctcggactcagcctcgacctcggaggagcctctgcctcgcccgaccttgggctcggccgaccacgtcgcagggggcacttcagtcattatgctgaagtgaatcctgaccctaatgctgagcacaacggggagaatggctggttttgtggcgaagatatgcctaatggtggctgggttcatgatgatgaggacatagttgatggatatattgcaaaggaacatcttgtgaggacgagatgtggttctgtgactgttgccgtgtacggagacgaggacaagccagcgcttataacgtacccggatgtagctctgaactacatgtcctatttccaaggatttttcttctgcccagaagtggcgtctttgctgctacacaacttctgcgtctaccacatcaatccccaggggcatgagatgggagcagctccaatgtcgtcagatgtgccggtgccatctgttgctgatctcgctgatcaagtcgcagatgtgcttcatttcttcagctctacgacgacctccaggctcgactggaggcagacaccgttgggatggcttcttcatccgtaa

SEQ ID NO: 15412 - DNA, 714 bp, Zea mays
  Peptide Sequence Number=SeqID_58787
atggggtgccctagcatcgccttgctcttactgccgttggaggagcacgatctcgtggagatcggtacctttcagccatcgtttggcttcaaggattttcatcgtgcagcccggctgcattcccccaccaatgggcagtttggtggggagaagcgagccgggctgcagcctccgccccgccctcagcttcaaggattttcatcatccaggctgaggcagaggagcgaggcgagccggggcctgccttcgcttgggctggcgtcccgcttcttcctcctgcatctggtggaaaccatcctccagctctgcggaggaggcgtcctccagccatgccggggaaggctaactgctgctgcccagccagggtgcagcattccatcctctgtccgggcaacggcggccagccgcaccagggggtctcacaacacgtcgtacgccgtgagggcggtggaggtccttttgctcgggtcgtcgtccgaggctgggcctggttccgtcgagggtggaatcaacgtcgagggtgctgctgctccccctgccgatgccagaacctgcaggaacagtttgtatgtagacttgcttgtaggtagcagaatcgtttatccgagcgagggttacttatcgcggaaggtgatgagtgaggagtccctcggctcggtcggccttgccgcttacgtgtactccatcgttttcaggatcccactatcgacgtag

SEQ ID NO: 15413 - DNA, 372 bp, Zea mays
  Peptide Sequence Number=SeqID_58788
atggcgagctcgctggtgctcgccgtctccccatccccctccctcccccgagcgcctataaaagggcccgctcgagccccgtcttcgccacacaacaccagccatcctcgctgccctcctccccgagcggttcaagcaagcgccgccgtgcccctgccttgctccgcggaagagggatccgatcctccagaactcttagctccggaagaagggcaagaacccgacccctccgagattaacctcttgtgccaggaaagcttcgacgaaggcaagtccatccttcccttgatgcattatttacctatctctctctaccactgcctaagcctggattatgggatgggaatcgaaatgcatggtgaatatgagtga

SEQ ID NO: 15414 - DNA, 675 bp, Zea mays
  Peptide Sequence Number=SeqID_58789
atgccttcttccccccttatgcctcgtgtctttccacctttcaagcccccggataggggaaaccgccgtcttttcgccccatcgttggaggaacgcaactccgtgggaattggcagcccggttgctcccccccgctgggggtcacccgagacggtgaccaccagctcctgggtggggaggggcaaaccggactgcgatctaggtcccaccctcagcttcaaggatgttcatcatcctcgctggggtgggtgccggactgagccggcgctctacctcccgcatgggttcgtgggtcatcctctcccacgacgttcgagggagagggcgctcactggccctgcgggcggcccggacttcgacaacgtggggtggatcggcggcggacgtcgtcacctccagcgtgtcgggtccgctggctcggctccggcggccccttctgttggggggcggctgccacgccgtgtacacgggagtgtcgaggcggaggcggctcgagaagtccccgtcgccgacgggatcatcgccaccatccgcgcttcgggcctccggctctttgtacttgtcctcgcccctcgagcgtcggcgtggccgagggcaagactgcagcagtgcctacccctgaggcctgcgctgctgcagttcggccatccggagtgggggccgttgtcgtcgtag

SEQ ID NO: 15415 - DNA, 483 bp, Zea mays
  Peptide Sequence Number=SeqID_58790
atggaggaagggaggaggggaggttgtggactacgaggtactcgacaggtcgcctgtccctatcaaagacgtttacaccctcgagtacccggtttatccccggaatattcccacgaggggaggttacagatagtcattaaggaaaaccttattacagacacgacccttatcgcgcttgtcctcacggggcccatcaccatgggccgaatcccacatgggcctctcctggcggtgacgccgtgggaggcccgtagacttcggcaaggccttcgtcttgcaacaagagagcaaaggggaccgcataggtctccatccagccggtgccttcggcttgttctgacgtgttctgtgaatgtggccttcgtctgcacgatgagaagacggagtcatagagcgaagggtagcatgttcgccttcgccccaacattttccctccgaggggccagttcgaccaagtcagctggtgccgaagaccgccgctag

SEQ ID NO: 15416 - DNA, 510 bp, Zea mays
  Peptide Sequence Number=SeqID_58791
atgtggggccctcacggccgcgacactgtccgagagtggtctgaccgggcgatggagcagatggcgaatgatgaagaagttgacgacttcagcggcctggagagcttggggacccgagcagaagatgcgaggatgggggttggagagcaactggtgccacctaccggctctagcgaagaccctgcggcggccgccatgccggctggcgaagacactccgatggcacctacgcaggctgccgaagaccctgcagcgccggctgccccttcgcaggagtcttcggacgaggatttggataattttgctgcgttggatgtggccgcggtggaggctgtgccacgattggaagtgcgtgaagtgtctggtacctcggctagggtgaggttcgtggagcaccgccgtcgaagagtggtgtcgaagcatagtgttggcaagatgtcacggagtgtgagcgaagacgctgccctcccccgactcgcgattaagagggagggcagcaaaatgcggtag

SEQ ID NO: 15417 - DNA, 459 bp, Zea mays
  Peptide Sequence Number=SeqID_58792
atggcgcggacgagcgtgaagcctgtcgccctggctccagcaagcctccgcctggcgcgcccagcgccagagcgaaggcctccgtcgccacagcgtgctgctgagacggcggtgggtggggccaaagtctccatggatatttccgtggaggactaccttgtgagcggggtcacgattttcgatgcccacacagggcggggacctgtcgggtcggagtctgggcaactggctgttgtcccggcgccggcggtggctaggtcggtggccgtggcgactggggcaaagggttcttcacaggacccatggtccaggttttgcgccagcggcgaaattgcttcggccgccgccgctaaggacgtggctacctcaattgcgcagcaactgaagcatgtggccgccttcgccgagcacattgcgtcgggggccttgacatcagggtttgctgctgaaaggcgatga

SEQ ID NO: 15418 - DNA, 309 bp, Zea mays
  Peptide Sequence Number=SeqID_58793
atggcccccaagcgagctaactcgaaggctgccccatccatcgacgatgcggcgagggcagcgcttctggcggataagaaaggcaaggccctcgcggactccaccccccaagaggccttcgaagatgatgctgtcaacagcaaaagacagcgccaagaccctcccaccctcgatggcactgtacgcacgtgcagttccgagggcgcgccacaagcaccaccgccaggcttcgctccaccagagggcgaagacaccatagaggataaagaggtcatcgacatctcagccgaagaccagctaaagctatga

SEQ ID NO: 15419 - DNA, 531 bp, Zea mays
  Peptide Sequence Number=SeqID_58794
atggggatccgtaagaagcccgaatatgtctggaaggaataccacgagaatgggagagatccaaccgaggatgaccccaccattgtctacatggtcggatacctccacaccctcgacaaccactacgatgacctctcctcccactgcacccacctaaactcccgggtggaaagcctagagcggcaggttagggaacttaagcaagagaaagcatccctcgaagagtgtctcgacatagcagaaggcgaggaggccaacacccgtgaggcttatcggaccttaaagatggactatgacaagaaactaaagaagctcgcccccaaaaagaaaatccagaagaagaccaccaaccgaggatgccaaacggagaagaagaagaagaagacccctccagccccacctcccccaggggtagatgattggtctgacgccgaggatctatccctagcaagccttgatgatcttctcaaggagtttggggacaccttagagaaggaattcggtagtacctcggggaacgctctcatgtag

SEQ ID NO: 15420 - DNA, 717 bp, Zea mays
  Peptide Sequence Number=SeqID_58795
atgtctcagtgggaattacatgctctgccacctccacctccacctcagggatctagggtcatgggccacaacatgccaccaccggtgataccagcaccaggaggagcttatgcaggagagggagctactccaggagagaatccaaacccgttacatgacttcgtcaacgagtttttcgcttctggaggtagtggtcacaactccaacgaggcaacgaccccgatatgtgatggtgttagttttgtgccgaattgtgcgttggaagacaccgctcctgcgcccaggtcgcggaccatccggcccaaggccgcggaccgttcgcgccgctgtagagggcaccgccagacggtacaccacctagtgattggcgctgcccagatcggcgccaacatactttttggcgactccgctggggaagaagttgcagatctacaaaatcaggcttacatggccgattctaaagatctcaacggtgcttctccaaacagcaacacaaggctgactaatttatcgaccgttgagcataaaagattagaagacgacatgaggaaaatagacgaggagatccaccgacaaaaagatcaggtgctcaaggtggcagataagtggtacctctcgcacttcagggtagattgccaccagaagaccgtacaagagagggagataaacgccgagtatatgttagccgtgctgcaacaactcccccacgataggtga

SEQ ID NO: 15421 - DNA, 324 bp, Zea mays
  Peptide Sequence Number=SeqID_58796
atgggcccacgtaccagtctcacagccaaccgcgctcgcgcgtcctgtgtcaccggcatgcgagccccgcattgtcagtggcatcctcgctctccaaccgcgcaagccagagcattgcaccagcgccgccaggtgggccctgcccgtcagtcggtggggcgcgtgtgcatgttgactgagccgctgcgtggtgggacctacacgtcggccacaccttccgtctgctacgctcggcgcaacggcggcgtgaagatggcgggggcgcggagaccgaatcccatggcggccatccgtaatgtgaggactataatactgggtccttag

SEQ ID NO: 15422 - DNA, 360 bp, Zea mays
  Peptide Sequence Number=SeqID_58797
ccaataaaaagaccaagttttggattcaacaaaggagcaaagtgggaaccgaaggccctctggtctgggagcaccggactgtccggtgtacaccagacagtgtccggtgcaccaccgaacagtgtccggtgcaccagaggactccaactcaaactcgccaccttcgggaatttccagaggcactcgcgctataattcaccggactgttacaccggacagtgtccgagcaacagctacttccgcgccaacggctacctgctgtgcattaaatgcgcgcgcagcgcgcgcagaagtcaggcgcgcccatactggcacaccggacagcaaacagtacctgtccggtgtgcaccggacacctag

SEQ ID NO: 15423 - DNA, 63 bp, Zea mays
  Peptide Sequence Number=SeqID_58798
atggagtcgtgcgccccgctcagtggactcaacggcggggcctgcggctacaacgatatttaa

SEQ ID NO: 15424 - DNA, 901 bp, Zea mays
  Peptide Sequence Number=SeqID_58799
atggctgggcttgcttggtacggtaatatggtaatcatcatcggaatcagcttcctcaatatctccttcttctgcttcggcagcaacttgttctgtatcggcaacggtttgctctgtctcggcagtgcggatttcttccgaggtcaccagtccggatcgttgcatcgcttcggagataggaacagtctccactccttcagcttcgcctccctcacgctcaactctagcggtaagaaggtgaatcgtcaggatttttacaccaggcaaacagctgcttacacccgctgcacggtggaccgcagagaccaaatagtaaccctgcagggtgggaccgctacgcgctcggaaactgaatcgtttctcgacaacgagctcagggaaggtgtttttcggaccttcggcttcctgaagcctaagagacttttttcacggatcaagctcgttacgaaaaacgatctagcaccgcgaaggggctactgttgggaccatgcttcgtcgccgaaggctgcatatggtgaggcgatgtctagtcagcatggatcggactatgactggaggaccgcacctattgatcctcaggttgtgtatgcaagtgatggaaaaccccatggaaggtactcgatgttcgataacgtcatcgactcgagccaggatactgcagaagttgagcaactacgagaagagcttaggcaacatcaggagcggcaaagggttcaggaggaatacttgaggcaacatgctacgcaacaagaatactatgctactcagtttcaacaacaacaagcactgatacaacaactagcacaagcccaagggatacaggttccgatggccccccccacctccacctcccatacattttccttggccttcacctccacctccacctaccgaacatcag

SEQ ID NO: 15425 - DNA, 1497 bp, Zea mays
  Peptide Sequence Number=SeqID_58800
atgacagatgctgaactgaggaacatggttagcaaaacactgacttgcagaatagataaaagggaaaattgtagcgagaaaatggaagagttcctcaaaagatgcttctatcattcaggccaatatgattcagaagagcatttcatagatctagacaagaagctaaagcaacatgagatcgacatacggcaaggacctcttggtgatcttctcagaagtgcatatagacctttgaaggatctgtcaccaatttttgctggagtaggagcagatctgatgcctccaattatggattcactacagcaagaggctcagaagatggatccacatggttccagagtttctaaccgccttttctacttgtcaatacctcctaatatattcttggatgttgtaaaatgtgcaagcaaatcagcatcttcggtgaatggttggacacgagtaattgttgagaagcccttcggccgagactcagaatcctctgctgcattaacaagcggtctgaagcagtaccttgtagaggaccaaattttcaggattgaccattatttgggaaaagaactggtggagaatttgtctgtcctgcgcttctcaaatctcgtttttgagcctctctggtcaagacaatatataagaaatgtgcaacttatattctcagaagactttggtactgaaggacgtggaggatactttgatggctacggtattattcgagacataatgcagaatcatctcattcagatactagctttatttgctatggaaactcctattagtttggaagcagaggatataagaaatgagaaggttaaagttcttcgttccatgaagccgttgcagctggaagatgtggtcgtaggacagtataaaagtcacacaaaaggtggtaccacataccctggctataccgatgataagacagtgcccaaggatagtgtgactccaacgtttgctgctgcggcgcttttcataaataatgccagatgggatggagttccctttcttatgaaagctgggaaagctttgcacacaaaacgagctgagattagggtacagttccgacatgttcctggaaatctctacaaggggagttttggcacagatcttgatagggccactaatgagcttgtgatacgtgtgcaaccggatgaagcaatttacctaaagattaacaacaagattcctggtctcggtatgcgactagataggagtaacttgaatctccattatgccgcaaggtactcaaaggagatacctgatgcttacgagagactcctgcttgatgccatcgaaggagagcgcaggcttttcatccgctcagatgagttggatgctgcatggtcactcttcacacccctcctgaaggagctggaagagaagcggatagctcctgagctctacccatatggaagccgtggacctgtcggggcccactatctcgccgccaagtacaacgtaagatggggtgacttgagtgcggagcactacaaggcatga

SEQ ID NO: 15426 - DNA, 528 bp, Zea mays
  Peptide Sequence Number=SeqID_58801
atggggagcgcccacgttgctttcgtctcgctattggaggagcgcaacctcgtggaggttagtaccttccagccatcgcttggcttcaaggatttcgagcaccaggagtccctcggctcggtcggccttgccactcaaggcttctcttgctcagttaaagagaaccctcggccgctctgcgatgagccagagccggaggcagcggtgtcagcatggacacaggaggagttggctcgaaaaggaggcttcatcggcctaggccaaggaggcgtagcagcgatggccggagcctgtccggatccttcgcccgtgttgccgtccgaggccgagtcagattccgccgaaggtggagacgatgccgagggtgctgttgctcccctcactgatgacttgtttgtcggtagcagaattacttgtgcgagtgagagttacttttcacggaaggtgatgagtgaggagtccctcggctcggtcggccttgctgcttacgtgtactccgtcgtttttaggatcccactatcgaagtag

SEQ ID NO: 15427 - DNA, 312 bp, Zea mays
  Peptide Sequence Number=SeqID_58802
atgcaggcggcatgcaaccgcaccacggggatgcgccctttcgactttgatgcgtccagcatggagtcccaggcccacacgtcatggaccgggaaaggggagactccgaaagggatccttctctacgaaggaagcgggccccgagcccccctactgatcagaggttcgaaggctggcccctcggaagggttcgacacccgcctcagagcactcgggctccgagccctcctactgatcagaggttcgaaggctggcccctcaaaagggttcgacagccgcctcaggccactcgggctccgcgcccactactga

SEQ ID NO: 15428 - DNA, 570 bp, Zea mays
  Peptide Sequence Number=SeqID_58803
atgcaagtggcgtgcaaccgcaccacggttgcgcaccccttcggcttcgtcgcatccggcatggaggcccaggcccacacatcatgtaaccagcgtgccggttactacgtgcaagaaaccgcaccgccacttgcgccaatgccgcgccttctcgactgcggaaccagtgccgcgactcgaggcagccctgcgcgtgacccaacagtgcccattgggtgcaacgatcacgggtcagtcagccgcgggaggaggcacgatggggttcgaaggctggcccctcggaagggttcgacagccgccccagagcactcaggcttcgagcccattactgaccaggggttcaaaggctggcccctcggaagggttcgacagccgccccagagcacccgggctccacgcccattactgatcaggggtttgaaggctggcccctcggaagggttcgacagccgccccagagcacgcagagtgagggatgactctgggtacgtccgttacatggccaaggctcgggctgcgctcccgaggtaccctaggacatttccgagaccagcaggagcgattttgtaa

SEQ ID NO: 15429 - DNA, 513 bp, Zea mays
  Peptide Sequence Number=SeqID_58804
atgctgccgcaaccttcaccgcgagtgcgagggtcgcagcccccgatgcttggcttcctccccagcgccggcgcggggattcgcttcgtgctcacgtccaccttcggccccgcacgctgcgtcgatctgggacaagcagctcgatctggagcagttgggcgtcgatctggagcagcagctcgacctggagcggtagggcgtcgatctgggagcggcagggcaggggcacagaggacggaggccggatttgatctggagcaggcgtcgtcgatctggagcaggcggacaaaggacggaggacgacaacgtcgatctggagcaggcggcgtcgaactggcggcggagcaggggcacagaggttcgccggagagggccaagcagggtcccggagacgagcggagacaggggctacgacggtgcccggtttcggcgtccaagaagaggagctgcgccgttgcggcttggagacacgagcggggagaggggctgaggcttggggaaagtcgtggctag

SEQ ID NO: 15430 - DNA, 381 bp, Zea mays
  Peptide Sequence Number=SeqID_58805
atgtccggtgcaccaggggactccaactcaaactcgccaccttcgggaatttccagaggcactcgcgctataattcaccggactgtccggtgtacaccggacagtgtccggtgcgccaaggagaagcagcctcaggaactcgccagcttcgggaatccccaacggctggtccgctataattcaccggacatgtccggtgtgcaccggactgtccggtgcaactccggggcaacggctatctccgcgccaacgactacctgcggcgcattaaatgcgcgcgcagaagtcaggcgtgcccatactggcacaccggacagtaaacagtacgtgtccggtgtgcaccggacatccaggcgggcccacaagtcagaagctccaacg

SEQ ID NO: 15431 - DNA, 255 bp, Zea mays
  Peptide Sequence Number=SeqID_58806
atggcggcagcaggcgggcgaaagcagcagtcaaaccgtctgcaggctcacatcccctcctggagcagcaggggagccctctcccacgacgtgaagacgacgcgcctggaccggaaaggggatatttcgaaagggatccttctccgcgaaggaagcgggccccgagcccttctactgatcaggggttcgaaggatggcccctcggaagggttcgacagccaccccaaagcactcgggcttcaggctcattactga

SEQ ID NO: 15432 - DNA, 1047 bp, Zea mays
  Peptide Sequence Number=SeqID_58807
atggagcctgagatcattctggataaaagcccgaatctggttaacgaacaaaccaacctcagtaggatccaccacaccttcaacatctaccgcaatgacaaagtcaacacgacgaacttcctgtccaagagccagatgaatgtgagcacgggagcgccgatcaatgccgccatcctcaacggccatctctggcggaaggaagggcctagggtccgctggaaagttggccatgaggagagcaacggggaactgctcctaggagaaatcgtcgggcagagggaactagaggctggggttttctccactaaggaaactgaacagttgccaccatcatcagaaggcaaaagggcacctttaccgagagattgcgtgggttcgggcacagtagtggggatgaccatcgtaggccgcacaatgggcttccaaatagagcgtccaaccacacgttctataacatttggtttcaatatggcaattactgaccagatgggcaatcaagaaggagacagtgtggtagcgtttgagcggatggcgtgcgagaacttcgctgtggcagcgcctgtttggtcccacaagaagaaaagaagacaatccaagcgtgggaagggtgggtcggagcttgtgtgcaactccaggcaggagtcgccgacttctccagacgatgttgagaccccctcgttctccgcgatggtggttgaagaagtggcgtggtgctatggcatagaagttgaggcattgttgatccatgaaactatgccggaggattttcttttgttcctgcctgatgaagagtctgcgacaatggtgttcaatgatggaaaggtgttcataggacctcatttcagccttgtattcaagcgctggtcaaggttcgcccatgcatcttcatcgctgacgtcaagtttggtggacattgagatttggggaattccggaacatgcttggtttcgttcaatggaggatagtatcttgaaggactcttgctgcattctggaagttcaccataacacgctgatgaagactaacttctcttcctttgatgtttga

SEQ ID NO: 15433 - DNA, 450 bp, Zea mays
  Peptide Sequence Number=SeqID_58808
atgggtgtagctcaaacaataaaatcatcattggatcaatctgctgaatactgtaacatgagacaggcaaatgctgtgattcgtgctcttgggaacgagaacatcatccgggagtcatactcgtctagtgttgatgtactgctctcattgcgagatcttcagctaggagctataggagatctgaaagtgattgtcccaggacgaaggaggcaattcattcttggtgaacaggaaacttcgctatattgctacaaggctattttattggatgccaagaagcaaacagaaacctttgtatatcactgtggagtttttattgtccctaaggttttcttggatagcagacatgcaaatatcgacatggatattattaagaaggatttatctccccttgttaaggatttagaacctggaaatcctgaagaggaggctcctatacctgccatctag

SEQ ID NO: 15434 - DNA, 315 bp, Zea mays
  Peptide Sequence Number=SeqID_58809
atgcggtaccagatcggcctaggggacacctattggatcgtctccaccaccaagctgcagaacctcacgcactaccaggccatggagcgcgtgaaccccacgctggtgcccaccgacctcgacgttggcaccatggtcacgttccccgtcttctgccagtgcccggccaccgccgacaacgccacgacgctcgtcacctatgtcatgcagcccgtggacacgagaatcaggaggatcagctcctcacgaggatcaggatccggaactaaagaagcaggagctggagctttgccaaacgagcccttaatcttatga

SEQ ID NO: 15435 - DNA, 399 bp, Zea mays
  Peptide Sequence Number=SeqID_58810
atgcagctaacgttctggcgtcggcaatgctctgttgcagagagtaatgtggatagcatcctgatatctgttagtaacgatgagaggaggaatagggcatatgccaagatctcggaggacgagccgaggcacaccaggatgcggtcactgaagaataaagccttgcatgcatcggcaagactcacacactccctgaagaagagggggaagagaaaagtggactacaaagtgccaaggatagctatagaagatgtcagggatgctgaagaagagcaggcaacgaactcgtttcaatttttaaaagcgaggaagttcgattttgaaaaagcagcacagatgtgggcggacatgctgcagtggagaaaggagttcggtacagacacaaggtgtatcttatag

SEQ ID NO: 15436 - DNA, 390 bp, Zea mays
  Peptide Sequence Number=SeqID_58811
atggagaagccacaaggcaagaatgagaaacccaccgactcaagccacaagaagaaggatgtcaaaaaagaaaaggatgaagaagaagaaatcatacactgcaactctcaagccaccatgatattacttgcttctctatgcagggaacattacaaagtatcttcccttcatggcgtcaatttgactttgtttaatggtcgactctccgaagatggaaccttcggccttgagatgaatgtgcattctatgaaaggcgcggtctgggagaaggatgaaccagttccgaagctacgaatgaagaagcttcggcttagcgcaagggcagcgattgagaatggaaccgacctaaaggagaatatactgcctagtcatcgacagattactccttag

SEQ ID NO: 15437 - DNA, 471 bp, Zea mays
  Peptide Sequence Number=SeqID_58812
atgatggtcctcggctcagttgccgccaccttgttcgacattctacttcttttctctctcccctcatgcctccacctccgcgccaccccattctcggcagagggcgtaggagcatgcgcctcctctccgtattcgtccgacaccagccccgacaccgactcgcgttgtggctattgcacgtccacgaggacgtttcacatcatgcgcgcaccatcgttttcgtcatcgtcggatgtcccattcgtcttcccggccttcaccctgttcttcctccccaacctgctgcccccgcccaaggtcacagccgtgagccgaccgacgctcgtcgacgcgggtgcagggcgagtcggtcatgctcctggcctttctctgtgcgtgtcgtcgaggaagacatggtggcgtctgccacgcttaggttatcttggcgatgaggagtccaggtctgagatattggacaaccaaagcccatag

SEQ ID NO: 15438 - DNA, 407 bp, Zea mays
  Peptide Sequence Number=SeqID_58813
gtaatactgctgaagggacctacaactttacttctactcaaccaaatggtccagatctcacacaaattgggtctggagatgttcctatcaatgtagaagaccgtgaagatgtgggagaccctttggcagatcacagacaaaatgaagtagaagacagagtgtatgaagttgaaggggttgatgtaaatgctaataggcaggatgaaaggtcaaaaaggacttctgctgtttcaaggaacgaagaagaaaaaggaccaaagaggccgaagaagagctccaacatagaagtattgatggagaggtacctagacattagaagcaaacaagctaaatatgaagcaacactattagcaagagaaagggaggcaagagaaggtgatgacttctcaattaagaattgcatataa

SEQ ID NO: 15439 - DNA, 432 bp, Zea mays
  Peptide Sequence Number=SeqID_58814
atgaagcgcaacaagttcaccactagaacggagctcaagtcactaacaaagtcaatcaagtgcgcgaagacggaatgtggaagacttagaatgctcaaggtatgcttaggtgactcctacatgcgcataggggtcccttttatagccctaaggcagctaggagccgttggaggcattcttggaaggccaaagttgccttctgtcgggtggcgcaccggacagtccggtgcaccaccggacaaccactgttcatgtccggtgcgcgattttcttccattcctagcgcagctgaccgttgtaacttcgggctggttggcgcaccggacactgtccggtgcacaccagacagtccggtgcccccagccgaccgttggcgcgggccacgcgtcgcccgcggatttggcggccgaccgttacgctggcggccgttag

SEQ ID NO: 15440 - DNA, 144 bp, Zea mays
  Peptide Sequence Number=SeqID_58815
atgtctgtcagcgagtaccatgacaagttcattcaactatcaagatatgctcctgatgagaggctacttgataaagctcttgctattgaacacaagcgtgttcatctgggagatttgaagaggagagccattgcccaggggtag

SEQ ID NO: 15441 - DNA, 465 bp, Zea mays
  Peptide Sequence Number=SeqID_58816
atgacgccccgtgtgcaccatgacgccggtggttctcagccccttacagcagcaaggagacgtcagcaggatccttgccgcactgccagctgtgctcctacaggactcaggcgctcctccgacggccacgccatcacgtgtacagggcccaagctctcccccgacagccacgttggcatgtacacagggcttaggcacttctctgccggacaccaacctcttcagcctgggacggtgctccgcttcgggagtctcgagttcatgtccctcgacggcagctacgacatggtactcctcccccgtggcgcgacgacagcgacggtcttcgactcgcccggcggcggtgagctcggcgacagcatctccccgcggcggaagaggtgcgctccggtcgtcctcgccaccctcctcgccggaggaggcggagacgaggcaaccatggccgcgcaggaggcggcaccttga

SEQ ID NO: 15442 - DNA, 600 bp, Zea mays
  Peptide Sequence Number=SeqID_58817
atgcaggcggcatgcaaccgcaccaagggggcgcaccctttcgacttcgtcgcgtccagcttggaggcccaggcccacacgtcatggaccgggaaagaggatactccgaaagggatccttctccacgaaggaaacgggccccgagcccccctactgatcagaggttcgaaggctggcccctcggaagggttcgacagccgcctcagagcactcgggctccgtgcccactactggctggcccccgaagggttcgacagccgcctcagagcacgcggagcgagggatgaccctgggtacgttcgatacataaccaaggctcgggctacgctcccgagcacaaagctgcgaaggcctgatgggcgcgattcaggccaaggctccacccaagggacacgatcccgcctcgcccgagcctggcatcgggcaaagacagccgaccccggaggattcacgtctcgcccgagggtcccctcaagcaacgggcgcaccaccgactcgcctgaggcccagcttgagcaggcttcgcggagaagcaaccttggccagatcgccatgccaaccgactgtatcgcaggagcatttaatgcaaggatcgcctga

SEQ ID NO: 15443 - DNA, 663 bp, Zea mays
  Peptide Sequence Number=SeqID_58818
atgacgaactccaagcggctcgccggcaaccgctccggcagcagcgacaacgaccttcgtctcgggcggctagatggcagcggcgatggcctcagagcaaatgctactgctgaagggccttcgttcgtgtccctcatggaggacgagaaccagccattaaagccaaagagccggaggcttggagcgcaggtggcgccgacggtctcatcggcagagacaaccgctggtgcaagaggaagcctcacctctggctgccaccacctcagcaccgacaacagcggccccctgccttccaacaccacgccggcgaacagcggtcgccctgaagcgcaccggcaggtcctcactcccgtccttgccacaagaacgagaacggggccatcccagaacacgaatgccgccctcgcggcgtacgacgtgttgggcgaccccccacccccaatagccggcggcgcagcaaggaccggcggtggggggcggcaacggaggcagcgccagagccgctcgtgccgaggagccagacgcgcggtagctgccagcgccacaggcggcgaacgcccttctccccaaatcactgagggaaggagcgggccgctgcctatgcagaggcaggccccggctcagcccgccctccgcctcagcaaggatgacgaaaatccttga

SEQ ID NO: 15444 - DNA, 666 bp, Zea mays
  Peptide Sequence Number=SeqID_58819
atgagggaacgatcagaccggccgaagcaccacgaaaagcattcagacctcagaggagtcaaaccactcctccgaggcctcagtggctacacccggcgggtgcgctcgcgcgcacccacgagaacaaggcaaaaaccgagaaaggccggtcccctcaccgaaaatgcggcaaaagcctccaagcgagtaccaacactcccttcgaggctcaggggctactgtcaggaaaacagcgccgctcgctccgctccgactgccgtgtcaaccacccaggcaaagactgacaacaagtcacgatcaaccaccgagttcggcctcgggcgaaacaggaagctccgcctcgcccgacctcaggctccggcctcgggaggaggtttccgcctcgcccgacctcaggctccggcctcgggaggaggtctccacctcgcccgacccccggactcggcctcgaccccggtctcaggaggaatcgcgtcctcgcccgaccccggcctcggcctcaagagaagtctccgcctcgtccgaccttgggctcggatcgaccgcgccaataggggatacatcattaccctattcctagcccgctcaggctacaaggaacaagaccggcgtcccatctggcttaccccggcgacgggtaatgatgacgccccgcgtgcaccatga

SEQ ID NO: 15445 - DNA, 945 bp, Zea mays
  Peptide Sequence Number=SeqID_58820
atgctgacaaaacccctgccgctctcctgtgcgttctggctcaatctgaactgtggcatcaaaaggagctgggacttcatgcgagtggatccatcgcattcggctggaatcctcccagagagtaggtttggtgaggattccattatcggtgtgctagacactggaatctggccagagtcggccagttttagagacgacggcatgagcgaggctccgcggcggtggaaagggcaatgcatcgccggggacaggttcaatgctacaaactgcaacaggatgccatctcaagtcatggatctgaggcgccacctctcccagttcagcaatccaaccgtggctgcgtcctccttctctgaggagcagtttcgccttcccacagagaggcagcgtaatgaagtcaacaaagatgatttcttaagagttatcgtgaatattgttggggatcaaatgctcaagcaggcagctcataaagtttttgtacagatgcaagcacatatgcaaagaaataggcaggcaaattcaagtcagcagtctttattctctcaactttctgcacagcagatggcttccaatggttcagcacagttacatgatcagaaaattcggccacctggaccacccaaccaaggccagaaaaaccaggtgtcatcttcacctcaggcttttgcaccaccatcaggcacccaaccgcataatagtgtacactatcttgctcatgataaccctaaccaaaaccctgatgcaaagggaacaaatgttgtaccaaatcaaccatctagaatgaacacatcagttccattgcaaacaaagaacaaacaacatcaaccaacacagttgcagcaggcctcacaacaaatatatggagcaagtaatcctggtgcccaggcttaccctcgatcaatcactggttctcttagatcaccgagtcctgttccagaaacatag

SEQ ID NO: 15446 - DNA, 390 bp, Zea mays
  Peptide Sequence Number=SeqID_58821
atggcgaggtcgttgggcttccgcgccgctgcaaggggctcacgatcgcacggggatttggttaagcataagaacagggatcagaatgagaagactccatgcacgtttacttcatcccgccggcggcgcgttaaaatcgtgagggatattctgtacggcgagggcaatagtgagaggcatgatgatggtgcgaggccgacaggaaagggaggggaggagccgtgggagaacacaggaagagacgtgaggctccacatgaaattagaacctagagccatcctaagcaccctctgtcacacccagtttttggaaggcaaaccgaatgtgaaccatcatcacctcctgagtactgagaacagtggggacaacctggggtgcggtggtttgtaa

SEQ ID NO: 15447 - DNA, 258 bp, Zea mays
  Peptide Sequence Number=SeqID_58822
atggctcaccagagtttctccggcccatccgaggccacctcaccgctgttctcccctctctgcccgtggattcatggcctcttcctcgccatcgagtttgccgtggcgccctcttcccctctgcccaactccggcgaccccggaggcaccctagctcatgcctgcttcaactctggcgacctcaccgccgcggagaggaccggcgccgcccgcagccatttgttttccctcggtctaacccccctgaaagtagcctag

SEQ ID NO: 15448 - DNA, 273 bp, Zea mays
  Peptide Sequence Number=SeqID_58823
atgtgcgcaccggacagtccggtgcgccagccacgtcacccaaccgttagggttctgacggtttcgaccgttggagctctgacaacttggggcaccggacaagcactgttcactgttcggaaaaagtttgaccctatttccctttcagtgaccaacgagaaggagactctcaacaatgagctgaagggagaaaagtccatcgactcgggatacaggaagaagaaagatagaaagaacaagaagcgcatcaagaagatcgtctactcacagtga

SEQ ID NO: 15449 - DNA, 99 bp, Zea mays
  Peptide Sequence Number=SeqID_58824
atggcgagcaacatagcacatgttggctcgtccaagcgaggcgatttgatctcgagctccaccgcccatgacaacaaaaggggagggttagaaggatga

SEQ ID NO: 15450 - DNA, 930 bp, Zea mays
  Peptide Sequence Number=SeqID_58825
atggcccaccggacagtccggtgcacaccggacagtccggtgccccctgccacgtcatcactgccgttggattcgaccgttgaagcttctgacttgtgggcccgcctgggtgtccggtgcacaccggacatctactgttccttgtccggtgtgccggagtgggcgcgcctgccatctgcgcgcgcagagcgcgcattaaatgcgcggcagagagccgttggcgcggagaagaccgttgctccggagtcgcaccggacagtccggtgcacaccggacagtccggtgaattttagcggactagccgttggagtttcccgaagcaggcgagttcctgaggccgacctcccttggcgcaccggacactgtccggtacgcgaggtcaacgcccgacgtgtcccccgttggggcgccggtgtcgtcgactcgctcgacagccaacgaggtgccgcctcctgcttggccatggctgccccgccttctcctcctgcggcgaagaaggtgacgggacaggcctggatgctgctcttccgtcacgcggggaagacatcgtcgattccgccgccggcgggcgggctgacggccgccattgtcgttgtcgcgcggcggaggaaggagtaccatgtcgtagctgtcatcaagggacatgaactcaagactcccgaaacggagcatcgtcccgggctggagaggttgctggagactacccatctggagcctgacgggaagttattcgtcaacacgcagcaggcccctacctggcgcgccaactgtcgacgtttcgaccccggggggtccctggaccgacgagtaaattgtcgctgcgtgtcccagcccagatgggttagcgcgagacggaacacaagggggaacaaagaaaggggaaccgcggctcgtgttgtcctgcgcccaaggcggatgcgcttgcagtag

SEQ ID NO: 15451 - DNA, 1068 bp, Zea mays
  Peptide Sequence Number=SeqID_58826
atgggcgcaccggacagtccgtccagtggcacaccagacagtctggtgaattatagcggagctgcgcttgggaaacccgaagctaaagagtttgagctgattcaccctggtgcaccggacactgtctggtggcacaccgaacactgtccggtggcacactggacagtccgcctaagcactggtgctttgtcaagattgattctgtcagatgattctctccgaacggccgcgaatgaactgcgagcttcgaagtgtttctttgattgcagggcaccgatgctgtactacgtgctcctgacattgcaggacagcgtgcacaaggtcttctacgccgtggtcgaggccgctgcagttcgcgcagacaacaaccatcttggagggttggtgaggtatccggtctctacaactcttccacagattggatccagattattccttacgtggggtgtcttctggagttttcctgaggtgcataaagttcaacataaaccaacaaagaaaagccacttcactaaaaatcaccgaactatccggtatgccaccagactgtccggtgcaccaacggagcaacaatcatcttctccaacggttgactgcattgacgacagtacaatgaatagagcagaagtcagaactgtaaagtcagaacgcaccggactgtccggtgcctcaagaggacaaaggacttcaacggttaatcgctccaaaccccaacggtcaaggctccgtccactcaagggacacgatctcgcctcgcccgagcccagcctcgggcaggagcagcagacccaggaaaacagcgccgcctgccctgctccgactactgtgccacctgccagggtgaggctgacagcagccaagtccagcctcaggcgccataggaagctctgcctcgcccgaccccagggctcggactcaacctcgacccaggaagacggtctccgcctcgcccgaccccggggctcgaactcaacctcgaccccgaaagacggtctccgcctcgcccgaccccagggctcggactcaacctcgaccccggaagacggtctccgcctcgcccgaccctag

SEQ ID NO: 15452 - DNA, 1011 bp, Zea mays
  Peptide Sequence Number=SeqID_58827
atgaggcgaaaagacagcgggttccccccatccgggggcttggaaggtgaaaagacgcgatgcataagggagcagcaagagagcctcctctcacggcgtgaagacgacacgcccgtgatccgtccctcgaacggctcacgcacgcgcaacggccgccccgccaaccactcgccccgtcgcattaactccgcgacaggacaggcggcgcctctggcaggagaagcgggcgacgcttcgccttcgccggaccgggaaagggggataccccgaaaaggatccttccccgtgaaggaaccgggctccgagccccctctactgattagaggttcgaaggctggccccctgaggggttcaatagccgcctcggatcgcgtgggccctacacccactactggtcagaggctggcccccgaagggttcacagtcgcctcagacgccgagcgagggatgaccaggggggaccgggtccggcagatcacccgcaggtacttttgggcgtgcctctgggcccctagccgacccccaacgaatggggcacggacgtccactcggattacccgcttgcagctcaccggagacaccatgttcggtgcccatcaaggggctcggactcgggctaagccccggaagacggcgaactccgctccgcccgacccaaggctcggactcgggctaggccccggaagacggcgaactccgctccgcccgacccagggctcggactcgggctcaaccccagaagacgacggactccgcttcgcccgaccccagggctcggactccgccctggcctctaccgaacgacctccgcctcgcccgacccaggggcttgggctcggcctcggccatggaagacagactcgacctcggcttcggaggagcctccacgtcgcccgacctagggcgcaggccagccacgtcaacaggaagcgccatcatcaccctatcccgagccgactcgggccgcagagaacaagaccggtgtcccatctggctagctccgccagataa

SEQ ID NO: 15453 - DNA, 258 bp, Zea mays
  Peptide Sequence Number=SeqID_58828
atggcgcctcctgtcgacgtggtcggtctgcgccctaggttgggcgatgtggaggctcctctgaggtcgaagtcgagtctgtcttccgtggccgtggtcgagtccgagccctggggtcgggcgaagcggagttcgtcgtcttctggggctgagcccaagtccgagccctgggtcgggcggggcagagttcgtcgtcttccggggctgagcccgagccctgggtcgggcggagcggagttcgtcgtcttccggggctga

SEQ ID NO: 15454 - DNA, 615 bp, Zea mays
  Peptide Sequence Number=SeqID_58829
atgggcgacgacgacggcgcgaaggcggcgtcgggcgtgaagcagatcgtgcggctgcgagagctgctgcacaggtggcatttcacggcgctgggtgcgaagcagcagcagcagcgggaggaggagggccgtggccatgccggcgtgccggagggggcggtggcgccggcgatcccgccgttcgtgctgcggcggctgcggcgcacggagacggcggactcggtgtcggacgacgagagctgccacagcccggagccgccgccggacgtcccgcggggctactgccccgtgtacgtggggcccgagcagcggcggttcgtgatccccaccagctacctggcgcaccccgtgttccggctgctgctggagaaggccgaggaggagttcgggttccggcaccaaggcgcgctcgccatcccctgcgagaccgaggccttcaagtacatcctccagtgcgtcgagcgccacgaccagggcctctccggcggcggcggcggcgacgaggcggcgaaccacccgacgacgaccgtgctggagcaagaaccagcgtttgggtctcattggtttactgcgtctacacatacagtctcacgtgagcctggtcgatgtaggtaa

SEQ ID NO: 15455 - DNA, 693 bp, Zea mays
  Peptide Sequence Number=SeqID_58830
atgcaggcggcatgcaaccacgccaagtggacgcgcttctccgactcccgacacacccagcatggagggatcgggaagggggataccccgaaaaggatccttccccgtgaaggaaccaggctccgagcctccctactgatcagaggtaccctaggacatttccgagaccagcgggagcgatcttgtaacggaatcccatcagagggaggcatcgagccctcggaccccgtcgccaggggaccgggtccggcagatcacccgcagaggctcgggggctgctctcgcaaacccggctccggccgaaccgttgacagcgtcaacataccagcccgagaacttgggccccgaccgtacacccgggctacggccagttcgcatgagggaacaaccagaccagccgaagcattacgcgaggcattaagacctcgaaggagtgaaaccactcctccgaggcctcgggggctacacccggcgggtgcgctcgcgcgcacccaccagaacaaaatgcaaccgagaaaggctggtccccttgcaaaaaagtgcgacgaaagcctccaagcgagtgctaacactcccttcgaggctcgggggctactgtcggggaccataattaggggtaccctcaagactcctaattctcagctggtaacccccatcagcataaagctgcaaaggcctgatgggtgcgattaa

SEQ ID NO: 15456 - DNA, 777 bp, Zea mays
  Peptide Sequence Number=SeqID_58831
atggaggatgaggcgagtcggggggctgcctccgcgtgggtcggttaccctcttcttcccctggcgtctgggggagaatggcatcctccagcttcgcggagacttcctccagccatgccgggaaaggcgggccgccgtcactcagccagggcgcagcattacgtcctccgtccggacgacggttgcgccgcgtaccgcgagggcggcgcccacgctctgggcggttctggcaagggcgaagacctgctggcgcgcttcgaggcgtcggcagccggagatggcttctctaccgatgagattgctaactccgctagtagccctgggtctctgtctcccggcctgaatggctggctctcgtcctcggtggcatcaagacccgagcctgcaggatcagagtgtcttgtagcgtgtgccttctgcggccgccgaggccagaagacacatcctcgctgtgttgtaaagttgcgtctcctttcctcttgtgtcgagtatctagacttttttgtcggtaacagggacgtttgtgcgagcgagagttgcttcttgcggaaggtgatgagtgaggtatccgtatcccggaggcgtgggagtccctcggctcggtcggccttgccgcttacgcgcactttcacccgtccacgaggccctgtcaccgactcagtcgagaaggctcgaaggatcgcttcggcagaagagcttccgaacgtgaagacttgttcggtccacggaatcactttatccgaacgcgagttacttatcgcagaaggtgatgagtga

SEQ ID NO: 15457 - DNA, 288 bp, Zea mays
  Peptide Sequence Number=SeqID_58832
atgaagcttcatgcctctgtcaatggcacatcgctggtggccttggttgatttgggctcaatgcacaccttgattcaaaaggtggcggcgacatggctcggcctaattgtcaaaccacactcgagcatctttgttaaggttgctttcttcagtgatccaagcccaaatctggtggtgaaatgcatggaaagctgctgcaccgaggcatatccagcaaggtccacgtttgcaccaatcaagagtggcgactacatagaaaagactagagagactgaactctacttataa

SEQ ID NO: 15458 - DNA, 744 bp, Zea mays
  Peptide Sequence Number=SeqID_58833
atggccttgctagaccctcgcaagcgcttccagcccgaggtggcactcaacttggtgcgcaacccgctcggatggggtgtgctggcatttgccgggaggatatgtgtcggtgtctctcctctcgacgacctcaccgccgaagagtttgtgttctttgtttccaaactccccagcgggttggctctgccgatcccgtctttcttcgtgcagctggtggaggggcttggcctccagcctctacccgtggcgtcatgcttcatccttcaagcggccatcatcgcctacctccacgggatgtccgtggaggcgatgctccttcccgcttcttcctctagcattcggggggaggatgattaccagcctcgtgaaggtggacagctagctgagctacggctccatccctcgcgcccccaactcttttggggcgggaagcgagccgtgttgtggctccatctttttggctttgatggcttcggtgccgcctccaaggctgcctcccaccgccgagcggggcatggctgtccatctaccgcacgggcgacgatcgcgccgtgcgtaggcccacggtacgggaccaggctgagcggctacacggctctggaccaccccaggagacaagctttcgggtacgggaccaggctaagcggccacacaggctccggaccaccccatggaacgagctcccgttctttagagccggcccccaggctgtcgggccctcctgctttcgcagagaggtcctaa

SEQ ID NO: 15459 - DNA, 207 bp, Zea mays
  Peptide Sequence Number=SeqID_58834
atgaactccggagcacgcgaggatttagagtggttcaggctgccggagcgtaataccctactccactgggaagcttctcgtataagtgatgatggacacagtgcaccccgcaacatgggcgcactgtttgataatggactggacaggcacgccgtctgcaggatggccctggcgctgcctgccagcggagtggacaggacacattaa

SEQ ID NO: 15460 - DNA, 1008 bp, Zea mays
  Peptide Sequence Number=SeqID_58835
atggcctctgcagcccgactccggggttggtcccgccagtggacgacccggccaggctccagccaccgctgctacgcctcctcggcctgggaagtcacctgcttctgggccaacgaagccccttttcgagccaaatccgcctctgtccatgctgacaccgctgcctccggctccggctcatcgcagagcagtcgaggggcaactcacacttggttaagcggttcagctagccgacaggcgagccctggtgttcgaaatgaggaagcaacacggccttacgcccaaatatacaaatgttcaggccccgaaagccgcaatgaacatacaccggcactcaaggtgccattacaaacggaatctccgcctcgctcgaccccagggctcgaactcaacctcgacctcggacgacggtctccgcctcacccgaccccagggctcgaactcaacctcgacctcagacgacggtctccgcctcgcccgaccccaggctcggactcaacctcgacctcggacgacggtctccgcctcgcccgacccagggctcggactcaacctcgacctcggacgacggtctccgcctcgctcgaccccagggctcggactcaacctcgacctcggacgacggtctccgcctcgcccgaccccagggctcggactcaacctcgacctcggacgacggtctccgcctcgctcgaccccagggctcggactcagcctcgacctcggaggagtcaccacctcgcccgaccttgggctcggaccgaccacgctacagggggggccatcattaccctacccctagctagctcaggctacagggaacaagaccggcgtcccatctggctcgccctggtaaaacaagtaatgatggcaccccgcgtgctccgtgacgacggcggttctcagccccctacggaagcaaggagacatcagcaaggacccgaaagccctgatagctgtgcttctacagggcttaagcgctcctccgacggccacaacatcacatga

SEQ ID NO: 15461 - DNA, 291 bp, Zea mays
  Peptide Sequence Number=SeqID_58836
atggaggcgaggatgatggcggagcgggaggctcgcctggcagatcatcagaggatggcggagatgttccagtacatgcagagccttggcgccgcacagggcttcgctccgccacctccattgttccctgcagttgaccctgctatcttccatactcctatgagtatcaaaattgtagttagatgttgggccaatctggggcggcatccaacaaccctcatgaagggttcaacccaacgcagcaccagtcgaaccgcccacctccatgagagttatgttttcagtgtttag

SEQ ID NO: 15462 - DNA, 750 bp, Zea mays
  Peptide Sequence Number=SeqID_58837
atgttcgcggcgtcctcgttggaggaggagtcggtggtgctctcgtcggagtctcattcccgacatacgaaaacagcgccgcctgcgctgctccgactgctgtgccacccgccaggggtgaggctgacagccaccaagtccggcctcaggcgccataggaatctctgcctcgcccgaccccagggctcggactcaacctcgacctcggacgtaggtctctgcctcgcccgaccccagggctcggactcaaccacgacctcggacgacggtctccgcctcgcccgaccccagggctcggactcaaccttgacctcagacgacggtcttcgccttgcccgaccccagggctcggactcaacctcgacctcggacgacggtctccgcctcgcccgaccccagggcttggactcaacctcgacctcggacgacggtctccgcctcgcccgaccccagggcttggactcagcctcgacctcggaggagtcaccgcctcgcccgaccttgggctcggaccgaccacgctacagggggcccatcattaccctaccccttgctagctcaggctacggggaacaagactggcgtcccatctggctcaccccggtaaaacaagtaatgatggcaccccgcgtgctccgtgatgacggcggttctcagccccctacggaagcaaggagacgtcagcaaggacccgacagctgtgcttctacagggcttaagcgctcctccgacagccacgacatcacatga

SEQ ID NO: 15463 - DNA, 486 bp, Zea mays
  Peptide Sequence Number=SeqID_58838
atgctggtagactacacaatggtactcaatagaccaagtgtgatggtcgaaggcccgacgcagcaagatgtcgagagcgtcgtggaggtgacacccgcgagcggcgtcacgagtgatgggtctagcgttccatccctttggctcctgatccttcgagagctccgtgttgtggctcgaactgccaccagcgtcgtcgtcatcgtctccgccagggtctcctccagcagccgggatgccctgtggtggtgcagggggcatctctggctgaggtgcaggggaagcctgcctcctagactccacgtcctgttgagacaagggggaagagtcctgctgctcctgcccctggcgtcggtgctcctgctcctcgggcaggtgacgatgcagtctctccaggtggctagactgacctgtcaccgtgcggcgcaatgcgcgctccgccaaacgagggcaaaaaggggatcactgatttacatgcagtgcatctaa

SEQ ID NO: 15464 - DNA, 864 bp, Zea mays
  Peptide Sequence Number=SeqID_58839
gagcaagagcagcaggactcttccccctcgcctcagcgggaggtggagtctgagaggccgccttcccctgcacctcggccagagatgctccctgcaccaccacagggcatcccgactattggaggagaccctgatggagacggagacaacgacgacatcggtggcagttcgagccacgacacggagcgctcggaggagccggagctggagggatggatcgcgagacccatcactcgtgacgctgctcgtgggtgtcacttccacgacgctctcgataccctgttgcgtcgggcctttgaccgacacacttggtctatcgagtacggttgtgtagtctaccagcatcgtcgcgagctatacccggaccagtgggaggctacttgcttggtgcgccgcccggacgatgatctccggggtgcagaggccttctcagagcactattctatcactgagagggacactgccgaggcagccatgcaagatgcagcacggtgggcactttctcagtattgctcattgtttagcggggtagctgatggccttgacctgaagtactacccttgctgttcgaccggcagtgctggaggtgtgattgtctcgccagttggtgagggcaatcccaggctgagaagcatggtcaacttggtcgtcgtgatcaacacagagttggaccacgcccttgaccagttgggcaaggttcgggcggaggttgcagaattgcgtgctgaatgcgcggcacgccactatcttgatggtggttctcccgcccctgtagggattcagcacccttaccgttcaccgccccgtggtcgcttcgactatggtaccccagactgtaggacccgcatagatttagatccatag

SEQ ID NO: 15465 - DNA, 657 bp, Zea mays
  Peptide Sequence Number=SeqID_58840
atgggggggcctgcggagcaacagaaggccgacgaacggctcaccatcgcccgctccagcagcagcgacaacgacccccgctacgggtggtcgaactacagcagcgatggcctcagggtggacgccgctgcaaccttgccctcgcccacgccgacgctcgaggggcgaggacaagggccgtcagccctccggcagatccccactcatatcctcccggacgagtggggcaccgacctccgcgtggaggcgccgtaccggtgcaaaggcagaactgccccagaacacgaacgccgccctggcagcgcgcgacatcttgggcggtcctcccgtacgcacggcgcgacaaccgcccttgcggcaggagggggcgccgggagccaagccggcgagcccaacgcgctgaagctgacgacgcccgccgtcggccagccccgcgttgtcgaagtccgcctctctcgcagagccagtgagcgccctctccctcaaacgctgagggagaggctgacccacgaacccgcaagggaggtagagctccggctcaccccggcctccgccccagcgaggatgatgaacatccttgaagctgagggtgggaccaagatcgcagcccggcttgcttctccccacccaggggctggtggtcaccgtcttgggtga

SEQ ID NO: 15466 - DNA, 459 bp, Zea mays
  Peptide Sequence Number=SeqID_58841
atgggcaagaacaacaagcgcaagcgtgagccgactcctccatcagaggacttcggtgattcggagtactcagaggaggagttctcctctgagtctgaggggtctctggctcccatccctctgcgtgagtcgtctgatgattcagacgattcccaggggcttgcggtggaggtctggacttatatccgggccgtcgagcgctccgggctcgagggctcagatgagtcggagtactcctcggacgaggaggactcgtccgagggcggtggcggcgatggcgacgatgatgacgacgacgacgacgatggaggcggtggcggcaatgacggtaacggtggcgatgatggtgatggcggcggcaggggcggcagcggcggcagcaaggatggtgacggcggcggcaacaggggcagcaacaggggcggcagcggcagaggcagcaacagggccagtgactag

SEQ ID NO: 15467 - DNA, 966 bp, Zea mays
  Peptide Sequence Number=SeqID_58842
atgtcgtttaatctaggtgtttggagagtcactcgtgatgggatgaaaccacccaagaatcccgagaaacccaccacgatttttacattaaaaactgctactgagatttggctaaaattgcatgagctccatgatggcacatccaatgttcgtgagcaaaaacattgcctagtcttaaatgagtataattcttttgctatgaaagataatgagcttgctagagatatgtattcttgtttgaatctaatcatcattgagctcaactctattggtattaataagctaggtgatgtggacattgtgaggaagattatctccctactaccacaacaaagatacgagagcatcatcactattcttcacaacatggaggacttgagtacaatgaccccgaccattgtgattgggagaatcgcggcctttgagatgtcgcaaaaatgtgttggggagaggagccaacttcctcaaggccatatgcttttgcatgtgatgaaaggaagggtaaaaagaaggctcccactccaagttcgtcaagtgaagaagagggaagaagaagaaagtgatgatgatgaagataatcaaccatcaacatcatcctccgaggacgaagaaacaatccgacgcatcagaaagtttgctagaaaatttgaaacaattgcaaatttaaattatgagctatcaactgcaattgagcaattagagtctagtgctccatccacagcaaccgatgatggccttattaaaaagaatgaaaaacttaaggctaagttagctacctcccaagaagctattgaaaatttgttaggaaaaatgctatgtcacaagaaagaccacaagtctttccaatacaaggcgaagattggggataagcaaaagctcaagaaaaatctaacaagcaaaatacccaacacctacatcaacaaggtggataaaaaggctgctacaccatatttgatcaagaagtaa

SEQ ID NO: 15468 - DNA, 324 bp, Zea mays
  Peptide Sequence Number=SeqID_58843
atgtcgatctgctttgctggatgttcctccccaggcccacgaaagaatgtcctcacgatttattgggcccttgggcctttcgtgaggtcttttactcttttggtggacccgggggatatctgtcccccacagtcgtacctcaagaggtttcagaccatgagaaatcgcattcctgaggtcgctgaagtagtagtgatcgaggacttctaccagggatccaatgactcggccttcgtccgagccatactgcaaaaggcgccgaccactttcgagcacctgttcagggaggcggacctctacatcaccaccgacgaatgggcttag

SEQ ID NO: 15469 - DNA, 108 bp, Zea mays
  Peptide Sequence Number=SeqID_58844
atggggaagacgcacccgaccagcgggtcccacacgcacgtggctatgcgcaaaaggaagggctggcacggtggggcctggggcagcgaccagattagatcatattag

SEQ ID NO: 15470 - DNA, 489 bp, Zea mays
  Peptide Sequence Number=SeqID_58845
atggccggccatggctgtcccgcaccatggtgcttcaagttcaaaactgaatgccgccaaatcgtatggaggacaaagcgaaggtgccaggagacttttttcctggatatagtatgcccacatatcccgcccacggtacaaggggctctgcggtggcgcccccagaggttgagcgatttccgcccaaggccaatgccagagatcccggtggcttctgttgaagcatggcgatcccggggcggtgaagaccacccaggcgagctacaggctgacttcgcgcgggcgattgccgggcagcgcggattcgttgtgaggttcacggcgtgggttgcacatcaaaatggcattccgatctctacggcctccaccgcgttcatggtggaaggaggcttctgcgcgacagggcccaaacggcagagaccgggtcagtgctgtttttctgcggatggtccaaggagtggggtcgatccggtagcgttcggcccgtga

SEQ ID NO: 15471 - DNA, 3195 bp, Zea mays
  Peptide Sequence Number=SeqID_58846
atggaggccagcgccgggctggtggccggctcgcacaaccggaacgagctggtgctgatccggggccacgaggaccccaagccgctgcgggcgctgagcgggcaggtgtgcgagatatgcggcgacgaggtcgggctcacggtggacggcgacctcttcgtcgcctgcaacgagtgcggcttccccgtgtgccggccctgctacgagtacgagcgccgggagggcacgcagaactgcccccagtgcaagacgcgctacaagcgcctcaaggggagcccgagggttgccggggacgatgacgaggaggacatcgacgacctggagcacgagttcaacatcgacgacgagaatcagcagaggcagctggagggcaacatgcagaacagccagatcaccgaggcgatgctgcacggcaggatgagctacgggaggggccccgacgacggcgacggcaacaacaccccgcagatcccgcccatcatcaccggctcccgctccgtgccggtgagcggtgagtttccgattaccaacgggtatggccacggcgaggtctcgtcttccctgcacaagcgcatccatccgtaccctgtgtctgagccagggagtgccaagtgggacgagaagaaagaagtgagctggaaggagaggatggacgactggaagtccaagcagggcatcctcggcggcggcgccgatcccgaagacatggacgccgacgtggcactgaacgacgaggcgaggcagccgctgtcgaggaaggtgtcgatcgcgtcgagcaaggtgaacccgtaccggatggtgatcgtggtgcgtctcgttgtgctcgccttcttcctccggtaccgtatcctgcaccccgtcccggacgccatcgggctgtggctcgtctccatcatctgcgagatctggttcgccatctcctggatcctcgaccagttccccaagtggttccccatcgaccgcgagacgtacctcgaccgcctctccctcagttccttgagtggactggacgacgctgcacgatgcaggtacgagagggaaggggagccgtcgctgctgtcggcggtggacctgttcgtgagcacggtggacccgctcaaggagccgccgctggtgaccgccaacaccgtgctctccatcctcgccgtagactaccccgtggacaaggtctcctgctacgtctccgacgacggcgcgtcgatgctgacgttcgagtcgctgtcggagacggccgagttcgcgcgcaagtgggtgcccttctgcaagaagttcggcatcgagccccgcgccccggagttctacttctcgctcaaggtcgactacctcaaggacaaggtgcagcccaccttcgtgcaggagcgccgcgccatgaagagagagtatgaggagttcaaggtccggatcaacgcgctggtggccaaggccatgaaggtgccggcagaggggtggatcatgaaggacggcacgccgtggcccgggaacaacacccgcgaccaccccggcatgatccaggtgttcctgggccacagcggcggccacgacaccgagggcaacgagctgccccgcctcgtgtacgtctcccgtgagaagcgcccgggattccagcaccacaagaaggccggcgccatgaacgctctgattcgcgtctccgccgtgctgaccaacgcgccattcatgctcaacttggactgtgatcactacatcaacaacagcaaggccatccgggaggccatgtgcttcctcatggaccctcaggtcggccggaaggtctgctacgttcagttcccgcagaggttcgacggcatcgacgtgcacgaccgatacgctaacaggaacaccgtcttcttcgacatcaacatgaaggggctggacggcatccaaggcccggtgtacgtcgggacagggtgcgtgttccggcgccaggcgctctacggctacaaccctcccaagggacccaagaggcccaagatggtgacctgcgactgctgcccgtgcttcggccgcaagaagcggaaacacgccaaggacgggctgccggagggcaccgctgatatgggagtagatagcgacaaggagatgctcatgtcccacatgaacttcgagaagcggttcgggcagtccgcggcgttcgtcacgtcgacgctgatggaggaaggcggcgtccctccttcgtcgagccccgccgcgctcctcaaggaggccatccatgtcatcagctgcggctacgaggacaagaccgactgggggctggagctggggtggatctacgggtcgatcacggaggacatcctgacggggttcaagatgcactgccgcgggtggcgctccgtgtactgcatgccgaagcgggcggcgttcaaggggtcggcgccgatcaatctatcggaccgtctcaaccaggtgctccggtgggcgctggggtccgtcgagatcttcttcagccggcacagccccctgctgtacggctacaagaacggcaacctcaagtggctggagcgcttcgcctacatcaacaccaccatctaccccttcacctcgctcccgctgctcgcctactgcaccctccccgccgtctgcctcctcaccggcaagttcatcatgccgtcgattagcacgttcgccagcctcttcttcatcgccctcttcatgtccatcttcgcgacgggcatcctggagatgcggtggagcggggtgagcatcgaggagtggtggaggaacgagcagttctgggtcatcggcggcgtgtccgcgcatctcttcgccgtcgtgcagggcctgctcaaggtcctcgccgggatcgacaccaacttcaccgtcacctccaaggccaccggcgacgaggacgacgagttcgccgagctctacgccttcaagtggaccacgctcctcatcccgcccaccacgctgctcatcattaacgtcatcggcgtcgtggccggcatctccgacgccatcaacaacgggtaccagtcctgggggcccctcttcggcaagctcttcttcgccttctgggtcatcgtccacctctacccgttcctcaaggggctcatggggcgccagaacaggacgcccaccgttgttgtcatctggtccattctgctggcctccatcttctccctgctctgggtcaggatcgaccctttcatcgtcaggaccaagggcccggacgtcaggcagtgtggcatcaattgctga

SEQ ID NO: 15472 - DNA, 1875 bp, Zea mays
  Peptide Sequence Number=SeqID_58847
atggatgctattaagagccatgcaaagaaggttgatcttgttgatgagactctaagaccaccactagttccatccgagaagcacaatgctttccgagtgaggaatgttgcatccaggtgcaaaactgatctggctgatgccactaagataagaagatgtacatcaccaagtcttggccagacctcagcaattgaaggcacaccagcacccaaaagagctcagtctgcagatagaagaaggccgacaccttcaacccctccctctaaggtgtcaacaccctcaacccctgtgtcaaggtccatcacaccagttcgtgataccactagagacttacacaagagttccaagcgtatagcaagcacaaaggctcctgatggcttgtggccagcaatgcgtaacttgtcttcatctttccagtcggaatctgtggctgcacctactactagaaatgataaggtagtcacggctttggattgtagcaaggggcaagtgagtgttctaacggagaggaagagaagtccttttagaaggaaaaacattggtgaacattgtgagaatgctcaaccttcagaggagccccctaagaggttaattgagcaacacagatggccagccatgatagctgggcaggcgccgaagaatctcatgtcaagaagcattgacctttcggacaaagctaatataccagtcgcatcatcaaatacatcaagaggtctttcaccaaggaagacgccttctgtcagacctgtgccatcatcaaatacatcaagaggcctttcaccaaggaagaccccttccgtcggaccagtcccatcatcaaatacatcaagatgcccttcaccaatgaagaccccttctgttgaagcttcagtgaaactgtcaaatcagtcattggatgaagtggcaaggagtttggctattcaatcaagcagaaaagatgataaggtagattcacagacaatagagagatccaaatctttgagccgaccaaacagaacagttacttttcctgttccaattctacaacgctcatcatcaccaagcagagcattgccagctacgtcctcaacttccagggcctttcagagcccatctcggacaaggccatcaacaccctgtcagtcccaaagtgttggagctatccaatcaagcgttccatcttctcttattaactacatggttgatgcgcggaaaggaaagaagaatgccagccaaatcgaaaatatccaccaagtgcgtttattgcacaatagacatttacagtggctctttataaatgcttatgcagaagatgctttatcttttcaaaaggctactgttgagaataccatgtataatgtttggaggaatactgtaaacctgcgggattctgttaatatgaaaagaataatggtgcaacacttccaacaagaactcaggctttacaacattctgaaagagcagattgcttaccttgaacaatggccaacgctagaaagggagaatagtatctctttactaggggcaactgaggctctgaaagcaagcaccctgcgcctgccagttacattgggagcaaaggctaacacaattgctctcaagaacgctgtaagctcagctgttgatgtcatgcaagttttgggctcatctgtttgctgcattcattcaaagtttgagaaggtgtgcaccttgaggtttgttttgattaacattagaatatcttaccagatcacggacagcacatccttggtttcagaactctctgtcatagcaggacaagagaagatcatgcttgatgaatgccgagaactcttagctacagctgcaaaactgcaggtgcaggagtcgagcctacggacacatcttgtgcaacagagacaaaggcttcaggattga

SEQ ID NO: 15473 - DNA, 750 bp, Zea mays
  Peptide Sequence Number=SeqID_58848
atggcggacctggaaaagcctgtgcagcagggtgcaggaaagctggaaaaggcccgggtcattgccggcgccgccgcgcatgccacgccacggtgcagtgcaacgcagacagcagtacagtactcgctcaaggctgaagcagtgaagcccaacaaccgcattcaaatttgcgcacgctcgcctcggacgtcgtctggccgttctctcccgccaccaccaccaccgtaccatctaccatacgtgccccgcacccgcaaccgaaaagcgggaccccgtggaggcgtccacgttcgtcgggggccccccagcgcgcggtcgccaaccgccacgttgccccgcggcgcggcgtcccccagccccatcaccagcacagcagcgcgggcaccgccgtggtccgtaggagggacggccgacggcggcccccacaccgcgcggtcccgccgtttgccgggcgcttccgtgtcccgcctccgcgaccgcgagcggccgagcgcacatggggcgtggcgtggcgtggcgtctggggcgcacccaccgacgcagacgcagacgcagccgggagccggcctcggggcacgttctcgaacggacaagcgccctgcgactcttgtgacggaacgggacagcgacgacgacatgcgagtggaggggtcgaggaacgaacgcgcgacagaggtcacgaatcacgaagatcatcgatttgtccaggatctaggaggattatccgtgatgcaatgcaaccatgcatga

SEQ ID NO: 15474 - DNA, 542 bp, Zea mays
  Peptide Sequence Number=SeqID_58849
atgggcgcaatacaagtcaaagctctgcccactcaagggacacgatctcgcctcgcccgagcccagcctcgggcaagaatagcagacccaggtggattcacgtctcgcccgagagtctcctcaagcaacgggcgcaccttcgactcgcctgaggcccagctcgggcaggcttcgcggagaagcaaccttggccagatcgcctcgccaaccgaccggctcggactccacctcgacctcggaagacggtctccgcctcgcccgaccctagggctcggactccacctcgacctcggaagacggtctccacctcgcccgaccccagggctcggactcaacctcggcctcggaagacggtctccgcctcgcccgaccctagggctcagactcagcctcgacctcggaggagtcaccgccttgcctgaccttgggctcggaccgaccacgtcgcagggggggccctcgtacgagaaggtggccgcgcgggagaacgggctgacggacaagctcccactctcttctctccctctccctcacgaacgctt

SEQ ID NO: 15475 - DNA, 150 bp, Zea mays
  Peptide Sequence Number=SeqID_58850
atggacgtgggggcctcctccgcaaccttcacccttgaaatggcagagacatgcaaaccaactggctcagtgctcgacgcggaggctagacctatggaggacttcatcgagcaaatgatcggggctttatatgatgttagtgttgtgtaa

SEQ ID NO: 15476 - DNA, 390 bp, Zea mays
  Peptide Sequence Number=SeqID_58851
atggcccctgccgtcggtgccgaggcggaggcggctcgagaagtccccatcaccgacgggatcaccgccaccatccgcgcttcgggcctccggttcttcgtacttgtcctcgcccctcgggcatcgccgggttgtccgtcagcggggccgacgccggagttgaccagccaaggcctcggaccgagctggcgcccttgggggatggttggccgaggctcctggggtaaccggccgagccgcctgctcgggccggattcccggagaagtccctggaccgcgtcaccgtccgaggccgggtcggacctcactgaaggtgtcgtcgatgccgagggtgctatagcccccttccagcgtgaagacccgagcctgcaggatcagattgtcttgtag

SEQ ID NO: 15477 - DNA, 111 bp, Zea mays
  Peptide Sequence Number=SeqID_58852
atggacctatttggcccgatagcttacataagcatcggcgggagaaaaatcacacacccaagtgaccttaaagggatttctttgagatgggctcaaattgagttcgactaa

SEQ ID NO: 15478 - DNA, 387 bp, Zea mays
  Peptide Sequence Number=SeqID_58853
atggctccgcaggaagtggtgctcgctggtagtatttgtaacttgtcaagggttggtggaggaggccgtgccgccatggctctgaaaattttgagcttgggggagaagaggtttcagaggcagggagggaaagccatgggtccgtcgaagtttttcgggatcttggatgggatgggacgcggtggggggtatgctttccagatttgggttaatttcggtatgggttcccgggctagagcgagtctgtttttgtccggcgccagctgcctcgcgggggcgcggccggaaaaatgcgaagaaagcggcaggtcgtcaggccgatgtcgatcatcggccagccagatggatgaaaccaaggcggtggacacagttttgctcttgtattga

SEQ ID NO: 15479 - DNA, 534 bp, Zea mays
  Peptide Sequence Number=SeqID_58854
atggcgggccctacgggtgtatcactaacgctctttaaagctaaagctgtgtacagatccaggcctcgacaaggctgcctcccgaaggccgtcgacaatcctttcatatacgctggtgcccaacctcgacacatcgagcctgtaccccaggcgaggggccagaagtaccttacaaaaacaggaaaaagcctgggggccggttctaaagaacagatgcccgttccatggggtgatccggagcctgtgtggccggagtcacactggaagttggctccgagcaacctctgcatcgacggatcaccgggggacagcaaccacctctgcaccagcagcgacaatgacctccgctccatgcggcttgccagcaacagcgaccacctcagggagaaggggtggatgtgctggatccacacacgacgcaaccgtcacccgtgcggtggacggacaaccaagccccggccaaagcggcaggaggcagcgtcggaggcggcgccgaagccgtccagcccaaagggccggacacgctgcagctga

SEQ ID NO: 15480 - DNA, 360 bp, Zea mays
  Peptide Sequence Number=SeqID_58855
atgttgcagacccacaggacttattgctctaagtaccagagtacccgttacggagtggtggagtgtgcagggtttcgggtacggaaccaggctaatcggccacacaggctccggaccatcccatggaacgggctcccgttcttcagagccggcccccaggctgtcaggccctcctgctttcgcatagaggtcctaagccgcaagcctggctgttcaattcagatgtcatcatgcctgataggatgggaactggtcggggtagctccgaccacctccgacatcgacccgcacaccgacgtgaccgtcgcaacctcccggacgtcactgaccaccccgccggagctctactgccgccgatag

SEQ ID NO: 15481 - DNA, 402 bp, Zea mays
  Peptide Sequence Number=SeqID_58856
atgacttacaatttgaaaaaggagggagtactttcatttatagagagggtggaacctgaagctggacctgtggcccctgtggtacctcgtcatccaaaatcatatatggaggatattaacgatgaccctccaaatcctgatcaaccaatctcagaacctcgtatggcaccgaaaccaaagccatgggaaaagcaaggtcaagggagtttggcctgtgatttgaaatcgctgccaagggaatccgacgtgctgaggtcagaagttcagcacgacgacggcaccaaccaggttacggagtccgccgatggcgccaaccaagcggactcattgctgcaggcaggcgtagctgctggatctgaatctcctggggttccagatgacgccgcttcttcgcttgagtaa

SEQ ID NO: 15482 - DNA, 954 bp, Zea mays
  Peptide Sequence Number=SeqID_58857
atgtcttctaccttatctgttgcaagtgcatcgtcgggcggtccgtcattcgaggataccttgaatgatttgatggcgacggagttgcagccgggccacaccgtggaatttggcacttcgaggatctcctcggttcgcgtgcaggagatgcagcagcttggatacttcggtgacgtcgtctgtggaaatcttcgccaagaactattgtctgcattggcaaagaggaaaataggaaataagattgcacaatttggatcgtgcaccttcacaccgaggactggaaagactttggcggaggttgtggaaatagtcccgtgcgctcggaataagtggggaaattggtgggacttttggttttatgtctctggtggggaagtcaaagatctccatgggctccctacagccattatgtgctcccactgcaatgtggcgttcctgccgttcgaggtggctgaggatgatgaggacgaaggggcccttcggtacgctgcccgcacgagtagcgggcgcgatcttgtcgaggaatttattggatatggagtgtggcccttggcgcacggctgggtgccgggcgaagtgtgcccccgccggatgccgtccttgggcgatcagttggtgcgaagtcctacttttgccttggatttgcggggcaggaacctggctgtgtttgtgcgggaggtggaggccgaggccgcgaggattgtggggcgctacgtgccgaggacagaaaccttgtgtagttgggatattcgtggttctaacatttgtttgaaccgcgtttttgagttgaaccgtctgtcatatggcggttacccgggagacgacgacgctggtgttgtcgaccgccggggaaaaagggcagttgttgctgtcacacccggttttagaaggcaaaccgaatgcgaaccaagtacgtgccaggatcagcaattcacgtacacagctgttacataa

SEQ ID NO: 15483 - DNA, 162 bp, Zea mays
  Peptide Sequence Number=SeqID_58858
atgtcgaaaacccccgcggaaccacttcgagcgagggcagcgtctccgccatctagcgacgtcttcggcaccagtcgctggtttgacgaagacaaaacggacagggacacccttcgcttcattcagcaccagacgaaggcctgcggtgacgtctccccgtag

SEQ ID NO: 15484 - DNA, 438 bp, Zea mays
  Peptide Sequence Number=SeqID_58859
atggtgttgaatctggacgtagcggtggacggggaggttgtcaagggcgtcgggcccgagggtaggaggaccacgactccgaaggtcgtagccgccgtccgtgttgccgaccgggttatgcccccaggaacggcgttcttcgtcaacgggcccgactgcctgctggatcaggcgttctgcgcgctcagccgcgcgccgtacgtcgcgtgccctgtgacgccggtctccacctgcggcggttgtctcaaggttcaccagctgcagtctccagtctccaccctaccccttcccaagctccagcagacctgcaccattgaggagatgagctcgtcatctcaaggttccttctactccccccatctcccccttctctgtggttctgccaaactagtggatgttgggtttcatcttcacttgatgaatcatctcaagtcttaa

SEQ ID NO: 15485 - DNA, 465 bp, Zea mays
  Peptide Sequence Number=SeqID_58860
atggatgagctcgtctggcaattttttggtgccagggatatccaacatctgagagaatattctcataccgtgagaaccacgtcctcctctcatcgccaaccgctcaaggagcggccatctaccacacacagctacaacctaaggagaagagggcataccaatctggtatcggagatgccgggcaacgacgacaacactgccagcgaagtcgcatctgctgcggcgccaaacaccactagcgcagccctggagcataagatggacaccatgatgaaggcccttgtagatctcgccaccaaggtgtccaatctggcgctgcatgtgacaaaaatcgatgggcgcacaactcccatagtgtccgccgccggcaaccatctagggtttccttacggtctcccaggttatggcggcattccagagacaggcaccatcgacctccaccaggccaccaccagctacaactga

SEQ ID NO: 15486 - DNA, 957 bp, Zea mays
  Peptide Sequence Number=SeqID_58861
atggcccgaaccagtgaagctctgaaggtgaagactgaacctactactgcgtgttatgtgtgctattgtgctagtattggttgctgggctgggctgctgcctgctggccaccagttcgtgcacgcggccgcgtgcatttggtgcatggctccggcacacgaggacgggcgacggcgtggccggtggagcggcctcagctggggcaccctgttctgcttcgggagccagaaggcgttggcggcggggacgacggcaccgtgggagaggtcgcggtggaggaagaggcgcaccgtcccggtggacggcgacctggtggtggggacagcggctgattcggaggtgataattcgcggcagcggcagcggcaccggcaccgacgaggaggagtctcggcagcggaaggggcttcttcgccttccgggatgctgcttcttggacccggcgcgcgtgcctggccgcaagcgtagcaccatggacagcagaggcggcggccgcaacaaacaacggaacctagatcgcacggagtcgccgccgccgcggcggcggtcacagagcggtaacaactcaccgtccgaagcgtcgcagtcgcagatccaagccgccggtggcagcaacagcaccggcagccgctcccgcggagccgagcgaccccggagtgttccggtccagacgacgcaaacgcccaccgagccgagcaaaacggggtccggcggcgtgggcgcgttcgaattcggccctgtggtggggctgtccgtggtggtcgcggtgtccatggcgggactgctgggcgggtggctctgggccgtggcctgcgtgtgcgcctggctggccgccctgtctaggcttcggcggaggagggaggcggcggcggtcgacgaggactcggcagatcacgagaaacccgccgtgctccggggaatgctcgagcggggtcggaggaaggccgcggcgacataa

SEQ ID NO: 15487 - DNA, 306 bp, Zea mays
  Peptide Sequence Number=SeqID_58862
atgtgtgaacatgcgatcgacactaactggtcagggttgataccgaccggtgctctagtggtggaggcggtattgacttgtacaggtccaacatggtcagtaccgaccctaatgtcggtcgatagcccaggcaaccatgtgctcttgccaatcagcgatgaagccatgacattcgataccaaccacaggcagttccatgtttatggtgatgggattctacatctgtggatggaagggcgacacgattctatggttgcaaatggaagggtggtggcgatggatgcgcgtgactgggaaaactattag

SEQ ID NO: 15488 - DNA, 168 bp, Zea mays
  Peptide Sequence Number=SeqID_58863
atggctccaagcgccaacggtcgtctgcaacggtacaggaacagtgaacagtgttcactgcgcgtgcagaagttggtcagggtcagcccgcaggagagtgcgcgctgcgactctatccacttcccccggagaccggaggcaaaaatctcccctcccccaaaatcctag

SEQ ID NO: 15489 - DNA, 252 bp, Zea mays
  Peptide Sequence Number=SeqID_58864
atggtcgagcctgctctggagcttgcggtcgtgcaggaaacagttgaagcagtggccttctgcgagattcacgagggcaattggccgaggccgagctcgggcgaggcggagtttgctccgaggctaaggccgataggtaggtatcaatctcctttgcttgctgatgaaatgaaacctttggttgaatatgataatgataatgatgcacactcacctagggatggcaacggggaattccctgccggggaatag

SEQ ID NO: 15490 - DNA, 1341 bp, Zea mays
  Peptide Sequence Number=SeqID_58865
atgtcttcttcctcccttaagcgttgtgtcttcccatcttccaagcccccggatggggggtatccgccgcctttccgcctcctcgttggaggaacgcaactccatgggagttggtacctctcagccatcgttcggcttcaaggattttcatcagccggcccggccatatccccacgccgacgaccacccaggatggtgaccgccggtttctgggtggggaagagcaagccgggctgcgatcttggtcccaccctcagcttcaaggatgttcatcatccccgctggggcgggagccacgctgagccggcgctctaccttccgcgcgggtccgcgggtcgccctttcccgtggcgtttgggggtggaggcgctcgctggccccgcggacggcgcggacttagacaacgtggggctgatcgacggcgggcgtcgtcacctccagcgtgtcggagtcgtcggccgggcttccggcggcccctcccgccggagggtgaccgccgcatcaggccggcgccccactcgtctgggaggatttgagtggggatctgccggggggctggtgtcccctgccatcggcgccgaggcggaggcggctcgagaagtcctcgtcaccgacgggatcactgccaccacccgcgccccgggccaccacgccggcgtgcttgtcctcgcccctcgagcatcggcgggggcgagggcaagatcgcagcagcgccggcccactgtcgccgtagtcaggatgggcggcggcgagccggccctcggtcttctgttgctccgcaggccttccccatggagtggggtcgttcgtacctgcggaggggggaaccagagttccgttcgtaatggcacttcgaatgccagtgttttttgttcattgtggctgtcggggcctgaacatccggttgaccgaggccccaggggtaaccggtcgagccgcctgctcgggccggattcccggaggagtccctggaccgcgtcgccgcccgaggctgggtcggactttgctgaagacgtcgtcgatgccgagggtgctacggctcccttcagcgtgaagacccgagcctgcaggatcagatcatctcgtagcgtgtgctttctgcggccgccgaggccagaaaaacacaccctcgccgcgcttgcgaagctgcgtcttttttcctcttgtttcgagcatctggactctgttggtaacagggatgtttgtgtgagcgagagttgcttttcgcggaagggacgagtgaggtatccgtatcccagaggcgtgggaatccctcggctcggtcggccttgccgcttacgcgtactttcacccgtccatgaggccctgtccccgacttag

SEQ ID NO: 15491 - DNA, 315 bp, Zea mays
  Peptide Sequence Number=SeqID_58866
atggcctattttcgtgggccaggctatattttcgtcggcaggccgacgaaaatacgaaagttattttcgtcggtctccacaccgacgaaaatgctgtctattttcgtcggtcccagcccggccgacgaaaataagtcctttattttcgtcggccgcagcgtcgctgcgcttctacacggacgtgctcggcttcgtccccatccgccgccccggctctttcgacttcgacggcgcctgtcggaggaccccggcagcctcccgccggagaagggagagatcaaccccaaggacaaccatatctccttccagagatga

SEQ ID NO: 15492 - DNA, 399 bp, Zea mays
  Peptide Sequence Number=SeqID_58867
atgggcaagaacaacaaaagcaagcgcgagccgactcctccatcagaggactttggcgactcggaatactcagaggaggagttctcctctgagtccgaggggtccccggctcccgtctctcccccagcgtcgtccgatgacacggacgactctcaggggattgccgcgaaggtctggacttacatccgggccgtcgagcgctccgggctcgaaggctcggatgagtcggagtactcctcggacgaggaggactcgcccgaggaggacgacgaaggtgacgacgacggaggcgacggcagcgacgacagtgacggcggcagcaggggcggcgacggcggcagcagcaggggtagcaacggcggcggcagcagcaaaggcagcaacagggccagtggctaa

SEQ ID NO: 15493 - DNA, 279 bp, Zea mays
  Peptide Sequence Number=SeqID_58868
atgtcgaagagcactggaatcgcagataaagcaatcatcttgatgcaggatcatgccaagcatatctatcgtatttgcaatgagaagctacccttgggtaagggcttgactgcatttgaggaggaacaattggagcatgacgagaaggtggctttagaaaggattgaaagcccactaccttctcctgattcggactgcttcctatcccttgaagagcacattgagaagttttggggcattgattacaactcagatcagatgcctagctactccgactag

SEQ ID NO: 15494 - DNA, 726 bp, Zea mays
  Peptide Sequence Number=SeqID_58869
atggcggctgctggatctgaggatgacgacaatctttcatcacctagaccacagatcctttgtatggagtttcaagtgcatgttggagtgaaatttgatggtagtgtagatggttattctggtggaagggttggttacatgagatttatggagccacaaggggtcgattggtttacaatgcaggaaaatcttgtgtatcatggctacgaaggaaatgccaccttgtactatttaaaacctagccatacggcaccacaaggtcttgttttgatggataatgcagaacatgtacaacagttgatgaaggaccatgagggccttaaggtgtgcaaattgttcattttgggaactgaagaaggagatggtgatgtatgggaaggtgaagaaagggatgtatgggaagatgatgaagaatatgtcgcatgggaaactgaagaagatgatggagatttatatgttatcaagaatagcagtgatttgaaacaaattcaaaaggatcatacaggacaattgataaatgaaattgataaaagggtttatttgtcggatgaggttaatgaaggtgttcacagtcctgtaaattttgatggtgaggacttcccagatggtcgttccttcaagatcaagaagtatgtaaaggaacacacttgtgggaaaagtcacacggtgaagcaaatggatgctaaatggattggcacagagtatgagcattttttcagaaagtga

SEQ ID NO: 15495 - DNA, 1173 bp, Zea mays
  Peptide Sequence Number=SeqID_58870
atggctcgtagaagatcccaaaagaacaagaagactcctccaacgaacgcaactcaaaaggaggtaactcttgagatattatttgatgattgttctaattatgattcatggtctactagtgtgataaatgcctttagaaccatacatcctcaattagaacaaattattgacaagagtattttcccctctagttttaatggaaaaattaattccgaggaggatcaaagatgttatcgcttaaactacctagcttttgacatcttaaacaattctcttagcaaagaagattatcgtgccttcatatcaaactatgacgaatccattcccgatgcgcatgatatttggactagaattaaaatcaagtttgatgagtccaaacataatagttcatttaatgcctcaacttcctttagtttttgtgatactaacccttgcaaggaagaaggagaaaatgaacgatggagaccaaacgatgaatccacctctccaaaagctaatgaaaatgatagcggaagcacaaacgaggatgaggaggaagaaagaagctttgtgcatctctacgctcgcctaagccaagaagataaggcggtcatgctcaaacttctagaaagagcgagagaacaaagcgaagctcgtcaaaggctagaagatattctctccataaagatgcaacactttgacgagttgactaaagaacatgaggagctaaagtgctctcatgttgatttggtccaaagcaaatcttcttttgagctagaatttgcaggaacaaatgatgattcatatcaaaagctcaaagaagaaaatgagaggctaaagaagagcttgacacaactaaaagggaaatgcattgcccaaccttctcaagataaccgtgatcacatggtgaagaagcttgagacgggaacaatcgtggcatgcactacatcccttgaagaaaatggcaaggatttgaggattgccatgaggaggaaacaaaaaatgaaattcaacacctcctccaaaagcctcaaccacgcctccacaaaaggtaacatccaaggcaacccaaaattgcaacttgtgctagaaaaggaattaaagaattatcatgtgcggaatttcaaagcctacaacatggaggaaagtcaaaggatgtcacatagaaatagaaagcacttaaggatgttttaa

SEQ ID NO: 15496 - DNA, 813 bp, Zea mays
  Peptide Sequence Number=SeqID_58871
atggatgaacaaagtgcaaatctagagcaaagaaacagagagaagaagaaaaggagaatgttggctgtgtacagccaacaggctgtgtcggtctggggcaccggactgtccggtggtgcaccggacagtgtccggtgcgccaggctacctcgggcgaagaagccgctctcgggaattcgccgacggcgtatggctaaaattcaccggactgtccggtgtgcaccggactgtccggtgctctctgaggttcgttgccaaaccagcttttgccagaatgaagatggtttccccaagttgctgagagcatgcacagttcgccttggaatcaggagccagccagagtatgatggtcatgaattcgtcgagcatggcacagagaaatgtgtcgtgaatgtgtacattggatccagtccgcaccatgtggaatggagtgtcactgctgctgggcacagattcaaagacacctgtcaagtcgtcgctcgcaaggcattgaggaccctatgtcagatctatgaagaagaagtggccgacacaccgctcagattctttctgccctttcagagaaaccatcctgtttggatggccaggatgcgtgcattggaagggaagcagctgcttgaggatgaccccacagttaagtacctcactgcatacctgctcaccctggatgcacagtatgatttcttggctcggcaccaccgtcagatgattgctcgagcagaagatgcagagaagctcaaccgtaagctccatgtggatctcaccacagctcaagcccgtgtagctgccttggaaagtcgtgaagtctgttga

SEQ ID NO: 15497 - DNA, 1212 bp, Zea mays
  Peptide Sequence Number=SeqID_58872
atggcgaagcctcggcgcggccgctccgcgtctcgctcctcctcgggatcttcttcccgctcgctgtcccactccgtctcctccggctctgtctcgtcccgctcccggtcgcgctcccgctccttctcgtcgtcgtcctcccagtcccggagccgctcccctcctcaggctaagcgcagttacagttataccttgtggcactcaacagaattgatgctgtcattcagcagtgaacagagccagagtctggttattggtttcaggaaagtgtcgcctcctgctgaatcagctgttctctgcattgatcatttatcaaggaatgttaatgaggctcacttgaaagagatatttggaaactttggcgaagtggtgaatgtggagctatcaatggaccgaatggttaaccttcctcgtggctatggatatattgaattcaagaagagagctgatgctgagaaggctcttcttcacatggatggtcatctccacgaaggaaaccagcttcacctctacggaaacgatctccaaatcgaagggctgaatcacccaggcgtccacctgacccatcacctaggcgccgtcctgattctccacctatacgtcgccgaccagatccttctcctgtcagacgtggtgacacacctcgcaggagaccaccatctccagttcgaaggcgttctccttctccaccacctaggaggcataggtcaccgatgcgtctttcacctaggagggggcgtggtagcccatcaccacgcaggcgctcccctgggcctcttaggcggcgctgtggactacacgtccatatccctgctaaatgtatcaagtattctcttgacatgggagggggcaatcaaaagggacttgaaggaatggaatatcccaatggagttgtgtttggatagaagtgcttggaaagaagctatccacctcaccacctccaaggcggttgaggagcccaccaagaaggccaccacctccacgtcgcttcagtcgctctcctcctcgccgaccccttcgctcccgctccagatcaatttctccaagaaggggacgagggcctccattgaggcgtggggccaaggagggtatcaaggagccgcagccctagaaagcctcctagagcaggaagaagcgtctccagtgacagccgcagcagcagttcaccttcccctagacgcggcagagttcctcagcattgccaccgtatga

SEQ ID NO: 15498 - DNA, 2049 bp, Zea mays
  Peptide Sequence Number=SeqID_58873
atgccggatgcgaggccgcccttgcttcggctcgcctcggcgcgcgcaccctgcttcttacgctcaacattgaccggattgcgtggcagtattagaagtgtggttctgcttcaactcatcttctgccctacccagccttgtaaccctgctgttggtggccctgcgaagtctcaacttgtccatgaggtagatgcccttggtggtgaaattggaaaaattactgataggtgctacttgcaaaagcgtgtactgaacagctcaaaaggccctgctgtacgtgcactgcgtgctcagactgataagagagagtatgcaatagagatgaagaacagtgtggaaagcacagaaaaccttttcattagagaagcaatggctacagaggttttaattggaaaaaatgacagcattgagggtgttcgcactttcttcggcatggacttttatgcaccatctgttgtacttaccaccggaacattcatgagtggtaagatttgggttggtaggacatcaatgcctgctgggcgagctggagagtcagcttctcatggactaactgaaaacttgcagtttctgggttttgaaactgaccgcttgaaaaccggtacaccaccacgaattgatcgcagaacagttgatttttctggattggaaccccagcatggtgatgaagaggtaggttggtttagttttgatcctgaatttcacgtcgagagagaacagatgtgctgctatctaacacgaactacaaaagagacgcaccaaattgttatcgacaacttagatgaaacaccaacttatggtggttgggttgaagcgaagggaccaagatactgcccgtcaattgaagacaagattgtaaggttcaaagataaagagtctcatcagatctttcttgaacctgagggtagaaatgttcctgaactatatctacagggcttttctactgggcttcctgagagattgcaattgtcccttgtgcgaactataccagggctggagaactgtctaatgctaagacctgcatatgcagttgaatatgattacttacccgcatatcaatgctcaagatcacttatgacaaagaagattgagggtttattcttctctggccagataaatggaacaacgggatacgaagaagctgcagctcagggtataatttctggaatcaatgcagctaggcattctgatgggaaatcattaattattcttgagagggaaagcagttatataggaactcttattgatgatcttgttacaaaagatcttagagagccctatcgcatgctaacaagccgttcagaacaccggctattgcttcgatcagataatgctgatagtcgtttgacccctttgggacgagagattggtttaatagatgatagacgttgggagctttatcagtcaaagcaagcccgcattaagcaagagaaagaacggttgagatctacaaaagttccaggaggtgaatttgctgctgaagttactgcagtatccaaccaacctgtaaaggattcatctacacttgaagccatattaaagaagccacacgtacaatataaactccttgacgagcatggatgcggaaatgaaaatttatctcgaattgagaaggaatgtgtagagattgatatcaagtatgaaggtttcatcgcacgacaacaaagtcaattacatcagatcgtaaaccaagaacacaggaaacttcctgaagatttggattaccactcaatgacaaatctatcacttgaagctcgtgagaaactttccaaggtgcgtccacaaacaataggtcaagctagcagaatcggcggtgagacagcgagagcagctgggatcagttgcagtcgagtcggatggttcttcagaggaggccgtccaagccagcacggcataaacgtggggagcttctggcagctgaacaaggaacaacaaaattcggtgaggcatccagggagcctgcgcgtctgtggaatgctggtggaatacaggttgatatttgcagtagtagaattgagagagcagactgtaaagaacgacaacaaatag

SEQ ID NO: 15499 - DNA, 774 bp, Zea mays
  Peptide Sequence Number=SeqID_58874
atgggggccacgggtcagtcatccgcggggacagacgtggcagttggcgtgaccgaaggcagactagcggtgattacgtcagcaagcgcacgaaagcggcgcgccaatcgccaatcaagctttggccccacctgtaggctcgtatcctcccccaaggtgggcccggggaccactgtcggtaccctgaaacagggggccaccacatggctagagaagatgatatactctaaggtatcaacagtgagtccggacccccatgggagagtgtcggacccctgtatatgcagaccggacctccgggagaggtccgggacctccacgggcgcaaaccggacccctaggatgggttcccggacccctctgtgtggggtccgggccactcacagtagggtcctgggattctgggacaaagaatacccaggccttaaccaaggccaggcaggggtccagagccgacacgtgtccggaccataccgtgtacgcttcagctccccactcaggcggagacccgatgctgccacgtggcctactacccgtgacgtgagccagcgggcggagcctgacgtaaggcctctaggccgcgcgacctctgcatttattgcggataaggcgcgccgcctgtcaattccactggcaggcggcgaccaggccatcccgcaggcggcatgcctgtccattccattggcaggcaccagcgagacagcagacatggactttttccttgcggtgtcatcagctggacggctaaaggaaggcagccagagccaactctga

SEQ ID NO: 15500 - DNA, 885 bp, Zea mays
  Peptide Sequence Number=SeqID_58875
atggggttccggacccctctgtgtggggtccgggccactcacagtagggtcccgggattctgggacgaagaatacccaggccttaaccaaggccaggtgggggtccggagccgacacgtgtccggaccatactgtgtacgcttcagctccccgctcaagcggagacccgatgctgccacgtggcatactgcccgtgacgtgagccagcggacggagcctgacgtaaggcctctaggctgcgcggcctccgcatttattgcgaataaggcgcgccgcctgtcaattccactggcaggcggcgaccaggccatcccgcaggcggcgtgcctgtccattccattggcaggcaggcgggtgcgatccgccacccggccggagaatttcctctccgacatttggcacaccagggcgtcaagggctgcgcctggggcgctgtctgcggtcagggaattgctgcgccaccctcctagctccacggcctcgccaggggccatgaagcaatggcgtgacgacgtcgaccgactgctcggtatggcgcattctggctcagccaggcctaggcctcggtcatcccggcgtcaacatgaggcatcggcatcagtgcgctcaccctcggtgagggccgcaccgattgaggacctacgcgcggagctcaaccgcaggcgtgcgggagaggacgccccagtttctctagaaaggtctaatgatctgcgggcagaactcaactgcaggcgtgcgggcgaggatgcccgcgtctctctggaaagggcgcgcgagcgccgaaagaacgtcgagggttgcaacctcgactacgacttcgtcgtggtcgcatcgcagactccaacggggcccggatctaggcgggtgtcccactggtcagcgtag

SEQ ID NO: 15501 - DNA, 228 bp, Zea mays
  Peptide Sequence Number=SeqID_58876
atggatgatggctcaggaggctctttagcgacacacacatgtcgctcaagaaaaagccactcagtaaagcctcgtcacgcgatagagcgagaggatgataggatcttaatcatgcctcatggagatcgagaaatagagacaatatcgaattataaatgtaccttcggcttggaaggagatgaaaatacaagtgtgacgcaaaagcaaatgccaagtcaacgtaaatag

SEQ ID NO: 15502 - DNA, 1452 bp, Zea mays
  Peptide Sequence Number=SeqID_58877
atggcctcagggcaaacgctactgctgaaaggccctcgttcacgtcccctcacgggggacgagaaccagccattaaagccaaagagccggaggtccggagcgcaggtggcactaatggtgtcgtcggcggaagcaaccaccgctgcggtggggaagcctcaccagcggtggccaccacttcagcaccggcgacagcagccacctgcgcacggcacgaccgtcgtctgggtggaggatggacagctacaccctgaccaggcagcggcagttcgccttcccccgcatagctggagaacgtctcctccgcaaggctggaggatgcccttctcccccgaatgttggaggaagaagcggccgggctgcgtgatgaaaatccttgaagctgagcgacgactgaagagcaccaacccccacgaggtcgcgctcctcaaacagcagcaaaaagaaggcaacacagaaccagtgccgcgattcgaggcagccctgcgcgtgacccaacagtgccaattaagtgcaacgatcatgggtcagtcagccgcgaggataggcgcgatggttgatatggccaaaagtggaccggcaggcaagcgacacctccagcaggagaagcgggcgccgtttcacctccgtcatgatgaccgcgtcaaaaaagggaccggcaaaggggatattccgaaaaggatccttctcagcgaaggaaacgggccccgagccctcctactgatcaggggttcgaaggttgcgccctccggggttcggcaaccgccccagagcactcgggctccgagcccactactgatcaggggttcgaaggctggcccctcggaagggttcgacagccaccccagagcatgcagagtcagggatgaccctgggtacgtccgttacatggtcgaggctcaggctacgctctcgcggtaccctaggacatttccgagaccagcgggaacgatttgtaacggaatcccaccggagggaggcatcgagccctcggaccctatcgaatgggttcgggtctggcaaatcacctgtagggaccaggaaaggggatattccaaaaaggatccttctcagcaaagggatgaccctgggtacgtctgttacatggccaaggctcgggctacgctcccgaggtaccctaggacatttccgagaccagcaggaacgatttgtaacggaatcccaccggagggaggcatcgagccctcggaccctatcgaatgggtccagacaggaaaacagcactgttcgccccgctccggctactgtgccaaccaccagggagaaggtctccgcctcgtccgaccccaggcctcggcctcagcctcggcctcgggaggagtcacatcctcgcccgacctcggcctcggcctcaggagaagtctccgcctcgcccgacctcagcctcagaccgactacgctataggggatacatcattaccctactcctag

SEQ ID NO: 15503 - DNA, 207 bp, Zea mays
  Peptide Sequence Number=SeqID_58878
atggagcaccgtcccgggttggagaggttgctggagactgcccatctggagcttgacaggaagctattcgtcaacacgcagcaggcccctacttggcgcgccaactgtcagcgttccgagaccggggggcgtaaggagaggatccaggtgtacaatgggggtgtagcagagtgctacgtgtctagcggaggagagctagcgccctaa

SEQ ID NO: 15504 - DNA, 735 bp, Zea mays
  Peptide Sequence Number=SeqID_58879
atgggggtccaggcccacgcgtcgtgcaaccggcgcgccaaatgcttcgtgcatgcaactgcaccgccacttgcgccactaccgcgcctcctcgactgcggaaccgataccgcgactcgaggcgacccagcgcgcgacccagcagcgccagcctggcgcgacggcggcgcctctggcaggagaagcgggcgacgcttcgccttcgccataatgaccgcgtcaaaaaagggaccgggaaagggggataccctgaaaaggatccttccccgtgaaggaaccaggctccgagcctccctactgatcagaggttcgaaggctggcccctcggaagggttcgacagccgcctcagatcacgtgggccctacacccactactggtcagaggttcgaaggccggcccctcggaagggttcaacgaccgcctcaggctactcgagctccgtgcccactactgatcagggggctcggactcgggctaagtcccggaagacggcgaactccgctccgcccgacccagggctcggacttgggctcggccccagaagacggcgaactccgctttgcccgacccagggctcggacttgggctcagccccagaagacggcgaactccgctccgcccgaccccagggctcggactctgccctggccccagccggcggcctccgcctcgcccgacccaggggctcggactcgacctcggcttcggaggagcttccacgtcgcccaacctag

SEQ ID NO: 15505 - DNA, 360 bp, Zea mays
  Peptide Sequence Number=SeqID_58880
atggtcggccccacgcgctgtttcatttcgcgttttcctctctgccgcgcgctgctctctgccatcgccgccgccgacgcacgtgcctgcctgcgcgtgcccgccgccgcccacccgccgccgcccgcccacctgcagcgcccgtgcccacccgccgccgccgccggcgcgtgcccgccgccgcccgcgcgtgcctgcctgccgccgacgccaacgccgccgtccgcccgcccgtgcctgccgcccccgacgtcgcccgtgctcgccgccgccaccgtccgggtagctgtcccgacgccggctgccccgactcatcctccgtcccgcccacgccgaccaccgtcccgccgtcaagcctaa

SEQ ID NO: 15506 - DNA, 219 bp, Zea mays
  Peptide Sequence Number=SeqID_58881
atggggggtgtggggcgcaaggggcgcgtagggccagctaccttggaaactcatgaagtcattgcattggaagttctaaagcaagctaaggatgagcacatccagaagttgacggaggccacttgttcacccacaaccaacttagagctctatggatccaagagcctgcctcatccagcccagttcaacccgtgtgtcctgaagagccctagattctag

SEQ ID NO: 15507 - DNA, 135 bp, Zea mays
  Peptide Sequence Number=SeqID_58882
atgaagcccgagctgaagaaaaacgagctgaagaagctgctgagcgtgaaaaaacgcatagctgaattatctccgccaccagaaccgtttgatcccctagccgacccggaaacaaattttgaatctaatatgtaa

SEQ ID NO: 15508 - DNA, 435 bp, Zea mays
  Peptide Sequence Number=SeqID_58883
atggcagtgttgcgtcaacaagcagagtaccatcaattagtcttgagggaacaattggagtaccagaggcaacaatctgaggaccagaggcaacaagccgagtaccagaagaagagggacgagtattatgcaaacctccaggcccaaaatcaagctcttctctcgcaactagcccaacaagcgggcgtcccgatgcccacctatgggatgccgcctccggactttgcacttccgatgccaatgcttgcgcctccacctccgcctccgtcacaattccctacaggatttcagacaccccccgctacagttgcagcaccaggagatgggtctggtcaagacgtcgaatcgcattcgtgggtgaataaccttttcaacacgcatagtccagcaggaggaggtggctactcgaaccatccaggcgatggatatgattga

SEQ ID NO: 15509 - DNA, 309 bp, Zea mays
  Peptide Sequence Number=SeqID_58884
atggccccggcccctgcgcgcggcgtcctggccctcggtgtggcttgcgtggccttggcgtggcctcgcgctcccccgtttacccctaacgcgttcccgcgtgcgcaaccccacgcgcgcgagaacgatccggtcggagagcccgaagaactcgcaggagaagcccttgagcagcagtcggtggcaatgagattgatggttcttggttttgactctggtaatggttgtcagcattgcaacccctgctcaggagaagatgaagctgtggaaggagacttccaggagttccaagactacgatgagttctag

SEQ ID NO: 15510 - DNA, 4062 bp, Zea mays
  Peptide Sequence Number=SeqID_58885
atggtcaagtcaccaccatcagataccagaggcaatatcaggtcatcatctgtagattttggcagcaacaactcagtccagaatcttcatgcatatgctgatgtccagaagtctgatgcatccttttccaagttcagaaatcaaatacaatcacgcattggtggtgcatgttcaccatcacaacagatgtctcatctttcagactccaatgaactaaacacgttagctatttctccaccaaagccttctacccttagcgctaccagaagaacagggatctcttctttggatgctactgctgatgatcatttgaccccttcaactgaacttgagagggaggaacaagcaaaagccaagcgtctggctcgtttccatgttgaattaagcaggccagtagaaaatactaatgattttgtgaaaacagttaaaagctctgcagataagtccaaacaagccacatcagtgggaagaactcctttgagaacaaatgatgacaccgatgacaatactttggttgacatggattccacagctttggctgcaattgttgggctttgccctgatatgtgcccagaacctgagagggcagagcgtgagagaaaaggagatcttgataggtatgaaagattggacggagacagaaacctaactactgagcttctcgctgttaaaaagataaggctccacataattgcgatgcatgaattatgtgaatacaacaaaggagaaggtttttccgagggttttgatgcacacctcaacattgagcagatgaataaaacatcagttgagctatttcaaatgtatgatgaccataggagagaaggtgttctcttctcaacagaaaaggagtttcggggttattatgcactgctcaagttagacaaacatcctggttacaaggttgaacctgctgagttatctctggatcttgctaagatgtctcgtgaaattagaggcagtccagagatcttgtttgcaagagaagttgcaagagcatgcagaatggggaactttatttccttcttccgtcttgcaaggaaagctacatatttgcaggcctgtttgatgcatgctcattttgcaaagctaaggaggcaagcactcgcttccttgcacagtggtcttcagaatggccaaggcatccctatttcgcaggttgtggtgtggcttgctatggagggcgaggatgttgaaaatctattagaataccatggttttgggttgaggcagtatgaagaactgtacttagtcaaagaaggaccttttcttaacagtgaaagtgatttcccatctggctgttcacagcttgtgcattctaaaaaatcgcagagggtcgttgatgatgtttcttctgggccagattgtgctccaactagcaaagaaaagactgtctttccatatactggtcaaccagttgctggcaaaagagatctatttctaccacagaatgctcctgcgattcctcctgatggcagaatggatttggatccatcatttcctgggcctatttcaatcactcctgacagacagattagcccattgttttcagatcctttctctccaagagctgccagtaaactattcagttcaacacatccaaagcctctctccccaactgaaggtagaaaagacaggttttcatctgtccttactgctgtttctccacgtactggcaagagggacatactgtcaaaaacaccaaaagtagcttcaccaaaagctgaagccaagacaaaattggttaatgaccttatagctgaagaccaggatagtggtgttgctgagatccctcagaaggtagagatgcaaacagacatactgtggtcacaagctaacacgcaaaacgccaatgctctggcagaaccaattatttcacatcctcttgcagatagcatgtctttaaattactccagtatgtatggagcggaagatgacttcagggcacatgtttctggcatcggtgcagatatggatgagggaactccaccagatcatgaatgtctggttattggagctggattgcctattagctcccctttgtcctatcatgaggaatatgaggaccatagtattagtaacagcacaaatgatgattggttaccaattgttatgcccgcaaagaaactaatttctgatgaaaacctgaaagcaatattgaggaaatggaggcagcatgctgctgacaagcgattacttagggagcagaagaatgctcttgctgttgcagcattgtgttctctatcactcggcccaccagttcataaaagtacaacggtgtctaagctagcagtcgaagaactagatattggccacgcctttaaagaaagacaagcaagaaagcaaaggtcctggtcacggctaaatgtttcggagttgtctggtcccattctaaatgaaaataaccctgatgctagatgcctctgctggaagttgcttgtacttgttccaccgggtatggaatcccagaccaacagttttgtctcaaaatggttacttagaaagctcatgggttatggaatcggagatattggattggttgtttcttcagcaggcctatcaatttggacagagtggatcagttttccaaatgcatgttgtttgtctgttgttagggccagcgatcaacaagttattgataatgatattgctaacagtacaagctgtatagtatttgtagtgtctgaaagcatttcatgggaaatgcagaaggaacggtttaacagtcttttagcctgcataccagatgaatccaatcttcctcttctgattttcagtggcgatacatataacgaaggatatgagtatgcgtcaaagtacatcatcaacaggcttggcctcaatggtcttaacagaggaaagatcggttcgtctttggttatttttcttgttgaaaactacacagaagaccatgccaatggtttctttgatgatgacaaactgcgtgagggcctgaagtggctggtaagtagtttgccagtgcagcctgatgtcactcttgtgaagacccatgaattgcttctggaatacttgaatccacaacttgagctgcttaacacccatgttgcacctggagctggtcctggcgattgcatttcagtattcaacaatgctgtcaatcaacttgcagaagagattttggctgcagcaaacgcaaactgtagccaatggccagctcccgagattgatcttctggagagaacaagcaatgagaggatatatgcagaaatgttcttgcctagcattggatggtcttcgccatcaaggatccagccactgcttgcagccattaatagctgcaagattccagagttcagttacgatctatcttggctaaaccatggttctcacatgggcaagcagatccaggatcagaagaagttacttgaggagtgcttggcgagatacttgaccgaatcagcccggctcttagatgaaagccaggtggtcaccgaagtgaatgttatggtgcagaattgtgttggccttgaactccaggattcgtcttactatctcgctcccagatgggtggcgatcttccgtcgtatttacaactggaggctagcaaagctctctaccggaaagttgtcagaagcttatgttctgactcagcacctgtatcaggctcctgcagcagctggctcaaatggtaccacacaagggcttactgctaacaccgccagcagtgatgctgtggatcacatcatgatgcctgctgtttcaaccggcatcacactagacgaaatcatcgagatcagttgtgacctcaatgttgttgatgcgcagcccgtaactctgccaccacgactgcctgtgcatgttcatgaagaacctcaggcacttgctgataccaacggcgtgcttggagttgatgaaatgtacataccaagaagagtagagttgggggaggtgatgcccatctcggacgacaagctttcccggctaagagtagagttgggggaggcgatgcccatcaagacggacgacaagctttcacggctactggagcagtgcaccaagctgcaggacaggatcgatgagacactttccatatacttttga

SEQ ID NO: 15511 - DNA, 1845 bp, Zea mays
  Peptide Sequence Number=SeqID_58886
atgaagggcgggtctggtgcagcggtagagcctatcgtccgtaatcggaaggtcccagatttgagccccaccctctgcatattatgcagttttctagccgccttcgcggcccttgcatccccagccgccgtcgcggccctccctcccccagccgtcgtcgcggccatctcctgcgctcttctgcgcgcgcggccagccgctgtcgcggccaccgcgcactgtccgctcgcccctgcgctcctttgcgcgcgccagccgccgtcgcggccactgcaccgttcgcccgcccctgcgctcctttgctccgtctgcagcgtcgcccgtctctgctcctgcgtcgcgaccctgactcgtggatctgcctccatctgcgcgcgtccctgctacatttgcagcgccgcccgcctctgctccgcggatctaccttcgtctgtgcgcgcccctgctacccctgcattcgccagcagcaccgtccgcccctactccgccgtcgcggctctgcctccgtcagcaacggcccctgctctgccagattctactgcattaagaggtcacggtttactatttcatttgactgaagattctccagttttagcagctgatagaagcaatgttgctgcaatcaagacttggcagatcaatgatggcaaggataatggtgctcttttacatacccttatgcggcagactcgtgtgattgaacaacatgatatgtccattgatgaatattattccgcctttgatcgtcttatgagtgcattgacctccatggtgcccgcttgtacagttgtgccttgtccagcccacaagtttattgagaagttctttacctacagatttgttatgggagttcgacctgaatttgattcccttcgtgcaatgctgcttcatagttcggatactctcaccatggctcaggcattgtccgaattgcttgctgaagagactcgtctgaagtctatgtcctttattactggtgtgagttctcgcagtgtgttggctgctgctcagagagccgaacccaaggtgccaagtaccgccaagcggttcattattgtgtttggtgaccaaaaaggcaccaacatacttttggcgactccgctggggaacgaggttgaagatctacaaaatcaggcttatatggccgattctaaagatctcaacagggcttctccaaacagcagcacaaggctgactaatttatcggccgctgagcataaaagattaaaagatgacatgaagaaaatagatgaggaggtccaacgacaaaaggatcaggtgctcaaggtggcggataaatggttcctctcgcacttcagggtggattgccaccagaagaccgtccaagaaagggaaatagacgccgattacatgtcatccgtgctgcaacagctccccacaataggtgatgtcagggaagacaccgctcctgcgcccaggtcgcggaccgtccgcgccgtcgcagagggcactaccaggcgatccagcgacctatcgcaggccgcactactgttcatcttgcagagccgaacccaagagaagctggctgattttcgtgtccgtcgtgctactcgtggtcgtggtacaggaccatctcctcgaggctcagttgcggttgctgctacttcatctgctggtactttgtcatcatcttgggttcttgattctggagcttcctttcatgtgacatctgatcagtcacggctggcgtctactacacctatcaccgagggtacttctgttcagactgctgatggatcgcaaaacaggggatgtgattgggactggccgtcgcctggcatcatcgtctgggtcacttatgaggatctcgtctgtctactctaa

SEQ ID NO: 15512 - DNA, 2190 bp, Zea mays
  Peptide Sequence Number=SeqID_58887
atggtgcatggactggttgactattcggataccatcaatgatgaaaatgttgaagcctcaaaaaggatgcgatcacctgcatcagagttcacacgcatggtcaagtcaccaccatcggataccagaggcaatatcaggtcatcatctgtagattttggcagcaactactcagtccagaatcttcatgcatatgctgatgtccagaaaagaacagggatctcttctttggatgctactgatgatgatcatttgaccccttcaactgaacttgagagggaggaacaagcaaaagccaagcggctggctcgtttccatgttgaattaagcaggccagtacaaaatactaatgattttgtgaaaacagttaaaagctctgcagataagtccaaacaagccacatcagtgggaagaactcctttgagaacaaatgatgacaccgatgacaatactttggttgacatggattccacagctttggctgcaatagttgggctttgccctgatatgtgcccagaacctgagagggcagagcgtgagagaaaaggagatcttgataggtatgaaagattggacggagacagaaacctaactactgagcttctcgctgttaaaaagaatggccaaggcatccctatttcgcaggttgtggtgtggcttgctatggaggacgaggatgttgaaaatctattagaataccatggttttgggttgaggcagtatgaagaactgtacttagtcaaagaaggaccttttcttaacagtgaaagtgatttcccatctggctgttcacagcttgtgcattctaaaaaatcgcagagggtcgttgatgatgtttcttctgggccagattgtgctccaactagcaaagaaaagactgtctttccatatactggtcaaccagttgctggcaaaagagatctatttctaccacagaatgctcctgcgattcctcctgatggcagaatggatttggatccatcatttcctgggcctatttcaatcactcctgacagacagattagcccattgttttcagatcctttctctccaagagctgccagcaaactattcagttcaacacatccaaagcctctctccccaactgatggtagaaaagacaggttttcatctgtccttactgctgtttctccacgtactggcaagagggacatactgtcaaaaacaccaaaagtagcttcaccaaaagctgaaggcaagaccaaattggttaatggccttatagctgaagaccaggatagtggtgttgctgagatccctcagaaggtagagatgcaaacagacatactgtggtcacaagctaacacgcaaaacgccaatgctctggcagaaccaattatttcacatcctcttgcagatagcatgtctttaaattactccagtatgtatggagcggaagatgacttcagggcacatgtttctggcatcggtgcagatatggatgagggaactccaccagatcatgaatgtctggttattggagctggattgcctattagctcccctttgtcctatcatgaggaatatgaggatcatagtattagtaacggcacaaatgatgattggttaccaattgttatgcccgcaaagaaactaatttctgatgaaaacctgaaagcaatactgaggaaatggaggcagcatgctgctgacaagcgattacttagggagcagaagaatgctcttgctgttgcagcattgtgttctctatcacttggcccaccagttcataaaaccgtcggttccaaccgaccgggcctccacccagccgcccgccctccccctgacccacctccggccgccggcctccctccccatctccccggcgcgccgcccttcccctggggtcgccgctcccgtcggtgcgcgaccgtcgctcacaggggccgccgcccctggcgcggccgccactcccccggtgccgcgcctccgacgtcccgcctggtcgtggacgtcccttcgtccgaggccgcgcaaccctctgccgcgaccaccgctccaggccacgcgcgggcagccgcccctggctccgcgacccagcgccaggagctcccgcaccgccgaccaacgctcccggccgcgcgcgggcagccgccccggctccgcgacccagcgcccggcaggcttccctacctcgctccctccccgacccggcttcgttccttgctgtga

SEQ ID NO: 15513 - DNA, 3618 bp, Zea mays
  Peptide Sequence Number=SeqID_58888
atggtcaagtcaccaccatcggataccagaggcaatatcaggtcatcatctgtagattttggcagcaacaactcagtccagaatcttcatgcatatgctgatgtccagaagtctgatgcatccttttccaagttcagaaatcaaatacaatcacgcattggtggtgcatgttcaccatcacaacagatgtctcatctttcagactccaatgaactaaacacgttagctatttctccaccaaagccttctatccttagtgctaccagaagaacagggatctcttctttggatgctactgatgatgatcatttgaccccttcaactgaacttgagagggaggaacaagcaaaagccaagcggctggctcgtttccacgttgaattaagcaggccagtacaaaatactaatgattttgtgaaaacagttaaaagctctgcagataagtccaaacaagccacatcagtgggaagaactcctttgagaacaaatgatgacaccgatgacaatactttggttgacatggattccacagctttggctgcaatagttgggctttgccctgatatgtgcccagaacctgagagggcagagcgtgagagaaaaggagatcttgataggtatgaaagattggacggagacagaaacctaactactgagcttctcgctgttaaaaagaaactaattctgaactgggaacttgtgaaatccttatatgccttcattttctctttcaaggacgaggatgttgaaaatctattagaataccatggttttgggttgaggcagtatgaagaactgtacttagtcaaagaaggaccttttcttaacagtgaaagtgatttcccatctggctgttcacatcttgtgcattctaaaaaatcgcagagggtcgttgatgatgtttcttctgggccagattgtgctccaactagcaaagaaaagactgtctttccatatactggtcaaccagttgctggcaaaagagatctatttctaccacagaatgctcctgcgattcctcctgatggcagaatggatttggatccatcatttcctgggcctatttcaatcactcctgacagacagattagcccattgttttcagatcctttctctccaagagctgccagtaaactattcagttcaacacatccaaagcctctctccccaactgatggtagaaaagacaggttttcatctgtccttactgctgtttctccacgtactggcaagagggacatactgtcaaaaacaccaaaagtagcttcaccaaaagctgaaggcaagaccaaattggttaatgaccttatagctgaagaccaggatagtggtgttgctgagatccctcagaaggtagagatgcaaacagacatactgtggtcacaagctaacacgcaaaacgccaatgctctggcagaaccaattatttcacatcctcttgcagatagcatgtctttaaattactccagtatgtatggagcggaagatgacttcagggcacatgtttctggcatcggtgcagatatggatgagggaactccaccagatcatgaatgtctggttattggagctggattgcctattagctcccctttgtcctatcatgaggaatatgaggatcatagtattagtaacggcacaaatgatgattggttaccaattgttatgcccgcaaagaaactaatttctgatgaaaacctgaaagcaatactgaggaaatggaggcagcatgctgctgacaagcgattacttagggagcagaagaatgctcttgctgttgcagcattgtgttctctatcacttggcccaccagttcataaaagtacaacggtgtctaagctagcagtcgaagaactagatattggccacgcctttaaagaaagacaagcaagaaagcaaaggtcctggtcacggctaaatgtttcggagttgtctggtcccattctaaatgaaaataaccctgatgctagatgcctctgctggaagttgcttgtacttgttccaccgggtatggaatcccagaccaacagttttgtctcaaaatggttacttagaaagctcatgggttatggaatcggagatattggattggttgtttcttcagcaggcctatcaatttggacagagtggatcagttttccaaatgcatgttgtttgtctgttgttagggccagcgatcagcaagttattgataatgatattgctaacagtacaagttgtatagtatttgtagtgtctgaaagcatttcatgggaaatgcagaaggaacggtttaacagtcttttagcctacataccagatgaatccaatcttccccttctgattttcagtggcgatacatataacgaaggatatgagtatgcgtcaaagtacatcatcaacatgcttggcctcaatggtcttaacagaggaaagatcggtttgtctttggttatttttcttgttgaaaactacacagaagaccatgccaatggtttctttgatgatgacaaactgcgtgagggcctgaagtggctggtaagtagtttgccagtgcagcctgatgtcactcttgtgaagacccatgaattgcttctggaatacttgaatccacaacttgagctgcttaacacccatgttgcacctggagctggtcctggcgattgcatttcagtattcaacaatgctgtcaatcaacttgcagaagagattttggctgcagcaaacgcaaaccgtagccaatggccagctcccgagattgatcttctggagagaacaagcaatgagaggatatatgcagaaatgttcttgcctagcattggatggtcttcgccatcaaggatccagccactgcttgcagccattaatagctgcaagattccagagttcagttacgatctatcttggctaaaccatggttctcacatgggcaagcagatccaggatcagaagaagttacttgaggagtgcttggcgagatacttgaccgaatcagcccggctgttagatgaaagccaggtggtcaccgaagtgaatgttatggtgcagaattgtgttggccttgaactccgggattcgtcttactatctcgctcccagatgggtggcgatcttccgtcgtatttacaactggaggctagcaaagctctctaccggaaagttctccgaagcttatgttctgactcagcacctgtatcaggctcctgcagcagctggctcaaatggtaccacacaagggcttactgctaacaccgccagcagcgatgctgtggatcacatcatgatgcctgctgtttcaaccggcatcacactagacgaaatcattgagatcagttgtgacctcgatgctgttgatgcgcagcccgtaactctggcaccacgactgcctgtgcatgttcatgaagaacctcaggcacttgctgacaacaacggcgtgcatggagttgatgaaatgtacataccaagaagagtagagttgggagaggtgatgcccatcgagacagacgacaagctttcccagctaagagtagagttgggcgaggtgatgcccatcgagacggacgacaagctttcccggctactggagcagtgcaccaagctgcaggacaggatcgatgagacactttccatatacttttga

SEQ ID NO: 15514 - DNA, 3888 bp, Zea mays
  Peptide Sequence Number=SeqID_58889
atgacggtcattacgtggggaataacacaaaccctagacgggtctgatgcatccttttccaagttcagaaatcaaatacaatcacgcattggtggtgcatgttcaccatcacaacagatgtctcatctttcagactccaatgaactaaacacgttagctatttctccaccaaagccttctatccttagtgctaccagaagaacagggatctcttctttggatgctactgatgatgatcatttgaccccttcaactgaacttgagagggaggaacaagcaaaagccaagcggctggctcgtttccatgttgaattaagcaggccagtacaaaatactaatgattttgtgaaaacagttaaaagctctgcagataagtccaaacaagccacatcagtgggaagaactcctttgagaacaaatgatgacaccgatgacaatactttggttgacatggattccacagctttggctgcaatagttgggctttgccctgatatgtgcccagaacctgagagggcagagcgtgagagaaaaggagatcttgataggtatgaaagattggacggagacagaaacctaactactgagcttctcgctgttaaaaagataaggctccacataattgcgatgcatgaattatgtgaatacaacaaaggagaaggttttcccgagggttttgatgcacacctcaacattgagcagatgaataaaacatcagttgagctatttcaaatgtatgatgaccataggagagaaggtgttctcttctcaacagaaaaggagtttcggggttattatgcactgctcaaattagacaaacatcctggttacaaggttgaacctgctgagttatctctggatcttgctaagatgtctcgtgaaattagaggcagtccagagatcttgtttgcaagagaagttgcaagagcatgcagaatggggaactttatttccttcttccgtcttgcaaggaaagctacatatttgcaggcctgtttgatgcatgctcattttgcaaaggctgctgttcaatttcaagtgcacctttttttttgtaaattaacaagcgaagtctcttcccagctaaggaggcaagcactcgcttccttgcacagtggtcttcagaatggccaaggcatccctatttcgcaggttgtggtgtggcttgctatggaggacgaggatgttgaaaatctattagaataccatggttttgggttgaggcagtatgaagaactgtacttagtcaaagaaggaccttttcttaacagtgaaagtgatttcccatctggctgttcacagcttgtgcattctaaaaaatcgcagagggtcgttgatgatgtttcttctgggccagattgtgctccaactagcaaagaaaagactgtctttccatatactagtcaaccagttgctggcaaaagagatctatttctaccacagaatgctcctgcgattcctcctgatggcagaatggatttggatccttcatttcctgggcctatttcaatcactcctgacagacagattagcccattgttttcagatcctttctctccaagagctgccagcaaactattcagttcaacacatccaaagcctctctccccaactgatggtagaaaagacaggttttcatctgtccttactgctgtttctccacgtactggcaagagggacatactgtcaaaaacaccaaaagtagcttcaccaaaagctgaaggcaagaccaaattggttaatggccttatagctgaagaccaggatagtggtgttgctgagatccctcagaaggtagagatgcaaacagacatactgtggtcacaagctaacacgcaaaacgccaatgctctggcagaaccaattatttcacatcctcttgcagatagcatgtctttaaattactccagtatgtatggagcggaagatgacttcagggcacatgtttctggcatcggtgcagatatggatgagggaactccaccagatcatgaatgtctggttattggagctggattgcctattagctcccctttgtcctatcatgaggaatatgaggatcatagtattagtaacggcacaaatgatgattggttaccaattgttatgcccgcaaagaaactaatttctgatgaaaacctgaaagcaatactgaggaaatggaggcagcatgctgctgacaagcgattacttagggagcagaagaatgctcttgctgttgcagcattgtgttctctatcacttggcccaccagttcataaaagtacaacggtgtctaagctagcagttgaagaactagatattggccacgcctttaaagaaagacaagcaagaaagcaaaggtcttggtcacggctaaatgtttcggagttgtctggtcccattctaaatgaaaataaccctgatgctagatgcctctgctggaagttgcttgtacttgttccaaccggtatggaatcccagaccaacagttttgtctcaaaatggttacttagaaagctcatgggttatggaatcggagatattggattggttgtttcttcagcaggcctatcaatttggacagagtggatcagttttccaaatgcatgttgtttgtctgttgttagggccagcgatcaacaagttattgataatgatattgctaacagtacaagctgtatagtatttgtagtgtctgaaagcatttcatgggaaatgcagaaggaacggtttaacagtcttttagcctgcataccagatgaatccaatcttcctcttctgattttcagtggcgatacatataacgaaggatacgagtatgcgtcaaagtacatcatcaacaggcttggcctcaatggtcttaacagaggaaagatcggttcgtctttggttatttttcttgttgaaaactacacagaagaccatgccaatggtttctttgatgatgacaaactgcgtgagggcctgaagtggctgaagagattttgggctgcagcaaacgcaaaccgtagccaatggccagctcccgagattgatcttctggagagaacaagcaatgagaggatatatgcagaaatgttcttgcctagcattggatggtcttcgccatcaaggatccagccactgcttgcagccattaatagctgcaagattccagagttcagttacgatctatcttggctaaaccatggttctcacatggcagcagatccaggatcagacgagttacttgaggagtgcttggcgagatacttgaccgaatcagcccggctgttagatgaaagccaggtggtcaccgaagtgaatgtatggtgcagaattgtgttggccttgaactccgggatcgtctactatctcgctcccagatgggtggcgatcttccgtcgtatttacaactggaggctagcaaagctctctaccggaaagttctccgaagcttatgctctgactcagcacctgtatcaggctcctgcagcagctggctcaaatggtaccacacaagggcttactgctaacaccgccagcagcgatgctgtggatcacatcatgatgcctgctgtttcaaccggcatcacactagacgaaatcattgagatcagttgtgacctcgatgctgttgatgcgcagcccgtaactctggcaccacgactgcctgtgcatgttcatgaagaacctcaggcacttgctgacaacaacggcgtgcatggagttgatgaaatgtacataccaagaagagtagagttgggagaggtgatgcccatcgagacagacgacaagctttcccagctaagagtagagttgggcgaggtgatgcccatcgagacggacgacaagctttcccggctactggagcagtgcaccaagctgcaggacaggatcgatgagacactttccatatacttttga

SEQ ID NO: 15515 - DNA, 1356 bp, Zea mays
  Peptide Sequence Number=SeqID_58890
atggggtgcgcgcagggcaagtgctgcctacggcggcacccgaggaggggctccgccgctgccgccgttggcggcggcgccacgctcggccgcgccgcggtgcccggggccgggctggtactggagtacgccgcgctggctgtggcggggctgtacccggactccacagcccgggagtcccaggacgcgcaccttgtcgccacgcgcttcgcgggggacccggacctccacctcttcgctgtcttcgacggtcatggcactgccggcaccgcctgcgctgggttcgcgcgggacgcgctcccgcgcctcctcgcgtcgctctccctcgccagcgccgccgaccccaccgcggcgttccgcgaggccatgctgggcgccaacgccgagatgcacgcggctcccgaggtcgacgactccatgagcgggaccaccgccgtggccgccctcgtctccggcggcgctctccacgtcgccaacgtcggcgactcgcgcgccgtcgccggggtctggcgcgccggccgcgtcgtcgccgaggacctctcctgggaccagactccgttccgcgccgacgagcgcgagcgcgtcagggcctgcggtgcccgggtcatgtccgtcgaacaggtggagggcatgcgcgatccggaggccgagcgctgggcgcccgacgagggggacccgccccgcgtctgggcgcgcgacggcctctaccccggcacagccttcacgcgcagcctcggtgacctcgccgccgaggccatcggggtcatcgccgagccggaggtcaagagcgtcgagatcactccatcgcacctcttcttcgttgtcgccagcgatggcgtgttcgagttcctctccagccaggaagttgttgacagggttgccacgtatcaagatcctcgagatgcctgctcagcaatcgctgcagagtcatacaaactatggctggagcacgaaaataggacagatgatataacgataatcattgtgcatatccgagacatggaaagtgtaggccctgcagggagtgacaaagcggactacggtagcgtgggagcgtcaatagctgtgcacgcaatacagtcagaggtacctgtatttgtagaatcagaagcaagtcacatgaacagatctttctcctatacaccctttgctgatgcatggcagaatatcagatgcttccaagcccgtgcaaagcgagcagcgagctgcatcacaaccggtgcaaacttggcatcaaatggacgggggtactggattggtctatgcagcaaagcatcccacctccaacctcctgatgaaagtggaggaaccattattgttattgagaggccgttgtcttttgcagagagctactaa

SEQ ID NO: 15516 - DNA, 201 bp, Zea mays
  Peptide Sequence Number=SeqID_58891
atggcggtggcaggcgggcggaagcagcgatcacgtcgtcagccaagcttgcgtcccatccagggacagcaagggaaccctctcccacggcgtgaagacggcgcacccgagttccgttcctcgaacgggaccgggaaagggggataccccgaaaagggatccttctccgtgaaggaaacaggccccgagcctccctactga

SEQ ID NO: 15517 - DNA, 1533 bp, Zea mays
  Peptide Sequence Number=SeqID_58892
atgcccgaggacggcgcgccgatgcacgtgctgcggcgcgtcctcgacggcctgcagtgcctgcacccgcggcggcggcggcggcacggcggcggcgcggggccgcccaagcaggcgcgcgtggccgtgcggcggctcggcaccggcaaggccacgccgtgcggcggcggtggtggcggagggcgggaggtgacgacgatccgcgtggcgacgttcaacgcggccatgttctccatggcgcccgcggtgtccggcgaggggacgtcgggggcgggggcggagcgcgggggagggctccccggcagcccgggcggcggcgcgcggcggccgcccaagggcatcctgaaggcgcaggcggcgtcgagcctggcgcggtcgccgagcaggccgcgcgtgtccatcaacgtccaggacaacgagatctccctggagcggacccggctgtggcgcggcgtcggcggcaacggcaagaggcagcagcagcagcagcagcagcaggcggggccgcggaggcggagcgtggaggaggtgctgcgcgaggccggcgccgacatcatcgggctgcagaacgtgcgcgccgaggaggagcgcgggatgcggccgctgtcggagctggccgagggcctgggcatgcgctacgtgttcgccgagagctgggcgccccagtacggcaacgccgtgctctcccgctggcccatcaagcgctggaaggcgcaccgcgtcgccgaccagtcggacttccggaacgtgctgcgcgtgacgatcgaggtgccggacgccggcgaggtgaacttccactgcacgcacctggaccacctggacgaggggtggaggatgaagcaggtggacgccatcatgcgctccggcggcgacggcccgcacatcctcgccggcggcctcaacgcgctcgacggcaccgactactccgccgaccgatgggccgacatcgtcaagtactacgaggagatcggcaagccgacgcccaaggtggaggtgatgcagtacctcaaggcgaagcagtacgtcgacgccaaggacttcgcgggagaatgcgaggcggtggtggtcgtggccaaagggcaagacgtgcaggggacgtgcaagtacggcacgagggtggactacatcatggcgtcgcccaactgcccctacaagttcgtgcccggatcctacacggtcgtctcctccaaagggacgtcggaccatcacgtcgtccgggtcgacgtcgccgtacctcacgccagagagcccgatgacgccgaggccaccgcgaacgggcagcgcagcagagtggctcggagtgacttcggctggacgttctctgtggttcaaggcattgcacattgcatcacactcacacctggttgtggttgcccgaaagccaacagcactatgatatacgttgatgccacaaccaaccctgagatcctccaacgacagaacaaggaacatggccctagcgaccgaagggtgtacaccacctacgttgccagataccacgcaggtggcgctggtcactgtagatgcaagtga

SEQ ID NO: 15518 - DNA, 720 bp, Zea mays
  Peptide Sequence Number=SeqID_58893
atggctgaaaggtaccaactcccacggagttgcgttcccccaacgacaaggcggaaggactgcgggcacccccgtccgggggctcggaagccgtcgcgggccgagtcttctccaacgcgctccaaggtcctccccctgcggcgcgggggctgggtcccacgcgtcatgcaagctggcccagagcagaagaagccaaaccgccgcgcgcggtgcatgcaaccgcccagcggttacaagcggccctccacttttgcccagaccaacgggcgaaagggcgggcagccatgcaggcggcatgcaaaccgcgccaagtgggcgcacttctccgacttccaacatgcccagcatggaggcccaggcccacgcgtcaggcaaccggcgcgccggatgctgcgtgcgagcgactgcaccgccacccgcgccactaccgcgcctcctcgactgcggaaccaatgccgcgactcgaggcgacccagcagcgccagcctggcgcgacggagaagcaagcgacgcttcgccttcgccataatgaccgcgtcaaaaaaggctccgagccttcctactgatcagaggttcgaaggctggcccctcggaagggttcaacagccgcctcagagcgcatgggctccacacccactactggtcagaggttcgaaggccggcccctcggaagggttcaacgaccgcctcaggctgctcgggctccgcgcccactactga

SEQ ID NO: 15519 - DNA, 471 bp, Zea mays
  Peptide Sequence Number=SeqID_58894
atgggcaagaacaacaaacgcaagcgtgagccaactcctccatcggaggagtttggtgactcggagtactcagaggaggagttctcctctgagtctgaggggtctccggctctcatccccctgcgtgagtcgtctgatgactcggacgactcccaggggcttgcggcggaggtctggacgtacatccgggtcgtcgagcgctccgggctcgagggctcggatgagtcggagtactcctcggatgaggaggactcggacgacggcggcgaggacgaggacgacggcggcgacgacgacgacgacgacggtgacggcaacggcaggggcggcagcggcggcaggaaggacggtgacggaggcggcagcagggacggcgacggcggcggcagcaggggcagcaaccggggcggcagcagcaggggcagcaccaggggcggcagcggcggtggcagcaacagggctagtggctag

SEQ ID NO: 15520 - DNA, 837 bp, Zea mays
  Peptide Sequence Number=SeqID_58895
atggcgcttcctgtcgacgtggtcggtccgcgccctaggttgggcgatgtggaggctcctccgaggtcgaggttaaggctgagtccgagccctggggtcgggcaaagcggtgttcgtcgtcttccggggctgagcccaagtccgagccctaggtcgggcggtgcggagtttgccatcttcaggggcttagcccgagtccgagccctaggtcgggcggagcggagttcgtcgtcttctagggctgagcccaagtccgagccctgggtcgggcggagcggagttcgccgtcttccggggcttagcccaagtccgagccctgggtcgggcggagcggagctcgccgtcttccggggcttagcccgagtccgagccctgggtcgggcagagcggagcttcctatggtgcctgaggtcgggcctgactgcctgtcagcctcactctgtcaagtggcactgcagtcggtgcggcgcaggcggcgctgtccttttgtcaggtcggtcagtggagcggcgaagtgactgcgggttgcttcttggcgaagacagggcctcgggcaagccggaacttcgtgctgatgggggttaccagctgagaattaggagctttgagggtttatgcatccgggggctcaagctggattatcgacagcggatgctgtcggcgtttcgagaccggggggtccctaagccgacgagtgaatgtcgctgcgtgccccagcccagatgggtcgagcgcgtgggcgagcgcaaaggggggaagcgaaaggagaggatccaggtgtacaatgggggtgtagcagagtgctacgtgtctagcgggggagagctagcgccctaa

SEQ ID NO: 15521 - DNA, 636 bp, Zea mays
  Peptide Sequence Number=SeqID_58896
atggcgactagacgaaccaccggcggaccccatgtcctccggcctacggagctgaagcctgccttcctccggaaaccattctgggtcccccatgggtccagacttctgacagatggaaacccggggtcgggacctaatcttatggaaataccaaaccagatcagggctcagcaacactccccagctgggaaggacccttcaaggaatggactatgctgcaccagcaggaatcgcgtggaagctggcttcggacagccccaccaatggcggcgaccacctctgcatcgacggatcgccggcgacagcgaccacctctgcaccagcagcgacaacgacctccgccccgagcggctcgccagcagcagcggtcacctcagggccccacgtgtcagactgattgacgcgaagcgcgaagaaggcgaaccaccgcgcagggagcgtgcaactgccccacagttatgcgccccttcattcttggggcaactagtggtcaggaaggccacgcggaggacgacgcctgaccccaccgcatgggcaggccaaagggcgccacgtggcaagaaaagacaacacatcccagtatgtatcgtggggtccggatctccacggaaggacaccggacccctatacgtataa

SEQ ID NO: 15522 - DNA, 1089 bp, Zea mays
  Peptide Sequence Number=SeqID_58897
atggctccaccagatccagaagacataagtagagaagagaagcgaaccaaagcaagcaagcttcaagaacaaggggagggggaggaggaggaggccatgcggctgccgtccgacgtgtcgcacggccacttcgcggtgtacgtgggcgagtggtggcgccggttcgtggtgcacatcgcgctgctggaccgccccgagttccggtccctgctgcggcgcgccgaggaggagttcgggttcacgggcgccggcggcgccctcgtcctcccctatgaggaggtcgccttccgctccctcacctccgcgctcgcctgcgcccggagaggagacgttctccaccgggtcataggtttcctgacgagatggacgggcaaatacgaggcgcaccacaggccggcgccgccctctgaccgcgaccgcccgggcaccagcggcctcactgccgaggagaccgccgcgtggttcctgaacaccctcgacgacccgctggagaaggacctgtacacgcagctctggtacaacacgatcgccgatgccgccccacaacacgagggcacgttcccgggccctacctcgcatccttcgtcgccgccgccacccgttgggagcagcggcgtcgagtctagctgggccggcgacatctgctcgaccttctgcggcagcaaccaggtgcccaggacgccgacggggatcagggggaaggacgcggcattgcagtcggaggtgccgagcgatgccggcgcgcatgacggcacatcgtcatccggtgggtccggaagcaactatgggggatccgggctgcccagtgacagcgtccatggccacaagaggaagggaatgtgtagagacgagtcagatagtcgaacgttattagctgctgctgatgtagagaagaagggaccggatcaaagaaaagatgcgtgcgttgcaagagctgatcccacactgcaacaagaggttggttccgcaggcgcagccaccactgggaggaatcgttggtcgtctggtggatacaaggttgtagacaatttgagtttgaatgcagtttcagattttgttggggttaataactgcagtgcattatgttag

SEQ ID NO: 15523 - DNA, 564 bp, Zea mays
  Peptide Sequence Number=SeqID_58898
atgggtggagccaagtggaaggaggaggagatggtgaagacgttgaggccatcggtgtggctcacggaggacttccccctgagcgtcgacaaattcctgccgttgctggacatcctggccagccatgtgtgcgccgtgcgctggctccgcgtgctgctcaccaccaagttcccacaggggactttcccagtaaagttatttccatgcctctcaataattccgacttccctcgtattaccaccatctccaggtaccgtgccgatggaggaaaggagaaacaagattgaggattatgagaagtatttaatacagctaagcaaactaactaaggttatggctcgttctctgccgcttgacaagcatacccttgtgaaaaacctgcgaggtatgttcagggaggtggttgctgtgacaggtgatggtaccaatgacgctccagctttgcatgaagcagatattgggcttgcaatgggcatagcaggaacagaggtactaactatacctcgcaactctactgttcttactgtagatgtaaaaacctcttgcaaggccatcagaagctaa

SEQ ID NO: 15524 - DNA, 267 bp, Zea mays
  Peptide Sequence Number=SeqID_58899
atggaggtgagcccaccatctaattcacgatcgcctctgcatcgttttgcgtcagcgcttgtggtgaatcggtcgctggagagctttgaaggtgcgatgatttctcgccgaactccctccgtcaccgcggtggcgcgcttcgccgtggccgtggtgctctgcgctgcaaagactggtggggacttccttctcggatccgccaacatctcgacttcaattagcactaaacctgggattaggccagggaaaggattcagtcggatctga

SEQ ID NO: 15525 - DNA, 126 bp, Zea mays
  Peptide Sequence Number=SeqID_58900
atggacgagtctggtatgaggatgcgctttgaaaaaatacagaatgtttctgcaaaatatcctgagctccacatattccatgcattatatctgatttcgcgggtgaagaaaaaggagatcgggtaa

SEQ ID NO: 15526 - DNA, 1712 bp, Zea mays
  Peptide Sequence Number=SeqID_58901
atgatcgcgtcgcagccgcgccgggtccgcccccttgccgccgtctccctggtgctgttcctcctcctcctgtacagccgttccggttgtggcccgccgcgcgctgcacggctcctgggctccggattgcacccggtgcaccgcagattcctctccgatgccgaccctggcggccccacatctagcgccgcgaatccttctggtgccgctacgctaaatggcgagcaggcggaggaccctgccgcggcgtgcgcggacatcgcgcggcacgaggggttcgggacgcagtgcgagttcctccgggcccacccgcagtgcagctccagtgggttagtcgactacctgggtttcttctactgcagatgcgagaggttcaggttgctgggctacgcggtgctcggggtatgcctggccgcgctgttctatatgctgggcaatactgctgccgactacttctgctgcagccttgagaagatgtcggcactgctgcggctcccgccgaccgtggctggcgtgacgttgctcccctttggtaatggcgctcctgacgtgtttgctagcattgctgcgtttatgggcagcggtgctggtgatgttgggctgaacagtgtgctcggtggagctgtattcgtcacttgtgttgtggttggggcagtttcattgtgtgttgccgagaagaatgtgcagattgataggaggtgctttgttagggatgttgggttctttctggtgactctgctcactttgtctatagtgttgatcgttgggaaggtgactgtttggggagctatgatgtttgtgtcgatttatgcggtctatgcatttgttgtggctgcaaatgaggtattgaggaaacatgccaggaagctgaagtttgatgtggtcacaccattgttgcctgtgagggcaagtatatttgaacaaggagcagaggaggatgagtcagtgtacagttcacttcttgaggaggatgcagatggtgacgtggcccaaatgaatacgtccctgcctcaatggatgtgggcttctcatgtggccatctactcaaatcatgggaatagagttggttcgcctgacagcccaagaccattatggggttggagtgagggagaagtggataactccatgttcaatatttccaagctgtttttgtttatgaagcttcccttgacgataccaagaaggttgacaattcctatagtggaggaagatcgctggtcgaaagaatgtgctgttgcaagttcttgcttggcgcctgttcttttggcatttttatggagcagtcaggatacagtatccacaaaggttagcatagcagcatatgttatggctgtcattttggggatcacacttgctgccctggctttcctgttcaccagtaatgaacgtcctccacggaggtttttgttcccatgggtttttggaggctttgtgatgagcatcatctggttctacatcatcgctaatgaattggttgaacttttggttgcttcgggtgtgatactgggaattaatccttcaatacttgggctaacagtgttagcatgggggaattcgatgggtgacttgatgtcaaatgtcgctttagcaatgaatggaggtgacggcgtgcagattgccatgtctggatgttatgcaggacctatgtttaatacacttgctggtttgggtatatcaatgctgcttggagcttggtcaacggcacccaattc

SEQ ID NO: 15527 - DNA, 771 bp, Zea mays
  Peptide Sequence Number=SeqID_58902
atggtccttcttccccaccacgtcgcgcgagtgacagagcccggtagtcgacggcgagctcgccgctgcgacggcgaacaacccaagccgtacccagctcatgccaaaacaaacctctcacgcttcctaatcacgctgcagagaggggaatggaacgtaccgccgcagagggaggtgaggacggggctggcgcacacggtccgaaggtcctccacgcgatgggagcgtcgagggtccctgacgccgagataccaaggagctcccgccgccgcaccagaggctcatgccgcgcccggactccgtagcggccacacgaaccgagcacgggtgtggcaaatgctgtggtcgcggtgcttgttctctctcttctctttctctcggcggctgccgcgatgggttctaactatggcggcggaggttagggctctatgggaggggaggcaaggtctctggaggcggacgcacggatgcgcacaaggaggaaggaacggctgccgctatatatctagggaatacccggtcgccggctccgatcttcgcgcgcgccagctgcgggatgcgttcggccaggttggggatggtgctgacgaggccggcccacccgtcagtgaggaggtgaggcgagcgtgctcgagagaccgcccggtgggtcagtgtgccggtgaacgaacagatgtgagcgcgagtgtgactggccagtgggcccatttagccgcgacacggcgtggacgcaaggaacagacgcggtgcgggccccgctggtcggcgtaa

SEQ ID NO: 15528 - DNA, 366 bp, Zea mays
  Peptide Sequence Number=SeqID_58903
atggcggcggaggttagggctctatgggaggggaggcaaggtctctggaggcggacgcacggatgcgcacaaggaggaaggaacggctgccgctatatatctagggaatacccggtcgccggctccgatcttcgcgcgcgccagctgcgggatgcgttcggccaggttggggatggtgctgacgaggccggcccacccgtcagtgaggaggtgaggcgagcgtgctcgagagaccgcccggtgggtcagtgtgccggtgaacgaacagatgtgagcgcgagtgtgactggccagtgggcccatttagccgcgacacggcgtggacgcaaggaacagacgcggtgcgggccccgctggtcggcgtaa

SEQ ID NO: 15529 - DNA, 766 bp, Zea mays
  Peptide Sequence Number=SeqID_58904
atggcatatctcaaccttgtgttcataatctctcctttgatgagtgcattatcaacaccaccaggactccaactcgaactcgtcgccttcgggaatttccagaagcactcgcgctataattcaccggactgtccggtgtacactggacagtgttcggtgctccaaagggacgcgactctggaacttggcagcctcgggaaatcggaacggctgctccgctataattcactggactgtccggtgtacaccggactgtccggtgaaccagcagagcaacggctacttcgcgccaacggtcacctacaggcgcatttaatgcacgccagaagcgcgcagaagtcaggcacgcgcgcgctggcacatcggacattgtgcagtacatgtccggtgtgcaccggacatccaggcgggcccagaagacagaagctccaacggtcggatcccaacggcctggtgacgtggctggagcaccggacatgtccggtgtgcaccggactgtccggaacaaatgatgatacatatcaaaagctcaaagaagaaaatgagaggctaaagatgagcttgacacaacttaaagggaaaggcattcctcaaccttctcaagataaccgtgatcacatggtgaagaagcttgagacgggaacaatcgaggcatgcacaaaatcccttgaagaaaatgtcaaggacttgaggattgccaagaggaggaaacaaaagaagaaaatcaatacctcttccaaaagcctcaaccatgcctccatacaag

SEQ ID NO: 15530 - DNA, 267 bp, Zea mays
  Peptide Sequence Number=SeqID_58905
atggagaaggtgaaggtcatgtgggttcctgtcgatggactgagagtgatgaaggacgagcgttgggtcttaactgagggactggagaagccaaatgaccagctgcaaatccaaacccgttacacgacttcatcaacgagtttttcgcttctggaggtagtagtcacaactctaacgaccccgcccctagcccccaaaaataaaggcttatttccggctgattttttctggcggccagagatcgccgaaaataagcctaaagtgtaa

SEQ ID NO: 15531 - DNA, 183 bp, Zea mays
  Peptide Sequence Number=SeqID_58906
atggctttgttcagccaaagtctgctcagtgctggctctggcgaacaggctgctctcgggacttcgacggcggtgtacggctataattcaccggactgtccggtggtgcaccggactgtccgactcctctctagccacttggcggttattgcgctaacactcaaccaagtttttgtggcttaa

SEQ ID NO: 15532 - DNA, 447 bp, Zea mays
  Peptide Sequence Number=SeqID_58907
atgtccggtgtgccaccggacatccaggcgggcccagcagtcagagctccaacggtcggaacccaacggcctggtgacgtggctggcgcaccgaacactgtccggcgactttcactccccacttcgtgcaacactgtcgtggacgtcgtgaagcggtgccaacgcctgtttctgctcgcggactcgaccggcgcgttcgacgctaccgtggcggtgcgggtgacccagatggtcatgtcgtcgccgaccgagaacgcaacacccacaggctcctcacaggagagcacggcgtgttggttctcgtgcaacaacaagagcagcaagcaactgcagcatggcgggccgttgttggatgggtcgtcgttgggtggaccgtcgttcagggccggcttgcagttgaggcggctatcagggtgctacgagtgccacatggtggtggtcccctga

SEQ ID NO: 15533 - DNA, 336 bp, Zea mays
  Peptide Sequence Number=SeqID_58908
atggcgagctcgtctgtggcggcggacatggagctggaccgccccaacctggaggactacctcccgcccgactcgctcccgcaggaggcgcccaggaatctccatctgcgcgatctgcttgacatctcgccggtgctaaccgaggcagcgggtgccatagtcgatcatggcggtgcattgtcgcttgagcccgtcctacgactgcaggtagcggtaagggcagacggacaccagcgcggtaccctgcagcaggtggatccgatgatcgtagggctgcacatgtggcagctcgcggggtgtgacgacttcgaaggtctgagtagctttgttggatga

SEQ ID NO: 15534 - DNA, 219 bp, Zea mays
  Peptide Sequence Number=SeqID_58909
atggggaagcagcaggtagatcaccgattccttgaccaggtctgccccaaatgcagccaaaacgtcctcaacactagggtcaagatcaaggcgaggacgacactaagcgttagggaatggcatgttgcgatcacgcgtgatggacacctggatatcgcctctgttctgagccacatacagagaggggtcttgaatcccttcaagcctcgagaaacctga

SEQ ID NO: 15535 - DNA, 978 bp, Zea mays
  Peptide Sequence Number=SeqID_58910
atgggcagaaggaaatggccacgtgttcgacgcaccttggtgacgccggagcacgcccctgcgctcggccccgcgcgcgccgcgccgcgccaagcaagaccccgtgcccgtgcccacgcccgcgcctataaagccgaccccggccttgaccagccagggattgagctctacctcgccggagacaccggatcgacgtcgccggacttcacccgaccaccggcgcatgtagaccaagctccacggccggagcatacgccgccgacgagcccgtccgcctgcgcacgtggcccgaccgattccggccatcaccgtcgacgagccgtacctcgacgtgaccgccaggacctcccggagctaaccccgcccttcgccgtacctccctcgccatcgaacctaaaagatgtaattagaggttttaagtccattcaaacccctaaagatgaagacggggagtacatcctcgttccagagcaaggagttgctcaggaggtagcccaggagccagcaccagagcctgccatcgaggatctgcctgccccagctttggaaggcaagccctgggctgaagataccatcgagtccattgctctccacaggctgacgaccttttgtggctttcatcccttggagctgtcaactcatcccattggcttgttccccgctgaaaaggaggacgacccaatttggaaggatcgagtggagcatgccaaggatgtgtgggctctttacccagggcagactgctcacctgacagtgcgatgcatgaatgccctgtatcgtctacaagcagtgcgaggtgaggcaatgtcccagctgatgggcttggtggagtctaccaagatcaccctggataacagggaggatcttgtggtagacctgtccactaagctagtggaaaaggacctccaggtagagcagatggccacccagatccaagagcttgaggagcaagtaggagccagggagaacaccatcgag

SEQ ID NO: 15536 - DNA, 528 bp, Zea mays
  Peptide Sequence Number=SeqID_58911
atggctcaccggattgctcggtccacacgcggccgcgggcgaccgaagtctggcaaagatgatcttgggtctctgatgaggttctgtcgggtccgagagcttggaaagctccacgagccactggcgaagctaaccgaggggcaggcgcaacttggacgtggctggagtgagctggccacggtggccgaggcttgggcggtgatggcgggcggaggaaagctcgccgaagctaaggaggggcgcctggctagcgagggtgagcacggggtgaggcttgcaggtttcgctgactggatcaagagatatggaggggacgagcgcggcaagcgcccatggcaacagggaagcgacagtgggtcatggcctgtccaccccaacagtcgccatagcgtctcggaatgccgggagatcctgaagctcgcgaagcgcatcagcgagcggcgcgagcagtcctccaaggatggctcgccgcctcgtcgccggtctggcaaggagaaggtcgatgaaggctacatggccgcgggataa

SEQ ID NO: 15537 - DNA, 684 bp, Zea mays
  Peptide Sequence Number=SeqID_58912
atggcgcctcctgtcgacgtggctcgtctgcgccctaggttgggcgatgtggaagctcctccgaagccgaggtcgagtctgtcttccgtggccgaggtcgagtccgagccctggggtcgggcggagcggagttcgtcatcttctggggctgagcccaagtccgagccctgggtcgggcggagcggagttcgtcgtcttccgggacttagcccgagcccgagccctgggtcgggcggagcggagttcgccgtcttccgggacttagcccgagtccgagccctgggtcgggcggagcggagttcgccgtcttccgggactttgcccgagtccgagccctgggcggagcggagttcgccgtcttccgggactttgcccgagtccgagccctgggtcgagcggagcggagttcgccgtcttccgggactttgcccgagtccaagccctaggtcgggcggagcggagttcgccgtcttccgggacttagcccgagtccgagccctgggtcgggcgaagcggagcttcctatggtgccttcggtcgggcctgactgcctgtcagtctcactctgtcagcgcagtcggagtggcgcaggcggcgctgtccttctgtcaggccggtcagtggagcggcgaagtgacggcggtcacttcggctctgtcggctcgggggcgcgcgtcaggataa

SEQ ID NO: 15538 - DNA, 1137 bp, Zea mays
  Peptide Sequence Number=SeqID_58913
atggagcctggcggagggacagctgtcggagctgttgtgtccttgctgacgtcctcttgcttccgtaagggggctgagagccgtcgtcgtcacagagtacgcggggcgccatcattgcctatctggcagagcgagctagatgggacaccggtcttgtcctcgtggcccgagtcagctcggggtagggtgatgatggcgcctcctgtcgacgtggctggtctgcgccctaggttgggcgatgtggaagctcctccgaagtcgaggtcgagtctgtcttccgtggccgaggtcgagtccgagcccctgggtcgggcgaggcagaggccgtcggctgaagccagggcggagtccgagccctggggtcgggcggagcagagttcgtcgtcttctggggctgagcccaagtccgagccctgggtcgggcggagcggagttcgtcgtcttccgggacttagcccgagcccgagccctgggtcgggcggagcggagttcgccgtcttccgggacttagcccgagtccgagccctgggtcgggcgaagcggagttcgccgtctttcgggactttgcccgagtccgagccctgggcggagcggagttcgccgtcttccgggactttgcccgagtccgagccctgggtcgggcggagcggagttcgccgtcttccgggactttgcccgagtccgagccctaggtcgggcagagcggagttcgccgtcttccgggacttagcccgagtccgagccctgggtcgggcgaagcagagcttcctatggtgccttcggccgggcctgactgcctgtcagtctcactctgtcaagtggcaccgcagtcggagtggcgcaggcggcgctgtccttctgtcaggccggtcagtggagcggcgaagtgacggcagtcacttcggctctgccggctggggggcgcgcgtcaggataaaggtgtcaggccacctttgcattaaatgctcctgcgatttggtcggtcggtgcggcgatttggtcagggttgcttcttggcgaagacagggcctcgggcgagccggaaatatgttcgccgctggaggggggcctcgggcgagacggaaatcctccggggtcggctgcccttgtccgaggctaggctcgggcgaggcgtga

SEQ ID NO: 15539 - DNA, 270 bp, Zea mays
  Peptide Sequence Number=SeqID_58914
atggcgggcggaaaagagctcgccggagcaaaggaggggtggctggccggtgatgaaaccctaggtgacactggggtgtcacagccttccccccttaaaggaatctcgtcccgagattcgggccagagtcctcccggggtgaagcgaaggattcgaagggcaggaggaggggttgggtgtgattacgtaccagcttccttaggtaggcaatcggggaagttggatctcaagaattcctcggtttcccaagtagtttcttcctccgagtga

SEQ ID NO: 15540 - DNA, 492 bp, Zea mays
  Peptide Sequence Number=SeqID_58915
atgggtgggatgttttcgaaaataaaacttgatgatggatctatcaaaggccttgataggttcaacatcggaaaagatgtacctctgccaggcttgatgatcgaggaccctttaactggtcacatgcctcgtcatgggatccactttagtaagcatttctgcaaaacagagtctttgattattgaaaagccttaccttgactcccatataaccagcatacccttgagagtcttttctttagtcgggtggttccaaaagaagaaaaacaagactgaagtgcgggaggagtcggtcctccacttaggatcttttgcttatagcttatcgggaggagtttgtgcctcccctgtcactcccgcttatgatattaatgttccaaatgaagttgcagatgaagatatgatgctgaactccatggatgctagtctagtgatacccccggtcatcttcctgtggatggatgtccttgtttcgctgtactttgatgaataa

SEQ ID NO: 15541 - DNA, 279 bp, Zea mays
  Peptide Sequence Number=SeqID_58916
atgcctcataatatctgcaaagaagggctacgctccgataccagctgtgacggaacctcccaaaagcagcaaaagtctgctacttcctcacctaaaaacaacgaagggataaaccctgagtatggaattactcagcaagtcttacccgaccaaagaaaagactctcaagggtatgctggttatatgggagtcaaggatgaagtccacgacggcgtcgcgcggaggatgaactccggcgagcatgcagaccggccggaggaggacaagaccagtgcttag

SEQ ID NO: 15542 - DNA, 1005 bp, Zea mays
  Peptide Sequence Number=SeqID_58917
atgatgattaggctcgtgggaaaagggactacacttacatggggccctagactttccagtgaccatggaagtgaggcgatcgctgctcctgctgctattgccgcactggctgtggctgcttttgttgtggctgctgctgctgaggtcgctgctgctgcccctcctgctgttgctgttgctgctgctggtgctcctggtggtgatcaccgctggatggtggtggtggcgcacttctgggcgggctccaaaacgagcgacccgtcagcgcaatgcaacttgtgtcgcctctcctcctctgacccctcggagctacctgggctggaggcactgcttgcagcccctttgcccttgtccaaggggctgggggccatggcgggattggcactgggaaccacaccgatgggatggggacccccagccggtgcaccagagatccggatcccgcggagggggtcctggctgccagtctggcgaaccgccacgccgctgtcatcgagggtcggcaacgtggccaggatcgtcgtcctcaggcctgggtcatcacagagcgacttgatgtcctggggaatgtcgttcgggccggtgaaccagcaggacaggcgtggcctcttctgcagcggcgtgatccggtgctttaggagatcgccaaccatgtgcattgatgtcaagcctctcgtggccaagacctttgtcggccatgactcgcccaagccttgggcgactactctgggccagcaacagcacctgaccccaccacgtgggtggctttgggccgccacgtgttcagagaaagtgatatactccaaggcatcaacagtgagtccggacccccatgggaaagtgccggaccactggatatacagtctggacctccaagttggtccaggacccccacgtgtacggatcggacccctagaattggatccgaaccccctgtatggggtccaggctggccacagtagggtcctaaggttccaggacagaacatacccgggccttaattag

SEQ ID NO: 15543 - DNA, 474 bp, Zea mays
  Peptide Sequence Number=SeqID_58918
atggttcagatcgtcgagcagcgcgacttgtctcccgcggacttcctaatggaggaaggggcaacgtcttctgtgccacggggctcttaccgccctgcgcctggtgatgctgctatgcacactgcgcagcagcacacgcccgtgcagaaatctagggctccgtcgggggctactcatggtgggccgttgtctgcagccagggagttgctgcgcaacccaccaagttccacagtctcatcgggggccatgagacagtggcgcgaagatgttgatcgtctcgtcggtatggcacattctggctcaaccaggcctaggcctcggtcattctggcgtcaacgcgaggtgtcggcatctgtgtgctcaccctcagtgaggggtgcacggatagacgacctaagggcagagctcaaccgtcagtgtgcgggcgaggatgctcgaatctctctagagaaggctgatgacctgcgggcttag

SEQ ID NO: 15544 - DNA, 1032 bp, Zea mays
  Peptide Sequence Number=SeqID_58919
atgaagaaggtcccagctaggggatctgcacccactcccaacactgggggtgacacagggggcgcgtccagctccatccccccgcttgctccggaggagatggaggtggtatttgggcggcgactctggtcgggtgccgagcgagaagcggcgccagtccccctcccctgcatgctgtcccgcgcccaccaggttcttagtgaaactgaggaagcaatcttgcgggagtgggaggcacttgtagctgagcaccagcacctcagtgactggtgcacccaactggaggagcacaccaagatggcatcccgacagttcacctccgtgcggtcccaactcgagctgcagaaatggcagcaagagctcgagggcaaggccagcgacatcgccctcgccgaggaaaaccttaaggagaaggagctatccttggacaggcgggagacagatcttgctaggcgagagacagatctcgccttcaaggaagaaatgctcgtccggcgaggtgagttgctggccgagcatgagctcgaagcagaggaaaaggagaggaagctggaggagcagatccgccagttcgatgcggcgcaagcggcgccgggtccccaggcaatggaggccactagaaaggccctcgaagatctccaagtagaataccgcaccggggtccagcgcattgccgagtgggccggcgaggcaagcacgacactggtgccactagagatgagccccatcccagtgtcggagtcgccagtgtcgatctccgatgccctcccggtgctggactctgccactgatcgcctctggtgcctagatcagatcctcggtgcccgcctagaggcagtgggcagcaagctctgccgggcggtggtagactacgtcctaacgtgcttccggagtcacgaccccgccatattcttggcaccggtgatcgatggtccggtagccgccacagaagatgccgcccaggagagtgtacaagatgcagtggagatggtggtcgcgtgctttcagcgtgatcctaccgacgccgaatag

SEQ ID NO: 15545 - DNA, 1215 bp, Zea mays
  Peptide Sequence Number=SeqID_58920
atggacaagaaccaaaatttagcatatgctccttatattatggctctcatcaaagccaagacaagatttgaggggccttgcgaggttgttcacacaccgttcagaccctttaagaatgagatagggtttctcaccaggccactcactcccttccctgataatgaggaagaccctggctatgatgcaggagcaaatcctgatgttgaggccgagcagatgcctcctcctccacctcctcctcagcctcagcagtattggcagtctggtccaggctactttgatccatattttcacactatgcagcagaggcttgagacccatattgatactcgctttgagggcatgatgacacatatggatcaccgcctagatgacatgcagtctcgctttgacagtaactgggatgcgctcaactctgagttttctgagtttcgtgatcacattcacacaaatgtcactgatcctatcatgaccaggctgaataatatgcagcagagttttcaagataacatgggcgctctctccaaccaatttgacaatctttctacaaatgacagcatgcatgatatcagtcagaggcggcagcaactccagcaagattttggccagttctcctctctttttgacacattcagcactcactactacaacatgcatcctccacccagcacactgactcacaccggcaacgggaggtgggaggcacggattgggcgagtctttgggaacaagtacctctacttgggaacatttgctaatgctgctactgcctccaagcggacagtaaacaagcgaacagtgggatcagcaacacatgccccatctgcaccttcaactgctactcgtgcacctgtggcaaagcctgatacattttggacctcatgcaacaaatgcaagatgaactatgagtacctcaggtggggtccattttcaagggcagctggtgcagctagtgccactgcatcgtctgctgctgctgctcaagctgctaatatgaaaaaggcgatcaagaaaattgcggtcaaggaaaatggtggggataatgaagctcttggaccagaagatcctacagctattaaagattctcatgattcagaacagactggttctaatactagcacagatgatgaaaatgaagatgatgaccacttatcttataatgttcctgatccagatttccatgattttgacaagaatcgcactgaggaatgttaa

SEQ ID NO: 15546 - DNA, 333 bp, Zea mays
  Peptide Sequence Number=SeqID_58921
atggcggaggccatcgttggtccgctggtggggaagctccaggagatggcggtgagcgaggcgaaggctctagtggcagtgaacgacgacatccgcggcctccgggaccggctcatgtggatgcaggccttcttgcggcatgccgacccgcggcgacgcgacacctccgacgagctcatcagggtgtggctcaagcagacccgcgatgttgccttcgacgccgaggacgccattgacgactactccctcaaggtcgacctctcaagccaagaacctgaagggagactgggagtacacatcgccactgacaaatcaaacatcctttctttgtaa

SEQ ID NO: 15547 - DNA, 819 bp, Zea mays
  Peptide Sequence Number=SeqID_58922
atggccgataaaggcaaaggcaagggcatcgtcattggcgatcctcgcatgtcaattatatcacaaaagaagattgctcgaaaggcttcgggcgagaaggctaaaaggttcgaagacgccggggcaattttggaccctttgctcggcgtcataggctatggcgccgaggtaacacagctcggcgccctagcctatggcgccgaggtcggcctgcccgagcctagacaactccttggatctctcctccccgacggggtccctctcgagagcgagatccaggcgccgccggcgatcttctgccgcccctgcgcacgtgcggaccgtccggccgtcaggcagggaaccctagccctgcgccaggtcgtggaccgaccgacccctggccgcggaccgttcgcgcctgtgcagagagcaccgccgccgccatctccgactccgcgcctccgctgcctcccgaaagcattgccagttcctccgcacaacatgacgcgcatccaccgcctccgccccctcttcctcttcgttctcttggcgtcgctgcaatgcggtaatgccgccaaaaccctagccgggctctccgccgccactgtggcgtccacactcgagtctccactggaccagtcctcgctcttgtttcactcactacacggtctgtcacttgatccgattgcaggtgcggcgacggcggcggctggatacggaggtggcgccgaggggttctgctcggcggagccgtccagcaagtgctccggggatcagccgctctactggaaggtcacccatcccaccctcgcgcccgcgcacctccaaggtgcgtaa

SEQ ID NO: 15548 - DNA, 822 bp, Zea mays
  Peptide Sequence Number=SeqID_58923
atgaacaaaacaccgacattcaaggtgccattacaaacggaaccctggttccacctccgtaggtacgaacaaccccacacgataggggggcctgcggagcaacagaaggccgacggatggctcgccgtcgcacgctccagcagcagcgacaacgacccccgctccgggtggccgaactgcagcagcgatggcctcagggcggacgccgctgcaaccttgccctcgcccccgccgatgctcgaggggcgaggacaagagccgtcagcccaccggcagatccccactcggatcctcccggacgagcggagcaccgacctccacgcagaggcgccgtaccggagcaaaggcaggacagccccagaacacgaacgccgccctagcagcgcgcgacgacttgggcggtcctcccgtgcgcgcggcgcgacaaccgcccttgcggcgggagggggcaccgggagccaagccggcaagcccaacgcgctgaagctgacgacgcccgccgtcgaccagccccgtgttgtcgaagtccgcccctctcgcagggccacagggactgggaaaggggataccccgaaagggatccttctccgtgaaggaaacgggccccgagcccccctactgatcagaggttcgaaggctggcccctcagaggggttcaacagccgccttagagcgctcgggctccgcgcccactactggtcagaggttcgagggctggcccctcggaagggttcaacggccgcctcaggccactcgggctctgcgcccactactgatcaggggttcgtaggctggcccacgaagggttcacagccgccttag

SEQ ID NO: 15549 - DNA, 507 bp, Zea mays
  Peptide Sequence Number=SeqID_58924
atggaggaggaggtagagtcgtcctcggcggtggcccttttgctggtactggtggcgcccgtcgtggtgccgtcgatggcgctgctggtacggggccggtggcgccgggccgcgccgcggagggaggagggagaagggattattatagatatcatgactttagaatcaggtctgagagaagacacacaccccatgggagctgaacttcgtgaaagcaagctgatgaacaagtacaatgagctcaaggaggcaggaaagcttgacgccttcatggaaagacggcggaattcagaagacctagacctatcaaaggaggaccttttgaagctgcttcttgagaaagatggatcattgaagtctaaagataaagagtttaaagatatgaaggataaagtcctacaacaaacgtggccttgccacaacaagcgtgagtcagagaacaccaaaaagtatgccatacaggatttgataacatttggctatccctggaaacatgctcatacttga

SEQ ID NO: 15550 - DNA, 2097 bp, Zea mays
  Peptide Sequence Number=SeqID_58925
atggaggattctgcgcgtcttgtcgatggaatttctggtggcagaggaagaaggcgtactcgtcgtggtccgaggaagagttctcggaggggcagtggtcatgatgatcctcccacctcttcctcatcgccgcctgtccctgatcctgccactgcctccgtccgtcaggtgtgtttcatcaagcgctccaggagcatctctcaggctgaagaagagcttcggcgtgctttacttgtctcggttattgctttagagggctctttctgcgcgacggatgtcttggatgcgctcatctcaagtttcaaccttgaggctgatgcgctcgacttacgcatggtggcgtcaaacaacttcattgttcaattttcaagtgttgagctagcggatcgtgtgcttgctgggggtggagccttacctcagcttatggaattagagcttcatggaattcctgctcatctttggaggattgaaacagtggagagtcttctatttggtctttgtatgattcatgagatccttccaagttcatttgaggacaacaacagggctattttcaagcttcgtgcatggtgccctgtaccgacattgttgccttcaattgttgatctgcatgttgaggaaccacctgtggcttttgaggtggattcgtcgtatccccgatcactggtatatcctatctccgttttggcttcatgtttggatgatcggatggtacgtgagacaatcctttctcatccaccattgctggatcagtctgatgatgatcgagatattgttcagcggaagagacggttcggtttccatgatttgactgttcgtgcttcggttaagtctcgccttggtccgcgagtttctattagtgctgataaaggcggcccagttgatagcctcgctctcccaattgttttggacgctgagctgatggcgcctgggatgggacccttgatatctgcttcattaatgtttggctcttcgggtcctggcagtttgtctgctgctttggcgcccccccatgcatgctttaatgagggtatctcggttgagacgtcagttaatgacctctggtactctgttaagggcggcccagttgattgcctcgctctcccgattgcttcggaagctgagctgacggcgcctggggttagaccctttatccctgattcattgatgaatggctcctcgggttctgtcagaagggcggctgctttggcgtccccccttgcttgctttaatacggacgttttgggtggggcggcggcagttaatgccctggcccgtatgtttaatcaggcagtgatattattgacttcggatattagttggatgacgcctagggtggagagatttcgtttctctgctaccttgtgggaggtttctagttctggctccctggtttctgctttggtgcctgctgttttggcgccatctagtgcagattcaaaagtggatgactcgttggtgctgtcagagattggtgaagctcatgactctttgacttctgctcttatggtgtctgaacctgctcagaatggtggattggctcttctggacacagtcggttctcagatctcagtggattctgatgatttgtcttttgagcagaatgataaccttcacagctctttggactttatgtggcctcctcctaccctggtccagcagccttgcaaggtcttgcaagtgtattctcgaagaaaactccccaagcaaagtcgtatagcttcagtggaggaggtggctatgacattcattaacaagatcgtaaagcccctcacaaatgtgttaccggttccttcatctccaaagcttaaagccagaaagactatcccgcccaacttcgtgccaagaagatcaagacgtgttgccaaacttcctccccttagggtgaactcagcggctcacactatttgtttgaagctggggttgaaaaatggagatgctcctgtttctgcggatgatctagatcgctgtgctagagaatttgataagcctctttctgtcagtcagataaaggctttagctaccttgttccgatgggagatccctgatgaggagttcctcgtttgtccagctgatgggctgctgcaagcctcgtaa

SEQ ID NO: 15551 - DNA, 813 bp, Zea mays
  Peptide Sequence Number=SeqID_58926
tgtgcatataattctgcaaaatctaagaacaaatttcatttttggggaagccattggagacatggagatgcattgcttttttcattagcatgtgcccaggttatgtatgcttttgttatgaggcctgaaagcttacctaagtcgtaccaagaatttatccttaagacaggaccagtagcagaacctgtctacaaggttgtcaaagaatgctgcagaggtggtcctgtggatctaactgccctctcagcccatttatcaaacaagaggaatccggatttgataaatttaacaacaaatccatccattatcccatgttctgtgatccaccctgacagagcatcatgcttggctcaaaatgttaatgttgtttcatcaacattcaagaagacattccctctatatttctcattgacatttgtgccctttgttgtcctacgtcttcaaaaggctgctatatgtttgcaccgaaaagttgcgaacaaagaccacaaacttgtgtattggtttgctggtttgatgtcgggtctttcaattcttttggaaaagaaagctagaagggctgagctagccctctatgtgcttccacgtgctggagattccctatggtatatattgatcaaccgccacctgctcccaaatattaaaaatgctgagtgtaatccaagaggtaaagcgaacaaaattatgttgcttgctattatgaccacaaagaatcgtagtacaaaatcttgtttgaagcagttatgggcagtgtgctcctcagctatgagccaagtagtgtgtcattggctcattgctacagaggatgaataa

SEQ ID NO: 15552 - DNA, 195 bp, Zea mays
  Peptide Sequence Number=SeqID_58927
atggcggagaggatcagagacgaagtagatggggtgtttagggacaaactcggtggaactagaataccagacttctctaatttttctagtgaaggtgggaaaagcacacacgaacatataagccaattcatatctgaagcgtccccaatcctctgggactcaaatgtgatacaattactagtcccaggaggctag

SEQ ID NO: 15553 - DNA, 558 bp, Zea mays
  Peptide Sequence Number=SeqID_58928
atgtcggctttcctcccagggatgtttgaggtgtgtgttaggtgtcctattaatgtcaccagctcctgccctatacctctcaggctctcttgtggccgaacagtattcaaccctatgtccatgaggtggtatgctctcggctctgcgtacgcatatccagacggtctagcgtgccaaaggttcatctacaactatactaaatcgactgtccgaaataccgtagattattccggacaggagaagctttttggaaaaacagaccaagcgcggaccgtccgggaccttgcggcggaccgtccgcaacaccaggatgaccctcagacagaaccaatgcaaaaatccaagtctgcactacggaccgtccggaggaaaagaaaggaccgtccgagaccttgcgcggaccgtccggcctcaggcgcggaccgtccgtttcgccctattcaccccccctctaggcgactatcaagccgggagcgcctccatggccggtttgatgatgttggtggtggagatcttggtgtgatccttagaaccggccatctatgggccgatttttag

SEQ ID NO: 15554 - DNA, 768 bp, Zea mays
  Peptide Sequence Number=SeqID_58929
atgggggggcctgcggagcagcagaagaccgacgaacggcgcgccgtcgcccgctccggcagcggcgacgacgacgacttctgctccggggggccgaacagcgacagcaatgacctcagggcggatgctgctgccaggaggcccccgcccatgcccaaactcgtgaggcaaggacgggcagaaggtcgtagagttggaggcgactctccttacttgcgtccccagccgtcgcgggctgagtcttctccaacacgctccaaggccctcctcctacggcgcgggggctgggtcccacacgtcatgcaagccggttcaaagcagaagaagccaaaccgccgtgcgcgatgcgtacaaccgcccagcggttacaagcggctctccacttttgcccagaccagcgggcgaaagggcgggcagccatgcaggcggtatgcaaccgcgccaagtgggcgcacttctccgactcccaacacgcccagcatggaggcccaggcccacgcgtcatgcaaccggcgcgtcgaatgcttcgtgcatgcagctgcaccgccacttgcgccaccgccgcgcctcctcgactgcggaatcaataccgcgactcgaggcgacccagcgcacgacccagcagcgtcagcctggcgcgacggtcaatgcggccgaaaatgggccggcagtaatggcggtggcaggcgggcaggagcagcggtcacgtcgtcagccaagctcacgtcccatccgggggcagcgagagaaccctctctcacggcgtga

SEQ ID NO: 15555 - DNA, 81 bp, Zea mays
  Peptide Sequence Number=SeqID_58930
atggcgatgatgggttcaacatctgaaaagatgtacctatgccagccttaccttgactccctcaaggcagcatatccttga

SEQ ID NO: 15556 - DNA, 203 bp, Zea mays
  Peptide Sequence Number=SeqID_58931
atggcacggtcgagggggagggagggctcgccggggcgcgagcagggtgcggcagcgaggggctgcgcgggggcggggcttgccggggaggggctcgacgggggcgcggccgggggagggcttgtcgggtcgtggctcgccggggcaggggagggcgcggggtcagcggggcacggcgcggccgctagggctcgccgagcgtg

SEQ ID NO: 15557 - DNA, 234 bp, Zea mays
  Peptide Sequence Number=SeqID_58932
atgtcgggagctcacgccaagaaggagatggtgaccggcgagaagtccgccaaaagccaggggaaagctccatcgggagagtccggcaacaagaagagggaggaatcacttcctcgtgtcaagtcgcactggagtggcgacaagaagaagaaaatgaagaaagtggtctactatgagaccgattctttcgtcgccttccacctccggctcctacacaccgtccgtcacttttag

SEQ ID NO: 15558 - DNA, 2451 bp, Zea mays
  Peptide Sequence Number=SeqID_58933
atggcgtcgccggccggcggcgagtctccggcgaagcccgtcctcctgcacggcgacctcgacctctggatcctcgaggcgcgcctgctgcccaacatggacatgttctccgagcacgtgcgccgctgcttcgccgcatgccgcccgccctcctcctgcgggaccaagcacccgccgcccgccgccgctggccgccgccaccaccaccaccaccggaacatcatcaccagcgatccctacgtcacgctgtccgtgtccggcgccgtcgtggcgcgcaccgccgtcatccccaactcccaggaccccgtctgggaggagcgcttcgccgtgccgctcgcgcaccgcgccgccgacctcgagttccaggtcaaggacaacgacaccttcggcgcgcagctcatcggcaccgtcgccgtccccgccgaccgcgttgtctcgggcgacgaggtcgaggactggttccccgtcataggcaccaacggcaagccgtacaagcccgacaccgcgctgcgcctccgcttcaagttccagcccatcgccgacaacccggcctaccgccacggcatcgccggcgaccccgaccacaggggcatccaggactcctacttcccgctccgccacggcggccaactcacgctgtaccaggacgcgcacgtcagggaaggggacctgccagagattgagctcgacaacggcaagacgttccagcacaacgcgtgctgggaggacatctgccacgccatcctagaggcgcaccacatgatatatatcgtcggctggtcggtgtacgacaaggtgcgcctcgtgcgcgaaccatctccgtcgcggccattgcccgagggtggagaccttacgcttggggacctgctcaagttcaagtcgcaggagggtgtcagagtgtgcctgcttgtgtgggatgataagacttcacatgacaagttcttcatcaagacggttgttgggactttgtttacacaccatcaaaagtgtgtgctggttgatacacaagccaggggaaacaagcggaaaattacagctttcattgggggcctagatctttgtgatggccgctatgacacacctgaacacaggcttttcaaagatcttgacacagtattccaaaatgattaccataaccctacattttcggcaggtgcaaagggtcccaggcaaccatggcatgatttacattgcaggattgatggccctgctgcctatgatgtcttgacaaattttgagcaaaggtggcgaaaggcaacaaaatggcgtgaccggtttagaagagtatctcattggaaagacgatgctttaattaaactggagcgtatctcatggattttaagcccttcacccaatgttccaaataatcatcctagtttgtgggtttcaaaagaagaggatcatgaaaattggcacgttcaggtattcaggtcaattgactctggttccctaaaaggatttcctagtgattgcaaagcagcttcaaagctgaatcttgtgtgccgaaagaacctggtaattgataagagcatccacactgcatatgtccgagcaatcagatctgcacaacatttcatttatattgagaaccagtactttcttggttcttcatatgcttggccatcctatgtgaattcaggtgctgataatctggtaccaatagaattggccctcaaaattgcaagtaagattaaagcgggagaacgctttgcagtgtatgtagtgataccaatgtggccggaaggagtccctactgcagcatctgtgcaagaaatccttttctttcaggcccagacaatggagatgatgtataaaataattgcagatgagctcaaggcaacggacaataaggatatgcaccctgaagattacttgaacttcttttgtcttggaaatcgggaagaaccaccatctaatggtagtccagaatcagagaaatctacagataaaagtgcagcggccttagcttcgaaatatcgacggttcatgatctatgttcacgcaaaagggatgattgtggatgatgaatatgtcattctgggttcagcaaacatcaaccagagatccctggctggttctagagatactgagatcgcaatgggtgcataccagcctcattatgcatggtctacaaagaatggacatcctcacggccaggtatatgggtacagaacgtctctgtgggcagagcaccttggaacggttgatgatcgcttcaaggatccttcgagtttggagtgtgtaaggtttgtgaatcaaatagctgtagagaactggcaaaggtttacagcagaagaaatgagtacgttacaagggcacctcctcaagtacccagttaaggtggaggctgatggtaagatcagcccactgtcagaccaggagtgctttcctgatgttgggggcaagattctgggagctccaacttcacttcctgattcactgactatgtag

SEQ ID NO: 15559 - DNA, 1536 bp, Zea mays
  Peptide Sequence Number=SeqID_58934
atggccatcggtatggtccccatattcgctattgacttgagtcgggatggggattcctccgtggaccatggaggaggtgtggacagcgtcgtcgtcttcccgccgatccaccgcccggccgcccgtgctataaagaggaaggccaaccacggacacccatgccaagcagaccaagatttatttgttcgtcgcattcgattcattagcagctccctgcttgccttgcacgtggtgactggtgagttcattcactttgccaagtcatcacgtcagcagcagaccaagaccaacagagacatgggtggaggcagccgcatgcagaccgtgctgttggccccgggcgttaaggacaagaagctgctctcctacacccgccgcaacgcgctcaaggaaaaggacgccgtcaccgacctcatccgctccatcatcgccacgtccagccccgtccagcggaccgccttccacgtcttccgcattgacaacgtcctcgagctctactcggcctggcgccgcggcctccccgacgtgcgcccctactacgccgtcaagtgcaacccggagccggcgctcctcggcgccctcgcggagctcggcgccgggttcgactgcgccagccgcgccgagatcgaggccgtgctcgcgctcggcgtcccgcccagcagcatcatctacgccaacccctgcaagtccgagccgcacctagagtacgccgccgcggccggcgtcaacctcaccacctacgacaccgaggaggaggtcgccaaggtcaagcgctgccacccgaggtgcgagctcctgctccgcctcaagggccccgacggcagcgagaccacgtgcgacctaggcaccaagtacggcgcgcgcgccgacgaggtggtgccgctcctgcgcgccgtccagcgcgcgggggtcaccgtggccggcgtctccttccacgtcgggagccccgtggcccgcgtcggcgtgtaccgcgccgccatcgaggccgcccgcgccgcgttcgacgaggccgccgccctcggcatgccccccatgcgcgtcctcgacatcggcggcgggttcacggccggcgccagcttcgacgacgccgcggccgtcatcaacgacgccctcgcgcgctccttcggcgacctgccgtgcgtcgaggtcatcggcgagccgggccgctacttctgcgagaccgcgttcaccctcgccgcgcgcgtcatcggcaagcgcacgcgcggcgaggtgcgcgagtactggatcgacgacggcctctacggctcgctcaacaacatactcatggaccacaaggtcccgcgcccgaggccgctggccaccccgcgccccggcgacaggacgcacacgtccacggttttcggcccgacgtgcgactcccaggacgaggtggtcaccggctaccagctgcccgagatgagcgtcggcgactggctcgtcttcgacaacatgggcgcctactccacaggttccggctccaagttcaacggcttcgacacgtcggagattaagatctacgtcgcctactccagctga

SEQ ID NO: 15560 - DNA, 237 bp, Zea mays
  Peptide Sequence Number=SeqID_58935
atgggtcagtcagccgcggggacagatatggcagttgacgtggctgaaggtggattgacagcgggcgcgtcagcagacgagctaaaacagcgcgccaatcaccaatcaggccatgttgaggcaaggcggcgtactcagtccgcgatacgtgggtcgtgcagttactcaccattactcccgcgttaccaggaaaagggtaacgacctattaatactgcatggactgctgtcatcatga

SEQ ID NO: 15561 - DNA, 1527 bp, Zea mays
  Peptide Sequence Number=SeqID_58936
atggcggttcgccagacaggcggctgggacccccactgcgggatccggatctccaatgcaccggttggaggtccccagcccgccggtgtagctcccagcgccaatccccccgtggcccccaaccccttggacaagggcaaaggggctgcaagcggtgcctccaccccaggcggggccgaggaggccagctcccaggcccacgacgcgcagaggcgcgttagtcctccagtctcgccgccaccaccaccatctgggggtgatcccccccaggggcaccagcagcaacaacaacagcagccgcaacagcagcagcagcagcggaggtcgcctcgcttccagggtcactggaaggtcttcacccatcatctgtttgccagggcttcttctccctccgctcccaaggtcacgcctcctccgccagataccaggcccaccgacgggtctgcctctcagcagcaagaatctgttgagggtggtgccggcggttcgcccccggctgctgccaagacagcgctagcggcttcccatgccccagtcggggatccggcggtagcggcaccagcgtcgggtggcgtcgcagcagcggaggaggtcccagctgggggatccgcgcccactcccgacactgggggtggtgcaggaggcgcgtccagctccaacccttcgcctgctccggaggagatggagagggtgtgcgctagggagctggaggcgtcccagagggagaagaaggtgaccaagagggaggaggtcgtggcccaccgggaggccctcacaatagagttccaggccaagcggagcgccctggaccagactctggaatcccagcgggcccagcaggtcaaggctgtggagaggctgcaaaagtggcagcaagagctcgagggcaaggccagcggatgcccgcccctccgcccgagggggaaccttaaggccgaagagagcagttccttggacaggagggagacggacctcgccaggcgagagacggatctcaccttcagggaagaaatgctcactcggcggggcgagttgctggccgagcacgagctcgaagctgaggagaaagagaggaagctggaggagcagatccgccagttcaacgcggcgcaagtggcgccgagtccccaggcgatggaggccaccaggaaggctcttgaagatctccaggcagagcaccgcgtcagggtccagcacattgccgcgtgggccggcgaggcaagcacgacactggtgccgctggggatgggccccatcacagtgtcggagctaccagcgtcgatctccgatgcgctcccagtgctggactccgccgccgatcgcctccggtgcctggatctgatcctcggcgcccgcctagaggcagagggcggcaagctctgccaggcggtggatgaatacgtcctaacgtggttccggagtcacgaccccgccatatccttggcgccggtgatcgctggtccggtagctgccacagaagacgccgcccgagagagtgttcaagacaccgtggagctggtggcctag

SEQ ID NO: 15562 - DNA, 2256 bp, Zea mays
  Peptide Sequence Number=SeqID_58937
atggggaactgcgccgcctaccgccttgccgccggcgggagcggcgacggcggggaccccgtggccgtgtgccgcgaccggaagcgcctcatcaaggcggcggccgaccgccggttcgcgctggccggcgcgcacgccgcttacgcggcggctctccgttccgtcgccgacgcactcgacgtcttcgtcgcgcgccacaccgcgcctgcgccgatcctcatcacgctccccacccccagcagctcgccctcggcttcccccaagccaacgcaggttcaagtgcaggggcttccctctctcgccacgccgccgccgccgcctccgcaggagggggaggaagaagaggaggcgccggcatcaccgcccgccgaggaagatggggacggcggcgtgcagacgccggagatggagtgcccgtactactacgcacccccggcggtgacgccgccaccgccaccgctccctgcggcgtcgccggtcggcggctgggacttctttaacccgttctacgggacggaggaggtggctgcggccatcagcgacgaggagatgcgagcggtcagggagcgagagggcatccccgaactggaggaggcggaggaagaggagggggcgaaggcggcggcggcggcggaaaccaagcccccaaaggcacagccctctcttggacttggagtcttgacgccccaagaggaggctagagatgcgtgcgagatggcggggaacaacggcgggctggaggtggccgtggcgccgcaggggcgcgagctgctcgcagcgctcaaggaggtggaggagctcttcgcggccgccgccgaggcaggcaaggaggtgtctgccatgctcgaagcagccacgcgcgtccccgacctcaaaggtctatcctttattgcttttcctccaccgatttcgctctcgttgcagcatgctcgatctgtgctacaaacatggtgccgcagtgaaaactcgtcaaaaataatccacgccatcacatggcatcgctctccatcatctgtatcctcatcctacaggagcgagctgggagcgagctcgaatagtttgtcatggacagacaagagtgaaactaggagtgatatattcgaagactatggtggaatgaagtcaggaagtcactcacagactttagggagactgtatgcttgggagaagaaactttatgaagaagttaaggttatagatcaaatccgacaaacctatgagaagaaatgtgttcagctgaggaaccaagatgccaaaggttcagagctgcgttgtgctgaaaaaaccaggacaactgttagagacctgtacacaagaatctgggtttctctacgagcagcggaatccatatctgatagaatacaaaagttacgggacgaggaactgcagccacaactcgtcgagctgttgcagggctttacaaaatcttggaaaataatggtggactcgcatgaaacccagaggcagattatgttcgaggtgaattcatttacatgccctgcttatggcaaattctgcaacgatgcacagcgtcatgcaactctgaagttggaggttgagctgaggaactggagatcctgctttactagctatttcaatgctcagaaagcgtatatcgaggctcttgaaggatgggtatccaagtttgttctgaccgacaccatccggtactcgcgggggatctcgtcgattgctccagatagagctggtgctccaactctagttgtgatgtgccatgactggtacactacaatgtccaagtttccgagcaagcgggtctcgttcaccatgaggaattttctcaggagcgtgagggtgctatggctgaagcaaggagaggagcagcagcagaaaaggaaggtggacagcctggcaaaggagctggacaagaagctgaccgcctacaaaagggcagagaacaggatcataggcaccaagcttctggagcacagtcctgagacagacgccaagcagcgcatggagcacctgtcggagaagaaagaggtgctgaacctcctaaagaggaggatcgaggcagagaaagggaagcatcatgcgtgcatgcgggacacgcacgacgtcactctcaacgggttcaagatcggcctcgccagcatcttcgagtcgctggctgagttctcgaaggattcggtgaagctctacgaagacctcctaggccgagcccatggcaaggattcagagaaggctcacatagtggtggatgatggtaatctgcatgtgttaggacctagctag

SEQ ID NO: 15563 - DNA, 876 bp, Zea mays
  Peptide Sequence Number=SeqID_58938
atggacggcgggttgattccacaaaaccccgagggctctttagcaaaaagacccgaccgaaggggtatccaacgaccctggccgttggatcggagttggacggtcgagattaaatcaagtcttcccccgaaccgagccgtccaattccagatcgacggttgcacactcatcttcttccctcgctggccgaacctgacggagcgcaacaaccgtggcggcgccatcaccgcggagcacccaattatcatgccagggcttgattctaagcacctcaatggtaccgcgcacgcaacccgtacgtcccggcgaagccccccgaccacagttgaagttctagcattggcacaaacggggaaacagcacacggcggatttctccttccttccgcccccttctgaagctccaattctcttccctggcaatggcgccctcggctgtggcttgggtaccgaggaaaggcataggtcttataggaagcgggtccgggtttggttgcgctcggcctgcgggaatcgcgcgcgagcggagctctcggccacggctgattcggtcagcgcgcggaagctgttgcgcggaagcgcgctgcggctgatccacgagcgccgaaggaatcggagaacatctgcatgcggagtccgcgcgacgagggcctcgcatcgcggatttgccgcggactctgcgcacaagtggggcccgaacgtcattgacgaaggcgtgtgcgcgggagatggagcctgggccgcacgcgcgtgggagggaaaaaggaaatgggccgaggagaagtggcgaggtattgggccagaagtgatgcggccggcccgaattggaggtcgagtttatgatctcgataaaatgcttcaccaaaattatcattaa

SEQ ID NO: 15564 - DNA, 225 bp, Zea mays
  Peptide Sequence Number=SeqID_58939
atgccctacatgcgtcaagcgaaggagaaattcttctcacaatacacggtggatcgccaccagaaggttgtcgaacatggagagactgatgtcgcatctcttgtatcttcgcttcaaatcatcaactcctacaaggatgcgaagagttggttaacggttatatccggaggttccgggacactagaaaccgacgctttgaaatccatgtcgcggacaaagagctag

SEQ ID NO: 15565 - DNA, 162 bp, Zea mays
  Peptide Sequence Number=SeqID_58940
atggccgccccgcgaaccgcacgcctcgtcgcattaactccgcggcgggaaaggcggcgcctctggcaggagaagggagcgacgcttcgccttcaccataatgatcgcgtcgaaaaagggaccgggaaagggggataccccgaaaaggatccttccccatga

SEQ ID NO: 15566 - DNA, 1254 bp, Zea mays
  Peptide Sequence Number=SeqID_58941
atggacaaggatcgccagggagctgcacaaaagcgccaggcggttgtcaggcttcatgaagccaggccgaagaggcagcggggggctgcgaaggctgcggcccccggcggaggcaagccacctctggcggcaaagtcgggcgtccatgcatttagcaaggcgccggaggcagcggcaggcgccggaggctccaaatcgacgaaggctgtgccgccggccagcagagtggcggaggtcgcgaaggcggcccgagtgttgccgtcgtcaggcaagcgcgtcgccgacttcgccaccgatattagtgtggacgactatcttggtgggtcggacgaaggccaacttgctatagttgcgcctgccacggcgaccacggcggctgtcgtagtgccgaaggcgaagggcggggctcttagcgccggaggcgagatgtcggcactcgcgaccgtcagggatgaggcaggcgctgtgtctcgccggctgaaggaggtgacggaggcactaagtcaggtggctgacttcgccaaccgcacagcgtcgggggccctcacggcagttgtgtctgtcgaagtcgagagacttcggacgcaacatgcggatgccgtccgtgaaaaatcggccgccgacagcaagtgccgcaagctggcggacaaggtggccacactggagggggagaagactgacctccggcgccaattggcgggggagaggagggagaccaacgaggccctcgccaaggcgcaggctgcgcaggcggaggctaatctggcacgggcggagggcaatcttgccagggagcgcgccgagcagctgcaggagcggctcatcgccctggagagccgcgtggagagggccgaggccgcgacgcgcgtggaggccgagcggacgcgcaaacagcttatggatttgtaccatgagctgggcgcgcggactggtgacttcgaagtgccggagcgagagcccggacttcgctgcctggagtgggtacaggaggagttgcaggcactccccactatcgtggaggggtttatgtcgtatgcctccctggtcacctgcaagggggcgatgaacgctctatctcgcgaagggtgccggcacttcgaggtcttcgaccaagctgacgaagactttgagcgagatatctacaaagttgaggaccccatagtgaaggaatccgccggagccatctacgaccggatgtggggtccgcacggtcgcgaggtggttagggagcgggccgggacggcgagggctcag

SEQ ID NO: 15567 - DNA, 468 bp, Zea mays
  Peptide Sequence Number=SeqID_58942
atggcgccccgcatgctccatgacaacggcggctctcagccctcttacggaagcaaggagacgtcagcaaggactcgacagcccgacagctgtccttccgccagcctccagcgctcctccgacggccacgacatcacacgaacagggtgccaaaacctctccggctgccacgacggcatcaaggaggtccatatttttcagcatcctttgagtgacaaagttcctaaaacggtgccatcatgtgctgttagccttatagaacctccggttgctagcgtaaagcgcatccgtacagataagagaactggagacacttctgcgattgctttagctgttcatttttctacatgttgtaggggcttagcacgagtaggagggtgcgctcgcgacgacagcttgcacgggaatcactggaatcgcgtggtaggcgggcacggttgcgatgacggatctagatacatagtctaa

SEQ ID NO: 15568 - DNA, 504 bp, Zea mays
  Peptide Sequence Number=SeqID_58943
atgagcgactccttctgccccgactgcaagaagcatacggaggtggcgttcgaccactcggcgggggacatggtgtgcaccgagtgcggcctcgtcctcgaggcgcactccgtcgacgagacctccgagtggcgcaccttcgcgaacgagtccaacgacaacgaccccgtccgtgtcggtggccccaccaacccgctcctcaccgatggcggcctctccaccgtcatcgccaagcccaacggtgcgcagggcgacttcctatcctcctccctcggcaggtggcagaaccgcggctccaaccccgaccgatccctcatcctcgccttccgcaccatcgccaacatggctgaccggatatggcgtgtgcttgttacgttcatgcgtgcggcgcgctgcctgattttacgcctggggctatggaatgtgaccaggggtttggtgctggatgatttgtcccttggatctactgaaatcccgttctttataatatgggaacccatctaa

SEQ ID NO: 15569 - DNA, 1692 bp, Zea mays
  Peptide Sequence Number=SeqID_58944
atgtacctggatacgctggtcgacttcgtggccgccaggccgggcatgcacctggtgagcgacgaggtgtacgcgagcacggcgttggcggatccgggcttcgtgagcgtgctagaggtggcggccgcggccgcgcgtgaggacgccaacgccgggtcgctggcggagcgcgtgcacgtggtgtacggggttgtccaaggacctgggcctgccggggttccgcgtcacctgctggcgtcgctcctgggcgacgggggcttcatgcggcggtacgcagcggagaacgcgcggcggatcggggcgcggcgcgcgcggctggcggcgggcctcgcggcggccaacgtcgcgtgcctggagggcagcgtggggctcttctgttgggccgacatgcggcgcctggtcgggctcaacgtctccccgggctcctcctgccactgcagcgagcccgggtggttccgcgtctgcttcgccaacgtgtccgccaagacgctcgacgttgcgctccagcgcctcgccgacttcgcggaggcgaaggccacccggggccccgcgcgccgcttgctcgctgctgcagggcaggagagaaccgggaacattggatcacgatggatcaacggcagacgagtggtgctgcacgggcaccgttatccgtgggccgataagggcgatgggtcggccatacaaaaaggccgtggacgcggacccgcgcacgggtcgctgtccctcgcctgccccgccgcccctagccctttccccccgtgtccggtggttgcggctgcccgcatcatattcccaccttgcgaacgaggacgaactgctaccccctcgcctcgccctcgccgcctgctcctctccagttctcccccaccaaccgcagcagcgagagcgagactgagaatggccgcggcgccgtcgtccctcgtgtcctcccatctctcccgcctcgccgacctccgccgcgcggcggcgccggccactcccaccgtcccacagcagcttcgcgtcggcttctcgcgccgccgcgcccagcgcgtcgtcgccatggctggatccggcaagttcttcgtcggaggcaactggaagtgcgtaagtgcatgttctgcttcttcagctttacgcggcttggagatgctgtgtaccgatgatcctggagatgctgttgcagaacaactggtggacatcggttgtcaatgggttattcttggacactcagagcgtagacatattattggtgaaaatgacgagtttattgggaagaaggctgcatatgcattgagccaaaatgttaaggttattgcctgcataggagagcttctggaagagagggaagcagggaaaacttttgaagtatgttttgagcagatgaaggcttttgcagatagtatttcaaactgggccgatgttgtgattgcatatgagcctgtttgggctattggaaccggaaaagttgctactcctgagcaagcccaggaagttcatgctgctgtacgcgattggttgacgaccaacatatcacctgatgttgcctctagcacccgaataatctatggaggttctgtgaatgcagccaactgtgcagagctagcaaagaaagaggatatcgatggttttcttgttggtggtgcctccttgaaggccccggacttcgccaccattatcaactcagtgaccgccaagaaagttgcagcctga

SEQ ID NO: 15570 - DNA, 342 bp, Zea mays
  Peptide Sequence Number=SeqID_58945
atggggcgtgtagggacgcatggcgcggtgcacgagggctcgggcggtgtcggtctctggcgtccaggcgggcgtccaggcggggtcctgggtggtcctcctagcggcttggccggtcaggtcacgcggggaagggcgcctggcgaggtgtcgcggaagcagggcgtcgcgcgctgggcggtcggcatggagtcgtgtcctggcagcagcggcggcctgtggaagaagcagggaggagggaagagaagggagatcaagaacagtgaatctattctacttagaagacataccgctcgattacgtggagaaattaaaggctgtcgcgtaggacagttcggctag

SEQ ID NO: 15571 - DNA, 351 bp, Zea mays
  Peptide Sequence Number=SeqID_58946
atgacttgcaacgtatttgaaaagcggacgctcttttcgttaggctttcttttagctttacatatgtcactcctgtttatgatattaatgttccaaatgggaagtcttatgttgggtgctggacgtggtcgacaggaacgggggcatctggcaagctcttatagttccggctcaggcagattggatacgggcatagttcccaaagctttaccctgtagtctggactataagttggttacgaagtttgcagatgaagttatgatgctgagctccatggatgctagtctagtgatacccccggtcatcttcctgtggatggatgtccttgtttcgctgtactttgatgaataa

SEQ ID NO: 15572 - DNA, 651 bp, Zea mays
  Peptide Sequence Number=SeqID_58947
atgtccggtgcaccaacggctctcaggctaccaacggtcgactgcaccatttttggaaagaaatcgggcaccggacagtgtccggatcacctattcaccccccctctaggtgctctcagggcggacctcactgggctggcgtacacaaatgctctatgttccagggattgggaagaggcactccttcagttgtgcgccgcctgcgtcgctctgactgctgtgccactcgacagagtgaggctgacagcggccaagcccggcctcaggcgccataagaaactccgccttacccgacccagggctcggactcgggctcggccccggaagacgacgaactctgcctcgcccgacccagggctcggactcggcctcggccccggaagacgacgaactccgcctcgcccaacccagggctcagactcggacttggcctcggaagacgacgaactccgcctcacccaacccagggctcggactcgacctcggcctcagccgacggtctccgtctcgcccgacccaagggctcggactcgacctcgacctcggaagacagactcgacctcgacctcggaggagcctccgcctcgcccaacccggggctcggaccgaccacgtcacaggaggggccatcattaccctacccctagctag

SEQ ID NO: 15573 - DNA, 327 bp, Zea mays
  Peptide Sequence Number=SeqID_58948
atgaataatgactgtaaccttgctgacggagagtacgtcctcgtgccggagcaaggagctgctcaggaggtagccccggatccagcaccagagcctgcaccagaggacctgcctgccactgctttggaaggcaagccccggattaaatgtgcacttaagtgtaggagttgtttgaaaccctacttgcatgatctcaggaatcctgttgagatgaatactagttctctggaggaaatggttgcgggagtgacttggccgtccatcttgccaccaggttggactgttgagtgggaccctacctcagctgaggaagagcatgaggagtga

SEQ ID NO: 15574 - DNA, 900 bp, Zea mays
  Peptide Sequence Number=SeqID_58949
atggcgcttcccgttgacgtggcgggcctgtgccctaggtcggacgacgtgtgggctcctccgaagccgaggtcgagtctgtcttccgtggccgaggccgagcccgagcccctgggtcgggcgaggcggagatcgttcggcagaggccagggcggagtccgagccctgtggtcgggcgaagcggagttcgtcgtcttccgggtcttagcccgagtccgagccctgggtcgggcggagcggaggttgcttcttagcgaagccaaggcctcgggcgagccggagatgtgtccgccgttaaaaggggggcctcaggcgagacggaagtccctcgagctttatgctgatgggggttaccagctgagaattaggtgtcttgagggggaccagcctttctcggtcgcattttgttccggtgggtgcaagcgagcgcacccgccgggtgtagcccccgaggcctcggaggagtgcccgggtgcacggtcggggcccaagctctcgggctggtatgttgacgctgtcaacggtttggcgaaagccgggtttgcgagaggcagcccccgagctccgccacagggcgagaagggcggatcagggacagactcgactttttacatacgcccctacgtcgcctttccgcaaggaggaggaggggagagcgccatgttaccctcgatgggcaccgaacatggtgtctccggtgagctgcaagcggggcccacgcgatctgaggcgactgttgaacccctcggagggccagccttcgaacctctgatcagtagagggggctcggagcctggttccttcacagggaaggatccttttcggggcgaagcgtcgcccgcttctcctgccagaggcgccgcctgtcccaccgcggagttaatgcgacggggcgagtag

SEQ ID NO: 15575 - DNA, 546 bp, Zea mays
  Peptide Sequence Number=SeqID_58950
atgtcgtggattccgccgccggcgggcgggttgtcggccgccattgtcgttgtcgcgcggcggtggaaggagtatcatgtcgtagctgccgtcgaaggacatgaactcaagactcccgaaacggagcaccgtcccgggccggagaggttgctggagactgcccatatggagcttgacgggaagctgttcgtcagcacgcagcaggcccctacctggcgtgccaactgtcggcgtttcgagaccggggggtccctaagccgacaagtcggacgacgtgtgggctcctccgaagccgaggtcgagtctgtcttccgtggccgaggccgagcccgagcccctgggtcgggcgaggcggagatcgttcggcagaggccagggcggagtccgagccctgtggtcgggcgaagcggagttcgtcgtcttccgggtcttagcccgagtccgagccctgggtcgggtggagcggagttcgccgtcttctgggtcttagcccgagtccgagccctgggtcgggcggagcggagttcgccgtcttccgggtcttag

SEQ ID NO: 15576 - DNA, 1386 bp, Zea mays
  Peptide Sequence Number=SeqID_58951
atgcaccgctccttcctcctcgtctgtgcactcgtagccaccgcgctttccaccgacaccaccgttgccgccgcccagagccagagccagagccagagccagaggtcatgggccgaactcagcgggcgggacaactgggacgggctcctggacccgctcgacggcgacctccggcgcgccgtcatccggtacggggagctggcgcaggcgacgtcggacgcgttcatcggcgacccggcgtcgccgtacgcgggcgcgtcgcggtacgcccccggcgcgttcctccgcagggcgcaggcgcccgacccggacgcgtacaacgtgacgaggttcctgtacgcgacgtcgagcgcgcgcgtccccggccagttcatcacgcggccggcgccgccgggggcgtggagcgccgagtccaactggatggggtacgtcgccgtggccacggacgccggcgtcgcgaggctggggaggcgggacatcgtggtggcgtggcgcgggaccaagcgcgccgtggagtgggccaacgacctggacatcacgctggtgccggcggcgggcgtcgtcgggcctggccccgggtggtcgcagccggcggtgcaccggggtttcttgtccgtgtacgcgtcgaggaactccacgtcgcggttcaacaagcaaagcgccagagagcaggaacatgcattttcatcttgtatagaatcttgtaggaacgggaacatcttaggtgttggtgtccacaagaatttgccgagaagcaacaagacagtgttggccgagattagaaggctattggacgcgtacaagggcgagaactgcagcatcacgctaaccggccacagcctgggcgcggcgctctccacgctcaccgccatcgacatcgtcgccaacggcctcaacgtccggggccccaacaacgacacggtccccgtcgccgccatcgtcttcggcagcccccgcgtgggcgacgaccagttcaagaaggcgttcgactcgacgcccggcgcccggctgctccgggtccggaacgcgcccgacgtcgtgcccaccgtcctgcccaacgccttctacaaggatgtcggcgtggagctgctgctggacacgcgcaagtcgccgcacctcaagaggcccggcccgggccccgccgcctggcacaacctcgagtgctacctgcacggcgtcgccggcacgcagggcgccggcgacgccgccgggttcagcctggaggtggaccgcgacgtcgcgctggtgaacaaggaggtggacgcgctcagcgacgactaccccgtgccggcggcctggtgggtggaggggaacaagggcatgaccagggacgccagcggacgctgggttttgcaggatcatgaggagggtaacctcgctatgtga

SEQ ID NO: 15577 - DNA, 1725 bp, Zea mays
  Peptide Sequence Number=SeqID_58952
atgcccgcgccgctgatactacccacagtcgcgcgcgagctggcagagctcctcgtcgccctctccgccgcccgcgcgctcccaaaaggacagcagctccacggccatctcctcaaggctggacacgtccccgccaccgcctcctcccacgcgctgctcgcgcaccacctccttacgttctacgcgcgctgcgcgctccctgacctctccctccgtgccttccttgacctccccgcgccgccccttcccgctgcatggtcttccctcatctcctccttcgctcagaacggcctcgccgccgctgccttcgacacgttccgccgcatgctcgccgcgggcgtccctgccaccgaccgctccatccctttggctgcaaaggccgttgccgctgccgagaccttgtcgcgccctccgttctcccctcacgcgctccacggccttgctgccaagactccgttcgctggcgacgtgtttgttggctcggcgattgtcgacatgtatgccaagtgcggccaccttgcagacgcccgccggctattcgatgatatgccagaacggaatgttgtttcttggtctgcactcatatgtgggtatgctgacgcggggatgcatcctgcagcgatgggaatcttccgcttggcacttgaggaggctgtgcctgtgaatgactacaccgtttcttccatcatccgtgtatgtgctgcagcgacgctctttgagcttggagcccaggtgcatgccagggctacaaagacagcgcttgacgcgtcaccttttgtgagcagctcacttgtctcggtttactcgaagtgtgggcttgtagagtgtgcttaccgtgtgttcaatgaagcacctgagaagaaccttggcatttggaatgcagtgctcattgcatctgctcagcatgggcatactgctgcagcatttgagcgatttatggagatgcagaaggctggattccagcccaatcacataaccttcctgtgcttgctcactgcttgtagctatgctggccttgttgatgaggggaagcgatatttttctatcatgaaagattatggcattgaaccacaggctgaacattatgcttcgatggttgacctacttggtcgtgtaggacttataaaggaagcccttgatcttattgagtccatgcctatggaaccacctgagtctgtttggggtgcactgctcatgtcatgccgcatatttaaagatgctgacactgcagcaattgctgcaaagaggctgtttgagactgggtctcgcagctctggagcacatatgcttttatcaagcacatatgcagctgcaggaaggcatattgatgcagctcttgctaggaaagcaatgcgtgatgcaggtgtacggaaagaaacgggacttagctggttggaagctgcaggggaggtgcatacctttgcatcgaactgcaggagacaccaacgaagcgaggaaatttacaaggtgctggagaacgttggtgagaagatggaggcagctggttatgtggcagacactagtgcagttgttaaggatgtagatggggatgagaagcgagcaacagtgaggtatcacagtgaaaggctagcaattgggttaggtcttttgattgttccacatgagataatcgtcggttccaccgatttgaaggtggggtgtgttcttgtggggatttctgacctgtttcagttcagtggtgatatgataataaaggagtactga

SEQ ID NO: 15578 - DNA, 174 bp, Zea mays
  Peptide Sequence Number=SeqID_58953
atggggccctctgcccagtctctctcacccgcgctcgctcctccctccctctctctggtccgcggggtccgcatgtcgggctcgtcttcaacagctcgccgcaacaaacgcgcgcggactccgaagctcgccggtaatctcggcgtccgtgcaacgatcgtgggtgcgctccgg

SEQ ID NO: 15579 - DNA, 120 bp, Zea mays
  Peptide Sequence Number=SeqID_58954
atggacgagtctggtatgaaaaaggagatcggtaattgtatcacatttgagtcccagaggatctggggcgcttcaggtggtatcaaagctgttaggttggccgcaggacgtaacccttag

SEQ ID NO: 15580 - DNA, 987 bp, Zea mays
  Peptide Sequence Number=SeqID_58955
atggtggtccgctgccaaaccagcttttgccagaatgaagagggtttccccaagttgctgagagcatgcgcagtccgcctcggaatcaggagccaaccagagtatgatggtcgtgaattcgtcgagcatggcacagagaagtgtgtcgtgactgtatacattggatccagtctgcaccatgtggaatggagtgtcactgctgctgggcacagattcaaagacacctgccaagtcgtcgctcgtaaggcattgagggccctgtgtcagatttatgaagaagaagtggctgacacaccgctcagattctttccaccctttcagagagaccatcccgtttggatggccatgatgcgtgcattggaagatgcacagtatgatttcttggctcggcaccaccgtcagatgattgcccgagcagaagatgcagagaagctcaaccgtaagctccatgtggatctcacctcagctcaagcccatgtaactgccttggaaagtcgtgaagccattgctgttgaagccctgaagcaagccaaggatgagcacgtccagaagttgatggaggcctacttgcccacttcatccaaccctgttcaacccatcagagctgaagacccccagattcttgaaggtcgcccagtctctatcagaggagagaagaaggcttgggaactcccggaaggagccatagtcttggaaagaattccagtcttccctcaggctatggataagcaagagcaccctgaatcctcccaagatcccccatcggagttgtttgagccccttaccatgaagaagattccagcaccatcccttgaagtcaaggaagaagctgcaagcaccccgccagcaccgccgccctctgaggaactacaagagccagtccagcttgaagaagagttcgaccccgtgctaccatctcagtctccgccagaagaagtcatcaacatcagctccctcttgacccatccaggagatgtctcagattga

SEQ ID NO: 15581 - DNA, 564 bp, Zea mays
  Peptide Sequence Number=SeqID_58956
atggccttggccggcccatttgcaccccacgcttgcacactcctgccctgggcgtgggtctctgccaggtgggcccgtccagtcggcacccgggtcgtcttccccaacggcctccgtggatgtcgctcgcgcggacccggtatcaacagaaacgccgcggattcgtcgctcgcaagcgcattgatctccacccggatttctctcaaccgtagcaacagctcggcctcgtttcccctcgcgccctacataaaatcctggccgctgccccctgactgtttcaccagggccaccattgtcgaaccgtggagcgctgagaggaataggaagccgccgcgacctagctcatgtatcaccgttgctggggactctctaatggttcagggggtttcgctcggtccctgggaacgtcttcatagcttcgcggggagtggggggaaacctggtgatcgcgaattgctcgatggagcaactccgccgccgcagatctgcctcgtcgtggccagcctagctgctgcacctatcaccgctccgttcaatttgacagtggtgctcggggaaggctga

SEQ ID NO: 15582 - DNA, 339 bp, Zea mays
  Peptide Sequence Number=SeqID_58957
atgcaggaatcccttgcaggaccgccatcgcagcaaaatcctcccgagggcctccctacactgaccactcccctactgcccttgcccctttcgggtaacacaggggtctcggggcaaaaatctctaagacacaaagccaaccgcgctggaccgcgggttgattcactaaaaggacgagggctcatatgcaacattgacggccgaaagggtatcttcgtctgtggaccgttggatcacgatcgagcggatcagattatattcaaccctatcgaaccgacccgcgataacgttccttcgatcacggatctacggtcagggttcagtgaagacatgatttaa

SEQ ID NO: 15583 - DNA, 795 bp, Zea mays
  Peptide Sequence Number=SeqID_58958
atgttgctgggccgaatgcagtccagcccatcttgtccctgcccaccctccttctgcggctgggccaaaatagccttggccggcccatttgcaccccacgcttgcacactcctgccctgggcgtgggtctctgccaggtgggcccgtccagtcggcacccgggtcgtcttccccaacgacctccgtggatgtcgctcgcgcggacccggtatcaacagaaacgccgcggattcgtcgctcgcaagcgcattgatctccacccggatttctctcaaccgtagcaacaactcggcctcgtttcccctcgcgccctacataaaatcctggccgctgccccctgactgtttcaccagggccaccattgtcgaaccgtggagcgctgagaggaataggaagccgccgcgacctagctcatgtatcaccgttgctggggactctctaatggttcagggggtttcgctcggtccctgggaacgtcttcatagcttcgcggggagtggggggaaacctggtgatcgcgaattgctcgatggagcaactccgccgccgcagatctgcctcgtcgtggctagcctggctgctgcacctatcaccggtaaggagtcattaattatggtcaccatgttgcgcacatcgtgtagctccgttcaatttgacagtggtgctcggggaaggctgatgggtgtcttgccgcgtcctccaccgcgtgggcatggtggcggcgccgcggcttgggtcgtctgggaggaagaagagtccctggccgtgtgtcttattttgaacggctacgattaa

SEQ ID NO: 15584 - DNA, 258 bp, Zea mays
  Peptide Sequence Number=SeqID_58959
atggacgagtctgaaaaaggagatcggcctcctgggactagtaattgtatcgcatttgagtcccagaggatctggggcgcttcaagctttgagcgagaggatgttacacttcatgctagccagattcaccagctatttggtacttctgatcctcctcggcgccctcacggcggagttgctcctgctacagctcacgtcgcgaccctgttccgaccgcccttctcagatgggtcgcgacgctctccagcagatttctga

SEQ ID NO: 15585 - DNA, 576 bp, Zea mays
  Peptide Sequence Number=SeqID_58960
atggccaaaggatccatcttctaccctgatgcagacccgagcggcgcgttcccagggacggcggcgcggtgctccggcgagcagtgccatccccgccaaaggctcccaagttcggagcgcggcttcgcccaagcaagtccacggtcgaatcacgcgcagaatggtggcgccaaaatctctgtttctggcagccgagatgatgagaggatgaggcggccaaggggttttatactagggcaaggaggtcgtactactctgctagcactgccagcaccatcggtagcttgtctccaccgcaacctcagatccctcgccgttgttgacgtgcatcctcctgtgcagcctcctgtggagccttcttcacaccaccatgatgcttccatgatagcagttggaccttcgacagctggacagagctccttgtgttcaacacgagatatgtttgctgatgacgatgacgacaatgctgaggacgacgatcctgaggatgaaagggacgatgacgtcgtgtccgcacatcacgacatgattggaccgtcgcagctacaggatgctcccttgactcagttgtcatag

SEQ ID NO: 15586 - DNA, 426 bp, Zea mays
  Peptide Sequence Number=SeqID_58961
atgcctcacattcttcagcataccggtgttcagattccccctgttcagtcagcaccccctccagctcttcaggtagcaattgtgccagccattcaggcaggaccccctcttcctttagttggtccttctacctctctgatccggccggtcaccctggacttctcgtcgccagtcatcagtttcgtcagtgctcagccgccagtgccaccagctcttgctgttaccactgctgatgtggcggtgtctgtgacctcttcagctctggcagctcctgcagcgcaacctcagtccgagtcagtaccagctccagcttctaaggcagatcctggatctgagactgactccgaccctcaactggcatttgctcttctgccacgactacgaccggatgcgcccccgcctcctccttcctcctctactctgtag

SEQ ID NO: 15587 - DNA, 180 bp, Zea mays
  Peptide Sequence Number=SeqID_58962
atgacctacgacgccgatgttgttgatgcgctggactctcatttgtttgagctcggcgccatgatttatggcaccgagctcggccacgtagacgtcggcttagcaaaaggaggccagcgcaataggtacctcggcaccttggcctatgacgccgagcgaagggtccaaaaacgatattaa

SEQ ID NO: 15588 - DNA, 423 bp, Zea mays
  Peptide Sequence Number=SeqID_58963
atggccgcgcgccggcgtgccgagacgcgccgcgccgggccgcgctgggcagggggcagggcggggaagcatgccgggcgagggacggagcgggcgcgcccgcgccatgaccggccggccgaggccgaggtgcggggaaggaggagggagggagagggaagggagaccaggggctcacctaggcagacggcgggcggcggcgtcgggcgagccggggtcgggcaggggagcggcgtgagggagaggagggatccggctaacccccttaacaggagcgttgatacacacttggtgaagatgctgccgactctgatcttgactgatttggaggagttgaaggttgccaaatggataggtgggagaggaaagaatagcgagaaaggggaaaacttctctaaggccatcgaaaggcaaggggaatga

SEQ ID NO: 15589 - DNA, 2076 bp, Zea mays
  Peptide Sequence Number=SeqID_58964
atgccgagcccgacgatccggaggctagacgtggcatcgccggtgccggcggacatcgacatcgccaactccgtcgagccgctcccaatcgccgacatcgcagcagagctcgggctccggcccgagcactacgacctctacggcaagtacaaggccaaggtcttgctgtcggttcttgatgagctcaaggcgcaacaggacgggtactacgtcgtggtgggcggcatcacgccaacgcccctcggggaggggaagtcaaccaccaccgtcgggctgtgtcaggctctcggcgctttccttgataaaaaggatatagcattcagtaaggttgattgttatgtaaatggtgtgatttcgttgagtatgcattgtcgaaacaactggaacaatctattcttcttgagctggataggatttagttactctttgaaatttatcaaggaaatatggcatcaagttgtatcaagatcaatacaggttgtcacttgcctccgtcaaccatcacaagggcctacctttggaatcaagggaggtgcagctggaggtgggtacagccaagttatacccatggatgagttcaatcttcatctgacaggcgatatccatgcaattacggccgcaaacaatcttcttgctgctgctattgatacgaggatattccatgaaaattctcagtcagataaagcactgttcaacagattgtgtccggcaaacaaggaaggcaagaggcactttgctgacataatgttccgacgtctgacaaagttgggcgtttcaaagacagaccccaatgagcttacaccagatgaaatcaggcgttttgcaaggcttgatatcgaccctgagtccattacatggagacgggtgatggatgtcaatgatcgtttcctgagaaaaattactgttggacagggccctgaagaaaaaggtatggtgagagaaacaggctttgacatatcagtagctagtgagataatggctgtattagctcttacaacttcccttgctgacatgagagaaaggcttggaagaatggtgatagggaacagcaagtcaggtgagccgataactgctgatgatcttggtgttggaggtgcattgactgtcttaatgaaagatgctattcatcccaccctcatgcaaactcttgaaggcacaccagttttagtacatgctggaccatttgctaacattgctcatggaaactcttcaattgttgctgataagattgctttgaagttggttgggaagggtggctttgttgttactgaggcaggttttggtgctgatattggaactgagaagttcatggacatcaaatgtaggtatagtggattggtgccgcagtgtgctattatcgtggccacaattagagctcttaaaatgcatggaggggggcctgaagtggtggctggaaagcctctggatcatgcatatgtgagcgaaaatgtggcccttgttgaagctggatgtattaatcttgctaaacatatatcaaacacgaggagttatggagttaatgttgtagttgcaatcaacaaatttgcatcagatactgaggcagaaatgaaggcagtgcacagtgcagctatggctgctggtgcttttgacgctgttgtctgcacacaccatgcccatggtggtaaaggagcggttgagcttggacttgctgttcaacgagcatgcgaaagccaggcagaacctctgaagtttttgtatcccttggaatctagcataaaggagaagattgagtcaattgctaagttctatggtgctagtggcgttgaatattccgagcaggctgagaagcagattgagatgtacaccaagcaagggttctccagcctccccatttgcatggcgaagacccagtactcgttctcacatgtcccgtccatgaagggcgccccgaccggctttgttctgccgataagagacgtgagggccagcatcggcgctgggttcatctacccgctcgtgggcaccatgagcacgatgcctggccttcccaccagaccctgcttctaccagatcgacgtcgacactgccaccgggaaggtcatggggctgtcatga

SEQ ID NO: 15590 - DNA, 96 bp, Zea mays
  Peptide Sequence Number=SeqID_58965
atgaaggcaaggcgactctctagggacaagtacgcctccaaccatcctgctgacaagatcgacaagaccctcattttcaagacaaggatggcatga

SEQ ID NO: 15591 - DNA, 444 bp, Zea mays
  Peptide Sequence Number=SeqID_58966
atggcggccacggcgcctgcgctcggccccggccatggcggtgtcccgacgcggcccggcctcgccccgcccggcgcgctcccctccccacgccccggcggcgctcggtcccggcgtggccagccggcgcggcggcccggcgtggcttgcctgcgcggcggccagcgcggccccggcatggctcacggcgccctcgcgcgaccagcgcggctcgagcagcctcggcacagccactcgcaccattgcgcgtcgtgcaggactggttcgtgccgtgctcgcggttatgagcggccaagggagctccagagattagtgatacttgatcagagacattgtggtacaggtggcaatgagattgatggttctggttatgattatggtcttggagaagatgaagctgtggaaggagacttccaggagttccaagattacgacgagttctag

SEQ ID NO: 15592 - DNA, 189 bp, Zea mays
  Peptide Sequence Number=SeqID_58967
atgggcgtcgtgatttcactaatctgcgcgtacgaactgcggagaccaacagcgttccttcgacagttaaatggtgacaccacccatttcatcatcatcagggtaacttcggatttcaaggcctatattgacgccaagatagatagcaagccagatccacctccgttcgcgtcgccggagatagagtag

SEQ ID NO: 15593 - DNA, 486 bp, Zea mays
  Peptide Sequence Number=SeqID_58968
atgaagctaaaaataaagagaaggaacaaacctgttcctgggccgaattcacaccgtcagcctagtcttccatgcccgctcggcccatttaaccaccctctggttcgtgccctccgcctggtgggacccacgagccagtgtgccaaacgtcataggcatgaatccgggtatatggcatgtgggagctgctttgtcaggcgtgttcctagccttgcacggactcacttcttgtcgccgactagcgtcccccatcctgtcaagtttgcccctattgaatttgttggggccgtgcgcaaatcccgggcggaatcggtcctcgccggcgacgcaattttggcggagacttcggtcgctggctacaaatacggatgtccaaattccctctgttatgagccacaccttggatttagctcaagtacacggatttcccggtgccaggagttctgcgaggaaggaggacggggagaaactaatcgccgacgctga

SEQ ID NO: 15594 - DNA, 141 bp, Zea mays
  Peptide Sequence Number=SeqID_58969
atggccgtgatgggttcaacatcggaaaagatgtacctctgccaggtgaggaagcagcaaatttttgttgcttttgttccaaggtggtgcctaaagaagaaaaccaggattgaagctttgggaggaagtgtcctcctttaa

SEQ ID NO: 15595 - DNA, 141 bp, Zea mays
  Peptide Sequence Number=SeqID_58970
atggccgtgatgggttcaacatcggaaaagatgtacctctgccaggtgaggaagcagcaattttttgttgcttttgttccaaggtggtgcctaaagaagaaaaccaggattgaagcttcgggaggaagtgtcctcctttaa

SEQ ID NO: 15596 - DNA, 573 bp, Zea mays
  Peptide Sequence Number=SeqID_58971
atgacgcaactaaatctaattggaccagtgctacacgatatggtgatgaaaacgggcacagacgatgaatacataccacgaatcgtggacgcagaagagctgcccacggcgaagtgcaggcgcatggcggagcttttcctccgacgaccaattcacgccacttcgccctcaaaacttgcgtggcgagactacggatatcatcagggtgttgaggcgaagctccctcaatggctcaggtcagcccgacgacggcagtcgcgtgcttcagccacgacaggttctgcggctgcggcggcactcggtccctctccgttcgttgtggtcaacgtttcccgcgagaagataggttcggaggcagacacgtcgaggtctttatacctaggccgaggggcaaatctctacctaaacccccggtcaaagcggcggctgttgcaatggcgcgctcgccatgcgcgcggagaggaacgagctggtcgagctgacagccacggcccaccgcgcagcggcgtagaagggaagcgcggccccgggtccacgcgccagcgagttgtgaaggaagcgaacgcgaaataa

SEQ ID NO: 15597 - DNA, 413 bp, Zea mays
  Peptide Sequence Number=SeqID_58972
atgcgcatccgcttttgctcccgcgccactgtcaggagggcccgcctcgtcaaccgcgcacctcaagtcacgtaccgcactactgtgctgacctgtagggcccaactcgccagccagtactccaccttcggcttccttatcgccctgtacctcggaggtagctgcacgctgagactaatttacccgaagccgcatgagagagaggagagcatcgccgccgcgtcgagcatgtggcaaccggtgtctgggtcgcagggcagaggggcgttggtgtccgctggtgccaagggtcatccgcgtgcaagcagctggtcgcacgcgtcctcgaatttccggaggttcttcgccgaagcaccctgcgcgcctgcttcgcggtccgacgtggtcggcctatttgggcacccaattgaccg

SEQ ID NO: 15598 - DNA, 195 bp, Zea mays
  Peptide Sequence Number=SeqID_58973
atggcctcatatggccgaatcttcgggcggcgaggaaggaatttctcgtcggcacatcactggtcaccacagagccaccgtgcgccatgggcagagttctatgctgcgcgattcacgggtcgtgccaccgtgagtgtggtcttgggaggaagacagagtctagagtttggtttcgagatgagcggcgaagattaa

SEQ ID NO: 15599 - DNA, 339 bp, Zea mays
  Peptide Sequence Number=SeqID_58974
atggagtcccaggtagcggtgaccgcgtggatcagcgccgatgatttgtttatctccctcctccttcctcacagaactcctggcaccgggaaatccatcaaccgaagtctccgccaaaattgcgtcgccggcgaggaccttttctgcccaggatttgcgcacgacccaactgattcgataggggcgaacctgacaggatggggcccgctagtcgacgaccagaaccaagactctgcgcagtctgggtgcaccggactgtccggtggtgcaccggacagtgtccggtgcgccaggctggctctggcgaactggctactctcgggtttcatcggcggctga

SEQ ID NO: 15600 - DNA, 312 bp, Zea mays
  Peptide Sequence Number=SeqID_58975
atggcgatttggagacgtagcctggcgaggaggtcccacaactcagtgaccacgagggaaatcaggtgtgagacactggagagcgggacccgcggggcgtccataccgaccggtggtgcacgttctgcctcccacgcccgcagccgcccccgcgatccccttcacctcccagatctcatgctctccgttcacctcctagatccagatgtcggccctgcctcctccccggcctgctccccgcgatgcccgctccgactcccagatgctggccccgcctcctccccggcctgctccccgcgattaagactctag

SEQ ID NO: 15601 - DNA, 738 bp, Zea mays
  Peptide Sequence Number=SeqID_58976
atggcgcagaacctcgacggcctcaagctcgataacgtcgaaggagttgaagaggatggcttcggcggcttcgcggtagcgcacgacgaggtgctgtatcaccacgtactttggtcgaaccggtcctggagcggcgagacaatgtcgggccctaggatgggcacacagccggaaactaaggggagaattggtgtaaggaacaaaatggaagtagtgcagcaggatgatgaagcattagttaaacttgagaacacaggtattgaacgctcaaaagctgttgattctgcagttctgggaaaatatagcatctggagacgtgaaaatgaaaatgagaaggcagattcaagggtgttggttattggagggggtgacggtggtgttctacgtgaggtttcacggcattcctctgtggaacaaattgacatctgtgaaattgacaagatggtggtagatgtcttgagcatgagtagggtaggagctccacgagcagttcttccccttctcacagaatcgccttcgctgagctttgccaacatgagcagtttatattcgcttccccgcaccctccacttccttgtcgtcgtgctgattccagatcatggggtagtgatccagaaggtggctatggtttttgtaagtacgaggctcaagatcttgttcaaggaaggtggctatgatacttttgatcctctgttccttaacttgattgcatctatgcaagcgctacaaccagattga

SEQ ID NO: 15602 - DNA, 1053 bp, Zea mays
  Peptide Sequence Number=SeqID_58977
atgcaggcggcatgcaaccgtgccaagtgggtgcacctctccgacttccagcgcgcccagcatggaagcccaggcccatgcgtcatgcaatcggcggacaggagcggcggtcacgtcgtcagccaagcttacgtcccatccgggggcagcgagagaaccctctctcacggcgtgaagaagacgcgcccgtgttccgttcctcgaacggctcgcgcacgtgcaacggctgccccgcgaaccgcatgcctcgttgcattaactccacggcgggacaggcggcgcctctggcaagagaagcaagcgacgcttcgccttcgccataatgaccgcgtcaaaaaaggaaccaggctccgagcctccctactgatcagaggttcgaaggctggcccctcgaagggttcaacaaccgcctcagagcgcgtgggctccacacccactactggtcagaggttcgaaggtcagcccctcggaagggttcaacgaccgcctcaggctactcgggctctgtgcccactactgatcaggggttcgaaggctggccctcgaagggttcacagccgcctcagacacagagcgagggatgaccatgggtacgttcgatacataaccaaggctcgggttgcgctcccgaggggctcgggggctgctctcgcaaacccggctccggccaaaccgttgacagcgtcaacataccagcccgagaacttgggacccgaccggatcggtccattcgagggactcgatcacgcctcgcccgagcctagcctcgggcaagggcagccgaccccggaggatctccgcctcgcccgaggtccccctccagcgacgaacatacttccggctcgcccgaggccctatcttcgccaagaagcagtcaggcccggcctcaggcaccataggaagctccgctccgcccgacccagggctcggactcgggctaagccctggaagatggcgaactccgctccgcccgacccagggctcggactcgggctaagccccggaagacggcgaactccgctccgcctgacccagggctcggactcgggctaa

SEQ ID NO: 15603 - DNA, 246 bp, Zea mays
  Peptide Sequence Number=SeqID_58978
atgaggaggactcggacggcagcaaaggacgaggatgacgacgacgacgacggtggcgacggcgacggtgacggcagcggcagcggcgggggcagcagcggcggcgacgtgagcaagggcagcaccagatgcggcagcagcaagggcagcaccaggggcggcagcagcaagggcagcaccaagggcggcagcagcaagggcagctccaagggcggcggcggcagcaggggcagggccagtggctag

SEQ ID NO: 15604 - DNA, 219 bp, Zea mays
  Peptide Sequence Number=SeqID_58979
atggcggagctaaccgaagcgctggcgcgacttggacgcgactggagagagctggccacggcggccgaggctctgaaagcttggcgggcggtggcgcggcgtgctcggggcaatttccgggcgtgttcaagggaatttggcacaactttgatatttggatctcctggttttgagtttcgaaaaacagagaacgcagttgatccttggaaagaggtctga

SEQ ID NO: 15605 - DNA, 276 bp, Zea mays
  Peptide Sequence Number=SeqID_58980
atggcaaacttcagaatgattgctcttgcgcaaaattgtaatctcgccgacggagagtacgtgctcatccccgagcaaggaactgtccaagaggaggaccaggagcaagctcccgaggctgctatcgaggatctccctgcagccccagctattgaaggcaagccccgctatggtgggtacaagtgcggtcactgcacggcggcagccggggtcagtggagcattgtatgccaaggcgctaatgagactgcttgaccccttgtcctacatcgagtaa

SEQ ID NO: 15606 - DNA, 108 bp, Zea mays
  Peptide Sequence Number=SeqID_58981
atggcgggcggaattgagctcgccggagctaaaggaaagtggctggccggtgagggttcacataaaatgatggttcttggtttggcatttgagaaaaaccctgagtga

SEQ ID NO: 15607 - DNA, 396 bp, Zea mays
  Peptide Sequence Number=SeqID_58982
atggagaagcagaagtccctgaagtcctggctgtcaaactttttgccattatcgacgctggctctcaataagtgtgaaatcctggcttcggtgtttgaggcgcttggcctcgttgacatcacttggatgggtgaaacccttgaattgtttctcaagactgcgaacggccgtaagatactgcataagtgcggggtcttttgccgaatagtctttctcgacttggccgacaacgactttggagtctgtcttgattatgcaggtgttcacgtcgagtgctttcagcttgcgaaggcccaggataacggcttcgtactctgctatgttgtttgtgcacctgtcgggttccagagcgaagctgaggcgtgctgcgtatctgtgcttgacgctggtgggtga

SEQ ID NO: 15608 - DNA, 1020 bp, Zea mays
  Peptide Sequence Number=SeqID_58983
atgtcgtccacatacgtgaaaatgttccggcctacttgggctctcgagcaccgtcttggtgaggagagagaaggtggaccccagcattctttagtccctccgggcattctgatgaagcaatacgtgccaaaggggcgggatgaaactggtactggccttgtcttcctccttcatgtatatttggtggtagccggagaaacagtcaaggagcgacatgactttgcatccggctgcgctatcgactatcttgtcgatccgtggcagcggggaattatccttggggcaggctttattgaggcttgtgaaatcgatgcacatccgccacttgccgcttttcttttgcaccatgactacgttagcgagccatgtagggtaggcgactggttcgatgaggccaatttcatcagacattttgcgcagcctctgcttcttcggccgcaccgaagggtcgatgcccagactgtgttcgatgatagtgcgactaactccgaccaggtcgagggcagactaggcgaagacgtccttgtttctagaaagacaagagatgagtttatcctcatcttgcgaagtcaggtcttcgcttatgatgaccgtttgcctgggcgttgccaggtcaagggggaccgtctttgttttgtcgttgctctgcagctgtgccttttcaagctcgttggcggttgggtgggtagcctcggggacctcgcgctgcgtcttgccatagaatgtgatcgcgccttgcggacccaggattttcatgcacaggtcccaacctgccacactgcagttgattaccatggcgtcaatgtggggtgcactgcgcaggtcgacatctctggcgtcgaaggtcagcggcacatgggaccacttcgtttgcacgactgggccggtgacggcgacgtggttgatgcttcagtagtggtccctcttctgtcgctttgtgttgaagtcgacgctggaccccccagtgatcatgtgaatgactccgcgatacggctgatcagagaagtcttcctgttttag

SEQ ID NO: 15609 - DNA, 258 bp, Zea mays
  Peptide Sequence Number=SeqID_58984
atgaggagtccaagtctgagatattggacaactaaggctcgtagcatggcagcagtcggcatatgctatgaagttgttggtggtgttgtgtcgcttcggcgggtccagggctgggaacattcgcattctctcgcccttctcggactgatgcctggtgcagatgcccaggtcttcatcgtgtccttctccggcaatgaacaggaagccccgaccacccgcccggttgaccaggcgcaccatccggtccacccactataa

SEQ ID NO: 15610 - DNA, 1398 bp, Zea mays
  Peptide Sequence Number=SeqID_58985
atgccggaggctgagaacgcacggccaacgcggtggtggctggcagcgaagcccaaggcgtcggacccgctcgcccgtagccttgactgcagcctcgaccgcacggactccatcctcaccaccgtccacctcctcctccactctatggccttcgactccacgacatctctctcgctatctgacccagccgctgcagccgctccagacctgtacatgtcctctgacaccgacatcgtctcttctggtagcaactcgggtgccagtgatccgccgcgccgggtcatcagcgtgtcggcaaggttctgccaaaaaaccaacagccgcctgcgccggattctagagcccagactaccactactgttgtctagcagaaggtcgttttcagacagcccaatgtcacccaggctgccaggtcggtccccatctccatgtcgtgaaagcaggggcggcgatagtccatcgagagggcgcagttgggaggcatcgccaaatgggcatatggtgcaggctctagcaaacgcgccatctatcatcaattttgcagcagagtggcgatgcatcaatgctcagacggatgcgacgcttctggtgcagagcttcactgctgagggactgattgtggcctcacgtgaagagactctccagtcatttaagaagcgatatgcacatgagcatgaacctgtcaaagatcttttaggtgctgttaaggctatcagaccaactgcactgataggatcagctggtgtaggtcaaagtttcactaaagaggtgattgaggctatgtcttcgattaatgagttatacgatcaagtgactggtgatgtgatttgccatggtgagaaaacttcttacaagatgggcgcaagagctatcctagtggccattcgcgtccccgcgctccgacggggagcactgcgcgtgcggtgggtcacggctgcgctgttctcatcggggattctcgccggcaacaagccgattctggtgcgtgacttcgtgaggtcagcgttgtacgaccccaaccatggctacttctccaagcgggcgggaccggtgggcgttcttgacgccagcatccgcttcaaccagctcgagggtgccatggtatgcctacacaatagcagcatcgattctgcgtacagcaaatctttcagtcccattgaagtagagattagctcctctcttgctgagaagcaattggaaactgttggtgaagtgcaaagccatttgtcaaagttcacggtggagcaccgggatgcaattaacagacctggatggggccgcacggatcctcatccatgttgggtgcttatgcttgagaacctttgctgtgcactaccacagttgaagatcatctatgtttgctctcgtgttctttgttcatgtgggggtttcagctga

SEQ ID NO: 15611 - DNA, 432 bp, Zea mays
  Peptide Sequence Number=SeqID_58986
atgacttgtggatgtcagattacaaggggggagagagaactcaagagccccaaaggttctttcatcggtggtcttgctcgcatacttgtccaacggaaacttggaggaggtagaagagtaggcatggttttgacgtgttctattccagttggcatggaggcgctcgcgttggcgtcgctcatcaacgacgagaagcttggcgactgccagttcgacctctggaagcagtcctacgtggccgcatacgccgctatgtacgacaagctccggcgcagccgccgcttagacgcggtccagagcggctgcaccacgctgtccattgtcaagcagggggacctcatggtcgtcgccaatgtagatgactctcgggttgttctaggcaccgcatccgacgacggcgccatcaatccgtccagctcatcatccacctga

SEQ ID NO: 15612 - DNA, 1023 bp, Zea mays
  Peptide Sequence Number=SeqID_58987
atgcaggcggcatgcaaccacaccaagggggcgtaccctttcggcttcgacgcgtccagcatggaggcccaggcccacacgtcatccgcgggagaaggcgtgacggtcgatatggccaaaagtgggccagcagtaatggcggcggcaggcgggcggaagcagtggtcaagtcgtctgcaagctcatgtcccctccggggacagcgagagagccctctcccacggcgtgaagacgacgcgcccgtgttccgttcctcgaacggctcgcgcacgcagaacggctgccccgcgaaccactcgtcccgtcgcattaactctgcggcaggacaggcggcacctttggcaggcgaagcaggcgacgcttcacctcagccataatgaccgcgtcaaaaaaggtgcgccacgtcatccgatttcgtatccttttcctcttcctctttctctatcttgctacagggactgggaaaggggatactccgaaagggatccttctccgcgaaggaagcgggccccgagccccctactgatcagaggttcaaaggctggccccttggaagggttcgacagccgcctcagagcactcgggctccgagccctcctactgatcagaggttcgaaggctggccccttggaagggttcgacagccgcctcagagcactcgggctctgcgcccaccactggtcagaggttcgaaggctagcccctcggaggggttcgacagtcgcctcaggccactcgggctccgcgcccactactgatcaggggttcgtaggctggcccccgaagggttcgacagccgcctcagagcacgcagagcgagggatgactctgggtacgtctgatacatggccgaggcttgggctacgctcccgaggtaccctaggacatttccgagaccagcaggagcgattctgtaacgaaatcccatcagagggaggcatcgagccctcagaccctatcaaacgggaccgggtccggcaaatcacctgcatgtacttttggagcgcgcctctgggccactag

SEQ ID NO: 15613 - DNA, 216 bp, Zea mays
  Peptide Sequence Number=SeqID_58988
atggcgaccggttatacgttggttctgccaacattcaactctgcgccggtcaaaagcgccccgcctttcaccggtctagaggcgatcttgacgaagaagtggcactacgacgcggaggcacagttcaagagcaaggtggagcatctttttaaggcggctactacgctgaagcataaggggttcaacggtgctcgatttgtgtgcaccttcatgtag

SEQ ID NO: 15614 - DNA, 81 bp, Zea mays
  Peptide Sequence Number=SeqID_58989
atgcggccacgcgctgctgtgtgcctgtgtgccaatgatgattattccactagttcgagctccacgagcagcaacgtctaa

SEQ ID NO: 15615 - DNA, 1953 bp, Zea mays
  Peptide Sequence Number=SeqID_58990
atgcggtttgacctggatggcctgcccgtgcacttcccgtacgcggcgatctacccggagcagcacgcgtacatgggggagctcaagcgcgccctcgacgcgcgcgggcacgcgctgctcgagatgcccacgggcaccggcaagacggcggcgctcatctccctcatcacctcctactccctcgccaacccggcccgcccgctccgcctcatctattgcacccgcaccgtgcacgagatggagaagaccctcgccgagctccgcctcctcttcgcccacctcccgcccgcggcctcccgctccctcctcgcgctcggcctctcctcccgcaagaacctctgcatccacccgcaggcgtccgccgccgccgcccgggactccgtcgacaccgcctgccgccgccttacggcctcctgggtccgcgagaaggcctcctccgacccggactccaccccgctgtgcgagttctacgagacgttcgaccgggccgctgccgccggcgacctcgcctccttcatgccgcccggggtgtacaccctggcagacctccgcgcgctcggaagggagcgccgggtctgcccttacttccttgccaggcagatggtcaagtacgccaatgttgtggtgtacagctaccagtacctgctcgaccccaaggtggccagcattgtgtccagggagatgcagaaggagtgtgtggtcgtgttcgatgaggctcacaacattgacaatgtctgcatagaggcgctgagcgtcagcatccgcaagcagacgctggaaggcgcagagcgaaatctgcggcgcatctcgcaagagatcgacaggttcaaggccaccgatgccaataggcttcgtgctgaatacaacagactggtggatggactggcacagcgaggaaatctaccaatatcggatgcttggctcgcgaatccgtctttgcctgatgacatcttgaaggaagctgttcctggaaacataaggagggctgaacattttcttgctgtcttgcggaggcttgtgagattccttgatggccggcttgaaacagaaaatgttgagaatgaaatgccagtttcctttgttgcctcaatccattcccaggctggaatcgaccaaaaaatgctgaggttttgttatgaccggctacactccctaatgatgacattagagataactgatacagatgagttcatgcacatacagaccatatgtgactttgccacactgattggaacttatacacggggcttttctattataatagagccgtatgatgatagaatgcctgatattcgtgatcctgttattcagctacctgtgagtacaaagttcgatatgcgtagtgatcctggtgttgtgaggaattatggccgcctcttgctggaaatggcttctgctgttccagatggcatagacatcatgcaacataaattagtgtttatcgaaacaccagatgtcgttgagacaacattggctcttgataactacagaaaggcatgtgattgtggaagaggtgccattttcttctctgttgccaggggcaaagttgctgaaggtattgattttgatcggcactatggcagattagttatcatgtttggtgttcctttccagtacacattgagtcggatattgcttgctaggttggagtacctgcgggaaacttttcagataaaggagggtgacttcctaacatttgatgctttgaggcaagcggcccaatgtgtcggtcgtgttattcgctccaaagctgattatgggatgatgatatttgctgacaagagatacagtcggcatgataaacggtccaagttgcctgggtggatactctcgcatttgcatgatgcgcacctaaatctgagcactgatatggctctccatatagctcgtgaggagcgctatagtatcaggtttgtggcgttcacaacttacaacctgcatggaccactgtag

SEQ ID NO: 15616 - DNA, 120 bp, Zea mays
  Peptide Sequence Number=SeqID_58991
atgttcggattacaggtgacaatgagattgatggtttttgatattgactatggtaatggtaaagaaggcgtcgaggcggatctccaggagttccaggacgtcgacgagttcgaggattag

SEQ ID NO: 15617 - DNA, 1269 bp, Zea mays
  Peptide Sequence Number=SeqID_58992
gcgagcccaccgccaccgatctcagcgcccaacccgatccgacggctattccacttcctcctaccactatccaaaccgagcgacggcgccagcgcccgtgcgacgacaggccacgccgaagaactcggtgtcgcgcgcccgtgcactcggatggccaatgagaccggttctacgccaagggtcgatgaaagcgaacatgtaaaggaggttcttacaggagattgggaagtagacgggcgccacgatgagattgcacgacgcatccgccgcggacggagtttgagatggccgctagggaatccgacgcagcgaccgcccgaccaacgctccctagctggcggcgggggtcttcattcccgcgagcttggcccatggcacacggcggccagggagccctccgcgtccactgcgccggtacgcccatgcatggagctcaggaccgaacgacgacataggcttcccactcctgcttggacgatgccgaacataccgggtgccagtgccgtcatgcccgtggccggagagttcgcccggcacaagcagggacgtcggcgtacgtcggtattggataggaatgtcaagggagcaagggaaggagcagtaagcacgagcgggtcgtgggagggggattcagcgaggaggagcgggcgacgcttcgccttcgccgtaataaccgcgccaaaaaagggaccgggaaagggggataccccaaaaaggatccttccccgtgaaggaaccaggctccgagcctccttactgatcagaggttcgaaggctggccccccgaagggtttcaacagccgcctcagatcgcgtgggccctacacccactactggtcagaggttcgaaggccggccccccgaagggttccacggccgcctcaggctacccgggctccgcgcccattactgatcaggggttcgaaggctggcccccgaagggttcacagccgcctcagacaccgagcgagggatgaccaggggtacgttcgatacataaccaaggctcgggctgcgctcccgagccgacccctaacgaacggggcacggacgtccactcggattacccgcttgcagctcaccggagacaccatgttcggcgcccatcgaggaggctcgggggctgctctcgcaaacccggctccggctgaaccgttgacagcgtcaacataccagcccgagaacttgggccccgaccatacacccgggctacggtcagttcgcatgagggacccaccagaccagccgaagcattacgcaaggcattaa

SEQ ID NO: 15618 - DNA, 414 bp, Zea mays
  Peptide Sequence Number=SeqID_58993
atggcggctaggtcctggtcgctactatgtgcacccctcgccccctcgtcacctccacatattcaaggttgtgccgctaattgccagcctccatggtcggcactgagcccctcggtggagcacgacctaggcctccacaacgatgctgggagtttgggaccactcctatcacctcgactatccttggatgttgttgtgttcattgtgccattacagctggcatgcgtggggtttggggtcctggcgaaagccatgcgagatgtagtcagtgccgccaacagtggcgccctcagtgccgctgacctccttggaggcgtcgtcagggagccccttccccctttccccaaccctacatgcctcatcatggaggactcatgttgtgccggtgaatttgacgtcatcatattcttgtag

SEQ ID NO: 15619 - DNA, 801 bp, Zea mays
  Peptide Sequence Number=SeqID_58994
atggcggggcaggggcagcgcctgaacgtggtgccgacggtgacgacgctgggcacggtgaaggcgcggctggcgggcgccgcccgcggccacgcgctgctcaagaagaagtcggacgcgctgacggtgcagttccgcgccatcctcaggcgcatcgtgtccgccaaggacgccgtgggcgacgccatgcgcaccgcctcgctctcgctcgccgaggcgctgtacgcggccggcgcgccgctccgccacgccgcgcagcagtccgtgtccggcccggccaggctccgcgtgcgcgcgcaccaggataacatcgccggcgtccgcctcccgcgcttcgagagctgcctgggcgccgccgacggaagctcgtcgcccgcgtcgctcgccgggctcgccggcggcgggcagcaggtgtcggcctgccgcgcggcgcacgcgcgcgcgctccaggtgctggtggagctggcgccgctgcagacgtcgttcctcgcgctggacgcggccatcaagaccaccaaccggcgggtcaacgcgctggagagcgtggtgaagccgcgcctggagaacaccatcgcctacatcagaggcgagctggacgagcacgagcgggaggagttcttccgcctcaagaagatccaggggtacaagcagcgcgagctcgagcgccagaaggaggccgccagccgctacgccgaggagaaggccgccggcgaggtcgcgctcaagcgcggcgtttccgtcgccactgcggagagcatgctggagaacggcgacagggacgaggaggatatcatcttttga

SEQ ID NO: 15620 - DNA, 723 bp, Zea mays
  Peptide Sequence Number=SeqID_58995
atgtggagagcgttagagtgtggccccgcccgtcaggacgacatcgcgcgcggtgaagaatcttgggccgcgcgggtaaaaggggaggaagacgactgcatcgtgcgggtagaagaaacacagtgcaagtgggcccggttcaccagtgggagagttccgcgactaagacggacgcctaaggctgacggggtggtcccggttgtcggcgccaggtccaaaacttttcttacaaagtgggtgttacacatgggcaagagcaagaagggtggtagttcttcgcatcactccagtgataagcggaagcgtgagccgactcctccctcggaggacttcggcgactcggagtactcggaggaggagttctcctccgagtcagagggctcaccggtccatgcctctcccccggcgtcgtctgatgattcagacgactcccaggggatcgccgcagaggtgtggacctacatccgggccgtcgagcgcgtcgggcttgagggctcggatgagtcggagtactcctcggacgaggagaactcctcggactcgtccgaggagggcggcggcgacggcgacggcgatggcggtgacgacgacgacggaggcgatggtgacggcggcagtgacggagacgaaggcaacgacaagggcggtgacgacagcggcaagggtggcagcggcgatggcagcaagggcagcggtaggggcagcaacaaggccagtggctag

SEQ ID NO: 15621 - DNA, 507 bp, Zea mays
  Peptide Sequence Number=SeqID_58996
atggcctcccccggactcccaacgctgagggctatcggtggctgttcactcgggcagccaaccaccttctaccactcactcatccgccgagcgatctgcgacacgccatcaacagtcggcgggacgcacggagctccatcaacgcttcgcgcgaacgacgacacgagaacaagatccgtcgccgagaagagtatgacagggatcacggcatcccggcatggagtcaggccaccagaactgagtcggcaacggcttcgactggtggcaccacccggggacgatcaaggcgccacgacaaccactcccctccccgggacagacatcatcatcgacgataagaggacacatgtggagtatcggcacttactccgcgcctcagggccattcagtggccccctaacttcaaggtctccaacgttgacaaatatgaacccaagcaggatccgggaggctggctggctgtctacaccactgccgcctgagccactggggcaaccgaagatgtga

SEQ ID NO: 15622 - DNA, 720 bp, Zea mays
  Peptide Sequence Number=SeqID_58997
atgccgcccgccgcggcggcgctcctccggtgcgctccggcggtcccattcgcggcccgcagtagcgctgtttcccgctcaggcatggcgcggcgtctggtggcagcgagcgctgcggccggcaggctggcaccggcgtaccgcgggctgctgctcgacgccggtggcacgctgctgcaggttgcgcggccggtagccgagacgtatgcctccatcggccgacgttacggtgtgacgaagactaagaagagaatcatggaggggttcaagcgggcattctccgcgccatggccgaagacactcaggtaccagggagatgggcggccattctggagaattgtcgtggcagaagcgaccgactgcactgatggtgattatttcgaagaatattatgcgcatggagatgcttggcgattgcctactggagcagacgcagcactgcgtgagctgaaggatgctggagaccttgagctcttcaggtttgatgccattgtggtgtcatccgaggtcggatatgagaaaccttccccagagatcttcaatatagcattggatcaaattggcgtggaagccagcaaggcaatccatgttggagacgatgaaactgcagacatggcaggtgccaatgctacaggacttgagtgctggctgtggggtaaggatgtgacgacgttttcggaaatacaggagcggattctgacaacagatggtcctcaatga

SEQ ID NO: 15623 - DNA, 1023 bp, Zea mays
  Peptide Sequence Number=SeqID_58998
atgtcttctcgctcccttatgcatcgcgtctttccaccttccaagcccccggatgggggatacccgccgtcttttcgcctcatcgtgggaggaacgcaactccgtgggagttggtacctttcagccatcgttcggcttcaaggattttcatcaggcagcccggctgcacccctccaccggcggtcacccaagatggtgacctccagcttgatgatgggggaaagcgagccgggctgcggcctctgcccctccctcagcctcaaggattttcatcaccagggctggggaggggagtctgcaccgtgcccggctctcggacgcgagtggcttcggagccactcgcgggcaccggcgtctgccacggcagctggaagaggttcttccgtcggcgagatagccaaggctggccacggaccgacctccaactctacggccttctgcccgtccttgcctcacaagtttgggcatgggcgggggcctcctggcagcagcatctgccctgaggtcagtgctgtcgctgttcgcccccccccccccggagcagaagtcgtcgtcgtcgctgctgctggagcaggtgacggcgtgacgttcgtcggtcttctgttgctccgcaggccatcccccatggagtggggttactcgcctgttgattatctgaaccgcttcaccaagcatgagtcgccccgtgtcaaggtgacgagtgagccgggttgtccgttagcgggaccgacgccggagttgaccaaccgaggcctcgggtcgggctggcgcccttggaagatggttggccgaggccccagaggtgaccggccgagccgcctgctcgggctggattcccggagaagaccctggcggcgacgacccgggcgtggcgatgacgtcgtccttcggagtggagatcttcggaccgcgtcgccgttcgaggctaggtcgaacctcgccaaagtcgtcgtcaatgccgagggtgctgctgcccccttccagcgtcaagacccgagcctgcaggatcagattgtcttgtag

SEQ ID NO: 15624 - DNA, 985 bp, Zea mays
  Peptide Sequence Number=SeqID_58999
ccatggccgaactcgtcccgacgaggtcctctccaaatcgccgtctggcgcgatgcgcagcccgcctcccctgctgagcgccacacccagccccttcctccatggcttcctcgtgcgcgcgcatagcccaggtgcggccagcggccgagcaacccgcccctactggcgtccctccctgcgcggccggccagcaggccacatcgcgtccgtgtccgcaagttcgtcgcacccacgcctcgccgaccagcagttgctcgggtgctcatcaatgtcgcgccacgaccccgtcgagcgcctccacccatgctccatccttgtcaacgtcgttcgccagagcagcgtctcgccgtgggatacgtcgtcgcactattatcgtcgctgcgcagcagggtctacatcgctcccatcatcgccgagcctgctcctcccctggccggcccacgccgcgagcgcagcccagcccagcaccgcgcccctgcgtgccccaagccacgcgcgcgttccccagccgctgccccagcccagcgggcgcgtgcgcgtttgcccagcgccgccgctcgctcgcaagtcgcaactgcccccgcaacgctcgcaggacctagaaaaccgccaggccgacctcggaccctgctcacggcgcgcggctgtgctgcagccatggccgaactcgccccgacgaggtcctctccaaatcgccgtctggcgcgatgcgcagcccgcctcccctgccgagcgccacccccatccccttcatggcttcctcgtgcgcacgcatagcccaggtgcggccagcggccgggcaacccgcccctgctggcgtccctccctgcgcggccggccagcaggccacatcgcgttcgtgtccgcaagttcgtcgcacccacgcctcgccgaccagcagttgctcgggtgctcatcaacgtcgcgccacgaccccgtcgagcgcctccacccatgctccatccttgtcaacgtcattcgctag

SEQ ID NO: 15625 - DNA, 1230 bp, Zea mays
  Peptide Sequence Number=SeqID_59000
atggagaaggaccgtcaagacgctgcacagaagcgccgagcggtcatcaggatcgtggatcctatacgtgaggcgaagaaggcgcgggggagcgtgaaggctgctgcctctggcagtagcaaaccggtgccggctgcgaaaccggctgcccccaggcacaacaaggcgtcggcgagtgcgaaggctgccgcctctagcgggagcaagccacccccgggcgggcccctgaaaggacgagggctgccttcgccggcgcgacgtgttgtcgactttggcacggacatcagtgtcgatgattattttgttgtatcatggtgcagggtcggatgggggcacctggttgttgtcccgccttcggtggcgaccacttcgccaacggcggtggttggggcgaaaggtgccgcgcaggacccgtgggccactttctgcgcgagcggcgagattctgtctgccgctgccgctaatgaagtggcgggctccatgtctcagcgactgagggaagcgtcgcagcagctgaagcaagcggccgacttcgccgaccacgtcgcgttgggtgccctgactacggacgttggtgccgaggtcgagagtctccgggcacagcatgtgcatgctgtccgggagaagtcggctgcggagagcaaaagccacaggctggcggagaaggtggctgccatggaggccgagaagacggatctcccgcaccagctggcagaggagaggagggaggcgaacaaggccatcgctgatgcacaggctgcgcaagccgaggccaaattggagcgggcggagggcagtctcgcccgccagcgcgccgaggagctggaggcgaggctcaacgccctgcgcagccgcgtggacaaggccgaggcctcgacacgcgtggaggtcgagcggacgcacgcgcagtttgtggacgcgtaccgggagctgggtgcgcggactgctgccttcgaagtgcccggccaagaagcgggccttcgcttccttgaatggttgcaggaggagctgctggtgctccagaccattgtgacaggtttcatgtccttcgcctccctcgtcacctgcgagggggccgtgaatgctttgtcccgcgaggggtgcaggcattacgaggtcttcgaccaagcggacaaaaactttgaacgtgaaatcttcaaggtcgaagaccccgtgctgaagcagtcggcgggggctctctttgataggatgtggggttcgcaccgctga

SEQ ID NO: 15626 - DNA, 774 bp, Zea mays
  Peptide Sequence Number=SeqID_59001
atggcctcctccatttcactgctcgtcaccatcatgctgctgctgccgccgccgtcacctgcttgctcattgctgagttgcagacttgacttcaccagcctcgcgctgctctcctgccaggagacggcaccacaaaaccctactgcctcatgttgcgacgccctcctctattccatcgacatctggccaatttatgaactggaaaaaggactttgctgcctatgtgtgtacatggtttcaaggaacattacctttgacctgcctacgtcttacgtctcaagcgggggtaaagactcaagtaatgtgctgcagtggaatgctatcatccctcgccctacaggctgcaatgatccatgctcccggcagctagagaagaagggtacgtccccatcgccacctccagctcccggcaggcttggatctggtgtcatagctgccatcgcagtcgaagcatatgtggccattgcaggcttcctcagatggcttgatttcaccagtgtgacgctgctctcctgccaggagacggcaccacaaaaccctactgcctcatgctgcgacgcccttttctattgcatcgacatctggccaattcatgaactggaaaaaggtctttactgcctatgtgtgtacatggtttcaaagaacactagctttgacctacctacgtcttacgtctcatgtgagggtaaagacttaagtaatgtgctgcagtggaatgccatcatccctcgccgtacagactgctatgataagtatcggacattccttaattaa

SEQ ID NO: 15627 - DNA, 651 bp, Zea mays
  Peptide Sequence Number=SeqID_59002
atggcaccacaaaaccctactgcctcatgctgcgacgccctcctctattccatcgacatctggccaattcatgaactagaaaagggtccttattgcctatgtgtgtacatggtttcaaggaacactacctttgacctgcctacgtcttacgtctcatgcgggggtaaagactcaagtaatgtgctacagtggaatgccttcatccctcgcataacagactgcaatgtcctacagatcaatgctctcgacagctggagaagaagggcttcctcggatggtgtgtctactactcctggttttgcagtccatcggccaaagcgcgaggtaacatctagcagctccggaggacagccacaggaaccacccccaggctttgctccactagagggcgaggacgccacagaggacagcaaagtcatcagcgtttcagcagaagaacagctacagctgtgggccctgcgcatcaagaaccgcaacctccagaagcaaaaagagatcctcgaggccaagcgccaacgtgtctctgcgcaggccaaggttcgccagatgatacgagacgaggagcagagggctcaggaactcgagcaagagattgcgctcatgcagcgcgaaggccaacatgatctgcagcgtggcccgcccctccaatag

SEQ ID NO: 15628 - DNA, 174 bp, Zea mays
  Peptide Sequence Number=SeqID_59003
atgtcgttgtcgagttacccggcggcggcggccaactcgaatcccctgattctctctctcatcggtagcgctggtaaacagtcgtggcgatggaaagagaaagcggagccctcagggctaccctttatagtcgcagcaaggtggacaccaatttatcccttattttcctcttaa

SEQ ID NO: 15629 - DNA, 423 bp, Zea mays
  Peptide Sequence Number=SeqID_59004
atggcctcctcctccgtttcgctgctcgtcaccaccatgctgctgctgatgctgccgccgtcacctgcttgctcctcgctgagttgcaagcttgacttcaccagcatggcgctgctctcctaccaggagatggcaccacaaaaccctactgcctcatgttgcgacgccctcctctattccatcgacatctggccaattcatgaattatccatgctctcggcagcaagggaagaagggtgcgtccccacgccaccgccaccgccagctcctgtccagcgcccaaagcgcgaggtagcatccaacagtgctccacctcagctctcctgtgatgcgattccccttccctacagctacacctttctcaagcatgcaggaatgcaacagcagcatagtcagcaggcagagctactgctaggctggtag

SEQ ID NO: 15630 - DNA, 303 bp, Zea mays
  Peptide Sequence Number=SeqID_59005
atggccacacatgctatgaccgtgatggcggctatggcacctgatccgagcccgccgggagctggcggtggcggtggggacgcacccttcttctcgagctaccgggagcatggatctgtaggatctctaggtcaagggatgatggcatttcactgcagcacattacttgagtctttatccccggatgagacatttgtgtgtgttgctccccaaccttactcttgtgctttcattgtgatctttgttgtgagggcgagagactccaacttgtggagattcctcgcaaatgggaaaaagagataa

SEQ ID NO: 15631 - DNA, 1231 bp, Zea mays
  Peptide Sequence Number=SeqID_59006
atggaggtaggatgtgaggggtggggtggatgggagtggagtaacgaattagtggtgggggtagtgtggaaggaggccccggagtcaaccacccaatcggtggtggttcggggaggtggaagtggcgaaggtacggtcacgtgggaagacaagcggtccaggcacgtgacggcccgcctgagggtggacctcgacgcagtcccgaagaatagggttgcagactggatcaaaggacacgaacatggcgcggatgagctggccgtcgtggaggaggacacgcacaatcacaagagcggcgggacggcgcaacaggtcctgcggttgtcgagcccagtcctcaggtcggcgtcaaatgcgcaggggcagggcgctgttgtcgcgcggggtgaggcagctttgctggcaccagggcgcgacggacactcgacccctcgcgagggcgaacgagtaggggcactcggggagtcgctcggctccctggcggcgcggtcaaatcgccctgggcggcgacgacggctcgatctgcggcgtgttggctggtgtcggcgcaagaagctgggccggcgacctggatacaccgagcagcgcctggatgcgcgcgggcctcacaagggtcgcagcgccgcagccctgctcctcccgaccttgtggaggagcgccttgacctggccgcgcaggagcgcctccccggaggcgggcgtgcgacgcggggccctgcggcgggtcttagcgcgggagaagagggcggcggtgtccggcccggcggcggcgctcttctgggaagatgcggcggctgctgaatcagtagcaactcatgatggtatcttcggaacagagtataatataaggattgaccgaggagccgtcatctttcgtgagctgcaccctgaccctccccacctggaagaaatcccgagggtggggtttggacaggccttggcagcggcggccctcggcgaccgtcttcttggagttgagttcgtgagaggtcggccttcctttcccttcactagtgacctccttgcgccgagggtggttctcgcacctccgccgctgaagttctctgcggccgttgatgcagcctgtgacaccgtgagtgcttctgctgccgcctgtgtggtagctggtgatctctatgccacatcatcagtaggagacattggccaaatactatcaggtttgtattctgaaacttttactgagccaatgcttcagatttttgtgccatatg

SEQ ID NO: 15632 - DNA, 1029 bp, Zea mays
  Peptide Sequence Number=SeqID_59007
atggatcgcccagtcgcgggagagggcgagagagaggacggcgcgaacagtggcgaacttgacgacggtgctgaaggtctcgtcgtagtccactccggggcgctgggtgaagccccgaaggacccaatgggccttgtagcggtcgagggagccgtccgagatggggcgccgggggtgggggggaaccgggtcggactcaaggagggagtcaagatcggtgggtggggtggagcctgcaaggggaaacacatcttcgtcgaagacaacgtgacgagagatgatgatgcggtgggaggtgaggtccaggcaccgataccccttttggtcaggggagtagccgaggaaaaggcagcgagtggagcgaggagaaagtttgttaggggcggtagcggaaatgttagggtagcaggcacaaccgaacacgcgcaggtggtcgtaggaaggggctgtgttgtacagggcaaagtgaggtgtagggtggctcaccgccttcgagggaagatggttgagaagatgcgtggcggtatgaagggcctctgcctagtaggtggcagggagagacgcctgaaagagaaagcagcagatcatgttggtggtggtgcgaatcatgcgctcggcccgaccattttgagcagaggtgtagggacacgagagacgcaactggacaccgtgagtgaggaagaaagagcgggaggcgttgttgtcgaactcgtggccattatcgcactacagggcacggaccgggcgccggaactgggtggatacccaggcgaagaagtgagtgagggtggtaaatgtgtcggacttcagccgaagggggaaagtccaaaggaaatgggagtagtcatccagaatgaccaggtagtatttgtagccggagaggctaaggacaggagatgtccagagatcacagtggacaagatcaaaggcatgaacagccctggacgtggaagtggaaaaaggaagacgggagtgacgaccgagctgacaagcatgacagaggtgctcagaagagccccgagtacatga

SEQ ID NO: 15633 - DNA, 435 bp, Zea mays
  Peptide Sequence Number=SeqID_59008
atggcgctgccgcaacgacgaagatgggagcggtcagccatggagtgggatgtgcagaggcggaggttgcaggaacatgaactggatgcaaaacagctagctcttgttgctgggctgtttggtagcacgcctaagccgccacctcgcgccacagttttgccgccgcagatgcctacagatgttggaaatttgaaaaggattgtgaaatcaaaatatccatatgtcagcaatctttggatgctcataaaaaatggtccacactgctccttggcacgggccgcggatgtgccatgccgcggtggcggaccctgggaagcaggagcaccggcggcggcggcgccgtggcaacagagcagacgtaggcaggcgtgggagacgttggccatggtgactgcgctcgccaaggtggttgccatgacggctccggccggctaa

SEQ ID NO: 15634 - DNA, 282 bp, Zea mays
  Peptide Sequence Number=SeqID_59009
atggcgaggattttttgtggaaatgagcaacaggcaaacactactcaagtcattggaacatatggttacatgtctcctgaatatgctatggaaggctcattctctgtcaagtctgacacctatagctttggtgttctactactggagattgtaagcggcttaaagattggctcaccccatctgataatggactatccaaacctcattgcttatttaagtacaaaggaattccggactattgaacagctcaaaaacacttttggtgacttgaccagaacttag

SEQ ID NO: 15635 - DNA, 837 bp, Zea mays
  Peptide Sequence Number=SeqID_59010
atggaaggctcattctctgttaagtctgacacctatgcttttggtgttctgctacttgagattgcatggagcttgtggaaagatggaaatgcattggaattggtcgactcatcaatttctgtgagttattcacttcaggaacttgtacgcggcaagccctacgggcaactctccgacgcgctccccttctctctcacgccagatgaaggggaggactgtgcactccgctacgcgctcttctcgcggaagccggcgcccgcgcgagacggcggaaagttccaggtccacttcgcttcctctggacggctctcgggaacgcgggcgagaaggggcgacgcggcggcggatctggcggcgcaaggccgattcggagccggaggagagttcatcggttcgaatcttgttgttgcgggccggatcttcagctctgcagcacatttgatcatggcatcctcgacagaagataacatgaaggctttgctgaaagtccttgtagactgtgccgaggatgccacaaaaacactgggtggtttagtagatcatgctttagaccacatgcatgatgaagagatcgtagctagaaccttgtatgccatcaaagataagctagaattgctgcaacaagatgccttagaggcaaaagtgcaagcatttccagaaattgttaagtacgatggcgatgacataagtgttgagcctacatctccgtcgacccctccaacagttactgaaccatctattgatgaagaggagttctactgccccgatgtgtctgatgagtggtacttcagcgactcagataggtcgactcgtaccagctactggaatatatattag

SEQ ID NO: 15636 - DNA, 282 bp, Zea mays
  Peptide Sequence Number=SeqID_59011
atggaggcgtcgctttccaaatcgccggagagtcgccaggagcggaggagccgaggagtcgcggagcgttcgagagagagcgaagctcgagcaggctgggcggtgcctccgccactgctgctgggcacgatctacatccacgctggctacagcgaggccggcgcgcacaagcggctgggtctctgcacgtcggcgactatatatccactcgtgtgccgctcccgtgtatacgtcttcaagctggactcaaggcctcaagctgttggtactcatgatctctaa

SEQ ID NO: 15637 - DNA, 2808 bp, Zea mays
  Peptide Sequence Number=SeqID_59012
atgtgctctcattattactcagcgtatccgccctttgaggtggcagaggaggatgcagacgaaggggcccttcgctgcgccgccggtcagagcagtgggcgtgatttagttgaagagttcgtggcgtacggggtgtggcccttggcgcatggctgggcgttgggcgaagtgtgccctcgccagatgccttttcacggaggaagggtggtgcgaagtccggctttcgcactgaatctgcggaaccgcgacccggccgcctttgtgcgcgatgcggaggatggggcggtgcggctcgtgggacgttacgtgctgaggacggaaggccagcgcagctttgatatccgcgggtcaaatgaccgtttgaacagggtttttgaattaaatcaattgccgtacgacggctatcctggtcaagacgaagcggaccgtcgtggaaagaagccggtggtggagactggagacgaccctgcgccggcggccgccccttcctcaaaaaagagaaaattaggtactgcgatgggaggacttggggtgtctgatagttttgctagagagttgatgaggacgtgcgcggccccgggggaaaggatgtcttcgcccgagctccgggagtcttcggctcggatgctgagggttaccgggggttgctggcctaggaatgttcctatcccctgcgcggctgacgaggactgttttacatctcgcatggttcgtcaatggagagtttttccttacgggcggaatatcgctgctgttgtgtcggcagtgatggacaaggatcgccaaggggcggcgcaaaaacgccaggcggctgtcaggctgcatgaagctaggccgaagaggcagcggggggctgcgaaggctgcggccttcggcggaggcaagccgccgctggcggcgaagtcgggcgcctctgcacctagcaaggcgccggaggcaacggcgggcgccggaggctccaagtcgacgaaggtggtgccgccggccagcggagtggcggaggcttcgaaggcggcccgagcattgccgttgtcgggcaaacgtgttgccgacttcggcaccgatattactgtggacgactatcttggtgggtcggacgagggccagcttgctatagttgcgcctgccgcggcgatcgcgacggctgccatagtgccgaaggcgaggggcgaggctcttggcaccggaggcgaggtgtcggccctcgcggttgtcagggatgaggcgggcgcagcgacccgccggctgagggaggtgacggaggcgctgagtcaggtggctgacttcgccagccgtactgtgtcgggggccctcacggcagctgtgtctgccgaagtcgagagacttcggacgcaacatgctgacgctgtccgtgagaaatcagcctccgacagcaagtgccgtaaactgacggacaaggtggccgcactggagagggagaaggctgacctccggcgccaactggcggcggagaggagggaggccaacgaggccatcgccaaggagcaggatgcacaggcggaggccaaactggcgcgggcggagggcaatcttgccaaggagctcgccgaacatctgcaggagcggctcaccgccctggagagccacgcgaagggggccgaggcctcgatgcgtgcggaggccgaacggacgcgcacgcagcttatggatacatatcgtgagctgggtgcgcggaccggtgacttcgaggtgccggaccgagagcccgggcttcgttgtctgcaatgggtgcaggaggagctgcaggaactccccactgtcgtgggggggtttatgtcgtacgcctccctggtcacctgcgagggggcgatgaacgcactctcccgcgaagggtgccggcacttcgaggtcttcgaccaggcagatgaagattttgagcgagatgtctataaggtcgaagaccccgtcgtgaaggaatccgccggggccctctatgaccggatgtggggtccgcacggtcgtgaggtggtcagggagcgggccgagactgcgagggctcaggcggcgcgtggcgagcgggtggacgacttcggggcgttgaacagtgcgctgcctgaccctgagccgacccctgcggaggccgtgcctggggtcgccctggagccaaccccggagaccgcggcgatcgcgacggctgcccccacatctgctgcggccggcgaagacctgcccccaaaggtggccaaaggcgcccctgatgcccccgcagctgctgtgccgagtgctgaagatcccgcggcggtggcggcggaaacaacggcggaagcggcggcggagccaacggcggaggctcccgcagcgtcagggccttcgcaggttcaagattttgggcctgcgcacgcaaccgttactactgaatttttggcggcttcgaccgcggaaggtggtaatggatatggtgaatctgcatctgagttttttgattttactgactctgggagctcggttgagtggactgaggagtcgtcggaggaggacttggattattttgcggccttggacgtggctgcggcggaggctacgccacacgccgcggacgcgccagacgtgccaggtcctagcaccgggcgccgacgacgaagggcggttgcaaagcgtagggttagcacggaggaaggggctcggcttcgtgtgagtagtgctggtgggcaggaactgttgtctttgccggccgccgcgagtacaggggaaggggaactgcgaagtctttttgcgggtgaggagcttaggataatgttatttaattatagggagatgagaattattcctaaggttgagccgatgtag

SEQ ID NO: 15638 - DNA, 627 bp, Zea mays
  Peptide Sequence Number=SeqID_59013
atggttaaaaattttggcagcaaaacagtgcaaatagcaatgaatgctgtggtaacttcacaactacttgtcagtttatatagtgctgcaggtaagaaggcgaagcggcggaattgttacaccaggcgcgcagtaacttgtacccgctgcgcagtggaccgcaaggatcaaacagtaactctgcaaggtgggaccgacacgcgctcggaagtcggatcgtttctccgcaacgagctcagggaaggtgttttttggaccttcggcttcccgaagctgaagaggcttttttcacgggtcaagctcgttacgaagaacgatctagcaccgcgaaaggggctactgttggggttgtgcttcggtgcgccgaaggtctcacacgaagaagcagcttcggctgaagtcgtctccaagagatggccgaagtcttacgtggccgcatgcgtcactgtgtacggcaagctccagcgcagccgccgcttggacgcggtccaaagcggctgcaccgcgctgtccatcgtcaaacagggggacctcatggtcgttgccaatgccaccgactctcgggttgttctgggcacctcaaccgacgacgacgccgtcacgccgtccagctcatcatccacctga

SEQ ID NO: 15639 - DNA, 153 bp, Zea mays
  Peptide Sequence Number=SeqID_59014
atggccatgatgggttcaacatcggaaaagatgtacctctatcaggtgatgaaagagccgagttttgctgtttctgctcgaaggtggtacctaaggaggaggcaaatcagtgaacttgttggtgggaggatgttttacctccctgatatgtaa

SEQ ID NO: 15640 - DNA, 267 bp, Zea mays
  Peptide Sequence Number=SeqID_59015
atggctgccactagggatggcaattttacccatgggttcggatatctgtcggatatccgacccgtcaggttcgggttcggatatatatatatatacccgcgggtacccgatacccgcccgataccctacgggtatgggcacgggtacaatttttactcgtgggtacagttgcgagagggtatggctaatacctgcgggtacggttgtgggcaggtttttgagggatgcactaatgttggggacttgttctcaaatgctaagaattaa

SEQ ID NO: 15641 - DNA, 708 bp, Zea mays
  Peptide Sequence Number=SeqID_59016
atgggtcggcgcgagacggagcgcgaaggggggaagaagccggagggagacaagcgtgagaggcgtaaggaaaggatccagggtaatgatggcgcctcctgtgacgtggtcggtccgagccctaggttgggcgaggtggagtctcctccgaggtcgaggtcgagtctgtcttccgaggccgaggtcgagtccgagcccctgggtcgggcgaggcggagaccgtcggttgaggccagggctgagtccgagccctggggtcgggcgaagcggagttcgtcgtcttccggggttgagctcgattccgagccctggggtcgggcgaagcggagttcgtcgtcttctggggctgagcccgagtccgagccctggggtcgggtgaagcggagttcgtcgtcttccggggctgagcccgagtccgagccctggggtcgagcgaagcggagttcatcgtcttccggggctgagcccgagtccgagccctggggtcgggtgaagcggagtttcctatggcgcctagggccggacttggctgctgccacctttgcattaaatgcccctgcgatttggtcggttggcgtggcgatttggccaaggttgcttcttggtgaagactgggcctcgggcgagccgaagctttgtgctgatgggggttaccagttgagatttaggagtcttgaggatacccctaaatatggtccccaacagtag

SEQ ID NO: 15642 - DNA, 2319 bp, Zea mays
  Peptide Sequence Number=SeqID_59017
atggacaagtacaacagaaagcacccctacggagggaccgatgctcaaggggaagcttcttgtagaagagaagacgagtataacgcgtcgctcggtacgggcgcactgggctgcacaactttacgtcaggctcggcccgatagcttatgtcatgggccacaagcagcgggcctccgcctgagtgggaagtggagagcaaggcccggacacgtgtcagcaccagacccctgctcataccagggtcctccttgttctgggatcctgctggggttcggacctatccggaggctccagacttatatgtataggggttcggtgtccttttgtggtggttcggacttactgggatatgttgtctctccttgccatgtgacgccctttgtcttgcccatgtggtggggtcaggcgccatcccccgtgtggctaggagtcgtcgcatgggtgcggcgtcttcatgctatagaagagggtacccctgatttagggtaccgacagtggcccccgggcccgcctcaggggaggatgcgagcctgcagatggggtgcgccggtgttccctggagggatccgcgtcaaggtcgtcccttccggcgacttcaccatcgaagagcgcgcgctcgtggtggtgtcaccggtcttgatgttcatcatccgtgctggggaggagggcgagccgagtgggagctttgccttccgcgtgggctggcagtccgcttcttcctccagcattcgggggagaagggcgttcgccggccttgcggaggaggtgaactctgggtgcgcggggccggccgtctgtggcgccgtcaactgccgcgtgtctggctccccggcctgggtggctctggtgccacctccggcgctgcctcttgccgctggggcggagcgtggctgcccgtccaccgtacgagcgacgatcgcgccgcgcgtgggttggccacatccacggcttctcccatgtcgctggtcgcaccggggggtcgtacaagatgtcccgttgcccattggtgcagaggtggtcgctgccactggtgggactgatgtggtcgcctccgctggtgaggctgcccactgcagaggtggttgcctccgctggcgagaccgtcagtgccacctgccgccggacctctggccctttggttttaatggcctcgctgttacccccgtaggaggacggggtcgaggacctattcgcagtagcgctcaccctgaggtgatcgctgctgttggtgagccgctcggagcagaggtcgttgtcgctgctggtgcagaggtggtcgccgtcgttggtggggctgtccggagccagcttccggcgcaactcttgctggtgcaacgtagttcattcctgcagaaatggagctggggtcccacttgctcacggtacgggaccaggctgagcaactacatggtttccggacccccccaggagacaaggttttgggtacagaaccaggctaaccggccacataggctccggaccaccctatggagcgggcatctgttctttagaactggcccccaggccttcccatgcccacggtacgggacctggctgagcgactacacaggctccggaccaccccaggagaccaatgtccgttctctagctccggtcccaaggttgtcggaccgcaggacttataactctagatgcttagtccccgtcacggggtggcggagcatgggccctaatctgcaagtctggctgttcaattcggatgtcgccatgtcagacagatggaaaccgtacggaccaatagtccaggttcatgggggcagacccaccgggttgtcgtacacagcccctcttggtatggtatctgtcgtggggctaagcctcgacccagggttcccatctgtatttgacacgggagccctcgtctctggctgtgatcacttctgcgtatacctgtctgcagctcggacgcgtggggggtccggaagggcctccgaaggaaaggcgtgcttcagctccgtagaccggggaacacggggtccctctagggtccgtctagttttcttcaccggagtaggagcctccggtgaagatatctttcaggtccccctcgggcgactggtacccgaggccctgctcagccgcggctacctcgccgtcgtccaccttctctttgccgggccgacggcgaggcggggagccgtctttggaagactgctcgcgccgctcgctgacgtgttttgcgaggtcaatgatctcacgacactccacggtgttgtggcgaccatgcgggtgcacatggcatggaccgctgctacccttccgcggtcgtgggcagcagtggaccacgacttctggtag

SEQ ID NO: 15643 - DNA, 216 bp, Zea mays
  Peptide Sequence Number=SeqID_59018
atgggagcggaggaagcagagggtactcccccgccgctgcccgccaccggcgagcccgcaaccacggcaagggcgcagccaatatctgcagcacaattcctctcctggaagcagcgcaaggtctttccttcctcccttacccccaataaagcttcgcctacttcttttaccatcaatttagggttcgatctagtttcctgtccgtcgggccagtag

SEQ ID NO: 15644 - DNA, 801 bp, Zea mays
  Peptide Sequence Number=SeqID_59019
atggaattcaggcgtcaggaggaggaggagcagcccgtcttagaggagatgggcgccagctccgcgccgtcggacggcgacagtctcaagtgtgctgcatgcggctgccaccgcagcttccaccgcaaagacgacgcgcgctgccaccaccaccaacttatgctcccagcgaccgcgacggcctctcgcatcccgctgctcctgcctctgcccaacccgcactatgcgtcgccgccgtcgttcctgtaccacggcacgcccagcggcggcggcggcaccgccaccgattcgtccagcgaggagcgcggcccgccgtccggggccgccgtcgtgcatcaacgctctcctcatcatcatacgctccccgccatcaacgctctcctcgtcatcatccgctccccgccatcaatgccctcctccctatgctacgctcagctccccctcacgctttcgtcgccgccatcacgtgctcatcattcgcttctcaccatcaacgccctcctccccacgctctgcttcgctccgtcgatggaaggaaaacagcgctattcaccccgttccgactactgtgccaaccaccaggcctcagcctcggggaaggtctctgcctcgctcgaccctaggccttggcctcagcctcggcctcgggggaaggtccccgtctcgcccgacctcagtctcggcctcagggaggagtcacatcctcgcccgacctcggcctcgggagaagtcaccacctcacccaacctcggcctcggaatcgactacactacaggggatacatcattaccctactgctag

SEQ ID NO: 15645 - DNA, 210 bp, Zea mays
  Peptide Sequence Number=SeqID_59020
atgccgcccaagaggaaagacggcgcgggcgtggtggtaccggcccggcccgccaggcggagggaggacgaggaggaggtcgtttgcttcatctgtttcgacgggggcaacctcgtcgtctgcgatcggagctataggacactgcttcgaatcaggcgcgttagaatatgtttggttggacgtacaaggagtgatccacccgtctgctag

SEQ ID NO: 15646 - DNA, 342 bp, Zea mays
  Peptide Sequence Number=SeqID_59021
atggcgcgccgcagcaccggctgcagaggccggccccgtcttaagggccttcgtgggggccagaccagccaagttcacctaaggaaactaccagctgggccccacatggcatctcttgcaaccacctcctcctatttctcagctgtgcacgagcctatctctgccagaaccgcccactccacgctcctatcgcctgttcttgccaacaaccgcgtcgagtctttccctgtgcttatctccgccatccgggaccgtggggatcctccccggcgcgacagcccagctccccggcgtggtagtcgaccgaccagcagcacggggccgagccgccaggccgcctag

SEQ ID NO: 15647 - DNA, 839 bp, Zea mays
  Peptide Sequence Number=SeqID_59022
atgaacgcgctgtctcgcgagggctgcagacactacgaggtcttcgaccaaacagacgagagctttgaacgcgagatctttaaggccgaagaccctattgtgaagcagtcagcgggggcactttttgataggatgtggggggcgcatggtcgggaggctgtcagggagcgatccgaccgggcgagagagcagatggagcgcgccgaggacgtcgaggacttcggaggtctagtcggcgcgccgcccgaggctgcggagggcaaaccggtgctgccctcggatgctggtgaaggcccatcggacgcactcgtgcctgctgttgccggcgaagaccctgtgtcggcccctgtgccgacggttgaaggcgctcaggagggttttgggcatgcgcacgcaaccgctactgaaagtgctaattttgtggcggcttcgaccgtggttgcggaaaatgattcgggtgattctgtgtctaagttttttgagtctgatgattatgggagttcgatggtgtggacggaagagtcttcggatgaggatttggattattttgcggcattggatgtggctgcggcggaggcttctccgcgtgtgatgggtgctgaagttcccggtccgagtgctgggcgtaggcggcgaagggcggtggcgaagcgtagagtgagtgaggtggagggtggtcgtcttcgtgtggacagggctggcaagcgggaattgttgtccttgccagttggggcgagtgtaggtgagggggagttgcgaagtctttttgagggtgaggagctgaggataatgttgtttaactatagggagatgggtatcatcccgaaggttgaaccaat

SEQ ID NO: 15648 - DNA, 273 bp, Zea mays
  Peptide Sequence Number=SeqID_59023
atggcgtcaaccgtggtgcttggggtgaagggtggcgctttctgcgctggcggcgagatttcgtcggccactgccgtcaaggacgaggcgggcaccatgtcccgccggctgagacttcgggcgcagcacgcggacaccgtccgggagaagtcggctgcggagagcaagagccgcaggctggcggtgaaggtggccgccctggaggccgagaagacggacctccagcgccagctggtggaggaaaggagggaggccaaccaggcccatcgctga

SEQ ID NO: 15649 - DNA, 363 bp, Zea mays
  Peptide Sequence Number=SeqID_59024
atggggggcaacaatcaaatggattgtgtcagtgattggatcggtcttgatattgatcgaactcttggcgaccccactcagctcattatccaggagaatattggccagctctacgttgcccacatgtgcacgctctacctcgacgttactgtgagatcagatctgcatcaactcttcgtcaagtcgggcagcgctccagccgtcactcgtgagcgtggaccccagccttgcatgctgcgcatgcaccacatgcagcagggcgctacatatcaaagtccacgtgtgaccgtgcgcgaggtgtgcaagggcgctagtgcaaaacgagaatcaaaagggagaaagaaatttgtttgtgttaattaa

SEQ ID NO: 15650 - DNA, 1341 bp, Zea mays
  Peptide Sequence Number=SeqID_59025
atgtcgtcctcttcctcttttgctgccgatacaccgccggccggcgcattatccgaggacacgctgagcaacgtggcggcggaggagttgcatcctagcgacacagtggaattcggcgcgtcgcggatgtcctcggtctgcgtgcaagacatgcaacagcttggatattttggcggcggagtggcgcgtgtcccgggggcggaggaggtccccgacccagaaggcgagttggtcgtcttcgaggcctttttcgccgctggccttcgtctgcctgcgcatcgatttgtggcggaggtcctgcgtagattcgagaaaaggaaaattggacataagattgcacaatttggatcttgcacatttacgctgaagaccggcaagactttgatggaagtcgtggagttggttccctgcgcccgcaataaatggggcaactggtgggaattttggttttacgtttccgaaggcacagtcgaagaccatccagggctccctgtggtcgtcatgtgctcacattattacgcagcgtacccacagtttgaggtagcggaggatgatgaaaacgaagaggcccttcggtgcgctgcccgcatgagtagcgggcgcgaccttgttgaggagtttgtcgggtatggagtatggcccttggcgcatggctgggcgctgggcgaagtatgccctcgccagatgccctcccgtggcgggatgctggtgcggagtcctgccttcacactggatttgcatggccgagatcccgctgcattcgtgcatgaagcggaagacggtgcaacgaggatcgtggggcgctacgtgccgaagacagagggtctgcggagctgggatatccgtgggtccaatgacaggctgaatcgggtcttcgaattgaactgtttgtcgtacggtggttatcccggggaagacgccgccgaccgccgccggaagaaaccgatgggcgggaccgaggaagggacttcacaggtggctgccccggctactaggaagagaaaattaggtactatagtggggggaaagggggtgtctgataattttgctgtggagttgatggggacatgtgcggcccctgggggaaggatgtcttcgcccgagctccgggagtcttcagcgcgaatgctggaggttaccgggagtcggtggccaaataatcttccgatcgcctgggcagagggcgaagacatgtctatgtctcgtatagctcttggattgaggatttttcccttacggacggaatattgttgctgttttgtcggcagtgatgaacatggatcgccaggatgctgcgcaaaagcgccgggcggtcttcagtttcccctatctttttcgtga

SEQ ID NO: 15651 - DNA, 243 bp, Zea mays
  Peptide Sequence Number=SeqID_59026
ccgtcgtgccgtcaatggggctcggtgtatgcagctcgctctgccaaggttgatttgtcccttggggaggagtgcgggtccgtacaacccgaggcaaaaagggaatcacggctcatgggtaaaggatgttcggatttgcaggtggcaatgagattgatggtttttggtattgattatggtaatggagaagatgaagccgtggaaggagacttccaggagttccaagactacgacgagttctag

SEQ ID NO: 15652 - DNA, 450 bp, Zea mays
  Peptide Sequence Number=SeqID_59027
atgggcaagaacaacaagcgcaagcgtgagccgactcctccatcggaggagtttggtgactcagaatactcggaggaggagttctcctccgagcccgaggggtctccggctcccgtctctcccccggcgtcgtccgatgactcggacgactcccaggggatagccgcggaggtctggacatatatccgggccgtcgagcgcgccgggctcgaaggctcggatgagtcggagtactcctcagatgaggaggactcggacggcggcgacgggggtgaagacgacgacgacgacgacgatgacgacgacgacgacggcgacggcagtggcagaggcggcggcgacggcagcggggacagcaccaagggcggcagcagcagggacagcaccaagggcagcagcaggggcagcaccaagggcggcggcggcggcaggggcagggccagtggctag

SEQ ID NO: 15653 - DNA, 162 bp, Zea mays
  Peptide Sequence Number=SeqID_59028
atggggcttagtgtatgcggctcgctttgccaaggtggtgatgaggatgatggttttggttatgactatggtaacggttgtccgcattgtaaccactgctcaggtgaagatgaagtcgtggaggaggacttccaggagttccaagagtacaacaagttctag

SEQ ID NO: 15654 - DNA, 2352 bp, Zea mays
  Peptide Sequence Number=SeqID_59029
atggagcgattgggggctccggttctctgtaatttccagcttggtgacaatcgtcgtcctcagcctcttgtcctggatacgccggcgctcgacgtctgggcgtccggccgctggcggtcgatcctgctgtggttcgtgacgcgcgtcgtctggttggcataccagggcgccgagatagccgcgacgggcgccctcggaagcctgtccctctccggctccgatgggtcggcggaggagcagcaggtgatagcgttctgggcgctgttcctgctgctgcacctgggcggcccggacaccatggccgcctacgcgctggaggacagcgccttgtccgtgcgcaagttcctcgagatggtcttccaggtcgggggcgccttctacgctcagtacaagtacatatatcgcgcgcgcacctggacgccgctggcgacggcgtcggccatcatgttgcccataggcattgtcagggggagggggagggggaggaggaggaggaggaggaggaggaggagaagaaggtcgcgggcgcgggaccgggacgattcacatccgcaagaccgcaacaagcagcaacgacgcgctgtgccttgctcaggatctgttccatgtctgccgtcgtgccttgtccgattcttcggtgctcccgggcacggagaagcagcgtgccagcgaggagatcttcctgctgggatgggagcgcatgtgcaaggtggtggagatggagctctcgctcatgtacgaggccctgtacaccaaggccatcgtgctgcacacctgcccggttgcaggctatctcaaccgtctagtgtcgcccctcgccaccgctgccgcagtgttgctcttcaaccagtatatcggcagccgcagccgccgggccatcatcatcaggagatctttcgtcgacatcacctacctcttgctggttgttgccttcgccatggaccagatgtggctgctcagagcccttggtctacctggacgtacgccgccctcagagaggcgcggccatgggcatggtggcttcgccaccacttgctgtgcagcgggagatggcgccggatccaccgcgccgtcgacgccctgcatccgttgtcgtggttattcggcagcgatccagttagctactacaggacgtggtcgggcaccatcgggaggtacaacctgctgcaggcgtgcagcgttgctgctgctcaccgtggtgcccgccgtccatggtggaccgtggacgcggttcgggagctggctggaaaaaaattggagctggaggagacagagtatctgcgtgagcttcctcaggacgtcaaggaatcgctgatccagcgagtgcagcgaatactggtgtcgaccaaaaataataatgctgataagaagacggatgagaatggaattggatgccgctacaccctggtagacatcaggacactctggggtcagcaggccctggaggacgccaagacgaacctgttcggtcgcggccgtaaaaatggtaggaaaacaagtaacaagaaaccgaaattgcccagcttcggccgtgaattcgaggaggacgtcctcatgtggcatatggccacctgcattctcttctcatcatcaagcggcaaggagagcatagtcagcataccagggggatcctcggccgacgccgccgatgcccatgtgacggcgatcaaggtgatgtcagaatacctcatgttcttcgtcgctgtacgtcgacacatgctgcctggccttgtgctccacagcctgctcgagaaaatccgccaaactttgcacgagatatgggacggcggcaagaagaaaactactggtggttcgtcgtcgtcgtcgtcgtcgtctacagcagccaaagatactccgcctcctcaagacaggcttgccgaaatgctgctagagagactgaaagcaggtcggagatggtttgaccgaaacgaaggcaggctcgttgttggtaatgcagctgcgcttgctaatacactaatagagactggcattagtgtgcagaagcgacggcaagtgccgcagctgctggagttcatcttcaacgtgtgggtggacaagctgctctatgcggccgccagatgtagcgtggagagccatgccaagcagctcagccgcggcggcgacctcaccaccatactgtggcttattgcccaacatgctggcctatttcgcatcggagaattaaaaccgaaggaggagaaggaggtggaaaagaaggaggaggaggaggaaatgaagtctttctggccacggtcgaagccagcatatccagttcattactttgaagatgatgaagaatctgacaatgccgaagaagatgatgacatgacgaggcatgttatactgtactag

SEQ ID NO: 15655 - DNA, 246 bp, Zea mays
  Peptide Sequence Number=SeqID_59030
atggggctaggtgtatgcggctcgctctgccaaggtggtgatgaggatgatggttttggttatgactatggtaacgtccactacaaccaaacgggacatattgctgagtatgttgatgtgtactcacccttgctttacacaccaaacccccctcccccaggttgtccgcgttgcaaccactgctcaggtgaagatgaagtcgtagaggaggacttccaggagttccaagagtacgacgagttctaa

SEQ ID NO: 15656 - DNA, 210 bp, Zea mays
  Peptide Sequence Number=SeqID_59031
atgcaggcgacatgcaaccgcaacaagggggcgcaccctttcgacttcgacgtgtccagcatggaggcccaggcccacacgtcatgtaaccggcgcgccggttactacgtgcgagaaactgcaccgccactcgcgccaggaccgggaaaggggatactccgaaagggatccttctccgcgaaggaagcgggccccgagcccccctactga

SEQ ID NO: 15657 - DNA, 288 bp, Zea mays
  Peptide Sequence Number=SeqID_59032
atggacttcgcctcgcccgaccccagggctcggactcaaccacaactcagaaaacgacggactccgcctcgcccgaccccagggctcgggctcaacctcgacgctggacgacgaactccgcctcgcccgaccccagggctcggacacagcctcggcctcggaagacggtctccgcctcgcctgacccggggctcggacttgacctcgacctcggaagacggactcgacctcgacctcagaggagccttcgcctcgcccgacctagggctcggatcgaccacgtcatag

SEQ ID NO: 15658 - DNA, 372 bp, Zea mays
  Peptide Sequence Number=SeqID_59033
atggacttcgcctcacccgaccacagggctcagactcaaccacaactcagaagacgatggactccgcctcgcccgaccctagggctcggacacagcctcggcctcggaagacggtctccgcctcgcccgaccccagggctcgggctcaacctcgacgctggacgacgaactccgcctcgcctgaccccagggctcggacacagccttgggcctcagaagacggtctccgcctcgcccgacccgggctcggacgcgacctcgacctcggaagacggactcgacctcgacctcggaggagcctccgcctcgcccgacctagggctcggaccgaccacgtcacaggggggccatcattaccctacccctagctag

SEQ ID NO: 15659 - DNA, 858 bp, Zea mays
  Peptide Sequence Number=SeqID_59034
atgaggtcggcgcgagatccatgccaccgactcggcactgagattcatggcgccgagatccatggcgctgaggtagtgccacgtcagtctgcccacacggccacaacacgatcaaagtcgagtcgagtcctcctctatttgcgggaacggtcaaataccgcctctcggagaatcgaagccgaactgggcgtcgggcgtaatggatctgctgaagcgagaactcgagaagaagcggaaggcggcgacggccgacttcgggggcaagagcttcgtgcggcggtcggagctggagcagaagcagctccagaagcggcgcgacgagcaccgccagctcctcgccaaggccggcacgtcggcgggaattccgccgcagctgctaccggttccgaggagcgtcgcatcgacgagctcgacctcccacggcacgaggtggtgcggcgcctccgcgtgctgcgcgagcccgtcacgctgttcggggaggacgacgacgcccgcctcgcgcgcttcaagctcgtgctcatgtccggcatcatcaacgacatcgacatgatcgagggacagaccaacgacttcctccgcgacatgatcgagatgcgcaagcggcagaaggccgggagggacacctacgccaagggcaagagcaagcgtgttgatgacgggggtgctgccggagccagtgcggatgatggggatgccaaggggagcggcgatgatgctaacgcagacaaggactccaagaggatgaggaccaagtttgaggagctttgcaatgaagacaagatcttggtgttctttaagaagctgcttaagactgaccgcagcggtcgaccctaccgctccccctccccttccagctag

SEQ ID NO: 15660 - DNA, 333 bp, Zea mays
  Peptide Sequence Number=SeqID_59035
atggatctgataaccggcaacgagaaatcgagggtgacaggccagagcggagagggagaaggaccaaacgaaggtggaatgtcgcatcctcaacctgagtgtctggcactagatctggtacgggcactaggtcctaaggggctggatgataggatccaaattggaggcgtgaggcctcgagggtgccctggaactgaggcggccggatcagctgcgcgaagatgtagcagagatagtgcgtgtatggcagctgtcggcagcacaaagaccatccaacatcgtgtcctcgatctcacagataagcaaatcaaccacatcaaactcagaatgtga

SEQ ID NO: 15661 - DNA, 195 bp, Zea mays
  Peptide Sequence Number=SeqID_59036
atggaggtcgacgccgagatccatggcaccgacctcggcactgagattcatggcgccgagatccatggcgccgaggtagtgccacgtcaggagctgcgtgcacgtgtaggccaagctatgtgcaagtgcccgagggtggtgggcaaccatgtcctaatccacagaaacaagcacgtccgagtgtccgacgggtag

SEQ ID NO: 15662 - DNA, 189 bp, Zea mays
  Peptide Sequence Number=SeqID_59037
atgtactcggccttggcggtagaaagagcgacagaattttgcttctttgaagcccaagacaccgaagctcatccgcattacaagacctgggtaccttcggacatggatcaaaaccacaatgtgaagaagtacaaggaatacgaaggatggtgcagagtcgaagctatgcgcaggggagcttcggcatga

SEQ ID NO: 15663 - DNA, 831 bp, Zea mays
  Peptide Sequence Number=SeqID_59038
atgggccttacccggaagtcggcccatcttcgctgtggcgcgctcggcccaactgggcgccacgccgcgctgacatgcggagccctgcagtcagccagacgtagtcacgagagcgagcttgtccttcctatcggccgcactccctggatgccaggtggggccaccttggtcggatcctcactcgcgctatcgtgggcactgcacgaagctggattccgcgccgatctctgcgcgagtaacgctgactcctcaaccgaactcccttggtatcataaagccatgcgccgggggctcagtttcttccccttttcccccagcaaccctaatcgccgctaccgaattggaggatttgtgggcgtaagggacgttcctcggtttgtttccgcgcggccggtgacatctcggtctacaccaacattcgggtgggggagagacgagccagtgaccgaggatccaagtgttcagcaggtagaagttgctgagcaggagctcattgaaggcaagttcccatctcggtccgccaatgggcgcaacgtggagtcggcgccgtgggcgcgggcccacatgccagcgaggggagagggaaacagcgtcaggggggagaacggcggtccgtccacagggaggaagaacgggccgccggtggcccgactacggttctccgccggtgatccggttctaggtggtcggggtggtggcatagcacaggcgggggtagggggtcatggtggtggggttgatttggccggtgggggctcaggacggacgatccacagtgaggtggcgggctcccgcagcggcgaggtttccaatgaggcctacggggcgtga

SEQ ID NO: 15664 - DNA, 195 bp, Zea mays
  Peptide Sequence Number=SeqID_59039
atggaaggcctcatcccgttcatctacagggccgtcgtgcggtacaggaaggaggaagggcgggtctccctcggcgacctcttcttcgacgagccctcctcgccgacgtcctacttccgtctcccgggcggcgccgactccgcccggtaccagcaggaggtactccaaaaggagaggctttgtgccttggagtga

SEQ ID NO: 15665 - DNA, 1158 bp, Zea mays
  Peptide Sequence Number=SeqID_59040
atggcgcagggtggtggtggcagtggcagggtgcccgttgacagctggcttcggtggtcacgtgtgccatcggcggctgtcggcttcagctctggcacgcaccagtgtgacgcacgtggcaagagttgtccggttctgtgtgcccatccagagggggtggcggccgacgcaactttgcggctgctgcggcagccgacgcgtcgatgcccctctggaggggttcatgcgggatgtcagtacggcagcaacggtgattcttggcctgacgatggtgctggggggcttcttgggcgaaagcctcggcgacgacgacggtcgtgggcgtcgcttcccctgttgggggcgtcgcattcatgtcttccttgggcgaaagcccagtccatctcgaacacacgacggtgtcatccccgacgtcactcccttcctgaaggcatcacattgaagtttgtctcggtcacggcttcgccttcggtggttgctttcgctcctcggcgtctgatccatggtccaatccgcatcaaaaaaggaactagcacgatgacccctgaaaactttctccctacagatatccctgctacatgggcagcgatggagaagttatacgactctggcaaagctcgtgcaatcggcgtgagtaacttctcttgtaagaagctgcatgatttgcttgccgttgcacgagtgcctccagcagtcaaccaggttgagtgtcatccggtttggcagcaagacaagctccggaagctatgccaatccaatggtgttcatctttctgcattctcgcctttaggctcacctggatctccttggatcaatgggccaagtgtcctcaagaaccccattgtggtctctgttgcagacaagttgcagaaaacgcctgcccaggtcgctctacgctggggaatccaaatgggccatagtgtactcccgaaaagcgccaatgagtccaggattaaggagaacattgacatatttggctggtctattcctgaagatttgatggccaagttctctgaaatcaaacaggcatgccctaatgcaacttttttcatgtctgctagttgcatttcattggtcaggctgctgacagctgagtttgtagttcaccctcaggccggctacaatacattggaggacttttgggatggtgaaatataa

SEQ ID NO: 15666 - DNA, 1767 bp, Zea mays
  Peptide Sequence Number=SeqID_59041
atgaggccagaaacagttgaggcaggcccaaatgaacatggtagacttcccaacataaacatccaactgcctcttatgcaagacttgatgtcaactaagatccagctgcttcatgtacatcaacgctccaagttccaagctaagttgattgcttatgactcagaggttggcaagatagttgccactatgaagcaatgtctgaataatattggtatgaagcagtccaagctagctgatacatttggagtgttgattgacgaggttctttgggctgagtcatatagttcagacgttgaagataatgtgacacaatcttgcaagaaatatgttctagcctcccaatctggtgatcaacttgtatctgaaccaatgatgacacccacccagatggagtcgcagatgactcctagtcaagtggaaaagttagttatcaaacagaaggaagtgcgactagtctttgagagttgccctgatgaatctgttacacctaatactcaaggtcagacagtgctaggtggcatagttgaccatgactctggcccaatctttgacaagactcctattggaagtgtttgtgcctcaggcatcttactatccaaattagaatgtgctcacgctctccgaacctacgtgtgttctaaggacattgacatggacaggatcgttggttttgcagtttatcggttacgttcctattcctgctccatgttcaaagcttatctgcacctttggaattctggcggccctaattggttcattgagtggcagcgttattcagtggaagaatctaaatcttggaaactggtttcacatcgctgttcttccctggcttcgttcgctaaaatggctcgtaaaccagctctgtcaggtgcaaattcggttcctttgggtcgtccgatgaggtatgatcgttcttcctctggattgaagcagcggcactcagttttcgatcggatttccttccccctttgcctcgtcagtgatcatgaagttgttgttcgtccacattttcaaaattattcaaatcgcagaatcggccgcaaggtttgctccggatttcggtcatcattgggggcctctcgcgcttccccatgggctccgcggaagttggtttggcggcccaagaagattttggaacagtgcccggggaattttgggcaggattctgtccccagccttaatggctctactgtcccagcggcatcgggccaccagcattttcgggatctttccctctcaggaaataattcacaattatttggtctctcggggccacctctgctgtcgcttacaggtgggccccctcccccgccctcttttaacaattttggtgagttctctcaggcggttctttcgagtaccaacgcttcgccttccacggaacttgcactgttcacaaaaccccattccgctccgttgccctggaagaatccgtcgctgtcaagctctctactgagtgtggtgcttccgccaccttcgcattccgacactctcggtgccactgaagatatggcttttcgtagagttgatcttgcgccgttcctcccccatggcttcgtggcgcaacaggtcgatcatcacgaaataatggtatgtactgtcactcgtcctcaacctttggcgcatgaagattggggcattgtgcttgttcaacctttgccggagcatgaggtcaacttccacatttttgatgatatcatccgtgagtatcttgtggaggtctggcgtgttcaagtcaggagcattcagcgctcccatttgggatag

SEQ ID NO: 15667 - DNA, 504 bp, Zea mays
  Peptide Sequence Number=SeqID_59042
atggtcctattgggctatgaaccagggacaaaaggctacagaatggttgatctaattactgaaaaattgtgcatcagtagggatgtgaagtttgaagaagatgaggcatggaactgggacagtaataacaaagctcagttgactgaagttggcccagaaaactcaaattttcagtttcagttcactgttcccagtcaggctatgttgtatccttctggtacaggtgaggagggtgagagttctgggggtggtgaagtaccctcagtgtcaccactaccacaatcacctgtgacccctcaatattcaagaactcaagctatactttcaggatcacaagcacaaaatccaggctcagtttcagatactagttacaattcacagccatctagttcagaaagttcaggaattgaaatggatttgacctttctctggcggcgctcgctccactacgctgaccgcgcccagaagcccgactcgccgcccaggatccaacactcggcctaa

SEQ ID NO: 15668 - DNA, 966 bp, Zea mays
  Peptide Sequence Number=SeqID_59043
atggcagctctatccgcgcccacaaatcgcgcgcagattcatggcagccccgccctgctctcctctctgcagtccgccatgattcttggcgcccacacctctgcagtctgccccgctccgcgctcctctctgcaatccaccgccatccatggcagctctgtccgcgcccacaaatcgcgcgcagattcatggcagccgcctttccgctcgagcactcacgcaatcatcaccgccgccatccatggcagctctgtccgtgcccacaaatcgcgcgcagattcatgcttcccgctatcacattctcaccgactgccccggtcgcgcttccttctcctgcagccatcagaaaagggggcaaaaaggccaccgaattctcctcgcccgggcacaacctcgctccacagtccaggccaaaccagcaggccgcctttccgctcgagcacccacgcaatcatcaccgtcgtcttcctgtcgctcttctcttccccttccattcctcggcaccatgccctcgggaacgtcgcatgccctccgcacaaggcgccgcctgttcccggtgaccgcggggccgagatcggcgcgccatggccgcgctcggaggcctggaccaggactgtgcataggacgccaccattaagctcttcggccgcagcatcccggttctccactcctccgtcttcgccgccaccgccgtggccgcatctgagtgtttgtacgggaattttcttccaatacgtgtttcttcaccaagtcactttccgtatttatggctgtatttacgaaagatacattgcctttgtctgtggagaaatcgctgagaattttcttgttttcgtgggggtaatcagtaatgccatggaaaagattgtagagcagctctccctgtgtttgtcaccttggaacacagaatccctactactctccccccataagatgtatgaactccctaagcacaatctattgtga

SEQ ID NO: 15669 - DNA, 822 bp, Zea mays
  Peptide Sequence Number=SeqID_59044
atgcctgccccgcctcctcctccgtcggtggggaaggtgacgggacagacccggatgttgctcttccgccacgtgggtaagacgtcgtcgattccgccgccggcgggcgggctgacggccgccattgtcgttgtcgcgcagcggaggaaggagtatcatgtcgtagctgccgtcgagggacatgaactcaagactcccgaaacgaagcatcgtcccgggttggagaggttgctggagactacccatctggagcttgacgggaagctgttcgtcaacacgcagcaggcccctacctggcgcgccaactgtcggcgtttcgaccccggggggtccgagcccgaggtcgggcgaggcggaggctcctccgaggtcgaggtcgagtccgagcccaggggtcgggcgaggcggagaccgtcttccgaggtcgaggctgagtccgagccctggggtcgggcgaggcggagtccgtcgtccggcgtcgaggttgagtccgagcccgggggtcgggcgaggcggagaccgtcgtccgacgtcgaggttgagcccgagctctggggtcgggcgaggcatagtccgtcgtccgaggtcgaggctgagtccgagccctggggtcgggcgaggcggagcttcctatggcgcccgaggctggacttaactgctatcagcctcactctgtcgagtggcacaacagtcggagcagggcaggcggcgctgttttcctgtcaggtcggtcagtggagcggcgaagtgactgcggtcacttcggctctgtggactgaggagcgcgcgtcaggatatggtgtcaggcgatccttgcattaa

SEQ ID NO: 15670 - DNA, 1851 bp, Zea mays
  Peptide Sequence Number=SeqID_59045
atgggagatttgtggaccaacataagggctgatctcacaaagatgcaagccacgctccagaaggttgagcaagggctgctgcaaatcaaggcagcagtgcaacatgagcaacaccagttggcgttgtccgcacggctccggacgtcggcggctgtgggcatacaagctgctgctcgtggcttccttgcacgacagaaagtgcgggagatgcgccggcagatgctcgaggcagccttggtgacggttgacctcggcacacgtcggcgcgacctcaccctgtcggacgaccatcagcagtggcaccaggccgctatctcgaagtgcgagcatgatacgtgtcccgtgggcgacgaacttcaactctacgacagcggcggtagggaaggcactcacctcgtcatcaacaagggcgcactatttagcgccaccacattccgctacaggccgccacgagggcgcctccgctggtgtttggttttgggtcaagtagactcggtctttgagcacccgttatgcggcagctcgagggcgagctgcttgtccaggaggggtgtagtgtcagggcctaaggaggcccacggaggggctgcggcggacatctgccatgcataccagatcatgaagaagggcggactcaaggatgagaacatcattgtctttatgtacgatgacatcgcgcatagcccggagaatccgaggcctggtgtcatcatcaaccatccccagggtggcgacgtctatgctggggtgccaaaggattacactggtcgagatgtcaacgtcgacaatttcttcgctgttctgcttggcaacaaaactgcactcaggggtgggagcggcaaggttgtggacagtggccccaatgatcatatctttgttttctacagtgaccatgggggtcctggtgtccttggaatgcctacgtatccatatctctatggtgatgacctcgtagatgtcctgaagaagaagcatgctgccgggacctacaaaagcctggtcttttaccttgaagcatgcgaatctgggagcatctttgagggcctcctgccgaatgacatcaatgtgtatgcgaccaccgcgtcaaatgcagacgagagcagctgggggacgtactgccctggcgagttcccgagccctccaccggagtatgacacttgtttgggagacctgtacagtgttgcttggatggaagacagtgatttccacaatctgcgaactgaatccctcaagcagcagtacaagttggtcaaggataggacagcggttcatgacacgttcagctatggttcccatgtgatgcaatatggcgcattggagctgaatgttcagcgtttgttttcgtacattggcacagaccctgctaacgatggcaacacttttatagaagataactcactgccatcgttctcaaaagccgttaatcagcgcgacgctgaccttgtctacttctggcagaagtaccgcaaattggctgatagctcgcatgcgaaaaatgaggctcggaaggaactgcttgaagtgatggcccacaggtctcatgttgacagcagcgttgagctcattggaagccttctctttggctccgaggacggtccaagggttctgaaagccgtccgtgcacctggtgaacctctggttgatgattggagctgcctcaagtccatagttcgcacttttgaggcgcgatgcgggtccttggcgcagtatgggatgaagcacatgcgatccttcgcgaacatgtgcaacgctggcatccttcctgaagcagtgtcgaaggtggccgctcaggcctgcagcagcattccgtccaacccctggagctctatccacaagggttttagcgcttaa

SEQ ID NO: 15671 - DNA, 624 bp, Zea mays
  Peptide Sequence Number=SeqID_59046
atgggtcggcgcgagacggagcacaaagtggggaaaaacagcaaaaggggaactcgcggcctccgtgttgtcctgcgcccaggtcgggtcgaggctgagtccgagccctggggtcgggcgaggcggagtccggcgtccggcgtcgaggttgagtccgagcctgggggtcgggcgaggtggagaccgtcgtctgacgtcgaggttgagcccgagctctggggtcgggcgaggcggagtccgtcgtacgaggtcgaggctcagtccgagcccgggggtcaggcgaggtggagaccgtcgtccgacgtcgaggttgagcccgagctctggggtcgggcgaggcggagtccgtcgtccgaggtcgaggctgagtccgagccccggggtcgggcgaggcggagtccgtcgtccgaggttgaggctgaatccgagccctggggtcgagcgaggcggagcttcctatggcgcctgagggtggacttagctgctgtcagcctcactctgtcgagtggcacagcagtcggagcagggcaggcggcgctgttttcctgtcaggtcggtcagtggagcggtgaagtgactgcggtcacttcggctctgtcgactgaggagcacgcgtcaggataa

SEQ ID NO: 15672 - DNA, 614 bp, Zea mays
  Peptide Sequence Number=SeqID_59047
gcgtccagtactggtggtgcacggttctgccctccgctcgtccgtgcccctacgccccgaaatctcgcaccgcacgtccgagccccttcgccgccacctcctcctcctctccccctcactgcgccaccacctcctcggttccgtgcgtccgtgactcctcacagcaaccgcccttcccctggtcctctctctcgccccatcccccacgaatcccacctctgcgatgcctaatatacgacgagcacggcatcgaccacaccggaaagtacgccggcgactccgacctccagctcgagagcatcaacgtctactacaatgaggccagcggcagccgctttgtcccgcgcgccatcctcatggacctcgagcccggcaccatggactccatgcgctcgggccccttcggccagatcttctaccccgacaatttcgtcttccagtccggcgccggcaacaactgggccaagggccactacaccgagggcgccggcaacaacaggaaccgcacccgccatccacgctccaaatctcgctgctcccttccatcctccacatgcatcgctccaaatctcgctgctcacattctaagcgctgggaggatgcggaccagctga

SEQ ID NO: 15673 - DNA, 81 bp, Zea mays
  Peptide Sequence Number=SeqID_59048
atgcggcttcatacccttagagatgatgtggttttataccctcagaggtgcttgttgctcatcaaggggagtgggaagtag

SEQ ID NO: 15674 - DNA, 189 bp, Zea mays
  Peptide Sequence Number=SeqID_59049
atgaaggtcctcttgggcgaaggaccttcggcgacgaagcatggccccaacagcaagcgtgagccgactcctcccttagaggacttcggcgactcggagtactcggagaaggagttctcctccgagtctgagggttcaccggctcctgcctctcccccagcgtcgtttgatgactcagacgactcctag

SEQ ID NO: 15675 - DNA, 176 bp, Zea mays
  Peptide Sequence Number=SeqID_59050
atggcgttcggggtcgggattccagtcaagttgcgtcgccagcatgaggggatgataatcgaagtcgaatcgaagctcgtgacgccgtgggtggatgggaatttctcatcgaagttttccctcgccctggatccgcatctcatcatggtcggggtacctcgacgtcctaactacgg

SEQ ID NO: 15676 - DNA, 1191 bp, Zea mays
  Peptide Sequence Number=SeqID_59051
atgaacaaaagacccgcattcaaggtgccattacaaacggaactccggttccacccccgcgggatggacgtggcaaccggaaggctctcgttcgcgtccccgctcaagggacacgaaccagacatcaaagccaaagagcgggccgctccaaagcgcaccggcagcaacagttcgccttccccggcatggctggaggacacctccttcgcagagctgggggatggtttccaccaccagaagctggaagaggaggtgaccagccgacccgtgcgggaggtagagcctcggctcacctcgctctccgccccagtaaggatggggctggtggtcaccgtcttgggtgaccaccagcgaggggggtgtcccccatctgggggctcggaaggtggaaagacacgatgcataagggagcgcgaagacatggtcgcctttcaagggggtcaccctccttttaaaggcgactctccctacttgcgtccccagccgtcgtgggctgagtcttctccaacacgctccaaggtcctccccctacggcgcgggggctggctcccacgcgtcgcgcaagctggcctagagcagaagaagccaaaccgctgcgcgcggtgcatgcaaccgaccagcggttacgagcattcctccactttcgctcagaccagcaggcgaaggggcgggcagccatgcaggcggcatgcaaccacgccaagtgggcgcacccctccgacttccaacgcacccagcatgggggcccacacccacgcgtcacgcaaccgacgcgccggtcgctacgtgcaagcaactacaccgccactcgcaccactgccacgcctcctcgactgcggaaccagtaccgtgactcgaggcgaccctgcgtatgacccagcagtgccagccaggcgcgacggtcaatacggccaaaaatgggccggcagtaatggcggtggcaggcgggcgggagcagcggtcacgtcgggaagcgagcgacgcttcgccttcgccataatgaccgcgtcaaaagaggctccgagcctccctactgatcagaggttcgaaggctggcccctcggaggggttcaacagccgcctcagagcgcgtgggttctgcgcccactactggtcagaggttcgaaggccggcccctcgaaagggttcaacggccgcctcaggctactcgggctccgtgcccactactga

SEQ ID NO: 15677 - DNA, 264 bp, Zea mays
  Peptide Sequence Number=SeqID_59052
atggcgccccgcacgctctatgacgatgacggctcccagcccccttacggagcaagaggacgtcaacaaggactcgacagccccgacagctgtccttccgccaggctccagcgctcctccgacggccacgacaccacacgaaccgggtgccaaaacctctccggctgccacgatggcatggagcgacggtcggacccagtgcctgttggggcgttgagatctgaggctgatgggaagagctcttccggtcactccgacgtctag

SEQ ID NO: 15678 - DNA, 378 bp, Zea mays
  Peptide Sequence Number=SeqID_59053
atggtgtgtttgggcctcggcggccgcagaaaacacacgctacaagataatccgatcctgcaggctcggatctcgatagttgaatggagcagcagcaccctcggcgtcgactacaccttcggcgagggtctcctccaagaatccggctcgagcaggcggctcggctggtcaccccgaggcctcggccagctgtcccccgaagacatcagcccggcccgaggcctcgacagatcaactccggcgtcggtcccgctaacggacgacccggctaggctccggctgaccaagtcttcttttcgagccaactcttcctcagtccgtgctgacaccgctaccctggcttcggctcatcgaagagcggccgagggcttcctttaa

SEQ ID NO: 15679 - DNA, 705 bp, Zea mays
  Peptide Sequence Number=SeqID_59054
atgaggatcaagctcaagatgatgaaaatgaagatcaaggggaggacaatgaccaagggggagatgataatgatcaaaacaaggaagatgagcaagaagtacagggtcaaagatcgtctcacccaagagtccaccagacgattcaaagagatcacctcggtagaggatgcactaagagattcggattgggagttggcaatgcaagaggaactcaacaacttcacgaggaatgaggatgccaagtccatcaagacacccatgggaacaaatgggcatctcgacctcgacacagcagataaatccgtagatcaaaaggcagtcaggcccggcctcaggcaccataggaaactccgcttcgcccgacccagggctcggactcgggctcagccccggaagacggcgaactccgctccgcccgacctagggctcggactcgggctcagccccggaagacggcgaactccgctccgcccgacccagggctcggactcgggctcagccccggaagacggcgaactccgctccgcccgacccagggctcggactcgggctcagcctcggaagacgacgaactctgctccgcccgacccagggctcggactcgggctcagccccgaaagacgacgaactccgctccgcctgacccagggctcggactcgggctcagccccggaagacgacgaactccgcttcgcccgaccctag

SEQ ID NO: 15680 - DNA, 804 bp, Zea mays
  Peptide Sequence Number=SeqID_59055
atgcctggattcacggtggcgcaggcgctggaggcgtccacagggggcgacaccgtgaccctgcccccgttcgacatcatcgcccctccccccgaccaccgtcgatttgtagaaactcctcgcccgtgcttgcttcaccagcgattcggggaggccatgcccccctcgatcacaccccctctctcctcctcaccgcctcctgcctcctccccctcgaccacatctacctccctccgtggcctcgctaccaaggccgaggtcgtcgagatcgacctcaccgaggaagacactagctccttggcccacgcgccgcggtgccgcccctggaccggtcgagaggagcggaaatccatccatccggccgtcggctgtaatgaaaatctgggcctgctagagccaggagttttcgttgcaaatctgcgtgtccgctatgggttcaggcaacttgatcgtgaagaaggtgatgtcctgagcacaatacatgcacaagttcccaatgggatagttctgggagactatgtgattgagtatggagatgatgacaatggtgaggactatgaagttttccgcggtgtcaggacgaactggtggtcatgtatattctacaaggcgttttcgagatctttaagaagtcgtagaagagcaagggaaagaaggggcagtggaaggaggattgggaaccaagctaatctagaaaattttaatatcgaggttccaacacaatctgttgaattaagggaaaatagatttgatgaaattgatgatgaatacatagtcacaggggccctcgtctacatcgattaa

SEQ ID NO: 15681 - DNA, 504 bp, Zea mays
  Peptide Sequence Number=SeqID_59056
atgacgaggaaggtggcaaatgcaccggggcttgccttggtgaggaggagagtcgggctcttctaccaggatattgcagttagcagcaaatccaaatggggcaccttttggaggacctttagtgacaacctcagttggagaaggctaagatttttaccaggagctattctaaaggaactacaggctttcatggactctggaaaatttgtttcactatgttataatttttctacattttctagtggaaaacagccgcgcacaggccgtctgcgatcgtatatggaattcttactaacatcccctcgaggagcgcaaccttggttaagctacgcccaaggccatatggcagtagcgtttaaacataacggtgtaaaagcactaatgcttgaaccaaattacgatgctcacccggacccgatcgagcaggacgcgaacaatccggtcgacgttgaggataattcacggcgcccccccaccggcgttccaagagatgggctgaggtag

SEQ ID NO: 15682 - DNA, 855 bp, Zea mays
  Peptide Sequence Number=SeqID_59057
atgtcgactatctctgatcagaagaaacgcacgttagaagcccttcagcaacggtatacttctgcaaaagctaagaaattgcaagatgaaaaggttaagagtcagaagaagagcaattttaatacccctaagcctaactttgatgcaccaagggaaggcaaaggtgtagcattttccagttctaattatcaacaaaagccttccacgtcctcaggtgaagaaatcaatcctgtgtatgctgaactttcttgtgcttttcatgacaatttgtctaaaggtgttatctcggattttgatgacacagaggttgtttacaatgttataaatgacataattcagaaaggtggagatgctgggaaaattacaaagggagccaaaaagttgaaactggaaagagggatccttttggataattatgttcagaggggtcctagattagtggatgcccaagcaagatctttactgattcattcaaagcgatcaaaaagacacttgtctctgaaacaacataagaaatgtggttcatttgatttagatggtacattgcacaagtatggcctctatgagccaatgcataagatatggaaggactatatcagagagcttataaatgtgaacccgtatccagtggcagaatgcaaagctgcttcagataaaggtttaaatggcatcatgattcgggatactgcagagacatttggaattatatccgaggacaaccgcttccgagctgtaccaaaagctggttcggttttcacactagaagcagactgctggaagtgcacactgatcggtgacaagctctcgcccagggagaagctgaaggaggatcagcgtcaacatcgtgcgcaatag

SEQ ID NO: 15683 - DNA, 828 bp, Zea mays
  Peptide Sequence Number=SeqID_59058
atggtaaggtggctgccgccgccggtgacagcggacggcgagctacccttcggccacgacgccgtaacgttttccttcttggtggcgtgcgtggccgccaccgtcacgctcgcgtcgtccatgtgctcggcgtgcggccgcaagccaaaggcggccaccaacgcggacccggcggggacgggctcctccgtctccggtggtagcggcagccaggaggctggcggcgcggaggaggcggcggtagaggaggaggtggtgaggctgtcgccggagctggcgatgcacggcgccatcgagccggtggcgctgccgtcgtcgacgtcgaggcggcggctgtccatcagcgtgagcaagaagctgagcctgaatatcccggacaagctgcggctgagccggcgggagcacaaggaccaccaccatcacaaggtggagtcggaggacacactgtggaagaagggcatcatcctcggggagaagtgcaggatcccgggggagcgggaggcggagtgcgccgaccccgacgacgacgacatcgccgccgccaacttccgccgttttagtttagaaaattgggctcatcgatgctattacccttcaaagaatagcattccttatcagaagtataaagcgttttccaggtcaagtataaagcgtggtgagaactatgacaatttaatccgcgaaccaaaaaccgatgagtaccctgaagattttgacctgggtacacacatatccgatgagtatcccgaagattttgacctgggtacacgcatatctgacccgaagtttcacgaatatgggtgcaaaattacatttcaacactggtga

SEQ ID NO: 15684 - DNA, 201 bp, Zea mays
  Peptide Sequence Number=SeqID_59059
atggcagggtatgccgggatgtactccagggacgatctgatgaaaaataactttggtactgaagacgacgacgacgaggagggtgatggagacgaggatgacaacttcgcaaagaacatgggaaaagctctgaaagacaagggttctcaaaaagaaagatttgaagcagcaagctgtgcaacggttcaaggatgccagtga

SEQ ID NO: 15685 - DNA, 531 bp, Zea mays
  Peptide Sequence Number=SeqID_59060
atgaagtccatagctacttttgcattaccagttaggggggagaggaatttcatcagccgatcaactgaggggatatttttgtatactgttggtgtaattataaacaagtggtttaccgccgccggcctgcagcctcggccgcccgccgcgcgtcctgcagctgcgccgccgtcggccgcccgccgcgcgtccgtcctgcctgcctgcatccaccgagctgcacggtgcctgacgccgctgctcccgctccagagggccgcgcggccgggcctgagcgcctggaacgccgacctgcctgcgaggccgcgcccggagctgctcgtgcccgcatcgaggggccacgctcggggctgcctgcgcgcctgcgcggctgcccacgccgccggggaggcaacgcccgcttggagaagccgctggtcaccagcagcagaccgcactgcctccacgcatcgccactccgacgtgctgctgctgctgctgctgcacgggggctggaacaggagaggaggacgagatatgtggtctgagtag

SEQ ID NO: 15686 - DNA, 717 bp, Zea mays
  Peptide Sequence Number=SeqID_59061
atgccgcgcgctgacgaggcgttcggcacggctccgctccgcctccgctccaccaaccgaggattaggcgtcgtcgccccgtgccacaggcgccgcgcccagatcggtgaccggcggctgaacggcctccccggcagggcgccggccacgccaccgccgacgcagctcatggaacggctctcgtcgtcagacggcagcgccgaggcagaggcggatgctgacaggatcccggcggcggtgttcgagcgggacccgtccgagtccaacaaggactggagcatgatgtccacggagtcggtgttcggcctccaggtcgcgccgtccagcgacttcaccggcttcttcctggcgcacccggagctcatggacatcgccacgccgccgcgcagcagcgccgtcatcgacgccgacaacgatgccaaggccgcccctgccatcgtctcgccgcccttcgagagcatcccagagctccccgagagcgccatgaaggggaactactccttcgccttcccaaatttgatagaggacaagaggaactactccaagaagcagtctcatcgagaccaccagccggaagcagcagcagcaacgacggaggcggtcaaggccgcgccagcaccgccagtagttgaagcgaaggcggagccgcagccggagacaagaagcaaaccggaggcaggaaagggcggcttgttctcctgcttcccctgctgctga

SEQ ID NO: 15687 - DNA, 192 bp, Zea mays
  Peptide Sequence Number=SeqID_59062
atggatcacaggattcagcgtcacatgctcatggatcggagggtggtgtcaacgtccaagacttcctcgtccatggtgctggagggagtggccaccttcctggtggcggaggagggagtggccaaaactcccacagcccgccggagtgaggagtacactaacctcgaaaacgtatgtgtagttgacgactag

SEQ ID NO: 15688 - DNA, 240 bp, Zea mays
  Peptide Sequence Number=SeqID_59063
atgaggaaaatagaaggtggatctcttatagtggaaaacgcaagcaataagctaagtgtggatggtgaagctaaagaagctcaacaagaacactctcagtttctcaatcctaacaacagtcagacacagagcgttcaagagattttggttttacgctcaaaactgaaggtgtttacgctcggacatggagatgcttccaacagtaaacgtgtcgtggttgcggaaactgagggacaataa

SEQ ID NO: 15689 - DNA, 999 bp, Zea mays
  Peptide Sequence Number=SeqID_59064
atggcttgtcttaggcacactacacgaaagtctgtcatccccttcttaccctcccgccttgctgagcgtccgcctcgccgtcctgtgaccggacagtccagccacttggagaggctgcaccaccgcctgcatgaggagcaggaacgtcgacgacaggagcagcagggctcttctttctcgctccagcaggagatagagtctgtgaggagctgctcccccgtgcttcctctagaggcgccccatgcaccaccactgggcgacccagcctctggagtagctgctggaggagacccagacgacggaggtggcgacgatagctcaagccacgacactgacttttctactgaccaggagccggatggatgggttgctcggcccatcactcgcgacgctgctcgcgggtgtcacttccacgatgcgctcgacaccctgctacgtcgggcacttgaccgacgtacttggtctatcaagtatcgctgtgtggtctaccagcaaagtcacggggtctacccggaccgctgggaggcgacctgcttgaacagtctccagggtgctgaggtctgcttagagcactattccatctctgagcgggactcagctgaggcggccatgcaagatgccgcacggcgagcgctttcgcactactgctcagtgctcggcggggtagccgatggtctcaacctgaagtattacccccgccgtccatctggcagcacaggaggcgtgattgtctcacctgttggtgaggacaatcctaggttgagcagcacagtcaacccagccgccgtgctaaacacggagctggaccatgcactagacgagctgagtagggctcatgctgagatcgcccagctgcgggctgagcgcgtggagcgtcgtcatctggacggtggttcccccgctcccgtcgggactcagcacccgtaccgctcacctcggcgtgtacaccagccttatggcaatcccgactgcaagaccaagatagatttggaaccatag

SEQ ID NO: 15690 - DNA, 519 bp, Zea mays
  Peptide Sequence Number=SeqID_59065
atggcgcccgcgcctctctcctccaagtgtgccgtccacaccaagctcccctgcctcaccgcgccccggcccgccacgcgatctctagccccgccgcgcccgccaagtctccgagatcgagcagatccgccatcctgcaccctcgcccccatcacgcgctcaccttggccccgcatccctgcaccgccataccctcggcctcgccctcgcctcatcctcccctgcccccgcaccgcatacaacgtgcagatccagtgccgtcgccgcgatgcctgcccatgccaccacgtgcgccgagtcgaagaatcggcgaggaacggtcgcaggaactgctccacgatggaggacgagaagccgagctgcgccagatgctcccccgtggtcgtctctggcgcccctgtgaagctcgggtccgcgaccaccacccctgctccccctccatcccatgccactccctttgacgacgatgcgctcgcctcctcttccgaatcacaagttcttcgacaagtcgtggcgtaa

SEQ ID NO: 15691 - DNA, 255 bp, Zea mays
  Peptide Sequence Number=SeqID_59066
atggcccatgaaattataaagaaaagtgaaaaagacacccatgaagtccaagcagaagcaaggcgagctgaagaagctgcagagtgcgaaaagcgtatagctgaattatctccgccgccggaaccgttcgatcccctagctgatccagaaatcaaggaagcgttggacttcataaacaaggctgaatccattgtcgatgaagtcgtcaacaacttgctgaacgaagttgcagagaaagtccttaaagaggaataa

SEQ ID NO: 15692 - DNA, 453 bp, Zea mays
  Peptide Sequence Number=SeqID_59067
atgggcaagaacaacaagcgtaagcgtgagccgactcctccatcagaggagtttggcgactcggagtactcggaggaggagttctcctccgagcccgaggggtctccggctcccgtctctcccccggcgtcgtccgatgactcggacgactcccaggggatagccgcggaggtctggacatacatccgggccgtcgagcgcgccgggctcgaaggctcggatgagtcggagtactcctcggatgaggaggactcggacggcggcgaggagggtgaagacgacgacgacgacgacgacgacgatgacgacgacggcggcagcagtggcgagggcgacggcgacggcagaggcggcaccaagggcggcagcggcggcagcggagacagcaccaggggcagcagcaggggcagcacccggggcagcggcggcggcaggggcagggccagtggctag

SEQ ID NO: 15693 - DNA, 678 bp, Zea mays
  Peptide Sequence Number=SeqID_59068
atggcggacatgccgatggtgtcgtacaaggctgagggccccggcgggcgcaagacggacgggttcctgtacaagtataggaagggggaggaggtgcccaactccatcaacctctgtcggattttctggccgtcaataacaaagaaatcacaggataccagagagatgatgatcagcccaaaggatgctgcttcaataatgcggaaggttgatcgacccccaaccaatccgaagcgtttaatcattgagtcaagtcaagaatgtttcagtgttgacattccgcgctcgactgacatggcagaccctacaaatacgcggtctgatggtgatcctccgcagcatagaaagaggggtgttgcagctgatgttaaaaacattcctatgcctaatgtggatgatgacgatgactttgagccaccaaaaaagaagtgcaatatctcaatggatgccccaaataagacgcagagactcaacatcagatgcaacccaggagatgttcttgcatccattcagatattgaatgaaaggcaacgtcaagctatagttagaaaaggattctctagtattcttgacatgacaattagatgcaatttgttgtcccccgtttctttgttatatcgtgcagaagagcggttccgttcccctgctattcgtggtggccctgacaaagtcatcagc

SEQ ID NO: 15694 - DNA, 273 bp, Zea mays
  Peptide Sequence Number=SeqID_59069
atgctgctagactacacaacggtactcgatggaccaagggcatctttggctagggtgcaagggaatgcggcctctcagactccacctcctgctgaggcgagggggaagagtcctactgctcctgctcctgacatcagcgctcctggtcctcatgcaggcgacgatgcaatcactccaggtgactggactgacctggcaccgtgcgacgcagtggacgctccaccagacgagatggcaaaaaggggatcacagacttacatgcagtgcacctga

SEQ ID NO: 15695 - DNA, 81 bp, Zea mays
  Peptide Sequence Number=SeqID_59070
atggtggtggcgcagggacgcgacagggcgacggtggcggagctccggctgcacaggaagaactccgggttttcaatttaa

SEQ ID NO: 15696 - DNA, 510 bp, Zea mays
  Peptide Sequence Number=SeqID_59071
atggctgacgatagagaagaagaaactggcgaggatatatctgtgtcattgcacagagctgaatcagaattaagagcgccaggggacaatgatggcaatacaatagtaattgaaacaatgatagcagcaaatcaaatggtgcctatgaggaccattagtgatcatgatcaagatacacctaatatcctccgaagtcatcctgaaagtattgatcaaaccatggtgcctaggatcggtatgacatttggaaatgtcgatgaggcatacatttttacagtcgttacgcatatgaggttggttttccacttaaaaagtatagggagagaaagaactgatactgtaaagaaacacctacaatgcaacaagactcatgatcctgagtacatggagtttctcagttcaatgcagcaaagcagaatcccacaacactgtatcatggacttcgtgtctgagatgcatggtggtcctgaaaacgtaccaattacagcaaaggacattgctaatttgtaa

SEQ ID NO: 15697 - DNA, 420 bp, Zea mays
  Peptide Sequence Number=SeqID_59072
atgacgcttgttggaaatgatgattgtgaaggaacacaatatggggatgttagaaagagactggaatatgatgtagatggcataagcttagtgcgtccaaataatgcaaggccaaagggaaggacgataaaaactagtgaacaaagagttctgaaactgggtgcgaaaggagaaaagaagaagactcgaaagtgccaaaaatgtggcattgctgatggacacaacagtcgaacctgcttgtctatagaggaaaatagggttaaattggctagccttgccgatagaaaaagaggacgaccgcctgggtctagaaacaaaaattcaacaatggccccgcagtggaatgagacatccacatcaaaaaaacataaacataccgattctgaagaacatggttcggatcacgataatttgacatga

SEQ ID NO: 15698 - DNA, 192 bp, Zea mays
  Peptide Sequence Number=SeqID_59073
atggcggcccggtccgcggtggcgagtgtccgcggcggcgtggtcgccggtgcggcaattgggtgcaatgggggcggggaggcgcccgggggagggagagggatggaggatacggcgagcaacgacgagctcgccatgatggcaggaatggcgctaacgccgattgagatggctcgggcaggcggggggtga

SEQ ID NO: 15699 - DNA, 468 bp, Zea mays
  Peptide Sequence Number=SeqID_59074
atggggatccgcaagaagcccgaatatgtctggaaggaatatcgcgaaaatggaatagaaaacaacaaaagtacccccacctggaggaaaagactccaggctctgtcaggaggagaccccacagaagatgaccccaccatcgtctacatggccggatacctccacacccttgacaaccactacgatgaactctcctcccactgcacccacctaaactcccaggtggaaagcctagagcagcaagtcaaagagcttaagcaagaaaagacatctctccaggagtgtctcaacatagcagaaggcgagaaggccaacacccgtgaggcctatcgaaccttaaagttggactatgacaagaagctaaagaagctcgctcccaagaagaaaatccagaagaagaccaccaaccaagggtgccaaacgaagaagaagaagaagaagacccctccagccccacctcccccatga

SEQ ID NO: 15700 - DNA, 300 bp, Zea mays
  Peptide Sequence Number=SeqID_59075
atggaggagacggcgagcaccgacgagctcgccatgatggcgggaatggcgctaacgccgattgagatggctcgggcaagcgggggagctcaagttgtgacttctgtgcgtgtttgtgctcgtgctttgaggcttgtgtgtgttgctcttcccactcttacatatgtgcttctttgtgatcatctcattgtaagggcgagaggctccaagttgtggagattcctcgcaaacgggaaagagaaaaggaaaaagaacaccgtggtattcaagttgaccattggatcacttgaaaggagttga

SEQ ID NO: 15701 - DNA, 435 bp, Zea mays
  Peptide Sequence Number=SeqID_59076
atgacggcggcggcggtctccttccgcttgagctcagggcaccgagctcgggtccttcctgccctccctatctctccttggcgcctggcttgcgacggctatggctcagggtcacaggcgctcacattttatagtccaggtggggagtccgcgtggacgaaaccgagcatcccggcgaggttggcgcgattcttagtgcgcgcgcgattaccacgcggattcctggcggaggttgggatcgtcgcgcatgccgcggagaaggtgaccccagctgcccagcgtagagggcccactgcccagcatcccatcggcaccgcgagcaacaaccagcaagcgaagattctggacaaaaactcggagtccagttcgctgagccccgtggtccgcgcaaagaagatgaccctgggatgcgggtcccgccggtcagtgaggtga

SEQ ID NO: 15702 - DNA, 348 bp, Zea mays
  Peptide Sequence Number=SeqID_59077
atggcgcattctccgccatggttccaggaatccgatgagaaatcaacggcgctccaattgatcttgagctcgaagcttcccctgcgatacggtgagtcacagcggcacgcaccgtcggacttcacccgtgcgcacacacgctcgacttccgcaccagacaccaccctcgcgctccagttctctctcaccagcggcgagcagaagattcatgggtggcggccctctcttgccctggcgatggcgacggactggttttctttttctcactgtgctaatggcggctcgacggattcctctttggatggctcagaggggcacggctttaaacctcggaccgagtccaggcag

SEQ ID NO: 15703 - DNA, 645 bp, Zea mays
  Peptide Sequence Number=SeqID_59078
atggccttgtggcttcatcccgagcacgcccagactgagcgagtgctcgaaatggtataccacctgcttggatgggatgtgctagtatttgccgggaggacttgtgctgctgctggaggggcttggcctccagcctctacccgtggcatcctgcttcatcttttaggcggccatcatcgcctacctccccgggatgtccgtggaggcgacgctccttcctgcttcttccaccagcattcggggggaaggatgatcaccagcctcgtgaaggtggatagcgggctgagccacgactccatccctcgcgccccaactctttggggtgggaagcgagccgtgctgcggctccatctctttggttttgatggctttggtgccgcctccgacgccgcctcccgcctccaagcgggcgtggctgtccgtccaccgcacgggcgatggtcgcaccgtgtgctgatccgccacatccgtggcatcccctgcaccgccgaccgcactgctctgacgccgcccggggggtcgtacaaggcgtcgtatgccatggaggtggcggccgcgttcttggatggtcttgtcctcacccccgtaggaggacgggggcaaggaccttttcgcacgcgctgtgatggccgccgtcgccggtga

SEQ ID NO: 15704 - DNA, 414 bp, Zea mays
  Peptide Sequence Number=SeqID_59079
atggctgctactcaagggatgaacccctttttaaaggcagatttccctgctcgcgccccaaagcgtcacgagcagggcctcccccgatgcgcaccaaggttcccatcctatgacacgggggccaggcctcacatgtcatacaagctggcccgaagcacgaagaaggcgaaccgccgcacaaggagcgcgcaaccgccccgcggttgtgcgccccttcatcttcgccgcaaccaacggtcaagaaggcgaaccgccgcacaaggagcgtgcaaccgccccgcggttgtgcgccccttcatcttcgccgcaaccaacggtcaagaggacgaaccgccgcacaaggagtgtgcaatcgtcccgcggctgtgcgccccctcggctttgccacaaccagtgatccaacctctggcatga

SEQ ID NO: 15705 - DNA, 774 bp, Zea mays
  Peptide Sequence Number=SeqID_59080
atgtatcagttgggccggacctccgcgaagaagcaccgggacccctgtacgcgcaacccggaccccgattacgatccgagactcccaagtaagcataccaggtcccttggatggggtctaggttcgggccacaacgaggtcccaggacagggggaccctggcgtaagcaagggtctggtactgacacgtgtccaggccttatcctgtgcgcttgcgctccccgctcaggcggagtcccgatgctgccacgtggttgttacccgtgacataagccagcgggcggagcctgacgtaaggcctctaggccgcgcggtctctgcatttattgcggaaaggacgcgccgcctgtccgccctgctgacaggcgatgtgccccctcggcatttaatgcgtcttgtccactcccctggcaggcggcgccagggccatcctgcagacggcacacctgtcttgtccattgtcaaacagtgcgcccgtgctgcgcgacgcactgtgctcatcatcccttatacaagaagcttcccctgcacgtcgatgctacacagatctcggatgtcagggcgcgagaagattgctccagcagcaaacattagtagctccaagtactacatccattgtgttcctgggcccacatgtcggggctcagtacccttgtacgtgccccccttgagctataaaagggagggcacacagcgttacaagggggctcgctcagaccaaactcagactctcagctctcaatcttcgacagcaatccaaaacacagtggagtag

SEQ ID NO: 15706 - DNA, 1422 bp, Zea mays
  Peptide Sequence Number=SeqID_59081
atggaggaaaccgtggctaacgtggagggagcgcagggccagctcctgaagtacctcaacagcatttcgtccaacaggtggctgatgatgaagatattctttgtgctgatgtctccaccctccacggctcccccccatctcaaaacccttagcaaccgcgcctccatcgggtccatccttaccccaaaatacccaatccaagttcggtcaccaggcggcgaggaccctcccgcgccgactcgtccccgcagatcggcgggcggggcagattcagattcgggtccgtggttcgctcggctagccctcgccgggggtcccaccgcggcgggtcgggggagcatggtgggaggggggaggcggggaggagcggcggcggaggaggtgaagctcaacaccggcaacgtgttcgcggcgctcgagtccctcaagaagaagaagaagggcgacaagggcagggcggccgggccgtcctccaggaagaagcacggcgcgggggccgcgcagcagcagcaggagccgccgcagaaggatgtcttctgggctcccgcgccgctcaccaccaagtcctgggcagacgtcgaggacgacgacgacgacgactacttcgccaccaccgcgccgccgcgccccgtatgggccgccgccgccgccgccgagcccgccaaggaggaggaggacgtcgaggatgctgtccgcgccgcccttcaggagtgcaagaaaaactaccacattgacactgagccaaattgtactgaacgtaaacggttcagccaacaggcaagccttacccacctgaacgagatggaacatgacgttgagagtgacgacgaggaccttgatgacgaggaccttgatgatggagctgagcatgaagtggaagatgccccagccgaacttgctgtcaaaacagttgaagccctggctgcgccacccaaagatacagaaaggcagctgtctaaaaaggagttgaaaaagagggaactagcagaacttgatgcagtattggctgagctgggactttctgggaactcaaccagcgctgcacaggatgctgagaaggaaggtgccaaccaagctggtgatgcagagaaaaaggaagatgctactgtcccctcagagagcaagacctccaagaagaagaaaaagaaggacaagagttcaaaggagggaagaaaagaaacacaagaagcagccgaggggtcagaggagactgccagtgcaggacctgatgaagaagataccactgctgtggacgtgaaggagcgtttgaagaagatggcttcaatgaagaagaagagatcgagcaaagagacggacaccggtgccaaaatcgccgctgccgaggccacagcaaggagcgcaaggcttgcggcggccaagaagaaagagaagagtcattacaaccagcagcctgtgcggtaa

SEQ ID NO: 15707 - DNA, 123 bp, Zea mays
  Peptide Sequence Number=SeqID_59082
atggtggtggccccctgggtgaagtaccttagccaagaatacgaccccatgttaacgtgggctgccagcacctaccgctccccctcttgcccatctttcaggttaaacaaggaatacagatag

SEQ ID NO: 15708 - DNA, 216 bp, Zea mays
  Peptide Sequence Number=SeqID_59083
atggcgagtggaaggacggtggagatcgagagcatgggggcaggcgttgttggggccgaggtcagaggagatcgattgcgattacctgcactacctgtcatgtacgggcgctcgtacgccaggcagcgtcgcgcccgtgacaggcgccgcgcacaggagcgcgatctgggagatcagcaggaacctatggaaagcagtggccaggaaggaaattag

SEQ ID NO: 15709 - DNA, 451 bp, Zea mays
  Peptide Sequence Number=SeqID_59084
gggaggcagggacggcctcgggtcgtcgaacggagcaggggatgacgtcgaggcggccacgggcgtcatgacgagctgcttgccggcgacaaagaacagaggcgacgacgagcagaggaccggcaggggtcagccgcggtcgagttcgtcgggcagggctcggccaaggcagcagaggaggtcgccgacgcggggaaaggtcgacggcgctcaaggggaggacggggaacgacgtcgaggggccggcgtcggggtcgtgcgcgacatcgggctcctggcgtgtggtacgcggctgcagggcgccggcgctcggctgcgcgcgtcgcacggctcggccgcctggacgccggcgcgcacgggaggcagcgcggcgtgcggccggctcgcgcacggcttgcgcagggctggcgcggctcgttgccgggcgctgggcgcgcgcgcggcgtgttag

SEQ ID NO: 15710 - DNA, 1608 bp, Zea mays
  Peptide Sequence Number=SeqID_59085
atgagggactccattctctggaaatggacggcagacggagcatattccactcgcttggcataccgaatacagtttggtggctcctacggacctttccggttcggccttatctggaaagcacatgctgaaaacaagtgcaatgtcgtttttgttgtgctagatctaggcgtgcgagtgtccctttttctgtcctgcgtattcgagaaaaaaacaagtgcaaggtcaaactttcaattcatttggccttggcaggagtggtcttatgtcaaggacctcccaaaatgggctccacaacgggtttttgtccaggaagtactggaaagggaagttcgcttgtcgtactttgaaaaaatcaagcagagtatcgaggatgctgctgagttagaagaactgctacccccaaaagctgggcctaatttcaaattccatagcgatgaaagcaacgaaagcactgatggcctgaagttatccaaggaacttattggcttgattagaggaaagaagtctacatatgatattattttatgggttgaggaacaaataattccaaaaaatggtactgaatttgcacttgatgttgttagccagacgcttcttgacatgggttcaaaaagtttcacccatcttgtcactattttggagagatataataagataatctctaagctatgtccaaatgaggaaatgcagctactgttaatgaatggagtcagtgcttattggaagaacagtacccagatgactgctatagctattgacagaatgatgggttatcgcctgatatccaatttggctatagtcaaatgggttttttctcctgccaatgttgagcaatttcatgtttctgatcgaccatgggaggtgcatcctttgtccttaattttaccttcatttgtgattcttagaaatgctgttagtaaaacatacaatcggatcagtgacctccgcaaagaaattcaatcactcaagaagggtcttcaagttgctaaagaggctagtgcaaaaaacagaaaggagctggaggaggccaaatcagtgcttgagattgtagaggggcaacctgcaccagctgaaagaccaggtaggataaggcgactagaatcacatgtcaaaaatgcagaggatgaggaaagaactcttgaagaatctttagaagcgaagggagttctccttgctcgggctcatgaggaaagcaaggacttgcttaagctactctttaagagctttgttgacgtgctcactgaacgtttgccgcctgtctctgttgatggggaaattcctaatctgcgcagtggagatcaaaatgtaaattttgcagctcaaaattctgaagcagcaacaatggagattgacaatgaaaatggagcagataataatagtgaaccgaatgagcgaaacacaaaaaatgcatataatgttggagagcttgagcagtggtgtctctgtacactgggttatctcaagtcattttcccgccaatatgcaagtgagatttggtcaaacatagcaatgttggatgaggtcttcgttggggatgttcacccacttatccgaaaagctgctttctctggtttgcgcagatttaccaatgaagggtctcatccttga

SEQ ID NO: 15711 - DNA, 2134 bp, Zea mays
  Peptide Sequence Number=SeqID_59086
atggctccgttgcatggaggcttcagcgcgggaaagtcgggtctctgttgcgatttactcgctcgacgtcgtgggccatccgggtttgcaccaatccgtggacccgggggatatctatcccccacagtcgtcgaccgccgcgggaaaaaaccagcggctgtgactgaggacgaccccacgccggaggccaccctagccactaaaaagaggaagctaggtactgcggtgggagaactgggggtctccgatagctttgctatggagttgatggggacatgcgcggccctcgggggaaggatgtcttcgcccgagctccgggagccttcggcgcgaatgctagaggttaccgggggtcgatggcccaagaacgttcctatcccccgcgcggctggcgaagacttctttacgtctcgcatggctcgtgacttgagagtgtttccttacggacggaatattgttgttgttgtgtcggcagtgatgaacaaggaccgccagggtgctacgcagaagcgctgggcgatcatcaggctccccgatgctaggccgaagagggcgcgggggactgagaaggctaccatccccggcggtaaccagccgcccctggcggcgaagccgaccgcccctgggtccagcaagttgccggagagcgcgaaggtggtcggcgccggcggaaccaagtctgcctcggacggggctgcgaaggtccgagaattgccttcgctggggaaacgtgttgccgacttcggcacaaatattagcgtggacgactatctcgttgggtggcgctttcagcgttggcggcgagatttcggcggccactgccgtcaaggacgaagcgggcactttgtcccaccggctgagggaggcatcgcagtagctggcgcagcagctgagtcaaacgtggctgccgaagtcgagagacttcgggcgcagcacgcgaacgccgtccgggagaagtcggccgcggagagcaaaagccgcaggctggcggagaacgtggcttccctagagggagagaggacggacctccggcgccagctggtggaggaaaggagggaggccaaccaggccatcgccaaggcgcaggcggcgcaggcggaggccaagttggtgcgggcggaggggagtctcgccagccagcgcgccgaggaatgggaggtgcgattcaacgctctgcaggcccgcatggagagggccaaggcctctatgcgctcggaagttgagcggacgcgcaaacagctcgtggactcataccgcgagctgggtgcgcggactgctgacttcgaggtgcccgaccgagaggcgggccttcgcttcctcgagtggctgcaagaggaattgctggcactcccgaccatcgtggagggcttcatgtcctttgcctccctcgtcacctgcgaaggggccatgaatgcgctgtcccgcgaggggtgcaatcactatgagggcttcgaccgatccgatgaagactttgggcgcgagatttttaaggtcgaagaccatgtggtgaaggactccgcgggggccctctttgaccggatgtggggccccacggtcgggaggcggttagggagcgatggcgcgtgccgaggacgtggaggacttggacatctgaatagcgcgcagcccgaagcggaggtcaacctggtggaggccgaggctgaggtcgacccggtaccacccccggaaactggtgaaggctccctcgctgcccctgcgtctactgtgtctggtggaggctcgtcgccagccactgtgccgatggcggaggatccctcgaagacggcgacggagttggcagcggaggatcccatggcggcggctaggtcttcgcaggattttgggcctgcgcacgcaaccgctactgctaattttgtggcggcttcgaccgtgggcgctggaaatgaatcggatgagtctacgtctaagttttctgagtttgatgactctgggagttcggttgtgtggacggaagagtcttcggatgaggacttggattactttgcggccttggatgtggctgtggcggaggcttctccgcgtgttacggatgctgaagttttgcctggtccgagtgctgggcgtaagcggcgaagggcggtggtgaagcgtagagtgagtgaagtggatggtg

SEQ ID NO: 15712 - DNA, 954 bp, Zea mays
  Peptide Sequence Number=SeqID_59087
atgccgcacgcgccagccatcgcccccgcatgccacacgcgcaccaatctcgccgcacgcgccagccatcgcccgcgagccctcgcccccaccaacccagcccccgagctcgcccgcgcaccaatctcgccgccggtgatcccgcccccaccaacggcgtcacagagcctgcccacaccaaactacgccccctgccctcgcccttgcaaaggacagtggccggtggaggtggcgtgtgcggtggccgtcagagccgtggagaattgttgcgattgggtctcattgttgcgattggaggagcacggcggtgacggagtcctccttggggaagtcgaggaggtcgtcgatgtgtccctcagcggcgggggcggctgcgtgcagtcccttggtggcgatggcatgcctgggagtgtcgtttcaaatgagcgtgacgagaagttcgatggcatggagcagatcctatgcctgagagcagatttcaagaaataccaaattaagtgggctgaggatactatcgaggtgattgctcttcatggactgaccaccttctgtggtttccaccccttggagctgtccactcaccccattggtttgttccccgcggagaaggaggatgacccaatgtggaaggaccgagtggagcatgccaaggatatatgggctatctacccaggtaagactgctcaattgacggtgcggtgcatgaatgctctgtatcatctgcaagtgatgcgaggagaggcaatgtctcatctaatggcattgttggaggctaccaagatcaccttggataacagggaggaacttgtggtagacttgtccactgagatggtggaaaaagacctacaagtggaacaaatgtcaaatgagatccaagagcttgaggaactagtgggaaccagggagaacaccatcgaggttctcgaggatcagctaatcaacactcagcagtag

SEQ ID NO: 15713 - DNA, 144 bp, Zea mays
  Peptide Sequence Number=SeqID_59088
atggggaagcctgtcccatcactcctcatgctcctcctcggccgagtgaccgcacttgtacccaccataaccggaatgggagactacgtctcaggtcgtgtgaggggcaaagtctactgccaggttcaatcagggtgggtttga

SEQ ID NO: 15714 - DNA, 318 bp, Zea mays
  Peptide Sequence Number=SeqID_59089
atggcgcctttggcaaggcctgactgcctgttagactcactctgtcgagtggcactgcagtcggagtggcgcaggcggcgctgtccttctgtcagactgctttatgatgatgggggttaccagctgagaattaggcgtcttgagggtacccctaattatggtccccgacacgaaggccgctgcctgctctggtccccatgcgaagtcttttgcgctgtggagtgttttgaggaaagggaggcttcgctctgcggatttggagatgattttgttgaggacagccaacctgcttgtcagtcgttgtacgtctctggctga

SEQ ID NO: 15715 - DNA, 351 bp, Zea mays
  Peptide Sequence Number=SeqID_59090
atgaggaaaaaacacggctccgtgccgaaattacatacatgttcaggcctcgacagccacaatgaacaaaaacactggcattcgaagtgccattacaaacggaactccggttccccctccgcaggtacgaacaaccccactccatggggaaggcctgcggagcgacagaagaccgacgagcggctcgtcgccgcccgctccgactacgacgacagcgactccgactacgcccgcggcagtgcaggcctcagggtgggcgctgccgctattttgccctcgcccacgccgacgctcgaggggcgaggacaagtgcgaagagccggaggcccggagcgcggatggtggcggtga

SEQ ID NO: 15716 - DNA, 186 bp, Zea mays
  Peptide Sequence Number=SeqID_59091
atggcgggcggaggagagctcgccggagttggagttcttgctcgaggcgagaggcagagtgaagggcagaccgttgcgcacccgggagtgttcctagggtattttggcgccactttgatatttggactttatggtttcgagttttggaagatagggaacacttctgaactttgggaaagggtttga

SEQ ID NO: 15717 - DNA, 630 bp, Zea mays
  Peptide Sequence Number=SeqID_59092
atggaggttcgctgccaaaccagcttttgccagaaggaagatggtttccctaagttgctgagagcatgcacagttcgcctcggaatcaagagtcagccagagtatgatggtcgtaaattcgtcgagcatggcacagagaatctgcaccatgtggaatggagtgtcactgctggtgggcacagattcaaagacacctgccaagtcgtcgctcgcaaggcattgagggccctgtgtcagatctatgaagaagaagtggctcacaccccactaagattctttccgccctttcagagagaccgccccgcttggatggccaggatgcgtgcattggaggagcaacagttgcttgaggatgaccccacagtcgtgtacctcactgcatacctgctcacccttgatacacaatatgatttcttggcacggcaccaccgtcagatgattgcccgagcagaagatgcagagaagcgcaaccgtcagctgcatgtggatctcaccacagctcaagcccgtgcaactgccttggagagtcgtgaagtcattgctgttgaagccctgaagcaagccaaggatgagcacgtccagaagttgatggaggctgttggggacttgttctcaaatgctatgagttaa

SEQ ID NO: 15718 - DNA, 375 bp, Zea mays
  Peptide Sequence Number=SeqID_59093
atggatcctaagggcaaggggatcgtgatcaatgataaggagaaggagttccttaacgtcgatgagccaaaagatcctcatgagttaggatgcaaccatatcatcatatggtggcaatactgctgtcatcgcgaaatccttcgtcatggtagtcaggagcgtggctcaaacatggtattcttctcttcgaccggtaacaatcacatcgtggtagaagctgaaggatttgctagtcaccagcttccagggctttcagatgaagccagtgactgctcaagctctattccagtacatgcaggaccattaagagtatttataggcgtatgtcccaaggtttctacgtctcagagctcaggcgccaacagttccaaatga

SEQ ID NO: 15719 - DNA, 312 bp, Zea mays
  Peptide Sequence Number=SeqID_59094
aagcactggcctgcccagaggatggcttggagggggcttggccacggtggccgaaagctctggcggcaatggcgggcggaaaatgagctcgccggagctaaaggaaaagtggctgggccggtgaggatgagtgcggggcgaaagtggggcgcgcctgggagggcttttattggcacgacgcggtgcacaggcggtcgtggaccgcgtcaccaaggtgccagtgtcagaatgcctggtcccgaggttaagctgcgccaaaaccgtgccaaatggatttggtttgagttcaaactttcccagaatgtgttcaag

SEQ ID NO: 15720 - DNA, 199 bp, Zea mays
  Peptide Sequence Number=SeqID_59095
atgaagggtccttgtacccctacatgttgtactcttctctatgcctccttcttctgtttcttgttagccggctctgagcatgaaccgcctgttatcgggagaatcgacttcggagccaaagcagttccagcttggctcttccagcttggttctttaacgaagccattgtctcaggaaagtggaaatgagttcaccggag

SEQ ID NO: 15721 - DNA, 297 bp, Zea mays
  Peptide Sequence Number=SeqID_59096
atggctcaccggattgctcggtctacaggcggctgcgggcgaccgaagtccggcgagggcaatcctgggtctccagtgaggctctgccaggtccgaggacttggaaagcttcacgggccactggcgaggctaatcgagcgactggcgcggcttggaagcggctggagggagctggccatggtggcggaggctcgagcagtgatggcaggcgaaggagagctcgtcggagttggagttcttgctcggggcgagaggcagagtgaagggcagaccgttgcacacccagggtacttatag

SEQ ID NO: 15722 - DNA, 225 bp, Zea mays
  Peptide Sequence Number=SeqID_59097
atggcgcctgaggctcgactcggctgctgtcagcctcaccctgacaggtggcacagcagtcggagcagggcaggcggcgctgttttcctgtcagcttgtgctgatggtgattaccagccgagtttaggagtcttgggggtacccctaattatggtccccgacaccaacttattttctttgttggtttatgttgaacttgatgcacctgagataaatggcaactag

SEQ ID NO: 15723 - DNA, 543 bp, Zea mays
  Peptide Sequence Number=SeqID_59098
atgggtgcggttgtcaaaccgtttgagccagggctacgactctactaccctgacatcctcttcatcgacgggagagtagacgatgaccccatttccgacgacgagccaatgggtatcgacctcgttgccggtgggaggaacaagaagaccaagcgcacagcgccgaagtccgacgatgtttatctcaagctccttgtcaaggagaagaacattgctgtgattgttggcacagtcacagatgacaagaggatccaagaggttccagcaatgaaggttactgccctgaggttcaccgagacggcaagggccaggattgtcaatgctggtggggagtgcctcacatttgaccagcttgctctccgtgctccacttggcgagaacacagtcctcttgaggggccccaagaatgcccgtgaggcggtgaggcacttcggcaaggctcctggagtgccgcacagccacaccaagccatatgtgcgctccaagggaaggaagttcgagaaggctcgtggcaggaggaacagccgtgggttcaaggtttaa

SEQ ID NO: 15724 - DNA, 246 bp, Zea mays
  Peptide Sequence Number=SeqID_59099
atgtcgaggtcaagatgcccattagttcccatgggtgtcttgatgggtttgccatccttcattccaaacttcttaaagacaaccgatcaagccaaggatggaggcaagaagagcttcaaggtacagagtgcacgggagaaggtcaaggagaccaggaacccaaagccagaggtgaagaagaagacttgcaaagtcaaggttgatcgagttaagaagagttatggtgcatcaaggatcactacataa

SEQ ID NO: 15725 - DNA, 1074 bp, Zea mays
  Peptide Sequence Number=SeqID_59100
atggctactgcccaggaaatcgatccctttttaaaggcagatctccccacttgcgccccaaagcatcacgggcaaagtctcccccgacgcgctccagggtttccaccctatgacacgggggctaggtcccacatgtcatacaaactgacccgaaacgcgaagaaggcggaccgccacgcaaaaggcatgcaaccgcaccacggttgtgcaccctttcagcttcgctgcaaccggcggtccagcatggaggcctgggcccacatgtcatgtaacaggcgcactggttaccatgtgcaaagaaaccgcaccgccacttgcgccaatgccgcgtcttctcggggctacagaaccagtgcaatgactcgaggcagccccgcgcatgacccaacaatgccaattaagtacgacggttacggggatcggaaaaggggatatttcgaaaggatccttctcagcaaaggaaacgggccccgagccttcctaccgatcaggggttcgaaggttgcgccctgcggggttcagcaactgccccagagcactcgggctctgagccctttactgatcaggggttcgaaggctggcccctcggagggattcgacagccgccccagagcatgcagagtcaggaatgaccctgggtacgttcgttacatggccgaggctcgggctacgctcccgaggtaccctaggacatttccgagaccagcgggaacggtttgtaatggaatcccaccgaagggaggcaccgagccctcggaccctatcaaatgggtccgagtccagcaaatcacccgcagggtaaaactaacgacagtaagtcacgacctcccccgagttcagcctcgggcgcaacagggagctccacctcgcccgaccccagacctcggcctcagcctcggccttggagaaggtctccgtctcgcccgaccccaggcctcggcctcagcctcagcctcgggaggagtcacaacctcgcccgacctcagcctcggcctaaggagaagtcaccgcctcgcccgacctcggcctcggaccgactacgccacaagggatacatcattaccctacccctag

SEQ ID NO: 15726 - DNA, 687 bp, Zea mays
  Peptide Sequence Number=SeqID_59101
atggccctggtctttggagatggtttgacctctatcccctctcccactatgtttgctttgtcttctttgttatatgtcacagaggagcaggtggagagactcagggatgagaagctaacgcttgtggccagttggttcacacggttccacaactaccagaactggcggcgtggtgggtcaaacgatggatgcttcaactacgacgaccttgaccactttgttgccagttgccctaagaagggcaatcagcacaagggcaagcgggagtacacctccgacaagtacaagtccaagggaggattcgacaaggaggtgctcaagaagtacctccataaggctaagatcaaggagcatgccttcattacctccctcagcaacctcgaccacgactccaatgacgcaacatcttcctcaagcgacgaggtgactgacaggcaggtcgaggacaagctgaacaaactctacttcatcgtcgacatcataggcgacctttgcaccatggcccttggtgatgatgtggtgggcggcgatgactcttcttctgaggtatcacattccgtcgatgatctcgctactgagtccatcatgaacaagatgtgtgccaataaggcacagttaccctatgatgatcatgaaagagcgctcaagataattcatgctctagatcagagggtttgggaggtgtag

SEQ ID NO: 15727 - DNA, 456 bp, Zea mays
  Peptide Sequence Number=SeqID_59102
atggaggctaaaactgtggcgacctcgaccactttgtcaccagttgccccaagaagggcaagcaggaggctggcccgcgtgaccaccattctggtcggtgtaaggacaagcaggagtacacctccggcaagcacaagtcctagggaggattcaacaaggaggtgctcaagaagaagtacctctagaagtccaagatcaagtcaggataagttgcttaggcttgctactcgtgagaggaaagattttaaattcaaatatgagaacatgcttagggagcttgagtctcctagagcttcagtcgtggtgtctgatgagactgaatgtgatgagtgcgctctacacatgtcgaagatcaccactttggagaccaagtacgccaccttgctatatgagcgcgtcgagttgagatctaggtctagcttgttgggtacatgtacagtttatcctggcttgtag

SEQ ID NO: 15728 - DNA, 1176 bp, Zea mays
  Peptide Sequence Number=SeqID_59103
atggacaaggatcgtcagggagctgcgcagaagcgccaggcggttgtcaggctgcctgaggccaggccgaagagatcacgggggactgcgaaggctgctgcccctggcggaagccagccgacgctggcggcgaagttggccgcccctgggtccggcagggtgctggaggctgtgaagacggccgccgccggcggtaccaagtctgtcccggccggagccgcgaaggcccgagaattgcctccgccgggcaagcgcgttgccgacttcgccaccgatattagcgtggatgattatcttgttgggtcgggcgaaggccaacttgttgttgttccgcctgccgtggcgaccgcggcggctaccgtggtgcctagggcgaagggtagtgctcttagtgccggtggtgagatgccggcactcactgccgtcagggacgaggcgggcgctgtgtcccaccggctgaaggaggcattaagtcaggcggaggccaatttggcgcgggcggagggcactcttgccagacagcgcgccgaggaattggaggagcggttcaacgctttgcagacccgtgtggagagggccgaggcttcgacgcgctcggaggctgagcggacgcgcaagcagcttatggactcgtaccacgagctgggcgcgcggaccgctgacttcgaagtgccagaccgagagcccggactttgctgcctcgagtggctgcaggaggagttgctggcgctccccgccattgtagaggggtttatgtcctatgcctctctggtcacctgcgaaggggcgatgaacgcgctgtcccgcgaagggtgccggcactatgaggtcttcgaccaagctgatgaggatttcgatcgcgagatttacaaggttgaggaccctgtggtgaaggaatccgcgggagccctcttcgaccggatgtggggccctcacggtcgggaggtggtcagggagcggtccgagacgatgaggggtcaggcggcgcgtaacgagaaggtggaggacttcggggctttgaacagcgcgcaacctgattcggagtcgaacccggtggcggctgcgtccgaggttgccccggcgccgcccccagaaaccgtcgaaggcgcccctgatgccccccgcagccactgcggctggcggtggcctgtcgccaactgctgcgccgagggctga

SEQ ID NO: 15729 - DNA, 1189 bp, Zea mays
  Peptide Sequence Number=SeqID_59104
atgatccacatcgtcttgcccgggataaccgccatacggcagacggttcaactcgaagaccctgttcaagcggtcgttggacccgcgtatatcctagctacgctggccctccgtcttcggcacgtaccgaccaacgatctgcaccgccccatcctccgcctcacgcacaaatgcggcaggatcgcggctctgcaaatccagtgcgaaggcgggacttcgcaccagcatcccaccacgggaaggcatctagcgagggcatacttcgcccaacgcccagccatgcgccaagggccacaccccatatgcgacaaactcctcaaccaggtcgcgcccgctactcagaccggccgcgcaccgcagggccctttcatctgcatcgtccttcgccacttcaaactgcggggccaccacggcattcggcatcagctggtgtatctggacgttgaatctgcgcaggacctctcccacgaatcaatgcgcaggcaggcgaagaccagcggcaaagaacgcctcgaagacaaccaactcgccttctggctcggggacctcctccgcccccgggacatgagcgactccgccgccaaaataaccaagctgctgcatatcttgcacgcggaccgaggacatccgcgacacaccgaaatccaccgtgtcgccggcgcgcaactcctcctccgccacagtgctcagcgtctcctcagacgacgcgtcggccggcggcgtagcggcagcagaagaagaagaggtcggcatcgctacgtaccgtcggcggtggcgggcggtctgcttcacacgggccagatctccggcgaacaagagcaaggagggcagacgagcagcgagaggattgagaaggcgggagacgcttcgggaaacccgcaatccaacagtacggcgtcaatcaacggtcatgtcaaaaaacccccgcgaaaccacttcgagcgagggcagagtctccgccatatagcgacgtcttcggcaccagatgactttgtcgaactggtccctcaaagggcaaatgttggggcgaaggcgaagacgtcacccttcgctcgaggccttcgccgtactcgctgcgccaacggtgacaagacaacgggcagacttacccttcggctcatacgccgtcggacgaagacctgtgacgaggtcgtctcatctcgcgccctcgtccagaatggaggcccgc

SEQ ID NO: 15730 - DNA, 438 bp, Zea mays
  Peptide Sequence Number=SeqID_59105
atggccacacgacccccattttttgtcgaaaatagccatgaacgaccattttcaataataccgaaggctaacacctatggatttttgaccaagaaatggtatgcaccagaaatccgagaatatgatctatggcaaggaaacatatgtggggtgaggtgtatgaacctctggtcgatgataaatggtcacacaacccccatttttgtcgaaaatagctatgaacgaccattttcaataataccgaaggctaacacatacgaatttttgaccaagaaatggtctccaccagaaatccaagaatgtgatctatggcaagaaaacatatgtggggtgaagtgttcgtgcctctggtcgatgatcaatggccacacaacccccatttttgtcgaaaatagccatgaacgaccattttcaaggacactgaaggctaacacctaa

SEQ ID NO: 15731 - DNA, 654 bp, Zea mays
  Peptide Sequence Number=SeqID_59106
atgcatctgcagcggttgaagcatcctgcgccttttctgccccgggatttcgccctcccgcgcggcaatggggtgcacgacctcccacgacgccgtcgccgtcgctgtcacctcctccaattcccgccccgtgcacgccgctcgtccgcgtccgagccctcaccgcggcgcggagaccccgccgcgctgtgctgcgagcgcgtggcgctcatccgcgccgcggccgaccgccggtacgcgctcgccgccgcgcacgctgcctacttccgctcgctcgccgtcgtcggtgacgcgctacggcgcttcgtggcgtccgcgctcgcgcccgccacgcccgggtcctcgccggtgctcacgcttccgccttcccccgccaagctggtcgctgccgcgtccgccagcctcccgccatggccgtcgtccaccgtctcgccgctctcgcactccctcgcagagaaggggtggatctttagggaggcggcgttgaagggaagcgcgggagagaggacacggtcacggactcaggccaccgctgctcacaactgcattagaattcgatttcgggtccgcgctcacacgtgtcaacgccggatccaggacactcccgtgaagtgcggacggggcttcaaaaggggtgaggttttaataacttag

SEQ ID NO: 15732 - DNA, 162 bp, Zea mays
  Peptide Sequence Number=SeqID_59107
atggctatgagggagatcaagagggacaatgtcatagttactgaggcctataataaaaagataaacaacaagaagtttgtgatggataggtggtataggtactacgacgacgaggacaatcagatcttttgggtgcgcaatagatgtttgaagaagacctag

SEQ ID NO: 15733 - DNA, 357 bp, Zea mays
  Peptide Sequence Number=SeqID_59108
atggggaccctccctggcgggctctttgccgagtgtcccaagtggcactcggcaaaagagttatctttgccgagtgtctacccgacagcactcggcaaagataactcctttgtcgagtgccactggggacactcggcaaagccgccgtctccgtcacacggcgccgtgtactacctcactgatgagcccgaggtgcacttcatctggcagcccagccaaaagtcatcggtactcgccatatcgcgcgcgtttgatgactactatgtcaaggactgtggcgtcatctcggcgtcggagatgacgcagaggaggactgacaacaagaccagttcatcatcctcaccaccgtcggggtag

SEQ ID NO: 15734 - DNA, 426 bp, Zea mays
  Peptide Sequence Number=SeqID_59109
atgtttgagactatttccctttcattgaccattagagaggagcaggtggagagccttggggatgaggagctagcgcttatggccaattggttcatgcggttccacaacaacaatatgagttgtcagtgtggtgggtcgaaggatggatgctacaactgtagcgatctcgaccactttgttgcaagttgccccaagaagggcatgcaggaggctagcccatgtgaccaccactgtagtcaacgcaagggcaagcgggagtacacttctggcaatcacaagtccaagggaggattcaataaggatgcacttaagaattgtctccagaaggccaagatcaaggagtgtgccttcctcgcctccctcatcgaccttgaccatgactccgaagacgcatcgtcttccttgagcaacgaggagtctaattag

SEQ ID NO: 15735 - DNA, 1214 bp, Zea mays
  Peptide Sequence Number=SeqID_59110
atgcccgatggggtgttggtcgtgtcccatatggctagggaccccgtggcagtggctttggttcttacttccccagtggaccacaatttccttcttgtggacaaaggtctagagaatagatggctcatggattccggttgttcgtgctacatgatcggaagcaaaaaatggatctccagcctcagccccgtgattggtaagcaaaacatcacattcagggatacgtcgagagttaaggatcttcctcttcactttggaagtggcatagtgaagcatcccaatcctctgggactcaaatgtgattcaaatactagccctaggaggctagtatacacatttatacaacagatggttccagatttgcttaaacgagacaaacctataaaggtgacgatcaactttaagagttggtccacaaatcgggacatatcatcagagtggggctggagcagcccaatatacgcaccgaagcaaatcagcagtccaacagccacatgcatggttgggaacaggcgtaactcttacccgatcaatgatctcctgtttgaaaaacaacaaataagcaagaagacaaccgatcaagccaaggatggaggcaagaagagcttcgaggtaccgagtgcatgggagaaggtcaaggagaccaggaacccaaagccaggggtgaagaagaagacttgcaaagtcaaggttgatcgagttaagaagagttatgatcctgttctcgggcatatggaactttcaattggtatcagagctaggcctctccagtgtgggcttaaccgtccggagatgacgatgtcgtcacaagagggagaagaaaaacgatggcaaccaaacgatgaatccacctcaccgacaggtttgtcttccactagttataaatgtcttattgttaacaatgatagtggagacgaaagcgatgaggaggaggaatatgaggatgatagcgaggatgagtcttcatcaccacaaggtacattttcctgtattgcttccattaataataatgacagggaaaatgaaaccgatgatgtggaagaagaggagattcaccggttctacacccatctcaacaaagaagacaaattgctcttggttaagctattgaggaggaacaaggaacaaggtgagacgcttctcaggctggaggagactctcatcaaaacaaatgacagcctggagaagatgaccaaagaacatgaggagctaag

SEQ ID NO: 15736 - DNA, 573 bp, Zea mays
  Peptide Sequence Number=SeqID_59111
atgacggcacatcaaatgtcgaggatcttctctttaacattgacaggaaaaagcaaagaaagagaggatgcttcgcatgcggagagaagggccacttcagggacagctgtccaactatggccgatcccacaaattggaggagcaaaggcaaggcacttacaagtgtcaaaacttgggatgactcttcaagcgaagatgaacctccaaggacgcgcagccaccgatcctcatcacaatcatcatagtcatcatgcaagtgccttatggcaagaggctcaacttaaaactttgaaaaataagttgattagctctcaaaatgattataaagatttgctagggaaaatggaaattcttagcatacacaatgatgagctaactactaagctagaaaacattggtagcacccgagaagtatctttggttgaaatatctgaaattattaagaaagatgcttctacttcttgctttgatttaattaatgattctaatccttgcaatcaagttcttgttaagaatgttgttatagaaacatgttcggacgagattgcaatgaagaatgagcaattaaagtaa

SEQ ID NO: 15737 - DNA, 726 bp, Zea mays
  Peptide Sequence Number=SeqID_59112
atgctgttcttccgtcacgcggggaagacgtcgtcgattccaccgccggcgggcgggctgacggccgccattgtcgttgtcgcgcggcggaggaaggagtatcatgttgtagctgccgtcgagggacatgaactcgagactcccaaaacggagcatcgtcccgggttggagaggttgctggagactacacatctggagcttgacgggaagttgttcgtcaacacgcagcaggcccctacctggcgcgccaactgtcggcgtttcgaccccgacgggtccctcgaccgacgacccaaggtcgggcgaggcggaggctcctccgaggtcgtggctgagtccgagccctggggtcgggcgaggtggagaccgtcgtccgaggtcgaggttgagtccgagccctggggtcgggcgaggcggagaccgtcattcatggtcgaggttgagtccgagccctggggtcgggcgaggcggagtccgtcgtccgaggtcgaggttgagtccgagccttggggtcgggcgaggcggagaccgtcgtccgaggtcgaggttgagtccgagccctggggtcgggcgaggcggagttcgtcgtctgaggtcgaggttgagtccgagctctggggtcgggcgaggcggagaccgtcgtccgaggtcgaggttgagtccgagctctggggtcgggcgaggcggagaccgtcgtccgaggtcgaggttgagtccgagccctag

SEQ ID NO: 15738 - DNA, 444 bp, Zea mays
  Peptide Sequence Number=SeqID_59113
atgctcctgttcctcctgaactccccgtgcctaactgtgactgtggcagactggcttgggtacatcaatcacaacatccagacacggctgctcgctgctactacctttgtggcactttggacatatgtaatagtgaaagggaaatgtgcccttgggccatttctaagtattttggtgactgagtaccaacacaagtgcttaaatgtgaatctatacccatggatggacaaagtgcaaatcaagagtaaattaagttcctcccttactccgtatttctttgtgaatctcaagtgtaagggcgagaggctccaagttgtggagattcctcgcaaacgggatattgaaaggcaaagcaaaacactgtggtattcaagttggtctttggaccgcttgagaggggttgattgcaaccctcgtccgttgggacgccacaacgtggagtag

SEQ ID NO: 15739 - DNA, 3279 bp, Zea mays
  Peptide Sequence Number=SeqID_59114
atgtcggacgtctcgttggatctcggcggcatccgggcggggcccgtggagcgtgacatcgagcaggccatcactgctctcaagaaaggagcatacttgctgaagtacggacgtagaggaaaaccaaagttttgtccatttaggttatccaatgatgaatctgtactgatatggttctcagggaaagaagagaaacatctaaggttgagccatatatccaagataattcctgggcaacggacttcaatttttcagaggtatccacggcctgagaaagaatgccagtctttttctctaatttcacatgataggtcattggatgtaatatgcaaagataaagatgaagctgaagtatggttcgctgggctgaaaacactgatttcacgttgtcaccaaagaaaatggagaactgaatctagaagtgatttgctttcctctggtgcaactagtccgaggacttacacacgacggagttctcctttgagttcacctttcagcagcaatgacagcatccacaaggatggcagtgacaattatcgactccgtactccatatggaagcccaccaaagaatggattggagaaggcattttctgatgtcatgctgtatgcagttcctccccgtggtttctttccatcagattctaatgctggatctgtccattctatgtcttctggacactcggataacacaaatgggcaccctagaggcgttccaatggatgctttccgagccagttattcaagtgcagttagttcatctagtcatggttctggtcatgacgatggtgatgctttaggcgatgtttttatatggggagaaggaaccggggaaggaattcttggtggtggtggttcaagagttggaagctcctcaggtgcaaaaatggactgccttgtaccaaaaccgttagaatttgccgtgcgacttgatgtgcagaacatatcttgtggaggaaggcatgctgcacttgttactaaacaaggcgagatatactcatggggtgaggaatcagggggacggcttggtcatggtgttgattgtgatgtgtctcagccaaaacttattgatgctctttctcatatgaacattgagcttgtagcatgtggtgaatatcacacttgtgctgttacactatctggagatctttacacatggggggatggcacatttaaatttgggcttttaggtcatggaaatgatatcagtcactgggtaccaaagcacgtgaatggaccattagagggcatacatgtttcatcaatttcatgtggaccttggcatacagccgtagtaacttccgctggacagcttttcacatttggtgatggatcttttggggttctgggccatggagatcgtgagagtatctcggtccccagggaagttgaatctctcaaagggctacgcacggtgcgggcagcttgtggtgtttggcacactgctgcagttgtagaagtcatggctgggaattcaagttctagcaattgttcttctggtaagatatttacatggggtgatggtgataaaggtcgcttaggtcatggtgacaagggaccaaaacttgtcccaacttgtgtggctgctttggtggagcccaatttttgtcaggttgcttgtgggcattgcttgacagtagccctaacaacttctgggcatgtgtatacaatgggcagtgctgtctatggtcaacttgggaatgcacaagctgatggtatgcttcctgtgcgtgttgaagggaagctacacaaaaactttgtggaggagatttcatgtggcgcttatcatgtggctgtattgacttctaagaccgaggtgtacacatggggaaaaggtgcaaatgggcggttaggtcatggcgatactgatgataagaatactcctacattggtcgaagcactgaaagataagcaagtcagaattgttgtttgtggaattaatttcactgcagcaatatgcattcacaaatgggtatctggagttgatcaatcgatgtgctcaggttgccgtcagccattcaacttgaggagaaaacgccataattgttacaactgtgctctagtattttgtcattcctgcagcagtaaaaaatccctgaaggcttcattagcacctaatacaaacaagccctaccgtgtctgcgatacctgctacagcaaactgacaaagggacttgagacggatatgcattcttcagcgaagcgagctgctactgtaccgggagtcagtgatgcaaatgaggaggatctggaaacaaggtcaaatgctcaactatcaaggttgtcttcaatggaatcttttaagcatttggatagcagatattccaagaaaaataagaagtttgaatttaatagcactcgtgtttcccctgtgcctaatggaagttcacattggagtggactaaacatttcaagatctttcaatcctgtatttggatcttcaaagaagttcttctcagcatcagttcctggatctagaattgtttctagggcaacatcaccgatttcaagaagagcaagccctccacgatctacaacaccaacacctactctgggtggtctaacatctccaagagttgttcccaatgatggcaagccaacaaatgatgcattaagccaagaggttctgaatttgaggtctcaggtggagagtcttgctaggaagtctcaactcctggaagtggagctggaaagaactaccaaacaactgaaggaagctatttctattgctggtgaggaaactgcaaagtgcaaggcagcaaaggaagtaatcaagtcactcactgcacaattgaaggggatggcagagagattacctggaggagcagccaagaacactaagttgccacctcttcctggaattttcattccaagtgacattccgtctatgcctacggagagtgagggcagcccaagcagctctggagaacaaatcataaatggtcataatggattgcttacttctaatggacaaagttctattaggaataaaacgagccatccagaagttggcaagaatggaggtaggctgcctgatgctgaatcttgccacgatgctgaatgggtagagcaagatgaaccaggtgtttacattactctcactgcgttgcctggaggcgccagagatctcaagcgggttcggttcagccggaagagattcagtgagacacaagcagaacagtggtggcaacagaaccgggcgagggtataccagcagtacaatgtccgcgtgattgacaaatcgaccgccagtgtcaacagtgacattgcggctaactga

SEQ ID NO: 15740 - DNA, 336 bp, Zea mays
  Peptide Sequence Number=SeqID_59115
atgcgtgaaccttgcaagtatctgtcttctcgcaaggcagtggggggcaacaaggcaacaactcagctgcgggagctgccggaggatccgtctctgaacttgttcccgtcctgtctttctggcagtggcaggctgctgctggcctgctgctgcagtgccgccacgcgtcacggcctcagcagacagtctgcactgcaggatcgttctcgtgctgtattttcccacgacagcgacggccgcgacgggtatagagttcgctctggcagtttttggcaggaggcgcaagcacggaaagggacgcagaggatccgggcctgcgtccactttctgcagtga

SEQ ID NO: 15741 - DNA, 444 bp, Zea mays
  Peptide Sequence Number=SeqID_59116
atgggccgctccggactggccgcccatggcctagtctggacagccaggaagctggaagaggaactcaatggttggctgggggcagccggtctaaccaagtctcctgatgttagggcagtaattgcaccccacgctggttattcatactcgggccgatgtgcagcttatgcttttggcaacatcgatccaactaacatttctcgggtgtttctgcttggcccttctcatcactactacactccaaaatgtgctttaaccagggcttctgtctactgtaccccaatcggggatttgccagtagaccaggaaggtagctggacctcggctacagagttcgtagtctcagacaataatggtgtgggaatttccccccggacaccctatggtgaagggggtgagattaggaagaagggagattggggaaatgaatctgttattgcttaa

SEQ ID NO: 15742 - DNA, 492 bp, Zea mays
  Peptide Sequence Number=SeqID_59117
atggcgaagccgaccgttgcagatgcgggagccgttggcgcaccggacatgtccggtgcacaccggacagtccggtgcccccttccgaccgttggctcggccacgtgtcctgcgctgatcgcgcggccgaccgttggccctggccgaccgttggctcaccggacagtccggtgtacaccggacagtccgaaatggcccaagggcacatttccctttcaaaggttgctggagactgcccatctggagcttgacgagaagctgttcgtcaacacgcagcaggcccctacctggcgcgccaactatcggcgtttcgagaccggggggtccctgggccgacgagtgaaatgtcgccgcgtgccccagcccagatgggtcggcgcgaggccgagcgcgaaggggggaagaaaggcagccggagacgggcgtgagagaggtggaaatctcgcggccttcgtgttcgtcccgcgcccaggtcgggtgcgcttgcagtag

SEQ ID NO: 15743 - DNA, 867 bp, Zea mays
  Peptide Sequence Number=SeqID_59118
atgacggatgcggagaaggaggtagcaacagaaagacggatggactcaccgcctcgatgcgattgtggagaccgtgttgtcatcgacgaagactatgacaagcagttctgttgtccgaacattgattatgagacgaggaaatgcagttgggagagttacgacgacaaaggagaggtgatgcgcacaatagagtccaagagaataatgggacagaagatgcgttgtggatctcggctcgtcgattcgtacattaacgatcgcatacgcgacatgcgtagggaagcaaaatctgccttttatgatagcccgaagcgtgcagagtataggaggttgaaggcggcagatgagaagagagcacaggatgcaagggaatgggaagcggctcaagccgagaaacagatgttggataatcttgctgatcgcctcaagggaaagattggaagcggcgtaaactatttggccaatgaggcgcatgcgagatatgttcaggataaaatggcaacggttgagctgatggaggaggaggacgacgacacatctagattgagtgagcttatcgccctcgcagaggcaggattacatgaagaagaggaggacgacacgtcaaggttgaaggaagaggatgagtttatgtctcaggccgccgcagaggtagaggcagcttattacaagaagaagtctgatgaggctgaggctgaggatgagctattctcccaagctgcagatgaagcaaaagccaattattacaaaagaactggtgacaagtgtgatgcaggacaatgcagcaagtggaatgaggttgttgttgaggattgcgcgacggatgactccgaagatgagttactcatagattgtgattcagactaa

SEQ ID NO: 15744 - DNA, 621 bp, Zea mays
  Peptide Sequence Number=SeqID_59119
atggccttactacactcggcgtggtatcagcagtccctggctccctgcgacgctaccatgcccgaggggttcggtcccgagacctacaggtgggcgacttggtgcttcggctacgacaagacgcccgaggaattaggcaccgcccgggggaggagctgcaccctcggcttcgtttccaccctcggcgagacccgccccggcctcggacagcggcacaagcgggaggatttccacctcgaaggaggacgccagcaccgcgcttgggcccgtggtggccgcgtcaagcctctgaactttggccagggcagcttcgtctttgtcgggaaggcagtacccctcgctgacccgctccagatccacatcgtagtgggaagcgagtacgacgaaggcccgcctaatgccgtgatacagcgcctcgcggagtctgccgcgcgcgtggtcacccaaggcctacaggcgactctggggggagcttcccgaggggacgtcgtcaagaccaaagacccggcagaaggccgagatagcctcggacatggccacgcggtcggcctccttctgctcagccgcctgggcaagtgccttggcggactcgttgagggcagactcgaactctgcaaatag

SEQ ID NO: 15745 - DNA, 510 bp, Zea mays
  Peptide Sequence Number=SeqID_59120
atggctaccacccaggaggtcgatccatttttaaaggcgactctcctcactcacgtcctcaggcgtcgcgggctaagtcttcaccaacgcgctcaaaggccctccccctacgacacgggggctgggtcccacacgtcgtgcaagctggccaggacagaagaagccaaaccaccgcgcgtggagcgtgtaaccgcccagcggttacaagcactcctccaccttcgcctaacccagcgggtgaaagggcgaaccaccatgcaggcggccgacagtaatggcggcagcaggcgagcggaagcggcagtcaaatcgtctgcaggctcacgtcctctcctggggcagcaggagagccctctcccacggcgtgaagacgacgcgcccgtgttccgttcctcaaacggctcgcgcaacggctgccccgcaaaccacttgtcccgtcgcattaacttcgtggcagggcaggcaacacctttggcaggcgaagcggacgacgcttcacctcagccataa

SEQ ID NO: 15746 - DNA, 3918 bp, Zea mays
  Peptide Sequence Number=SeqID_59121
atgacggcaggagaggttgacatgtttctttttatcaaatggtctgttggtgcccgtggggactggggagctagaagtatattcttgtatatcctcaaggatgtgatgtctctaatcatctttcattattcctttgcgttgctaatcatgacaaacttctcccagttcactatagctgtagccaatatagatcctaaaaagatgaagtactcaggtgagctgaacttggtttgttttcttcttggaaggttctggaagaaggagcatgattggggatggaaaaaatttatggagctatcaaagattcaggatggttttcttgttgatgatgttcttgaaatcatagctcaagttcaggttatcagggagaaagtggatagaccttttcgttgccttgatcgtccttaccggagagaattgatccgcatctatatgacaaatgtggaacaaatataccgacgttttattgaggagcgaagaagtaaattaagcaagctcattgaggacaaaataaaatggtccagttttcgtgctttctggtcagcaattgacccaaacaccaggcatcgcatgtccagggaaaagactgacaccatattgaaaatgttagtgaagcaattctttgtagagaaagaagttacttccacattagtgatggactccttgtatacgagtctgaaggcacttgaataccagatgaagggcaggaaaggcaaaacaaaattagcagatttggaagaactacctgcgcctatggtccatgttgacatggacatgtttattttggctgatgatgtcatagctttgcttgagagagctgccttagaacccttgccttgtcaacctttagcccccaaggatgataaaacttcccaaccccgcatgaaggtgtctactttcttggccctagaacctcggatcaattatgttaggacaattttcttgctagtttctcatgcttacttgcaggatggaagttctggtgaggtttacaatgtttctatggagcgtgaggaaagacgtctaactgagcttggtcagaagatactagagacatttgtgctatctcatatatttagtggaattgaagttgcgtaccaagaagctgttgcattgaaaaggcaagaggagcttattcgtgaggaggaggaggaggctgggcttcttgaacatcagatgaaggggaagcgtggtggtggtgtaaatgaaaaggacaagcgtgccaagaaaaagcagaccaagcaaaagaagaaccgtaaggctaaagacaaggaaagagatgagaaatgcgaggttaaaattctggaaaggcttcgtgatgaaactgccattgataatagtgatggcttaccatctcaggtggaagtgatagcaaagattgatgccttggaagaaggttcttcagatgggtcagacatgtcaaatagagggaaaaatcagcgtaacaagggcttaagcattattagctttgccgaggaaggtgatggtcttccctccacctctaatgtcactggtggtttaggccgcaatagttctggctgctgcacagctccaaaactggatcaggatactgttctacttaccttgagagatagacttcgtaagttggggcagcgtctgcatgagaaaaacattgaggggcagaaacttctcaaaaaacattttgaagctagggacgcaaaagcgaaggaagaaccttctgactcatctaattctttggataagccacctgatgttccagagatcccggtgcattcatcagaagataccgttgatcttaaagtgaatggaacaccaaagaaggatgcatctgtggtcaaccctgttctggaggattctgtttcaggcataccagtcactgcaaacaatgaacctgtgccttctcccaccacaacaaaaatggacccagtttcaaacaaagttaatggatcaagtttgaaaatgaaagtcaccatggcatctccttgctccaaatcacatccagctgatatggataaagatgcctctcttccttctaaatcaccacgaaccaatagagctgctccagttcctcctaagctgccttcagctgataaagcaacgctagttccctcaaagctaccttcggttgataaagctactccagttcctcaaaaatctccgttggtaaacaaagtagctcaggcccgtcccaaatctccagcagttgacaaagcaactccacatcgtcccaaatctccagcagttgacaaagcaactccagttcgttctcaatctccagcagttgacaaagccactctagttcgccctcaatctccagcagttgacaaagcaactccagttcgtcctcaatccgcagcagttgacaaagcaactccagttcgcccaaaatctccagccattgataaagcaactccaattgctcccaaatctccaccagttgataaagcctctccagctctgccaaaatcattatcaggtgctaaagatgcgctttttccttctaggtcgctgcagattgataagtttactccagccgccccaaggttatcacaagatgataaggctgctctgccttcttcagaacagtcacatatatctccagctactagttctgaagctcaaggggcaactactaggaaggtcacaactaccacctcactttcagaggctgctgcagcatggaggccttcaagtgctcctgtgttacccacaccaagatcaaccgggccagctgcttcacatattcaaacttccacattgctttcccgctcgatgagtgaagcagctgggagaaggccagtaaatgatccttcattttctgccccatcttatactccacagacctaccggaatgcaataattggtaagtctggtctgtctatgacctccgcaagccttgcgtatcagccgtcttctctggatcaagacactgctccttcacggcctctatcagcatatgcatcaagtacagtcatgatgcctcctgcaggaagatctgatcagtcatcagctaggcatggattcaagtctgggcctggtaagttagaagcacatgacggctggcagcagtggaaaggtgacagtaatgttgatatgcatctctggagggaccacgctccttaccaacaaatgaccaacagtcaagcatatgagcagtctcggagggacgatacttatcagcaagcatgcagcagaggaacagaaaagttcagcaggcatgcaggactgcaagctaggcagcagttccaaaccgagacacccgccagtcatgtatggcatcaaccgcaggggccagtggcagaagaatttccacaccttgacatcataaacgacttgcttgaggaggaccagatcaacggcagtataccggagtcgtttcgtcaagactacaacgtgtttggcctgccgttttcaccgagaggaaacttgtcagacatggaaatggcttctgttagaagtcccgctcggttcaattcacccaagtacgatggtggattgtcgggggcttatgacatgaatgctgtcaatgggttgagggaacggcagtttccctcgttggatatctactctaatggcctgtctgacgtgagtgcttctaagccttggctgaatggctctgccagtccatcggtgagccttggggtcaacacaaatggataccacccccagctaaatttggcggtggcctgtgggagagagaagaacggtatgaaggtgagtgtgaatgtggagccaacaaccaagagcggatatcacctccttacgcagaacggcacccgcgccacgctgctcgactacagcctcctcgacggtgccacagcgaaggggcacgtggccgcaaccaccgaccaacatgtctccacgtcctcattcgacctcgacgtgtcatggcaagccgtcggacgccagcaccagactgacgatacgggtctctga

SEQ ID NO: 15747 - DNA, 255 bp, Zea mays
  Peptide Sequence Number=SeqID_59122
atgtccggtgcgccagccacgtcaccaaagccgttggattccgaccgttggagttctgacttctgggcctgcctggatgtccggtgcacaccagacatgtactgttcaatgtccggtgtgccagcgcgcgcgtgcctgacttctgcgcgcttctggcgcgcattaaatattcccgaggctgccaagttccagagccgcgtcttcttggagcaccggacactgtccggtgtacaccggatagtcggtgaattatag

SEQ ID NO: 15748 - DNA, 303 bp, Zea mays
  Peptide Sequence Number=SeqID_59123
atgaagttcagacctaatgaagttctagtgcaccatctaggactaaaaaataagtttgaggctcctcggaagaagaagaaattctacaagaagaagaaagatggtaaagcctacctagttgaatgggattcggatgctagctcggatgatgatgatgatgatgatgacacctcatccaagcttaatgccagaattgccatcaaggaagccccttcacttttctcatcccctcattgtctcatggcaaagggagatgctaaggtgaactacaaggcgggagggaatctcttgggtgttggatag

SEQ ID NO: 15749 - DNA, 111 bp, Zea mays
  Peptide Sequence Number=SeqID_59124
atgccgcccagatttccggggtgcggcaccgctcctctccggcgtgttcagccgccgtggagcagggtgggccgcctaactccggcgtggggaggtgaagggctaccctag

SEQ ID NO: 15750 - DNA, 537 bp, Zea mays
  Peptide Sequence Number=SeqID_59125
atgcggctctgcagtctgcaccttcggaccttcccattcccatcagccaccgctcaggctcagcccagcgccgccactgcccactgctcagccctagctgtggtctgtggaggccgtccgcccatcgcagcttgcagtcgcagtgaaggtgaagcttcacctccacggaagcgtatgttgttggagttgcctagtgaacatcaaagtcaaaacttgacatcgccacctcatgcaaatatgagtcaaccttttggtgtgttcgcatcatcgtcaacacctgctgcaacatctcatgaacaaggtgcaaatccagaagaaggaattaatttggatgaggatgatccttcaaagttgaagcaagcaaagaagtccacttcaaatgtttggcagtattttgagaagtatgaggttgtcgtagaagagaatggcaaatctgtgaagcaagtttgggccaaatgcaagtatccgggatgcaaaaacaagactagcaaagctagggctgaaagtagtagaggaacaactgttggtctcatttga

SEQ ID NO: 15751 - DNA, 576 bp, Zea mays
  Peptide Sequence Number=SeqID_59126
atgcctgaggttggcttgccgaagcaacagaagctgcagaatggttgccaacatattctggaatgtatgcgcctctgccccttggagctgggggccgagggtaactctgttgttgccccgaagcctgagaagaatattgtggcctctgttgctgggttcccctgtcgtcattctggatctgacatgcctggggtgaactctccctccgaagcccctggtcatctcggagaacctataagcttcctcccttctctgccgaaagtcattgtcagcgcggatgtactcatccatcttctgaagcagtttcttcagggtctgagggggtttcccggcgaagtattgggccgaaggtcctggccgaagccccttgatcatggcctcaatgacaatttcattaggcactgttggtgcttgtgccctcaatcgcaagaaccttcggacataggcctagaggtattcttcttgatcttgcgtgcattggaacaaagcctgagcagtgaccggcttcgtgtgaaatccttggacactggcttctcgaagagaaagggtatcttggttcgggtccagtggctgtag

SEQ ID NO: 15752 - DNA, 1533 bp, Zea mays
  Peptide Sequence Number=SeqID_59127
atgtcgacccacgccgcctcccgccgctcctcctcctcgtccgcggtcgccaagcgccccgcgatagcggagggagctaccaaggcggcgggaccgggccccaccgccgcgcaggcgaagaagcgcaccgcgctcgtcaacatcaccaacgtcgccgctccgggggcgagggtcgccgccgttgggaaggtcgcgccaccggtcaccggcgcgtacctgattagtggaggttccaggcagaggtttgaaataacttgtcccttttgttcaaattcaaatctcatgcagaagttgaatccagctacctcaggtgcacccttaaagaagccatctttggcaaatgctcgcaccatccggggttctgctgcgaagtcggcttccatcaagccagctccaccagtatcacgccatgacagcagctcagagcagaagcataatgttcttgtgcctaccactgtccatgtgccaagtcgtgctcctgccttggtaccctacagcagtttcgtgtctcctggacgttcaagagattcagtttctactgatgagacgatgtcgacttgtgactccatgaaaagcccggacttcgagtacatagacaatgggggttgctcgatgctggcttcgttgcagcgacgggcggatgaacatctgcgtacatcagaggacagagacgttgaagaaaataagtggaagaaaaatggccctgccccaatggaaatcgacagcatctgtgaagttgacagtaacctcgaggatccacagttgtgcgccgctctggcttctgacatctacatgcatctgcgagaagctgagatgaagaaaagaccatcgactgatttcatgaagacgattcaaaaggatgtcaaccctagcatgagggcaattttgatagactggctcgtggaagttgctgaagaatatcgtcttgctcctgataccttgtacctgacagtcaactacatcgaccgttatctttctggcaacgagatcaatcgccaaaggctgcaattacttggtgttgcttgcatgcttatagcggcaaaatacgaggagatatgtgcaccccaggttgaagaattctgctacataacagacaatacatacttcagagacgaggatcctgctctgcatctggagttcctggccaattacatcgctgagctatccctgctggagtacagtcttctgtcttaccctccatcactaatcgctgcctcagctattttcttggcgagatttgtactccagccaacgaagtatccttggttgttgcctgatgagaatgatactgtcttggtggctgacactcgttacatctggaagcagaactccacgcttgctcactacacgcagtacaagccgtccgaattgagcgagtgtgtaaagacactgcaccgcctttccagtgttggtcctgggagcaacctcccagcaatcagagaaaagtacagccagcacaaatacaaatttgtcgcgaagaagcagtgcccgccacaaatccctgccgaattcttcagggatgcggcatgctag

SEQ ID NO: 15753 - DNA, 456 bp, Zea mays
  Peptide Sequence Number=SeqID_59128
atgtggcagaacgccaagaaaagcctcacacaaatgaacgtaaatggaaatttgcagaatggaattggggttcagatgagtcaagttaagacgatagaaatcaaggagtccgcggaaaaagggagaaatggggagagcgagaccgcggagaagaaaagggacgtaaatcacagattcatgggtatcctctgtcgggacaatgaccccatgacaaatccgccaagaacaaagctccctcgggggaaggaccccgatggacacgaggtggagaaggcgccaactcaactctactggcaaatagagcgggagccgaattacagagaggatctggaggcaggaaagcaagaactagggcacggaaagcagaggcggctgaaagcgcagtacatatgggatattcccgagtcagataccgtttccaaaaacgcccagacagcacccggcagttacttctaa

SEQ ID NO: 15754 - DNA, 879 bp, Zea mays
  Peptide Sequence Number=SeqID_59129
atgcccccgcccgtgtctgcctcatcatccccgcccacccccgaacctcgcgcccctcccgagctgcaccgcgtcatcccctcatttcccacagaaccccgtcgatccgtacgcgaggaggaggacgatggccccaagcccgttctcatctgcctgggaaccctagctgtcgcaggcttcgtccacaactgcaccctcccgtcaatgctccgcctctacccatctccactgcactcccggttcttgatttctttccccttcggtaggggggcactggctagggaaagctcagacaacgggtggagcttcgggggcctggtgagtacgttcgcatcgcggtcggagtcagtcctaggaggctaccgccacgatctcgaggacctcggctcggggcttcgcctcgagacggtcgcgctctgggccgccgccacccgtgccgcctcagcgctacctggcgcactggaggccagcgcgtctgtcgcctctaacaagcttgagtccatcggccaggttgttgacgacctcgatgccgccgccgctgggctcctctcgcatgccaacaaggccctccggtccgctgaagctgacggtgttgatggtgaccgtgccgctcgcccctccgacggctctgtttccagtgcgtcctggcgtgcttccttgccaaccaagaagtataccaggtttgaggcccaggtcttggcgttgcgtgcggaccctgcgacattcaccgaggagcctaaagattctaagggctttggtaaatggagtgccttgttctcaattgacgagatgaaggaacagatagagacggtgctccatgaaagccttggattggagagctttgtggagcggcttgtgccgtcagttgtggattactag

SEQ ID NO: 15755 - DNA, 168 bp, Zea mays
  Peptide Sequence Number=SeqID_59130
atgggggccgagccctggggtcggcgaggtggagcttcctatggcgcccgagctccgataccagctgtggcggaactgcccgaattattccaacttaagtgcctaagtcccgccttagaggctagaccacacttaaatgggaataacccgtcaatccctcggatctag

SEQ ID NO: 15756 - DNA, 1230 bp, Zea mays
  Peptide Sequence Number=SeqID_59131
atggggagcgcccgctgtccttccgccttgtcgtcgttggaggaacgcaacttcgcggaagttggtcgatggtgggggataagtgagccaggctgcggcctctgccccgccctcagcttcaaggatcttcatcatcctggctggggcggaggccgggctgagccggagctctacctcccgcgcgggttcatgggtcaccttctcccccagcattcaggggagagggcgctcaccggcctagcgggagggtcggacttcgacaacgcggggccggtcggcggcgagcgtcgtcagcttcagcgcgttgggctcgctggctcagttggctctggctcggctcccggtgccccctcccaccgcgagaacggttgtcgcgtcgtgctcaccggaggaccacccaagacgtcgcgcgctgctagggcggcgttcgtgttcttgggctgtcctgcctttgctccgatggcttccgtcgtcggcgtgaaggtggtggcggctaaagaagtcctcgtcgtcgacgggatcaccgccaccatccgcgctacgggcctccggctctttggctttgatgtctggttcgcgtcccttgagtggggacgcgaacgagagccttccggtggctatgtccgtccttgggccatggctgctgctgcagaggtcgctggcgagtcgcccggagcttgtcaccccacaggctctccggactcgcctgtcggcaaactgaaccgcttcaccaagtgtgagttgcctcgtgcgaaggtgacgagtgagcgccggagtcgagtcgccgaggccatgagccgggctgatgtcctcgggggacagctggttgaggctcctgggtggccggccgagccagatccttcgcccgtgttgccgtccaaggctcggtcggacttcgccgaaggtggagttgatgccgagggtgctactgctccccctccgtcaagaattgtttgtccgagcgagagttacttttcacggaaggtgatgagtgaggattctgctatcgatatagtcgagaaggcacgaaaaatcgtttcggcagaaaggttcccgagcattaagacttgttctgtcagcggaatcgcttatccgagcgtgagttacttatcgcagaaggtgatgagtgaggatcccactttcgaagtagtcgaaaagcacgaaagacattctggcagaaagatcttttccgaggaaaattttgacgcagagggggttccccccttctag

SEQ ID NO: 15757 - DNA, 612 bp, Zea mays
  Peptide Sequence Number=SeqID_59132
atggcgcacacctcacctgaaatccagctcaatccgttgggggagggaggtatatttcagggacaacccaagcctcttcccctgcgagccaccatcaccgtagaatttgtccgcgcggcggaagaacctcgccgaccctcgctgccgtcgactagcgtccgcgtgcctaccccggcgtcaacccatgatcggggggtgctccctgggttcgcggttcttcaccagctggattccgagcgtgtggatccggggtgtggccggaatttgccatcgtcgacagccaacggcggtggtgtaccggcgcaccgtggtcaagccgttcgaccacaccatacccggtgtatgggagtcgcgaccccttggcagatgggtaacatgacttgtgggtacaggatggtcaataccaggaagggtggtggaattgatttacctcccaatcgccaccctcgaaggatatttagacaaccccagccacaaccagaagagatggatcctccaccaccgcctccaccagcaggagttgacccactggttgcagctcagatgaggatgatgcaacaaatggcagataccatggcggatatgcgtgctcagatgcagcaggaacgctag

SEQ ID NO: 15758 - DNA, 225 bp, Zea mays
  Peptide Sequence Number=SeqID_59133
atgacattaagtacgatggtcacgggccaattagctgcgggaataggcatagcagttggcatggccataggcgggctggaagtaattgcagcaacaggcgcgcaggagcagcggtccaaccgccaatcagactctggtcccacctacaggctcgcatcctcccctgaggcgggcccgggagccactgtcggtaccctgaatcaggggtacccccttctacggtaa

SEQ ID NO: 15759 - DNA, 483 bp, Zea mays
  Peptide Sequence Number=SeqID_59134
atgggcaagaacaacaagcgcaagcgtgagccaactcctccatcggaggagtttggtgactcggagtactcagagaaggagttctcctctgagtctgaggggtctctggctcccatccccctgcgtgagtcgtctgatgactcagacgacttccaggggcttgcggcagaggtctggacgtacatccgggccgtcgagcgctccgggctcgagggctcggatgagtcggagtactcctcggatgaggaggactcggacggcggcggcgaggacgaggacgacgacgacgacgacggtgacggcagcggcaggggcgacagcggcgacagcaaggacggtgacggcagcggcagggacggcgacggcggcggcagcaggggcagcaaccggggcggcagcagcaggggcaacaccaggggcggcagcggcggcggcagcaacaggggcggcagcggcggcggcagcaacagggccagtggctag

SEQ ID NO: 15760 - DNA, 345 bp, Zea mays
  Peptide Sequence Number=SeqID_59135
atggacgagacaccagtcaaaaacaggaagagcgagcgagcctccccctactccgagaatggcacaatgccggaggtcaggatccaaatggggtccagcaaaatcgaacctccggcacgaacctatggagacttcaccggaatttggcggcgccggaggagggccgaggttctctcaggccccaccatcagcggcgatagcggtggggaggagcgtccgaaactggttccaggaagttcaatgcggtcggagactcgagagtgggcccggactgtcaagaccacggcacaggagaaacgcgagcaggcttcctcctcgtttcgtcgccaaaatgagcgagcatga

SEQ ID NO: 15761 - DNA, 698 bp, Zea mays
  Peptide Sequence Number=SeqID_59136
gtactaattggtccacgctggaaattcttcttatcctgtatggataccttgggaaggaaaaggagctaaagaggacatgggagatcatgcaagacctccctcatattcgatccaaaagcttcacactagcaatcgaagcatttggaaaggttggctccattgaccaggcagaaaagatatggatccatataaaatcaacaaagaagttaagccttacagaacagtttaattctatgttatcagtttactgcaggcacggtgttgtcgataaagcatcatctgtattcaaggaaatgagagcaaatggatgccagcctaatgctattacttatcgccacttagcattgggttgcttgaaatcaggtcttgttaaagaagctttgaacacaatagatatgggaaagaaggaagtcgtcactaaaaaggtgaggagttcaacaccatggttggagaccacacatctgttgcttgagaactttgcagaaattggagacttggaaaatgcaaagagactgtacagtgaactgaatgaatccaaatattctctgaattcctttgtgtataacaccctcctgaaagcttatgtgaaggcaaaagtttatgagccggatttgtcgaggacaatgattttgagaggggcaatgcctgacgctgagacatatagccttctcagactgattgaacaattcaagatctaa

SEQ ID NO: 15762 - DNA, 1422 bp, Zea mays
  Peptide Sequence Number=SeqID_59137
atggcggggaaggaggcggcggagagcagcagggccaggaggcgcatggatctgaacctgtacgtgggcctcccgccgctgtcgccgcctcgactctggctcgacacctcggcgccttcccgaacgacgtgggtgtcccactcgggtcccggtgccgcgctggacgctccaaggacacgcgagcccgaggaaccgctcgccccggcggcggcggcggcggcggcctactcgccgtcgaacgcgctcttcgccccggacccggaggagcacccggtgtttgatcccttagtgtactcctggctcgacggcagcggtgaagagtacaccgatgctcctgcgctgtcggcgccggctccaacgccggtggatggtcatggtgtctctgggccgcagtttctgatggctgccactgggctggacggggacgatcttgcggtaccaaggcctgtgcaccctagccgggtggcggcggctgctgctgctgctggtggactggagatggtcggcacgagcgtacttgggcagtccactcaaggtgcgactgcaagtgaagcaggggagctccggttcctgagggcgatacggatcagccagcagcacaacatcgtgaggtcaggaccagcgagccacactcaagtggcagctagcacggatgcgggtagcctggtcatggcaatgcaacacacacaaagcgctttcgaagcagcagcagatccggatggcggcggcgacaaggtgcgtggaagcgacgccgcagagaaggacgggtcctgtgactgcaactgcgactccagcttcgagtgcaacatctgcctcgagcgggccaagcagccggtggtcacgtcctgcggccacctcttctgctggccgtgcctgtaccggtggctgcacgcgcagtcgcccttctgcgactgccccgtctgcaagggcgaggtgttgctaacgagcatcacaccgatctacgggagaggcggcgacgaagaaggggactccggctcctccgccgtccccgacctgccgcccaggccgcaagcgaaccggagggacagcctgaggcagcagctgcagacggcgacggacgccagagggatcgccgcggtgctgagggagatgatccagaaccagggcatcgtgacctcggttcccgcaggccggcaacgggctggtagcgctcggaggcagcgaaggcagggtagcaacgcgtcgcgctccgcggtggtgaacgcgggcaatgctgcccctgagggcagcgatccgatccagccgccacactccaatggcggcaacggtgagcaggttgttcatgcagctcctcaacaaccaccaccggctgttgtgctgggcgagcctgggccaagtaggcggtcgaggcattcggagtccgcagccataagaaggacaaggaggaggccacagcagtag

SEQ ID NO: 15763 - DNA, 819 bp, Zea mays
  Peptide Sequence Number=SeqID_59138
atggcgggggagaggacggggcgagctagaatgttgttcttccaccacgcggggaagacgtcgtcgattccgccgccggcgggcgggctgtcggccgccattgtcgttgtcgcgcggcggtggaaggagtatcatgtcgtagctgccgtcgaaggacatgaactcaagactcccgaaatggagcaccgtcccgggccgaagaggttgctagagactgcccatctggagcttgacgggaagctgttcgtcaacacgcagcaggcccctacctggcgcgccaactgtcggcgtttcgagaccgggggggtccctaagccaacgagtgaatgtcgctgcgtgccccagcccagatgggtcgagcgtgtgggcgagcgcgaaggggggaagcgaaggtggccggagacgggcgtgagagaggtggaaatcccgcggccttcgtgttcgtcccgcgcccagggcttgcggggcgccatcattgcctatctggcggagcttagccagatgggacaccggtctcgttctctgcggcccgagttggctcggggtagggtgatgatggcgcttcctgtcgacgtggtcggcctgcgccctaggttgggcgacgtggaggctcctccgaagccgaggtcgagtctgtcttccgtggccgaggccgagtccgagcccctgggtcgggcgaggcggaggtcgttcggcagaggccagggcggagtccgagccctggggtcgggcgaagcggagttcgtcgtcttctggggcctagcccgagtccgagccctaggtcgggcggagcggagttcgccgtcttccgggacctag

SEQ ID NO: 15764 - DNA, 987 bp, Zea mays
  Peptide Sequence Number=SeqID_59139
atggctgccacactctcctccgtggctgccccttccctccccaagcacatccccgttaccagagctcagcagcaggcgcctccttccatcatctcggcatcaactcagaagactgccttccatggggtgtcgctggtggtggacaggaggtgggcggccggccaccggagaggcggcggccggcggaggctgctgcaggtgaacgcgaggaccgccgccaagaacatcgaggtggaggtcgagaagccgcttggcttagccttgggccagaagcccggtggtggcgtcgtcatcactgaaaggtttccatcgctttattttattgatcataaagagttcatgacagttaagttccagcgaatcaaacagaaaaaggccttaaaagccaacagcaccactacccgaacacattttgattactttgggtcaccatcgagtcttcattcgtgtgacgaggagcatctaaacattggccacacaaggatcagaaaacagatggcaaatagactccctctcactacagaaaagacaggactgtctgtggagtctggagggaatgcagccagagccggtctgaaaaccggggaccaggtcctgtacacaagcagcttcttcggagacgagctgtggcctgcggataagcttgggttcaccaagacagccatccaagcgaagtcagactccgtctacttcgtcgagagagcaacgcacgtctgccttgattgtgggtacatatacttcctacccaagccttttgacgaacagcccgacgactacggttgcccacagtgcaacgcgccgaagaagcggtttgcgaggtacgacgctgccaccgggaaggccatcggcggcgctctgccgcctatcgccgtgatctcgttgacttcggtcggtgtcatctttctctgggatcggctcatctaccagatcaaagttagctcctcatcgtggtggcgctgggatgggtcatctgccaagagaccctga

SEQ ID NO: 15765 - DNA, 285 bp, Zea mays
  Peptide Sequence Number=SeqID_59140
atggcgacgaacgtgggctggacggatggtaggagcgagcgcggcagcttgtatttcgggtctggggacgacggtgacgaacaagtgctgttggggcctggggatcgtggtagaaatccgttcgttgatttatccctacctcaacaacaaccacctctcaactattttggtttgatatccgcgtttgctgcagaaaaggacgagcactgtgaagcaaatgacataaaacgagtgatgggtagttgtgctgattttttagtgggatattggttgaacgattggtag

SEQ ID NO: 15766 - DNA, 2439 bp, Zea mays
  Peptide Sequence Number=SeqID_59141
atggcaaactatgcatttgatatgaatctcctttggacagatatgaatccagacaatgctgaatatcacagaaatatccagaatcacttcatgtcaaacattgaaaacatgaatgcttatggtaatagggatcttgatgcttcctccatgtttgattctgatatttcagatgctttatctgggttgaggctgtctaataattcagtaatggatcaaaggaataatagggaagagctagcagatgaaatactcgagcgtcaaagagatttctctaaaactgttgatgaaacccgatcatctttggttggtaatgtttttcatgcacctaggtcagatgtgcatccatcacgaatatatggagatggtattttacggaggcagaccagtgcatgtgcattagatggttccaatgtttcaaggatcaatcgccatcacataaagggtgttgatcgcccatctttggctgaccagctagctataatgcaatcaggcaactttcctagagggaccaatctttctcgcaatgtgtctgtgactaacatgtccaaccccatgagcaacagatacaacagcaatacagacctggatttggctaggagtcgaatgacattttttaaggagatacttgcacaacagtatctgcaggaggataatctgtcatataacgatagtaggatctatcatgatgagccttgttttccctgttcaagaatgcaaagatctggatctcatttttattcaaactcgcggtgcattctatcccatggtgatcggcaatcacggctcttgtccctcaataggaaggcaatgggtagaaatattggatcacatgcctatcatgataatacattatcaaactacctggatgtgctttctttggataatgcagatagaaacggtgctgattcagtggaactgattgatttagtgggtcacgttaaggaaattagtatggatcaatatggaagccggtttattcaacaaaaactcgaaattgcatcactggatgaccgggaaaaaatatttccagagatattatccaatgccattgctctaacaactgatgtttttggcaattatgttatccagaagtttttcgagttcgctacagaaaggcagttaatccaattggcagatcaactcaaaggtcacattttggaactcagcctccagatgtatggttgcagggtagttcagaagaagagtgggcctggtgcagcggtagagcctaccgtctgtaaccggaaggttttggaggtagttgataaggatcgaaagattgacattgttcatgagctcaggaatcatattctgaaatgtattggtgatcaaaatggtaaccatgtgatccagaaatgcatcgagtgtgttcctgaagaccgcattccatttgttattgatcctatactttcacaaattcttgttttatgtacccatcaatatggctgcagagttattcagagagttttagagcattgccatgatcctgtgactcaaagtgctaccatgaatgaaattgtgcagcaaaccttccatctgacagatgataaatttgggaactatgttgttcagcatgtgttgaaacatgggaaaccagaagagcgttcggccatcattcaaaagctctctgggcaagtggtcatcttgagcaagctaaagtatgcttctaatgtcatcgagaaatgtttggagtttggaactcttgaagaacgtgatagccttattggggagatcatttcttctggtcaaacatttcagtttcataggagccttgtggaatattctgggcacctatctgctagatttcaattggcacaggaattgatgaaggatcagtttggtaactatgttgtacagaaagtccttaagacatgtgatgaaagatacctagagatgatcctctcgagcatcaagttacacttgaatgaactgaagaattacacgtacggaaagcacattgtgacacgcgtcgagaagctaatcgttacaggagggtggttctacgtgacggttattgaagtttttgaacttcaaacggtcaaaacaacgattatgatagctgctacttcattttttattggatatgaaaatcctccacaagaggatgatagtgacccatcaaacaatgaagatgaagcaaaccaatacccacaaattcttctcagtaaacagggcatttataagatatacttgattttctttgccttattccctctaatgcatcatttgtattatttggtatatgaattctcaggcaaaccacaaggttactgctacaagttctccatcgagacgagtattgggaggctgcaattgatgtggctatatgttgcaagaaatcatttcctatcattgctcaaggtgataactctagtgcacaagattccgctgaactcggttcgcaggagaaggctacgaagaagtttgaagggtgtttga

SEQ ID NO: 15767 - DNA, 570 bp, Zea mays
  Peptide Sequence Number=SeqID_59142
atggcgcttcctgttgacgtggctggcccgcgccctaggctgggcgatgtggaggctcctctgaagccgaggtcgagtctgtcttccatggccgaggccgagtccgagcccctgggtcgggcgaggcggagggcggagtccgagccctggggtcgggcgaagcggagatcgtcgtcttctggggctgagcccgagtccgagccctggggtgggacggagcggagttcgtcgtcttctggggctgagcccgagtccgagccctgggtcgggcgaagcggactttatgctgatgggggttaccagctgagaattaggagtcttgagggtacccctaattatggtccccgacaccttggaaactcatttgtcaagtctattgtgaacaagatgcgtgtcaataaggcacaacttctctatgatgatcatgagaaagcgctgaagttgctacatgctttggatcagagggtttgggaggtgaaggtctcggcgatcatcgagtcacccaattatgagactctcaccatggtcgagatattcatcaagctcaagtccaccgagattgaccactag

SEQ ID NO: 15768 - DNA, 324 bp, Zea mays
  Peptide Sequence Number=SeqID_59143
atgaggtgtggagcacaggtacagtggtcgacggtgaaagtgaaggtcatgcagattcatggtgatggatcgggagtggtgaatgacgagtgctgtgacttgaccgagggaccagtgtcatcgggagaccttgtgtcggcgtttcgagaccggggggtccctaagcagacgagtgaatgtgccgcgtgccccagcccagatgggtcgagcgcgtgggcgagcgcgaaggggggaagtgaggtggccggagatgggcgtgagagaggtggaaatcccgcggccttcgtgttcgtcccgcgcccaggtcgggtgcgcttgcagtag

SEQ ID NO: 15769 - DNA, 318 bp, Zea mays
  Peptide Sequence Number=SeqID_59144
atggactgcgccgcatgtcaccttcgtcacgctgtcctggcaaccgacgtccccatctccatgtgctgcgctgtatgccaccttcgtcacgccatcctgacaaccggcgtccccatctccatgggcagcatcgcctgccaattttgtcaccacatcctggacaccggcgtgcccatctccaggaacaacgccaaatttcgtcacatcatcttcgttgacggcgtcttcgtccccatgggcgacgccactaggggcagccacgactcagcaatcacgaactccatcaatgggagacttgtggaccaacataagggctaa

SEQ ID NO: 15770 - DNA, 1701 bp, Zea mays
  Peptide Sequence Number=SeqID_59145
atggatggcggcaaccacccccgcggcggtgagccctccatcttgcagctcctacaaggcctccagaaggggctggagattcttccgtctctcgcgcggggccccatagcgccagttggtgtcggcggtggtcaccactcgttgagaaaacgatgggagcttcccttcatcgttccgaaggtaaaaccaccggcgctgccaccccttgttcgaagaagcaaggacggcggggatgtactgctgcgcacgcgcctgcctcaactggaggatgcatccaccggcccgcatcgccatgcgaactctcctctcccctgtcgccaaggcaaagggctccgcggagaagagatgggtccacagatcccagtggggatcaatccccaaaaacccttcgcaaaccgccgcgaagatggctgcttgcacgatggagttggggctgagattgtgcagctccaccccgtagaagtgcagaatcgcccgcatgaaacgacttgccggcactccgaacccccgctcgtggaaagagatgaaactcagcacataccctggctgcggggatggggcggctccgcttgggggagcaatccactccagctgcaggtcaccgaagaggggacgaagcaagccatcggcaacaagggcctccaaatcgtccactgtgacggtagagaaaggccacgggtcgcgcggcggaaaaacggccacccggtcggccatcaccaagcaaaggaggtggcggcggagcgaacgaggataggcggcacctttggcaggcgaagcaggcgacgcttcacctccgccatgatgaccgcgtcaaaaaggctggcccctcggaagggttcgacagccgcctcagagcactcgggctccgcgcctactactgatcagaggttaaggctggccccttggaagggttcgacagccgcctcagagcactcgggctccacgcccactactggtcagagactggccctcgaagggttcgacagccgcctcagaacacgcagagcgagggatgactctgggtacgtccgatacatggccgaggctcgggctacgctcccgagaggctcgggggctgctctcgcaaacccggctccggccaaaccattgacagcgtcaacataccagcccgagaacttggaacctgactatgcacccgggctacggccactggtaacccccatcaacacaaagctgcaaaggcctgatgggcgcgattcaggtcaaggctccgtccgctcaagggacacgatctcgccacgctcgagcccagactcgggcaaaggcagccgacccaggaggattcacgtctcgcccgagggctcaacctcgacgccggatgacggactccgcctcgcccgaccccagggctcggactcaacctcgacgccggatgacggactctgccttgcccgaccccagggctcgggctcaaccttgacgccggatgacggactccgcctcgcccgaccccagggctcaaactcaacctcgacgtcagaagacggactccgcctcgcccgaccccagggctcggactcagcctcgactccggaaggcggtctccgcctcgcccgacctagggctcggactcaacctcgacctcggacgatggtctccgcctcgaccgacccctggggctcggactcagcctcgacctcggaggagcctccgcctcgcctgacctcgggctcggactga

SEQ ID NO: 15771 - DNA, 408 bp, Zea mays
  Peptide Sequence Number=SeqID_59146
atgggaagtgttgctaggacgggtgaggattcagttggccaagaatttttcttttgcctcctggatcatacgctccttgtgctcctcaaactggagctgttcgtcagccagcaaggtttcccaagtcggctctatgatgttacttggggaatatcagagctatcccttgaaccggccattaagggccgatttgatgtgtctatatttgtcgtccccagcggagtcgccaaaaagtatgttgacacctttttggaggcgccaatcacttcaagagaatcagcggcggtgctctctggtcaggcgcggacgggcgaaaaggaaaaaatgactaaatcacggacgtcgttgaggccggggtgtggagggctagccttggcatataaagagttaatctataccactatataa

SEQ ID NO: 15772 - DNA, 394 bp, Zea mays
  Peptide Sequence Number=SeqID_59147
ccgggcaggtcaggcagtttctccagttttccaaccccccaccccacaagacgggacgccgcctcgtgtccggcacgccgttcccttcccgtccccgctccttcccctcgctaaaacccatcgaatcgaccgacgcacgtcctgacactcctgctcccctgtcgccaccgcgtcgcgcgcgggcagaggcctctctcgccatctcgcggccgcggcaccccacagctatcctaccacccgacctcccaccaccgccgccgccgccggcctgctcccaaccacaagtccaggaggacgccccttcgatccgccgcagggaggcaggcgcccgcgcccccgccccccgccaggctccatctccggatccgatcgcccgccggctcggttcaatccg

SEQ ID NO: 15773 - DNA, 66 bp, Zea mays
  Peptide Sequence Number=SeqID_59148
atggcgcaggagggccaatctgcggcagcatcctacaaccctccggaagggttcaacccaacgtag

SEQ ID NO: 15774 - DNA, 560 bp, Zea mays
  Peptide Sequence Number=SeqID_59149
atggtcggaggaacactcgccctggccggcagagcccgcgccgggccgccgtgcccgcctggacggggtcgtgcgccggttgccgcgcgctgccggggccgctgccgccgggccgccgtgcccgcctggccggggctgtgcgcccgcgccgaggccgcctgccgtcgacccgagactgcggtcgcgcccacgcctagccaaaagaggacgccgaggccccgccacgcccgctcccgcaccggggtcggatccgcagtaccagcgtcgtggctagggccgggggacggcgcacctgcgctgtcgaggggctgcgcccgcgcgcccgaggggcctcgcctgctgccgaggccggggggccgccgcgccgggcagcgcgcagggccgctgccgcgccgggacgcctgtgccgccgagagtgccacggggccgcgccagtctgcaccgtgccgccgaggggccgcacgccggtgccgcccgcaccgccaccgggggctgcacccacgagccgtccagggagcctcgcgccgccgcatggggccgcgcgcccgcgcgccgaggcg

SEQ ID NO: 15775 - DNA, 69 bp, Zea mays
  Peptide Sequence Number=SeqID_59150
atggcggctgtccggatagatagaggcacagaggaggtgtacgcatggcaggattcgtggatcgtgtaa

SEQ ID NO: 15776 - DNA, 930 bp, Zea mays
  Peptide Sequence Number=SeqID_59151
atgactctgtttcatcgtccgtcggatgcaactctgcagcaaccaacgccgaaacacgcccacgcctcgcgcgagcactggctcccccgaggccccgatccatccctcctccccacgcccctctctcacctaactgccccgctccgatcccgccgccgacgccctggccccgcgcaagcaccagctccgaccccgccgcgtctctcccacgccgccatctgcacggctctggcatcctatgcaggtctcctccagcctcgcgggctcctctacccggccctcaccacggcgtcgcacgatgacctcgaaggggcacgctgcgtcgctcctgcatcctctccggagctgacccgaacgccgtcgtcgcccatcccgtctccctctctccgggaggacacctcgatggccaacacgagcgtcaccagcgggggtcatccatggcgccgcggaatccaccggatccgcggtgggggaccatggcacccaccggagacgacgcccttgcccccttctcggtgcctgctccactgcctcgacctggcgccatcgtcgacgtcctgcgagacgcgctcgacaacctccacacgtgcgtctactgcaaggcgtcccagcagctatccactgcgctgggcaccaccgagagttgagaggaccctcctgcagcgctaccgtttcgtccccagaggtagcgcgctggccgcctgcgcccgagcgtcgtcggcgcctccaccgctcccgctcctgctcctgctccatctccagccaacagagaagtccatggtgaaaatccgcacggttgaggtggaggacaagaccgtaaagctgcagattctgatggctgatgctgcatgcttcaacagtgggacacagcagggcaggagcggttcaggaccatcacgagcagctactaccgaggagctcacgggataa

SEQ ID NO: 15777 - DNA, 249 bp, Zea mays
  Peptide Sequence Number=SeqID_59152
atgccgtcctcctcttcttctgctgccgctacgccgctggccggttcctcgccgtcggccgccgcctcgtcggaggagacgttgagtagtttgatggcggaggagttgcgcgccggcgattctgttgatttcggcgtgtcgcgaatgtcgtcggcccgcgtggaggatatgtgtgacaccccagtgtcacctagggtttctcttgtaaaagcccaaccaagaaccattatttcatgtaaatccaagtaa

SEQ ID NO: 15778 - DNA, 795 bp, Zea mays
  Peptide Sequence Number=SeqID_59153
atgctgacgccgtccgagagaaatcggccgtcgacagcaagtgccgcaagctggcggacaaggtggtcgcactggagggagagaaggctgacctccggcgcccaattggcgggggagaggagggagaccaacaaggccctcgccaaggcgcaagcttcgcaggcggaggccaagctggcccgagcggagggaaatattgccagggagcgcgccgagcagctgcaagagcggctcatcgccctggagagccgtgtggagcgggccgaggccgcgatgcgagcggaggccgaacggacgcgcacacagcttgtgagcacatatcgtgagctgggaagaactgcaggaactccccgctgtcgtggggggttcatgtcgtacgcctccctggtcacctgcgagggggcgatgaacgcgctctcccgcgaagggtgccggcacttcgaggtcttcgaccaggtggatgaagattttgatcgagatgtctataaggttgaagacctcgtgctgaaggattctgccggggccctctacgaccagatgtggggtccgcacggtcgcgaggtggtcagggagcgggcggagacggcgatggctcaggcgttgcgtggcgagcgggtggacgacttcggggcgttgaacagcgtgttgcctgacccggagccaacccctgcggaggcccgtgtccagggtcgccctggagccaaccccggagaccgcggaagacgcaccggatgcccccacatccgcagcggccggcgaagacctgcccccgaaggtggccgaaggcgcacctga

SEQ ID NO: 15779 - DNA, 453 bp, Zea mays
  Peptide Sequence Number=SeqID_59154
atgctggtagactacacaacggtactcgatagaccatgtgtgtcggtcgaaggcccgatgcagcagggtatcgagagcgtcgtggaagtgacactcacaagcggcatcacgagtgatgggtctagcgatccatccctccggctctggctcctccgaaagctccgtgccgtggctcgaactgccactggcatcatcgtcgtctccgtctccgtcaagggggcatctctggctgaggtgcaggggaaggcggcctctcggactccacctcctactgaggtgagggggaagagtcctgctgctcctgctcctggagtcggtgctcttgctcctcatgcatgcgacgatgcagtctctccagctgactggactgacctggcaccgtgcgacgcaggggatgctccgccaggcgagaaggcaaaaagtggatcacagacttacgtgcagtgcacctga

SEQ ID NO: 15780 - DNA, 354 bp, Zea mays
  Peptide Sequence Number=SeqID_59155
atgcaagatgcagcacgacgggcactttctcagtattgctcgttgttcagcggggtagctaatggccttgacttgaagtactaccctcgccattcgaccaggagtgctgggaggttgaacaacatggtcgacttggctgccgtgctcaacatagagttggaccacgcccttgatgagttgggcaaggttcgggcggaggttgcggaattgcgtgttgagcgcgcagcacgccactatctagatggtggttctcccgcccctgtcgggattcagcacccttaccgttcaccactccgtggtcgcttcgactatggtaccccaaactgcaggacctggatagatttggatccctag

SEQ ID NO: 15781 - DNA, 414 bp, Zea mays
  Peptide Sequence Number=SeqID_59156
atgggcaagagcaagaagggcggaagttcgtcgcaccattccggcgacaagcggaagcgcgagccgacccctccctcagaggatttcggcgattccgagtactcggaggaggagttctcctccgagtccgaggggtcgccggtctacacctctcccccggcatcgtctgacgactcagacgattcccgggggatcgctgctgaggtgtggacatacatccgagccgtcgagcgtgctgggcttgagggctcggatgagttggaggtctcctcggatgaggagaactcctcagactcgtccgaggaggggagcggcggtgatggcgatgacgagggcgacgatgacggcagaggcgacggcgatggcgatggcgacgacaagggcgacagtggcagcagcaaggccagtggctag

SEQ ID NO: 15782 - DNA, 897 bp, Zea mays
  Peptide Sequence Number=SeqID_59157
atggggttgaagcggactctgcggagccggttgtacctatggtcgttgtcctatcccttctgcactccctcactgttccctaggtcaggcacgctctgcacgctcccacttgaccttgggtatcgatggggtggggctcgttccatgtcttcctcgggctcggacaactgtcccaataaggtgtcatttcctgctggcgtggacgcgagtttctgcctcggggagtttgtccaggagcgttgcggcggctgcaacattctggctcgcctaggagaatcgtggtgggccggccccaccgtaggtcaggcagtggtcgagtcgaggtggggcggatgccatgacatacatcatggcattggtggggtcccccaacgagttggccatgaggcattcttgggctatgttgtgtacatgtcgtcgcccgtcaccacctcgtggggaaccgagtcggaggctgtcgaggcctccggcaatgtcgagcaagtagctcgttgggggaaccagggctccggggtcctggccattgttctcctatcgttgatgacgaagtcgagactcccaaaacgaatggtcgttccgagggtccaaacaacaccactgttgttgttggccatctggagcctggaaagttcgtcaagaacacaaaggcctctacctagtgtgccaactatcaatgatttgaatctttgctccgacaaaatgtccctacatccagtcttcggtggctcgtgctaccggcgcctctattactcgatgctcgtagtaggggttacaagcgggttacaagcggacgagagagggataaaaggctccaaagtctcttatgaaggagtggtcctaaagactatggaactggggccctacgctaagccttgtctccagcctctaggtttttag

SEQ ID NO: 15783 - DNA, 96 bp, Zea mays
  Peptide Sequence Number=SeqID_59158
atggagaagccagggagggacgtttcccacgggccaggatggcgcgcgcctggcgacgttgagttcattgcatacattgtttttgttggggactaa

SEQ ID NO: 15784 - DNA, 999 bp, Zea mays
  Peptide Sequence Number=SeqID_59159
atgttgaagaagctcaatagagaaggcatcaaatttgattcaagaaagaagaaattcttttccaacaaaagaaagcccatttctgagatggattgctacaactgtggtgagctcggtcatcttgctcatcaatgtaacaaacccaagaagaacaagttcaagggcaagaaagaagatgacagcgatgatgaaaagaaggaaaagaaattcttcaagaggaaggatgggaagcaaaagaggttccacaagaagaagaatggaaaggcatatattgttggtgactggctcaccgacattgagtcatcaagtggatcttcttcaagtgaagaagagaatgatgaaaaagttgttgccatcgccggggacttgtcttcaccaccaccatcgccatcattgacttctcacctatgcctcatggctagaggtgaacggaaggtacaaaatgatattgatattactgatgatagtgatgaggaatttgcttcaccttcatatgataaactagctgacttgcttaaagaatatactcaaattattagaaagtcaaaagctaaatgtgataggttgaaaaatgaaaatgaatctttaaatgccaaatatgacatagttatgaaagctaatgctaaggataaatgtgacaaattaaatgaatctaatagggagttgcaagatagactagtaaaaatcaaggaagactatactcaaattaaatttgatcatgataatcttcttgttgaaaatgaatttttatcttgcaaaacacatgaggctattaaccctgttgttaagattgatgtagcaacctcatgtgatgatttgagtcaaggagagcaaactagtctacatgctgaattgactgaaaaagttgaagtcctgactttagacaaccaaaaattgaagaaatacttgattgatgcaactactagaggaaaggttgctattgagaacaatgatttcaacaatgagttggcagtggataatcaaaggcttaaaaatgag

SEQ ID NO: 15785 - DNA, 825 bp, Zea mays
  Peptide Sequence Number=SeqID_59160
atggcgccttctgttgacgtggtcggtccgtgccctagtttgggcgaggtggaggctcctccgaggtcgaggtcgagtctgtcttccaaggtcgaggtcgagtccgagcccccgggtcggacgaggcggagaccatcggctgatgccagggctgagtccgagccctggggtcgggcgaagcgaagttcatcgttcttcggggctgagcccgagtccgggccctggggtcgggcgaagcggagttcgtcgtcttccagggctgagcccgagtccgagccctggggtcgggtgaagcggagttcgtcgtcttccagggctgagcccgagtccgagccctggggtcgggcgaagcggagttcgtcgtcttccggggctgagcccgagtccgagccctggggtcgggcggagcggagttcgtcgtcttccggggctgagcccgagtccgagccctggggtcgggcgaagcggagttcatcgtcttccggggctgagcccgagtctgagccctggggtcgggcgaagcgggacctcgctctgtcgagtgggttcagcagtcggtgcgggcgccaggcggcgctgtcctctgtcagaccggccacctttgcattaaatgcccctgtgatttggtcggttggcgtggcgatttggcctaggttgcttcttggtgaagactgggcctcgggcgagccgaagctttgtgctgatgggggttaccagctgagatttaggagtcttgagggggcgccgaacatggtttctctggtgaagctgctggcgggtaatcccgagtggacgcccgtgccccatttgttaggggtcggctag

SEQ ID NO: 15786 - DNA, 261 bp, Zea mays
  Peptide Sequence Number=SeqID_59161
atgtggaggctgacggtggccgagggcggcggcccgtggctgcgctcgacgaacggcttcgtggggcgggcggtgtgggagttcgaccctgacctcggtacgccggaggagcgcgacgaggtagagagggtacgccaggagttctccgaccaccgcttccagaggagagagtcggccgacctcctcatgcgcatgcagcttctggtcaccaaaagctgctgcggactgccaaacgctcagcttttcagccagcttctataa

SEQ ID NO: 15787 - DNA, 564 bp, Zea mays
  Peptide Sequence Number=SeqID_59162
atgccaattcaagaagatattgcagtaaacaccgtaaatgacaaatggatatacatcactggtccagctgcgtcaacagacgacttcacagttgaatttaaggattacaaagataacggtgaagtaattgcactcggagagactattgtttacgatgtagagcttgaagctaccgactcattaggcggaactgctacatacacaatagctctaaccgtaacttctgagaaccgtgcaccaactaaaaagaccactgttaaccttaatctcggtactttcacagtcatgtctggcgactcatacagtttagtgaacacaagagactttgaagatcttgatgagcatgaaatttctattgcttgcacctataaagatgatttctccgataatacaactatactatcatacgctattgttggtgctggatttaaatcaggacctgataatacagactttgaagtttcgtttgatgacacatacacaggagatggatttaaatacctcataaccggattgtcattcataagagatgatgcctatggtgcaactgtcaacaagatctaa

SEQ ID NO: 15788 - DNA, 1095 bp, Zea mays
  Peptide Sequence Number=SeqID_59163
atggcggcggccccgtccccctccgtccccgcctgcagcgacctcttggctgccgtatctgcattcgtcgacgcgttcgtggactttgccgtgtccgacatcttcttcccgaccttcccgtcctcctccttgctccctcctcgcccgaagactccgaccaccttcctcccttccccatcctggctcgtcgccatcggagacctccacggggacctgcccaagtccctctccgcgctccgactcgccggcctcacacacggaggcgcgttcctccccatcctcggcaaccacgaggtcatgaacatctccggcgacttccgcttcgtcatgctgcagggtttccacgacagggcggtgaatcgcgggggtggagcagcggaggaggttgaggagatgctgtccggcgacatccccccgagccagaccatctacctcaacaacctcaacgagaaggtcaagaaagaagagttgaagagatcactttatgccttgtgttcacagtatggaaggatactggatgtggtggccctgaaaacacaaaaactgagagggcaagcatgggtggcgtttagcgaaattacagctgctaccaatgctttccgtggtttgcaagatttcgatttctacagcaaaaaaatgcgagtacaatatgcaaaaacaaaatcagactgtattgcaaaagaagatggtacttatgcacctaaggagaaaaggaagaagcaagaggagaaagctgctgagaaaaaacgacgaacagaagaggcacaacaagctggcctcaatgctgctgctgcccaaagcaatggaactggctatcaagcgtctcgtctgggcaaggcttcacaggagccacctgcgcctccgaacaacatcctcttcatccagaatctgccagaccagaccacgagcatgatgctccagatcctgttccagcagtaccctggcttccgggaagtacggatgatcgaagctaaaccaggcatcgcttttgtggagttcgaggacgacggccagtccatggtcgcgatgcaggctctccaaggcttcaagatcaccccggagaaccccatggctatatcctatgccaaaaaatga

SEQ ID NO: 15789 - DNA, 180 bp, Zea mays
  Peptide Sequence Number=SeqID_59164
atggagagaccgacgtcgcatctcttctatcttcgcttcaagtgtctaacgaattctcggaagccggcgcgctataattcaccggactgtccggtgtgcaccggacatgtccggtgctccaaggaagcgcggtctccggaactcgccagcctcgggttcgcgcggcagccgctccgctaa

SEQ ID NO: 15790 - DNA, 387 bp, Zea mays
  Peptide Sequence Number=SeqID_59165
atgggcgagggcctcctggcagcggcatccaccctgagatcagcgttgccgctgttcggccccccggagcagaagtcgtcgtcgtcgccgctgctggagcaggtgacggcgcgccgtttgttggtcttccgttgctccgcaggccttcccccatggagtggggttgctcgtacccgcggagggggaacccggagttccgtttgtgatggcaccttgaatgccagtgtttttgttcattgtggctgtcgaggcctgaacatggatgtttgtgtgggcgagagttgcttttcgcggaaggtgatgagtgaggtatccgtatcccggaggcgtgggagtccctcggctcggtcggccttgccgcttacacgtactttcacccgtccatga

SEQ ID NO: 15791 - DNA, 504 bp, Zea mays
  Peptide Sequence Number=SeqID_59166
atggcgctccctgttgacgtggcgggcccgcgcccgaggccgggcgacgtgggggctcctccgaagctggggtcgagtctgtcttccgttgccgaggccgagcccgagcccctgggtcggcccgagtccgagccctgggtcgggcggtgcggagttcgccgtcttccgggtcttagcccgagtccgagccctgggtcgggcggagtggagttcgccgtcttccgggccttagcccgagtccgagccctgggtcgggcggagcggagttcgccgtcttccgggtctcagcccgagtccgagccctgggtcgggcggagcggagttcgccgtcttccgggccttagcccgagtccgagccctgggtcgggcggagcggagtttcctatagcgcctttggcaagacctgactgcctgtcagactcactctgtcgagtggcactgcagtcggagtggcgcaggcggcgctgtccttctgtcagaccggtcagtggagcagtgaagtga

SEQ ID NO: 15792 - DNA, 183 bp, Zea mays
  Peptide Sequence Number=SeqID_59167
atggcgaggcctggccgggtcagctcctgggaaggaccggcggcgccgtcctcgaaccgaagaaaagccgccgtcctcgagcaggcgccgcgccgccctgctgtggcggtgtggcctgcgggggacgggagttctaggttctcaagccacgcgaagaatgacgatgtagatggcaacgggtaa

SEQ ID NO: 15793 - DNA, 1008 bp, Zea mays
  Peptide Sequence Number=SeqID_59168
atgccggcgctggacctccgccccgagatagcgcacgcgcaccagcccgtcatgtcgccctctcaccacggctgggacggcaatggcgccacagccgtgcccacaccgatgcccaagaggctggacgggaaggtggccattgtgacgggcggcgcgcgcgggatcggcgaggccatcgtgcggctgttcgccaagcacggggcccgggtggtgatcgcggacatcgacgacgccgcgggggaggcgctggcgtcggcgctgggcccgcaggtcagcttcgtgcgctgcgacgtgtccgtggaggacgacgtccggcgcgccgtggactgggcgctgtcgcgccacggcggccgcctcgacgtctactgcaacaacgccggggtgctgggccgccagacgcgcgccgccaggagcatcctgtccttcgacgcggccgagttcgaccgcgtgctccgcgtcaacgcgctgggcgccgcgctcgggatgaagcacgcggcgcgcgccatggcgccgcgccgcgcggggagcatcgtctccgtcgccagcgtcgcggccgtgctgggcggcctcggcccgcacgcctacaccgcctccaagcacgccatcgtcgggctcaccaagaacgccgcctgcgagctgggcgcgcacggggtccgggtcaactgcgtctcgcccttcggcgtcgccacgcccatgctcatcaacgcctggcgccagggccacgacgacgccaccgccgacgccgaccgagacctcgacctcgacctcgacgtcaccgtgcccagcgaccaggaggtggagaagatggaggaggtggtcaggggcctggccacgctcaagggccccacgctcaggcccagggacatcgccgaggcggtgctcttcctggccagcgacgaggccagagcagagcacccaattgcctggtggtcctgccacatgaacgaggaaccatttgtccgtggtaccaaagccaccgtggaggccgcatccgtcaccagtagctga

SEQ ID NO: 15794 - DNA, 1203 bp, Zea mays
  Peptide Sequence Number=SeqID_59169
atgaagcgaacggcggcagtgcagtgcagtgcaggtgcatgctgggcagtgctcgtccaacaggcgagtgtctctcaggattggcgctcggtggagagacctcggagcgataaaattcgattcgctgccgtcgctgccgccgcccgcccccagacaaacggggcgccggaggccgttgcgcttgtccgcttgccggcgcaggaatccgaccaggcttctcgtttctggttctggcgacgggactgcgacggcgacctggttttcggctggcgccacttgcacgaacccatgccgccggggcatctgtcaccttggttttcttgccgccaataccacatagaaggtgcaattaagcaggacaaccgaacggagataaagatactcgatctcctgtcgctacagtatgtgccttgtcagcctgtaatccatcttggctccagaatctcgtggaaggatgtactgcaaatgatcctggtggctcagaaactgttgattgagttagccttaactgctgaaaatgacaagggcctataccttagcttagttgatggagcgagcagatataaaagtgctttggcacattccttcactgctatgcagccatgcaggttgttcaggtctatatggaccaagtatataaactccatggattgcctcggtccatcatctttgatggagaccgcattttcccaagttcagtgtggcaaaatttattcaaactctctgacagacaacacaactactgatgagatcctcttaccatcctcaaaccgatggtcaaaccgagaggctcaatcagagcctggaatcatctctccgctgtgcagccagtcctgtccgaagcaatggagcaagtggcttttattagccgattggtatagcgcctcattgcattcagcctttggcaggtcacgctttgaggtcctttatggtcactcctgtcgccatttgggcgttacaaatgctaaggtgaggatggcgagtctgatccgttgtctgttcaggcggtcgacactcggctatcaaacaaaggcgcgtacactcgtatggagagttccagccaaggacaactcgacggcgacggccgactcccgcgcgatggctgctggcgaccaacggaggcggcatctatcctcggcggagactgccggtgtcgcactgccggtgctgctcgtgccagagctgtcgcatagctcattctag

SEQ ID NO: 15795 - DNA, 663 bp, Zea mays
  Peptide Sequence Number=SeqID_59170
atggctgaaaggtaccaactcccgcggagttgtgttccgccaacggcaaggcggaaagactgcgagcatcccccatccgggggcttggaaggtggaaaggcacgatgcataagggagcgcgaagatgtggtcgcccttcaagggggtcaccctccttttaaaggcgactctccctacttgcgtccccaaccgtcatgggctgagtcttctccaacacactccaaggtcctcccctacggcgcgggggctgggtcccacacgtcatgcaagccgactcagagcagaagaagccaaaccgccgtgcgcggcggcgcctctggcaggagaagcgagcgacgcttcgccttcgccataatgaccgcgtcaaaaaagggaccaggaaagggggataccccgaaaaggatccttccccgtgaaggaaccaggcttcgagcctccctactgatcagaggttcgaaggctggcccctcggaagggttcaacagccgccttagagcgcgtgggctccacacccactactggtcagaggttcgaaggccggcccctaggaagggttcaacgaccgcctcaggctactcgggctccgcgcccactactgatcaggggttcgaaggctggcccccgaagggttcacagccgcctcagacacagagcgagggatga

SEQ ID NO: 15796 - DNA, 243 bp, Zea mays
  Peptide Sequence Number=SeqID_59171
atggaggaccctaacgcaggcccccatagctggaaaaaaattgaaccaggtgcgacggacccgaagctggggaaaggagatggagcggggcacggttccggtggaggcgaccccgagcgccatgggagggaccgagctggggccggcgctggcggctgggcgctcggccatgggagacaggaaggagggagcgcggctatggagatggagctcgacagagctgcgagtgtccatggcgagtag

SEQ ID NO: 15797 - DNA, 741 bp, Zea mays
  Peptide Sequence Number=SeqID_59172
atggagcattacatgggaggggagggctgctgtgtcgatcgtctctatatataccagagcggcaataaatataatgggaggtgcatgattttgagccaagccagccgcatgccccatcaagccctcggagacaccgccatctacccctcgcccacctacctcccgacctcaagcatagacatccatgccaccgtcgccaaggccgctgagctgcacgcggcgctcctccagggcggcagcgccgccgcgtccattgttggggcatacgccagcgctaggcggagcctcgctctcatctgcctacagccggccgcgtcgtgggtgccaacgatcaccaggtcaggcctcctggccatggccatcgtggactaccccgtgtttgccctgattaatccaaaagctgcagagtctctagcagatccttctgaatatccaaatctatttgaagactggcaggttgctctaactgtagaaaaaagtgttgcgtctcagagcttcagttatgaagatgtatctcaaggttttcaacttcttgtggatgcaaatatgaatcaccagaagtgctggcaaatgaatgccggcgccccttgtgtccagctcccctgttcgatgggcttcatgcccagtttcttctgctgcttccgttctacttgtcgaggcatcacctccaagatgaagctgccaccgttccatgtcgaggcgcacaccttgagtatcaggaacaccacgtgcatccggtag

SEQ ID NO: 15798 - DNA, 326 bp, Zea mays
  Peptide Sequence Number=SeqID_59173
atggggaaggtcctcaccagcgatgatgacatgatgaagccttaccacggcatggtgcagttggcggtgatttcccaactttgggtcgaagccaaggtgggggtttcggtcaatggctccgaggtccatggcaagctccgccacggccgggattccgttgagggcgaagctgacgttgcggccccatttgccagagactgcgggcgcgcgcgacgcaaaacccgacggcagacactgacgccacgggcccacgacacagcggcaccaggcgaagacgccatcgagcgcagcgacggacgactggcgagggaagcctggcgagtggg

SEQ ID NO: 15799 - DNA, 471 bp, Zea mays
  Peptide Sequence Number=SeqID_59174
atggcacccaagagagttagttcgaaggcagccccatccgtcgatgaagcagcgaaggcagcgctgctagccaagaaaaagggcaaggccctcgcacacaacacaccccaaaaagcctgcgacgatgaagccctcagcaagagacaacgacatgaacaccccactctcgaaggcaccgcacgcacctgcagctccggagggcaaccacaagcaccacccccatgctttgctccaccagagggcgatgacacaatagaggatggtgaagtcatcagcatctcagccgaagaacagctacaactacgggccctacgcatcaagaaccgcaacctccaaaaacagagagacatccttgaggccaagcgccagcgtgtcaccgtgcaagccaaggtgcgccaaatgatatgggacgaggagcagagagcccaggagctcgagcaagagatcacgctcatgcagaacgaaagctag

SEQ ID NO: 15800 - DNA, 1578 bp, Zea mays
  Peptide Sequence Number=SeqID_59175
atggagttacagccgggccacacggtggagttcagcgttttgaggatttcctcggcgttcttcgttgctggccttcgcctacctgggcatcgttttgtggtggaggtcctgcagaggtttgaggtccaggtccaccagttgacacctaacgccgtggtggccctggcgaaaagcaaagtcgaagacctcccagggctccccatggccgtgatgtgctcccattattatgtggcattcccacaatttgatgtggcggaggatgatgaggacgaaggggccctccggtgcgcagcccgcatgagcagcgggcgtgacttggttgaggagtttattggttatggagtgtggcccctggcgcatggctgggtgctgagcgaagtatgccctcgccagatgcctaatttgggccagcagctagtgcgaagtccggccttctctttggatctacgcggtcgagacccggccgtgttcgttcatgaagtggaggacggggctgtgaggattgtgggcgatggaatattgctgctgttgttcgacaaagatggacaaggatcatcaagatgcggcgcgaaagcgccgggcaatcacaaggcgaagcctaccgtccccgggcccagcaagtcttcggcgggttcgagggctgccgcttctggcgcgggcaagccgccattgattgaacccgcgaaggagccaaggccaccgtcgccggtgcgcaccgacaaggcggcgacgggtggtgctgattttgatacggacatctgcgtggatgattacctcgttggtgaggggttttttctagactgggtcttgaacaagattatggacccacggtccaaattctgcgccagcggcgagatttcattggccgccgccgctagggacatggcggacattgtgtcccagcagctgaagcatgcggccgccttcatcgaccatgttgtgtcgggcgccttgtctttggagtcggctgcggagaacaagagccgcaggctgacggagaggctggctgctgcggaggctgagaaggaggacctcaggcgtcagctgacggaggagaggagggacgcaaacaaagcttgtgctgaggcgcagtccgtgcaagccgaggccaagcttgcgcgggcggaggctagtctcgcccaccagtgtgccgagaagatggagacgaggctcagcagcctgcgcgaccggctgaacaagatggaggcctcgacgcgcgtggaggtcaagcggacgcatactcagcttgtggacgcgtaccgggagctgggtgcgcggaccacgcccttcgaagcgcctggtcaggaggtggtcctccgcttccttggatggctacaggaggagctggaggtgctcccgaccattgtgacgggcctcatgtccttcgcctccctcgtcacttgtgagggggccgtgaatgccttgtcccgcgaggggtgcgggcactttgaggccttcgaccagtctgacgaaggcttcgggcgcgaaatctttcaggtcgaggacccgatgatgaagcggtcggctggggctctttttgataggatgtggggccctcacggccgagagactgtctag

SEQ ID NO: 15801 - DNA, 741 bp, Zea mays
  Peptide Sequence Number=SeqID_59176
atggcgcgtgacgaagaggttgaggaccttggtgatctggtcagcacgctgcccgaggcatcgggggtggagctggcgccgccatctgatgcagacgagggcccctcggcgacccccacgccgactggagctggcgaggaccccgcgccagccgctgtgctgacgggtgcggacgccccgaaggtggtggctgaaccggctgtcgaagactcagggccttcgcaggttccgatgtttgggcctacgcaagcaaccgctgctgtcgatactgattttgtggtggcctcaaccgtagtgcctgccgatgataatttgtttggctctgtgtctgagtgttttgagcctgatggtgaatcagggagttcgatttcatggatggaggagtcctcagatgaaggcttggattattttgctacgttagatgtggctgcagcggagacttctccacgtgtggaggcttccgggggtcttcctagtgcgagtactaggtataggaggcgaagggcggtggcgaaacacagtgagagtgaattttcgcgaagtggtaggtgccgtcgtatggggatggagcgtggccgtcttcgcgtggaccggactggtaaacgagaattgttgtcctcggcaattggggcgagcataggtgaaggggagctgcaaaatctttttgagggtgaggaattgaggataatgctgttcaattatagggagatgggtattatcccgaaggttgagccgatgtaa

SEQ ID NO: 15802 - DNA, 213 bp, Zea mays
  Peptide Sequence Number=SeqID_59177
atggttaaaaattttggcaggaaaacagtgcaaatagcaatgaatgctgtggtaacttcacacctactcgtctgtttatatagtgttgcaggttttgaaacccctcctttatggattgtagcactagaagatcaatctaggcaagatgatgtcgcagttttatgggtgaacaacctcttcgctagtcatagtccagcgggacatgatgagtag

SEQ ID NO: 15803 - DNA, 951 bp, Zea mays
  Peptide Sequence Number=SeqID_59178
atggcgtcttcgcctggtgccgctgtgtcgtgggcccgtggcgtcagtgtctgccgtcgggttttgcgtcgcgcgcgcccgcagtctctggcaaatggggccgcaacgtcagcttcgccctcaacggaatcccggccgtggcggagcttgccatggacctcggagccattgaccgaaacccccacctcggcttcgaccctgggcactataagaatctcatctcttctctctcctcctcaatttcgcgtgcgccaccaaccaccccaccctctgtcccttcgtcgcgggctgcttcgagtccgatccgccagggactaccgccgttggaattacctggctaccatcggcgaggctctatttgtggatcaagggacccctaagtgcgccagggtccaaaccaagacacacgcgcgcgcgaagttgcctgcggcacctcagaatttctcatcggactacgctcttcgcgaccgaccgccgtgcgccgtgggcagtgtgctacatcgcgggaatcacgatggacatcttagcatgtaccaacctaagatggtcaataccaggcggggtggtggaattgatttgcctcctaatcgacacactcagtggatatatagacaaccccagccacagcctgcagagatgaatcctcctaatcctccaccaggcggagttgacccactggttgctgctcagatggcggtgatgcagcaaatggcggacactatggctgatatgcgtgcccagatgcagcaagaacgccaagagatgcgtcaggaaagagaagatatacgccaggagttgcgccaggagagagaggagatacgccaggagagaagagcgcaacaacagcagctgcaacaacaacttcaacaaaatagcagcaacagcaacaagtgccattgcctccaccaccaccaccagttccacctcgtgataagcaccgggagtttatga

SEQ ID NO: 15804 - DNA, 384 bp, Zea mays
  Peptide Sequence Number=SeqID_59179
atgccggggtggccttcgctggattaccgccacagcagagaactcgtgccgccatcacacacgtgccaggagccccgttgcgtggaatcgagggagaagactgccacctccattgaaactcgacgccttggcgcgggcgtaccgtacgcacgaagaaccggccatacggtcgtcctaccctcggaacgggcgttgagggcactgctggagggtgctgaagatttccgtggccgaacggtgcgacgatttggcgtggagtacaccgggagccctcaccggactctgtggattcgccgcgggccatacctcgccgtggtctgcgatacctgcgcgacaatccctgaggataacgctgtggggagtactcggcggctcgacggctag

SEQ ID NO: 15805 - DNA, 618 bp, Zea mays
  Peptide Sequence Number=SeqID_59180
atggcgctctcccccctcctccttgtggaaaggcgacgcaggggcgtatgtaaaaaagtcaagtctgtccctgatcgccctctcgccctgtgtagaggctcgggggctgctctcgcaaacccggctctggccaaaccgtacacccgggctacggccagcttgcatgagggaacgaccagaccagccgaagcattgcgcgaggcgttaagacctcggaggagtcaaaccactcctccaaggcctcgggggctacacccggcgggtgcgctcgcgcgcacccaccggaacaaaacgcaaccgagaaaggctggtccccttgcaaaaaagtgcgacgaaagcctccaagcgagtgctaacactcccttcgaggctcgggggctactgtcggggaccataattaggggtaccctcaaggctcctaattctcagctgaaagacagcgccacctgcgccgctccgactgcggtgccacttgacagagtgaggctgacaggcagtcaggcccggccgcacaccataggaaactccgtcccgcccgacccagggctcggactcgggctaagccccggaagacggcgaactccgctctgcccgacccagggctcggactcgggctaa

SEQ ID NO: 15806 - DNA, 375 bp, Zea mays
  Peptide Sequence Number=SeqID_59181
atggcgcctcctgttgatgtggctggtccgcgccctaggttgggcgatgtggaagctcctccgaggtcgaggtcgagtccgtcttccgtggccaaggccgagtccgagcccctaggtcgggcgaggcggaggccgttggctgaggccagggcggaatttgagtcctggagtcgggcgaagcggagttcgtcatcttctggggctgagcccaagtccgagccctgggtcgggcagagcggagtttgccgtctttcggggcttagcccgagtccgagccctgggtcgggcggagcggagttcgccgtcttccggggcttagcccgagtccgagccctaggtcgggcagagcggagttcgccgtcttccggggcttag

SEQ ID NO: 15807 - DNA, 417 bp, Zea mays
  Peptide Sequence Number=SeqID_59182
atgacaaccgaagctttgtaccttgttctcgtcggatctggagcagccgagcgaatggaagacgatgacgatggcggtgaggagttgcgcttgcgtttctcggcacctatcttcgtcggcaccgtggaccttcttagcctcttcgcgatggcggttcgacgtcgaccaacaccgacgcttgcacccgagttttggatctttctctcgtcgccgaccacctccttgtttccagccaccgagagcggtccgccgccggacccactcgcacacggcctattcgagcccagcttggctggctccgccgacgagccgcgctgcgaggcccccttgccgagatggatcgaagtcgccagcgacgggagaacagagcgtccaaatttttcaccaccgcgggagcctgaaccctcgcccggatag

SEQ ID NO: 15808 - DNA, 324 bp, Zea mays
  Peptide Sequence Number=SeqID_59183
atggcgcctcccgttgatgtggccggcccgcaccctaggttgggcgatgtggaggctcctccgaggtcgaggtcgagtctgtcttccgtgaccgaggtcgagtccgagcccctaggtcgggcgaggcagaggccgttggctgaggccagggcggagttcgagccctggggttgggtgaagcggagttcgtcgtcttctagggttgagcccaagtccgagccctgggtcgggcggaacggagttcgccgtcttccggggcttagcccgagtccgagccctgggtcgggcggagcggagttcgccgtcttccggggcttagcctga

SEQ ID NO: 15809 - DNA, 216 bp, Zea mays
  Peptide Sequence Number=SeqID_59184
atggttaaaaattttggcaggaaaacagtgcaaatagcaatgaatgctgtggtaacttcacacctactcgtctgtttatatagtgctgcagtggtacaagctccgataccagctgtggcggaactgcctgaattattccaacttaagtgcctaagtcccgccttagaggctagaccacacttaaatgggaataacccatcaatccctcggatctag

SEQ ID NO: 15810 - DNA, 909 bp, Zea mays
  Peptide Sequence Number=SeqID_59185
atgaagggtactcaccctcatcaccttgggagtgggatgatcaaggactccctgatggaagactctctggccattaggacatcctactgctcagaggtggaagggttcccacatctattgcgaagctgtgcgcttcgcgttggaatccgcaagaagccggaatacgtctggaaggagtatctcgagagcggaatggagaaatgctctatggcagtctacctgggagaaagccgatactatctgaaccatccttctttccaagtcacttttaccggataccgctttccagatacttgccagaatgttgcccgaacagccctccgacaactatgccagaactacaacaaggtgatctttgaaactccccttcgctactttccacccagcaacaagaatacccccacctggaggaaaagacttcaggccctgtcaggaggagatcctattgaggatgatcccaccatcgtctacatggctggataccttcacacccttgataaccaatatgatgacctcaccctccactgcacccacctaacctcccgagtggaaagcctggagcaaaaagtcagggaactttcaagggaaaaggcgtccctccaagagagcctcgcaacagcagaaggcgaggaaaccaatacccgtgaggcctaccgcaccctaaagatggattacgacaagaaactgaagaagctcgcccccgcaagaaaaatacacaagaagaccaaaagccaaggatgtcagactgagcagaaggaagaagcccctccaaccctaccccctgccgggttaaggaactcgtccgacaccgaggagatgtccctagccagccttgatgaccttctcaaggaatttggggacactttagagaaggagttcgggagtaccctagatagcactcgcatgtaa

SEQ ID NO: 15811 - DNA, 213 bp, Zea mays
  Peptide Sequence Number=SeqID_59186
atggtgaccgtggcgaggggcggcatggggtcctcgcaggacccgtggtccaagttctttttttggaggggcgaggggcgaggggctagcctggccgccgccgtgaaggacgtagccgcctcagttgtgcagcaactgaaacatgcggctaccttcgccgagcgcattgcttcaggggcgctgacctcggagttctctgccgaaaggcgatga

SEQ ID NO: 15812 - DNA, 1113 bp, Zea mays
  Peptide Sequence Number=SeqID_59187
atggacgagtctggtgtgaggattggggacgcttcacttggttacttttgtaacagtgtcgggcgagccccgggtgcggaggaaatctccgagcctgaaggcgagttgatagtttttgaggccttttttgctgccgatgttcgcctcccgacacatcggttcgtggtggaggtgttgcgacgatttgaggtccaagtccaccagctgacgccgaacgcggtggtggcgcttgctaagtatgtcccggcctcggttcgtgggcagccgtctatggaggtcttcgccaagaattattgcctgcattggcagaagatgaagatagggaataaaatagcccaatttggatcatgcaccttcacgccgaggactggaaagactttggctgaggttgtggagatagtcccctgcgctaggaacaaatgggtggaggctgaggccgcgaaaattgtaggaaaatatgtgccgaagacggagacattgagaagttgggatatccgtggttcaaatgtcaggttgaaccgcgtttttgagttgaaccgtttgccgtatgctggctacccgggggacgactatgccgatgttgctgtccgctgggggaaacaagtgatgccaacggccgacgagggcccctcatgggacaaggctccaggcgtggccgttaagaaaagtaaattaggtacaacagctgaggggttgagggcttccaatcgtttcgttgcggaattgttggagacatgcgcggttcctggggagacgatgtcttcgcccgagcttcgggaatcttccgcgcgaatgctagaggttaccggagtgagggagaaggatcgccaagacgcgccacggaagcgccgggcgttcgccaggttggcgtacccgaggcgagaggcgaagatggcgcggccgagcgtgaagcctgcctcccctagcgtcatcatgcctccacctgcctcgcccacacatgagcgaaggcttccctcgccaccgcatgctgggaagggtggacttgccttcgtcgaagctttcctggcacaagaggtttatcttggaggggtcgggttcttgcccttcttccggagctataagttccggaggatcggatccctcttccgctaa

SEQ ID NO: 15813 - DNA, 501 bp, Zea mays
  Peptide Sequence Number=SeqID_59188
atgaaagaaaagagaaaaagaaatttaacttctttttcagaaaattgggatatcacagccccagctttgtggggccgaaccgtacatgggcctctcttcgtggtgagggagtgggaggtccaggggtcttcggtggggccttcgtcttgtctcctcggaacgaagggggtcgaacaggcctccgtctggtccatgcccttggcctatccggcgggtcttgcggacgttgtcttcgtctgcgcaatgcgaggtggaagtcgtcgagcgaagggtggcgtgttcgccttcgccccaacatttgccctccaagggaccagttcgactaagtcagctggtgccaaagaccatcatgtgatggtgaagacgctgccctcgctcgaagtgactgtgtgctgccgccggtacgttgcaatgtcttcttcctcgtctgctgcgagtgcatcgtcggccgtgccgtcggccgaggataccttgagtgatttggcggtgattgagttgtag

SEQ ID NO: 15814 - DNA, 657 bp, Zea mays
  Peptide Sequence Number=SeqID_59189
atgctggtagactacacaacggtaatcaatagaccaagtgtgtcggttgaaggctcgatgcaacaaggtgacgagagcgtcgtggaagtgacacctgcgatgatgcagtctctccaaatggctagactgacttgtcaccgtgcagcgcagtgggcgctccgccaggcgagagggcaaaaaggggatcactcacttacgtgcatggcatctaatacgggccatctacaaaagacatcaaacaacaaaactctgatgtttcctcacctacaacaacatgggttcgaaaaccctgagtacagagtgtactttcgcaagtcttacccgacaaaagaaaaagactctcaaggatatgctagcttgacggagtcaaggtatcaaggaatggtaatcaatttcaagagaccctccgacttctgtttcttctccaaaccgaaccttggcaacggcgcgctcgccgtcggccatctctttgctcagaccggccatgaacgatgtcgactgaccaagctaagtgtcagactagcgcccccgatcccatatgaatctaagccctgccttaattgcaccaatccagccctaggttctcccacccgcgatgacggtgaacttcacggacaaatcaaggtgttccagacaattgagcatgatctagcttaa

SEQ ID NO: 15815 - DNA, 285 bp, Zea mays
  Peptide Sequence Number=SeqID_59190
atgacggggacttacccgtggcgcaaaaacaggattcatggggaaggcggggtggcgagcgcggcaggagtgggggaacgcgggggtgtggggaggaagagggggcacaacgggcaacattgcgatggagggaaatgtgtgggggcacgaaatcgcctgggcgacgccgacgaccagggcatgcggggcgaggatggagacgtgacagccatggaatcgcgggcgtcgcgagagggtgcgacggctggattttgcggggtgatgaagtcagaggcgggggaataa

SEQ ID NO: 15816 - DNA, 363 bp, Zea mays
  Peptide Sequence Number=SeqID_59191
atggctcgccccagcctcgggcgactactctgggccagcgatagtgcccgacccctccacatggacggttccggggccgccacatggccagagaagatgatataccccaaggtatcaacagcgagtccggacccccatggggaagtgccagacccctgtatatacagaccgggcctccggatcatgttattaactggaacatggagaaccacccggaaaaacagtgctaccacaagggtggaatgggacacccttggccaagtaattaggaaagctagggagagattaccttacccggttaggggcaagcggggaggtgtcgctgcagagtatagggaggtcctcgggtcgaactgtctgtaa

SEQ ID NO: 15817 - DNA, 1503 bp, Zea mays
  Peptide Sequence Number=SeqID_59192
atgccggcactcgctgccgtcagggacgaggcaggcgctgtatcccgccggctgaaggaggtggaggaggcactaagtcaggcggctgccttcgcagaccgcgcggcgtcgggggcgctcacggcagttgtgtctgccgaagtcgagagacttcggacgcaacatgctgacgccgtggccgcactggagggggagaagactgacctccggcgccaactggcgggggagaggagggaggccaatgaggccctcgcccaggcacaggctgcgctggcggaggcaaaattggcgcgggcggagggcaatcttgccagggagcgcgccgagcagttgggggagcggctcagcgccctgcagagccgtgtagaaagggccgaggccgcggcgcgcacggaggctgagcggacgcgcaaacagcttatggattcataccgtgagctgggcgcgcagaccgctaagttcaaagtgccggaccgagagcccggactttgctgcctggagtgggtacaggaggagttgcaggcactccccactatcgtggaggggtttatgtcttatgcttccctggttacctgcgagggggcgatgaacgcgctctctcgcgaaggatgccgacactatgaggtcttcgaccaggctgatgaggatttcgagcgagatatctacaaggttgaggaccctatagtgaaggaatccgccggagccatctacgaccggatgtggggtccgcacgatcgagaggtggtcagggagcgggccgagacggcgagggctcaggcggcgcgtggcgagagggtggatgatttcggggcgttgaacagcgcgctgcctgacccggagtcgaacccggcggagccgctgctgccggcggaggcccgccccccagagacagccgaaggcgctcctaatgcccccgcagccgctgcgccgagggctgagggtcctgcgacggtggcggcggaggcaccagcggaggcaacagcggaggctcccgcgacggctgggtcttcgcaggttcaagaatttgggcctgcgcacgcaaccgccactactaactttttggcggcttcgaccgtggatgatggtaataaatttgatgggtctgcatctgagttttttgattttactgactctgggagctcggttgagtggactgaggagtcgtcggaggaggacttggactactttgcggccttggatgtggcagcggcggaggcttcaccgcacgcggcggacacagaagatgtgcctgggagatgggaattattccgaaggttgagccgatgtagggtgtggtgccctcgcttgtacatgtgtaaaggcttgtatgatgaagttgtgtgcccccgcacatttggctatgcttgcgaaggcgttgcgtacttggtcaggtgtatctgttatgcttcgtccggctgtgccctcgggcacttctgcgcggatagtcttcgcggtagacttcggtttttcgcacttgttgtgctagtccggctgcacccttag

SEQ ID NO: 15818 - DNA, 636 bp, Zea mays
  Peptide Sequence Number=SeqID_59193
atgtgggccctctctatcggatctatcctcttccccctccgtttcctttcaacagaatgtgaagtcgcgcaggtatatcggagtcgcatcgtggtcttctcatggctgtccgtgaatcctggccggatctgcgtccacgcctctggggcgctggccgcggaccccactcgccagtcgagttttcggccacgcaccgactacactcgctgtgtggtggacccaagctcggcctctctcgctgctccgcggcgaactccggtgggcacaacgaatcaccgcggatttcgtgcggagaccgagcccttctcttgcgcaacggataccgaattccgcgtgctactacgaggtataaattggcacgttcctgccctcgctcacctcatccgtgtcggggaccggtgccgtgacagccattctgattggaagtatgtgccctgggcgcctcggttggacacctcaccggcgttgcgccgccgcaatggctctattgccgtggcggcgctgggttctctactgtctggggttgcatccccggtgcgggatgcgagcgtgggcacggaggcaatggcgacaccggacgaggcggaaatgggcactggcacagacgcggcggagctcgagcacggtgcggcatga

SEQ ID NO: 15819 - DNA, 447 bp, Zea mays
  Peptide Sequence Number=SeqID_59194
atgggggctccctgggcttggtctctggcttctctgcgacgcacggctgctcttcttctccaagcgtcggctcccagctcagctctccagagcgtgcgcgccacctgctccctccacgctcggcgccttgtccctgcgccgcgcccctctactacttgctctggtgctgcatgcgtgttctcccatggccggctgcagctccctgcgcgcctaactccagctcgctctccagccggttcctcccgtgccgtggtcttccctgctccagctcggcatcctctgttcctccactgcgagatcgtcaggctgcaccagtttgttgggcgcctgcgtcaatctccagcccaccgtggtctggtgaccaaccccaagccccctgattctatccgtcaagttctaagcccccatgttactggcgcttctgcgtcctccccccgcgtttcgtga

SEQ ID NO: 15820 - DNA, 759 bp, Zea mays
  Peptide Sequence Number=SeqID_59195
atggtgagctacggtgagcagagcactccgcgcggcagcgatgttgctggagtatgccccaacgcccctagagagtctcctattctaccgacagttgtgatgcaaggagggagcgaaggtgaactggacaggggcgtccttaccatggatttttccaccgggatgtccaatttcgtcgaggcgcggcatccatgcatggtgattggtaccggcggccacacggtggaggtccaagtgacctatccgccctcatgccaagctcgagaccgcgacaccagtgaaatgtctgagcggcagcttctctctcctccaaacccaacagaaaaacaccgatgtggaaactcctcgattctgactcgtggtgcggcttgcgacagcttgtttgaggggaaggggggtgaccgcgggttcaacttatatagtaacgggtgtagccgatccagggaggtttcaatcgaagcaatccccgatggatcaccacggaatacggtggcgtttgttgaagctcgcttcgatccggaactgggaggagatctcggccgtggggcccaagtactggtgatggcgtgcgcagagtccggctgcaattgcgcggagatcgtttctgtcgcccgtgatgaagtcggagaagaccgaactgatgaggcgggaccacacgacggtgatggagagggcgcgagcgtgagatggctgattcacgggcccgatgtgtcagtgacaatctgttggacgcgcggactgggctggcgcgggggatga

SEQ ID NO: 15821 - DNA, 1089 bp, Zea mays
  Peptide Sequence Number=SeqID_59196
atggtcgacctaaggactatagacctctactcttaccttgaccttagtgtcttttcaaagatggcccgtatcaggtgcactgcacgtaagtcggtgatcccctttttgccttctcaactgggggagtgtcccctgtgtcgcacggtgttaggtcagtccattcacctagagagactgcatcgtcacctacacgaggagcaggagcaccgacaccaggagcaggagcaggagcagcaggactattccccctcgcctcagcatgaggtggagtctgagaggccgccttcccctacaactcagccagagatgccccctacaccaccacagggcatcccggctgctggaggagaccctgatggagatggagacgacgacaacgatgtcgacggcagttcgagccatgacacggagcgctcggaggaaccggagccggagggatggatcgcgagagccatcactcatgacactgctcgcgagtgtcacttccacgatgctctcgataccctgttgcatcgggcctttgatcgacacacttggtctatcgagtatcattgtgtagtctaccagcatcgtcgcgggctatacccagaccagtgggaggctacttgctgggtgcgccgtgcggacgatgatctccggggtgcagaggccttctcagagcactattctttcactgagagggacactactgaggaagccatgcaagatgcaacacgatgggcacattctcagtattgctcgttgttcagcggggtagctgatggccttgacctgaagtactaccctcgccgttcgaccggcagtgctggaggtgtgattgtctcgccagttggtgagggcaatcctaggctgagcagcatggtcaacttggtcgtcgtgctcaacatagagttggaccatgcccttgacgagttgggcaaggttcgggcagaggttgcggaattgcgtgttgaatgcgcggcatgccactatcttgatagtggttctcccgcccctgttgggattcagcacccttaccgttcaccgccccgtggttgcttcgactatggtaccccagactgtaggacccgcatagatttagatccatag

SEQ ID NO: 15822 - DNA, 810 bp, Zea mays
  Peptide Sequence Number=SeqID_59197
gtggacccagcctgtcggcgcaaacccgagcgccctctctccctcgctctctcgctgctccgtgggaccgacctgtcggcgccgttgctctcgcccacgcccgctttccctctctctaccccaccaaccccacctgtcagctcgtccctaacctcccgcccacgatctccccgtcgtggacgcgcccatgtccgcgcgttcttcggctacaaccgagccctcgcgccccttttgaaccccacgtcctgctcatctacctcccctcttccatttgcgccctctgcccagctctctcgccctctcgctcgctctgcccacgcgaaccgagaacctccaccaccgtccgccgacgtccaccgcctgttccgtggccgccgttgcgcccgtgcctcgtccagtgccatagtaagtgtcgccttgccgtcagctactcgggacacccttcggtgtgcccttcccctctctggtctgtccggtccacgctcaccggagtggttcttgcccagccagagctccgccaccgtcgccccgtcgcgtccctgtgcctccgctgttgccccgtgcctccagcgcttcccctcaagcgccctctggtgctcccacgccggcgtggtgccctcggatgagtccgccagatccccccgtgcgcgcctaggccaaccccaagactctgacaacgagcagtccgaggttcctgagtgtgttgttggagacctccctgagcaacaacctggtgaaggcaaagtgttagaaactggtatatcagtcgtgctcacggttaagagcagccttgggatcctcttcgattag

SEQ ID NO: 15823 - DNA, 324 bp, Zea mays
  Peptide Sequence Number=SeqID_59198
atggggtgggtagacagctccaagggatggaatccgcagaaagtggtcaacccgtgcagagcaatcgcctcgattgtgtcctcagcccggtatcaaaaagactcagagtccagtgaacgccagcctggctatgaccagttaaagggtcctcgatttttgggactcgacgagctgggtagagcagagggacaacccgcgttgcatcgacggcagcgcgactctagcgagacccgagtccgaacgggccgacagcatggacgagcagacatgacacagaggtgcgagtccgccaaggacgcgaacttgaagggcggcgcaacttag

SEQ ID NO: 15824 - DNA, 753 bp, Zea mays
  Peptide Sequence Number=SeqID_59199
atggaatcaggggctcagcttggtcacagaccacggcgggctggagttcagcgcagacgcccaacaaactggtgcagcctggcgttctcgcagtggaggaacagaggatgccgagctggagcagggaagaccacgacacgagaggaacggctggagagcgagctagagttaggcgcgcagggagctgcagctggccatgggagaacgcgcacgcagcaccagagcaagcagcagaggggcgcggcgcagggacaaggctccgagcgtggagggagcaggtggcgcgcacgctctggagagctgagcagggagccgacacttggagaagaagagcagccgtgcgtcgcagagaagccagagaccaagcccagggcgccgcccacagagcttgggcgcgcgagccagggagggcgcgagcgagtagaggggagctccggccaggggcgcgcagcccgcgatggagaaccaagggcgcggcaagggaggaaggagacctcggctgggagcttggcgcacggcgaagcagacagcagagggagcttcgcccggcgaacaaagggagctggggagggtcgcgcaaggaagatgcgcgcgcttgaggaggatgaagacgaccgggtctttgttactcgatcagatgaggctgggcaactagaagagcagacgcgcagaaatatcagaggagggagagaaagtacgactgggagatgggagaagcggctggatttgtacccagcgcggtcgaacagataa

SEQ ID NO: 15825 - DNA, 369 bp, Zea mays
  Peptide Sequence Number=SeqID_59200
atgagaatagggcaaggcctagccactactcctctgctcctctcatgctggagcagcatcccactcgaccgtccaacccggtggcaaggtggtaggccaagtcacaccatcaaccatatcctgaagcgtacctgcaaaaattatgccacaagcaaggctgagtatactaatactcatctagacttacccggttacaaggggtcaagcagtctcattagctgcgagaaccagacgattcaaatcgagtttttaaaccttgcaagggagatcctcgatggcaggctccggagctggctcctagacttcctcgtggacaactccttgcttagggatgagcacgtactctccgtcagcgaggttgcaatctaa

SEQ ID NO: 15826 - DNA, 132 bp, Zea mays
  Peptide Sequence Number=SeqID_59201
atgtcgaaagatcaacttgcagacaattttgcttataatagtctgaagggcttaattctaagcaaagctttgaaggaccagaaggatgcagaggatgagagctatcgcatagctcttgggaatctgtgttaa

SEQ ID NO: 15827 - DNA, 375 bp, Zea mays
  Peptide Sequence Number=SeqID_59202
atggcgaggcactctgtcccaacacacatcaaccgtcccccatcgattccctgtcagcagatcagggctcaccgccttggcgtacaatgcctcattgaccccgactgccgtcgtgcagtgaccgcacttgtacccaccataaccggaatgggagaccacgtctcaggtcgcgtgaggggtaaagtccactgccaggttcaattagggtttcaaacaactcctacacctaagtgcacattcaatcctacaatcattaagtatggtaaaaatagcataaacaacaggttatgcataaaaccggggcttgccttccaaagcagtggcaggcagatcctctcgtgcagctctggtgctggatccggggctacctcctga

SEQ ID NO: 15828 - DNA, 666 bp, Zea mays
  Peptide Sequence Number=SeqID_59203
atgacttcccatggatcctcagacgacggaaatgcattgtcccacactgacgggcttgcacgagagggctttccccgcattttgtgggaggtacttcagggggccggatacacgacgcctcctcagtacgcggtgcagcagttcgagaagcatcgagtgccccgctgtagggacacaatcgaggaaattgctctgcacgggttgaccactttctgcggattccatcccttggagctatctacccaccccattggcttgttccccgtggaaagggaggacgacccaatgtggaaggatcgggtggagcatgccaaggacatctgtgctatctacccaggtcagactgcgcacttgaccgtacggtgcatgaatgctctgtaccgtctgcaagtgatgcgtggtgaggcgatgtcccatctgatggccttgttagaggcaacaaagatcacccttgacaacagagaggagctcgtggttgatttgtccactgagatgcttgccgaggctaatgagcacctggatatgcatcaccaggagatccaggacatggaggccaacgaggacgtcgacattgagggaggagaggagcctgcctccagcgtggacactgctggctcagggagaccaccttcccccgagtcgagtgttgcctcgttcgctcactag

SEQ ID NO: 15829 - DNA, 603 bp, Zea mays
  Peptide Sequence Number=SeqID_59204
atggcagtaacaaacgaattaagtgcacagggaggttgcttaccacgagtgcgaactcaggagcgcctggaggacggtggggaggcggtgaagcctcgggtcaatggcgacgggcttcggctacgcaagaagtgctttggtgagcgtggaccgaacgaaccagagagggaaaggatgaaccgaagggtgtcccgagctgagggtgatgcggcggagcttaccgagggaaagggcgcggcgcgggctcaacgacggtcgcggaacggtggaagtctttgcggggtagctgacggccttgacctgaagcactaccctcgtcgttcgaccggcagtgctggaggtgtgattgtcttgcccgttggtgagggaaatcccaggctgaatagcatggtcaacctggtcaccgtgctcaaaatcgagctggaccacgcccttgatgagttgggcaaggttcgggcggaggttgtggaattgcgtgctgagcgcgcagcgcgccactatcaagatggtggttttcctgctcctgacgagattcagcacccttaccgctcgccgctccgtggtcgctttgattatggcaccctgactgcaggacccagatag

SEQ ID NO: 15830 - DNA, 171 bp, Zea mays
  Peptide Sequence Number=SeqID_59205
atggcagtcggggtcagtgaggcattgtacgccaaggcggtgagccctgatctgctgatggggaatcgatggggacggttgatgatctctggaggacatggttgctggagtgacttggtcgtccatcttgccactgggttggactatcgagtaggaccctacctcggctga

SEQ ID NO: 15831 - DNA, 71 bp, Zea mays
  Peptide Sequence Number=SeqID_59206
ggtgtttgtggaccccggggtgttacaagagacctcgataccagcatgcgccaagcagcataaccttgcgt

SEQ ID NO: 15832 - DNA, 174 bp, Zea mays
  Peptide Sequence Number=SeqID_59207
atgggcaccggcgaccagctccaccatggggatgtcttggcggcaccaccccatgagctaagctgtggggggtgtgatacagcaagagtgagcttacatacgttcatagctcaacaagttgtggggaataatgtgcatgaactcatcaaaggtgggagctcacgtgaagtgtaa

SEQ ID NO: 15833 - DNA, 654 bp, Zea mays
  Peptide Sequence Number=SeqID_59208
atggccgattacctcgactattcgaggattctcgaagccaccgagcccagcggcatcgtggacgggctctttagtggccacgggaacagacgcttcctcggctcttggagcattgggacgtcgcccgtgggggaagtgggtggcggagatccgggacccgcagaagccggcgcgggtgtggctgggcaccttccccaccgtcgaggacgccgcacgctcctacgacgccgccgcgccaagctcaactcccccgaggacgccgccgcgcaccgcgccagggacgccgaggcggccttcgccgcggccagggcggggccgcccgccgcgctgctcgactcgcaggccgtcggcgacgacatgaccgattaccttgactattcgaggattctcgaagccaccgagcccagcggcatcgtggacgggctctttagtggccacgggaacggacgcttcctcggctccgggtttgaaatgggctcggcggcggccggcgcagatgaggggtggtggggaagggcgagggcgggggcgacggaacacatccacgctcaccggcgcaacaaccgcacagaacagaggcagaagaacgaggtgaggtcctcatgcatccacgggacaccgtgggccgtggccacaatcaccggtctcaaataa

SEQ ID NO: 15834 - DNA, 549 bp, Zea mays
  Peptide Sequence Number=SeqID_59209
atggcggaggtcgcgtcgcgggtccttggtgttatcgaagagtccggcggcggcgcatccatttttcgccctcctggtgcaaacaagaatttgcaatggttctgtgttgtgcacaacttgttggtagactcgtacaccactgagaaagctttaaagaaagtaaaatgtttgccaaccttggttcctcagacaattaatgtcactgatgtcactatggaggacaaaggtgatggtgaattggaaaagcaatctgagcagatgcccagtgatgttcaacagataagcaaaggtgttatggtcactggtttaccctcatcggcatcgtggcaagacctgaaggaccacatgcggtgcgctggtgatgtctgtttctctgatgtataccgtgaggttggagcatcctccatgagcatcatcctgcagtacctggtcttgacctgtggtgtatgtgagacagcaagagtgagctcacatacgttcatcgctcagcaagttgtggggaataatgtgcatgaactcgccaaaggtgggagctcacgtgaagtgtaa

SEQ ID NO: 15835 - DNA, 300 bp, Zea mays
  Peptide Sequence Number=SeqID_59210
atgggttcatacaaaaagagcaagggaaaaccgaagtgctccctggtctggcgcactggactgtccggtgtgccaccggacagtgtccggtgcaccaggggactccaagctgaactcctcaccttcgggaattctcagaggcgcttcgctataattcaccggactgtccggttggcaaaaagaatgcgcaagttatcatcctcattactagcattatcctcatcactagaggtttcatatttggtggaggatcttgattttaccttcttccttttgtcgtcctttgtgaaagttgcctag

SEQ ID NO: 15836 - DNA, 459 bp, Zea mays
  Peptide Sequence Number=SeqID_59211
atgggagatttgtggaccaacataaggactgatctcacaaagatgcaagccacgctccagaaggttgagcaagggctgctgcaaatcaaggcagcagtgcaacatgagcaacaccagctggcgctatccgcacggctccggacgtcggcggttgtgggcatacaagctgctggtcgtggcttccttgcacgacagaaagtgcgggagatgcgccggcagatgctcgaggcagccttggtgatggttgacctcggcacacgtcggcgcgacctcaccctgtcggacggcccatcagcagtggcaccagtagactcggtctttgagcacccgttatgcggcagctcgagggcgagctgcttgtccaggaagggtgtagtgtcagggcctaaggagacccacggaggggctgcggtagcagcagccatgggccttcaagggggattagataaggatagttag

SEQ ID NO: 15837 - DNA, 2040 bp, Zea mays
  Peptide Sequence Number=SeqID_59212
atgaaggcaaatatgggcacaaaagctcgtccactatctgttgacgcagacaaaggagagattggcgaaatagatacaagggctccttttgaatctgttaaagctgcagtgagtttatttggtgaagtcaaggtttcatctgacatatcagctgcaagaaagcctaaggttcctcaagcagaggcacgctccctgcccaggcagaggaccgatgcctacgcgtggccgggaatgcctggcgtaagtcaccgggcggcgcctgacagggttttagccaaggagacagagctgcacttagcccagaaagagttgaataaatacaaggaacagctgaataatgctgagacaacgaaagtgcaggctctctctgagctagagaaagctaaaaaaactgtcgaggagctaacaaccaagctggatgtggttaacaagtccaaacagttggccattcaggcaacagaggatgcaaagactcgaaccaagcagcttgaaggtggcagcacaaatgaatgtctaggaacagatggtcctctgaggcaggaactcgaaagtgcaagggagcagcatgctatcgctttggcagaacttgatgcagcaaaacaggagcttagaaagctcaagaaggattttgaaacatctttggatatgaggttgtgtgctgcccagcaggaagacgaatcactccatacaactgaagccaacaaagaaaaagctaaccaacttcttggtgagattgcggaaattcaagaatcgcttatgcatgttaaggcagctacggtgcaagcacacgaagaagaggcacaaatccttgctgagaaggatgttgctagggccacgtataaacaagctttggaagaaacacagaagaaattgttgtctttgaggaatgattttgaccctgctgcttatgatagtctgaaagaaaaactagaacaaaccaattctgaggttgcatctatgcaaaaaaagatagaagatgctcgggctcaggatttagagtctgttgctgttgtcagcacagagttggatgatgctaaggaaatgttgcaaaaagtagcagaggaggaaagttctcttcgaagtttggtggaatcactgaaagtggaattggaagctgtaaaacaggagcacaaccagctcaaagagaaagacacagaaactgaatccattgtcggagatttacatgtcaagcttcagaaatgtaaatctgtgctggaggctgctgtggctgctgaatcaaaagctacgtcagcttctgatgacctgatgctggcccttcagcaactgtccgcggagtcaaacaatgcattgcaagaagctgagataatgcagaagagtgcggcggagctaagagaggaagccaaaaaggctcgggctgaactagcagaagccgaacaaaagttgcagttgacgttaaaggaagcagaagaggctaaagcagctgaagcaatggcccttgaccggatcaagcagctctcggacagagcaagtgccgctagagcatcaacttcagagtccggagcaaatatcgcaatttcaaaagaggagttcgaatctctaagccgaaaggtcgaggagtcagagaagttgagtgagatgaaagtcgctgctgccatggctcaagtggaagccatcagagccagcgagaacgaggcgatcaagaaactagaagctgctcgcaaggagatggaggacatggagttggcaacagaagaggccctaaagagggcagagatggccgaggcagccaaaaaggccgtggaaggtgagctcaagagatggcacgagaaagaacagaagaaaaccgcagaggccgcacagccttctgcgggggcagaagaactgggaagtgctgcgtcgccccctgtacgtcagacttctgccggaaaagcttccgagaagaacgaggggcatcagaggagcagtaaagcgctgctgaagaggagcttcatgctgccaaacatcgccagcatgttccataagaagaaaagccatccttccagttctccctcgcaccttcctggggaaaaatctgtgtga

SEQ ID NO: 15838 - DNA, 111 bp, Zea mays
  Peptide Sequence Number=SeqID_59213
atggcgagggcgggtcggcgcggaccgcggagcgcggggtgggggtgggggacgtgggagggacgatctgaaatgcggggtcctcggggcgtatttggcatggctacataa

SEQ ID NO: 15839 - DNA, 582 bp, Zea mays
  Peptide Sequence Number=SeqID_59214
atggtgaagtcaccggagctagggcgggtgcaggctagaggggctccaaggtcaccagagttggctaggaccggcgagaaggacccgaagaactcactggtggggttccgaacacgagaccgagaccagaggcgagagaacagcagagggaaagctccaggcggatcaaggttcctcaccttgggacgaagctcgaggtggcttggcatggcttctggcgagctagacggctgtcacagcggacgagggtctccggcgagcgtgagcggcgagggcagagcgagagagagagtgagcttacgcgaaatggggcagggaagagagagcgggtgcgggcggtgctcaaaagggagctggggtgcgtgggcaggcgatgtggtgaggttcttgacttgcgtgcgtgctggtccacagcggttcgcggggaaggcggaactgacagggaggccccacgacgcagcgagggaaaacaggcgcatggagggaacacctcggtgtgctgacaagttgggcccactatgcagagagagaacgcgggcgcgcgagcgagggcaactagcgccgacaagccagccccactag

SEQ ID NO: 15840 - DNA, 321 bp, Zea mays
  Peptide Sequence Number=SeqID_59215
atggctctggatgggctttgtgtgtggtgcgtctattatctaggttgtttgtgcattctgtgtagaaagttggaaagttcactgttcaagattggtataattattgaagataaagaggttgtcagttctataatggatggaagaccttgggaagctggaaagttctccctcagcctacgactttctctatgggcagaacaccttggtcttcttccaggagaggttagttgcattatggatcctgtggatgattcagcgtacaaaaacatctggatggccactgctaaggtatcaatttcgccaaagttttgctcatcgtaa

SEQ ID NO: 15841 - DNA, 1026 bp, Zea mays
  Peptide Sequence Number=SeqID_59216
atgagcaaaatcaacaaatcttgggcgctggctgctggtcttgcggagggaggagggggagccgtagaggtgagaggtcataggtcggtggagggcggcggcggcgcggcgcagtggcctatggcgcgacgcagtggcctgtgggtggagggaggggggagccgagatttgtaccaatatacttctctactcgtcaaacatcttgttcaaccagaagatatggttgaacaacttggtctaaggctcagccccggtcgtggtcgttctcacatgggcttcgatgccgctgtgtatgggtggggcaggggttcgggggttttcttgacctgtgtcgttagaagtgttggcccatggtcagcaggaacagctcaaatcgaaggaagcatccataatgcctatttttctcttattgaaaaggcagaacattttgtttacatcgagaatcagtttttcatttcaggtctttcaggggatgacacaattaagaatcgtgtattagaagcactatataggcgcatacttagagcagaaaaagagaaaaggcgcttccgggttattattgtcataccacttttacctggttttcagggtggcattgatgatggtggagctgcgtctgtgagggcaattatgcattggcaataccgaactatttgtagaggacctaattcaattcttaaaaatctgtatgatgtggttggctcgaaggcggatgattatatctcattttatgggcttagagcacatggaagatcagatgatgggggtcctctggtcaccaatcagatatatgtgcacagtaaattgatgattattgatgatcgcatggcattgattggctcagccaacataaatgatagaagcttgcttggatctagggattctgaggggtggtggctcgtgatggcctgggctggcgctcggaggcggcgacgacgactgagtgtccggaggcagctggctttggttgtgggtgccagggccgccgacgacagtcggcatcggctctggcacgtgacagtgtga

SEQ ID NO: 15842 - DNA, 129 bp, Zea mays
  Peptide Sequence Number=SeqID_59217
atggagcagcatagggggcagaaggacctacacatggttttcatctacttagagaaggcttatggcaaaataccaaagaagggatttcttacgttatatctgttctctgagaaagtggtaaaaatttaa

SEQ ID NO: 15843 - DNA, 1020 bp, Zea mays
  Peptide Sequence Number=SeqID_59218
atgaccggcgaggaggagcaggagcacggtggccacaggtacgtcaggatgcctccggagccgcccgagccggaggggttggccgccgcgtcgtcggcgtcgttccgcctgccggagtcggtgcgggtgttcgacgagctgccgcgggccaggatcgtccaggtctcgcgccctgacgccggggacatcacgcccatgctgctctcctacaccatcgaggtccactacaagcagtttaggtggcttctatataagaaggcctcacaagtgctatatctacattttgcattgaagagacgtgcatttcttgaagaattccatgagaaacaagaacaggtcaaagaatggcttcaaaatttggggataggggagcatgtgccagttgtacatgatgatgatgaagccgatgatgtgcatgttccttcacagcatgacgaaaactctgtcaaaaacaggaatgtcccttcaagtgctgttttacctgttattcgacctgcccttggccgtcagcaatcaatttctgatcgtgcaaaggctgccatgcaagaatacttgaaccatttcttgggaaacttggatattgtcaactcaagagaggtctgcaagtttttggaagtttcactgttatcatttctgccagaatatgggcctaagctaaaggaagattatgttacagcaaggcacttgccgaaaattgagatggacagtaaagagagatactgttcatcctgttgttttagtttttgcagtagtagctggcaaaaggtttgggctgtactgaagccaggattcttggctttacttcaagatccatttgatcctaagctcttggacataattattttcgatgtgtcaccttgcactgatagagatggagatgaccaaaccactctagcaaaggagataaaggaacgtaatccattgcattttggatttgagatactaggttctgatgaactgccactggatcccattgccaagacattggctgacttcgtccaacaggtggcgtctctctag

SEQ ID NO: 15844 - DNA, 780 bp, Zea mays
  Peptide Sequence Number=SeqID_59219
atgccccttgcaccaccacagggcatcccggctgctggaggagacctcgacggagacggggacgacgacgacgccggtggcagttcgagccacggcacggagcgctcagaggagccagagccggaggggtggatcgcgagacccatcactcgtgacgctgctcgcgggtgtcacttccacgatgctctcgataccctattgcgtcgggccttcgatcaacacactcggtctatcaagtactgttgtgtagtctaccagcatcgtcgtgggctatacccgaaccagtgggaggctacttgcttgatgcgccatccggacgatgatctccaggctgtagaggccttctcagagcactattctatcactgagagggacactgccaaggcagccatgcaagatgcaacacgacgggcactttctcagtattgctcgttgttcagcggggtagctaacggccttgacctgaagtactaccctcgccgttcgaccggaagtgctggaggcgtgattgtcttgccagttggtgagggcaatcccaggctgagcagcatggtcaacctggccgtcgtgctcaacacagagttggaccacgcccttgatgagttgggaaaggtttgggcagaggttgcggaattgcatgctgaatgcgcggcacgccactatattgatggtggttctcccgcccctgtcgggattcagcacccttaccgttcaccgccccgtggtcgcttcaactatggtaccccagactgcaggacccggatagatttggatccctag

SEQ ID NO: 15845 - DNA, 654 bp, Zea mays
  Peptide Sequence Number=SeqID_59220
atggagagcggagaccaccttccgaggctgaggcaggggccaagccctggggtcgggcgaggcggagacctcctcttgaggccgaggcccaaggtgatcctcgcattaaatgcgcctgcgatatggtcggttggtgaggcaatttggccaaggttgcttcacaacgaagcctgctcgagctggggttcgggcgagacgaggaaccctcggctgctctgcgatgagccagagccagaggcagcggtgtcggcgtggacagaggtggagatccttccgcccgtgtcgccgtccgaggccgagccagattccgccgaaggcgggaacgacgccgagggtgctgctgctccctctattgatgacttgttcgtcggtagcagaatcgtttatctgagcgagagttacttttcgtgggaggtgatgagtgaggagtccctcggctcggtcggccttgacgcttacgtgtactccgtcgttttcaagatcctgctatcgaagcagtcgaaaagcgcgaaagacgtcctagcaaaaagacttttaccgaggaaaattttgacgcagagggggatccccccttctagcccccgagggagggtcgggctttaccgaggcaaggctgacccttccttgacggttagactttatttgtgtatgtaa

SEQ ID NO: 15846 - DNA, 312 bp, Zea mays
  Peptide Sequence Number=SeqID_59221
atgggggcgccagagaacgcagaacgcggtgaaaaaggttccgcggcggcgcagctaactccggtgagcaattgcgcgggctctggtgcggtacttggcgatttaagggcatgtgaaggttgctcacctcgagtgcgaactccaggacgcttggagaacgacgggggtgcggtggagcctcgggtcgacgactgtggggcttcgactacgcaagaactgctccgggttttcaattcaaattcaattcaagtttcaaattcaaaccaaatcaaatatgtgcaacaattcaaagaatatttaggctccatatga

SEQ ID NO: 15847 - DNA, 479 bp, Zea mays
  Peptide Sequence Number=SeqID_59222
atggcccagaggccttacgtccggctctgcccgttggcttacgtcacaggtagcatcgggtcttcgcttgagcggggagcagaggcgtacgcaatatggtccggacacgtgtcgactccgaacccccgcctagccttgattaaggtccgggtactccttctcctagaatcccgggaccttgttgtgagtgacctgggccccacacagggaggtccgggacccgtgtcggcggtccagtctgtactcatggaggtcatggaccctgctaggaggttcgggctgtgtatccaggggtccggcactttcccgtgggggtccggacccacttttgacaccatggagtatattgtctcctccggccacgtggtggccccggtgctgcccacgtggcggggtcaggcgctgttttccacgtggctagaggcagtcgcatggactccacgccttcacactgcagtaagtggtacccatgattcagg

SEQ ID NO: 15848 - DNA, 1155 bp, Zea mays
  Peptide Sequence Number=SeqID_59223
atgtgccgcctcaccattaaatgtgccctgtccactctactgacgagcggcgtccaggccatcctgcaggcgggcggcatgatggtgcaaatcgttgagcaccgcaccgagacttcagaggatttcctggtggaggaggaagctgcttcttccacgccacgggttcccaaccgcctagtgccggacatcctagactccatcaagggcaactccgggggcgttgtctcggccagggagttgctgcgccaccatccaagcttcacggcctcaccgggggccatgaagcagtggcgtgacgatgtcgatcgactgctcggcatggcgcgctccggctcaaccaggtctaggatatggtcatcccggcgccaacatgaggcagcagtgtctgtacgctccccctcggtgaggggtgcacagaccgacgacctccgggcagagctcaaccgcaggcgtgcgggagaggatgcctgggtctctctggagagggcgcgggagcgccgacaaaacttcgagggtcgcgaagacgctcgagtctctctagagagggcacgtgagcgccggctaaacatcgagggtcgcaacctcgatgaagactttgttgcggtagcaccgcaaaccccaataggcgcctggttccaagcggcgaacttcgctagtgcttaccagcgacatggcgtggaggctcacctccatgtagtgaggcaggagcacagggaaactctctggaccttcatctcccgcttcacccagaggtacgaggaactataccccgacggcaaaaacaagaagacgaagaaccgcggctccgagaggccgccgtctgctgctccggtcgtcgcagctgcgactgggggccgaaacgagcgcaacaagcgcccacagccgcagaggggtaacagcggctcatgccctgtacaccccaacagtcgccatagcgtcgtagagtgtcgcgagatcatcgaactcgtgaagcgcgtcagcaaacagcgcaagcagacctccaaggacggctcccctcctcaccgccagccttgcaaggaaagggtcgacagcggcgaggtagctatgggagaaccggacctcgggtatcagtcacccgagggggtcctgaaggatgttctcaccggagactccgactccagcgatgacaactag

SEQ ID NO: 15849 - DNA, 1722 bp, Zea mays
  Peptide Sequence Number=SeqID_59224
atggcctcgacgtcgccaatcagtagagtggacatggcacatttaatgctgaggtggcacatcgcttgcagctggccatgtggcagcatcgggtctccgcctgagtggggagcagaggcgtacgcaatatggtccgtacacgtgtcggctccggacccccgcctggccttgattaaggtccgggtactccttctcctagaatctcgggaccttgttgtgagtgacctgggccccacacagggaggttcaggacctgtctcgggggtccagtctgtactcgtggaggtcctggaccctgcccagaggttcgggctgtgtatccaggggtccgacactttcccgtgggggtccggacccactgttgacaccatggagtatattgtctcctccggccacgtggcggccccggtgctgcccacgtggcggggtcaggcgctgttttccacgtggctagaggcagctgcatggactccgtgccttcacactgtagtaaggggtacccctgattcagggtaccgacaatggcccccgagcccgcctcagaggaggaaacgagcctacaggtggggccaaaagcttgattggcgatcggcatgctgcttctatgcgcttgctgacacaattattggggcgccacccaaggaggatgactcgtgggcccgggcccctatgccagagactgggctgttggtttcggcggggatgaagaggcgtgacgaggccgacgccaaggagaatgactcatgggcacgggaccccatgttagaggttggtccgctgcttttggcggggatgaagaggcgcgacgccgccatggccttgctaggccctcccgagcgcctccagcctgaggtggcactcaacttggtgcgcaacctgcccggatggggtgtgccagcgttcgccagaaggatccatgtcggcgcctctcctcacggtgatctcgccgccggagagttcatgctcttcgtctccaacctccccagcgggttggcgctgccgatctcgtctttcttcttgctgctgctagaggagctcggcctccaacctcagcacttcacgccctgcttcatccttcaggcagccatcatcgcctacctctgcaagatgtccgtggtggcgacgcttcttcctccagcattcggcttcaaggatgttcatcagccttatggaggtggagagcgagttgagctgcggctccatctttcacgctcgacgtgtcgaggctggataccagcatacctaaaagagttggcaacgactacaggaggcagcctcgactgggacctggacctgaacacagcttcggctagggagcgcttacggtacgggaccaggctaagcggctacacgtctccagaccaccccaggagacaagcatccattctccagaaccggaccctaggttaccggacccacaggactatagctccaaatattagggctgtcggaccctcctactttcacagaggggtcctaaactgcaagcctggctattcaattcggatgtcatcataccagcaagggtgggagaccgtatgggtggaccaacatgctgagcttatgagggcgaacctcaccgggctggcgtacacggataggcacaacttcagttgtggcgaggcgggcacttccgggtcggcatacttctgtcaccttgaagggtccttcccaactgggggagagtttgtggagcccttctcggttcaatactcgccgtag

SEQ ID NO: 15850 - DNA, 330 bp, Zea mays
  Peptide Sequence Number=SeqID_59225
atgaggaaatggcacaagaagaagaggatcaagatcaagacgatgagccacctcaagagtaagacattgatcaaggaggagatgaagtggatcaagaaaaagatgagcaagaaattcaagatcaaagactaccgcacccaagagtccaccaagcaattcaacgagatcaccccgtcaactccatactttgtgacatccacaagggggatagaggatgcactaagagatcccgactgggtggtggcaatgcaagaggagctcaacaacttcacgaggaatgaggtaccaagtgggtattccacaacaaacaagatgagcatggtgtggtga

SEQ ID NO: 15851 - DNA, 99 bp, Zea mays
  Peptide Sequence Number=SeqID_59226
atggggtctgggcacagtacttgctttgtcgagtgctcaagaggagatgttggcaacatggaggactttgaggagttccaggactacgacgagttctag

SEQ ID NO: 15852 - DNA, 477 bp, Zea mays
  Peptide Sequence Number=SeqID_59227
atgaagcagtggcgcgacgatgtcgaccggctgctcggcatggcgcattctacttcgaccaggtcgaggcctcgatcatcccggtgccaacgcgaggcgacgacgtctgtgcgctcgccctctgtaaggggtgcccagaccgacgacctccgggcggagctcaacccgatcggaggccagggcgaccgcaacaaacgcccgcgaccgcagaagggtagcagcggttcatgccctgtgcacccgcatggtcgccatagcgccgcggagtgtcgcgagatcattgacctggcaaaacgcgtcagcgagcggtgcgagcagtcctccaaagacggctccccgcctcgccgccggcccggcagggaaaaggtggacgacggtgaggtggtcgcggctgaacgggacctcaggtatcagtcgcctgagggggacctgaaggatatcttcgccggaggctcctattccggtgatgacaactag

SEQ ID NO: 15853 - DNA, 672 bp, Zea mays
  Peptide Sequence Number=SeqID_59228
atgggggttggagagcaaccggcgccactgactggacctggcgaggaccctgcggcgaccgtcgtgtcggctggtgaagacactccagtggcagttgtgccggctgacgaagaccctgcagcgccggctgctccttcgcaggttccgacgtctaggcctgcccaagcaacccatactgatgatattaattttgtggcggctgcgaatgcaatgcctgttaatgaaaatttgtctggttcggaaactgggtcttggtcatctaatgagggtgagtttgggagcccgttttcgtggactgaagagtcttcgggcgaggatttggattattttactacgttggatgtggtcgcggcggagtctgtgccgcggctggaagtgcgcgaagcatctgatcccttggctggggcgaggaccgaggagcaccgccagcgaagagtggtgtcgaagcataatgttggcgagatgtcgcgaagtggtagacgtcgtcggatggggatggaacgaatccgtcttcgggtagatcggggtggccaacgagatttgctgtcctcgtcgtccgggacgtgtatttgggaggggggtctgcgaaatctttttgagggtgaggagttaaagatgatgttgtttaattttcgtgaggtgggccttatcccaaaggttgagccaatgtag

SEQ ID NO: 15854 - DNA, 2260 bp, Zea mays
  Peptide Sequence Number=SeqID_59229
ggcccatcactatgggccgaatcacacatgggcctcccccgacgatgagagagcgagagccttcgtctacgcgatgagaagacgaagtcgtagagcgaagggtggcgtgttcgccatcaccccaacatttgccctccgagggaccagttcgactaagtcagctggtgccgaagactgccgctggatgaaatctggcccacatcaagcagaccgcgcgccgccgccgacggtacgttgcaatgtcttcttcttcgtctgctgtgagtgcgtcatcggccgtgccgtcgtccgaggttactttgagcgatttggcggtgatggagttgcagcctggccataccgtggagttcggcatttcgaggatttcctcggtccgcgtgctggagatgtagcggctcgggtccaccagttgacgcctaacgtcgtggttgcgctggcgaagtatgttgggcggttacttcctacggcgggcagcctgtggaggaacaagtggggcaactgttgggatttttggttctatgtgtcttctggtgatgtcgaagacctgcctggcctccctccggccattctatggtcacactgttatgtggcgttccctcaatttgaggtggcgaaggatgacgatgacgaaggggccctttggtatgttgcccgcttgagtagcgggcgtgacttggttgaggaacttatcatctatggagtgtggcccttggcacacgactgggtattgggcgaagtgtgcccccatcggatgccgaccctgggtgaccagttggtgcgaagtcctgcctttgttgtggatttacgtggtcggaacccagccgcatttgtgcgcgaagtggaggccgaggccgcgaagattgtgggaagatatgtgccaaggacagagaccctgaggagttgggatatccacggttcaaatgtttggttgaaccacgtttttgagttcaatcgtttgccgtatgtcggctacccggggggacgacgatgccgatgctgctgtccaccggggaaaaaaggtggtgacgatggtcgacgaaggcccttcgcggggatcagcgccgagcgtggccgccaagaagaggaaattaggtacaatggctgtggggttgagggcttccgaatgttttgctgcggatttattggagacctgcgcggttcccggatagacgatgtcttcagccgagctccaggaatcttctgcgcgaatgctgaaggttaccgggggtcgcctaggaatgttccgattcctcaggcggccggcgaggacatgtttacatatcgattagctcgtgagatgaaaattttcccttacggacggaatgttgctgctgttgtatcggcagtgatggagaaggatcgtcaatacgcgccacggaaacgtcggccgttcgcgagggttggggacccgcgacgcgaggtcaaaatggcttgggcgagcgtgaagcctgccgccccggcacgaacatgcctccgcctggcgtgcccggcgccagcatgtcgctccctgccatgcccacacaagagtgaaggcctccgtcgccaccgcgtgctgctgagacggcggtgggtggcgccgaagtctccatggatatttccgtggaggattaccttatgggcgaggtcgcgatattcgacgcccacacagggcggggacatgctggtgagttttttgaacaaagtctgggtttctaacgtgaccatggtgcaggagcggagtctgggcaactggctgttgtcccgacgccggtggcagctggccgtggtgactgggacgaacgggtcttcgcaggacccatggtccaggttttgtgccagcggcgaaatttcttcggccaccactactaaggacatggttagctcagttgtgcagcagctgaagcacgcggccgccttcgccaagcacattgcgtcgggggcattgacctcgaagtttgctgccgaaaggcgacgactcgaggggaggattgagcgcctccgaacgcagcatactgaggctgtgcgagacaaatcaatcgcggaaaacaagagccgcaatttgatggagaagctgttggcggcggaggctgaaaaagaggacctcggccgtcggctggcggtggaaaaggaggatgtggatagggcccgcgcggaggcccagcctgcccgtgccgaggccaacctcgccctccaacgtgctagcaacgcagagtcagggcacaggagtctgtgtggctatctcgacaaagcggaggcctccacccgcataggggtcgactga

SEQ ID NO: 15855 - DNA, 684 bp, Zea mays
  Peptide Sequence Number=SeqID_59230
atggctcgtcttagacacaccgcacggaagttagtcattcctttcttgccttctcgtctcgcggagcatccgcttcgccatccggtgactggtcagtctagccatttggagaggctgcaccaccacctgcacgaggagcaggagcgtcagcgacaggagttggagcagcagggctcttcttcctcacttcagcaggaggtagagtctgtgaggagctgctctcctgtgcccctgctggaggcgccccctgcaccaccactgggcatcccggcttctggagtagctattggaggagaccccgacgacgaagtcgtggggtttactcggaccactgggaggcgacttgtttggtgcaccctctggagaatagtctccggggtgcaggggtctgctcagaccattactccatgtctgagtgggattcagctgaggcggccgtacaagatgccgcacggcgtgcgctttcgcactactgctcagtgctcggtggggtggtcgatgggtctcgacctgaggtattacccccgccatccatctggcagcacaggaggcgtggtagtctcacctgttggtgaggacaatcctaggttgagcagcacagtcaacctagccgacgtgctaaacaccgagctggaccatgctttagatgagctgagtagggctcgtgctaagatcgcccagtag

SEQ ID NO: 15856 - DNA, 1413 bp, Zea mays
  Peptide Sequence Number=SeqID_59231
atggaggagcacgcctccagatggggtgcgccggtgtcctctagagggatccacgtcaaggtcgtctctgcttgtgacttcaccgtcggagagcgtgcgctcgtggtggtgtcgccgatcttgtcttcttcctgctaccgttggaggggtgcaaccccatgggggttggcatcctttcaccaccattcggcttcaaggattttcctcacgcagcctggctgtagtcccctgcctgtggtcatccagaaggatgactaccagccttgtggtggggagaagcaagccgggctgcagcctccctcctgccctcagcttcaagtatgttcatcattcgtgctggggaggagggtgtgccgagttggggcccgcctccatgtgggtagcggctggcttcttcccgcaatgtctgggggagaagggcgtttgccgtctgtggcgctgtcagctgccgctagggcggagcgtggctgcccgtccaccgcacaggcgatggtagcgtcgtgcgcgggttggccacatccacgacttctcccacggcaccggttgtactgggaggtcgtacaagacgtcgtacgtcgtgcgggtgggggcgacattcttggatggtcttgtcctcactcccgtagtgaggacaggagcgaagacctcttcgtgcgtgctggtgcggccgcattcgctgaggcggccgtcgccgtcggtgctgatgcggttgcctctgctggtgagccgctcggggcttgttatcccgcgggccttgctggtgtggaggtagttcattcctacagaaatggagctggggtcccgcttgtaagggaatgtaatgacatctgcttgagagcaaaatgtaataacacatgctcacagtacgggaccaggctgagcggctacatgatttccagaccacccaagagacaagtggtggtggagcgtgcaggcccacggtacgggacctggctgagcggctacatgggctccggaccaccccaggagaccaatgtccattctctagctctggtcccaaggctccggaccaccctatggaacgaggcccggttctctagagccggcccccaggctgtcggacctccctactttcgcgtcaggggccctaacctgcaagcctggctgttcaattcggatgtcgccatgttagacagatggaaccgtacgggtgggttagctgaaagaccaatagtccgggttcatgggggcagacccactgggttgtcgtacacagcccctcttggtatggtatctgccatggggctaagccccaacccagggttcccatctgtatttgacacgggagcccttgtctctggctatgatcacttctgcatatacatgtctgcaactcggacccgagtgggtccgaaagggcctccagaggaaaggcgtgcttcagctctgtag

SEQ ID NO: 15857 - DNA, 771 bp, Zea mays
  Peptide Sequence Number=SeqID_59232
atggctcctggtgatgccgtggagcttggagggtgtcgcaacaactccctggctgctgacaacgcccccggagacgcccttgatggagtccgagatgtttgcactaccgtgtgctgtcgtgcggcatgcacagcaggagtgactggtgccgtgcgactaggagcctgcggggaagcttcttgcggaagagaagatgggtgcagtgctccgctccgaaccgactcacaatccaccaacagactggtcaggcgcgccgtctactggatgaccctgacgccgcctgccaacggattggacaaggcgcatttaatgctgagagggcacgtcgcctgtcagcgcagtggaaggcggcacatcttttcctcaataaatgcaggggctgcacgacttctcgtcaggttcggcccagtaacttatgtcatgggccacaagcagcgggtctccgcttgtgcgggaagtggagagcaaggcctgcacacatgtcagcaccggacccctgcacacaccaaggtccttctcgttccggaaccctgccgggtttcggaccttctcgggggctctggacctgcgcagtcctccgcgtggctaggagacgtcgcatgggtgcaatgtcttcatgctgaaggagagggtacccctgatttaggggggaagtgggcgagcggggcatggggtctaaagggtcgagggcgtgcggaggtggctagagaacgcgccgacgtgggcgcgtccaaggcgagggacgtgggcgggaggttagggacgggctaa

SEQ ID NO: 15858 - DNA, 1059 bp, Zea mays
  Peptide Sequence Number=SeqID_59233
atgcctagaactcgagtaggaccaagagcagaagcagcgggactctttcccctcgcctcagcaggaggtggagtttgggaggcagccttcccctgcacctcagctagagatgcccctgcaccaccccagggcatcccggctactggaggagaccctgacggagacgacgacaatgtcgttggcagttcgagccacgacacggagctcttggaggagcgagagccagagggatggatcgctagatccatcactcgcgacgctgctgcgagggtcccttccacgacgctctcgacaccttattgcgttggaccttcgaccgacacacttgacaatgatctccggggtgtagaggccttctcagagcactattctatcactaagagggatactgtggaggcagccatgcaagatgcagcacgacgtgcactttcacggtattgctcgttgtttagcggggtagctgatggccgtgacctgaagtactaccctcgccgctcgaccggcagtgctgtaggtgcgattgtctcgctcgttggtgaaggaaatcctaggctgaaaaacatggtcaacctggtcaccatgctcaacaccgagctggaccacgcccttgacgagttgggcaaggttcaggcggaggttgtggaattgcgtgctgactgcgcagcacgccactatctagatggtgagcttacgcttggggccatggatgttttgatgattaggaactttggagaggaccagcaaggacttgggaaaggcctaggtgttgaggaggaggagcaagggcgccacaacaggaaggagatcaagcaggaattagccctcgtggtgaggtcaatcgcgcagtgcacggttgataaccagaggagaagtggcgacgacgaagaagcaaggatccctacagacttcgatgaatgtgttagccgccaagatcttgaggcaaacaacaaactcctgaaggagcaaatggaggagacggtccacaagtcagtgcatgatgccttcattaacatggaccttggcaggacttatgagaggctggatcgacgattgtcctag

SEQ ID NO: 15859 - DNA, 108 bp, Zea mays
  Peptide Sequence Number=SeqID_59234
atgcgcgacctcctacttgcgctggagctgcttggttgttctggttggttgctgcggcaggaagctactgacactgatgctggtgaccttgagggtgaccttgcttga

SEQ ID NO: 15860 - DNA, 267 bp, Zea mays
  Peptide Sequence Number=SeqID_59235
atggcgctctcgcccgcgctggagcgcccgcccgggcgagaggcgggcgagagggaggcgaggcactggcggggcgagagtgcaggcgagagcgacgtggcgcgatctgattggtccacagatatggacccggctgaaagacgtacccatggcagggccgtaaagatggtcgaaaaagaacttggtctgctagatgacgaagaagaggaaccggaagcggaacgtgaagaggaggaagatgaggatgagatcgaggagtccgattag

SEQ ID NO: 15861 - DNA, 285 bp, Zea mays
  Peptide Sequence Number=SeqID_59236
atggagagtcatgatctccgggcagaaagggaatcacggcttgtgggtggcaatgagaatgatggttgggtattgactctggtaatggttgtcagcattgcaaccactgctcaggagaagatgaagccgtggaaggagacttacaggagttccaagattatgacgagttttaggcgtgggttagcggcaacccccagtcggctacctgtgaaggccacgtgtatctacgtttcttttccgcattttgattattgtaaagactatgtggatgtctcagacatatga

SEQ ID NO: 15862 - DNA, 264 bp, Zea mays
  Peptide Sequence Number=SeqID_59237
atggtgtctccggtgagctgcaagcgggtaatccgagtggacgtccgtgccccgttcgttgggggtcggctaggggcccagaggcacgcccaaaagtacctgcggcaactggcgcgctggttgtgcgacgcgtgggcctgggcctccaagccggcgcgtcagaagtcggagaagcgcgtccacctggcgcggttgcatgccgcctgcatggctgcccgcccctcccgcccgttggtctgggcgaaagtggggaatcgcctgtaa

SEQ ID NO: 15863 - DNA, 441 bp, Zea mays
  Peptide Sequence Number=SeqID_59238
atgggcaagaacaacaagcgcaagcgtgagccgactcctccatcggaggagtttggtgactcggaatactcagaggaggagttctcctctgagtccgaggggtctccggctcccatccccctgcgtgagtcagacgactcccaggggcttgcggcggaggtctggacgtacatccgggccgtcgagcgctccgggctcgagggctcggatgagtctgagttctcctcggatgaggaggactcggacggcggcgaggacgaagatgacgacgacgacgacggcgacgacgacgacggtggcgacggcgacggtgatggcgacggtgatggcggcaacggcggcggaggtagcggcggcaagggcggcaccaagggcggcagcagcgtgggcagcaccggaggcggcggcggcaagggcagcggcggcagggccagtggctaa

SEQ ID NO: 15864 - DNA, 1110 bp, Zea mays
  Peptide Sequence Number=SeqID_59239
atggtgatcctcgcaaaaatccaagaattttttgccggtgaactgggtaccgttgtcggtgatgatggagtttgggaccccgaagcgatggatgatgttggtgaagaacgccaccgcctgctcggacctgatgctgttcaggggtcggacctcgatccacttggagaatttgtcgatggcgaccagcaggtgtgtgtagcccccgggtgccttctgcaagggaccgacgaggtccagaccccatacagcgaaaggctaggtgatgggtatcgtctgcagagcctgagcgggcaggtgggtctgcttcgcatagaattggcacccttcgcaggtgcggacaattctagtggcgtcaaccaccgccgttggccagtagaagccttgccggaaagcattcccgacaagggctcgaggcgctgcatgatggccgcaagcccccgagtgtattttcttgcagtagttcccgaccttcggcgatggagatgcatcgctggaggatgcccgaggggctgtgatggtagagctcctcttcatcgcccagcaagacgaacgacttggcgcgtcgcgctacccgccgagcctcgacttggtcggggggtagctctcctcgacggagatattgcagcgccgagcgatgtggttgagctcgagcccgaagaacttgtcttccaggcgccgaacctcgtcgcagcaggcctccatctttgggtcgcggcagtgggagttcttcatgacttggtcgatgacgagctgcgaatcaccgcgggcgtcgaggcgtctgtcggtgttttgggcccacgaaagaatgaccttacgaattattgggccctcgggcctttcgtgaggccttttacttctttagtggacccaggggatatctttcccccacaagcccccgatctttgggttgatttagagaggtcagcgtatattttgtctttagcagccgagtttgcaatccatccatatcttgctaggtactgcaatttatttgcttctgcgattgattggacgtttgacggacgttctctgtctggtcttcacgtagcttctgtcgtccatatcttgtactttgctggctatatttggctttcctctgatccttactga

SEQ ID NO: 15865 - DNA, 441 bp, Zea mays
  Peptide Sequence Number=SeqID_59240
atggaggatggccctcacgaaggcctcatcatgggacccacgatagaagtctttaatcactaccacctcagtgatgatgggaatgtgattcctcatccaccaaaagtgcttcatgaaggatcgaagggacttgtcgtccttgcgcttgacatactagagatcccatggctacgtcgatttatcagagagcaattgaaagttggtgacaaatcaatagaagtcaatctagttgttgatgcagtggtgatgaaggtgaagaatccattggatgatgtcctattgtcacacccggttttggaaggcaaaccgaatgcgaaccatgcacgtgctaggatcaaaaattcacgcagctcactgggggaggtcgctagcctaatcctcgaactcgtcgaagtcctggaactcctggagatccgcctcgacgccttcttccttacctga

SEQ ID NO: 15866 - DNA, 189 bp, Zea mays
  Peptide Sequence Number=SeqID_59241
atggaggacacgacgaatcggctacccccaacgaggaagaaggcaaagcgaagatgcttcaggtcgattggtgcaattcttgaggatctcttggacccgtgggttaggacccacacacgctttcgctgcaccatgttgatcttgttggttgatgttgatcgcattgtcttctttggggttagcagctaa

SEQ ID NO: 15867 - DNA, 672 bp, Zea mays
  Peptide Sequence Number=SeqID_59242
atggagagtcatgatctccaggcagaaagggaatcacggtttgtgggtggcaatgagaatgatggttttggtattgactctggtaatggtaagtggtattctttccgtttggaaagggttgtcagcattgcaaccactgctcaggagaagatgaagccatggaaggagacttccaggagttccaagattacgacgagttctaggcgtgggttagcgacaacccccagtcggctgcctgtgaaggccgcgtgtatctacgtttcttttccgcactttgattattgtaaagacaatgtggaggagcaggagcagcagggctcttctttctcgctccagcaggagatagagtctgtgaggagctgctcccctgtgctcccactggaggcgccccctgcaccaccactgagcgccccagcccctggagtagctgctggaggagacccagacgatggaggtggcgacgatagctcgggcttcagcaccgacctttctgccgaccaggagttggaaggatgggttgctcgacccatcactcgtgacgctgctcgcgggtgtcatttccacgatgcgctcgacaccctgctacgtcgggcactcgaccggcatacttggtccatcgagtatcgttgtgtggtcttccagcacagtcgcggggtttacccagaccactag

SEQ ID NO: 15868 - DNA, 288 bp, Zea mays
  Peptide Sequence Number=SeqID_59243
atgggcgcaccggacagtccgatgatgaagaggctccatgcgtcgcgctatggaacatgtccaatggggatgtgtgccctaaggaatccgaagagcccacacaagctcaagatcaaccaacatcttccaattaagcatctccatcaactcaaaatgaggatcaggctcaagacaatgaagatgaagatcaagagaatgagccacctcaagaggaggataatgatcaagggggagatgaagttgatcaagacaaggaagatgatcaagagatacagggtcaaagtgtaa

SEQ ID NO: 15869 - DNA, 333 bp, Zea mays
  Peptide Sequence Number=SeqID_59244
atgggggtggcgatgaaactgcttgcacgatcccgcggtttttgttctcttgcttactgtggacagaggcgtgctgtggtgttctggaacacgttggagaaggaacaagctgcgcacgagtggagtgagtacacgcacctcaggcttgcaggccttgcaaagcgcgccgagggagttggcgagcgcagaggcgtcctcctccccagcaccgcggccgccgcagccgccgctcccgctgtgcggcggcaggacgtggagcatagtgaggaagttgcccctgttggcgacgtggatgatgttttttggctaggatatggtcaaaaaacagtatga

SEQ ID NO: 15870 - DNA, 219 bp, Zea mays
  Peptide Sequence Number=SeqID_59245
atggccgagggcggcatagatagaaggtggatggggacagtgacgctgggtgggcggatcaagcctagaaggggtagcggggccgatgccggtggcgtcggcaatgcatgcagcgacagcgggaggatggcatgggacatgtgccttagcggtggaaaattggtggagagaaaggcggtgatggccgcaacgaaacggccgagatcgataaccgcctag

SEQ ID NO: 15871 - DNA, 243 bp, Zea mays
  Peptide Sequence Number=SeqID_59246
atgcctggctcgctggctcagctggctctggcgctgcttctggtgccacttcccactgctggggcgggggcgggctttcgccccccgtacgggcgggctgttgcgccttgcccccgggggaccgtcccaagagttcgcacgccgctagggcggcgtcccatggttcttggattgtcttgtcctcattccgggcacgacgcctccgtgcggagggtcggtgcctgcccgtccgcgaggacttga

SEQ ID NO: 15872 - DNA, 1587 bp, Zea mays
  Peptide Sequence Number=SeqID_59247
atggagactgaggtacaaccacttgctgcggatcatagactgtttgaccttcagcgtgctacagcggcacggatgtctgctcagatagctctgcgagtgcaccggctcttggaccttccagcttttctgctcgccgccggtgctgactctgaggcgcacctcacatatctgcctggccttctgaccctcttgaccaccagcggcaggtatgttgaggagtgggtacgagtcttctacgcctctgtatggatagacccagatcatcactggatgaggtttcgttttgagcgagaggatgtcaccattactgccagtcagatctgccagctctttggatttcccgagtcgacgactcgtcttcacagcctctgctacggcacttctgaccctcctcgtcgccctcacggcggtgtggctccgggtacagctcacgtcgcggctctgtttcgcccgcccttttcagatgggtcgcgacgttcaccgacagactttactacaacagccaagtacttatttgagcttatcagacggactcttctgccggggatgggatacagggaggctaccacacatatccagctctggctccttggtgccctggtctctcactctgagtttgacgtcgtggacttccttatttgtgagatcgaggacactattttggatgggattcgtactcgtcgtcagttgccatatgctcactacttatgccacatctttgcgcagctgattcagcctcctcggtttcagggcacacttgaggcctcacgcctcgtttttggatcctaccgtcctgcgcctgagactcctgtgccagcttctgctcttgtttttgactctcaggccgaggatgcagctcttcatcagttcgacactcaggctacagcagttgatgatgatgatgatgatgattttggggtccctcctctacctcctatgcctccacgctcacatgatcatgaggctgggagttctagtgctgcccctccggctatggaccccgctcttgcttcgattctccagtctatcactcagcagcaggctcacctggcagccgagcaggcccggttatccaagaggatgctctcgatgtttcagaacatgcaggacagacaggatgcgcttcagcagcagctactccaggatcgggctgagagcagggcattcatggctcttatgctacagcattctggtgtctcagttcccccagttcagtctgctccacctcctccgcttcaggctccagttgtgccagcgattcagaccggaccccctattccttctgttggtccctctccgctccggccggtcactttggctttcacctctccggttctcagctctgtctgcccgcagccgccagtgccaccagcatctgctgttaccactactgatgtggcagtatctgtgaccacttctgttccggcagctcctgcagcgcggcctcagtccgagtcagtaccagctccagcttctaccgcagatcctggatccgagactgactctgaccccccgccggcgttcgctctgctgcctcgaccgcgaccggatgcgcccccgacgcctcctcccgcttcagatgtttag

SEQ ID NO: 15873 - DNA, 756 bp, Zea mays
  Peptide Sequence Number=SeqID_59248
atggcacaccggacagtgaacagtcactgtctggtgcacaccggacagtccggtgcgatgtccgatgcgctgtccgctttgacggcttgtcctcgcccctcgtgtggggacgtgggcgagggccttcctacaacagcatttgccctgaggtcatcgctgctgctgtttagccgcttgaggcggaggtcgttgtcgctgctgctgcagtggtggccggcgagctacccggagtttgtcgtcccgcaggccctccgatgtggaggttgttcttacccgcgggagtggaaccggagttccgtttgtaatggcaccttgagtgccggtttacggaaccctcggctgctctacgatgagccggagccggaggcagcggtgtcagcgtggaccgaggcggagtcggctcgagaagaggctttgtcggcccagggccacgtggcttccctggccgaggaggcgcagcagcggcggctggagcctggccaggtcatccgtgagcgggaccaacttcggagtcacgttgccgaggccgtgagccgggctgatgtcctcgagggacagctagctgaggctacggagcgaccggtcgaggacttgttcgtcggtagcagaatcacttatccgagcgagagttacttatcgcggaaggtgatgagtgaggaccccgctatcgaagcagtcgaaaagcgcaaaagacattctggcagaaagattttttccgaggaaaatgttgacgcagagggggttccccccttctag

SEQ ID NO: 15874 - DNA, 1353 bp, Zea mays
  Peptide Sequence Number=SeqID_59249
atggggagcactcgcgtcgctttcgtcttgctgtcgttggaggaacgcaacttcgcggaagttggcagcccggctgcatcccctcgccggtggtcacccaagacggtgaccaccagtttgatggtggggagaagcaagccgggctgcgacctctgccccgccctcagcttcaaggatctttatcatcctagctggggcggaggccggactgagccggagctctacctcccgcgtgggttcgtgggtcaccttctccctcagcattcaggggagagggcgctcaccggcctagcgggagggtcggacttcgactacgcggggctggtcggtggcgagcgtcgtcagcttcagcgcgtcgggctcgctggctcagctggctctggctcggctcccggtgccccctcccgccgcgagagcggttgtcgcgccacgcgcaccggaggaccgcccaagacgtcgcgtgctgctagggcggcgttcgtgttcttgggccgtcctgcctttgctccggtacggcgcctctgcgtggaggtcggtgctgcccgtccgggaggatccgagtggggatctgccggtgggcagatggcttccaccgtcggtgctgaggtggtggcggctgaagaagtcctcgtcgccgacgggatcaccgccaccatccgcactccgggcctctggctctttggctttgatagcttgtcctcgcccctcgagtggggacgtgggcgaggggctcgttgtagcatcgtccgccctgaggccatcgctgctgccgtttggccacctggagcggaggtcgttgtcgctgctgctggagcgggcggcggtgagccacctggagtctcgtcgccccgcaggccctccaatgtggggggttgttcgtacctgtgggggtggaaccggagttccgtttgtaatggcaccttgaatgtcggtgtctgttcattgcggctgtcgaggcctgaacatcgccggagtcgagttgccgaggctgtgagccgggctggtgtcctcgggggacagctggctgaggcttcgggacggccggccgagccgtctgctcgggtcggattcctggaggagcccgggcgtggtgctgatgtcgtccttcgaagcggagatccttcgcccgtgttgccgtccaaggctcggtcggacttcgccgaaggtggaattgacgccgagggtgctgctgctctccctccatcgacgtctaagcctgcaggatcggttcgcctgtacgggatcgcttatccgagcgtgagttacttatcgcagaaggtgatgagtgagactttgtatgtgaacgaggtgtatgaacgacttgaaatcatcttaagggtagaagcgacgtag

SEQ ID NO: 15875 - DNA, 1266 bp, Zea mays
  Peptide Sequence Number=SeqID_59250
atggttgccttccaagggggtcaccctccttttaaaggcaactctccccacttgtgtcctcagccggcgcggaccgagtcttctccaacacgctccaaggtcctccccctacgacacgggggctgggtcccacgcgtcatgcaagctggcccaggacagaaggagccaaaaccaccgcgcgcggtgcgcgcaactgcccagcggttacaagcattcctccactatcgcccggaccagcgggtgaaagggcggaccgccatgcaggcgacatgcaaccgcaccaagggggcgcacccttttgacttagacgcgtccagcatggaggcccaggcccacacgtcatgtaaccggcgcgccggttactacgtgcaagaaaccgcaccgccactcgcgccagtgccatgccttctcgactgcggaaccggtgccacgactcgaggcgaccctgcgcatgaccgaactgtgccaaccgagcacatcggtcacggggaccgggaaaggggatactccgaaagggatccttctccgcgaaggaagcgggccccgagccccctactgatcagaggttcgaaggctggcccctcggaagggttcaacagtcgcctcagagcactcgggctccgtgcccactactggtcagaggttcgaaggctggcccctcgaaagggttcaacggccgcctcaggccactcgggctctgcgcccactactgatcaggggttcgtaggctggcccccgaagggttctgacagccgcctcagagcacgcagagcgagggatgaccctaggtacgttcgatacataaccaaggctcgggctacgctcccgaggctcgggggctgctctcgcaaacccggctctggccaaaccgttgacatcgtcaacataccaacccgagaacttgggactcgactatgcacccgggctacggccacctcgggtgccataggaagctccgcctcgcccgaccccaagggctcagcacccgtctcggcctcggaagatggactttgcctcgcccgaccccagggctcggacttcaaccacgactcagaagacgacggactctgcttcgcccgatcccagggctcggactcagcctcgccttcggaagacgacgaactccgccacgcccgaccccagggctcggacacagcctcggcctcagaagacggtctccgcctcgcccgacccagggctcggactcgacctcggaagacagactcgacctcaacctcggaggagcctccgcctcacccgacctag

SEQ ID NO: 15876 - DNA, 60 bp, Zea mays
  Peptide Sequence Number=SeqID_59251
atggcgcggcagggcggcacgcaaggcgcggcgcgcctgggcagcgcggccttggcttcg

SEQ ID NO: 15877 - DNA, 1074 bp, Zea mays
  Peptide Sequence Number=SeqID_59252
atgggcaagacgggaagcggtggtgttggcagcccacgttatcatggggacgtattcttggctaagatggttcgtactctccaaactacccatgccaacactagctacgcccatcagccccggcagatcccggtctacccagtggtagtcgaggaagttccggtggatctccctcacatccgagtggagaatgtagtcatcctggaggacagctcgaaggaacagctgccggcgcccaccctgttggcagagtccctggccttcgcagctaggtcatcaacatcgaccccgcctacaccagccatccaagcacctgcacccggaggtgatgaccccgacgactctagggacgatgatgacgaggatgacgacgacgacgaaggtggagacgaacatgtcaacgaggaagccgactacgcccagcaggactacttcatgaggtttggtcctgtcaccgaacattacacatcaatgttcgagatgcggcacttccccaacctgctgcaagaagtgatgcacgcgctaggcacctacgtccgcctcctgtacaaaacaaggcgagtgagcgagcctccccgggctcgctactacatcactcgcatccacgtcagggtgatggatgcagaggataggggattcaggactctgtctgctcatgagtccctgacaccgctatccacctatgctgcctcggtcagcgacgctgccagacggaccctatggtcgctcagccacacctaccgacagcagctacaggacacgaggttcaggaatctccctctgcgtctgagtggaggaagccagaccagcatcgttccaggtggagctggtgaggagcgcctcaacaccctagctggtgtggtggccggacacaacaccgatctgaacagtgccaccctggatctctctagggtgcacttggagctagaggatgcccatgccaggattgcaaccctggaagcccaactgcaaggacggcatccgcccgaagctcaggtccccgccatggcgttgtctcctccccacaagaggctgcgcaatggggagcctggatccgtcactaggctgctttaa

SEQ ID NO: 15878 - DNA, 444 bp, Zea mays
  Peptide Sequence Number=SeqID_59253
atgcagtacaatggatcaagcagtctcattagctgcgagaagcagacgattcgaatcgagtttttatccttgcaagtgaccgcacttgtacccaccataaccggaatgggagactatgtctcaggtcgcgtgaggggcttcggctacacccttccgcacaccctccacacctcgccggagttaactcgtcgccgtttgcccgtgcgcagcgagcccgcggccgcccaacccctctgccaccgtagaccggccagcagagccatccccaaccccgtcctgccctcggagaagcttgtgcacacctccgtgaggctccccgagcaaggaatcggagtttccttcgccggagaagccagtccacgctcgccggagctctcgcccccgccggagtacgtggaccggtcgctgcgtgaccccgtgatgctcaccgagccctcggattga

SEQ ID NO: 15879 - DNA, 258 bp, Zea mays
  Peptide Sequence Number=SeqID_59254
atggtggcgatgacgtcagagttggtgatgttggggagctcggtgcatttcttggagaaccggcgaaatgtattcacgcatgctctcgtcttgcttctgccgacaactccggagatcccaagagttcccagggcacacgtatgtgccctggaatttacccccaaagaccctgaccaggtcctcctagtcgtggatctggataacgttccgtccgcagagtccgaggaagcttcagaagaatcccatgagcagcagtag

SEQ ID NO: 15880 - DNA, 765 bp, Zea mays
  Peptide Sequence Number=SeqID_59255
atgccgccgcgcacgaggagaactgcgcgcaagcatactggcccaattggtgtgccatgtcatcaactgcccccaagacacgaggatagtagtagcaggagtaatgatccgatcggggatcttgaagcgcaagtgaatcggcttcaaacagaactccgacgcaggactgacatatgggtcgcagatggcaacagaatcaatgaattgagaagtgacgtccgccgcctgcgagatcagctcgcggaccgagatttagcgctcgactgggtagttcaatctcgttcgcttgcctgggctaaggaggcaaaggctcaagctcgagtagaggagctcagctcggccattgatgacctgcaggcttattgcaatactttacatgaagaagttcatatgccttactggactcgtgctcaggacggggctagtacctcccgtgggagggaggcaacaccaaacccacctccagtccctcccacacttgccgaggttatcgccgccttggtaaacgcgacagcggataatacccgtttcctacgggagatggcgggtcaacaactccaacaacaagggggtggggctatcagcagggcccccgcgaaagaccctttagaggcggacgaatggatccgcgtcattgagcagaaattggtattcttcggtgttccgaaactcagaagcccctgttcacggctcagcaattgcgtggccctgccagcacctagtgggggaactttgttgccgtacaaccggctggtcatcaagtaa

SEQ ID NO: 15881 - DNA, 489 bp, Zea mays
  Peptide Sequence Number=SeqID_59256
atggccgccctcctgcggctcaccgcagcccgatccgccctcccccagcgcaccctcgccccacaccggaggctccgcacacgcaagttcatgaccaaccgtcttctctcccgcaagcagttcgtgctcgaggtcatccaccccggccgccccaacgtctccaaggcggagctcaaagagaggctggcgaagatctacgaggtgaaggaccccgactgcatcttcgtcttcaagttccgaaccaacttcggaggcgacatactatgccacggccggaggaggaaccgctgttggcctactccacctccatggctccacctgtctgctctctgtctgcgcagcacgacgatcgcatcgcgttctacattctccgccctccccgctccccctactctgcttggtttcccagaagatttgattggtttccccaaatctggtgactccattcctgttgttcaccggcaggccccaaatctggcgaagatttga

SEQ ID NO: 15882 - DNA, 720 bp, Zea mays
  Peptide Sequence Number=SeqID_59257
atgcagtccacgacgttcaccggcagggagaccaccagcttctccttccccaagttcaaccagaaccggctccagctctccaccaacctgacgttcaccggaaactccaccgtcagccagggggcgttgcaggtcaccccgaacagcggcaacaacttcagcacgtacctcgccaaccaggccggccgcgtcttctactccacgcccttcgtgctctgggcggcggccgccaactccaacgcgtccagcgtcgtcgccgacggccgccgcgtggcgtccttctccaacgggttcgccgccgtggagttggacacgatgaagcagccctacgaccccgacggcaaccacatcggccttgacgtcaacgacgtccgctcctccagcgccacctgcccgctcgcggccctgggcatcgagctcgcgccgggcgacaccggcgccagtgacggcagcaacttcgtctgggtcgactacgacggcgccgcgcggcgcctgcaggcgtacatttcgcccaacggcaccaagccgtccgccgctgcgctcaacgcgtcgctggacctctccgcggtcgtcgccgccagggacgcctacttcggcttctcggcgtccaccggcacggacgactaccagctcaactgcgtgaagatgtggaacatgacggtagaggtgctgcacgacgacgacgacgacgacaggctgccgaagaagctgtccggctag

SEQ ID NO: 15883 - DNA, 816 bp, Zea mays
  Peptide Sequence Number=SeqID_59258
atgtaccgggaggcgttgtggcagaagaaaagtcgtcctcgggagttatatccagacgtatctagtaaggatgctcctgttcctcttgaacttcctgtgtctaactgtgactatggcagactggcttgggagcacctgaggtgtttctttttccagtggatcgacggtcctgataaatttgaccctcgatatcttcttttcgctaattggttgtgtggaaggactagtcatgagcgttttaagcattgggtacctcctcccctaaatcctccaccaatgaaggatgcagagaaggaggtagcaacagaaagaaggatggactcaccgcctcgatgcgattgtggagatcgtgctgtcattgacgaagacactgcgaagcactttccatacgggtggcgtaagtgtcgtttcagagagtggttgtatggtcctttgtcccattggccagaggtagaggagacgaggaaatgcagttgggaaagttatgacgacaaaggagaggtgatgcgcacaatagagtccaagagactaatgggacagaagatgcgttgtggatctcaactcgtcgattcgtacattaacaatcgcatatgcgacatgcgtaggtacgcaaaatctgccttttttgacagcccgaagcgtgcagagcagaggaggttgaaggcggcagatgagaagagagcacaggatgcaagggaatgggaggcggctagagccgagaaacagatgttggataatcttgctgatcgtctcaagggaaagattggatgtggcgtaaactatatggcagatgaggcacatgcaagatatgtttag

SEQ ID NO: 15884 - DNA, 408 bp, Zea mays
  Peptide Sequence Number=SeqID_59259
atgttgttgccccgctcgtcccgcgcatcctcgccgccgctctccgccgcgtccgggaccaggactcctcccgtccgcgccgcggcggcggccttggcgtccgccgcgctacggcccctcacggatgcgctcctccacgagcaggaccagtgcgcgcagctagcggccgcgctcgccacggccgccgctgtcgaggcgtccgccgtcaccttcgaccttgcttcctacctccacaggctccaaccgcgcctcctcaagttacttcgcaacaatgccttcaaggcgaagcccgcgctcatcaccctcatcggcgcctgcgcggccatgggcgtcaataccgaagtcaccgcctccatcacgtgcctccacgatgcaatcgctagcgatggctgggcatcgaggaagtag

SEQ ID NO: 15885 - DNA, 1056 bp, Zea mays
  Peptide Sequence Number=SeqID_59260
atggaggtccgttgccaaatcagcttttgccagaatgaagatggtttccccaagttgttgagagcatgcacagttcgcctcggaatcaggagccagccagagtatgatggtcgtgaattcgtcgagcatggcacagagaagtgtgtcgtgactgtatacattggatccagtccgcaccatgtggaatggagtgtcactgctggtgggcacaggttcaaagacacctgccaagtcgtcgctcgcaaggcattgagggccctgtgtcagatctatgaagaagtggccgacaccccactcagattctttccgccctttcagagagaccgtcccgcttggatggccaggatgcgtgcattggaggaacagcagctgcttgaggacgaccccacagtcgtgtacctcactgcatacctgctcaccctggatgcacaatatgatttcttggctcggcaccaccgtcagatgattgcccgagcagaagatgcagagaagcgcaaccgtcagctccatgtggatctcaccttagctcaagcccgtgtagctgccttggaaagtcgtgaagccattgctgttgaagccctgaagcaagccaaggatgagcatatccagaagttgatggaggcctacttgatccaagagcccgcttcatccaaccctgttcaacccatcaaagctgaagacccccagattcttgaaggtcacccggtctctaccagaggagaaaagaaggcttgggaactcccggaagaagccatagtcttggaaggaattccagtctcccctaaggctatggataagcaagagcaccctgaatcctcccaagatccccagctagagttgtttgagcccctcgccatgaagaagattctagcaccgtcccttgaggtcaaggaagaagctgcaagcaccccgccagcaccgccgccctctgaggaactacaagagccagtctcgcttgaagaagagttcaaccccgtgttgccatctcagtcgctgccagaagaagtcatcaacatcagttccctgttgacccatccaggagatgtctcagattga

SEQ ID NO: 15886 - DNA, 721 bp, Zea mays
  Peptide Sequence Number=SeqID_59261
atgtccggcgtcatgcccgatcctgaagacaagagcacagaacagaagctggacttcctcatggacgcaatgaacaggatgttgggtcagctgacaaccatgaatagtcggctgattgcatgttctacaggtgtcaaagattcaacaaaaaccaatagaaagaacaagacagggttcaaaacaaaggagcaaaaagaaaccgaagtgctccctggtctggcacaccggactgtccggtgtggcaccggacagtgtccggtgcaccaccggacagtgtccggtgcaccaccggacagtgtccggtgcaccagggaggattgccttcaaactcttcaccttcgggtttctcaggcgcagcccactataattcaccggactgtccggtgcaccaccggacagtgtccggtgctccagagtgaagcggctctgaactggccagcttcgggaaagtgggaggtcgctccgctaaaattcaccggactgtccggtgtacaccggactgtccggtgtgccagcgaagcaacggtcatctgcgcgcaacggtcgactctgcaaagtgtacagttgaattcagagtgtcagagcagaagtcagaggggcaccggactgtccggtgctgcaccggactgtccggtgccacatgaggacaaagcctccaacggtcgaccagctccaaccgcaacggataggatgacgtggctggcgcaccggacactgtccg

SEQ ID NO: 15887 - DNA, 990 bp, Zea mays
  Peptide Sequence Number=SeqID_59262
atggggatcattaactggatgcaggatcgcttcaacggtaaacacgataagaggcgacccgaggccattaactcgggatcagctcgcgaaagctgccgccaagacgaccgcgcgcgcgagggcaagagccgcaacgacggcggcgactggccggcgccacagcacggcctcctgtcgatcgggacgctgggagacgacgacccgccgccgccgcgcgcgtcgtcgcaggccgacgacgtgctggacttcaccatcgaggaggtgaaaaagctccaggacgcgctgaacaagctgctccggcgcgccaagtccaagtccagctccagctccagctcctcccgcgggtcgggcgccagcgccaccgacgaggaccgccgcgccagccacagccagctgccgctcgacaggttcctcaactgcccctccagcctcgaggtcgaccggagggtctcgctgatcaggcacgacggtggtggcgagagcggcgagttctcgccggacacgcagatcatactcagcaaggccagggatctcctcgtccacagcaacggcaccgccatcaggaagaagtcgttcaagttcctcctgaagaagatgttcgtctgccatggcggcttcgcccccgcgccgagcttgaaggatccagttgaatcgagaatggagaagttgttcagaacgatgcttcagaagaagatgaatgctcgcccgagcaacgctgcagtgtcatccaggaagtactacctcgacgacaagccgagcgggaggatgatgacacgggatggtcgtcgtcgtcacgatggagaggacgatgacgagaagggctctgacagaatcaagtgggataaaactgatactgactgcaattcgttgctggtgctaaaattttgtggtggtttgatctttatttcgcagcttacgagtggtggtgatgaccttgagtcagaggagaaatccactacaataatccgtattaaaggagtgttcagttga

SEQ ID NO: 15888 - DNA, 2508 bp, Zea mays
  Peptide Sequence Number=SeqID_59263
atggaggacttcgcgcgcgcggtggaggacggactcaagctctcgaagaggctcgtgctcccgggaggggtgccgccgccgcgcccgccggcggggatggagcgcaccgtgtcggccgcctcggcgtcgggtcccgacccgcggctgctccctaccgcgccgatggcctacgcgctcgtcaccgacccggccgccgtcgacacccccgacgtgcccagctaccagccctacgtctacggcgacctcgacccgcccgcgctcatcccgctgcagatgaaggaggtcgacctggccgtcgactgcgcgctcgacgccgcgcacgtcaccctgcgcgcgcgctggtggctgcactgcatcacgcgaagccgcgactccgacgtgcgcctcgtcgtgcccttgggcgagcagggttcaattctaggcgctgaggttactgttggaagaagatcatataatacccaagtaatcgaagtagaagaccacactttggagaaacatgcaaaaattgagagtggtggccttttgcagccacatctgtttttcttgacaatacctcaggttgagggaggagcagatatttgtgctacatttcaatggtctcagaagttactttatgatagcgggcgtttctctgttgacatacctttccgttttccgtactttgtgaatccattaccaaaagtgttcatgaagaaggaaaaaattcagttgactgtgcacagtggtttcagtaaagagattttgctgcaaggaacaagccacccgttgaaggaaaagagtaggcaaggagataaattgtttttccatcatgaagccattgttgagaattggtcgatcaaagatttcaatttttcatacaatgtttactcgggtgatttgtctggtggtgtgcttgtgcaaccagcaacattatgtgactatgatgatagagatatgttctgcatttttcttctacctggaagtggcaacagaaaggtatttggaaaagcagttgtgtttattgttgacacaagtggaagcatgcaaggaaagcctcttgagaatgtcaagcatgcagtttctactgctctttcagagcttgtggaaggggattatttcaacattataacatttaatgatgagcttcactcattctcttcctgtttagagcaagtaaatgacaaagcaatagcaagcgcaactgagtggatgaatgcaaactttgttgctgagggtggtacagatattatgcatcctttgagtgaggcaatggcattactatcaagtgttcatgacacacttccacaaatatatcttatcacggatggttctgttgatgatgagcataacatctgccgaactacaaaaactgatctctccaacagagggtctaggtctcctcgaatttctacttttggactaggatcgtattgcaaccactatttcctgcgcatgttagcttcaattggcaagggacattatgatgctgcacttgggacagcatcaatcgagaatcagattcttaaatggttcaggagagcgtcgagtacaattgtggcaaatatctccattgatgctttgacacatcttgatgaattcgaagtggattctgagtacattccagacctttcagcgaactctcctttgtgtgtatctggaaaatacaaaggaaaattcccggacacaattaaagctaaaggttacttagctgacatgaaggagatctcggttgaactgaaggtccaacaactaaaggaaatacctcttgacaaagtattggtgatacaacagattgattttatgacatcaaaggcatggatgtctgcagataaacaagtggagagaaaggtgattaaattaagtacacaaaatggtgttccgtcggagtacacagatatgatctttcttcaaacaaatctggataaagtagaaggaacacaaaaggtcaagcaaaaactgaaaggacacaaaggcagagatgagcaacagatttatggcctgaaactgggattcggtaacaaagatgctacacgggaaaatctcatcacaggatttggagacatgaatccggcagagaaatctgtgatgctccaaaagggatcgggctgttgcagccgcgtcgcagactgcctctgctgcatgtgctgcatcaaggcgtgcaacaggatgaacgaccagtgcgccgttctgatggcacagatctgcgcggctctagcgtgcctcggctgctacgagtgttgtgcagaggacccgctaaatttagaggacgtagatctggagggagtagaggacgtcctcgtcctaaatagtacaggacccgctagtcttagccggttcctcccgaatggacgtactcggaggatgatagaaaagcccgtctatggcttagtgcagatgaatgaaatatttggatacacaaatgacttatgcattgctttgcaaaggagagagcaagatattgtgaatgcaatggatcttcttgagttcactatggtggaattgagtgttttgagagaaaatcatggatga

SEQ ID NO: 15889 - DNA, 1023 bp, Zea mays
  Peptide Sequence Number=SeqID_59264
atggcgaattggcgagccctggtccacgcgagcacgccacgtctcctacgacctcgagggcggctcccggggatacaccgtatcgacagcgacccaaagtttttctttttcgtaagaaaggggatcacgtcacgtggactagatggaagatgggtacagaaacgattgttgccgactgtcgagcgagctttctggacggacccggtgttcatcaatcgcccgcgtctggcgttgtcgctgtcggacgctgcggcaaataatcagtcgtgtagtgcagctgcgggcggagtaacgaagaccatgtttacaccattcgaaaccacattgaagtcgtggaagacctctcattcattcgtggaagagatgctagagaaggtcccacttgccgtaggccacgcagagaatttgtgtggagctacggcgtgccggactctatcggagaaaaaaagagagagatcaaaggatcgcagaggcagggattttggtcatcgaggctgggatcatgatgatgatgaggactttcagcaggatagacgtcatggcactcgtaggcaccgcagtctttcgggctgggcgcgttcttcgcggtgccgtggcggtccggaggactgcttcagttcaagtggaaggcgcaggccggctaccccttttcgtcgtcgtgggctggttgggcgctggattccaaaggtgaaggtcagatcggtctcttttgctgatccactaatctctgctgtttggcccccaattggtgtggaagagctggaagatgaaattggtgctattcctgctggcgattcgatttcaggcgtcctgacagcacagcagcctcggcttgctgtcccttccaaggtggatttgatggaacagcttgcaaggcatttcataaggccccttactaaggatcaaatggaggcaattatggagttggcaattcagggaaaggagaaagaagggaccaagaagaagggcagaaaggtggcacctctcaaggctcctttcatagaggctgctgagaggatctga

SEQ ID NO: 15890 - DNA, 1077 bp, Zea mays
  Peptide Sequence Number=SeqID_59265
atgcaggtttctgaggttgtcaagttttcatttcaaagcaaatccagctggacagcaccaggtcacaagcaggttttttcaactttatctaattttgctgggcatctcacttcaaaggaagatgtttttcttttcgagattattggagaccaacttaccgagtggctctctttaagcatcatattgtactctgaaatgcaacaaggacaaattattgttcatcttgagaacctttggctcaagatgaagcagcgacttcttcaagctgcactcaatcacccacaccgccccatttcagttgcaacagcatcagtttgcagagtagcaacacatggcaacacaaccctgcaccctggtcgcttaatttctggatttgatgagttattaatgcatagaagaaaggctcgtgatagctccaggaaaacagtcatcacatccaatcctactgatctcacagtcgagaggtatgatggatctgtgaatgtctcagtgggtttggggaggaagaggctgaagatcatgaagtattcaactaaaccaaaggaactcaacaaaaatagagccaacatgggcatctcaccagaggaagacatagttaccttaccaccatgcatccaattaatcacgaagagagatcgatgtgctaaactcatgcttccgaccgatccatatacgtgccctggagacctgacgctgatgagcggcgcggagctgttcatgcgggaggacgtggggctcaccgacggcgaggtcgaggtgctggcggggtccatgaacgtgttcatgctcgcgtccatcctcgccgccggctgggtggccgaccacctgggccgccgccgcaccctcgtgctcgccaacgccttcctcatggccggcgcgctcgccatgtcgctcggcaccagcttcgccgcgctcatggcggcgcgcttcgtcaccagcgtcggctccgggttcgcccgccggagactggggacggacgcagacgaggagggggcgggggaggaggcggtggtggaaggggaggtccagacgatgagggccacggacgcgagcgtctggttgcatcgaattcaataa

SEQ ID NO: 15891 - DNA, 954 bp, Zea mays
  Peptide Sequence Number=SeqID_59266
atgccgagagccggggtgtccagcagcgagagtagccgccgtggcgccggtgcgttcagaaccctctccgaagatcgccgcatcaccgtattctgctccgacggtcgcctctaccaagtcgattacgcgtggaacgctacgaagctggcgggcgtcacctccgtcggggtgcgtgggaccgactccgtatgcgtcgtcggccagcggagggcgaacacgcacgcgcccaaggacaaattgctggacatgaccagcgtttcgcgcctgttcccgatcaccgaccggctggggttgctcgccacggggatcgcaggtgaggggagagcattggcacatgaggcaaggaatcaaactgcagaatttcgtttcaattggggatatgaaatgcctcctgatgttttggcacaatggattgcagacagagcacagatctggacccagtatgtttccaagagaccttctggagttgttgccatgattctgggcattgatgatgagaaaggaactccacaactctttacatgtgatcctgctgggtattttttcggtcacaaggcagcaagtgctggccaaagagatacggaggctgtcaactttcttgagaagaaaatgaagaacaatccttcactaccatttcaggaaaccattcaggtaatcttttttgaaaaggaaaaccagcaccgcgaccagattcctgacttggtggttcggtccaattttgatttattcttctcctctcgtttccagatggcaatatcagcattgcagttcgccctgaaggctgacctcaaagcctcggaagtcgaggttggggttgtcaggacggatgatccaactttcagagtgctgacagaagctgaaatcgatgagcatctggaagccatcaacccagagccgcggcactctgaaatgctccccggtttattccgggataaactgacattggagaactga

SEQ ID NO: 15892 - DNA, 597 bp, Zea mays
  Peptide Sequence Number=SeqID_59267
atggcgcttcctgttgacgtggcgggtctgtgccctaggcagggtgacgtgggggctccttcgaagccgaggttgagtctgtcctctgttgccgaggccgagcccgagccatggggtcgggcgaggcagaagtcgttcggccgaggccagggcggagtccgagccctggggtcgggcgaggcggagtttcgtcgtcttccggcccgagtccgagccctggggtcgggcggagcggagttcgccgtcttccgggtcttagcccgagtccgagccctggggtcgggcggagcggagttcgccgtcttccgggtcttagcccgagtccgagccctggggtcgggcggagcggagttcgccgtcttccgggtcttagcccgagtccgagccctggggtcgggtggtgcggagttcgccgtggcgcctttggcaaggcctgactgcctgtcagactcactctgtcgagtggcaccgcagtcggagtggcgcaggcggcgctgtccttctgtcagactgctttatgctgatgggggttaccagctgagaattaggcgtcttgagggtacccctaattatggtccccgacaaacacagaactaa

SEQ ID NO: 15893 - DNA, 936 bp, Zea mays
  Peptide Sequence Number=SeqID_59268
atggctggaggaagtctccgtgggactcgaggacgccatcctcccccaggcgcgaggggaagaaaaaggcagccgacccacgcgggggcgcccccccgactcgcctcatcttccatcttggcctggatgacgaaaatccttgaggccgagggaggagtagaggccgcggcctggcccgctttccccaccgacgaactggaggtcaccatcttgggtgaccgccggtggcggggcaactctccctacgtgcgcccccagacgccgcgggctgagtcttctccaacacgctccaaggccctcccctgcgactcgggggctgggtcccgcatgtcatccaaaccggctcagggtagaagaagccaaaccgccgcgcgtggtgcgcacgaccgcccagcggttacaagcgaccccccacttttgcccagaccaacgggcggaaggggcgggcagccatgcaggcggcatgcaaccgcgccaggtggacgcgcttctccgacttctgacacgccagcttggaagcccaggcccacgcgtcaagcaaccggcgtgccagttgctgcatgcaagcaaccgcaccgccactcgtgccaccgtcgcgcctcttcggttgcggagcctatgccgcgactcgaggcgacccagcagcgccagcctggcgcgtcggtcaaagcgaccgaaagtgggccggcggtaatggcggtggcaggcgggcgggcgcagcagtcacgtcgtcagctaggctcacgtctcatcctgggacaacaagagagccatccctcacggcgtgaagacggtgcacccgtgacccgttcctcgaacggatcgcgcatgcgcaacggccgccccaccaactacacgccccgtcgcattaactccgcggcgggacacgcggcgcctctggcgggagaagcgcgcgacgcctcgcctttgccgtaa

SEQ ID NO: 15894 - DNA, 852 bp, Zea mays
  Peptide Sequence Number=SeqID_59269
atggggcacgctgtgaaagtcgatgtctcttgcattgaagggctaacctttcttggtgctgaaggcgttgttgctgtgggaagggattggggttttgttgttgggggaagggattgtggttttgctgctggaggtaatatcgatgtttgttttggtattgatggtggtggtatggttgtggttgatagtacccacgacaaagatcacggcggcgagactcacaggcggcgaaatagctccggcgaagtggtcgtcgacgttggggaggtcacggcggtcacgacggtgtgcggtgagttggagagcttcacgggaggtcagggaagtcgtaggcgcaaggaattgaaaaatggttcacctggtagcccggtctacgtgcggtggcgggcggccgaagtccggcgaggttgcgctcgcttctccggtgaggcaatgtctcggctcaagcttgggaaatcttcacagcctctcggggaagccgtccaggggctagggcgaggctgggggtcgacgggaaaggctggccacggcggtcgtgctcgggcagtgatggggggcggtggcgcttgctttccacggcgaactctggtgatctctggctcgggcggggctttggcactcgagtggattggatcttggatttacgagatacgagggggcgaagttgggtttgtcgctcggctgaaatccgagaccaaggtcgagtcaaatcgtgtcaaacggtttttgtttgatgtccaactttgccagagtatgtccaagcttaattcggtttatgttaaggtcatctttcttatatttggattcaaagggcaggggggctgggttatggttccgtaccgatttccttag

SEQ ID NO: 15895 - DNA, 546 bp, Zea mays
  Peptide Sequence Number=SeqID_59270
atggcgagagtagcgtgtaccctccgtggcaagaggctggacggtggtgtatctgtgctctcgattagcgtgaacccgagttgtccaaagtctgttggacaaggacaactgtatgtgggcctaataacttgggaggttccatcacagctggacgatcagcgtataactgagttggcagctgacgttcgacgcttgcaagacgagcttgctgaacgagatttggtggttgattgggccgtcaactcacgttcgattgcctgggaccgtgaagccaaagcacgtgcttgtgtagcagagcttagcacggccctcgacaacttgcaggtgtactgcaatactttacatgaggaagtacatgtactgtatgcgcgactacacccggacgtgcctgtcgaccctattgcaatgggagccggactatcagggatagcaggtgaaggacctgatgggaagttggacctttttaggcctcctccttccatgaacctggctgacgatcagtctcctgcagcaggaaatgaagaaaccaaggacgacgaagactag

SEQ ID NO: 15896 - DNA, 159 bp, Zea mays
  Peptide Sequence Number=SeqID_59271
atggggaagcatgtcccatcactcctcatgctcctccttagccgagtgaccgcacttgtacccaccataaccggaatgggagaccacgtctcaggtcgcgtgaggatggcaatctgcgggcaggttcactcaggatttagaaatcattatgctaagtga

SEQ ID NO: 15897 - DNA, 159 bp, Zea mays
  Peptide Sequence Number=SeqID_59272
atggggaagcctgtcccatcactcctcatgctcctcctcagccgagcgaccgcacttgtacccaccataaccggaatgggagaccacgtctcaggtcgcgtgaggagggcaatctgcgggcaggttcactcaggatttagaaatcattatgctaagtga

SEQ ID NO: 15898 - DNA, 726 bp, Zea mays
  Peptide Sequence Number=SeqID_59273
atggcgcatcaacaagaagagcaccagtttggaaggctaatttcgaaggaattgagagtttccggtgaatcaaactggataaaagtggagcaaaagttggttgctaaaggaaccaatagaacctcaaggcttcaaataacaactaacaagaaaggagttgtctggtttgatcaagtatcactcatgcctgaagacacatacaagggacatggctttcgcacagaacttatatccatgattttggatttaaaaccacgattcttgagatttcctggaggctgctttgtagaaggtgactggttaagaaatgcctttaggtggagagaatctattggtccatgggaagagagacctggacacttcgggggtgtttggcattactggactgatgatggccttggatactatgaatttcttcagaaagttccctcttgtaactcaggagtcagccacaatgatgaagttgatactgttgctattgctccttttgtaaagagggagatgaagaatgtggagaaagacataagggtggctaccaagcgcaatgacatgttatctgcaaaggtacggtcagaaaagcaagcacatcagcaaaatagatcggtttggaagtcaagttcagccgtatcgtcggacaacagttttatggatagcatgcacacaaccatcatgacttcatttttcgattctgatggaatctctgttcttgtcaacccagcactctag

SEQ ID NO: 15899 - DNA, 93 bp, Zea mays
  Peptide Sequence Number=SeqID_59274
atggggcccacacggcaggagaagcggcttctggctgggctggcaggattggggaaggattatgggtcgagaggggtgatatctatccattaa

SEQ ID NO: 15900 - DNA, 693 bp, Zea mays
  Peptide Sequence Number=SeqID_59275
atgatggtgagggcgcgcgacgcggcgcgggcgctgctccgcctcgccggcgccagagctggcgtccatagggactatttccctccgctagcgcgcgccacgtttgctcgcgccttcctggatttccgcaagacggggaacaaggaggccatcgagaaggataaggccaggcttaccgatgaactgagtagaggctacttccaagactttgccgagatccgcgagaacgctggcaagattgcgacagcgagtaaggtcatcatcccagaggtagatgctgtgaagtttcctgatcttgatgtggattcccctgatggaggggcactgcatctgcctcttgttgcaccaactctgcaagctgatgatggtgaggctggagaccataagattcctggtgcttcattggtgtgcctttccttccgcgcaagctcgctggtgtccagtgcccctctcctaattcttagcctcgccaagatcagccccaatcgtcctctggctctgcagcctctgggggcgttccctccaacaataggcatggcaagcaccgtggcaagagggcctccagtggcagccaaggcagctccagtggacagtagggatggcaacatatcaaagttggatcggatattgcacatatctgcccatgaccatatccgcggttgcaaccaatatctacgactagattggatatga

SEQ ID NO: 15901 - DNA, 897 bp, Zea mays
  Peptide Sequence Number=SeqID_59276
atgagggcaagcgacacctccggcaggagaagcgggcgccgtttcgcctccgtcatgatgaccgcgtcaacaaagggaccaggaaagggggtatttcgaaaaaggacccttcccagcgaaggaaacgggccccgagccctcctactgatcagtggttcgaaggttgcgtcctccagggtttggcaaccgccccagagcactcgggctccgtgccctttactgatcaggggttcgaaggctggcccctcagaagggttcgacagccgccccagagcatgcagagtcagggatgaccctgggtacgtccgttacatggccgaggctcgggctacgctcccgaggtaccctaggacatttccgagaccagcaggaacgatttgtaacggaatcccattggagggaggcatcgagcccttggaccctatcgaatgggtccgggaaaatagcgctgttcgccctgctccagctactgtgccaaccaccaagataaagcagagtcatgatctcccacgagtttggactcgggcgcaacagggagctccgcctcgcccgacctcaggcctcggcctcagcctcggcctcggaagaagatctccgcctcgcccgaccctaggcctcagcctcagcctcggcctcgggaggaatcacaacctcgcccgagcccagcctcaagagaagtctcctcctcgcccgacctgggcctcgaaccgactgcgctacaggggatacatcattaccctactcctagctagctgccccaggctacgaaggaacaagaccggtgtcccatctaaggttactccggcaacagctgtgcttctacagggctcaaggcacttctccgacggccacattagctcgtgtacagggctcaaggcgcttctccgccagccatga

SEQ ID NO: 15902 - DNA, 1500 bp, Zea mays
  Peptide Sequence Number=SeqID_59277
atgtctgctcagatagctctgcgagtgcaccggcttttggatcttccagcctttctgcttgcagccggtgctgactttgaggcgcatctcacctatctgcctggccttcagacccttctgactatcagcggcaggtatgttgaggagtgggtacgagtcttttacgcctctgtttggattgacccggatcatcactggatgaggttccgctttgagcgagaggatgtcacaattactgccagtcagatccgccagctatttggattccccgagtcgacgactcgccttcacagtctctgctacaacacttctgaccctcctcgtcgccctcacggcggtgtggctccgggtacagctcacgtcgcggctctgttccgcccgcccttcacagatgggtcgcgacgttcaccggcagactttactacagcagccaagtacttatacgagctcatcagacggactcttctgccgaggatgggatacagggaggctaccactcatattcagctttggctccttggtgccctggtctcccactctgagtttgacgttgtggacttcctgatttgtgagatcgaggacaccgttctggatgggatttgtgctcgtcggcagttgccttatgctcactacttgtgccacatctttgcgcagctaattcagccccctcgatttcagagcacccttgaggcctcacgcctcgtttttggatcctaccgtcctgcgcctgagattcctgtgccagcttctgctcctgtgtttgattctcaggccgaggatgcagctcttcgacagtttgacactcagggtacagcagctgatgatgatgatgatgatgatgattttggggttcctcctccgcctccgcctcctatgcctccacgctctcatgatcatgaggctgggagttctagtgttgcccctcctcctcaggctatggaccctgctcttgcttcgattctggccaacctggcggccgagcaggcccggttatccgagaggatgctctcgatgtttcagaacatgcaggacaggcaggatgcccttcagcagcaactacttcaggatcgggctgagactagggcattcatggctcttatgcttcagcattctggtatctcagtacctcctattcagtctgctccacctcctccgcttcacgctccagtggtaccatcgattttgtcaggaccccctgttggtacctctccgctccggccggtcactttggcgttcacctctccggttctcagcactgtctgcccgcagccgccagtgccaccagcatctgctgttaccactaccgctgtgacagtatctgtgaccgcttctgttccggtagctcctgcagcgcggcctcagtccgagtcagtaccagctccagcttctaccgcagatcctggatccgagactgactctgaccctccgccggcgttcgctctgctgcctcgacctcgaccggatgcgcccccgcctcctcctcctgcttcagatgtttag

SEQ ID NO: 15903 - DNA, 225 bp, Zea mays
  Peptide Sequence Number=SeqID_59278
atgccatggaaggtccccccatcgaaggatgtcttggccgaggcccatggcatcgaacgtggcggagtagagaatgttgagtacgcttcccacatccatcagaatcttcgacaatcgcttcgatccgatgatggggttcacgatgagcgggtatcacccgggtcgggggacatgcttcggatgatcagagcggtcgaagaaacaattcttggtgtattcttgtag

SEQ ID NO: 15904 - DNA, 240 bp, Zea mays
  Peptide Sequence Number=SeqID_59279
atggggtggaggtggtgcagtgcggagtggagcactgacaggagggtgcagttgcggacggagccgttgaggtgggtgtggggctccaccttggggcgagcgacgcagagtggtagttgtccagggaagacgacgaagaggtgttgtccaggggagatgttgtccagggaagacgacgaagaggtggaggtccgagtcccccacgaggcgccctcctcgggtgttgcatcggtgtcatga

SEQ ID NO: 15905 - DNA, 825 bp, Zea mays
  Peptide Sequence Number=SeqID_59280
atgggcgccagggggctcaccatatctcatgtcaagagtcatctccaggcattgactgattgttttcccgttggagccaacaatcgcgtgcaaatagactcaaaagcttctaaattactaattcctcgttcgcttttttcgataaacagatgtacagagctccgaggcttggcgcaggaagaagagtctttacagcccactagctaccaacaacgtcctgaaaagatcacgcgcgagcgttctcgtggtgaaggtggtatccttagaaatagtgaagggccattgaaggaccacatttatttgcatctgaaccatctgccgcctgaggttctcaaagaaaggctccctggtatttctgaaactgctgctatttttgctggtgttgacgttacaaaggagcccattccagttttgcctactgtgcactacaatatgggtggtatcccaacgaactaccatggggaggtagtggatatcaagggtgataatccagatgctgttatccctggtctaatggctgctggtgaagcagcctgtgcatctgtccatggtgcaaataggctaggcgcaaattcacttcttgacatagttgttttggcagagcttgtgcaaacaggggaggctatgaaggggctggacatcagaaaggtgttggaggcgcccaaggaggtcaagtgcgtgcccatgaagaatgtgctcgagcccggagacatccccacgcttgctgagctcggtctcactactccaccaggcatggcacaggtacaactagaaaggtttctggcattcagtaccatgatgcgttctgtcgttgaacctgtttga

SEQ ID NO: 15906 - DNA, 93 bp, Zea mays
  Peptide Sequence Number=SeqID_59281
atggcgaaggtcatgcggcttcgtgtcgatggactaggagcgatgaaggatgaatgttgggacttgtcaaggcaccatataagtcagttttga

SEQ ID NO: 15907 - DNA, 351 bp, Zea mays
  Peptide Sequence Number=SeqID_59282
atgaacgtcttcgacattagtcgccggtctccatttgctgaatcgcaggtctatgaggtagtgtcgcacacatctccatcgcctcaagtcagctccccttacaaaaaaagtgaagcactaggtggtacaccgagcaagcgtcattggcttgttactcttggaggttgccgcctcctagacggctcgggtgattgtctccgtcgagctctccaagaagattgtggagaagccgcgatgttgattgtgaggggtttgcgcctacctcgccggagcggcaaaggtgacattagtggaatcgaggtattgagtgatttcttgtccacttggctcaaagatcaagccatgacttga

SEQ ID NO: 15908 - DNA, 441 bp, Zea mays
  Peptide Sequence Number=SeqID_59283
atgggcaagaacaacaagcgcaagcgtgagccaactcctccatcggaggattttggtgactcggagtactcagaggaggagttctcctctgagtctgaggggtctccggctcccatccccctgcgtgagtcgtctgacgactcagacgactcccaggggctcgcggcggaggtctggacgtacatccgggccgtcgagcgctccgggctcgagggctcgaatgagtcggagtactcctcggatgaggaggactcgtccgaggaggacggtggcggcgacggcgaggacgacgacgatgacgatgacggaggcggtggcggcggtgacggtgacggcagcggcagcaaggatggcgacggcgacagcagcaggggcggcagcggtggcggcggcagcagcaagggcagcaacaggggcggcagcagcagggccagtggctag

SEQ ID NO: 15909 - DNA, 375 bp, Zea mays
  Peptide Sequence Number=SeqID_59284
atgaacaaaaatggaaatttgcaggatagaattgggattcagatgggtcaagttaagatggtagaaatcaaggaggccgcgaaaaaagggagaaatgggaagaccgaggccgcggagaaggaaaggagcgtaaatcacggactcatgggtatcctcagtcgggacagtaaccccatggcaaatccgccaagaacagagttccctcgggggaagaaccccgatggacacgaggtggagaagttcgggctcggagatgacagacatgtggttacctgcgaaaggaaactggctgttggggtcgatcggaggaatcaccgcggtagacgaactcgaggttttcctcttgggcgccatctcgattctaccggcgagtag

SEQ ID NO: 15910 - DNA, 87 bp, Zea mays
  Peptide Sequence Number=SeqID_59285
atgggcctgctcgtcctcctcgtcatcctcctcatgggcctgctcgtcctcgtcctcctcctcatgagcgataggtgtatcacgtag

SEQ ID NO: 15911 - DNA, 396 bp, Zea mays
  Peptide Sequence Number=SeqID_59286
atggaggaagctatgagggagcagcaagaaaagttttgtgaagagatgcggcaacaacaaatggcatttctccaacagcaatcagagtacatggctgcttataacgcacaggcgcaacaagcaataaaccaggcacagcagcaaccatttgttttccctcaatttcagccgccgatgcctcagtggggattacatgctccgccacctccacctccacctcagggatccggggtcatgggccacaacacgccaccaccggtcataccagcaccaggaggagcttatgcaggggagggagcttatgcaggagaggatccaaccccgttacacgacttcgtcgaccagttattggcttctggaggtagtggacacaactccaacgaccccaatgtgtga

SEQ ID NO: 15912 - DNA, 586 bp, Zea mays
  Peptide Sequence Number=SeqID_59287
ggaaggggcggagctcgccaaccgccgccgtaggctggatcttattcttgatgatgatgaggaggaggaggatcgcgtagccttggccttggctccctacgttgatcgccattacaatgatcctgtctattaccggctgatctcgcctcgaacccgtccccgatccccatccccgtcctcacacgccggggacgacgacaacaagcgtgcttgcatcctggggctcaaggaggtggtgccaaccgctaagaacgacgacaactgtgccatctgcctcaacccattggccgatatcgctggtcctgatcctgatcacaagaaggacgacgccgcagctacgtcgatgcttcgggccatgccctgctcccacatcttccaccagcactgtatcttacagtggctccatcgcaacgccgtctgtcctctctgtcgctaccaactacccaccactttcaaggatgaggacaccgaagaggaggatgaggatgaggatgaggatgaggaggaggaggaggaggaggagacgaacaactcaaattctcgattgaatcagatcagacgacgactgcagatcttgtataactaa

SEQ ID NO: 15913 - DNA, 1353 bp, Zea mays
  Peptide Sequence Number=SeqID_59288
atgaagggctcagcgcacctccttgacgaggcggagagcagcgttggtgagaagggcgcagcacacctccttccaccgtttgacgaggcggagagcgtcgtttggctggaagttacggaggagatgacggagggcagcgttggcgagaagggctcagcgcacctccttgatgaggcagagagcagcgttggcgagaagggcgcagcgcacctccttcaaccgtttgacgaggcggagagcgtcgtttggctggaagttacggaggagacgacggagggcagcgttggcgagaagggctcagcgcacctccttccaccgtttgacgaggcgaagtgcgtcgtttggctggaagctatagaggagacgacggagcgcagctgcaaggaatccctcgtcacgcaggcgctgtcgggctccaagattgacggggagtacgaccccttaatgcttgacctcttcgtctactggcgtgccgttgcttcgcgggacaccgcctgggagagtgtcccattggtcctccatgacgagcgactcatcacggtcagggttggctggcctccacatgaacccgagcagccacgagacctagtggaagctgtgacgaggatccttggccaccatctgggcccagtatcttcgttctgcctccattcgtcgctctcgcccgatggggacacgctaggctgctggatggatttgctcttagatcgcagagttgattatcttcaacttgtaccaggacgtattgaccgcgcgcagctgccgttgcaacgtctcaagacggacatgcttggtaccatggtgattggtttcttcaatatcctaccactagtgctcaccgataacaaccattggtgcgacggcatccacaaccttggtacgttaacattgattggctacaagttttcggttgatgacctaagtgttgcactccgcatggttggttgtttgtggagtctcacactgggctcgtgcaacctggttgcgggaaacgaggaggccaccatgctcatagaatctctatcgctacgtaacttgggattttggagttgcatcggcaagaccctggttatctactatgcccctgttcttagtttcctagagattggtatttcttctgtggtggccagcgccgctagtgtctctgtagagttgcgggcggctgcagctctacgggagatacgcagggtgatgctccctctacattccattgaaatatatggagccttgggtcccgcattcatgccgaagcgtaggatgtcactacactgtgacgaaactggactgttggacaccaaaatgagcagacggtccggcccttgggcccggacggtccgtgtgtcccgagattag

SEQ ID NO: 15914 - DNA, 297 bp, Zea mays
  Peptide Sequence Number=SeqID_59289
atgtgcgggtcaccgtcggggatggtcagagtcggccggtcgacgtgcgcaggtgggggagctcgttggcggcgaggagtctggcctaaccagggcacgattggtcaatcaaatgggtcagtgagcttcaccagaggcgggcgaccgaagtctggcgaggacgatcttgggtctccggtgaggttctgccgggtccgagcgcttggaaagcttcacgggccactggcgaagctaaccgaggggcaggcgcggcttggacgcgactggagcgggctggccatggtggccgaggcttag

SEQ ID NO: 15915 - DNA, 192 bp, Zea mays
  Peptide Sequence Number=SeqID_59290
atggcccagctcagtgacaagggagtgcaaattattaaggagaacctccatcagaagaccgagaagtataaatgtttctgccaagatggaaaggatggcattgggacacgagccctggacccgacaaaaccaaggatttgcctcgggctcgggctaggagacagaccagacttcagagttccaaatctttga

SEQ ID NO: 15916 - DNA, 981 bp, Zea mays
  Peptide Sequence Number=SeqID_59291
atggatccggtgtggttagagtggttccacatggacggggcggagctcgccaaccgcggccgtcgaccggatcatcttgatgatgaggacgatctctatgtagccttggccttggctccctacgttgatcgccaccggcctcgaacccgtccccgatccccatccccatccccatccccgccctcacacgaggacgccggggacgacgctgctactgctcgcaacaacaagcgtgcttgcatccccgcttacagcgaagccatcctggggctcaaggaggtggtgccaaccgctaagcacgacgacgacgactgtggcatctgcctcaacccattggccgatatcgctggtcctgatcacaagccatctgtttggttgggtgcgtccgtgggtgcatgccccatcagatgcaaaaataaaatgagtgtacatgtttggttgactgtatttggttttgggccaggccacgctcgtgcaaatatcggtctcaatctaggcccgcgggatacggtggaaatctgcgttcctggagagccaggatgcgctgggccattcgcgcacacgctcttgctctccattcgcgcacacgctagggttttcatctcctctctccctccctcgtctcctctcgccctcgagctcctctcgcccccgagctctcactcccccggctcctctcgcccccgagctctccctcccccggctcctctcgccctcgagctctcgcaccctcgactcccctcgctgttgaggatctggttccttaaggtttcgtcaaaaggtatgagctctctctcccccatctcctctccccgtctcctctcgccctcgagctctccctcccccgtctcatatcgctctcgagctctcacaccctccactcccctcacttttgaggatctggttcgttcaggtttcgtcaaaagatctgagaatgttgagtccatgtcgagctctttcaatagcctgctctctagctag

SEQ ID NO: 15917 - DNA, 354 bp, Zea mays
  Peptide Sequence Number=SeqID_59292
atggagttgcgttcctccaacgaggaggcagagaggcggcggataccccccatccggaggaagaagacatggttgccttccgaaaggagtctccctccttttaaaggcaactctccctacgtgcgcccccaggcgccgcaagccgagtcttctacgacacgctccaaggccctcccctgcgactcgggggctgggtcctgtcggtgttttgggtccgaccgcacacccggggttgcccctcaaggtgtttttaggagtaggacggtgtcgacaactgtagcaaaatggttcgtgccgatcgcacgagggacaatggacaagatttacaggttcgggccgcttagaaatgcgtaa

SEQ ID NO: 15918 - DNA, 1632 bp, Zea mays
  Peptide Sequence Number=SeqID_59293
atgacaacggggatcgagctcacgacagaaagcgatgatggcgcagcacgggaagctggagcagagacacggcaacatggggctagacagaggagcgcgagcagggaacgcgacgcagcggccatggagatgagctgggcgagcttcctggcgcgcggcaagtctgagcgcagagagaacggcggcgcaggagctggagaaagccagatgtgcagggagatgagcttgaggaagaccaggcagccaggcagagggagcactgccgccatgggaaagggagagctcggctggaaggagctgctggaggctggagttgtgtacggctacggccccctaggcatgatcgacccaacagaacgacggtggaaccctggtctcctccctcttcacccgcatctgcactgcagcacacgcggcgccgaagcgatctacccacctcgttcccctccagtggccgtcggcgcggctcagcagtccatcctcctgacgccacctgcaacggcgccaggcggtgatccattccaactcgcgaaagtggacatgatcatagctcgtgcatggcgaaggttccttgagaagacaagctttgggaatttatttggcaaggtcacaattcaagagcctacatttgaagaggtgattgtcttgtataggagaaaatgtccaaagggccaggatgatagagcaattcatgtaaagcacttcaaaaatatcccaatggcagacatggagttggttctgcctgagaagaaaaacccgagcctcacacgtatggactgggttcaatttattgtttctgttgtcattggacttgtcaaggaggtcataattgcctactacattttgatggagaatggaaaggctactagtgatgaagagtttggcttgcaatgcaattttgaggtgatggatgccgttcagaagctggaaaggtttggtgtcattacaagagactctattggaaggatttgctgtgtccctctaaagcgtgccaatgagatcatcggcgcaaccacggaagagctgaaaggcatcccctacctgaacacctacgacggccgcaccatccgctaccccgaccctctcatcaaggtcaacgacaccatcaagatcgatctggagaccaacaagatcatggacttcatcaagttgccacggttccagaatcacccttctacttccccgacgacctcgttatcaatgggggagtggaagacgacgttgcctctgatgacaaactcaccatggcaggggaagactcgtagtagcgcaacatgtgttgtcaccagaaccggcgatgtaacatccagtgtcatcataatgccagcgaacgtgatccgactccaaacgagtgaggattctaggagcaaaggaatgctcgatggaagagtcagcatgatgttcaagattgcatgcatgagcatgagcacgagcatgagcttgccgagcgcgacgaacttcaaccacatggccaattattccttccgtgtaacctgctacccgacttcgcttgattcatgcaaactccaagtcaagtcagagagggggacatacaccaccgacctaatagttgtcgtgacgtgcggagcagcattgaagcaccacgcgcttgacgacatgaagaagaactga

SEQ ID NO: 15919 - DNA, 108 bp, Zea mays
  Peptide Sequence Number=SeqID_59294
atggcgacccccaaggcggttgatgttgcgcgacgatggttatgcttcgagcttgaagtgagctgtgaattggaaaatgagaaaaataactgggttgaagagtcatga

SEQ ID NO: 15920 - DNA, 723 bp, Zea mays
  Peptide Sequence Number=SeqID_59295
atgccgcctgccgccggtgggggggcggacaggggcaacgctatggggcggcgcattctttctgcaataaatgcagtggccgcgcggctccagtggctcgacgtcagactcctcccgttggctcatgtcatgggccacaagccatgcggcagtagcgggtctccgccttggggagggggagcgtggtgcaagccccagacacgtgccagcaccggaccccttccagggcagggcccgggtatttcctgccccaagacccaggacccggtggtgaaccgtccggacctcattccgaagggtccgggatctgtcccggaggttcgctcgtcatgcaccgggtctggtgccttccacgtagcgggtctagacctgctacagatttcaccgccggcacagcgtcttttccttgtaacagggggtaccccctgtttcaagttttctgccatcgcggttgccatggccacgctggttccccctgatcactaccagaccgaggaggcactcgactcggtgcgcagtatgcttggatggggctcgcttgcactcgccgggaggatccgggccggcactgttcccctcggcgatcttgccgccggggagtttgtgctcttcgtctcctatctcttctgtgggttggcactaccgatttcaccgttcttcctgctgctactggaggagttcgggctccaactccagcacgtcacgccccactccattctctag

SEQ ID NO: 15921 - DNA, 2814 bp, Zea mays
  Peptide Sequence Number=SeqID_59296
atggcggaggcgcacgcggaggccatggatgggagcacctgggaggacatgatgcggaggatccttcccccgggcactcccatccccgaggcgccgcccaacctcgactactccatcgccctcgagtacgacggcccgccggtgccctacgaactccccagggtagaccccgtggagatccctgcaatccccacggcggagccggtgtccggttcccaggtgctcggagggctcccggtggcgcctgttgttcagcccatccgcctcccagtctctaggatcgcccgctgcgcagatccggtggccgcgcaggctgctggcagctcagagtcagtcttgcacaaccaggagttcagtgacgacgacgaagaaggcgatgattcccgctcacagtcgcacggatcagcgcagagctcacctgggccacagaataggcctgaaagacaggagggcaggagaggtccggtcgtcaccttcggcttcacacccgacagcaagtatgagagcaaggagtttgaggagatgtctgagcagtacgtggccgtcacgaagaaggagaagaggagaagggcatgctatcgctgtgggaagaggaaatgggagagcaaggagtcgtgccttgtttgcgatgcaaggtattgcggctattgtgtccttaggatgatggggtcaatgccagaagggcgcaagtgtgtcaactgcatcggccagccaattgatgaatccaaaaggtcgaagctggggaagaactccaggacgctttcgcggttgctcagcccgttggaagttcggcaaatcttgaaagctgagaaggagtgccaagcgaatcagcttcggccagagcagcttattgtcaatggttgcccattgcggccagaggagttaaccgacctgctaagttgctcacggcctcctcagaagctaaagccaggaaaatattggtatgacaaggagtcaggcttatggggaaaggaaggagaaaaaccagacaggattattagctccaacctcaattttactgggaagcttcaggtcaatgctagtaacggaaacacccaggtttatatgaacggaagggagataacaaagattgagctgaaagttctgaagcgcaagagagctgcgcgaaaatatattaagaaggagataaaggtccaaaaggaccccaagatacagataggtgatgaattttttgccattatggaattccttgcaaacttgcccccattatttgtgaatcctccttactgccattatggaatcctccttattttgcaaggaatcctccttgatgcaaacactgcccccattatggattttgtgaaatggaccttgctgtccttgcttactgccattatgaagcaccattaccaatatcagttgcaaatgttcagtgtccccgtgacactcatttttgggtttatgacgatggtcgttatgaggaagaaggctctggcacgttttgcatgcgcattattttcactgccggtgcctccggggaactcaaatggaaccagagatgaagttccatatacagcaagagctgtccctgattatttggaccaaaaaagaatacaaaagctgctgcttcttggaccacctggtgctggtacgagcactatttttaagcaggctaaatacttgtacgggactaggttcacccaagaagaacttgaaggtatcaaactgatgatccaaagcaatatgttcaagtatcttgggattttgctagagggccgcgagcgttttgaggaagaggctttgtctagattgaattacacgatttctcagggtgaagaaactcagcatgatgaaaataaagccaatggatcaaattcttgtatatactccataaatgcgaggctaaagaaattttcagattggcttttggatatcatagcaatgggcgacctagatgcattcttccctgctgcaacgcgtgaatatgctccgtttgttgatgagatgtggaaggaccccgccatacaagcaacatttaaaagaaaggaagaattgcattttctccctgatgtggctgagcacttcttgagcagggccgttgaggtgtcaagcaatgagtatgaaccttcagagaaagatgtaatcttcgctgaaggagtaacacaaggaaatgggctagccttcatcgagttcacacttgatgatcgcagcccaatgtctgaaccttatatcgacaacagtgaggcacattcgcagcctctcaccaaatatcagctgatcagagtcagtgcaaaaggcatgaatgatggctgcaaatgggtggaaatgtttgaagatgtccgcatggtaatattctgtgtagcactcagtgactatgaccaattgggaccccctgtaagtggcagcagtcggcctcttgtgaacaaaatgatgcaaagcaaagagttgtttgaggctacaatccggcagccatgcttctgcgatactccatttgttctggttctgaacaagtacgaccttttcgaggagaagatcaaccgcgcgcccctctctagctgcgagtggttcaacgacttctgcccggtgcggacgcaccacaacaaccagtcgctggctcatcaggcatactactacgtggccatgaagttcaaggacctgtactctgcgcagacgaaccggaagcttttcgtgtggcaggcccgtgcccgtgagcgccagactgtggacgaagcattcaagtacattagggaggttctcaagtgggaggaggagaaggatgacaactgctaccaggaggaatcattctacagcacgactgagatgagctcctccccgttcatcagagcggaatga

SEQ ID NO: 15922 - DNA, 1140 bp, Zea mays
  Peptide Sequence Number=SeqID_59297
atggagagggccgatgcctctatgcgctcggaagttgagcggacgcgcaaacagctcgtggactcataccgtgagctgggtgcgcggactgctgactttgaagtgcccggccgagaggcgggccttcgcttcctcgagtggctgcaagaggaattgttggcgctcccgaccattgtggagggatttatgtcctttgcctccctcgtcacctacgaaggggcgatgaacgcgctgtcccgcgaggggtgcagtcactatgtggtcttcgaccgatctgatgaagattttgggcgcgagatttttaaggtcgaagaccctgtggtgaaggactccgcgggggccctcttcgaccggatgtggggcccccacagtcgggaggtggttagggagcggtccgaccgggcgagggatcaggcggcgcgtgccgaggacgtggaggacttcggacccctgaacagcgcgcgacccgaagcggaggctcacccggtggtgcccgaggctgaggtcgacccggcaccgcccccggaaaccggtgaaggagccctcgctgcccctgcggctactgtgtccggtggtggctcgtcgccaaccgctgtgccgagggtggaggatcccccgaaggcggcggcggagccggcagcggaggatcccatggcggcggctgggtcttcgcaggattttgggcctgcgcacgcaactgccactgctaattttgtggcggcttcgaccgtggtcgctggaaatgaatgggatgagtctacgtctaagttttctgattttggtgactctaggagttcggttgagtggacggaagagtcttcggatgaggacttggattactttgcggccttggatgtggctgcggtggaggcttctccgcgtgttgcggatgctgtagttttgcctggtccgagtgctgggcgtaggcggcgaagggcggtggcgaagcgtagagtgagtgaagtggatggcggtcggcttcgtgtgggcagggctggcaagcgggaattgttgtcctcgccggttggggcgagtgtaggtgagggggagttgcgaagtctttttgagggtgaggagcttaggatgatgctatttaactatagggaaatgggaatcattccgaaggttgaaccaatgtaa

SEQ ID NO: 15923 - DNA, 939 bp, Zea mays
  Peptide Sequence Number=SeqID_59298
atggggtgcgtgtcgtccgccttgctcgaggaggacggcgccgaggacgaccgccgccgcatcatctcgcaccaccacatcgtctccctcacctcctccacctacggcatcctcaccagcccgcgagcctactgctcctcctcgtcgtcttccactgcccttggctcagagccgttggctcgttgcgcgcctcctcctccccctccgctgcctccccctccaccgacgacggcaagacaacaagcagccccagcaccgaaacccgaatcccagccccaggcggaggtcatcaactcctgggagctcatggcaggcctcgtggacccctcgacgccgggcaagcccacgaagctcgacggcggcggccagcagcgccgccgccgcatccctctgcgcgccatcgacggcaactcttccgtctccaaggcgccgtcctcgtccgcggttgtgctctacaccacctccctccgcggggtccgcgtcaccttcgaggcctgcaacgccgtccgcgcggcgctgcaggcgcacggcgtcgccttccgggagcgcgacgtgtccatggaccgcgggttcagggacgagctgaggagcaggctggggctggggctgggcggcggcagagcagcagcggcgggcatgctccccaggctgttcgtgcggggccgtcacgtgggcggcgcggaggacgtgctgcgcctggacgaggagggcctcctggcgcggctgctggagggcctgcccagggcgcgcggaggggcctactgctgcgacggatgcggcggcatgaggttcctgccctgcttcgactgctcggggagccgcaagctggctgtcgcgcttcccgtggtggcctcctcgcggaagaaagcagggaccgtggtggtgcgatgcggggagtgcaacgagaatggactcgtgctctgcccaatctgctcctga

SEQ ID NO: 15924 - DNA, 348 bp, Zea mays
  Peptide Sequence Number=SeqID_59299
atggtcctcgcctcaattgccgccacctccttcgtcatcctgcttattttctctcttccctcaggcctctaccttcgcgccacctcattctcggcagagggcatgggagtaggcgtctcctcctcgtattcgtccaacaccagccctgacaccaacctactgctcccgcccacggccgcagccgtgagccgaccgatgctcttcgacgcgggtatagggcgagtcggtcttgctcctggcctttcttcatacgtgccgctgaggaggacacggtggcacctgccacgcttaggttatcttggcgatgaggagtacaagtctgagatattggacaaacaaggctcgtag

SEQ ID NO: 15925 - DNA, 363 bp, Zea mays
  Peptide Sequence Number=SeqID_59300
atgagaaatcgcatccccgaggtcactaaggcagcagtgattgaggacttctaccagggatctaatgactcggccttcgtccgagccatactgcagaaaccacctccgaacaactgtttcgagaagcggacctctacatcaccgctgatgaacgggcccaggacctcatcggtgctagaaacaggagaaacaattatggagaagttggctgtgtacaaccaaaagactgctcggtctgggtgcatcggactgtccggtggtgcaccagacagtgtccagtgcgccaggctggcgtctgtcaactggctgctctcgggacttcgatggcagtgtacagctataattcaccggactgtccggtga

SEQ ID NO: 15926 - DNA, 480 bp, Zea mays
  Peptide Sequence Number=SeqID_59301
atgggggagaatcccgagaaaggcatcgcacagatgtacaaaaatggaaacttgcagaatggagttaggattcagatgtgtcaagttcagttcatagaaatcaaggaggccacggaaaaagggggagacgggaagagcaagaccgcaaataagaaaaggaacgtaaacgacatattcatgggtatcctctgtcggaacggtgaccccgtggcaaattcgccaagagcagagctctttcggaagcaaaaccccaacgtcgacaagatgaaggaggtcagattacgagatgatggacatgtggttacccgcgaatggcaactgactgttggggtcgattggcggaatgattgtcgcaacggagcttggcctcttccgcttctgcgccatcgcagtcttgccagcgaaacggacaggaacgagatctcagggaagcagaggagtggttcgaggcagaaaattgaagttagggctcagaaataa

SEQ ID NO: 15927 - DNA, 567 bp, Zea mays
  Peptide Sequence Number=SeqID_59302
atgggcaaaggcaagagaggtcgcggctcgccccgccatgctggcgacaagcggaagcgggatccaagccctccctcagaggacttcggcgactcagagtactcggaggaggaggtttcctccaagtctgagaggttgcttgccctcgcctctcccccgacgtcgtccgacgatttggacgactcccaggggatagctgcagaggtgtggacgtacatccgctccatcgagcgcaccgggctcgaggagtcggatgagtctgaggtctcctctgatgtggaggactccttcggctcgtccgaggagcggagcggcgacgacagcgacgacgagggcggtgacggtggcggcgacagcgacgacggcggtgaaggcaaagacggtggcggcaagggcggcaaaggcgacagtggcagcggcggcggcaaggccagtggcaaggcgccactgttcatccatgtgcctaacgatatcggcgtttttagaggtaaccaccgagcgatagctgatgccactagcgttttagaggtaaccaccaagcgatgtctgacgctgccggtgttttag

SEQ ID NO: 15928 - DNA, 611 bp, Zea mays
  Peptide Sequence Number=SeqID_59303
ctgcagctgagcttttcagctgggctgaacttcagctgaactcaacttcagctgtgaacctctttgaccatacaccagctgaacttgcctctgggcagttgagctgggatgttgatcctagggcaatagatcttgccatgagaatcgccgaaaggatgttcctcaaaatgaaggaagatgaggcgaagaacattattgaagaagaagaaaatgatcgatggagaccaaacgatgaatccacctcttcacaaggttcgtctttcaaatccacttctcatatgtgctttgttgctaatgagagtgacagtgaaagcgaaagtgaggatgaggaggagcatgaaagtgatagtgaagatgaggatgatcttcaaaaattcttcgctcaactaagtaagaagaaccggatgagcttgctcaaacttatgaaaagagcggaagaacaaaaggaaatgcttcataagcaagaagatatcctcatcgaaaaaatcaaagacttggagaagttgaccaaagagcatgagaagctaaagtgctctcatgatgatttggtccaaagatacgcagagtgggtctccaatattgtgccggtggagaaaaaggagtcaggataa

SEQ ID NO: 15929 - DNA, 770 bp, Zea mays
  Peptide Sequence Number=SeqID_59304
atgaagctgtggaaggagacttccaggagttccaagactacgacgagttctaggtgtgggttagcggcaaccccccagtcggctgcctctgcagctgagctgaacttcagctgtgttgaactttctcaactccagctgaacttcaacttcaaccggggtccaggcaggtttaaccggggtccagagaggttcaaccggggtccaagaaaagttcagccgaggttttttccccggacctcactgtctgacctgcagtctgccagtctgactggcagactgactgtcagcctgccccaggcggttgaactggtcttaggggccgatgttgatcctagggcaatagaccttgccatgagaatcgtcgaaaggatgttcctcaaaatgaaggaagatgaggcgaagaacattattgaagaagaagaaaatgatcgatggagaccaaacgacgaatccacctcttcacaaggcccgtctttcaaatccacttctcatatgtgctttgttgctaatgagagtgacagtgaaagcgaaagtgaggatgaggaggagcatgaaagtgatagtgaagatgaggatgatcttcaaaaattcttcgctcaactaagtaagaagaaccggatgagcttgctcaaactcgtgaaaagagcggaagaacaaaaggaaatgcttcataagcaagaagatatcctcatcgaaaaaatcaaagacttggagaagttgaccaaagagcatgagaagctaaagtgctctcatgataatttggtccaaag

SEQ ID NO: 15930 - DNA, 189 bp, Zea mays
  Peptide Sequence Number=SeqID_59305
atggcccaagaaattatacgaaagagcgagaaagccgcactttctggcccctcagagcctgccaagccatcggcggacccccacgcgaagggggacgacgaaattagaaaaatggctgaagctatcatggataaagttgttgatcaactactgaacgaagctgcagaagttgttctaagggaaaactaa

SEQ ID NO: 15931 - DNA, 1098 bp, Zea mays
  Peptide Sequence Number=SeqID_59306
atgaggcggaaagacggcgggtatcccccatccggggtcttggaagatggaaagacgcgatgcataagggagcacgaagacatggtcgccttccgaagggggaccagcggccgaaagggggcgggcagccatgcaggcggcatgcaaccgcgccaagtggacgcgcttctccgactcccgacacgcccagcgtggaggcccaggcccacgcgtcacgcaaccggcgcgccggatgcttcatgcaagcaactgcactgccacttgcgccaccaccgcgcctcctcgattgcggaaccaataccgcgactcgaggcgacccagcgcacgacccagcagcgccagcctggcgcggcggtcaatgcgaccaaaaatgggccggcagtaatgacggtggcaggcgggcgggagcagcggtcacgtcgtcagccaagctcacgtcccatccgggggcagcaagagaaccccctctcatggcgtgaagaccacgcgcccgtgatccgttcctcgaacggctcgcgcacgcgcaacggccgccccgccaaccactcgcaccgttgcattaactccgcggtgggacaggcggcgcctcttacaggagaagcggggaccgggaaagggggataccccgaaagggatccttccccaggaaggaatcaggctccgagcctccctactgatcagaggttcgaaggctggcccctcgaagggttcgacagccgcctcagatcgcgtgggccctacacccactactggtcagaggttcgaaggccgcccccccgaagggttctacggccgcctcaggctactcgggctccgcgcccattactgatcaggggttcgaaggctggcccccgaagggttcacagccgcctcagacgccgagcgagggatgaccatgggtacgttcgatacataaccaaggctcgggctgcgctcccgagaggctcaggggctgctctcgcaaacccggctctggccgaaccgttgacagcgtcaacataccagcccgagaacttgggacccgaccgtacacccgggctacggccaactcgcatgagggaacaaccagaccagccgaagcattacgcgaggcattaa

SEQ ID NO: 15932 - DNA, 3694 bp, Zea mays
  Peptide Sequence Number=SeqID_59307
atggtgatcagtttggcgctgaccatcccacaggtaacggttagcactgtagcacaccagctcgatccggccgggtactgcatctgcatggccgacggtgttcgtgccacggaagcggaagggaaaaccaagatagcgaaggtcctgtgcgagtgcgcgctcgtcgtcctcgtcgacggccacacccacgcgtgctgcccctcgtccgcgcacgtgctcctcctcgtcccaccacaactcttcttctacctccaattgtttgcacggacggacttctcaaatatattagcatactgcataccgatgcccaggtgtacatcagttgtgactgaagtccagctgaccggggtccaccgttcgttccgcctcccggagcccaggcccccgagtccagtccatacggaggcttatccggccacctcctgctcacctcgcctcgccgccggtcccgcgccccggagccctagagctctccccgcggcgtgggccgccggagtccccgggcgcgcggagagaatggaggcggcgctggaggcggcgcgcgccaaggacaccaaggagcgtctggccggggtcgagcggctgcacgaggcgctcgacgccgccgcgcggcgcgggctggcggcggccgaggtcaccgcgctggtggacacctgcatggatctgacgcgggacgccaacttccgcatcgcccagggcggcctccaggcgctctccgccgccgccgtcgtcgccggcgaccacttcaagatccacctcaacgccctcgtccccgccgccgtcgagcgcctcggcgacggcaagcagcccgtccgcgacgccgcgcgccagctcctcatcacgctcatggaggagatgtacaagcacatgggatcacaatttcatgaagagttgcagcgccataatctgccttcatacatgctaaaagaaataaattcaaggttggataaaatagaaccaaaggttcgatcctctgatacagcaatgcagtataaggctgtagagtctagatctgttagtgctaatccaaaaagaggcagcccaaggacaaaaaacataccaagggaaagtacactatatggaggtgacacagatgttacagaaaaacctgtggaaccagtaaaagttcattctgagaaagaattgcttcgggagtttgagaagatcgcggctacccttgttccagaaaaggactggtctttacgtattgctgccatgcaaaggattgaagccctggtttatggaggtgcaatcgataatccatcatttcttatgctcctgaagcaactggttcctccattgtctactcagctgtctgatcgacgttctagtattgtcaaacaggcatgccacctacttaatatactatccaaagaactccttggtgattttgagccatttgctgaactattcattccgatcctgcggaattgcaaggttgctaggattcttcctcgcatagttgacacagcaaagaatgatcgaagtgcaatactccgtgcaaggtgctgtgagtatgcacttctggtactggagtattgggctgatgcaccagaaatacaacgttcagctgatttatatcaggatatgataaaatgctgtgtagcagatgcgatgagtgaggttcgtgcaactgcaagaacttgctatagaatgtttgcaaagacatggcctgagcgctcacgccgtcttttcatgtcatttgatcccgcgatacagaggataataaatgatgaagatggtggtgtgcacaaaaggtatgcttctccctcgttgcgtgatagagtcgtgcagccttcacgtgcttcctctcattcaagtggtacacatgtacctggatatggcacttcagctattgtcgcaatggacaagagtgcagctatttcttcagattcatcttttccatcaaacactcttcggttatcacagtcaaagacgattgacagaagttctgagaggagcctggagagtgtgcttagctccagcaaagaaaaagtttccgccattgaaagtttgctgaaaggtgtcagcatgtcagggcaaaatttctctgctgcacgctcaacaagtttggaccttggagttgatcctccatcatctcgtgatcctcctgtgccgcttgcagcaccagcatcaaacgttctgtcattgcagaactcagcactgttggactcatcccttcctaccatcccacctagttcacgaaatggaggttcccgcttattggatacgatgacaacacacttgcccaccaaagaacgatcaaggtcaccatacttgagtaatatgtcatctgagtccatgtctggcttatcactgccttactcaagaaaatctttggagaggctccaagaaggtggccgcatggatgagagctatgatatccgttcaactaggcgaatcccccaaatgcacttggacagaaactatgttgatatgccttatagggattcacataataaccacgtccctaatttccagagacctcttctaagaaaacaagtaatgtcaagagcttctgcaagtggcagacacagctttgatgatagccatgtaccattaggtgatgtgcctggctatacagattctctggcttctctaaatgatgcactttccgagggtctcagccctagttctgactgggtagcaagagtttcagcttttgaatttattaggaatttattgaaacaaggacagaagggcattcaagaaattattcaaaattttgagaaggttatgaagctgtttttccgtcatttggatgatcctcaccataaggttgcacaggcagctttctctacacttgcagagattatcccagcttgcaagaagccatttgaaagttacgtcgagcgaattctaccatatgtattttcacggcttattgatccaaaagagttggtgaaaaaaccatgctccataacattggagattgttggtcgaacatatgctattgatatgttgctacccgcgctagtacgctcattagatgaacagaggtccccaaaggcaaaattggctgttctggagttcgcaaataaatcattcagcaagtactctgtggactctgatggttatagtaacagtggctttcttaaactatggctttcaaaattggcacctttggtaaatgaaaagaatgcaaaattgaaggaggcatctatttctggtatcatatctgtttattctcattttgattcaacagctgtgctaaattttattctcagtttgtcagttgaagatcaaaacctcctgaggagagcgttgaagatcaaaacccctcgtattgaggttgatctggtgaactacttgcagagcaagaaagaacgcccgcgccccaaaccttatgaccaggtggattttggaacttcttcggaggatggctatgcactgacatccaagaagagctatccatttgggcggttttcttctagttcccttgatgctgaagggggcaagatgatcagctcgatgcaagaaccagcgctgcataatgtctctataggtcgaacagtttctgatatgagcatggatcatgctattcaaagtttggagtcatctacaggagctgaagttcatttaactaggggtagagaaccaaagaataacagtaacttagttgcggaagctgctcgctcttggacaagctaccctgaaaaaactgatgcctccgtagatggtgaaactgctaccg

SEQ ID NO: 15933 - DNA, 438 bp, Zea mays
  Peptide Sequence Number=SeqID_59308
atggagctgctttcttgtatgtcagccttggatccttccaactcttttgcttcttttgatgcacacaaggaggagttctcctccgagtccgaggggtctccagctcccgtctctcccccggcgtcgtctgatgattcagacgactcccaggggattgccgcggaagtctggacgtacatccgggccgtcgagcgccccgggctcgagggctcggatgagtcggagtactcctcggatgaggaggactcggacggcgtcgaggacgaggatgacgacgacaacgacggtggcgacggcgacggtgacggcagcggcagcggcgacgggagcaagggcagcaccagaggtggcagcagcacgggcagcactagaggcggcagcagcaagggcagcaccaagggcggcggcggtggcagcagcagcaaggccagtggctaa

SEQ ID NO: 15934 - DNA, 501 bp, Zea mays
  Peptide Sequence Number=SeqID_59309
atggcctcagggcaaatgctactgctgaaaagccctcgttcatgtcccctcccgggggacgagaaccagccattaaagccaaagagccggaggtctggagcacaggcggcactaacggtctcgtcggtggaggcaaccgctacggtgggaagcctcaccagcggcggccaccacttcagcaccggtgacagcagccacctgtgcacggcactaccgtcgcccgggtggaggatggacagctacaccctgaccaggcagcagcagttcgccttcccccgcatggctggaggacgtctcctccgcagggctagaggatgcccttctcccccgaatgctggaggaagaagcgggtcaccggcccacacgggaggcaggaccctactcggcgcgccctcctcctcagctcagatgatgaacatccttgaagctgagggcggggcagaggtcgtagcccggcttgcttctccccaccacaaggctggtgttcatccctacggatga

SEQ ID NO: 15935 - DNA, 402 bp, Zea mays
  Peptide Sequence Number=SeqID_59310
atgacccatttgaaaatgccagcaatacccattgcgccctgccaatataatgcaattgagcagcaagttacacaagtctccgctatactggagggagcgcggagcgtcggccgacggctggacaacggtgagtcggcgacacgatgtggacgcgtcacgcgtggtcgcggctcgcgggctctcggcggtgctccgggcgccggcggggtgagcggcgatgcggtagtgctccgacggtccggcctccgggcgagcgcgcggcgggctgcgacggcggcggcgctctgggcgtgggccatgggcggctgcggctccgcgactggcgggcagcggctggagctggaggagggtagagggatctatgcggctagagctggggctgggcgcctcggctggagctag

SEQ ID NO: 15936 - DNA, 1347 bp, Zea mays
  Peptide Sequence Number=SeqID_59311
atgggcatcttcacggtgaccaagctatccgagggccccgtgcggccgtccgccgacacgccgtcggagacgctgcccctggcctgggtcgaccggtacccgacgcaccgcggcctcgtcgagtccacgcacatctactgctgcgacgacgtcgcgaagacgctgctgctgcctgctgcgccggccgagggcgacgccgacgcactggcgccgacgaagaaggaggtgatcaccaagaagtccccggccgcggtggtgcgcgccgcgctggcggacgcgctggtgcactactacccgttcgcgggccggatcgtggaggacgtgccggggcgccccgccgtgctgtgctctgccgagggcgtctacttcgtggaggccgtggccaactgcaccctcgccgacgtcaacttcctggagcggccgctgctcctcgccaaggagcagctcgtgccgtgccccacgccggagctctggcccgtcttgccgcacaacagccttgccatgatacaggtcacggccttcacctgcggcggcttcgtggtgggcctgcgcaccaaccacgcggtggcggacggcacgggcgcggcgcagttcctgagcgccgtgggcgacctcgcccgcgggctgccggagccccgcgtgaggcccgtctggggccgggaccgcttccccgacccggacatcaagcccggcccgctcccggagctgccggcgctggcgctggagtacatagcgttcgacttccccaccgcgtacctcgacgagctcaagtcgcagtacgcggcgtccacgggcggcaagttctgctcgggcttcgacatcgtcatcgccaagctctggcagtgccggacgcgcgccatcgccgccgccctcggccccgacgacgtcaggctctgcttcttcgccagcgtccggcacgtgctgaagctggagccgggctactacggcaacgccatcttccccgtgaaggtgtgcgcgccggcggagaaggtggccggctcgtcggtggtcgagctcgtcggcatggtccgggacgcgaagcgccggatggccgaggagtgcctgcgctgggccgagggccgcaccggcggcgtcgacccgttccagatgaccttcaactacgagtccgtgtacgtgtcggactggagcaagctcgggttcgccgacgtggactacgggtacggcacgcccatgtccgccggcccgctggtgaactgcgacctcatcgcgtcggtcatcgtcatgagggcgcccgcgccgctcgccggcacgcggcttctggccagctgcgtcaccaaggagcacgccgacgacttcgcctgcaggatgcgggaggacctagtctga

SEQ ID NO: 15937 - DNA, 153 bp, Zea mays
  Peptide Sequence Number=SeqID_59312
atggtcgagcagacgataaacacctggggtgttacaactattagagtgaacggaacggagcgtgactgtgagagcgggatgggaacggagcggctccgtccctttgattttttggagcggaatggttccggatctgaggacaatattccctaa

SEQ ID NO: 15938 - DNA, 459 bp, Zea mays
  Peptide Sequence Number=SeqID_59313
atggccgctcacggctcgcccgctcctcgcctggccggccgaccgcctgctcgtccgtccacggccgtggccgctgcccgcctccgtctctggctctggctctggcttgctgcttcctgcgggctgcggtcctacatggccgcctctgccttcctgctgtgtgcggctcgttgggcgttggccgcccggcggccgcacggtcgtgctccacctccactgctccacgactgcttctgcttgcctgctttgttgcttgctttgatgtttgctttgctttgctgtgcctgctccgcctgcttcggtcgtgctccactgctccgcctgcttgctttgctgcttgcaaattcggctgcttgcaaattgcaaattctcctagacccacgacactatggtagagcaagcgagatcgagcagaacggtaggagcgccctcgcggcagacgaggacgaacgaagatga

SEQ ID NO: 15939 - DNA, 48 bp, Zea mays
  Peptide Sequence Number=SeqID_59314
ataatctttgtcctgccgttatgccgccgaaattccgatcgttcgttc

SEQ ID NO: 15940 - DNA, 561 bp, Zea mays
  Peptide Sequence Number=SeqID_59315
atggagagacccgcgaaggaggaggccatctgggagctggcgattgagacaaccggatgtcgcgcagacggactccgcgggggctggctcgaagctgaaccccagatcgatgcactcgtcgcgcggagtaggcacaatatcctttgcttgtctgcagtattaaagtacacaaaatctccaaagtccgcaaaggcaccagctcaagggtggctgggcaagatggtgatgctcccaagcatgttgggacacaggatcaatctagaaaacataaggcatctattcgggaggcgggttcttgcttctgacttcgtgttggaccatcagtctatgtcacgtcagcatgctgctgttattccactcgggaatggaaggacctcaacaaccatccataagagaaactccaagaaagaagatacagctgtctacataaacaataaacaatttttcttctcggactgctcaatctggttttcagtagtgtttccctgtcatctactcatacagggttatgctcttggttgtaatcatgaagcgtcccgatcctctgggactcaaatgtga

SEQ ID NO: 15941 - DNA, 159 bp, Zea mays
  Peptide Sequence Number=SeqID_59316
atgaagccgtggaaggagacttccaggagttccaagactacgacgagttctaggcgtgggatgacgaagccgaagaacacagagccgaagcttagaagacgatccgaagctcaacagatggtgatgaagctcgaatacctagctgtggaaaaattctaa

SEQ ID NO: 15942 - DNA, 261 bp, Zea mays
  Peptide Sequence Number=SeqID_59317
atgaacaaaacactagaaaataatgaacaatggatgaacatatttttcctagtttatttgagtaatgaagaacctaggaaaaatagaaagaaccttagtccagaacaaatccaagattgcaacctcgctgacggagagtacgtgctcatccctgagcaaggagctgtccacgaggaagatcaggagccagctcccgagcctgccatcgaggatctccccgcagccccagcaattgaaggcaagccccatttttatgcataa

SEQ ID NO: 15943 - DNA, 378 bp, Zea mays
  Peptide Sequence Number=SeqID_59318
atggtggctcccaatgacggagcacgagctgcccgcggcggccgccattaccgagctggccgaatcggcgcccccggtgacccgaatcctaacctaacgggagctacacgattcaggggcaagggtttacgcgtggaggaggttctcaccatagatggtgcccagcagagctccatcgacgaggggggcacggccacggcggaagcccaagctccagcgacgaattccgagggctccgaccgccaatccacagtagggagggtctacaccatggattccaagcagaggagggtcgcggatcacgcgcgaagtccgccgtccactccggcgcgcgcgtcgggttctgttgtgatccattgcaatgcggccaaggattga

SEQ ID NO: 15944 - DNA, 297 bp, Zea mays
  Peptide Sequence Number=SeqID_59319
atggcgggcggaaatacgctcgccggagctaaggaacggtggctggccggtgaggggacagggagttgtagcgtcaccaaggtgccagtgtcagaatgcctggtcccgaggttgagctgcgccaaaaccgtgtcaaatggatttggtttgagttcaaattttcccagaatgtgttcaagagaaaccctaggtgacactggggtgtcacacaacctatgctcgggtaaagaagtagaagaagaaggtgttgatgcggatctccaggagttccaggacttcgacgagttcgaagattag

SEQ ID NO: 15945 - DNA, 465 bp, Zea mays
  Peptide Sequence Number=SeqID_59320
atgggcaagaacaacaagcgcaagcgtgagccaactcctccatcggaggagtttggtgactcggagtactcaaaggaacagttctcctctgagtctgaggggtctctggctcccgtccccctgcgtgagtcgtccgacgactcagatgactcccaggggcttgcggcggaggtctggacgtacatccgggccgtcgagcgctccgggctcgagggctcggatgagtcggagtactcctcgggtgaggaggactcggatggtggcggcgaggacgaggatgacgacgacgacgacggcgacgacgacgacgatggcggcggtgacgacagcggcagcggcaggggcagcggcggcggcagcaaggacggtgacggcggcggcagcgggggcagcaaccggggcggcagcagcaggggcagtaccaggggcggcagcggcggcgacagcaacagggccagtggctag

SEQ ID NO: 15946 - DNA, 366 bp, Zea mays
  Peptide Sequence Number=SeqID_59321
atgacgacagaggaagtcagcaacagaggccacaatattcctcccaggcttcggggcagcaacatagctatcctcgacccacagctccaaggggcagaggcgccaggggcttcagaggaagatatacagaatccaaaaagttgccgaagcacgaaaactcgttcaaaagagctcatggatacagaaaatatttccgaagttacaaaaagtcgttttaagaaacacagtagcttacagcgaaaaataaacgctgataccgccgaagtaaaaggcgaagaagctcctaagggaggcttacagcgaaaaataaacgctgataccgccgaagtgaaaggcgaagaagctcctaagggaggcttacaataa

SEQ ID NO: 15947 - DNA, 330 bp, Zea mays
  Peptide Sequence Number=SeqID_59322
atggagctgaagcaagacttgcaaagtggcaagggaggggaaacaaccaaggacgggataggtaaaacaacactcacaaacagaagtgtgagagaggaggatttaaaatgtaggaacatgataagcatcaagacaaacacacaacaaatggtagatttaagacaaaactcgcaaggtgacaaaaagggggaagcaatcaagggtgaattaggtgaagcaccatattcaaattgggatgggaaacaagagcctttaaaggttaggttcaaatcttccgaaggtgtttcttcttatggcaccttcggcgacgaagcagacccccaacagtag

SEQ ID NO: 15948 - DNA, 684 bp, Zea mays
  Peptide Sequence Number=SeqID_59323
atggatcaaaattatcaaatgatggtagcagctcaaggggtgcaacatatagaaagcccatcacaacatgggtctaattctcgacagaactcaagggtgcatcggtcagatgaggtggcacatggttacaatggtaatgaccattcaccaaatatggttgaagatgacttgcagcttactaggcgagttgcaagcactatgggccgtccaaggaatcgtgaagatgttaatactattgaagagcaaagtcgcaggcgagacattgcaacaatggttggtaaagaagtcatattatattctatgatgagatcagaagttcctgttgcaatagcaaatattatctcaaccgatgcaaccactaaggttgcagatgttcctcttggaagggagtttacacaggtttttgtgactctggacccgggggatatctgtcccccacaagcccccgatctttgggctgattttggaataaacggcccaaagatcctaggttcatgcttcggaggtcagcattttgcactgttggacttcgggtttcattgggtgggtgtagccccgagcttcgagtggatttttgcaaacaatccactcgaagcatttttcttcttcggggatgatgattcattgggtgcaccaaaggtgcacccaatgggtgtagcccccgagcttcgagtggatttttga

SEQ ID NO: 15949 - DNA, 504 bp, Zea mays
  Peptide Sequence Number=SeqID_59324
atggaagtgacacctgcgagcagcgtcgcgagtgatgggtcgagcaacccatccttccggctcctggtcggcagaaaagtcggtgtcgtggctcgagctactgtcgccacctccgtcgtctgggtctcctccagcagctcctccaggggctggggtgtccagtggtggtgcagggggcgcctccaggggaagcacaagggagcagctcctcacagactctatctcctactggagcgagaaagaagagccctgctgctcctgtcgtcgacgctcctgctcctcatgcaggcggtggtgcagcctctccaagtggctggactgaccggtcacgggacggcgaagcggacgctccacgagacgggaaggaaagagtaccacttaccattactagagtcaaaaccaagaaccatcaatctcattgccacctgcaaaccgaacatctctgatcaagtaccactaatcactggagctcccttggccgctcataactgcgagcacgactga

SEQ ID NO: 15950 - DNA, 624 bp, Zea mays
  Peptide Sequence Number=SeqID_59325
atgcaagatgccgcacggcgtgcgctttcgcactactactcagtgctcggtggggtagctgatagtctcaacctgaagtattacccccaccgtccatctggcagcacaggaggcatgattgtttcacctgttggtgaggacaatcctaggttgagcagcacagtcaacctagctgccgtgctaaacatggagctggaccatgcattagacgagctgagtagggctcatgctgagatcgccctgctgcgggctgagcgcgcggaacgtcgtcacctggatgatggttcccccgctcccgtcgggactcagcacctgtaccgctcacctcggcgtggacaccagtcttatggcaatcccgacttgttgttgaagaattctatacccttttcttatgctgcaagatttgcaagatcagttctgatgtgtggttgcattctgcagatgtcagaaaacaggcgcagaggaggaaggcgagctcagcaggagcaagccgctcagcaggatgaggtgcctcagcaacatcagctgccgcccccgcccccgatgtccatcgagcagatgtttctgatgcagactcaggcagtccaagccattggtcagactctagccgccattcagcagtag

SEQ ID NO: 15951 - DNA, 492 bp, Zea mays
  Peptide Sequence Number=SeqID_59326
atggtggcgcttccgtttcaattagccgagcaacaagagatcaaagatcctacaggagcaagaacacgtctgcgcaccacaggacagccggctggaggtccgagtctcaaggggcaagaacagggcgaagcttgtagcgtgctgcccaccggccagggcgtgggcatgagcttaattggagatccaaatatcaaagttgtgccaaattcccttgaacacgccctggaaaagtttgaactcaaaccaaattcgtttgacacagttttggcgcagattgacctcgggaccacacattctgacactggcaccttggtgacgctacaactccctgtccctagcctaaaaccgcgcgacatccatacacaaaagacaaagcaaggtcaggtgaacaaatccttcacaacgatcttgcccaaattcgcgaagatttgcacccaaccagcgcttgaacttgggcagaggcaacaggcacacgtgttcgactgtggctaa

SEQ ID NO: 15952 - DNA, 891 bp, Zea mays
  Peptide Sequence Number=SeqID_59327
atgcatatatcttacacattgcattcattagattgtaatctcgccgacggagagtacgtgctcatccccgagcaaggaactgtccaagaggaggaccaggagcaagcttccgaggctgctatcgaggatcttcatgcagccccagctattgaaggcaagccccgctatggtgtgtacaagtgcggtcactacacggcggcagccggggtcagtggagcattgtatgccaaggcggtgcgcttcaggatatggttgatgatgaattcacccacccctgccagtggaggagacactcgtttcagttttgacttcctttctcgcgatggctttccttccatcttgtgtgaagtgcttaactccgccggttaccctacgccccctttgtacacgatgcagttgtatgaggagcatcgggtacctcgttgtcgggtctggctgactttggaggctcatccccttcagccgagttggcgttctcttgattccgagacgattggattcaggacggacgacaccattgaagcggcagccatgaagactctgacgactttttgtggctaccatcccctggagatggtgatgcaccccttgggactcttccctgctgagaagaaggatgaccccatgtggtgtaaccgcgtgagccatgtgaaggatgtgtgggcaatgtatcctgacttggttgggagggtcaccgttcagtgcatgagtgcgctgtacagccttcaggccctccagagcgacgctatggcacaccttgctaacatcgctcaaaccaccaagctcactcttgacagtcgagaagattttgtggtcgatttatccaccgagttggtagagaaggatctgcgggtggaaaggctgagccagcgcattaccaccttggagtag

SEQ ID NO: 15953 - DNA, 375 bp, Zea mays
  Peptide Sequence Number=SeqID_59328
atggcgcgggcactgtttgcatgtctggcgctcgcgttttgcatgttggcgttttgcatggcgcgagcaagaaaggaagccgagacgccagcaaggaagtcgagacgcgagcaagaaaagaaatgggaggcgtgcgattgtaatctctccgacggagagtacatgctcatccccgagcaaggaactgtccaagaggaggaccaggagcaagcttccgaggctgctatcaaggatctccctgcagcccagctattgaaggcaagcccgggtgcgcttcaggatatggttgatggtgtgacttggcctaccaccctgccaccgggttggacggtcgagtgggatgttgctccggcaggagaggagcacgaggagtag

SEQ ID NO: 15954 - DNA, 204 bp, Zea mays
  Peptide Sequence Number=SeqID_59329
atggattgcagcgagctcgcagttgcccatggccgcgagccctctgccgatgcctcctctctgctgctgcgcatgaacagcacgccgtcgacactcgccgattgtttgctgtttttgcgcagccccaacgtcgtcgtcgttcaccccggagagaaccccgtgttttgcgtggagaagaaggcaaaccgctcgacgctcgtcgat

SEQ ID NO: 15955 - DNA, 540 bp, Zea mays
  Peptide Sequence Number=SeqID_59330
atgggggagaagaaagggcgccgtcgagggagcttcaacagtggagcgctcggctgctgggctgctcaccgtggacagcagagaaaggcaggtgcagtggagaaagggtgctcaaaactactggccggagctagggctcggccatgggaaagaagggggaaggaggaaggggagccggctggtggagatgggagagctcggctccatgcagatatggagctcaccatttggagcagtggcagggggcgtccttggctgctgggcgagctcggcatggagaagctgcttgctgccgtgatgcgggaggaagaaggggcgccctgctcttgcacgttgggaagaaggggaggacgccgggagggcgccgggccatggctggccgaggggaggagctcctgccgtcaaccctgcacacgcagagaaagcagcggccaaggggagagcaggggggcgctaggccaaggtccggctagaggtggaagaaggcttgggcgccatggagaggaagggggccgagctccctgcgcgctggggaagaag

SEQ ID NO: 15956 - DNA, 3063 bp, Zea mays
  Peptide Sequence Number=SeqID_59331
atggagagctatctcaaggagaacttcgggggcgtgcaggccaagcactcgtcggacgaggcgctgagacgatggcgcaaggtcgtcggcctcgtcaagaaccccaagcgccgcttccgcttcacggccaacctcgacaagcgcaacgaggccaccgccatgaagcgaaataaccatgtaggcctccgctttcctgatctgtgctccctgcgtttcccctgcttcagcgccggcgttgctccgtcgagtgagtacaaggtccctgccgatgtcaaggcggctggtttcggcatctgcgctgaagagctgagctcgattgtcgaggggcatgatgtgaagaagctgaaatctcatggtggcgtgcagggcctcgcgtccaagctatccacttcggagtctgacggcctcaccacgtccgcggacaagctagcgacccggcgggatgtttttggcgtcaacaagtttgcggaggcggagtcccgtggcttcttggtcttcgtctgggaggcgttgcaggacatgacactcatgatccttgccgcgtgcgcgttcttctcgctcatcgtcggtatcgccacggagggatggcccaagggcgcacacgacggcctcggcattgtggccagcatcctgctggtcgtgttcgtcacggcgtcaagcgactaccgccaatccctgcagttcaaggaccttgacaaggagaagaagaagatcacggttcaggtcacccggagcggctacaggcagaagctctcaatatatgaacttctcgtcggcgacatcgttcacctctccattggtgatcaggtgccggctgacgggctgttcatgtcaggcttctcgcttctgatcaacgagtcgagcttgaccggagagagtgagccagttgccgtcaacgttgagtacccattccttttgtcagggacgaaggtgcaggacggttcttgcaaaatgctcgtcacgacagtcggcatgaggactcagtgggggaagctgatggccactctcagcgaaggtggtgatgacgagacaccattgcaggtcaagctgaatggtgtggccaccatcatcggtaagataggacttatctttgcagtggtcacattcgcagtgctcacccaaagcctgttccggcgcaagatcattgatggtacgtacttgagctggactggagatgacgcattggagctgcttgagttcttcgccattgctgtcaccatcgtcgttgtggcagtacctgaagggctaccgctggccgtgacactgagccttgcatttgcaatgaagaagatgatgaacgacaaggcactcgtccggcaccttgcagcctgcgagaccatgggctcagcgacctccatttgcagtgacaagacaggcactctcacaacgaaccacatgaccgttgtcaaagcctgcatctgtggtaagatcaaagaagtggatggtgtttcggatatcaagaacctgttctctgaactcccagactctgtcatggcgattctctcccagtccatattcaacaacactgggggagacgttgtcttgaaccaggatggcaaacgtgaaatactggggacacctactgagacagcgattctagagttcgggctgtcacttggtggagactttttggcggtgcgcaaagcaagcactcttgtaaaggtggagccgttcaactctgccaagaagagaatgggagtggtaatccagctcccagagggtgcactgcgagcacactgcaaaggtgcatcagagatcatactggcatcttgcagcaagtacctgaatgaagatggcaatgtcatccccctggatgcaggaaccattgatcacttgaaggccacgatcgatagcttcgcgaacgaggcacttcgcactctctgtcttgcctacatagaagttgaggatgggttctcagtcaatgatcagatcccaacggatgggtacacctgcattggcattgtggggatcaaagacccagtgcggcctggagtgaaggaatcagttgctatctgcaggtcggcaggtattacagtcaggatggtcacaggtgacaacatcaacacggcaaaggcaattgcccgggaatgcggcattttaactgaaggtggcattgccatagaaggcccagatttcagaaccaagagtgaagaagagcttactcaactgataccaaagatacaggtgatggcaagatcttcaccactggataagcatacccttgtcaagcatcttcgaactaaactctacgaagttgtggctgtgactggtgacggaacaaacgatgcacctgctcttcatgaggctgatattgggcttgcaatgggcattgctggaaccgaggtggccaaagagagtgctgacgtcatcattcttgatgacaacttctccacaattgtcactgttgcaaaatggggtcgatcagtttacatcaacattcagaagtttgtgcagtttcagctcactgtcaatgtggttgctctggtggtaaacttctcctcagcttgcctgacagggagtgctcctctcactgctgtgcaattgctctgggtcaacatgatcatggatacactgggtgcgctggcattggcgacagaacccccaaacaatgaactgatgaagagaacacctgttggaaggaaaggaaacttcatcagtaacattatgtggagaaacatcctgggacaggccttgtaccagttccttgtaatttggtacctacagacagagggaaagtggctgtttggaatcaagggcgataactccgatctagtcttgaacacactgatcttcaattgcttcgtgttctgccaggtattcaatgaggtgagctcaagggagatggagaggataaatgtatttgaaggcattctaaacaacaacgtgttcattgctgtcctcggcagcaccgtcatcttccagttcatcataatacagttcctcggcgatttcgcaaacactacccctcttacgctcaaccagtggatcgcatgtgtttttatcggtttcataggcatgcctatcgcagctattgtgaagatgatcccagttggatctacgtag

SEQ ID NO: 15957 - DNA, 5364 bp, Zea mays
  Peptide Sequence Number=SeqID_59332
atggagacggctgccgcgaccgcgaggcccggcgcagcgaggaagcggcggtggaaccaatcgcagccttgccaaggggagggtccgagcgatctcaagttcgctagacttcgcttcgacggcgacggcggcgccaagggcgcgtgggaacacctcgacctcgtcctctccctccagagcaaggagctgtcgctcgaaagaaagattgagctagcggtcgaatttctaaccacactgccaaataactcaagctgcagcattcagctattgcggctggtgtcatttattggaaactggttgcagtctatcttaaattttcctgagaatagtaaaaagattctacatatttttgatccagcattggatagtagatgctgggcaattttgagagtgtgtgttgaaaagaaaccatccatttcaatatctctgaacttacttaaatcccttagtcgagttgcaagtcatggtttgggcagagttgatagcaacacatcatgtcctgacaatgaatctattgagctctttgaacaagtgtttgactgcatgtcattgcttttctcttccaatacaagagctttcttcaacgctggtgtggatttatgggcctcttgtgccattgaggttgtcaatcttgctcagaaggtgtcagctaaaaaggacaatttttgccctgttcttcagaagcttgcaaattgcctcctcgggcaattcgcatgcttcctgagattttatgcaaatccgaagaatattttccatgcttttgttgataaggttcttgggccattgttggaattgttagttttacttaattcacaagcacattccagtgaacacaagcagacaggaacaatgttgaaaattgttgaagatgttttttcaaatggactgtttcatccccaacatcttagtggatatttcggtctcaggagtttgaataaatcttctgctgctaaggatatcaaaggaagctaccatagacatctatttcagcgattcaaaggaataaaaacagaaaacaaggctgtattgctggctgggtttggctacttgtttcaattgtttgttaggagggctagaaatcaaagaacaactgtagcaccaagtagaacgactttgggtacgctgcacaaaagcaatgatggttctgaagaaccacaacatagggaatcactttttgaagtgtttattatgttcatggaacccatcgtattagagtgtaaatcgtattcccaaaaggacttctctaagttaggggtgacaaggctagtagaggtccattgcatgctgaaatccattaatgtgatgctgataacccttattgaagagaagatctatgttcctacagaggacacattggaaggatctcacttcaattttttgcaagatatttactctgtcttgatcttaatatctgaaaagatgtacaaattctggatgtctgctgtgcatctagaagatgtaaacattaagaagatagtacctttaatgtttgcagagattatttctgcagttggcaattttctagaaatcgagtacaaagttctaggagacgaccttgtgaaattgtggttaatgatttttgctttgtctgctattaatacatcttccaaggacatcgaaccctgttttctgcttgcttcaaagatttcaagcctctcagcccaagtgatttgcacattcagtgaacttcgtcaggtttcccgctcaattttcagtctgtgtgatgctgtgagggcattcagagttgagggccctgatggagtacatggctcattttctgtggcctctttatcgtcccaggagtgtttgggatcattgacaacactgttgagttccgaaacattgatgggtgctattcgcacttcaattaagtcgatgcctcaaggccagtctagccgatgtatagaggagcttacatcggatctcacagaaacattgaattggatggcagattgcagttttgaagatgatgtaagcaaactcagagagccatccattgccaggaagtctattttttgtcagaaagccgaacttcttggcagacacttatctgaagtatatgctagcattcttgattcaataactgtcactgtttcaaatagtacactggtaggaaaatctgttgaaagaagcttgtatcagcaatctattggcctcatgcctccagatgtagccatagatgcaacaaagttagtggggaatccattcattgtatgttcaggaaaggaatggaccaatccgacgaatattcttgggaagggttattttgcattgatcgatgaaaattcaaactcccttttggatgttattgagagtttatcagagtctctctcaacaaactgtgcttcttttgctccacttgtttacatcttccatgtcatggttctgcagagactcaatgaccttaacaggcagattaaggcatttcaatttttgcttgaagatgatgcttggcaaatagataataaggatataggaaacactcgactgttaaaggaatcttgcagtctggaggctgctaaattgatgagttttgtgatgaattatgtgaagctattatcttcaggagaaactggtccttttgggtcttatgatgttagtagttcctgggatttgagtctatgttccttagatgaaggctcttttcctatagccacgtggcagcttctgtgtgaaaacattgacgtttggagctctcatgtttctaagaaggatttaaagaactttttctctaatttgataaggttttcttttactcaaaagagatcttccctggacaaggagaataatggcactcaatcttcgggcagagaaatgactttgcatagtgtctctattggagtcctttgtgatacaattatttatgaaaaaaaggtaattttgaagaatctggcatcaagtttttgtcatgctttgaagaaatcgttttcttttgttaccaactctgatggagataatgtctttttggacacttcacctgatttgatggagacaataagtaacctggaaaatgagaagttgattggtacaggttctggtgctacgcatgcgcactgcttagacaaacactggatctgtgaggatttccttaatttttttagtgctgttcctggatttcatgcaaattccaaggcattcatacggcttataaactatattctccatcttgaaaggcaagtagaaaaaatgttcacaaatacataccggttccatgctgaggtgtccattaagcgtcgccttagcgagcgcgctcacagggcaaggtgtctagctcgccttgcgctgtggagtaaggcgtccgccacggcggctctgataaatctcatcttgaaattcgggaaagagtgcccagaggcaaggcaatacttgtccttttcaaataaaaatggtaactcatattccctggtttggtttttgagatctgttcaggaaattgttggttcatcacataaaatatttgacgagtgtactgatgagaaacaaattgaatcttcccttgatggtagtcctattaaaaaggagacttcagaacataatgaccaggcatttgatatagtagaagtatcagccttagagtgtgtcagaagtatggctgaattgttgcagaagactgcaactgggatacctgttaccataaaggacagcaagtgtgttatcaaaatagaagactgccgtaacactgtatgttggaaaagattgtcatgcagcatgtcttgcataggaggatttttgcagggacttaattcagcattagaaagcacattcaatgatcacccaatagcaagcccagaggacaggaagatgttgcttcagtattgctcaagatttagcagttatgtcgctaagtttgggacctttgtagatatttgtgttcatgtcttgtttatggataacaaagattctgcctctatagatttagtctctgttcatcttccacaagagctagattgtgcgaatggttttctgaatattgaagcaatcatggatgaattgacaaagtgtggaagtcatggagttgatctgtctaagatacagtacatggaaaatgttcttctggaaaacctgttgaaaggtgaatgcccactcatatcattcactttgagagagatatacagtatatctgctgctatcattaaatttcatggttacctatccttttcaagtgatgtttctaggcagacttgcagccctgtcgaacagctttcattgggtaccatgcttgggatagctttcatcactctacagaaagttgcagacatgtctagctggccacacatgttttgtcttgtatggattgatggggtattaagatatcttgaagtcttaggaagtgcatttacattgtctgagctcaatatttcaatagaactgtatactcagattataaatgctttattgagggctgttggtaaatgcatcttacttcaacagaagaatgctactctccctactcatgagattggctcaagcacgaaaacactgcaattacagaatgcatctggttatgcttttcctaaagatttcattgatacacagaatagattaaattcattgaaatcgaggcttcgactagtacttggaaaatttgtcagtattgcatcaaacacacatctaaatgcagctctacaagtaattgaaagggcattggttggagtgaatcattgcagtcattcaatataccaaatttacactggaaatcctgatggtgggacagtttcttctgatgttgctgctgggatcgactgcctctatatgattcttgattttgtgccaggaaacaagcgcgtttttaagaggactgtccctggcctagttggtgctttattcaacattatactacaccttcagagtccacatattttctatagtcagaacctgccacctcaaggtagtgtgttccatccagatgctggagccactgttctaattgagattgggtggtgtgtggccctcctggaggattcagtaagcatactgctcggttgtttggagtccacagattcgaagatgattaacgtagctggatattttgcttggaatatggaagaggcactaaaatgtgcttcctttttcagaaggatctatgaagagatgcgccagcagagagaaaccctaggaaaacatgccatgcactttcttgctggttatatttccatgttttctggacagggtccttttcagacagggataacacgagaaattgatgaggtcctgagacctggtgtgtattccctgattgatatatgcgaggaaagtgattttcaacagctccacacatacctgggtgagggtccatgccgaaccactcttgctgatctggtgcgtgattataaattacacttccagtatcagggcaagatctaa

SEQ ID NO: 15958 - DNA, 282 bp, Zea mays
  Peptide Sequence Number=SeqID_59333
atggcgggggagggaaggggggaaaggcggtccgttgccaggaggttacgtgccactctcgccatctttccactcccagtgcgtgattctcttttcatgtatggaatagctgggttcaagcttatccatgatgaggtgataaaacatttaaaacacaaggaaggggcaaatgcgcacgggaaggctgaagattgcaggggagtagcgtacaccaccatgggcgagctggaggagcgctggagatggagcaggagcgccgtgagggagaagcaaaggaagtag

SEQ ID NO: 15959 - DNA, 174 bp, Zea mays
  Peptide Sequence Number=SeqID_59334
atgggaaaaaccctaagtatgcaagtactcagcaagacttacccgactaaagaaaagactatcaagggtatggtggttttaaaaggattcaagggcagtgatccagtcttcatatccgagaagtacggcgatccgaatcgattaatacccagctggggatctccaaccacatga

SEQ ID NO: 15960 - DNA, 315 bp, Zea mays
  Peptide Sequence Number=SeqID_59335
atggagagtcatgatctccgggcagaaagggaatcacggcttgtgggtggtaatgagattgatggttctggttatgactatggtgctggtaagtggtattctttccgtttggaaagggttgtccgcattgcaaccactgctcaggagaagatgaagccgtggaaggagacttccaggagttccaagactacgatgaattctaggcgtgggttagcggcaacccccagtcggctgcctgtgaaggccgcgtttatctacgtttcgttttcgcactttgattattgtaaatactatgtggatgtctcagacatatga

SEQ ID NO: 15961 - DNA, 396 bp, Zea mays
  Peptide Sequence Number=SeqID_59336
atgggcgtggctgcacgcgcaagcaggaagaacagcggtgacttaagagtgaatggaacagagcgtgactgtgagagcgggatgggaacggagcggctccgtccgaggcgagacagagagctccgcgtgcaggaagccgacacgcgcagcaggggtgagcagcaggcgcggacaggcggagacagcatccacggcttcaatagaatcgacggcgaggaccgaaacggcgaggaccgaatagagaactggagcagggaggaagacgtgcgcagagaaggtgccagggcgctgggggctgggcgaggtccgagctacatggcggtagagggacgagcgacgggaaggatggagcttgaccggcaaagaggaccgtgcggcttggggagctgggcatag

SEQ ID NO: 15962 - DNA, 177 bp, Zea mays
  Peptide Sequence Number=SeqID_59337
atggtcctaccgacgatgcggattccgcggcgcgagtatgcggaggattcactggagcacgcacggcacatgagggaaggaagggtcagcgcgaggcacgatacactttataccacggtgcgggtacttgccgtcgatgaaaaccctggaggtctaactacccaatttgaacattaa

SEQ ID NO: 15963 - DNA, 162 bp, Zea mays
  Peptide Sequence Number=SeqID_59338
atggggctcggtgtatgcggctcgctctgccaaggtggcaatgagattgatggttctgattacgattatggtattggttgtcagcattgcaaccactgctcaggcgaagatgaagctgtggaaggagacttccaggagttccaagactacgacgagttctag

SEQ ID NO: 15964 - DNA, 474 bp, Zea mays
  Peptide Sequence Number=SeqID_59339
atggcgcttcctgttgacgtggcggacttgtgtcctaggtcgggcgacgtggaggctcctccgaagccgaagtcgagtctgtcctgcatggccgaggccgagcccgagctcctgggtcgggcgaggcggagcccgagtccgagccctgggtcgggcggagcggagttcgccgtcttccggggccttagcccgagtccgagccctgggtcgggcggagcggagttcgccgtcttccggggccttagcccgagtccgagccctgggtcgggcggagcggagttcgccgtcttccggggccttagcccgagtccgagccctgggtcgggcggagcggagttcgccgtcttccggggccttagcccgagtccgagccctgggtcgggcagagcggagttcgccgtcttccggggccttagcccgagtccgagccctgggtcgggcggagcttcctatggcgcctttggcaaggcctga

SEQ ID NO: 15965 - DNA, 393 bp, Zea mays
  Peptide Sequence Number=SeqID_59340
atggtgacctccggcttgatggtgggggaaagcgagccgggctgcggcctctgcccctccctcagcctcaaggattttcatcaccagggctggggaggggagtgtgccgagttgagcgtgcctggccttcggatgcgagtggcttcggagccgctcgcggcgccggcgtttgccacggcaactggaagaggttcttccaccggcgcgacagccaaggctggccacggaccgacctccaactctacggccttctgcccgtccttgcctctcgagtttgggcaagggcgggggcctcctagcagcagcatccgccctgaggtcatcactgctgctgttcggccccccgggacagaagtcttcatcgtcgccgctgctggggcgggcgatgactag

SEQ ID NO: 15966 - DNA, 1077 bp, Zea mays
  Peptide Sequence Number=SeqID_59341
atggctgaaagaccaacgggcgaaaggggcgggcagccatgcaggcggcatgcaaccgcgccaagtggacgcgcctctccgactcccgacacgctagcatggaggcccaggcccacgcgtcgcgcgaccggcgcgccggatgctgcatgcaagcaactgtaccacctgtgccaccaccgcacctcctcgattgcggaaccgataccgcgacccgaggcgacccagcgcgcgacccagcagcgccagcctgacgcagcggtcaacgcggtcaaaagtgggcctgtagtgatgacggtggcaggcacgcgggagcagcggtcacgccgtcagccaagctcacgtcccatccggaggcagcgagagaaccccctctcacggcgtgaagacaacacgcccgtgacccgttcctcgaacggctcgcgcacgcgcaacggcagccccgccaactactcgccccgtcgcattaactccgcggctggacaggcggcgcttctggcaggagcagcgggcgacgcttcgccttcgccaaaacaaccgcaccaaaaaaggctggccccccgaagggttcaacagccgcctcagatcgcgtgggccctacacccactactagttagaggttcgaaggccggccccccgaagggttccacggccgcctcaggctactcgggctccgcgcccattactgatcagggcgggagcgatcctgtaacggaatcccatcggagggaggcatcgagccctcggaccccgtcgccaggggaccgggtccggcagatcacccgcagctcaccggagacaccatgttcggtgcccatcgagggtaacatggcgctctcccccctcctccttgcggaaaggcgacgtaggggcgtatgtaaaaaagccgagtctgtccctgatcgccctctcgccctgtgcggaggctcgggggctgctctcgcaaacccggctccggccaaaccgttgacagcgtcaacataccagcccgagaacttgggccccgaccgtgcacccgggctacggccagttcgcatgagggaaccaccagaccagccgaagcattacgcaaggcattaa

SEQ ID NO: 15967 - DNA, 162 bp, Zea mays
  Peptide Sequence Number=SeqID_59342
atggggctcggtgtatgcggctcgctctgccaaggtggcaatgagattgatggttctgattatgattatggtgctggttgtccgtgttgcaaccactgctcaggagaagatgaagctgtggaaggagacttccaggagttccaagactacgacgagttctag

SEQ ID NO: 15968 - DNA, 222 bp, Zea mays
  Peptide Sequence Number=SeqID_59343
atgtcgcgtgcgttcgacgactactatatcgaggattgtggcgtcatcttggtgccggaggtgacacagaggaggatcgacaacagtgaccagttcgtcatcctcgccaccgtcagggaatttttccggcatgtgtggaacgtgctcgtgctctccaatgatgagaccatacaaatcgtggcatatatcgaagtctgcatgatactgatggttgcaatgtag

SEQ ID NO: 15969 - DNA, 1416 bp, Zea mays
  Peptide Sequence Number=SeqID_59344
atggtggccgtcggcggtgtgcggcggaagcgggcgtggcggtgggccatgcgggcggtggccagcgccgtcgtgtggaccgcggtcgtgcaggtcgcctccatcgccgggctgttccgcccgcgggtcgtcgccgactgcggcgggaaaggcggcggcggcgccgcggccgggctcgccgctctcgccggcgaggacagcgccgccgcgaggctgtcgccgccggcgctcgtgcccaagaccgtccttgttcctgttcctgtcggcgctagagctgattgggtttccctgataccccccctacaggaatttacaagagcaacggctatctacgatgccgctgttccttcctcattctgtctcaagtttgtaagaaatggtgtgctgcagatatgcgatatggttactatagcacgccatctaaatctaacgcttgtggtccctgaattggacaaaaggtcgttttgggctgacccaagtgattttggagatatttttgacgtggaccacttcattaattccttgagagatgagctgatgatagttaaagagctgcctttgaaactccagttaataagaactaagaagagactgtactccatgtctcctgtcagctggtcgaatgaaacatactacctaaagcggatactacctcttgcaaggaagcacaaagtaatccatttcgataaatcagacgcccgccttgcaaacaacggccttccagttcagctccagatgctgcgttgccgtgtaaacttcgatgctttgagattcaccccacagattgaggcccttggcagacagcttatctccactctccagagaagcgggcaattcgttgtgcttcacctgcgctatgagatggacatgctctccttttcaggctgcacgcatggctgctctactgaagaagctgaggagctcactagaatgagatatgcttatccatggtggaaagaaaaagagattggttctgaagcgaagaggcttcagggactttgccccctcacgccagaggagattactctagtgcttaaagctctagggttcacaaaggacacgctgatctacattgcttctggtgagatctatggcggcgaaaggcgcttggcagtgctcaaggctgcgtaccctaaactagtaaggaaggagaagattctatctcctgatgaactgcggccgttccagaaccattcgacccagatggcagcgctggattacatggtggacgatgagctggacggcgtgatggcgtcgtcgtcggatgcggtgtccagaacgacccgagagtcgtcgacgttggcgacaaccatgaggcccctgcttaacgatggacagcgcggtgcagctgctctggaccgcgtccaagcggcggcttcgcgggagcttgtcgtacacagcggcgcatgcgaccac

SEQ ID NO: 15970 - DNA, 786 bp, Zea mays
  Peptide Sequence Number=SeqID_59345
atgcccggaagagagagagagaggatcatcaaaagggcaggccacaaaatatcctcaaagcctcccagaaaaattcctcccaccgcgcccgcgacagcgacgacgacggcgacgagcacggggcccctccaccgcctccgcctccgcctcgccgcgtgcggccaccgcgccgccccgacgtcgtcccctccgccctccccctcggccctcgacgcgccgccgcccgccctccgccgccgccgccgccgcggcgggctcggcctcctctggaagctcccctccgcccgcgcgccgccccgcccggctccgatggacgcgcgcgcgcccccgcctccgcagccccatccgccgcgcgccccgtcgccgcagcccccgcccgcgccgtccaggaggtacggcctgcacttctcggcgtccagcttcatccaggcgccgctcaccgcgctgctcgagtactccggcatcctccggcccgatcccggtggtggaatccaacagccagggaccggggccaggccgggcgaggtgtcgatccggattgtggcgcccggcgaggcgggcacgtcgtctgagagggccgaggaggtgatcgtcgaggaagaggaagaggatggacaggcaacgaggacgcgccccgaggacccatcacctgccgctggcggcggggagggcggcagggaatcctcgtcgtcgtaccagcggtacgacatacagcaggtggccaggtttctttgtgacaatttggattgctgcggtgatgttcaagtccaacgatatcctgtgtaa

SEQ ID NO: 15971 - DNA, 591 bp, Zea mays
  Peptide Sequence Number=SeqID_59346
atgtggagacgtgggagctcattgggcgtcaccgcgtcagtgaacccaaccggggatagagggagggacgaggagccctacgcacgcgacagggaactggagcgcagccgcggcggatctgggcggagccgggtaatcgaccgctaccgcgaggagcgcgattcgcgattgccccccaagaacgggagaatgagacgcgagtgttacctcttgcgccgcgacgcgggaggccggcgggaacggttgcaggcgaggccgaggggaggcgaccacgcgtgcgcggccgtgggcgccacgggagtggcgcaagcgaaggccgggcgcccggacccggaagggcagagaggggggctcgggaagcgctccctccgccggatgcgtgacagcgtgagcatcctcacgatggcgcctcctgcacctggcctcgctcgcaccaaaggcgaagccgacggctccgccgctgctccagccacaaacgtcgccggtggtcaagccctccccttcgccactgctcaccacgatgtcgctgctccaaccttgcaacggcgccccctgcccttgtccccacccgcggccccgctgctgctctag

SEQ ID NO: 15972 - DNA, 1074 bp, Zea mays
  Peptide Sequence Number=SeqID_59347
atggaggcccaggcccacgcgtcatgcaaccggcgcaccggttactacgtgcgagcaactgcaccgccactcgcaccactaccacgcctcctcgactgcggaaccagtaccgcgactcgaggcaaccctgcgtatgacccagcagtaccagccaggcgcgacggtcaatacggccaaaaatgggccgacagtaatggcggtggcaggcgggcaggagcagcggtcacgtcgtcagccaaagcttatgtcccatccaggggcagtgagataaccctctctcacggcgtgaagacgacgcgcccgtgttccgttcctcgaacggctcgcacacgcgcaacggccgcctcgcgaaccactcgccccgtcacattaactccgcggcgggacaggcggcgcctcaggcaggagaagcaagcgacgcttcgccttcgccataatgaccgcgtcaaaaagggaccgggaaagggggataccccgaaaaggatccttctccgtgaaggaaacatgccccgagcctccctactgatcagaggttcaaaggctggcccctcggagggattcaacagccgcctcagagcgcttgggttccgcgcccactactggtcagaggttcgaaggccggcccctcggaagggttcaacggccgcctcaggccactcgggctccgtgcccactactgatcaggggttcgtaggctggccctcgaagggttcacagccgcctcagacacagagcgagggatggccctgggtacgttcgatacataaccaaggctcgggctatgctcccgagggagatttgagtgatgcagcggatgtcgattccgggctacgttcgggctggggcatcgggaaccctggcgtggccctcccgtgcattgtgggtcaccagcacgtcggggactcctcaccggaatcgtccgtactccgcgatgccgctgttctacgtggacggggatctgcgcgcctgggaccaataatcgtagtcgggcttgggcgtcgtggtatgaactctggtatgggcgtccgccgtggtggagttcctgacgccgtcgcgctcgatagctggaggtag

SEQ ID NO: 15973 - DNA, 342 bp, Zea mays
  Peptide Sequence Number=SeqID_59348
atggcacccaagagagctagctcgaaggcaaccccatccattgacaaagcagcgaaggcagcgctgctagccgagaaaaagggcaagacccttgcagacaccacccaccaagaagcctgcgaagactacgcactcagcaagagacagcgcaacgaccaacccactcccgaaggctccctccgcacctgcagctccagaggacagccacaagaaccacccccaggcttcgctccactagagggcgaggacgccacaaaagacggcgaaatcatcggcatcccagccgaggaacagctacagctgcgggccctgcgcatcaagaaccgcaacctccagaaatag

SEQ ID NO: 15974 - DNA, 1095 bp, Zea mays
  Peptide Sequence Number=SeqID_59349
atggcggcttgtcgtggcacgcggcccagcctcgccccgtcccggcgtgcagccatggcggccgcggcgcccgtgcccggccccggccccggccccccttccccgcgtctcggccggtcggccatggcacgcccgcgcccgcccgtccccggcggcgctcgcccggtccggtgtggccccggctcgccggtgcgcggccgtggaaccccccctgtgcccccgcctgcgcgcggcggcgttcggcccagcgcccaacccccctccccgtggcccggcgccccgcccggcgcggtcgcgtcgcccctacccggcgcgctcgcgcggcctgcggctcggcgcagcgtggacgtggcgcggccatggcgcccgttcccggcgcggtccgtgcagtgcgcggtgccctcggcgagctcgccgcaccaacggctcgcggtcgtgtcgctctgccccggcgtgtgcgcgacacagaacgatccggttgaggagcccgaagaactcggaggagaagcccctgagcagcagttggttggtggaggcatgtcgagtgaggacgtgggatggagagacttcatcgtaggccttcgtcttgcagtgaatagggcgaaggggtgggccgcgccggtcatcttgcctccgctggtgcagcgagttgacgaaggcctggagcgaagggtagcgtcttcgccttcgctccaacatttgccctccgagggaccagttcaactgagtcatctggtgctgaagacgtcgctagatggtggaggtggagacgctgcccttactcgaagtggttccgcgggggtttttgatgtgaccgttgacggacgtgtactgttggactgcggccttcccgaagcgtcgcatcctgtgtataaaaagggggtaggcggtgcggctcaggctttcttacctttctgcgcgtcgcaaaaccctagcattttgaaaccgtttgcccgctcgcctgccctccttgctcttgttcatcggagatctggcccgcgtcaagcagaccgcgcgccgccgccgacggtacgtagccatgtcgtcttcttcttcatccgctgcgaatacgccgccgggcaaatcgtcgtctga

SEQ ID NO: 15975 - DNA, 897 bp, Zea mays
  Peptide Sequence Number=SeqID_59350
atgtggcctcgtgcgacgatagcggcgtgtgtcgcgactgtgggggtcagggaggcgacgagggggaaggacgaaggggagcttgcggacgtcggcaaagtgcaggaatggagcgggaggggaactggtcaaagaagtggagatcgtggagagggaggctacggtagtggagctgaccgagcggttgggcgcgacgtcgtgcagacggaggttgccaaagaagactgctgcagtcgctggagtatgggtcgccccaaacccaccaacagaattcttactatcaagtccgcgcccacgcttataagccgcgccatgtctcctttagtagccagtatggtgctaaattgttgcaagacagcaggagagcggttcctcggcccatcaatggaaccgcgcggcccatttgctgagtgtcgcgcggacggcccatttgctgcgaggggtgctgcgagtggggcgggcacctcggccccgggcgcgtcctggtcgccgtcgcccgtcgccctgcgacgcgaccctcaggcgggaccgcgggagagcggtcttcttcctcagcgcaaccgctcggtcagccactcagccccactctcgcatcctccctccccacgacctccacttccttggcgctggatgatgtcgctatatggtgccgcgtccgacgctgccgccacgccggtgctgcccaacgtgtacagcgcgctgctctgctttgaccgcctctccgagctctcctctgccattgacgagttctcaagtgggtatcaacaagactgcgcgcgtgccggagaacgaggacgactgaaatcacatagaggaaactcgaatacaatagtggctcttgctgggaacaaggctgatgtgttagatacgaggcaggtgtcagcagatgtatgttaa

SEQ ID NO: 15976 - DNA, 429 bp, Zea mays
  Peptide Sequence Number=SeqID_59351
atgccgcgcggcccggctactgttgccttgcgcgcgctgctcctcggcctcacgctgacgatcggggcccacaccgtcagcctgaacaccgcactcctccactcgtcggtcgcgcgcgctcggtctcactgctccgcggaccccgctgtcaggcccatctccaacaccgggagcttcggaacgaactcgtgcgcggactccgtccgtcctccccgtcaaccaaccccgagcatggcggaccgagagcgttgccgtccttgcttcgggaaaggcgagattggagtcctctggcgcgtgtggattgtgtgggtgtcaaccggaaggtttggggatcgtcgggccaacggcaattgctcaccgttgttcgctctcggccgcatcctcacccggtgcgtgggcggctacaaccggcagctaatcaccgttaag

SEQ ID NO: 15977 - DNA, 426 bp, Zea mays
  Peptide Sequence Number=SeqID_59352
atgcgcgcaaagaattggaaaacggtgcaggggcttacccggtccacgtgcgccggcgggttcttgaactccggtgagcacgattgggcgagtccggtgacgcgggtccccgggtcaagcttgagcaagtctcacggcttccccaggaagctaactgagggcctggatcgaacggaggaggacgggagaggggctggccacggtggttgctctcgggcggcactggcgggtcgcggggaggtcgccggagctaatggctggctcgggcaagtccggcgagattgtaatcttgccgacggagagtacgtgctcatccccgagcaaggacctgtccaagaggaggaccaggagcaggcttcagaggctgctattgaggatctccccgcagccccagcaattgaaggcaagccccggttttatgcataa

SEQ ID NO: 15978 - DNA, 381 bp, Zea mays
  Peptide Sequence Number=SeqID_59353
atggcgggcggaattgagctcgccggagctaaggagaggtggctggccggtgaagactgtaaccttgctgacggagagtacgtcctcgtgccggagcaaggagctgctcaggaggtggccccggatccagcaccagagcctgcaccagaggacctgcctgccactgctttggaaggcaagccccgtagactttgcccctcactcgacctgagacgtggtctcccattccggttatggtgggtacaagtgcggtcactgcacgacggcagtcggggttctctggaggacatggttgctggagtgacttggccgtccatcttgccaccgggttggactgtcgagtgggaccctacctcggctgaggaggagcatgaggagtga

SEQ ID NO: 15979 - DNA, 249 bp, Zea mays
  Peptide Sequence Number=SeqID_59354
atggggaagcctgtcccatcactcctcatgcttctccttagccgagtgaccgcacttgtacccaccataactggaatgggagaccacgccttaggtcgcgtgaggagtaaagtctgcgggcaggttcactcaggtatccgcacgttaatccttattccaatttcatctcgtagaccacgcatccccattgatccgtgtccacagaccatcattattctgttatcaaagtggatacaaccaattccttga

SEQ ID NO: 15980 - DNA, 156 bp, Zea mays
  Peptide Sequence Number=SeqID_59355
atggggaagcctgtcccatcactcctcatgctcctcctcagccgagtgaccgcacttgtacccaccataaccggaatgggagactacgtctcaggtcgcgtgaggggcaaagtctgcgggaaggttcactcaggatttagtaaccaatttgcgtga

SEQ ID NO: 15981 - DNA, 1272 bp, Zea mays
  Peptide Sequence Number=SeqID_59356
atgacgaatttgatgtcaccctgttcgccgactcggtccgcaaatgggctgttctccttcgcggcaacctggcgaaggtcttcgagtcaattcccggcactggacagcgacggggaacgcaatcgcgacggcggcggtgggttcgtttccctcgacgagcgcacggcgaactggtggctgaagttaaacggtgaaaatgaggggggagaagaagactcggtccggtcctttataagcgcacgggcgacgaacttgggcacaacgtccactgccatgaagatcgggatggctcccgcggagctcgggattcggttgatgatggaactgacgaggtcgggccactggcaagaggcaacccggacagtctctcgtgcttcgtcgaccttggagggcagtctagctcgcgaggacacgctgaccttcaacgccgctgatcagagtcacccgacctctctcggcacaaccgagggagcttcagctttggaggtggccgctaaagaggacccagcccctgagggtgttgggctaggctcctcttcggctgcttctatagacgttcacgtcggatcaccactggttcagtctaaggaactcatggtgacacacttatctgctgctctcgttggtccgatcaccttagaggccagtgatccagatgctaggagttcgctgcctgctgatggagctgaagtcccttcgagtcgtgctttcaacatcattcctgttgacacccccctcaacaagcagtgcaccaatgcttccggctttgggtcttcccttatttctctccaatcttcagctttgactcggagatgctctaatgccgaggagaagtatactcggagccaggcagacctgaaccaaacctctgccttcttggacattgcctgcaccttgaattcttctttgaatgctcagcttgactcagagaagatagcttatgaggaggagaaacgaacgctcattgtgcaaagacgcggcgaggggtcgggtcggcggcgatggcgctgcggctacgcggaggaggaacactatcccttcgggataactccttcaaagacgaagcatgtttttgaggaccttcgacagacgaaggcccccaacatggggtgcagggagctagaaatggtcgggggtggggcggtcgcgacctcagcgtgcgacatggaagcgaagtgcatggcgtgctcgcaggtcgtgctcgctgacaggcggggcccgcggaacagcgggagggggtgtgcgagcgagtggggcggcgctgataggtag

SEQ ID NO: 15982 - DNA, 456 bp, Zea mays
  Peptide Sequence Number=SeqID_59357
atgatggtcctcgcctcagttgctaccacctcgttcgtcattctacttattttctctctcccctcaagcctccacttccgcaccaccccatgctcggtagagggcgtaggagcaggcgcctcctacccgtattcgtccgacaccaaccccgacattgactcgcacaatggctattgcacgtccacgaggacgtttcacatcatgcgcgcaccatcgttttcgccgtcgtcggacgtctcgttcgtctttccggctttcgccctattcttcctccctaacctgctacccatggttgcagccgtaagccgaccgacgctcgtcgacacaggtacggggcgagtcggtcatgctcctggcctttctccgtgcgtggcgtcgaggaggacatggtggcgcctcccactcttaggttatcttagcaatgaggagtccatgcctgatatattggacaactaa

SEQ ID NO: 15983 - DNA, 546 bp, Zea mays
  Peptide Sequence Number=SeqID_59358
atgcccttcttcttgtctctcaaccacgatcgcggcgctgaccacctgagtggtagcggcgacgtagatcaagaggtcttctccggcggcgggggcaccaagatgggcgcgttcgtaaggagtgccttcaggttcccgagggcttcctcagcctcggaggtccaagtgaagcactcggtctttcttaagaggcggtacagggctcagggccgcaaggcatcccatgaccctctgtacgcctttcaagtccttgatgggccccatgttggtgatggccgcgattttctcagggttggcctcgatgccccgctcggagacgatgaaccccaagagcatgcctcgggggactccgaagacacacttctcgggattgagttttacgccctttgccttgagacaccggaatgtcgtttcaaggtcggaaaggaggtcagaggctttcctcgtcttgactacgatgtcatcgacataagcctcgaccgttcgaccaatgtgtggcggaactgcacgaattattctgacttaagtgcctacgtcccgccttag

SEQ ID NO: 15984 - DNA, 327 bp, Zea mays
  Peptide Sequence Number=SeqID_59359
atggcgcccgaggctggacttggctgctgtcagcctcactttgtcgagcggcacagcagtcggagcgacgcaggcggcactgtcttcttgtcaggccgtgtttttcgccttcggctcaaaaatgctaatttcgttcacaccaaagcacttcatacatttatgggaagatttcaggaatgcaacagcagtgccccgagaagctaccagggcacagaaatcaccatgtccagcaataacatcatcaaggtcatcaatttcaccttcgatgtggtcaaaggctccaggcttgttaatgatttttgcaaatctgaaaccttctggacttag

SEQ ID NO: 15985 - DNA, 420 bp, Zea mays
  Peptide Sequence Number=SeqID_59360
atgggcaagaacaacaagcgcaagcgtgaaccgactcctccatcggaggagtttggtgactcggaatactcggaggaggagttctcctccgagcccgaggggtctccggctcccgtctctcccccggcgtcgtctgatgactcggacgactcccaggggatagccgcggaggtctggacgtacatccgagccgtcgagcgcgccgggctcgaaggctcggatgagtcggagtactcctcggatgaggaggactcggacggcggcgacgagggtgaagacgacgacgacgacgacgacgacgacgacggcgacgacagtggcagggacggcggcgacggcagcagggacagcaccaagggcgacagcagcaggggcagcaccaagggcggcggcggcggcaggggcagggccagtgcctag

SEQ ID NO: 15986 - DNA, 339 bp, Zea mays
  Peptide Sequence Number=SeqID_59361
atgactttcggcaaagaagggaagaagcctacaaatactctgagatggccaggggcttcagaggaagattccaccctaggcatgttaggtcaatccataatgctagctcaagtgacgacaggggaaaccatactcaaaggcagtagcacagctctcagtcgtcgggaccacaacaaagctcttttaggccaccgactccaagaggcagaggggggagaagcttcagaggaagatatggagatcagcccaggaaactattttgtctgttctacggagaagataaggggcataccacaaggacgtgccaagttacgatttagaagcagaaagaatttgtag

SEQ ID NO: 15987 - DNA, 315 bp, Zea mays
  Peptide Sequence Number=SeqID_59362
atggctggaaaaacatcctcaaaacagaccgtaaagaccggaaaacaacactattcaccccgttccgactactgtgccaaccaccagggtaaaactaacatcagtaagtcacgacctcccccgagttcagccaagggcgcaacagaggtctccgtcttgcccgacctcgggcctcggcctcagcctcggcctcgggaggagtcacaacctcgcccgacctcagcctcggcctcaggagaagtctccgcctcgcccaacctcggcctcggaccgactacgccacaggggatacatcattaccctacctctagctag

SEQ ID NO: 15988 - DNA, 174 bp, Zea mays
  Peptide Sequence Number=SeqID_59363
atggcgaggagaagctgggctccctgctggccgccgtggaaaccagggaggaagaaggggcacgctggccatggagctcctgctggtaaccatggaaaggagagcagaggtgctgcacgattttgtttgtacgcaaaactgagtgaactagagttcagacgaacggaagattga

SEQ ID NO: 15989 - DNA, 609 bp, Zea mays
  Peptide Sequence Number=SeqID_59364
atgacgacagtcggggtcaatgaggcattgtacgccaaggcggtgagccctgttctgttgccaagaaatcgatggggatggttgatatgtgtggggacggagtgcctcgccatgtcggctgaggatactatcaagtccaccgctctccacgtgctgacgaccttttgtggctttcaccccttggagctatcaactcatcccattggcttactccccgctgagaaggaggacgacccaatgtggaaggatcgagtggagcatgccaaggatgtgtgggctctttacccgaggcagactgctcacctgatggtgcggtgcatgaatgccctgtatcatctgcaagcagtgcgaggtgaggcaatgtcccaactgatgggaatagtggagtctaccaagatcaccctggataacagggaggaccttgtggtagacctgtccactgagatggtggaaaaggacctccaggtggagcagatggccactcaaatccaagagcttgaggatcaggtaggggccagggagaacaccatcgaggttctggaagatcagctccagaccacgcagcaacagcttgaggaagccaaccagcatttggatctgcaccattag

SEQ ID NO: 15990 - DNA, 366 bp, Zea mays
  Peptide Sequence Number=SeqID_59365
atgcagattattgaaagaaagtgcgaggctcaaaagggtgctgggataaggaaaaaaacactcgataaactcaccgatcaacctggaaatctgataccacttgatagagctggagtgcccgatctttcgttcaattatcttgcccgggcccaagtcactggcccaggtggaaggggtagcgcctggactggggaagatggtgcctgggctggagaaggtgctgctggtgtagatgtgctcgtgttggtgttgatgtcctcatcagcgggtatatgccgtaatatggttatactcgcgacgagaaaagatgtcttatatgagcgtgatcgcagcccaataattattggaggcgagcagcgttcataa

SEQ ID NO: 15991 - DNA, 930 bp, Zea mays
  Peptide Sequence Number=SeqID_59366
atgccaatgcggaatcgaacaaggatcgtcgcggtctcaccgggggtgaacgatgacgacattggggctgcgcaaaaacagcaaaccaccagtgagcgtcgacggcgtgctgtccactgggcttcacgaaacagcgagccgacagcgcgcggagacgttggtgctgctacgcacaacataatatttcccacgggcattctgtcaaacacctacgacgcgtcgatgttgtggggctgcgggggaagcttgtttgcgaggagctgcgctaccgaagagggaaataggggcgctgtccttgggagggagtgcagctgcttgtcgctggggacagagaggggcagggaaaggcgctgcttgggcgcccggatgggggagccgagggggaggaaggggaatattgcaggggcgccatggagcaggggaacagggagctcggcctgctgggaggaagatgaacagggagggcgctggaaaattttctgggcgccatccatgggagctgctgctgctgctttgtgtagaagctcggccatgggacaaaaacagcagggccagacgtcatggaagccgcagggggcacaggcgccatggctggacttggcggccaaggaagaggagagagcagagaggggcttcagctgctggttcccctggccggcatcctgcagcatgggcgccgagcgccatggcgaagagaagctgggctccctgctggccgccgtggaaaccagggaggaagaaggggcgcgctggccatggagctcctgctgggcgccatggaaaggagagcagaggtgctgcacggcaggaggaggaaggagagcgtggggaggaagagaaggctgttggcggctaaaaaattttgaggggtgggagtgcaaaatagccaagtgcaatgaaggagcacccctatttattgaaaaatgctag

SEQ ID NO: 15992 - DNA, 474 bp, Zea mays
  Peptide Sequence Number=SeqID_59367
atggcggtggcaggcgggcaggagcagcggtcacgtcgtcagccaggcttacgtcccatccgggggcagcgagagaaccctctctcacggcgtgaagacgacgcgcccgtgttccgttcctcgaacggctcgcgcacgcgcaacggccgccccgcaaaccgcacgccccgtcgcattaacttcgcggcgggaaagggacaaggaaagggggataccccgaaaaggatccttctccgtgaaggaaccaggctccgagcctccctactgatcagaggttcgaaggctggcccctcggaagggttcaacagccgcctcagagcgcgtgggccccacacccactactggtcagaggttcgaaggccggccccttggaagggttcaacgaccgcctcaggctactcgggctccgcgcccactactgatcaggggttcaaaggctggcccccgaagggttcacagccgcctcagacatag

SEQ ID NO: 15993 - DNA, 188 bp, Zea mays
  Peptide Sequence Number=SeqID_59368
cccggagtccgagcccctggggttcgggcggagacggagttcgtcgttcttcccgggtcttaaaccccgagtccgagccctggggttcggggcgggagcggaagttccccgtcttccgggtctttagcccgagccccgagccctggggtcgggcggagcggaagttcgccgtcttcccggggtcttag

SEQ ID NO: 15994 - DNA, 897 bp, Zea mays
  Peptide Sequence Number=SeqID_59369
atgtcttcttcctcccttatgcgtcgtgtctttccatcttccaagcccccggatggggggtatccgccgcctttccgcctcctcgttggaggaacgcaactccgtgggagttggtatctctcagccatcgttcggcttcaaggattttcatcatgcggcccggccgcacccccacgccggcggtcacccaggatggtgaccaccagttcctgggtggggaagagcaaaccgggctgcgatcttggtcccaccctcagcttcaaggatgttcatcatcctcgctggggtgggggccacgctgagccggcgctctacctcccgcgcgggtccgcgggtcacccttttccgcggcgttcgggggtggaggtgctcgctggccctgcgggcggcgcggacttagacaacgtggggctgatcgacggcgggcgtcgtcacctccagcgtgtcggagtcgtcggccgggcgcccggcggcccctcctgccggagggcggccgccgcgccgtgtgcacgggaggaccacccacgatgccgcgcgctgctagggcggcgttcgtgttctggggtggccctgcttttgcactgggatggtgccctcgcgcagaggccggcggaggcggctcgagaagtcctcgtcgccgacgggatcactgccaccatccgcgccccgggccactgcgccggcgtacttgtcctcgcccctcgagcgtcggcgtgggcgagggcaagatcgcagcagcgcccgcccactgtcgccgtagtcagaacgggcggcggcgagccgctcgaatccctcggctcgatcggccttgttgtctggggctcctctagcttagttaaagagacccctcggccgctcttcgatgagccgaggccaggggtagcgatatcagtatga

SEQ ID NO: 15995 - DNA, 789 bp, Zea mays
  Peptide Sequence Number=SeqID_59370
atgccatatggttatgcatttagcatcatgatttcagcattgcacagaggtggtcatcaccaagaatcgaaacagcttgccaaagaattcgagtctgagaatgcatcatatgatctggttatgcttaatacatcactgcgcacttactgcagcacaaatgacatggagagcgtaatgaggatgctaaagaaaatggatgaatcaaacatatcacctgataacattacatttaataccttgataaggtacttctgcaatgcaaaggagctttgttctcatgtaatggtacagctaggaaaggcaggtttcccttctgaagcattttctgtgtataatatgttgagatatagtaaaagaacagttcacaaatctcttcatgagaaggtcttaggcatcttagttccagcagaacttctcaaagctgcttatatagttgttaaggacaatgctgatctgatatctccttcttctttggagaagtttgctaaatcgttcatggtctcaggcaatataaatctaattaatgatgttatgaaagccctaaaccgctccgggtggcgtatcagccagactcccaagcaacctctaaccgtcaaggaactcgaggttccaagagtaacaaatccgcacacggttaagtttgcaacgagctcaagaacaagagaatgggagaatcgagatgaaattgacagcgagttcgatcgagttcacctcacaccaagggtccttcaaatgattgaaggagatgcgattgcgggtgtgaaaggtgaaatgaatgcgcttgtttga

SEQ ID NO: 15996 - DNA, 189 bp, Zea mays
  Peptide Sequence Number=SeqID_59371
atgacgcttcctgttgacgtggcgggtctgtgccctaggcggggtgacgtgggggctcctccgaagccgaggttgagtctgtcttctgttgccgaggccgagtccgagccatggggtcggggcgaggcggagcccgagtccgagccctggggtcgggcggagcggagttcgccgtcttccgggtcttag

SEQ ID NO: 15997 - DNA, 1431 bp, Zea mays
  Peptide Sequence Number=SeqID_59372
atgcacatcggtgctcggaatgaagagtattatgatggtggtgcagagtccggcctcggcggtgctccgggtccgggcgccggcggggcgagcgtcgctgcggcctcgacggtgaatgatacagccacccagtcgggcgtcggtggtgctccggcttggctgcgctgtgccgatgcgtgctgcggcggcggccccaggctcatcaagaacgccgccgccctcttcgccgcagccgtcagccccctccactcttgtgaacagagcacaaacgcgcgcgcttgtagaatgcccgcctttcccgtccgcgcctccgcttcgtccagcgtcgtcggtagcctcaccggtacccgccgccccaggctcatcaagaacaccaccgtcatcttcgccaccgccccctccaccctcgtggccatgggcgacgccgtggagcacctcaagagcgggttccagaagttcaagaccgaggtgtatgacaagaagccggagctgttcgagcctctcaaggccggtcaggcccccaagtacatggtgttcgcctgctccgactcccgcgtgtgcccgtcggtgaccctgggcctgcagcccggcgaggccttcaccgtgcgcaacatcgccgccatggtcccggcctacgacaagaccaagtacaccggcatcgggtccgccatcgagtacgccgtgtgcgccctcaaggtggaggtcctcgtggtcatcggccacagctgctgcggtggcatccgggcgctgctctccctccaggacggtgcacccgacaacttccacttcgtcgagaactgggtcaagatcggcttccctgccaaggtcaaggtgaagaaagagcacgcctccgtgcccttcgatgaccagtgctccatcctggagaaggaggccgtgaacgtgtccctggagaacctcaagacctaccccttcgtccaggaagggctggccaaggggaccctcaagctggtcggcgcccactacgacttcgtgtccgggaacttcctcccaacggaagaggcacaccaatattcgagtaaccgggccggattgggccgtatagttgggctgcgtcttgtaaaggattaccttttgcgtcggcctgcctataaaaagaagcggatgacttcacctccgggcatgatgaatgagaataacaaagttccaacccctacattcttcttctacctctgccatcctctctgtatttttcccagctcctatcttctcttcgtcgtagtgctgcccttcagcgaggtgctggactggagcaccttctcggtggtgctcgccgagagaagggcataccggcggacctcaagaacttcctgtggcacgccgcacgccacgcccatcaagtacgacttcttccacatgatcctgcactccatctggttgagtagagcgaaccaggtcgagctcgacggctga

SEQ ID NO: 15998 - DNA, 1047 bp, Zea mays
  Peptide Sequence Number=SeqID_59373
atggcgtccacgccacggacgccggcgccggagcggtctccgccgcccgtgcccactcctcctccgcctctggaggacgagccgccgccgtatctggccgacgggtcgccgcgggaggaggccagcttctccagcgacgggagggaaggagcgccccccaagaacccgcagctctcgcccacgcaccacgctgcgccacgcctcgtgccgccgcccagcagcccagccaggcaagacgggcaagaacaagaagggagcgctaataaggccgccgcggccacggcggagccggcccgcgagccgctccgccagatggcgacgggcctcgcccggccactgtcgtcgcagacgtcgcccgccaccaccaactctcctactccgtcggcgtctccgacgccgtcgagtcccgcgcccgtggccaacaacagcaagaggagcggccagagcacgcccaagcgcgcggagacgaagctgccgctgtcgtcgccggccgtcgcggtgcacttcgacccagtcgaggaggccgtcacgtcgccgctgcgcctcggcaaggcgcgcctcgaccagcagcagcagcagcagcacgcggcgggggcggcggagagcggggcatccgtggtccccggtgtggcggcggccgtggccgcggtcgccgagcggagggagctgttgctggcgctgcgcctggccacggcggtgctcagcctcgcggccttctcggtgatcgccagtgcccggacgtccggatgggccggcgactactacgcccgccacctgcagtacaggtacgccgtcgcagtgaacgtgatcgtgttcgcctactcggtcgcgcagtcattgggcaaaatccgccacctggttctggcgtacctcctcatgtcggcgtcgtcggcggccgcgtcgcgcaacgacctgtgggtgtccaggttcggcacggacgccttcgtcaggaagatcaccggcgccctgtggctgtccttcgtcgcgttcctggtgctcgctctgaacgcggtcatctccacggctaatctcttcagcatggtctga

SEQ ID NO: 15999 - DNA, 339 bp, Zea mays
  Peptide Sequence Number=SeqID_59374
atggtctccaccgccgcgtcttgcctcaccatcacgctcgaactcacctccccctcacctctcccgccgcgctgcactccctcgtgcactcctccttgtcctacgccgccgtcgcagcagcagcagcggtggttcgagtccaaggtggtccccgcggcgtggagcagcgggtacctacgtagagccaatagcctgggcggcggccatggcgcggtggcgcccgccgtcacggacacgctcacgaaggcgatcacgtcggatccgagcttccagtcggtgctggtggcggcgatcacgtccgtcatggggcgtggcggagctactgctactcaaaagtga

SEQ ID NO: 16000 - DNA, 456 bp, Zea mays
  Peptide Sequence Number=SeqID_59375
atgggcgcgattaaggtcaagcctcagtcccctcaagggacacgatctcgcctcgcccgagcccagcctcgggcaaaggcaaccgaccccggaggattcacgtctcgcccgagggccccctcaagcaacggacacaccttcggctcacctgaggcccagtcttcgcagagaagcaaccttggccagatcgccacgccaaccgacccctcgggcgccataggaagctccgcctcgcctgaccccagggctcgggctcaacctcgacgctggacgacggactccgcctcgcccgaccccagggctcggacacagcctcggcctcggaagacggtctccgcctcgcccgacccagggctcggactcaacctcgacctcggaagacggactccgtctcgcccaacccagggctcagactcaacctcgacctcggaggagcctccgcctcgctcgacctag

SEQ ID NO: 16001 - DNA, 1071 bp, Zea mays
  Peptide Sequence Number=SeqID_59376
atggagaaccgtcccgggctggagaggttgctggagactgcccatctggagcttgatgggaagctgttcgtcagcacgcagcaggcccctacctggcgcgccaactgtcggcgtttcgagaccggggggcgtaaggagaggatccaggtgtacaatggggatgtagcagagtgctacgtgtctagcggagggagagctagcgccctaagtacatgccaatgtggcagccggagagatcttggcaccctgctgctgagagccgccgtcgtcacagggctagcggggcgccatcattgcctatctggcggagctagccagatgggacatcggtcttgttctctgcggcccgagtcggctcggggtagggtgatgatggcgcttcctgttgacgtggcgggcctgtgccctaggtcaggcgacgtggaggttcctctgaagccgaggtcgagtctgtcttccatggccgaggccgagcccgagcccccgggtcgggcgaggcggaggtcgttcggcagaggccagggcggagtccgagccctggggtcgggtgaagcggtgtcacacccgggttttagggatccaaagcccgggcgcgaacataaacaccagccgacggcgtgcgctagccacgacggcgccattactgcccgtcgtgagctcgcccagcgaccagtacccactgatgccgacgctgtcatccgcggagctcgcaaccgttacaaaaggaacgcaacttaccactgcggagacgaggacgaggcctgcgcgcacggcctgaagtattttttttcctccttctaccaattttggactttacaagcggagtttgtcgtcttctggggcttagcccgagtccgagccctgggtcgatcggagcggagttcgtcgtcttctggggctgagcccgagtccgagccctgggtcgggcggagcggagttcgccgtcttccggggcttagcccgagtccgagccctgggtcggtcggagcggagttcgccgtcttccggggcttagcccgagtccgagccctgggtcgggcggagcggagttcgccgtcttccggggcttag

SEQ ID NO: 16002 - DNA, 708 bp, Zea mays
  Peptide Sequence Number=SeqID_59377
atgcaggcggcatgcaaccgcaccaagggggcgcaccctttcgacttcgacgcgtccagcatggaggcccaggcccacacgtcatgtaaccggcacgccggttactacgtgcgagaaactgcaccgccactcgcgccagtaccgcgcctcctcgactgcggaaccggtgccgcgactcgaggcaaccctgcacatgacccgacagtgccaaccgagcacatcgatcatgggtcagtcagccgcgggagaaggcgcgatggtcgatacggccagaaatgggccggcagtaatggcggtggcaggcgggcggaagcagcagtcaagtcgtcatcaagctcatgccccctcctgggacagcgagagaaccctctcccacggcgtgaagacgacgcgcccatgctctgttcctcgaacggctcgcgcacgcacaacagctgccccgcgaaccactcgtcccgtcgcattaactctgcggcaggacagggactgggaaagggatactccgaaagggatccttctccgcgaaggaagcgggccccgagcccccctactgatcagaggttcgaaggctggcccctcggaagggttcaacaaccgcctcagagcactcgggctccgcgcccactactggtcagaggttcgaaggctggcccctcggaagggttcaacggccgcctcaggccactcaggctccgcgcccactactga

SEQ ID NO: 16003 - DNA, 807 bp, Zea mays
  Peptide Sequence Number=SeqID_59378
atgtcggggaaggcgaactgttgctgcccagctaggatgcaacattccgtcctctgtccttgctttcgtggcgaggacgggagtgaggacctgccgatgcgctttggggcggccggcgttcgctggtgcggtgttggtgggcaggtggacaccgccgtcggtgctgaggtggtggcggctggacaaagcttctccgccattgagaccgtcagtgccacctgtggaccgacctccagctctttggctttgatgtctggttctcgttccttgagtggggacgcgaacgagagccttccggtggcagcgtccatcctgggaccatcgctgctgctgcagaggtcgctggcgggtcgcttggagttcgtcgtcccgcaggctcttcgatgtggaggttgttcatacctgcaggagtgcaaccggagttccatttgtaatggcaccttgagtgccggtgtttgttcattgtggctgtcggggcctgaacatgaatcactcggctcggtcggccttgccgcccgaggcttcacttgcttagtcgaagaaaccctcggccgctctgcggtgagccggggccgaaggcagcggtgtcagcgtggacagaggcagagttggctcgaaaaaggaagcttcctcggccggggcttggccgggtcatccactagcgcgaccaacgccggagtcgagttgtcgaggccacgagcggggctggtgtcctcgggggacagctggctgaggcttcgggggcggccggccgagccgtctgctcgggtcgggttcctggaggagaccctggcggcgatggcctga

SEQ ID NO: 16004 - DNA, 342 bp, Zea mays
  Peptide Sequence Number=SeqID_59379
atgccgtggatgctcgagtggcgcttgtccttgacgctggagttgaggcggatgatgtacttctatgcatggttggccaactacattggagttgaggcagatgttcctccagtccctggaagctcaactttgagccaccaagaggagttagcacaattaagccaagtggctagagaggagaacttgcacaacacgataaccacaaagagatcaacacagagatggcacaatggtttatcccgtggttcggccaagtccaacacttgcctactccacgttgtggtgtcccaacggacgagggttgcaatcaacccctttcaagcggtccaaagacccacttga

SEQ ID NO: 16005 - DNA, 132 bp, Zea mays
  Peptide Sequence Number=SeqID_59380
atggcgaaggagggaggtggcagagaaaaggtgagcgagcactttttcgctcccctcatctcagtgcgtcattcttggctatggcaggaaagagtaaaagtggataggactgagaaggcaagagcaaggtga

SEQ ID NO: 16006 - DNA, 459 bp, Zea mays
  Peptide Sequence Number=SeqID_59381
atgacgctcgaggcctccttagagagttctcggatggcgccgaccaccctcaccaccgatgatctcctcaagcgggtcaagggtacggtggggaaggctgattacaccgtccctttcccaatgtgccccgagcggggcaacatatccctagctatcgaactgccctacccccagtccccaaagacgcgactggccgggcggcacgccggttggctaaaaagggcggctcacgatgcccttgagaagcatcgtcgagcacaagagagggaggagctgtcgctggaggcatccccaagctcggatgacaatgacgacgacgatgatgacgaggggatggaggttcggctgggcttcagccccgagcctggagcgcaaagcgtatgcgctgatccaacccccgcgaaggctgtgaagggagctgaggcggtgaggcttgccctgggagggaagaccgggtaa

SEQ ID NO: 16007 - DNA, 204 bp, Zea mays
  Peptide Sequence Number=SeqID_59382
atggtgaatcagcgcacacatacatcctgtctcgctagatctgctatgccgcgttgggatgataagccatcgcttccgcagtccccgccacagtttatatgctctaggaccaagaggctcatgctgcagaggtacaataccttgaaccctcatcctcttccttttatttttatttttttcacgcttcctggtgtggtccaataa

SEQ ID NO: 16008 - DNA, 534 bp, Zea mays
  Peptide Sequence Number=SeqID_59383
atggccaccaagaagagcatcgtcgtcatggagttcgttggaggcggttccctcaacgcctacctcgtccaccacgatggccatggcatcggcgaggcctcggtgcgtcgcgcgtcttccagcagctcgtgtatgcactcaactactagcactcgaatactcaagcctgataagatcctcgtcgatgccacgagcaacatcaaggtcactaattttgggctctcaacccttacccgcacggcacagcaggcggcacatgtctacatcgtctataggatgtccatgttcagatgttcctatggtgtcctcttcccgctcgtggctctaaaacagtcgcaacaacacacatcggcaacaaatgagatttctcagtcccaaccatattatggtatgccgatgaactcatatcaaggacaacagctgctaccgtttgcactgtatgataggtcgacgctgagtacgacaggacaatccatgtacaatatcggaccgtccaaccctctcgtggactgttcgacaccttatgcaaaatag

SEQ ID NO: 16009 - DNA, 372 bp, Zea mays
  Peptide Sequence Number=SeqID_59384
atggtgagagaacgaagaacacaaacaaacacaatgagcaagaacacaagagacacaagatttatcccgaggttcggtcacaccaccaaggtgccctacttcctcgttgaggcgcccacaaagagccgggtctctttcaaccctaatcctcccttgccgaccacaaagtaccaaagctcgaatcaagaagagcaagagggatttagagatgaagcaccaaaatcgcagctcttcaatctcactcaaagatttctctccaaagatttgaaatgggagaggcaagaggtgtgtgagagagagtggggaggtgtttctcaggttagaaatggagtccaagtcgtgctcttctgtggaggagagaggtgggagtga

SEQ ID NO: 16010 - DNA, 453 bp, Zea mays
  Peptide Sequence Number=SeqID_59385
atgggcaagaacaacaagcgtaagcgtgagccgactcctccatcagaggagtttggcgactcggagtactcggaagaggagttctcctccgagcccgaggggtctccggctcccgtctctcccccggcgtcgtccgatgactcggacgactcccaggggatagccgcggaggtctggacatacatccgggccgtcgagcgctccgggctcgaaggctcggatgagtcggagtactcctcggatgaggaggactcggacggcggcgaggagggtgaagacgacgacgacgacgacgacgacgatgacgacgacggcggcagcggtggcgggggcgacggcgacggcagaggcggcaccaagggcggcagcggcggcagcggagacagcaccaggggcagcagcaggggcagcacccggggcggcggtggcggcaggggcagggccagtggctag

SEQ ID NO: 16011 - DNA, 273 bp, Zea mays
  Peptide Sequence Number=SeqID_59386
atggagcaggtgccacgcagcagcaagtgcgacaaggggaggggggatggtgttgctggcggtaatggcggtgggtgcgctgcaaagggggcgtgggtggcagtagtgcgcatggaggcgagcacgcgtgcggggtcacgggtgagtggtggggtctatgaccttgatgtttgtggaatctggctccaagaatctttgcctctctgtatgcttattccaggcttcaagggtaagcttcctggtatcttcttaggtaaggcacttttctcttga

SEQ ID NO: 16012 - DNA, 591 bp, Zea mays
  Peptide Sequence Number=SeqID_59387
atggcggctccgtcgagggggaagaaacgcctggtggtcgacgtcgatgtcgagttggacagtgaggccaaagttgcttcagctttcagtcgtctgtctgtgtcgatcgttgccaagccttcaggcgagtacgttcgcgccaaggagcactcctccacgagcgtgaactgcgcggccacatcaggtacgtggtacacccagcagcagaccccttctgtcgtgaaacagtgctctgaaccacgttcagtgtcgataaccagatttgaaacggttcgtagtgacctggcactagccattgcaaagatgcatgtagttgggaacgagttgaaagatttggccggaaatgagataatggattcgccagatacggccaaagaggtgtcagtgaacttctcaatgtggcgcgtgtatgagcttgctcagtcactgctggacgaagcacaacgtttagaagatcttgaagctggtccttcgccaccattatctgaatgtttcaataaccattttgctgaagatgaagatatgggtggcggggaatgggcactggatgatgtggattctgaagagcttgtggatcgtcagatgaagtag

SEQ ID NO: 16013 - DNA, 384 bp, Zea mays
  Peptide Sequence Number=SeqID_59388
atgggggaggaggggagaagaaggggcggccgtttcagggaggccgagcggctgtcgcggcggcacgcgcgagtgcgcccccacgcgaggaaggagaaggggtcggggtgggccccacacccacctgtagagactgcatcaccgcctgcacaagaagtaggagcgtcgacgctaagagcaggagcaataagactcttccccttcgcctcagcaggaggcggagtctgggaggcatccttccccatcacctcagccagagatgcctctgcaccagcacagggcatcccagttgctggaggagaccctgatggagacggagacgacgacgacgatggtggcagtttgagccacatcacggagctctcggaggagcagaagccatag

SEQ ID NO: 16014 - DNA, 321 bp, Zea mays
  Peptide Sequence Number=SeqID_59389
atggccggttcaaaagatagctctgaggtttccaccagcaatatcatcacaccgacatgggaagccttgccggctgaagaacagctcctgttcgaggagcgccaggagcagctgatccaagaagcaaaggcgaagttcctggcggacttcaaagtggacaggaacaacaaagtcgttcccctctcgtgcgacagatctggcttcgctccgacctactacgaataccccaaattcaagtacaagagagatccaatcatgctcctgtactcctttctggtccataggttcgccgtcctcatcggcattaatgagagcacctag

SEQ ID NO: 16015 - DNA, 987 bp, Zea mays
  Peptide Sequence Number=SeqID_59390
atgaactttatggcggaattggcggcagccgatgccagagcgcacggcaaggaagcttcacaatttgacaagaccgtggccggacgaactctatggctcggactgcttcgcgaccaagacagctgtcgcgacgcgcacgacgtcgccacgccacaacaccactacggccaggctcggccatgggcgcgacgagcaggaaggacgcgcggccaggatcccggcgcgcgacctgcagaagaacacgcacgcgcgacaccaagaacccgtgctcgctacaacatatcatcgagcaagcagagggcgcgactccgaggggttgccatagttgttgctactgcacggccagggcgagggcacgcacaacggaaggacgacaccagagaaggagcaacaaaggtcgccacacaccaacgatgcagagagcgaccatggacagacctaggtgttctagaaattgaacagagaaggcgcgagcgcaagggctatgctcgaccaccagggaacgggcgacgtccggcgtgcagggagggatctaggggagaggagcacgcagggatgaacaggcaaggcgacgacgcgagcagggagaaggaacgagggggcgcgttatgggggcttgaaggagggagatccgggctggggctggacgccggcaggggaaaggacgagcacatgggaggagctcggtcgcgcaggggccttggctggggaaaaggagaaggtgcgcgcgtcagggacggagcgtcggcagctcgcgcgcgtggagaagcttccagggagaagcagcggccgagctcggcacggcaggagaagccggcgagcgcagggaggagcagagccgaaccaagggctggggcacggcactggaggagcgagcagggagagcagaagagatggatgcgcagggaagaagactgcgcgggcaggataaagacagcgcgtaggcggcaggaaaagatcagggcgcgctggaaaacaaaaatctaa

SEQ ID NO: 16016 - DNA, 423 bp, Zea mays
  Peptide Sequence Number=SeqID_59391
atggatgagtacatcttggctgataatgacttccgacaaagaagggaggaagcttgggcttcggagggagaatccaccctaggcatgtcacatcaatccacaactccagtcagaacgacgacaaaggaagtcattttcaaagaccacagcaaagctcacagtcttcaggacagcagcaaagcttctttaggccaccaacttcaagaggctgaggcggtaggggctttggtggaagatatggggatcagcccagaaaagtcttttgcttattctgtggtgaggacaaaggccacaatacaagaacgtgccagatcaccatccagaagcaaaaagaaattaccgaagcagaggctcggcagaatcagccaaagcaagtcctgcatactgcttcgtgccactccccctacataccagaatatgtag

SEQ ID NO: 16017 - DNA, 1554 bp, Zea mays
  Peptide Sequence Number=SeqID_59392
atggagctctccatggatgattaccttgtgggcagggtcgctatgttcgatgcccacacgagactggctcctgctggggcggagtccggacaactggctgttgtcccggtggcggtgtcagctggcctggtggctgcggcaaccgtggcgaagggtgacgtggtgtcctcggaggacccgtggtccaagttctgcaccggcggcaagattgcctcagccgccgctacgaaggacgtggccgcctcagttgcgcaacaactaaaatatgcggctgccttcgccaagcgcattgcttcgggggcgctgaccttggagttttccgccgagaggcggcgacttgaggggacgatcgagcgcctccggacgcaacatacggaggcagttagagacaagtcggcggcggaaaactggagtcgtaacctgcttgagaagctgacatcggcggaggcggagaaagaggacctaagccgtcggcttgcggaggagagggagggcgcgcaaagggcccatgcggaggcccaagctgcacgcgctgaggccagccttgccctcaagcgtgccaccgatgcgaagtcgggcctgaagagcttgtgcggctatgctaagaagatggaggctaccacgcgcgctagggtcgaccgagcgcacgcgttgctcgtggacgcgtaccgccaactgggcgtgcgaactgccccttttgacaaatctggcaaagaggtgggcctccgcttcctcgggtggctgcaggaggagctggagtcgctcccgtccatcgcgaccggtctcatgtcctacgcctcgctcgttacctgcgggggggctgtgaatgccttgtcccatgagggatgtaggcatttcgaagtatttgatcgggtaactgaagacttcgacagtggaatcttccaggtcggagacgaggtgctaaagcggtccgctgggatgctgaatgatgatgaagacgaggacttcggcggcattaaaagcttggtgatccagacagaggaagcgggtgtaacaccccaagttttatctccccgcgccctgatcttttcgtgccgcctgcacgctgtctttatcctgcccgcacagtcttcttccctgcgcatccatctcttctgctctccctgctcgctcctccagtgccttgccccagcccctggttcggctttgctcctccctgtgctcgccggcttctcctgccgcgccgagctcggccgctgcttctccctagaagcttctccgcgcgcgcgagctgccggcgctccgtccctaacacgcactccttctccttttccccagccgaggcccctgcgcgaccgagctcctcccctgtgctcgtcctttcccctgccggtgtccagccccagcccagatctccctccttcaagcccccatggcacgccctcgttccttctctctactcgcgtcgtcgcctcgcctgttcgtccctacgcgctcctctcccctagatccctccctgcacgccggacgtcgcccgttccctggtggccgagcatagcccttgcgctcgcgccttctctgttcaatttctag

SEQ ID NO: 16018 - DNA, 651 bp, Zea mays
  Peptide Sequence Number=SeqID_59393
atggacgacggggatcgggtgggccggcttcggccctcccctccggccagcagaggtgggcggtgcccgtactcgcggtgggggaactcaccgaaaacaaggggcgcgggggctccatgggttcttagggcaacgggatggcctgggaggttggggaaggcgcggggaacccaatggcgagggccaatacgcgataggggcaccggagggtggcggcccacgacaagacggcacggcggcggcgccaaccgactccgacgagaaattaagcgcaatagggagcaagggaggggaaaaggagagggcaggggaggttccttacctcaaggcgtaccccagggacctctcagtagcggtgaaggcgcgatgacggctcgggtcaacggcggcggcaccgggactgcgtggaggacggcgggtgagcgcgagcagaggaaatcagggagggagaggagaaattggagtgtgtcccgagttgcggacgtcgaggcggagctcaccgtggcagagagcacgacagggctccaacgtcgacgaggaaacgggctcagggcagcagcggacaacgacgactcctccttggcgtgcgcgcagcgcgggggagtggaaatgaggctctgcaggtgtgcaaatgagggaaagggagagtga

SEQ ID NO: 16019 - DNA, 537 bp, Zea mays
  Peptide Sequence Number=SeqID_59394
atggggtccagggctccaggcacagtgcttgctctgccgaggctgggtgccgagatggctcgtcttagacacactgctcgtaagtcggtgatccctttcctgccgtctcgccttgcggagcgtcccctgtgccgcaccgtgtccggtcagtcgagtcacttggagaggctgcaccaccgcctgcgtgaggagcaggagcgccagcttcagcagagggagcagcagggctcttcctccccgcctgagcaggaggtggagtccgtgaggtgccgtttccctgttccccagctggaggcaccccctgcaccaccgcgggacgccccgactgctggaggaggtcctagaggagaccccaacgacgacgactcagaccacagcactgagccctctgagccgcaggaggcggaaggctgggtcgcccgacccatcacccgtgacgccgctcgcggttgtcacttccacgacgcactcgacaccttgttgcgccaggctttcgaccggcacacctggtcgatcgagtatcgttgtgtagtctag

SEQ ID NO: 16020 - DNA, 297 bp, Zea mays
  Peptide Sequence Number=SeqID_59395
atgaactcgaccccatcccctgacctcaagccacggcggcgcgtccagccacccggcgaccgagcacgccggagagtgcttattaccggcaacggtgaggtgaaggagccgcaccacgacgcgagagcaattccacggcagaggaggagcgcggggaagaaattgccgtcacaccgaggcaccgagtgcccaagtacaagcgtgcgcagacaccacccgttggcgagccccaagttcttctctgccgacaccggaaggagcgagaggaggaaagctagcgcggcggcgttcggatag

SEQ ID NO: 16021 - DNA, 693 bp, Zea mays
  Peptide Sequence Number=SeqID_59396
atggctggcaaaacagtgcaaatagcagtaaatgctgtggtaacttcacacctactcgtctgtttatatagtgccgcagcatttgagaacaagtccccaacagtgcgtactgttcagaccacccgtgtgaacaccaactatatccctccgccacgacaggctcctatctacctagtggtagtagaggaagtccctgtggatcttcaccaccttcgtgtggagaatggagttattctagaggatagctcagaggagattttggcaacgcccaccctgttgtcagagtcccaagcctttgcagctggagcttcatcttcagcaccgccaacaccaatagctcaagcccctgctcctggaggcgacgatctggatgattttggtgatggtggagaagatgatgaagaataccacacttatcgacagcagttgcatgacacgaggtacatatatcttcctctatgtcttcgtggagaaagacagcccgatgttgttccaggtgaagctagagaagatcgcctcaacacccttgtaggtgtggtggcatgtcttaacactgacctggacagcgctaccctggatctttcgagggtacatagagaacttgaagaagcccatgccaagattgcatcattgcagccatcgaagctcagctcgaaggaaggaatctacccgaagcccaagtccctgccatag

SEQ ID NO: 16022 - DNA, 387 bp, Zea mays
  Peptide Sequence Number=SeqID_59397
atgcaagatgttgcatggcgtgcgctttcgcagtactgtttgttgttcagtggggtagctgacggcctcgacctgaagtactaccctcgccactcaatcggcagtgctggaggtgtgattgtctcaccagttggtgagggcaatccctggttgaagggcatggtcaacatggccgtcgtgctcaataccgagctggaccacaccgttgatgagttggacaaggctcggacagagattgtggaactacatgttgagcgtgtggcgcgccactatcaggatggtggttcccccgctcctgtcaggattcagcacccataccgctcgcctcgtggtcgttatgcttatggcacccctgactgcatgacccagatagatttggagccatag

SEQ ID NO: 16023 - DNA, 654 bp, Zea mays
  Peptide Sequence Number=SeqID_59398
atggaggcgggagcaggagtaggacgtagtgccgcaggagagacaagggagcaccgaacccacggtggaagagatccggccacctgctcgcgagtctccattagagggctgctgggtgcttggcgcgagttggcggcgaactcggtgcggcggcttgcgcttggcgagttggcggcaaacttgggtggcgactggcgagcaccggctggcgagttgctggcgactggcgagcaccggctgtcgaactcggccgtcgctcaatttagggaattagggttagccagccaaatgggccttgtgccaaatgggccttgtgcccttgtctctaagcgagtctgcgagtggctgggcgcctgggctgcctgcctgctgaacgcggccgcttcttcgtaccgaggagaagaagaagaagaagcagggagcgacggcggcgtcatcgtcgctgccgccgcgacgagagcgccgccgattgaggccgacgacgcagctacgggccagcagcggctgggaaacaggagaggagctctgccctaccctcaagaaggggaacccagccaaccccacgaaagggtgactgaccattccatgtcggatgcctcgctacttggagaaccggcggaaggccgcggcggcgatggtggggaccaccactga

SEQ ID NO: 16024 - DNA, 474 bp, Zea mays
  Peptide Sequence Number=SeqID_59399
atgcatggcacacagaagacgactacatacactatcggaattcggctctttgccgagtgccggccccctttgccgactgctttttatccggcactcggcaaagccaactttgccgagcgccgcactcggcaaagtcctacgctcggtaaagatcttatttaccgagtgtgggacactcggcacagcccagcactcggcaaagactactttgccgagagtcaaacactcggcaaagacggctttcggcaaagggccgttagcggccgtctacagctgacggccgtcagtctttgccaagtgccaaatattgggcacttggcaaaggacgctttgccgagtgtcttctctagacactcggcaaagtcactcgaaacatggaaaaccgtgcatgcaaaaatgatattcatgttacttagcataagttacgaccgattccaggagcggaccggaaacttcgagcaacatgctcactaa

SEQ ID NO: 16025 - DNA, 408 bp, Zea mays
  Peptide Sequence Number=SeqID_59400
atggaggttatcggtgtttcgaacctcgctctgattagatatggcaatgggtacccaaatactcaacaggttttacccgatatgaaggcggtgattggtatattggaatttaagactttcctagcgggtacgggttacctgactggtaaaattaccctcacacgtatgggttacccgacgggactcgatgaggctacaaccctctttatcataggcataagattgattcatgttgcctttcatagtgatgactccattagggccaagtatcttgaggaaattgcgaacacaaggtgtggagcacaggaacggtggtcgatggctgaggtgaaggtcatgcgggctcgtgctgatggaccgggagcggtgaagggcgagtgttgggtcttgactgacggatcagagtag

SEQ ID NO: 16026 - DNA, 4122 bp, Zea mays
  Peptide Sequence Number=SeqID_59401
atgtcttcaaagtggcggtcactgcagcatcggcaccggtacacctacacctccattgtgttcccgaagcattaccttgaggccctaactctcgtgccagctgagatctcctcatccaatttctttgtccgattgagcaacttgatttccctgacctccacttactcccaagttgttgtggtcaaggatcttgcctcggcatatgtgcagtttctgtccactacagggactcctgatgaagcagtgctcgctgccacaaagctttatttggagatcctctttcttgagaattccctccctctccaccggacactcatatcagtgcttgccaagtgcaagaaattctccacagtgatcagtgggtgttttgccttgctctgtgaggagtatggtggctctggtagtaaggcaaagaagagatttatggtatctcgagcagccttgtcgcttattgggtacccaaagttgggatttttggatgaggcagtagagaggtgtgcagagatcatggcactggatgttgttgatgggcttgatggagtgacaaaagacattggtgaagggtcacggccatctccagtcgtgatggagcagtgccaggaggccatgtcttgcatgtactacttgctgcagaggtacccgtataagtttattggccttgacaaggcgtcaagtgtcttcaagagtgctgtcaggacaatactatctgttcttaagtcatctgccttttcaagggattgcctggtggcctctggagtaagcttctgtgcggcaattcaggttttcatgagcacagaggagatttcctggttcatttctcaaggtctatttggcatctatgcaaatcatgaagatagaaaaaatcagtctgtgcacaatgtattttcggactttgatctgtgtgaacaaatcagagacctttcagtgttgagtagactttgtctactaagagggattttgacatctattccaaggacagtactcaacatgcaccaacttcattccagtggacctttatggactgttttatatgatggaattttacctgagctttgcaagcattgtgagaacccagttgatagccacttcaatttccatgctcttacagtgacacaaatatgtttgcagcagataaagacatcggtttcatctgatatcaccgacttctctggggactataagcctttttcaagagatgttgtcaaccgtatattgggaatcatatggcgcaacctggaagatcctttgagtcagacagtaaaacaggtgcatttgatctttgatctcctattagatattgaactatgtattgcatcagaagaccgtgaacataacaacaacttgttcctttgcaatgttgcaaatgatttacttcgcttaggtccacgatgcaaagggagatatgtccctttagcttctttgacaaagcgattgggtgccaaatctcttctaacattgaaatcaaatctgctttcagaaacagcttatgcgtacatagatgatgatgtttgttgtgctgtcaccacatttttaaaatccttcctggagactttaagaggtgaatgttggaatgacgatggtgttgagctaggatatgatgccttcagagctttgtgcttgcctcctttcatgcggggacttgtatctggaaattcaaaactacgttctaacttaaatacttatgctttacctgctctaattgaagttgatgcagagagcatattcacaatgcttggattcatctccattggccctagcacaaatgaaactaaactagatgttgttttgaaaaatgaccagtgtatagctgcactggtttctctgcttaaggtctcacggaatctggctcttgttgaaggggacattgatttagatcctgatgaattgtcacagattcagcagatggatagtaagggtgctgcagttatatctgttaaagggattaaagttacagttccttttaattggtttgctttggcactgacacacagtgatgaaagtctccgtatagatgcagctgaatccctctttctaaatccaaagacatcaagtcttccatcctccttggaactgagcttgctcaaagaagctgttccgttgaatatgcgttgtagctcaacggcatttcaaatgaaatggacaagtttatttcggaagttttttgctagggtgcgaactgcacttgacagacaggtaaaacaggggtcttggattccatcattaacgtctagtgttaaaggggctggctctattgatacttctaaggccactgttgtcaagagggctgaagatctcttccaattcatgaagtggctgagttcctttctgtttaattcttgttacccctctggcccttatgaaaggaaaacaattgcaatggagctcattcttacactactagatgtatggcctatttgccgctctgaagggaaaattgatctttatccttacaatgatagcataatattgccagactcaacaatttcatttgttgggtctataattgatagttgggacagattaagggaaaactcttttcgcattctactgcagttcccaacaccgcttcctgggatttccttgagtacatccataaatgatgttatcagatgggcaaaaaaacttgttctaagcccacgtgtccgggaaagtgatgctggtgctttaaccttccgccttatatttaggaagtatgttttgcagcttggatgtattcttgtattttctaaagaaagtgattgccttgaatgttatacacaatctatgaatggagatacagaagttactagtcaaaacccagttgcacagtatatatcttcactcattcaatggctctgtattgttgtcgaagagggtgagagggatctctctgaagcatgtaagaagagctttgttcatggagttcttcttactctgcgctacacatttgatgagatggattggaactctgaggtagtacaatcatgtatttctgaaatgaggtacctggtagaaaaactgcttcaactcataatgcgtgtaacttcggtggccctatgggtggtttcttcagacgcattgtctctgccatatgacatggatgacatgattgatgatggttccttcctctcagatatatatgatgatcaacctactaccacttcagaaagagaggagaagaatgcaaaaccagggagtaatggcaaaccagccgaacaagttgttatggttggttgctggcttgctatgaaggagtttcacgctattgtggcattgcaggtcagtttactttttggaaccatcatcaggaagataccattgcctggctgttctcattcagcttcatctcagaatggcttgcctgacagtattgaagagacaagtatatctgaagaaattcttgatgtggggcagttaaagatgatgggtgaccattttttacaggttcttcttaaaatgaagcataacggtgcaatagataaaacaagggctgggtttactgccctttgcaaccggcttctttgctcaaatgattcaaggctgtgcaaaatgacagagtcatggatggtgctactaatggataggacaattgctaaagggcaaactgtggatgatttgataaggaggagtgcaggaattcctgctgcatttatcgccctgttcctggcagagccagaaggaacaccaaagaaactacttccaagggcattagaatggctgatagagtttgctaagaactctttagctaatttccagaaagactccaaccagaggtctggagtaatgaaagagctgttggaatcacagtcagaaactacaagtgtatattctaatggtaacctatctaaaggtcgagatgagggtgttgttcccactgtgcatgtgttcaatgtgcttaaagctgctttcaatgatgcaaatctggcaaccgacacttcgggtttcagtgctgaagcaacaatagttgctatacgagcattttcatctccctactgggaagtgcgcaatgcagcttgccttgcgtatactgcactagttcgtcgcatggttgggtttctgaatgtgcagaagcgtgaatcagcacgacgatctttaactggccttgaattcttccacaggcaagttcataacgtttatacatag

SEQ ID NO: 16027 - DNA, 1854 bp, Zea mays
  Peptide Sequence Number=SeqID_59402
atggctcacagtgttcagcatactgatcctgccatatcagctaatatgggaaaagcaaatgtacttctgctgtctaagtcattcaattcaatacatggccttttgctgcagctggcttctcttctggataacaactttagaggtttgacagacggtagcatgaaggatcagattattggcctattactggaggttctttcaagatgctcttggcttggctgcacgaaattatgctcatgccctatcgtaattacatcttacttgcgggtattggatctcatgcttgatgttgcaaggacagggaaaagcagacatactgaagtcattcaggcattgctgctagagttaacttcccagtgcttgagcaacacagcatcaacccagtacgcattccatgatccaacccgtattgaactaaaacaacaagcaactgaatcatttttgagctgtgttggtctttctaagaaaaccgatgaaactaacgatgatgatgtgcagttgcaaatactcggtgaaccaactttagagatgcctagagtggattactcccttcatgaagtacacaaggagatcctgtcatgtctcactgatccttcatatgatgttagaattacggtgctgaagaggattctttggctcacaaaatcaatcagacatggttatgcagataacattttgcaccagtgggcaggagttaatctgcagcctgctttaatggaacggttgtttgtggaagaacaccctaagtgcctttattataatctgaagatcatcttttcatggaacatggaattcccattcaacaatggagaagattctagcacacttttgtccttgtgggatagaatcaatgaaggggatggattatctgatgccatgcttagattaaacttgtttgtcacacttgtcaagaaccaaagtgaaccatcagaaagcatgaatgctcgacgggctgctgctgaggcaattgttgcttctggtcttcttgaagaagcaagctacgttgcttcatctgtgtccaacatgtactctccttcagaatttgatgaagaccataccaaagagaaatgcatggaagatagcgtttttgaatttttgctggaggatgaggatgcatatctgaggcaaaaacttgcgaaggatattcagaaaataatcgctaagggttcagctaataccttctgtgatgattccacaccactacaagttgatagagtcattgaattaagcttggactatttaacttctttgtttggcctctggctgaaatacgttgaattcttgttaaggatagtcttgggcactggaaacgctctgaactcccgtggcgatttggtccgtcagatatttgataaagaaattgataaccaccatgaggagaagctattgatatgtcaaatctgctgttcaaacattcagaaacttctgaattcaaaatgccagatggaagcaggagcagagactaaactgttcctgcagaattggagggagatatttctaaagcagctcacatcgctgactggtggctatattgagaaagaggggaagaacgattggattggcggcataggtaaccacaaggacgtgttcatatcagtgtatgcagtcctactcggtttatacgcgctcacgcagtctggctctctggatcaattggaggaccactgtgcagtttatttgcaggaatttgcaaaccttgaaaggtctatcacaccattcctcaagaacccgttgatttctaatctttacgctctggtaaaattgtcacacgagaggttcatatcatcagataagcctgaggaccaagtgggtgattcaggatcaagttttgacccatattttcttatcagatga

SEQ ID NO: 16028 - DNA, 735 bp, Zea mays
  Peptide Sequence Number=SeqID_59403
atggagttcgggaggaagcccttgagccttgtggagctctgcgtgcggaaggccatcgacaacctccgctacatgggcagcgtcgacggcgtcgagatggatctgctcaagcgcatcctgccgcactgcacgatggagcagctcacccgcgtagagaacagcaccgagatggatcttagcttggtaactgatccgctgtggaggcgattctaccagcgagaattcggtcaggagcatacgagcaaagtcatcgcaaggctgaaggagcttgggcaaaaaacgccgtacacatggagggagctcttcgcggcgaaaaaagagaaacagaaggaagttgaggataagatgcttgacaaattcacaaagaagtttcaggcagagagagctgagaaacaaagcaagcaaatcaaactctgtacaaaggtgcctccaagcagcaaaaggagtttctttggaggatgtattcttgcaggaagtggacctagcagtgtatccagttccagctacaagagccctatactgaagaaggctaggatagaggttaacagtcgagcaagattgcagtctgctatgcaaaagaatacttttgcgaggtcatctcagccaataaggacgacctctgttagtggacagccagtgagaacaactaccattcataggcccaattcaaccgtcaccatcaccaaaccgatgggaaaaagcaggcaaattcagaacagcaggcccaaattctag

SEQ ID NO: 16029 - DNA, 480 bp, Zea mays
  Peptide Sequence Number=SeqID_59404
atggatgagcttttcatcaagctcaagtccaccaagattgaccaccagacccaggccaagattgagaaccgtgaggagcagaagggcaagtatgaggatatcccacacgaccatcactctaatcgctgcaagggcaagtgggagtacaactctagcaatgtgacacctggttttgaaggttgtcgctcccccgaacaggtccttacggagaggtactcaggaaatagcctaagtcccctaaactatcacaggatcatcatcgggataacatcattgtcggtgttttggacccatgaggaccctcaaccgactagtgaatttgacgctgcgtatccctgcccagatgggttgatgcaagatgaaacacaaggggggaggatgaggcttatattatcttgcaccgggttcccccttgggaaggccctggacatccccttttatagatacaaggagatggtccagctgtacatgggggtgtag

SEQ ID NO: 16030 - DNA, 264 bp, Zea mays
  Peptide Sequence Number=SeqID_59405
atggccgccagccttgtggtggggaagagcgagccgggccgtggcctctcccttgccctcagcttcaaggatgttcatcatccgtgctggggaggagggcaagccgggttggtttcttgccttccgcatgggctggcgacccgcttcttcctccagcattcgggggagaagggcgtccaccagccttacggaggaggcgaactgccacctactgcctggtcgggaaaaccgccgagggtgctgccgacgtctaagtctaggtag

SEQ ID NO: 16031 - DNA, 270 bp, Zea mays
  Peptide Sequence Number=SeqID_59406
atgactccaaaatcaaaactgccagcccctcacctcctcctcgccatggctgctccgtgtgcagcaaccgcacactgcaccagcgagccgtcgacaccatcgaacctcatctgcattcgtggtcgctacgccctccgacgccaagctgtgccgaggctgcatctctccccgcgctgcgcgctgctctcgccggcgtggccccggccagcagccgcttccccggccgagactggatccctgcgtgtcgttcttctccctggccactggtaa

SEQ ID NO: 16032 - DNA, 306 bp, Zea mays
  Peptide Sequence Number=SeqID_59407
atgtggtgctgcatggcctgcgtgggggctagggcggccagctacttggcttggggaactcgcgcgcaccagctaggctgcgaaccgagcgagacgggctggccgagcgcagcagggctaggggcgcgctggtccacgggcgccacagtgggccgcacgaaggaactgggggcgcactgggccgcggcgggggaaacaacgcagggaaaaagaaaagaaaagcaaggaaaagagaagggtgttacaagcaagcacaagtccacagggaggttcgacatggtggcgctcaagaagaagtacctctag

SEQ ID NO: 16033 - DNA, 430 bp, Zea mays
  Peptide Sequence Number=SeqID_59408
ctgggcgtgcggacgtcgggctgcctcccctggtcgaggagggagggacttgttgtggttctccatggtgaaccactcgaggcgccatcttttaatgttgtccttgagggggatgtcaaggtactctactttcctcccccggcgaagctccaaactggcaccaccgacaagttgatgctgtcctccggccataccgggccgacaatggtaaagatatctccagagcctaaagtgaggaagaatcccaagaaatgcctcgcaaaggtgcacgaaaatggcaatttgaagaatagagttgggattcagatgtgtaagattcaaatcatagaaatcaaggaggccgcggaaaaatggagaaacgggcagggcaagccctcggatgaggaaaggcacaaagacaacggcttcatgggtgtcctctatcggaaag

SEQ ID NO: 16034 - DNA, 630 bp, Zea mays
  Peptide Sequence Number=SeqID_59409
atggcccgccttcaggggttgtcgatatctaattttgaccatgcactggaggaaatcatacccaagaaccttctatcagagcctcctaaggttgacaatcccatcatctgtttagaggttctagattatgttcttttgccatgcgatcctgtcgggcaagagggcggtctagctcgcgaggacgcactggcccttaatgccactgactcgagtcctccggctcctctgggtatggctgagggagcttcagccttggaagtggctactagggagggcccagcccccgagggtggtgcagggagcgacctagcccccgagggtgttggggcaggttccttttttgctgcctccatggacgtccacgttggatcaccaccagtccaatctaaggagcccgcagtgacacgcctatctgctgctctcgctggtctggtcactttagaggccaatgacccagacgccaggagtctgccgcctgttgacgaggctaaagatgttcttgattctatatctgcccaactgaaatcctatggcgctcctgtccccgaccaagtttcatccttgatgcagtggaaccctttgctgcttcaaaaacagatagaagatctgaaagcctcaaacattggttag

SEQ ID NO: 16035 - DNA, 402 bp, Zea mays
  Peptide Sequence Number=SeqID_59410
atgaggcaaccgacggcacctctggctggaggcaccggactgtccggtgtgcaccggacagtgtccggtgcgcccagaggacaccaactcaaactcttcgccctcgggaattctcggaagccggcgcgctataattcaccggactgtccggtgtcgcctatccaccccccccctcaaggcgactttcagtactacctcgctgatgagcccggggtgcacttcgtttggcagcccaaccaagagtcatcggtactcgtcatgtcgcacgcgttcgacgactactatatcgaggattgtggcatcatcttggcgtcggaggtgacgcagaggaggatcaacaacagtgaccagtttgtcatccttgccaccgtcatggtagcttttgcatcggcctgtctttaa

SEQ ID NO: 16036 - DNA, 138 bp, Zea mays
  Peptide Sequence Number=SeqID_59411
atggtgccaccgcgtggaccacgcgccgccgctctggtcaccgtgaggggaaaagacgagcaagccactatggaatctggggttcaacaagttgaggtagctgagcaggagctcattgaaggcaagttgtgcccttga

SEQ ID NO: 16037 - DNA, 861 bp, Zea mays
  Peptide Sequence Number=SeqID_59412
atggtcacggcgcacggcggtactggcccggccaaagtgctccggcgagcaattggtgcattaccggaggatatccccgcccggaaggtccacgaagacgtgcgggggattggagccttggaggggcgaggcgtgacacatcttatgcgcagcccgagatctaggcgaggtcttcggatcgagtggaaccactcggaaacaccggcaacacaactcatgcgaggatcagctggttgctacggccgaggtccacggagttcgcccttcaactaccagcgcgtggagcggagaggagaaagggaggggaagaagatacacctgactggtggggccaatcgcgcgcagggcgcagcgcagagggaattgggccgcgtgggtgaaatccccatttgggccgacagggaggggaatcggcccaggcgaccgacggtggcgctccaccatgatcgagcgacggtggcgctccacagggagctcgcccgcctcgccgccaggtccgtcgcgcgcctgcctgctggggctaggctcgacgggagcggaaccgccgaggaggccgagatggccgccgcgctcatggacgtcgcggtcgccagcgccgccgcctccgccgccgtgttctcggccgccgcgtccgtgtctgccgccgcgtcgtcgtgctcgaacaagaaggccccgacggccttcgtggctgctgccttcgccaagaagccggagacgccgacgacggccaatgtcgcgcaggagaagcacgaggagcttgagcgatgcatcgaagagtgcgagagtggcagcgaggtggtgttcaggagcattgttcggaatagggtttcgttgctcaacatccatagtccggcgatctag

SEQ ID NO: 16038 - DNA, 1450 bp, Zea mays
  Peptide Sequence Number=SeqID_59413
atgacgtcgcggaatcaccggaccctgcctggcctcgaagccacggagccggagaggccggcggcggccctcagcatcgatctcatggaagagatcttcctccgcgttgcctcccctgcagacctcgcccgtgcctccactgcctgcgtctccttccgccgcatcatcagtgatccgtccttcctccgccggtaccgctctatccacccgccgctgctcctcggcttaatcggcgttgcaggtttcacacctgccgacccgccccatccctccgctgctctatcccgcgctgtcgcccgcgccgccgacatctccttcgacttcctacctcgcagtcgcaccgccaattggcgccactcgcatccgtggtatccgtgcgatgtccgcgacggccgtgtcctcgtcaagtgcattcgcgaggaacccgtcgtatacttggacctcgcggtgtgcgatcctttgtcccgtagatacctgctgctgcctcctttggccgaggacctagtactcgcctccgtcgggctccaaaaaccaagtgtggtccattctggggtctcgtttatcccttctggaggcgtggaggagacatcattcagagtgatcagctggaaatattccaagacaaggttagcggtgtttgtcttcacttcgtcttctggcagctggagcgtcggtacatctaccaccagggatgatctaggcttggaccacgagtttgtcaggctttattcggtccagtgtgtgtatggccactgctattggagattatgtggcacaagcaagttaatcaagctcgacatgaacagcatggagttctccactgttgacctcccacctgatcacgaaaagaggaatgtcatcattgtggagtcatggggaagcaatgttgcaatgtttagtatgattgatgaaggcgcatctgtggattattacacctcttcgcaaaatgacagcgagaagtcccatgagtggcatatgatgattagcatccctttgcctgcagactatattattggcccctgctttaagggtccagctgaagggtatattttcctagaaggcattcgaatagatcatgaggcgggacattcagggttattctcacttgagattaaatctttcaaaattgagagggcaacaccgcccgtcatccgcgccgccatcaacggaaggtgccgaggatctcctaccccgccatcaacggaaggtgtcaaggatcttctacccctgtactctgcaatccccgtcatccgaggccgccatcaacgccctcctacccacgccgtcgatggaaggtgcccgaggttccaccccatcgcgccctcctatctgctctgccccaccttcctccccacgccttcgatggcgcgcgcagatcccaggtggccgaggatccgccccaccctcctcccccaccttctagggcccctgccgtgccccccgcttgcgg

SEQ ID NO: 16039 - DNA, 207 bp, Zea mays
  Peptide Sequence Number=SeqID_59414
atgcccggattcgcgccctgctcgcccagatccgaccacgactttgatttcccaaacgacgcaggagcgcgatgcttccgttgcgccgtctacaactacgacggggactacaaggacaaggatggtgtcaaaggcctgtgcgtcgtgggcgccatcaacaactgtacctcccagctccccacctatgggagatcttctcccccataa

SEQ ID NO: 16040 - DNA, 1017 bp, Zea mays
  Peptide Sequence Number=SeqID_59415
atgtcttcgcgctcccttatgcagtgtgtctttccacctttcgagcccctggatggggaacacccgcaatccttccgccttgtcgttggaggaatgcaacttcgtggaagttggtacctttcagccatcattcggcttcaaggattttcatcatgcagcccggctgcatcccctcgccggtggtcacccaagacggtgaccaccagcccctggatggggagaagcaagccaggctgcggcccccgcccctcccttagcttcagggatgtttatcatccttgttggggcggagagcgaggcgagccggggctctacctcccgcacgggtcggctggccacctcctcttccagcttctggtggtggaaaccatcctccagctctgcgaaggaggcgtcctccagccatgccggggaaggcgaactgttgctgcccagctaggatgcaacattctgtcctcttcctcgctttcgtggcgaggatgggggcgaggacctgccgccgggagaagcttccccaccgttgaggctgtcagcgccgcctacgggccggcctccggctctttggctttgatgtctgactcgcctgttggttatctgaaccgcttcaccaagcgtgagtcgcctcgtgcgaaggtgacgagtgagctcgaacagaggcagagttggcttcgaaaagaagacttggtcggccggagcctggtcgggtcgtccgctggcgggaccgacgccagagttgagttgccgaggccacgggtcgggctcatgtcttcgggggacagccggccgaggcctcggggtggccggccgagccgtctgctcgagccggattcctggagaagaccctggcggcaatggcctaagcgtggtgctgatgtcgtccttcagagtggagatcctccgaccgcgtcaccgtccgaggctaggtcggacctcgccgaaggtgtagttgacgccgagggtgctgctgctcccttcaactgtcaagatccgagcctgcaggatcggattatcttgtag

SEQ ID NO: 16041 - DNA, 366 bp, Zea mays
  Peptide Sequence Number=SeqID_59416
atgggaacaggcgcctcttccccgtattcgtccgacaccagtcccgacaccgacacgcgcagtggctattgcacgtccacgaggacgattcacaacatgtgtgcaccatcattttcgtcgttgttggacgccccgttcgtcttctcggccttcgccctattcttcctccccaacctactgcccccgcccacggtcacagctgcgagccgatcgacgctcgtcgacgcgggtacggtgcgagtcagtcttgctcctagcctttctccgtgcgtgccgccgaggaggacacaatggcgcctgccacgcttaggttatcttggcgatgaggagcccaagtctgagatattggacatccaaggctcgtag

SEQ ID NO: 16042 - DNA, 762 bp, Zea mays
  Peptide Sequence Number=SeqID_59417
atggcgcctcctgttgacgtggtcggtccgtgccctaggttgggcgaggtggaggctcctccgaggtcgaggtcgagtctgtcttccaaggtcgaggtcgagtccgagcccccgggtcagacgaggcggagaccgtcggctgatgccagggctgagtccgagccctggggtcgggcgaagcgaagttcgtcgtccttcggggctgagcccgagtccgagccctggggtcgggcgaagcggagttcgtcgtcttccggggctgagcccaagtccgagccctggggtcgggcggagcggagttcgtcgtcttccggggccgagcccgagtccgagccctggggtcaggcagagcggagttcgccgtcttccggggctgagcccaagtccgagccctggggtcgggcggagcggagttcgccgtcttccggggctgagcccgagtccgagccttggggtcgggcggagcggagttccctatggcgcttgaggccggacttggctgctgtcagcctcactctatcgagtggcacagcagtcggagcggcgcaggcggcgctgtcctcttgtcagaccgttggcgtggcgatttggccaaggttgcttcttggcgaagactgggcctcgggcgagccgaaggtatgcccgttgctagagggggtcttcgggcgagacgtagatcctccgaggtcggctgcccttgcccgaggctgggctcgggcgaggcgtgatcgcgtccctcaaatggatcgatccttgacttag

SEQ ID NO: 16043 - DNA, 663 bp, Zea mays
  Peptide Sequence Number=SeqID_59418
atggagatgggagggatgagcgatgcggagcggctgttcttcttcgagatggcctgcaagaactccgaggtcgcgtacgagcagaaccccaacgacgccgcggatggaaggttgccagtccaccaaatcgcgcggatggaagcctgcaaattggtggtttcttggttcttatcagtggagctggctttggaatttgcaggcaccgttctgagctgcgctggtgctcctggaaaggtaactaatgatataggtttgctgaaaattaatcttggctgcctggtcttatatgtgcttctttcctaccagccattagatacagcagcttctaggatgcagacaagtgtctttggaaagtctaaagggctgagcgaaactcttgcagaaggtacttggatggaagcattcgatggcttaggcatttccattatattgacttgcaatccttctattcaggtactcaaattgaaagatcaatttggtggtacaatattgaatctattgcgtcggctcgagcttcacttgatcgagaggtggtggagcaagaaggtgttggtagcatactgggtgcaaccaaggttggccttgccgtggaacaattgtgagaggacatcatggtggcaggaagtcgaagaaggtgttttttacaagatcaagatgaggtag

SEQ ID NO: 16044 - DNA, 267 bp, Zea mays
  Peptide Sequence Number=SeqID_59419
atggcgcctgaggtcgggcctgactgcctgtcagcctcactctgtcaggtggcactgcagtcggtgcggcgcaggcggcgctgtccttctgtcaggtgctctcagttgctggggccagtgcacgccttaatggcgaggcgacggggcgagagggggctcggcggcggatgcgccggtgatggcatgggcgagacgaaggagctgacaggcggggccaggctgccagcgagagggagcggcgtgagagggagggggacgagacgctga

SEQ ID NO: 16045 - DNA, 321 bp, Zea mays
  Peptide Sequence Number=SeqID_59420
atggcgtacctttttcgacgcggtcattatggcgaaggcgaagcgtcgcccgcttcccctgccagaggcgccgcctgtcccgccgcggagttaatgcgacggggcgagtggttcgcggggcggccgttgcgcgtgcacgggccattcgaggaacggaacacgggcgcgtcgtcttcacaccgtgagagagggttctctcgctgcccccggatgggacgtcgcctcgagtcgcggtattggttccgcagtcgaggaggcgcggtagtgcacgggcggcggtgcagttgctcgcacgcagcatctggcgcgccggttgcatga

SEQ ID NO: 16046 - DNA, 429 bp, Zea mays
  Peptide Sequence Number=SeqID_59421
atgaagaatacgacactcatggtgctaaagttgtcatcctctggagtcgggagctcctcgtccggcggcgaatcgggctcggaggcggtggtgctcgcgaacgctatggacgtcaaccacttcggctacttccagcgcagcgtcgcccgcgagttcatcgtcttcgttgctcgcaccatcgctcagcgcacccagccaggccagcggcagtccgtccagcatgatgttgcattcatggatgatcattatcctgtatggagtgcattttctcttctgaatcaggtactatcggggaccataattaggggtaccctcaaggctcctaattctcagctgagccgaagtgactgcagtcacttcgccgctccactgaccgacctgacagaaggacagcgccgcctgcgccgcaccgactgcagtgccacttga

SEQ ID NO: 16047 - DNA, 129 bp, Zea mays
  Peptide Sequence Number=SeqID_59422
atggcgacacatgaggcgcgaggttcgagcgacgtcacggaaggtgcgaggtttttacgcttcaacctggagatgcgttcaccagtgaacaacatgccatatttttacgcagtgtaccgaattacataa

SEQ ID NO: 16048 - DNA, 699 bp, Zea mays
  Peptide Sequence Number=SeqID_59423
atggctcgtaaaagatcccaaaagaacaagaagacccaagagaacaaggaggtgttaaaggttcacactcagccaataaaaagatcaaatttggattcaacacaggagcaaagggccaaccgaaggcacctctggtttggcgcaccggactgtccggtgcaccaccggacagtgtccggtgcaccaccggacatgtccggtgcaccagaggactccaacgcaaactcaccaccttcgggaatttccagaggcactcgcgctataattcaccggactgtccggtgtacaccggacagtgtccggtgcgccaaggaggagcggcctcaggaactcgccagcttcgggaaactccatcggccagtccgctataattcaccggactgtccggtgtacaccggactgtccggtgcgactacggagcaacggctatctccgtgccaacggctctctgccgcgcatttaatgcgcgctctgcgcgcgcagaagtcaggcgcgcccatactggcacaccggacagcaaacagtacctgtccggtgtgcaccggacacccaggcgggcccacaagtcagaagctccaacggtcagaatccaacggcagtgatgacatggcagggggcaccggactgtccggtgtgcaccggactgtccggtgcgccatcgagcagccaacggtcaagtttggtgggttggggctataa

SEQ ID NO: 16049 - DNA, 847 bp, Zea mays
  Peptide Sequence Number=SeqID_59424
atgaacgcgctctctcgcgaagggtgccggcacttcgaggtctttgaccaagctgacgaagactttgagcgagatatctacaaggttgaggaccccatagtgaaggaatccgccggagccatctacgaccggatgtgggcgcgctgcctgacccggagccgaccccggcggaggccatgtccggggccacccccggagatcgcagaaggcgcaccggatacctctgcatccgctgcggccggcggagacctgcccccagagaccgccgaaggcgcgcctgatgcccccgcagccgctgcgccgagcgctgaagatcctgcgacggtggcggcggaggcgacggcggaggcaacggtggaggcaacggcggaggctccgcaggttcaagattttgggcctgcgcacgcaaccgccactactaaatttttggcggcttcgaccgcggatggtggtaatgaatgtggtggatctgcatctgagttttctgattttgctgactctgggagctcggttgagtggactgaggagtcgtcggaggaggacttggactactttgcggccttggatgtggctgcggcggaggcttcaccgcacgccgcggacacagaagatgtgtctggtcctagcaccgggcgccggcgacgaagggcggttgcgaagcgtagagttagtggggcggaggggggtcggcttcgagtgagtagggctggccggcaggaactgttgtctttgccggccgccgtgagtacaggtgaaggggaactgcgaagtctttttgcgggcttgtatgatgaggttgtgtgccctcgcttgtctatgcctgtgaaggcgttgtgtacttggtctg

SEQ ID NO: 16050 - DNA, 735 bp, Zea mays
  Peptide Sequence Number=SeqID_59425
atggttcgtgaatggagggtttttccttacgggcggaatattgctgctgttgtgtcggcagtgatcgacaaggatcgccagggagctgcgcaaaagcgccaggcggttgtcaggctcgttgaagccaggccgaagaggcagcggggggctgcgaaggctgcggctcccggcggaggcaagccgccgctggcggcgaagtcgggcacccctgcgtctagcaaagcgccggaggcaacgacaggtgccggaggctccaaatcgacgaaggctgtgccgccgtccagcacagtgccggaggccgcaaaggcggcccgagcattgccgtcggcaggcaagcgtgtcgtcgacttcgccaccgatattagtgtggacgactatcttggtgggtcggacgaaggccaacttgctatagttgcgcctgccgcggcgaccacgacggctgccgtagtgccgaaggcgaagggcggggctcttagcgccggaggcgaggtgttggccctcgcggctgtcagggatgaggcgggcgctgcgtcccgccggctgaaggaggtgacggaggcgctaagtcaggtggctaacttcgccaaccgcacagcgtcgggggccctcacggcagttgtgtctgccgaagtcgagagacttcagacacaacatgctgatgccgtccgtgaaaaatcggccaccgacagcaagtgccgcaagctggcggacaaggtggccgcgctggagggatag

SEQ ID NO: 16051 - DNA, 1149 bp, Zea mays
  Peptide Sequence Number=SeqID_59426
atgccgtcttcttcctcgtctgctgcaactacgccgccggccgacgcatcgtccgaggataccttgagcaatgtggcggtggaggagctacgtccgggtgacacggtggagttcagcgtttcgcggatttcctcggttcgcgtgcaggacatgcagcatcttgaatattttggcagcggagtgggtcgtgtcccaggggcggaggaggttcctgagcccaagggcgagttgctcgtgtttgaggtgtttttcaccgccgaccttcgtctgcctgcacatcgctttgtggcggaggtcctgcagaggtttgaggtccaggtccatcagctgactcctaatgtcgtggtggccctggcgaagaaagacaaggcggtgacctcgtatggtgagttatttccctgtgctcgcaataagtggggcaactggtgggatttctggttttatgtttccgatggcgaactcgaagaccacccagggctccccgtggccgtgatgtgctcccattattatgtggcgtacccgcaatttgaggtggtagaggatgatgaagacgaaggagcccttcggtgcgcggcccgcatgagtagcgagcgcgatttagttgaggaatttatcgagtttggggtgtggcccttggcacatggctgggcgctgggcgaagtatgcccttgcgagatgccctccctgggcaggcagcgggtgcgaagtccagccttcacgttggatctgcacggccgggatcccgccgcattcgtgcatgaagcggaagacggtgccgcgaggattgtggggcgctatgtgccgaggatagagggtctgcggagctgggatatccgtgggtccaatgttagattgaatcgggtcttcgaattggattgcttgtcgtacggtggttatcccggggaggacactgccgaccgccgcgggaagaaaccggtggacgtgaccgaggaagggccttcacaggaggctgccccggccactaaaaagagaaaattagccctcgggggaaggatgtcttcgcccgagctccgggagtcttcgacgcgaatgctggaggttaccgggggtcgatggcccaagaatgttccgatcccccgcgcggttggcgaagacttctttacgtcccgcatggcacgcgacttgaag

SEQ ID NO: 16052 - DNA, 351 bp, Zea mays
  Peptide Sequence Number=SeqID_59427
atgggtctcccgaaccgaggtggaaaaacattctggcaaggcttggcaccgacctccggtgacctcgattcgcggccgcacatcatagcggcgccagtagaacacctatgctcggatccccttagcagcgagggccctagggctcccgcgggagagcccacaagtcatactgagcgcttcacgcaggatgaggacgccttcggtctcgatgacacatttaagcatgggttgcttgaccccccttctgttaaagctggtcctcaaagagaacagggtgattggtgctcgccagtcttcggtcatgatgaggttgactatgcggtggccttcggtgtcgttggttatttgtag

SEQ ID NO: 16053 - DNA, 444 bp, Zea mays
  Peptide Sequence Number=SeqID_59428
atgggcaagagcaacaaacacaagcgcgagccaactcctccatcggaggacttcggcgactcggaatactcggaggaggatttctcctccgagtccgaggggtctccggctcctgtctctcccccagcgtcgtctgacgattcagacgactcccaggggcttgccgcggaggtctggacttacatccaggctgtcgagcgctccgggctcgagggctcgaatgagtcggagtactcctcagatgaggaggactcgtccgaggagggcggcggcggcgatggcggagatgacgacgacgacgacggaggcgatggtgacgacgctgacgatgacggtgacggcggcaacaggggcggcaacggcggcagcaagggtggcaacggcggcagcaggggcagcaacggcggcggcagcagcaagggcagcaacaaggccagtggctag

SEQ ID NO: 16054 - DNA, 411 bp, Zea mays
  Peptide Sequence Number=SeqID_59429
atgaagactctgacgactttctgtggctaccatcccctggagatggtgacgcaccccttgggactcttccctgctgagaagaaggatgatcccatgtggtgtaaccgcgtgagccatgtgaaggatgtgtgggcgatgtatcctgacttggttgggagggtcactgttcagtgcatgagtgcgctgtaccgccttcaggcccttcagagcgatgctatgtgtcggcgtttcgagaccggggggtccctaagccgacgagtgaatgtcgctgcgtgccccagcccagatgggtcgagcgcgtgggcgagcgcgaaggggggaagcgaggtggccggagatgggcgtgagagaggtggaaatcccgcggccttcgtgttcgtcccgcgcccaggtcgggtgcgcttgcagtag

SEQ ID NO: 16055 - DNA, 480 bp, Zea mays
  Peptide Sequence Number=SeqID_59430
atggtgtgtatgggcctcggcggccacagaaaacacacactacaagataatccgatcctgcaggctcggatcttgacagtcgaagggagcagcagcaccctcggcgtcaactacaccttcggcaaggaatccggctcgagcagacggctcggctggtcaccccgaggcctaggccagctgtcccccgaagacatcagcccggcccgaggcctcggcaactcaattctggcgtcggtcccgccagtggacgacccagccaggctctggccgaccaagtcttcttttcgagccaactccgcctctgcccgtgctgacactgctacccctggcttcggctcatcgaagagcggccgaggggttcctttaactaagcaagagaagcctcggacagcaaggctgaccgagccgagggactcctacgcctccgggatacggatacctcactcgtcacctttgcacggggcgactcatgcttggtga

SEQ ID NO: 16056 - DNA, 300 bp, Zea mays
  Peptide Sequence Number=SeqID_59431
atgaggtctcccattccggttatggtgggtacaagtgcggtcactgcacgacggccagtcggggtcagtgaggcattgtacgccaaggcggtgagccctgatctgctgacggggaatcgatggggacggttgataaactcagctagtgcttttggcaaccaaaccccacagccaaacagctgcatgtctagaggttctctggaggagatggttgctgggataacttggccgtccaccttgccaccgggttggactgtcgagtgggaccctgcctcggctaaggaggagcatgaggagtga

SEQ ID NO: 16057 - DNA, 714 bp, Zea mays
  Peptide Sequence Number=SeqID_59432
atggacagtgttgtcctgacctggatcctcggcactctcaaggtcgagatgcaggacaacgctcagtcccgctacgcgcaccagcgggccatcctcacgcggatcacctcattctcgtccttcgctcgagttcgcgatgatcttctgctcgaggaacttatgactacggcgccaccaccaccgatgccacgacatctctctacagtgcccaccccggagagcaggccctgcggcccccccgtcctacctccggggagatgccccctcggcagagcactcctccaccgccctccgatgcccctcgctcgactaccacctctggcgatggtcgtcatcgtcgccaaggcggtcgtggtcgcgtgggtggtcctagtagttctcctgcggctcggagccatggctcctggccatccttctacaacccgtggaccggctccatctccatgtggcctggaccacctgcgggccctcctccaccatgcccgacggcccctcagccaaccttctacgccactccacctccgttggcacttccggcgaccccggcaatacctcacctccagtcaggatcttgctaccaggacacttcccgcgcgttgtgacaactccgggccgctctacacccttcgcctgcctgcctgcctcctcttcatcgacctccaccccgcatgctttgaccgctgctgcctccatcacttggcaccgccaccttag

SEQ ID NO: 16058 - DNA, 300 bp, Zea mays
  Peptide Sequence Number=SeqID_59433
atgaggtctcccattccggttatggtgggtacaagtgcggtcactgcacgacggccagtcggggtcagtgaggcattgtacgccaaggcggtgagccctgatctgctgacggggaatcgatggggacggttgataaactcagctagtgcttttggcaaccaaaccccacagccaaacagctgcatgtctagaggttctctagaggagatggttgctgggataacttggtcgtccaccttgccaccgggttggactgtcgagtgggaccctgcctcggctgaggaggagcatgaggagtga

SEQ ID NO: 16059 - DNA, 408 bp, Zea mays
  Peptide Sequence Number=SeqID_59434
atggaagtaggcaagtattacttggccgaaccacgggataaaaatcgcgtgtctcttgatcacctattcacccccccccctctaggtgctctcaggcgcggggcggcagctgggggcggagacgcgatgcaaagcgcgctcacgatggggagggctagaggggaaggaggcgaagatggtaggctttcggcacacgctcggaggagagcggggatggtgggatgtgcgggtgggcatgggtccggcgcctacttgcaggagctgcggcgccggagacaggatgtgtggggcgcggatgtcgcaccccagcactggagacaggatgtgtggggcacggatgtcgcagagtgggtgggagtggagacgggggcattcaagggtgtggacgcccacactgctgtcttatag

SEQ ID NO: 16060 - DNA, 1170 bp, Zea mays
  Peptide Sequence Number=SeqID_59435
atgcgggtggcacccagggtgctcttcctcgtccgcgacgccgcgggctacggcgctgccctcgccgacgcgctccgcccgccgcccgggctaactagggagtcctcgcccttcgagctcccccttggaaagtacggcctcgacggagagaaggcgtgcgccgagctcctgagcttttccgattccagtggctctccacaggtgaccatttttgttctgccagactataagccacctcttgcagcgtgtgttgtaaatggggtcttggaactgatttcttctgaagctacctccactgagcgaactctaattgtcccatacatcacaagatcgtcaagctatcatcatggaacggaacatgcaacaaaggcatcgactgtacttcatggtgctgaaataggggcaacaactgactatactcacctgttggttggtgggaccactaaacctcctacatccttgcaaatacgtagtgaaccaatattatgtttgctggaaatggtgcgtgtgttgaaggtgcctacagttcttcttgtcacttctggtggacagcagcaaggcaagagctctacagtttctgatcttgaggggtcagcggataaccgcacgacagaactagcgcgcgaatgggagagagatggccattttccgtcgggatcgcgcgacgcggcgcagttgaccgggacgagggggctacagttctcttattccctccgcaacgccgcgcactgcggcatcctctccgccgtgttccccttctctctcacgccagataaggcggatcactattcaccccccggtcgcttctcgcgaacgcctacgcccacgccctggcgaggaaagttcttggtcgatttcgctacgcctcgacgcgtccatcgagcgtgggcgacatggcgtcggatctgccggtacaatgccgattcagatccggtggacctcgacgacgagcaggagcaagtgcacggcgacgaggtcgtgacgaagcaatcccgtgtgcggaggaggacgaagcaccgacaaatacgactccgccgaggctgttcttcgtcgccacatctgtctccctccactccgaccgtcgacggcatcctcagatccggatttcctcccttcgcttctgacacttggaccacagatcttgccttcctcaggcaattcattcggtaa

SEQ ID NO: 16061 - DNA, 819 bp, Zea mays
  Peptide Sequence Number=SeqID_59436
atgcagacctgtgcgtcactggttcactgctatctcactactgccttgctgctagcagggcttgcaaatggtggagtggaagtcaagcaaacacctgcaagtcctgtacccaaatcagttgaatcctcacttccacttgtcaagatacccacaccagaatcaagcaaagagaacagcggtgttatgtggatatcctcacctgatcggcttgaagatcctcgaaggccatttcagtactctaacagttctggctctccctgtgtttcagaatcaggatctgacatttatagcaaaagagaggtcatacagaagctaagacagcacctcaagaaacgtgatgagatgatcatggagatgcaaactcagattgctgatcttaagaactctcttaacattcaggtgacacagtccagcaatctgcagtctcaattggatgctgccaatcgtgatctgtttgaatctgaacgagagattcagcatctaaggaagattattgcagatcattgtgtcacagaagcactctctcatgataaacctttgcaagctgcgcattggcagccagatgccgcaaatgggcattctaatggctatggtgatggttgtgttgatgatgctgacctgcattgtattagcatcgagaagaggaaggtagaagtagagagggtggagatgctcaagaaagaggtggttgaactgaaggaagtcattgagggaaaggactttgtgcttcagagctacaaggaacagaaggtggaactcttctcaaagatcagggagttgcaggaaaagctctcagcacaagtgccaatcatcttgtag

SEQ ID NO: 16062 - DNA, 549 bp, Zea mays
  Peptide Sequence Number=SeqID_59437
atggggagtagctctctccgggcagaagggaatcacggcttgtgggtaaagtgcacaacctctgcagagggtttgaaaactgatatatcagccgtgctcacggttatgagcggccaagggagctccagtggcaatgagactgatggttttggttatgtctatggtgctgcaggagatagagtctgtgaggagctgctccccctgtgcttcccctggaggcgcccccctgcacccaccactgggcgcccccagcctctgggaatagctgctggaggagacccagacgacggaggtggcgacgacagctcgagccacgacgccgacttccctgctaaccaggagccggaaggatgggtcgctcgacctatcactcgcgacgctgctcgtgggtgtcacttccacgatgcgctcgacaccctgctacgtcgggcacttaaccggcgtacttggtcccatcgagtatcgctgtgtgggtctaccagcaatagtcgtggggtctactcggacccgctgggaggcgatttgctggtcgccttggaaaagtcctag

SEQ ID NO: 16063 - DNA, 186 bp, Zea mays
  Peptide Sequence Number=SeqID_59438
atgcgccccaactcccccttagagccccgccagtgcccgcactcacttccccgcctcatttcgcacagcaccgccctctctcgcgctctgcccacgctgccagatgccgccggagacccgtgcccgcttccccgaccatctagttcgctggagaccgcgccaagccaccccgagctccgccccgag

SEQ ID NO: 16064 - DNA, 123 bp, Zea mays
  Peptide Sequence Number=SeqID_59439
atgtggacccacatagtgaacggaacggagcgtgactgtgagagcgggatgggaacggagcggctccgtccggttgattttttggagcggaatggttctggatctgaggagaatattccctaa

SEQ ID NO: 16065 - DNA, 243 bp, Zea mays
  Peptide Sequence Number=SeqID_59440
atggggtgctccagcgccgccttgctcttgttgtcgttggaggagcgcggcctcgtggagatcggcacctttcagccatcgctcggcttcaaggattttcgtcgtgcaggctggggtggagatttttgggaccctcggctgctctgcgatgagccagagccggaggcagcggtgttagcgcagacagacgtggagttggctcagaaagagacttcgtcggcccgggagatggcggtttcctag

SEQ ID NO: 16066 - DNA, 336 bp, Zea mays
  Peptide Sequence Number=SeqID_59441
atgcggcggcagcccgagtcgacggtggcggacctcggcggctgcgcagagaacggcggtgagcgcgggcagagggattcggggagggagaggggaaattggggcgcgtcccgagttgcggacgtcggggcgaagctcaccgtggcagagggcacggcggggctccaatggcgacggaggaacgagctcaggcggcggtggtttaatggcggcggcgctttggcgtgtgcgcagcgtgggggaggtgggagaggggtctgcagggaccgggaaagggggataccccgaaaaggatccttccccgtgaaggaaccaggctccgagcctccctactga

SEQ ID NO: 16067 - DNA, 837 bp, Zea mays
  Peptide Sequence Number=SeqID_59442
atgaacaaaaacattgacattcgaagtgccattacaatcggaactccggttccgtccccgcgggtatggacaacctccacgccggggaagcccgtggagcgacaagctctgggcgaatcaccagcaaacgcgggtcgccccaaagcgcaccgacaagctggacagcaacagcccgcctcccccagcatggctggaggacgtctcctctacagaactggaggatggtctccaccaccagaagctagaagaggaggtggtcggccgacccgcgcggggggcagagcaccggctcagcccggcccccaccccagcgaggatgatgaagaccagctaggggcggggccaagatcacagcccagcttgctcctccccatccaggggctggtgccgtcatgggctgagtcttctccaacacactccaaggtcctcccctacggcgcggggggctgggtcccacacgtcatgcgagccggctcagagcagaagaagccaaaccgccgtgcgcggtgcgtacaaccgcccagcggttacaagcgactctccacttttgcccagaccaacgggcaaaaggggcgggcagccatgcaggcggtatgcaaccgcgccaagtgggcgcacttctccgactcccaacacgcccagcatggaggcccagacccacgcgtcatgcaaccgacgcgccgaatgcttcgtgcatgcaactgcaccgccacttgcgccactaccgcgcctcctcgactgcggaaccaataccgcgactcgaggcgacccagcgcacgacccagcagcgccagcctggcgcggcggtcaatgcggccaaaaatgggccggcagtaa

SEQ ID NO: 16068 - DNA, 441 bp, Zea mays
  Peptide Sequence Number=SeqID_59443
atgggcgtaccagacagtccggtggcgcaccgaacagtcattgttcactgtccggtgcacgccatgtacaaccaacaccggggaggtcgtttcaaccccgatggagaccaaagtctgagctcgccaccatcgaggcctcgagcctttagccgtcacgttcttcaagcaccggtgccacagcggtataggcgcgcccaccaatatcgcaaaatatttgggagagtcaaaccccaacctctggctagtagactaccaactggtgtgccatgcgagaggagcggaccacgacgatttcataattcgcaacctacccctgtatttggtagattcggcgtgggcatggttagagaacatgaggcctggctgcatccaaaactggcccggcctcaaggaaatctctacatccgacgcttctcgcggatagtgcaacgacctaactaa

SEQ ID NO: 16069 - DNA, 207 bp, Zea mays
  Peptide Sequence Number=SeqID_59444
atggaggacggtgcgaccacgcctggttgcagggcgatgtcacaccacgatgatgaacgtctgtcaccgtctaatttatggcaaaggcgggtcaccatagtgaacggaacagagcgtgactgtgcgagcgggctgggaacggagcggctccgcccggttgattttttggagtgggatggttctggatctgaggagaatattccctaa

SEQ ID NO: 16070 - DNA, 6534 bp, Zea mays
  Peptide Sequence Number=SeqID_59445
atgcaggccttgaggggttatcatcttcttgcactttttcttcataggagaatgtcactatttgatatgcaatctcttgatatcttctttcgtattgctgcctgtgaggcttcctttcctgagccacagaaatcaaagataaatcgaacagcaggctatgcgtctggaatgtccccagaggccagccttgatgatctcaccttacccaggtttgccgatgatatgtcttctgggggatcacatggggatctagatgacttttcagctcaaaaggattcatttagccacttgtctgagctggagaatgctgacttagctggtgagacttctgaattcatagtcttgtcaaatgctgatatggttgaacacattcttttggactggactatatgggttgctgctcctatatcagtgcaaataactcttcttgggtttcttgagaggatggtgtccatgcattggttcagaaatcacaaccttacaatgctgcggcgaattaatcttgttcaacatcttcttgttacgttacaacgtggtgatgttgaaattcccgtgttggagaagctagttgtgcttctaggtgtcatcctggaggatggttttctagcttctgagctggagcttgttgtaagattcataataatgacatttgatcctccagagcttacaccgaaccgccagattgtgcgggaggctatgggaaagcatgttattgtgaggaacatgttattggaaatgcttattgatctacaagtaaccataaatgctgaagagttgctggagcaatggcataaagttgtttcatccagattggtcacatatttccttgatgaagcggtacatccaactagtatgagatggatcacgactcttttaggagtttgccttacgtcatcaactacatttgcattgaagttccgtacaagtggaggttttcaaggattgaatcatgtgcttccaagctttcacgattctccagaaatatactatatattgttctgtttggtgtttgggaagcctgtttatcctcgagtgccagaggtccgcatgcttgatttccatgctctcatgcctagcgatggaaactatggagaattgaagtttgtggatctcttggatactataattgcaatggcaaaagctacatttgattccttgattatgaaatctatgcttgcacatgagaataacaatctttcacatcttaatggcaccttggtcgcggatcttgttgaggcgacatcggacatgggaggtgatcttcaaggagaagctctgatgcataagacatacgcagcaaggttaatgggtggtgaagcagcagcacctgctgttgctacttcaatattgaggttcatggttgatctggcaaagatgtgcccaccattctctgccgtttgcaggcggcatgatttcctagagagctgcattgatctctatttctcttgtgtgagatccgattttgccctgaggatggcaaaagatcttacaactgttgcaactggcgagatgaatgaacatgatgatgataatggaagtttaaaggatgccctttcaagtttaccacatgatcaggatcaatctaccaaaacattgagtgccacaagttttcctcaggagcagaaaagttccagttcagaaagtactggcatgccaaacccttttgaaactgctgaagccaaagcagatgattcttcgaatcaggagttcagcaataaaattttaaatggagaagcaaatcaaatatttaataatgctcgtgatcaagggcggatcacagcttccggtgcaaatggcatttctgaattccaccatgtaactgattcacccaactcagttgctatgaataatgttggatctcctgttttatccgagaggtcaacccacagagcagctagtacccctactgcatctccaatggccccattcacatcttggcctggcagtgcaggatcgtatactgatggtagacacctgacagcttctccatccatggcttcatctatatctgggatagacctggactcgtcccctgatctgaggacaaatattcagggaccatctgccgcaaatacccttttcccaatcaattccaagcttttgcttgacatagatgatttaggttatgggggtggcccatgctctgcaggagctacagctgttctagattttgttgctcaaattcttgctgacactatctcagatcagcttaaagcagcactctttattgagaacattttggagtccgtgcctttgtttgttgatattgactctgctctagtttttcaaggcttgtgtctaagcagattgatgaacttccttgaaagaaagctcttgcttgatgatgaagaagatgggaagaaacttgacaagagccgctggtcggtcaatttggacccactttgctggatgattgttgatcgtgtgtacatgggctgctttccaaccccactcagggtactacaaacactagaattcttaatgtcaatgttacagcttgctagtaaagatggccgtgttgaagatgccgtgcctccagggaaaggtattttgtccattgctcgaggaagcaggcaacttgatccatacatccacgcgatattgaagaacacaaaccgaatgataatgtactgtttcctcccaatattccttaaaagtatgggggaagatgatctacttgcaaatcttgcattcctgacggaaactgggaggagtttagcttctaaacgttatcaggaagatttttctattgatatttgtacagttcttcagctactagttgccaacaagagattggtgctctgcccaagcaatgttgatacagatctaatgtgttgtttctgcataaatttaatgtcacttctccatgacaagagagtaactgctcaaaacttggcagttgatttacttaaatacttggtagtgcatcgtcgtcaatctcttgaggaccttctagtttgcaagcctaaccaaggacaacaactggacatcctgcatggaggacttgataaattggtcactggaagtacatcaacgttttttgaatggctgcaaagttctcagcaaacaataagtaaagtgttggaccagtgtgctttaataatgtgggttcaatatattaccggctcagcaaaatttcctggcgtgagaataaaaggaatggaggtcaggcgcaagaaagagatgggacggaaatttcgcgaatctgcaaaagtagatgccaggcactgggagcagataaatgagcggcggtataatcttgatttggttcgtgatgtgatgtctacagagctaagagcaattcgtcaagacaaatacggttggatattgcacggagaaagtgagtggcaaagccagctccaagaacttgtccatgagagaggtatttttcctatgcggcaaccatccacagaacctgagtggcagctgtgtggtgttgaaggaccatatagaatgaggaagaaacttgagcactccaaatttaagatagatactattcagaatgttctaaccagcaaccttggatcaaatggtggtaagattatcaataaagaggatggagaattgttgttgacatctgggtcagacacaatgtcaggcttgaatcttttgacctatgacactgagcagagggatcttgatgctgtcgagttttcgtcattcaaagatgatgatgacatattcaaaggaggaagcacaatttcaggtccaattggctggactgatgataaaagcagcgttaatgagcagagccttcattctgcgacggaatttggagcaaaatcaagttccctttcttttcacatgactgagagtcaccagggtaaatctgaacttagttcaccaaggagggcaccttcagtcaaaggtactgatgcaagaacctcagaggataaatcagaaaaggagttgcttgacaatggtgagtatcttatcaggccttatctggagccctatgagaaaataaggcataaatacaactgtgaacgggttgctggtcttgataagcacgatggaatatttttaattggagaactttgcttatacattattgagaacttctacattgatgattccaattgcatttgcgaaaagggcagtgaagatgagctctctgtcattgatcaagctttaggtgtgaacaaggatataatgggaggcagtgaatctcagttaaaatcacctaccacttggggtgggacagcaaaggtcttgcttggtggcagatcatgggcatataatggaggtgcttgggattatgagagcgatgttttagatctgaggaatccacagacatttcgcaggcttgataaacccatgggatgccaaacggaggaaggtgaagaggaattctgcaagagatatgatagctgggatgaccctgatgtaccaaagttccattatggctctcattattcaagtgctggaattgtccttttctatctcttaaggttgcctccttttagcacagaaaatcagaaattgcagggtggacaatttgaccatgcagaccggttattcaacagtgtgaaggatacatgggtaagtgctgcaggcaaaagtaacacatcagatgtgaaagaactaattcctgagttctattatttgcctgaatttttggagaaccgttttaatctggatctgggcgagaaacaatcaggagagaaggttggtgatgttgttttaccaccttgggctaaaggcagcgccagagagttcatcaggaagcatcgggaagcactggaatcggattatgtatctgagaatctgcatcattggattgatcttatttttggatataagcagagaggaaagctggctgcacgggtgcgcgacagttggccacgggtgtcggtgtggattctcgcgcatggtttggcggcgacggagagggagccgcgcacgggccggacgaagcagcatcgacaatgttggtcggaggaggggtgctgccgcggcggtggcgaggcttcccgcgtctacgatagtggcagtcggttcgaggagcttgacagatgctggaggggaaggaggccggcaaccggggggtggccggcagcgggggatctgagtcaccgggggagaggcggcgccaggggaggggtcggcgtcctacagatgggaaaggagaggcggaggctcggtggaggggcagcgactgcgcaggcctgctcctggctcgcggcatcggcggctcgtgccctgctattggcggcggcgtcccggggaggcatcggcttgacctggtgccgcgtcggcgtcgcacctggggggtgccgagggttaagatggccccggaggagaagaagtcggcgccgacgagatccatggggagaccggcggctgcaggatggaggggcccaacgggcagctgaagatgccgtcaatgtcttctatcactacacatatgaaggcaatgttgacatagacgcagtatcagatcctaccatgaaggcttcaatactagcacaaatcaaccattttggtcagacccccaaacagttattccagaaaccacatccacagaggcggactgacaggaaagtccctcctcatcctctacggtactgtgcctatctaacacagcaggagattcgcaagacagcatcttcggtgtcccagattgtctcctacaatgataagatcctaattgctgcagttaactgcttgctcaagccgctaacttataatgaatacatttcctggggattccctgaccgaagcttgagaatattaacatatgatcaggatagacttttgtctactcatgaaaaccttcatggtggtagtcaaattcagtgcactggagtgagccatgatggcaacattctcatcactggtggtgatgatggagttgttgcagtgtggagatttgtgaaggatggcatccgccgtctcctgagaatggagaaggctttgtgtgctcacacaggaaagataacttgcgtctctgtcagccaaccttactcattaattgtctcaggctctgatgactgttctgttatcttatgggacctgacaagcctagtctttgtgaagcagctaccaaggttcccggcatcagtatccgcgctacatgtgaacagcctcactggtgagattctgactggtgctggtgttctttttgctgtttggagcatcaatggggactgccttgctgtggtgaacacctcccagcttccttctgacctcatcttgtctgtgacaagcgcgacacactcagactggcaggacacaaactggtacgtgacaggccatcaaagcggcgcggttaaggtatggaagatgttgcactgctcgtctgatgaagcagtaaatagcaagagcaaatcacctgcggtatcgtctggtgggcttagcctgaacggccaagcaccagagtataggctacttctgcagaaggtgctcaagtcacacaaacaccctgtcactgccctttgtataccaccggacttgaagcagcttctgagtggggatggcagcggtcacttgctctcatggtcattgaaagacgacagtttcaagggttcatag

SEQ ID NO: 16071 - DNA, 1074 bp, Zea mays
  Peptide Sequence Number=SeqID_59446
atgaagaagaagaaagtgatgatgaagaagataatcaaccatcaaaatcatcctctgaggacgaagaaacaatccgatgcgtcagaaagggagaagcaccacttcaaggacaactgtccaaatatggctgaacccacaaagaggaggagcaaaggcaagacacttacaagtgtcaaaacttgggacgactcttcaagcgaagatgaacctccaaagacgcgcagccaccgatcctcatcacgctcatcccggtcatcacgcaagtgccttatggcaagaggtaaaatgagtattccatcctctagtgatgatagcagtagtgatgacgacgaaggtgaggaaaagccctccttagatgagcttgcggaagccgttaaacttttccaggatgtgcataaggttcaacataaaccaagaaagaaattaagttggggactcaaacaagtttggagcaaaggacttggaatggtgctgctaatggagcaccggacagtgtccggtgtaaaaggttcacactcagccaataaaaagatcaagttttggattcaacaaaggagcaaagaggcaaccgaaggcacctctggtctgggggcaccggactgtccggtgtacaccggacagtgtccggtgcaccaccggacagtgtccggtgcaccagaggactccaattcaaacttgccaccttcgggaatctccagaggcactcgcgctataattcaccggactgtccggtgtacaccggacagtgtccggtgctccaaggaagagccgcctccggaactcgccagcctcgggaattcgcttcggccactccgctataattcaccagactgtccggtgtacaccggactgtccggtgtacaccggactgtccggtgtaacagcggggcaactgctatttcggcgccaacggctacctgcgacgcatttaatgcgcgcgctgcgcgcgcagacgtcaggcgtgcccatactggcgcaccggacaatgaacaggacatgtccggtgtgcaccggacatccaggcaggcccagaagtcagaagctccaacggtcagaatccaatggcattggtga

SEQ ID NO: 16072 - DNA, 237 bp, Zea mays
  Peptide Sequence Number=SeqID_59447
atggtaacctgtgccaacggtcgactgccaaaggtgaacaatgcgcgtcagaagtcagagcagagaagtgtgccctcactcttatttttctctgggtccgcccctagtgggggaggctataaataccccaaccggccatttggaggtgtgggagcccaagcaacacaccaaggcatattattgacatttccaagtgctcaaacactcaagtgcttaatagaatcactcagtgattag

SEQ ID NO: 16073 - DNA, 1179 bp, Zea mays
  Peptide Sequence Number=SeqID_59448
atgcgtcatgcaagctggcctaggacagaaggagccaaaccgccgcgcgcggagcgcacaactgcccagcggttacaagcactcctccactttcgcctaaaccaacgggtgaaagggcggaccgccgtgcaggcggcatgcaactacaccaagggggcgcacccttccgacttcgacgcgtccagcatggaggcccaggcccacgcgtcatgtaaccggcgtgccggttactacgtgcgagaaactgcaccgccacttgcgccagtaccgcgccttctcgactgcggaaccggtgccgcgactcgaggcgaccctgcgcacggcccaacagtgccaaccgagcacatcactcacgggtcggtccgccacgggagaagacgcggcggtcggtatggccaaaggtgggccggcagtaatggcggcggcaggcgagcgaaagcagcagtcaaatcgtctgcaggctcacgtcccctcctgggacagcgagagagccctctcccacggcgtgaagacaacgcgcccgtgttccgttcctcgaatggctcgcgcacgcacaacggttgccccgccaaccactcgtcccgtcggattaactctgcggcagaacaggcgacacctttggcagggaccggcaaaggggatactccgaaagggatccttctccgcgaaggaagcgggccccgagccctcctactgatcagaggttcgaaggctggcccctcggaagggttcgacagccgccttagagaactcgggctccgcgcccactactggtcagaggaagctccacctcgcccgaccccagagctcgggctcaacctcgacgccggacgacggactccgcctcgcccgaccccagggctcggactcagccttgacgccggacgacggactccgcttcgcccgaccccagggctcggactcagcctcgacctcggaagacggactccgcctcacccgaccccagggctcggactcagcctcgacctcggaagacggtctccgcctcgcccgaccccagggctcggactcaacctcgaccacggacgacggtctccgcctcgcccgacccccgggcccggactgagcctcgacctcggaggagcctccgcctcgcccgacctcgggctcggaccgaccacgtcacaggggggccatcattaccctacccctagctag

SEQ ID NO: 16074 - DNA, 627 bp, Zea mays
  Peptide Sequence Number=SeqID_59449
atggcggattttgatacccatgggtattttattgggtcatttgttatgctcatcgggtacggtgggcgtgggttgtttggtgctgtgaatgacatcttctgcttgttccaagggcatattgagaacattgccaacctgaagcagcattatggcctgagcaagactgcaaatgaggtgactatcctcatagaggcctacaggaccctgagggacaggggccctgtcccagccagccaggttgtgagagaccttagtgggaagttcgcgttcatcctgtatgacaccctgtcgaagtctacctttgttgctgctgacgctgatggtagcatccctttcttctggggcgttgactacgaaaaccaccttgtgttctctgacgatgttgggatcctcaagacaggctgcggcaactcgtacgctccatttcctaaaggttgcttctacaccacctccggtgggctgcagagcttcgagcacccgttgcacgaggtcaaggcggtgccacgcgtggacagccaaggccagatgtgcggctccatcttcaaggtcgacagcgagagcaagaagaagcaggacgctagcatcccccgcgtcggcagtgctgccgactggtccaaccagttctga

SEQ ID NO: 16075 - DNA, 366 bp, Zea mays
  Peptide Sequence Number=SeqID_59450
atggtgaccaccagcccctgggtggggagaagcaagccgggctgcgatcttagtcccaccctcagcttcaaggatgttcatcatcctcgctggggtggaggccaggctgagctggagctctacctccgcgcgggtttgtggcttcagcgcgttgggttcgccggcttggctcccggagccccctcctgccgcaagggcggttatcgcgccgtgcgcacgggaggaccgcccaagacgtcgcgcgctgccagggtggcgtttgtgttctggggcggccctgcctttgcaccggtacggcgcctccgcgcggaggttggtgccccgctcgtccggggggatccgagtggggatctgccggtgggctga

SEQ ID NO: 16076 - DNA, 279 bp, Zea mays
  Peptide Sequence Number=SeqID_59451
atgcagaaatggctacagcacgaggacgaggactccgtcatcaaacgcagatgggaacccagggtcgggacccagtcctacggcaagtaccaaaccaagaagggctccacaactctcccccagctaggaaggacccttcaagttttccggatgttattttatctaacccacccaaatagttcccatcccatcaaacatgatggcatccgaattgaacaaccagacttacagtttaggacctctctacgaaagcaggagtgcccgacagcatgggtgtga

SEQ ID NO: 16077 - DNA, 252 bp, Zea mays
  Peptide Sequence Number=SeqID_59452
atgaggatcaggctcaagatgatgaaaatgaagatcaagaggatgagccacctcaagaggaggacaatgatcaagggggagatgaagagaatgaaggcaaggaagatgatcaagagatacagggtcaaagaccgccacacccaagagtccaccaagcaattcaacgagatcaccccgccagatctgcaagtctacgccaggcggtggagccagaagccagttccacaagctctcaccccttccgccggttaa

SEQ ID NO: 16078 - DNA, 486 bp, Zea mays
  Peptide Sequence Number=SeqID_59453
atgccttgcttctctcccactcgcggcgtcctctcgcctccgagctctctgcgcccctttgccttcaaggtgcgcggccttgtgggagcggcgctcttccactggtgcttggcttcaaggatgttcatcagcctcgcggtggtggagagcgagctgagccgcggccccgcctcccacatgggctggtggcccgcctcttcctccaacattcggaggaaaaggatgatcaccagccttgtgaaggaggcgaacttcgggtacacggagggtgggggcgagggcctcttcgccatggcacacacgttgaggtggtcgccaccgctggggaggctacccggcgcagaggtggtcgcctccgctggcgagccactcggagcaaaggttgccaccgccgctggcgagccgtcggtgcagaggtggtcgctgccgctggtcgagccgctcggagcagaggtggtcgtcgccgctggcgggccgtcggggtag

SEQ ID NO: 16079 - DNA, 363 bp, Zea mays
  Peptide Sequence Number=SeqID_59454
atgcagatccaacgcgaaggctggacttcacacccgctgcccgcccagggagggcatctcgcgagagcatacttcgcccaacgcccagccatgtgccaagggtcataccccatacctgatgaattcctcactaaatcgcgcccgctactcatgcggacagcgcaccgaaagggctcctttcgtcttcatcatcctctgccacctcaaattgcggacagtaatgtttggcgaagacctccacagaaggctgaccaccatacgaagtcgccgcccagacatacttcgccagggccaccacggtattcggcgtcagctggtggacctagacctcaaatctctgcaggacctcctgagagcacctag

SEQ ID NO: 16080 - DNA, 411 bp, Zea mays
  Peptide Sequence Number=SeqID_59455
atgtcgtcttcttccttgtctgctgcaaacacgccaccggccgacacatcgtccgaggataccttgagcaacatggtggcggaggagctacatccgggtgatacggtggagttcggcgttttgcggatttcctcggtccatgttcaggatatgcagcagcttgggtattttggcagcggagtggggcgtgtcctgggggcggaggaggttcccgagcccgagggcgagttggtcgtgtttgaggcgtttttcaccactggccttcgtctgcctgcacatcgctttgtggcggaggtgaaagggaaatgtgcccttgggccatttctatgtattttggtgattgagtgccaacacatgtgcttaattgggaatttatgtacatggatgaacaaggtgaaaatcatgaagtaa

SEQ ID NO: 16081 - DNA, 1002 bp, Zea mays
  Peptide Sequence Number=SeqID_59456
atggcggacgcgaagcagcagcagcagcagccacagcaggcggcagcggcagccaccggcgtgtggaagacggtcaagcccttcgttaacggcggggcctctgggatgctcgcgacctgcgtcatccagcctatcgacatggtcaaggtaccgtaccaccgcaccgctctgtcacccggcttccttcacagtgctcggggcttcgccccttcgtcaaaaaaggtgaggatccaattgggtgagggctccgctggtcaggtcacaaggaacatgcttgcaaatgagggtgtccgttctttctacaagggtttgtctgccggattgctgaggcaagcgacgtacacgactgctcgtcttggatcctttagggttctaactaacaaagcagttgaaaagaatgaagggaagccattgcctctaattcagaaagcttttattggtctgactgctggagcaattggtgcttgttttggtagtcctgctgatctggcactcattagaatgcaagccgactcgaccctgccagctgcacaacgacgcaactataagaatgctttccatgcactctaccgtatcagtgctgatgagggagtccttgcgctttggaagggtgcaggtccaactgtggtgagagctatggcactcaatatgggtatgcttgcttcctatgaccagagtgtcgagctatttagggacaaatttggcgcaggagaaatttctactgttgttggagccagcgctgtttctggattcttcgcctcagcatgcagtttgccctttgactatgtgaagacacagattcagaagatgcaacctgatgctaatggcaagtacccatacacagggtctttggactgtgctgtgaagaccttcaagagcggtggcccattcaagttctacactggtttcccggtgtactgcgtcaggattgcaccccatgtcatgatgacctggatattcttgaatcagatccagaagtttgagaagaagatcggcatatag

SEQ ID NO: 16082 - DNA, 213 bp, Zea mays
  Peptide Sequence Number=SeqID_59457
atgtcgcgcgcgttcgatgactactatattaaggactgtgacgtcatctcggcgccgaaggtgacgcagaggaggaccgacagcaatgaccagttcgtcatcctcgccaccgtcggggacacgggcgcggacgtgaaccccggtgcggcgccccctccgtggtccacactcgactccgccttccaccgtagccgcaagttggatctgtcctag

SEQ ID NO: 16083 - DNA, 477 bp, Zea mays
  Peptide Sequence Number=SeqID_59458
atggtgtctccgaccatcacacgcagacgcagacgccgccttcttcctgaccagcggtacaggcggtccagccttcagacgccgctagagcgccagcgccgccacccgccagcagcaggatccagctccacgtccagccgcactgccacagccaggcagccagcagccagggctccacgtccagccacagcagccagcaccagcaggctccacgtccagccacagccagagctcgccggggatcctggacaccgagtcgcccaccacgccggtcggccatgccatccaggaccaggttgccactgcctcacgccctcaccagtaacccaccctaatcgaatcgagcaggctcgcagtgccgccagcctggctgctcaacaaagcctagaaaaatcttgcgagagttcaagtcagactggttttgtttctggttattttggtctcaaatggcaccagcaggatctcaaccttcgttaa

SEQ ID NO: 16084 - DNA, 2388 bp, Zea mays
  Peptide Sequence Number=SeqID_59459
atggcaaccaaggttaagaagcagacgtcaattttacgcactttgtcacacccggatttaatggcaaattcaggcaggataaaagttgatgaccgccgagccctcgaagtgtccaagaagtacacaactgcgcaagcactccacttcaagctcccaccttcaccggggcaccatcggtggcggactggcggtggggcacacaaaccgttcctcccgtgctcgtcatctcccttgtctcttcatcgttccttccgtcagcccgcacatctcacctgcgcgcgcgccatgggacctgcgtgcaaaaccgcagcgcggccgcgcgtgctgctgctgtgcagcccgtgcatggggcacctcatccccttcgcggagctcgcgcggcgcctcgtggccgaccacggcctctccaccacgctcctcttcgcctcggctacatccccgccctcggagcagtacctcgcggtggccgccgccgtccccgacgccgtcgacctcatcgcgctgccggcaccgccgccagacgcgctgcctcccgccacggccgcgcgcgagcgcgcggagctcgccgtcgcctccaacgtgccacgcgtccgggagatcgcgcgggagctgggcgcggcggcgccgctcgtcgcgctcgtggtggacatggtcggcgcggcggcggcgcgcgacgtggcggcggagctgggcgtcccgttctacgccttcttcacgtccccgtggatgacgctttcgctgctcctccgcctccccgagatcgacgcagcccgcgccggggagcaccgggacgccgcggagccgatccggctccccggctgcgtgccgatccacgcccacgagctgccgacgtccatgctcgccgaccggagcagcagcgcgtacgccgggttcttgtccatggccaagggcgtcgcgggagtcgatggcgtccttgtgaacacgtttcgtgaactggagcccgcggtgggcggcgacggtcgtctgcagctgccggtgtacccggttgggccattggtttggaccaggccggccggcgtggacacggaccacgagtgcatgagctggctggacgggcagccacgtggctccgtggcgtatgtgtcgttcggcagtggcggcacgattacatggcagcagacggctgagctggcgctggggctggagcttagccagtgtaggttcatctgggctatcaagaggccacaccagagctcaacaatcgcggcgttcttcgggactcaaagaggcgatgagcacagccccttggattttttacctgaagggttcatggagaggactagagggatggggttggtggcccagtcttgggcgccacaaacagctatacttggccacccttccattgggtgcttcgtcacgcattgcgggtggaactcggtcctagagagtgtgatcaacggtgttcctatggttgcttggccactctacgccgagcagaacatgaatgctgcgatgatggaggtccaggttggtgtggcattgcgggctaaggtcggagctgatcgatttataaggaaggacgaagttgcgaatgcgattcgacgtgcgattgtaggggaggaagctgaaaggctgaggaagcgatcaagcgagcttagacgccaatcagcgcaagctctgagcaaggatggttgttctactcggccactctcttccctggattggctgctgtcgccgccgccggcggccagtcttagcaccagcagggacctcgtctcctgcagccgccatctgggctgctcgccatcaccatgtcatcgtcaagggtcctcccgcttcagaccatgttgcaaatattgtcggatgatgttacaaggagcaagtcacagaggtccttcgcctttaagaggtgggctcggggcaggtgttatcgttgcctcgctcacgaccaccaaatcaactcatgcaagaactccttctgttgcatccgttgtcgctgccccggtcatcgggagcggcattatcgctttcggtcttcctcttcctgtccatcgagttaactgctccgtgcaatgtgaccatcctcaacaaacgagtacttgtgctaaggacaccagtgcaaacgccacagcctttgtccttggcgagaagcccacaaggatatctggtacaaagattcatagagagacgaaccttagcactaatgaggcggtcgcagggacatttgaagcagattctcgccaaatgatgtccaccgagcagaccattgaggtgccttcggataccttcacattgcttcaggctataacctctgttgaagatgttgttttggtggaggatgcatcatatgatgaggaagctactttggttatgcaaactacttttgatggccccatctttattaccaccatcgactatggttaa

SEQ ID NO: 16085 - DNA, 564 bp, Zea mays
  Peptide Sequence Number=SeqID_59460
atggacacaaaaccttgggaacatatacttcagcacaagttctggaagatctctcatcacacacaaccagtcaggaatgtagtcttcaggaggaccaccaatccaatgtaccccatcaacgagccatctaccaacaacaagggtctaatcgtgccgtgcccgtgccggcccagcgtgcctgatgctcggcccaggcacggcactacctatcaggccgtgccggcacgggcccgacaccagccgtgccgtgccgtgctccgggccggcccgattagcccggcacggctggccatctatagctgcggcggcgacggccgcgagtgccggccgctgggttggctgctggggctgccgttcgcgctgctcgccgtcctcgtctccgtcgtcggcgccatcatctggatcatcgggcaagctgcccatatcgtgcatctgcccgtgctgcctctgcgtgacggtggtgctggaggcggcggtggagctcatcaaggcgccgctgcacgtcatcacctggttcacatccaagataccctgctagacaagcagtcggaggatggtttgtga

SEQ ID NO: 16086 - DNA, 186 bp, Zea mays
  Peptide Sequence Number=SeqID_59461
atggccttgttctgccaaagccagctctgtctgggtgcaccggactgtccggtggtgcaccggacagtgtccggctcacggtacgggaccaggctaagcggctacactgcaccggactatttcatggaacgagctcccgttcttcggaactggcccccaggctatcggacctccctgctttcgtaa

SEQ ID NO: 16087 - DNA, 1140 bp, Zea mays
  Peptide Sequence Number=SeqID_59462
atgagactgaggttcgaccacttgctgcggatcccagactctttgaccttcagcgtgctacagcggcactggtatgttgaggagtgggtccgagtcttctacgcctctgtatggatagacccggatcatcactggatgaggtttcgttttgagcgagaggatgtcaccattactgcaactcagattcgccagctctttggatttcccgagtcgacgactcgtcttcacagcctctgctacggcacctctgaccctcctcgtcgccctcatggcggtgtggctccgggtacagctcacgtcgcggctctgttccgcccgcccttctcagatgggtcgcgacgttcaccggcagattttactatagcagccaacctcctcggtttcagggcacacttgaggcctcacgcctcgtttttggatcctaccgtcctgcgcctgcggctcctgtgccagcttctgctcctgtttttgactctcaggccgaggacgctgctcttcgtcagttcgacacttaggatacagcagctgatgatgatgatgatgatgattttggggttcctcctccgcctccgcctcctatgcctccacgctcacatgatcatgaggctgggagttctagtgctgcccctgctgcccctccggctatggaccctgctcttgcttcgattctccagtctatcactcagcagcaggctcacctggcagccgagcaggcccggttatccgagaggatgctctcgatgtttcagaacatgcaggacaggcaggatgcgctttagcagcagctactccaggatcgggctgagagcaaggcattcatggctcttatgctacagcagtctgctcctgcagcgtggcctcagtccgagtcagtaccagctccagcttctaccacagatcctggatctgagactgactctgaccctccaccggcgttcgctctgctgcctcgaccgcgaccggatgcgccctcgccgcctcttcccgcttcagatgtttaggttcggcttggagacaactgatcaagccaaagatggaagcaagaagtgcttcgaggtaccgagtgcatgggagaaggtcaaagaggccgaggaacccaaagccagggttgaaggagatgacttgctaaatcaaggttga

SEQ ID NO: 16088 - DNA, 1398 bp, Zea mays
  Peptide Sequence Number=SeqID_59463
atggcggacgcgaagcagcagcagcagcagcagcagcagccacagcaggcggcagcggcagccaccggcgtgtggaagacggtcaagcccttcgttaacggcggggcctctgggatgctcgcgacctgcgtcatccagcctatcgacatggtcaaggtaccgtatcaccgcaccgctctgtcactcctccactcggcttccttcacagtgctcgtgtgtgagctggtgaggatccagttgggtgagggctctgctggtcaggtcacaaggaacatgcttgcaaatgagggtgtccgttctttctacaagggtttgtccgccggattgctgaggcaagcgacgtacacgactgctcgtcttggatcctttagggttctaactaacaaagcagttgaaaagaatgaagggaagccattgcctctatttcagaaagcttttattggtctgactgctggtgcaattggtgcttgtgttggtagtcctgctgatctggcactcattagaatgcaagccgattcgaccctgccagttgcacaacgacgcaactataagaatgctttccatgcactctaccgtatcagtggtgatgagggagtccttgcgctttggaagggtgcaggtccaactgtggtgagagctatggcactcaatatgggtatgcttgcttcctatgaccagagtgtcgagctatttagggacaaatttggcgcaggagaaatttctactgttgttggagccagcgctgtttctggattctttgcctcagcatgcagtttgccctttgactatgtgaagacacagattcagaagatgcaacctgatgcgaatggcaagtacccatacacagggtctttggactgtgctgtgaagaccttcaagagcggtggcccattcaagttctacactggtttcccggtgtactgcgtcaggattgcaccccatgtcatgatgacctggatattcttgaatcagatccagaaatactaccgtaggcgtccacaccaccacacccgccttccctcgccagtcgcacccatcgcctcgcccctcgagatccccgccgccgcgcgccgtaaggacccaaccgcaagcgttgccttgttcgtcgtatttcttatcgaggcaaacagacctggatgttgcggcgctgcgtctcgacctgtgaggctgcgagcgcttgtcgaagtcggggaccatgcagaagcagcggtggtagctcttgacgagggagtcgatggcctcccgcaccagcgttgtgcatccaccgaggggttcttcgtcggcacctcgagccgcaaaggaattccatcagccttgcgggctccattggggagctatcacgacagggcagaggcatcgggggagcgggacacggggcctaggctgcaggcggcgtag

SEQ ID NO: 16089 - DNA, 159 bp, Zea mays
  Peptide Sequence Number=SeqID_59464
atgacgaaggtgatgcttgccgaaagtgttcaagactcaaaaaatggaaataaattacaaatgtaccttcggcttgaaggaaagaaaatacaggcgtggcgcaaaagtgaatgccaagtcagcgtgcacagtacgggaatactgttcacctatttatag

SEQ ID NO: 16090 - DNA, 243 bp, Zea mays
  Peptide Sequence Number=SeqID_59465
atgtctagtcagcacggaccagactatgactggaggacctcacctattgatcctcaggctatgtatgcaagtggtggaaaagctcatggaaggtacacaatgtttgctaatgtcatcgactcgagccaggtgacagttcagcgtggaggttcatcgaggtctactgctcgtagctctcgtcgctccactcaagatccagctgaagtggagcaactgcgagaagaacttattagtactggatga

SEQ ID NO: 16091 - DNA, 348 bp, Zea mays
  Peptide Sequence Number=SeqID_59466
atgacggggatgtactgctgcgcgcgtgcctgcctcaactggaggatgcaaccaccggcccgcaccgccatgcagactctcttctcccccgttgtcaaggcaaaaggctccatggagaagagggaccagaaaaggggatactccgaaagggatccttctccgcgaaggaagcgggccccgagcccccctactgatcagaggttcgaaagctggcccctcggaagggttcgacagccgcctcagagcattcgggctccgcgcccactactggtcagaggttcgaaggctggcccctcggaagggttcgacagccgcctcagaccactcgggctccgcgcccactactga

SEQ ID NO: 16092 - DNA, 879 bp, Zea mays
  Peptide Sequence Number=SeqID_59467
atgacggtggcaggcgcgcgggagcagcggtcacgtcgtcagccaagctcacgtcccatccggtggcagcaagagaaccccctctcacggcgtgaagacaacgcgcccgtgatccgttcctcgaacggctcgcgcacgcgcaacggccgccccgccaactactcgccccgtcgcattaactccgcggctggacaggcggcgcttctggcaggagcagcgggcgacgcttcgccttcaccgaaactaccgcgccaaaaaaggtacgccgcgtcgttcggtttcgctccgagcctccttactgatcaggggttcgaaggctggccccccgaagggttcaacagccgcctcagatcgcgtgggccctacacccactactggtcagaggttcgaaggccggccccccgaagggttccacggccgcctcaggctactcaggctccgcgcccattactgatcaggggttcgaaggctggcccccgaagggttcacagccgcctcagacgccgagcgagggatgaccaggggtacgttcgatacataaccaaggctcgggctgcgctcccgagctcaccggagacaccatgttcggcgcccaacgagggtaacatggcgctctcccccccctcctccttgcggaaaggcgacgaagccaggccctgccaaaggcaccataggaagctccgcccgacccagggctcggactcgggctcagccccggaagacggcgaactccgctccgcccgacccagggctcggactcgggctcagccccggaagatggcgaactccgctccgcccgacccagggctcggactcgggctcagccccggaagacggcgaactccgctccgcccgacccagggctcggactcgggctaa

SEQ ID NO: 16093 - DNA, 1008 bp, Zea mays
  Peptide Sequence Number=SeqID_59468
atgaagttgcttgaggaaggttttgatctttgtgcacatctgctagccctgcggcggtaccatttcatggaaatagctgactgggcagattcctttattgctctaatttataataagaaaagatcggagattcaagggcttatggactttgctttgcagagatcttcatgtgattctgatccttataaggaaaggttatttatatacatcagggagccacctgttgattcttttgatgcatctgcatgtgatcttgatttgctggatgatatcttgttgggttataaagctgaatggccagtgaatattgttattacagaagacacacttaaaatatatgctgaaatattctgttatcttcttcaagtcaggtttgcagtgttttcactgactgaagtatggagatttctaaaggagttgacacagttcatcagtcgctccagccatagaggatctgacgtgttgaagaaattgaatgttgtaatgaaagtgagagttctgtcctggtgtcggcgtttcgagaccggggggtccctcaggccgacgagtgagtgccgcgtgccccagcccagatgggtcgagcgcgtgggcgagcgcgaaggggggaaaggagtgaggcggccggagaccggcgcgagagaggtgggaatcccgcggccttcgtgttcgtcccgcgcccaggtcggccagatgggacaccggtcttgttctctgcggctcgagtcagcccggggtagggtgatgatgacgcttcctgttgacgtggctggcctgcgccctaggttgggcgacgtggaggctcctccgaagccgaggtcgagtctgtcttccatggccgaggccgagtccgagcccctgggccgggcgaggcggaggtcgtcggcagaggccggggcggtgtccgagccctggggtcgggcgaagcggagttcgtcgtcttctggggctgagcccgagcccgagccctggggtcgggcgaagcggagttcgtcgtcttccgggtcttag

SEQ ID NO: 16094 - DNA, 1200 bp, Zea mays
  Peptide Sequence Number=SeqID_59469
atggaggcggccgcctccagcctctcgacgctgctctccaccttgcgcgtggacgggccctggacgcctccgggaacctgggagtcggccatccctgagagtggcgccgctcgcgttacagacctcggaggacgcctgcagccgatctacgagctcgcatcggttactgatgatgctttgattcatctggccttgcatgcgctgtatggtgtcaaatcatcgttagatgagattgaggagctttcagtgctgttctcctcaaatccagctgacagaacctctaaccgtgttacaaatgtgtggttacgttcctcgagcaccatatctgtggggagtattctcaaatctttacgctctacaggtcttgtggtcttcttcctttgcaagtttgtgcacttttatcttgtccaaagtcgagaaatgaattgtgcaagtagagaagttcatgaacatgaacatcctggtgataaagacactgaacagcatcggccttacagtctagtaaaccaagcatttgcagctgcagttagtaaggtcctcgaaggctatttctgttccttgaatactttaccagcatcaattaggcttaggcgttcagttggccaatctggtataccttccaagacttcagatggaatgagttgtaattccactgcagaagtcactcttctggaagtttatctacacactgaagagttaagaaggcatgttaaatcccttggaaatatttgtttccctaagtttgcaggtgctacattgtgccatgatggtttggatactgaagcaagtgtggagtttgagaatttcccacggggcactgatttgctttcgtatttgtatgtctatattcgtgatgccgatccagttcactatggtcttctgaagtatctttttattcgttcctgtgagccatactttaacttcattaagtcatggatttaccgagcttctgttgatgacccttatgaggaatttctcattacacaaactgaaaataagggtgttcaaggagtctcttctgacataacagatgagttcacccttttcccgttaaaggtgattccttttgatactgcatcaaacatcctacataaaaggaccaatcttctggacacatcagtttcagatgctgaactgttcaatggggacagcgacgctgcactaccttgcaatatgtatatcctcatttcacttttttaa

SEQ ID NO: 16095 - DNA, 201 bp, Zea mays
  Peptide Sequence Number=SeqID_59470
atggccacatacaataagtgcctgggtgaatttgacctcatgggcattccacccgctccaaggggcttgcctcagattgaggttacatttgacatcgatgctaatggaatcgtgaccatcttagccaaatataaggctacgaggaaggatcagaacatcaccatccgatcttcgggtgggctgtctgaggctgacatctag

SEQ ID NO: 16096 - DNA, 1338 bp, Zea mays
  Peptide Sequence Number=SeqID_59471
atgggcggcggcggcaggaatggcactgtggtgaggcggtacatccggtccaaggagcccaggataaagtggagcgccgacctccaccgcagcttcgtacaggccatagactgcctcggcggccaacacaaggccacgccgaagctcatcctccagttcatggccaccagggggctcaccatatctcatgtcaagagccatctccagatgtacagagctgcgaggcttggcgcaggaaggagagggatgcaagcccagctgctgcaaaggaggcactcatgcactggtgatgagcaagaggagttcctgcgcccaccaccacctctgaaaagaaccaaagcgccttttcccacggtgtctgtccatctgcacctttttctcatgggggtctctggtcgtctactctttgttggatgcgtgaacagggcccggatggggtacgagagcatgcagggactgggaagccatggagtcagtgatgcgcggaccgcagccgctgccgggggcctgtactgcatcgatgattacatgcaagccatggcggccatgggctggagaataaaggaggagggactcaccagatggcagtggcagaggagggatgctgctgcgccttccgacctccaagccatgggatgtttggtgcaagaacctgacccctttaagatgcgccgaccagaagcacgccgtcttggttcagcgctgaggaatcagcaggacgactccagcgaagaggacggaaacggatgccccctcctctccagcagcagcttcagcaatgcagcgaacgacgacgagccgtctgatgagcagtgctccctctcgctgtcccttggcctggacacaaaaggcgcccgtgccatggcaacctcctcgccgagcggcgagagcagctgcatcctcacggcggcctcgcctgcgaggaggagctctagcgactgctgctgctccggccattcaggctgcttcgtcggcccgggcgttagcctggaactctccctgtccatctctggatcctacctagatcactccgattctccgtggtggccaaggaacccaagctcattggacaggagtttgacttcgcctgtctccgaacaagcggtcgacgaggcggaggtctcgcgtcctgcgtgcgtcaccgttgtctggctccgtcctcaccgttcctccgtcacagccaccgtccttttgccaagagtcgtcgaattgatggcgtgcggggcggtggccaacatcgtcaaatcctcgctcggccccgttggtctcgacaaggaagaaggttatgttgtcttgttcattggaagcactcttccacattacttggttccttgctga

SEQ ID NO: 16097 - DNA, 918 bp, Zea mays
  Peptide Sequence Number=SeqID_59472
gttagtgcctcttatgagcaggctctgatggatgcccgaaagcagattgaacgagagatggaacgatttaaagtatgtgagaaggaaacaaaaactaaggccttctcaaaagaagggttaggtcagcaaccaaaaacagatcccaaagaaaaggccaaagctgaaacaagagactggcttaataatgtgatggctcttgctatgactattatttgctttattgttgttagtgatttggaaagccagattgataacttcgaagcagagattgaaggactttcaattaaaaagggaaaacaaagaccgcctcgattggtacatttagagaagtctattacgagacataaagctcatataaagaaattggagtcaatcttgagacttttggataatgatgagttgagtcctgagcaagtcaatgatgttaaagattttcttgatgattatgttgaacgtaatcaggaagactttgatgaattcagtgatgttgaggacctctatagcacattgcctatggagaaggttgaagcacttgaagacatggtttcacttgctccttctagtcttgtcaagccaaagagaaggcgcaaacacagccagagagaaaggcgcaaacatgaaaataaatgggtggaggcacaaataaagcctctgccaggattcgaactcgagacctctgtctctgataccattcgaatggagaccatcatgcacattgtggtgaaggaagtgagcggaagcagcacctatccactgctcacaaacaccaactatgaggactggagtctcttcaatagggcgggcaaaaaacccgatacccattacccgaacccaaactactcaaacccgtacctgatctacccgaattacccaaacactagttcggatcctaggtctgaaaacccgaaattatattga

SEQ ID NO: 16098 - DNA, 462 bp, Zea mays
  Peptide Sequence Number=SeqID_59473
atggcggtgaccagtgccgacgagcagctgttgctgcgcaaggggagaggcgtcgaggaggggcccgaggccagagatgtagggggtcccaccaacagcgagctcgggaagagggccggtgagggggtgctggtcggagtagacgcacagggcggccgtcgcaccagcgagggcaacagggtcggtcgcgcccaggggggcgaccagagaggggaccgcgaccagggaggcaccgaccgacggcaaggtggcgacgcctgcgcgcaggcccgcagcgacgcgcgctcctgggccgacagcagcgcctgctggcagggccgcgacagcgctcgcgccctggccggtagtcaggccggcggcgacggcgacctcgcagggaggggtggccgcgcgttggcgccggcgaggtgggagatgtgcgccatggccggcgcacgcaggggaggtggcggcggcacctag

SEQ ID NO: 16099 - DNA, 912 bp, Zea mays
  Peptide Sequence Number=SeqID_59474
atggcttctgctgccaatttcacggcgtcatcctggcaaccagcgtccccatctccatggactgcgccgcatgtcaccttcgtcacgccgtcctggcaaccgacgtccccatctccatgggctgcgccgcatgccaccttcgtcacgccatcctggcaactgacgtccctatctccatgggcagcatcgcctgccaattttgtcaccacatcctggacgctggcgtgcccatctccagggacaacgtcaaattccgtcacatcatcttcgttgacggcgtctccgtccccatgggcgatgccactaggggcagccacggctcagcaatcaccaactccatcgatgggggacctgtgggccaacataagggctgatctcacaaagatgcaagcaacgctccagaaggttgagcaagggctgctgcaaatcaaggcagcagtgcaacatgagcaacaccagctggcgttgtccgcacggctccagacgtcggcaactgtgggcatacaagctgctgctcgtggcttccttgcacgacggagagtgcgggagatgcgccggcaaatgctcgaggcagccttggtgacggttgacctcgacacacgggggcacgacctcgccctgttggacggccatcagcagcggcaccgggccgctatctcaaagtgtgagcatggtacgtgtcccgctcacgacgaacttcaactctacggcagcagcgctagggaaggcactcccctcgtcatcggcaagggcgcactattttgcgccaccacattccgctaccggccgccacgagggcgcctccgctggttattgttgagacctactccagactcggtctttgagcacccgccattgttgcagctcgaggacgagctgcttgtccaggaggggtgtagtgtcagggcctaa

SEQ ID NO: 16100 - DNA, 201 bp, Zea mays
  Peptide Sequence Number=SeqID_59475
atggtgggtacaagtgcggccactgcacgacggccagtcggggtcagtggggcattgtacgccaaggcggtcatggaattaccattagacgcgcagagcagcggaagacgtctcgatgtagacgaacgcgtcgagcagtgccgtgcagtcgccggcgtccttcacgtcctcgcacggttcgtccaagtgctccagatgtag

SEQ ID NO: 16101 - DNA, 531 bp, Zea mays
  Peptide Sequence Number=SeqID_59476
atgcgcgcaacgaatcgggaaatggtgaaggggtttacccggtccacgtgcgccggcgagttcttgaactccgatgagcgcgatttggcttctccggtgacgcgggccctcggttcaagcttgagcaaggctcacggtctcaccaggaagctatctgggggcttgaatcgaacggagggggactggagaggggttggccatggcggtggctcttggtcggcactggcgggctgcggggaggtcgccggaggcaatggctggctcgggcgagtccggcgaggtacggaggaagcaatggggaaggcaaccgagcgctggggcgggttttataggcgcggacgcggccggggcgtcggttcgaccgtttggcgcgacgcgggcacgcggggcgcgcgcgcgggcgtgctctggcgagctcagagcgcgtcgaacacgtggcgcgttgcttctgcccgtgttcttcgctctgctgagcagccaggcgtacgaatctcgccctaccgcctctggagatctcttccctgcacctag

SEQ ID NO: 16102 - DNA, 438 bp, Zea mays
  Peptide Sequence Number=SeqID_59477
atggatgttttaatgattaggaaccgtggagaggaccagcaaggacttggaaaaggcctagttgttgaggaggagcagcaagggcgcacacaacaggaaggagatcaagcaggaattagctctcgtgacgaggtcaatcgcagtgcacggttgataaccagaggagaagtggtgctgcgattgcaggctccacatactatatcttctgatcaatacagatttgaccttgcaatcgcggtttcactacctcttggcgacgacgaagaagcaaggatccctacagacttcgatgaatgtgttagccgccaagatcttgaggcaaacaacaagctcctgaaggagcaaatggaggagacggtccacaagtcagtgcatgatgcctttattaacatggaccttggcaggacttacgagaggctggatcgacgattgtcctag

SEQ ID NO: 16103 - DNA, 1932 bp, Zea mays
  Peptide Sequence Number=SeqID_59478
atgtccggtggggatggacctcctcccatttttgatggtgacgattttccttattggaaaattcgtatggaagcatatttagaggctatagacattggtgtctataaattcgccacacaaggattccccgaacctagagatcgcacaaatcttgtaggtgatgagtttaattatgaaaaatggaatgccaaggccaaaaacacccttttcagaggcctttgcaaagatgtgttcaatagaattttgggaaagatcaatgctcatgagatgtacattcacatcaacgacaaagatgagtcatcttccaaaagaaaggatttggctctcaaagcaaatcaagaaagaaaaggaaaagcaaaaatacaagttgaggaagagtcctcaagtgatgatgaccttgatgctaacattgccttgatggtaaggaagaccaccaagatgttgaagaagctcaacagagaaggcatcaaatttgattcaagaaagaagaaattcttttccaacaaaagaaagcccatttctgagatggattgctacaactgtggagagctcggtcatcttgctcatcaatgtaacaagcccaagaagaacaagttcaagggcaagaaagaagatgacagcaatgatgaaaagaaggaaaagaaattcttcaagaggaaggatgggaagcaaaagaggttccccaagaagaaaaatggaaaggcatatattgttggtgactggctcactgacattgagtcatcaagtggatcttcttcaagtgaagaagagaatgatgaacaagttgtcgccatcgtcgaggacttctcttcaccaccaccatcgccatcatcaacttctcacctatgcctcatggctagaggtgaacggaaggtacaaaatgatattgatattactgatgatagtgatagtgatgaggaatttgcttcaccttcatataatgagctagctgacttgcttaaagaatatacacaaattattagaaagtcaaaagctaaatgtgataggttgaaaaatgaaaatgaatctttaaatgccaaatatgacatagttatgaaagctagtgatgaaataaaagaagaaaataaaactatgtcatcaactgtaaatgagctcacaacctccctaaaagttgctaaggataaatgtgacaaattaaatgaagctaatagggagttgcaagatagactagtaaaaataaaggaagactatactcagattaaatttgatcatgacaatcttcttgttgaaaatgaacttttatcttgcaaaacacatgaggctattaaccctgttgttaagattgatgtagcaacctcatgtgatgatttgagtcaaggagagcaaactagtctacatgatgaattgactgaaaaagttgaagtcttgactttagacaaccaaaaattgaagaaatacttgactgatgcaactactagaggaaaggttgctattgagaacaatgatttcaacaatgagttggcagtggataatgaaaggcttaaaaatgaggtcaagaaactaaagagtgaaaatgaacatcttgcaacaagtgtgcaaaagttcaacaagggtcaatacctccaaaatgagctgcttatgaacactgtcatgaaaacaacaagattgaaagctactactcaatacaagcctaagcagactcacaagcctatcaaatgctttgagtgtggaaatgaaggtcattttgcccacaactgcaaagccaaaccaccaactcccttgcctaagcactcaagaccatttgctttcaatgctcattatgttctaagaaaggttgcaaatggaaaggtcaaagttacattcctaggtccaccaaacaagagtagacctagacaaatctgggttgcaaagtccttgattgagagagtcactggtcctatgcaatatagggccctcaaaactcaagcttga

SEQ ID NO: 16104 - DNA, 804 bp, Zea mays
  Peptide Sequence Number=SeqID_59479
atgaggctcactgatgctggtgatggtcagatgaaaacccttcatctggatgatggtcttcgagtatgtttcaaatggatcactattcgagcgattgcatgtgaaaattatatacctagaaagcaagacaacttacaacttgtaatggagagagtacatattaagaaaaggtccaacactcaaaaggatgctgctggtgaaattgctgctgaattacaaggtactccagacttcataattggaaactacagtgatggaaatcttgtggcatcgttgctatcttacaagatgggaattacccattgcaacattgctcatgctctggaaaagactaagtatccagattcagacatattttggaagaattttgatgagaagtaccatttctcctgtcagttcactactgatataattgctatgaacaatgctgattttatcatcaccagcacataccaagaaattgctggaagtgggcatctggatgaccggtcaaagcccatcctcttctccatggcaagactcgacagggtgaaggacataacagggctggtcgaagcttttgctaagtgcgctaagctgagggagctggcaaaccttgttgtcgttgccgggtacaatgatgtcaagaagtccaaggacagggaagagatcgcggagatagagaagatgcatgaactcatcaagacccacaaattgttcaggcagttccgctggatctctgcccagacaaacagggcccgtaacggtgagctctatcgctacatcgttgatacccatggtgctttcgtacagatatattcttga

SEQ ID NO: 16105 - DNA, 974 bp, Zea mays
  Peptide Sequence Number=SeqID_59480
atgaacgcgctctctcacgaagggtgccggtacttcgaggtcttcgaccaagctgacgaagactttgagcgagatatctacaaggttgaggaccccatagtgaaggaatccaccggagccatctacgaccggatgtggggtccgcacggtcgcgaggtggttagggagcgggccgagacggcgagggctcaggcggcgcgtggcgagagggtggatgacttcggggcgttgaacagcgcgctggctgacccggagccgaccccggcggaggccgtgtccggggccgccctggagccgcccccggagaccgcagaaggcgcaccggatacctccgcatccgctgcggccggcggagacctgcccccagagaccgccgaaggcacgcctgatgcccccgcagccgctgcaccgagtgctgaagatcctgcgacggtggcggcggaggcgacagcggaggcaacggcggaggcgacggcggaggctcccacaacggcagggtcttcgcaggttcaagattttgggcctgcgcacgcaaccgccactactaaatttttggcggcttcgaccgtggatggtggtaatgaatgtgatgggtctgcatctgagttttctgattttgctgactctgggagctcggttgagtggactgagtcgttggaggaggacttggactactttgcggccttggatgtggctgcggcggaggcttcaccgcacgccgcggacacagaagatgtgcctggtcctagcaccgggcgccggcgacgaagggcggttgcgaagcgtagggtgagtggggcggagggaggtcggcttcgtgtgagtagggctggccggcaggaactgttgtctttgccggccgtcgtgagtacaggtgaaggggaattgcgaagcctttttgcgggcttgtatgatgaggttgtgtgcccccgcacacttggctatgcctgcgaagttgttgtgtacttggtctg

SEQ ID NO: 16106 - DNA, 690 bp, Zea mays
  Peptide Sequence Number=SeqID_59481
atgaatgggggcaaaagagagggagacaggcgtaaaggggaaacccgcggcctttgtgttgtcctgcgcccaggtcggggtaatgatggcctcccctgtgacgtggtcggtccgagccctgggtcgggcgaggcggtggctcctccgaggtcaaggtcgagtctgtcttccgaggtcgaggtcgagtccgagccccgggtcgggcgaggcggagaccattgtctgaggccaaggctgagtccgagccctggggtagggcgaggcggagttcgtcgtcttccggagccgagccgagtccgagccctggagtcgggcgaggcggagttcgtcatcttccggtgccgaggccgagtccgagccctgggttgggcgaggcggagttcgccgtccgaggccgagacgggggccgagccctggggtcgggcgaggcggagcttcctatggtgcccgaagccagacttggctgctgccagcctcactctatcgagcagcatagcagtcgacgcaggcggcgctgtcctcttgtcaggccggataaggtgtcaggccatccttgcattaaatgcttctgcgatacggtcggtcagtgtggcgatctggccaaggttgcttcttggcgaagactgggcctcgggcgagccgaagctttgtgctgatgggggttaccagctgagattaggagtcttgggg

SEQ ID NO: 16107 - DNA, 489 bp, Zea mays
  Peptide Sequence Number=SeqID_59482
atgacggtggcaggcgggcgggagcagcagtcacgtcgtcagccaggctcacgtcccatccagggacagcaagagagcctcctcccacggcgtgaagacggtgcgcccgtgatccgttcctcgaacggctcgcgcacgcgcaacggccgccccgccaaccactcgccccgtcgcattaactccgcggcgggacaggcggcgcctctgggcaggagcagcgggcgacgcttcgccttcgccgtaataaccgcgccaaaaaagggaccgggaaagggggataccccgaaaaagatccttctctgtgaaggaaccgggctccgagccccccccctactgatcagaggttcgaaggctggccctccgaagggttcaacagtcgcctcagatcgcgtgggcccgacacccactactggtcaggggttcgaaggccagccccccgaagggctccatggccgcctcaggctactcgggctccgcgcccattactaa

SEQ ID NO: 16108 - DNA, 891 bp, Zea mays
  Peptide Sequence Number=SeqID_59483
atggcgcaggggacgctggaggtgcttctcgtcggagccaggggcctcgagaacaccgattacctgagcaacatggacccctacgcgcttctgcaatgtcgctcccacgagcagaagagcagcgtcgcatctggcaaaggctgtgaacctgagtggaacgagaccttcgtgttcaccgtctccgatggcgcagcagagctgttcatcaagctcctggacagtgacggtggcactgatgacgattttgttggtgaggcaacgattcctctggaagcagtttacacggaaggaaacatccctccgactgtttacaatgttgtgaaagacgaagaataccgcggagaaatcaaagttggcctcacgttcactccagagcgaggcgcgagcacgacaaagcgccagcttgtccgggctcccatcgggttggagccctgcggcaccatcctcttggactcgccgagcgccgcctccgtgtccaggtctgccttcgtgggggaggggggcgtagcgcgcgcgcctgccatcgtcgtcgtcgtcgcctcccgcccgtgcctccacgccgccacgtccgctctgggaatcctgtggccgcagcagccgaaggaggccagctccgtcgccagcagcagaagcattgccagcagcatggctggtagccgtcgtgcgctcatgccgtgtcgctccatgctcggggtcgggaccggacggctgggtgctgcctgggagtctgggactgactgggaggatgaggacgccgagcggcgagcgctgtggtacgaccggaagagagcgattttgtttttgtatgcgtctgctagctgtgcacgctgctatgttgcgctgcgtgccgtaggcgactggtgctgccggcccgccggcgcgcgctgctaa

SEQ ID NO: 16109 - DNA, 570 bp, Zea mays
  Peptide Sequence Number=SeqID_59484
atgaagcaagtggaccgttctccaaataaccccaagcgtataacaattcagtcaagccaggagtgtttcagtgttgacattccctctgcagaacagcctaatccatgtccagaagttgaaaatcctccaaatgttgacagtcaaaatttgaccaatgaaacagttcagattgattctgatgaagatgacttcatgccagctctgaagaagcgtaatgtttctgaaagccacacaagagtgttaagaaaagtcgtgacaaagaggattaaacatgaggagctaccccgacagaggcttaatgtgaggtgcaaccctcaagatgtcattgcaagcattaacattttgaatgaaagacaacgtgaggctataagacgtaaaggtttctctaccattcttgatatgacagtagatgcgctgtgcagtagatcacaccttcaatggttgatggacaagctagaccccaaggatatgacaatacgtcctggtccaggaaaggaactcaagatcacaaaggacattgttcatcttatccttggcgttgatagtcgcctagagggggggggtgaatag

SEQ ID NO: 16110 - DNA, 339 bp, Zea mays
  Peptide Sequence Number=SeqID_59485
atggactaccaattggagcggtacccgttgacggcggcgaatgttgaggatggcggagaacgtggaagcagtcgggtcggcggagagcgaaggagtagaagcgtcggcggagaaggtagggttttctccggtctccggacgcaacggcgcgaatattggagcgaggattggggacaccgaggacgcgccgctcaaatgccgtttgcgactggatcgacaacgagcggcgaggggttggaagagtcgtcggaaaggggagcggagtcgccggggatgaaagaatcggcggagattcccggagtcgtggcggggttggggttttgcggttatggaaactga

SEQ ID NO: 16111 - DNA, 342 bp, Zea mays
  Peptide Sequence Number=SeqID_59486
atggacgagtctggaaaaggagatcgggtaagagttatgactgttcccaaccttgcttgtggctgttggaccgctgatttgcttcgctgcgtacatcgggctgctccagccccatctgatgttatgccccgagttgtggaccaactcttaaaattgttcgccacctttatagagacaaccgatcaagccaaggatggaggcaagaagagcttcgaggtaccgagtgcacgggagaaggtcaaggagaccaggaacccaaagccaggggtgaagaagaagacttgcaaagtcaaggttgatcgagttaagaagagttatggtgcatcaaggatcactacataa

SEQ ID NO: 16112 - DNA, 1191 bp, Zea mays
  Peptide Sequence Number=SeqID_59487
atggggcttggtgtatgcggctcgctctgccaagcttgggtggcaatgagattgatggttcttggttttgactctggtaatgtaataataatctggccaactaaaagcaactgcttgacctaccccccacataaagctagtccactacagccaaacaggatacttgctgagtatgttgatgtgtactcacccttgctctacacaccaaccccccatccccaggttgtcagcattgcaaccactgcccaggagaagatgaagccgtggaatgagaccaccaggagttccaagattacgacgagttctaggcatgggttagcggcaacccctagtcggctgcctgtgaaggccgcatttatctaccaggagatagagtctgtgaggagctactcccctgtgctccccctggaggcgccccctgcaccaccactggacgccccagctcctggagtagctgctggaggagacccagacgacggaggaggcgacaacagctcgagccacaacaccgacttttctgctgaccaggagccggaaggatgggttgctcgacccatcactcgcgacgctgctcgcgggtgtcacttccacgatgcgctcgacaccctgctacgtcgggcacttgaccggcgtacttggtccatcgagtatcgctgtgtggtctaccagcatagtcgcggggtcgacccggaccgctgggaggcaacctgcttggtgcaccatccggagaacagtctttggggtgctgagatctgcttagagcactattccatctctgagcaggactcagctgaggcagccatgcaagatgccacacggcgtgcgctttcgcactactgctcagtgctcggtggggtagccgacggtctcaacctgaagtattacccccgccgtccatctggcagcacaggaggcgtgattgtctcacctgttggtgaggacaatcctaggttgagcagcacaatcaacctagccaccgtgttaaacacggagctggaccatgcactagacgagctgagtagggctcgtgctgagatcgccctgctgcgggcagagcgcgcggagcgtcgtcacctggacgatggttcccccactcccgtcgggactcagcacccgtaccgctcacctcggcgtggacaccagtcttatggcaaccccgactgcaagaccaagataaatctagaaccatag

SEQ ID NO: 16113 - DNA, 498 bp, Zea mays
  Peptide Sequence Number=SeqID_59488
atggctgcgcagagggaggcgcctgtgcgagaaagggtggctgaaagtcgcctaggggccccaaccaccaaacttgaccgttggtggaagctgctgtcgacgggcgcaccggacagtccgcagagccctctgaaaattcccgaaggtgaagagttgggcgtcgagttccctggtgcaccggacactgtccggtggtgcaccggacagtccgggttcaaagtagtagatctgagaagggcacttctcaaaatccacacaccaaaaagatatgaacaaatcttccacggaatggtgagagaacgaagaacacaaacaaacacaatgagcaagaacacaagagacacaagatttatcccgaggttcggtcacaccaccaaggtgccctacttcctcgttgaggcgcccacaaagagccgggtctctttcaaccctaatcctccctttgtcgaccacaaaggtcaagcccacacaataatctttgctcaaacgagcgggtaa

SEQ ID NO: 16114 - DNA, 483 bp, Zea mays
  Peptide Sequence Number=SeqID_59489
atggccgccccgcgaaccacccgccccgtcgcattaactccgcggcgggaaaggcggcgcctctggcagggggagcaagcgacgcttcgccttcgccataatgaccgcgtcaaaaaaggaaccaggctccgagccaccctactgatcagaggttcgaaggctggcccctcggaagggttcaacagccgcctcagagcgcgtgggccccacacccactactggtcagaggttcgaaggccggcccctcggaagggttcaacgaccgcctcaggctactcgggctccgcgcccactactgatcaggggttcgaagggctcggacttgggctcagccccagaagacggcgaactccgctccgcccgacccagggctcggacttgggctcagccccagaagacgacgaactccgctccgcccgacccagggctcggacttgggctaagccccggaagacggcaaactccgctccgcccgacccatag

SEQ ID NO: 16115 - DNA, 1464 bp, Zea mays
  Peptide Sequence Number=SeqID_59490
atggagccctcccccgtcggcgccagcggctcggcggagcggtggcgcgcggaggcggcgcgggcgttccagcactacctggaccgctcggcgccgcacacggcggggcggtgggcgggcacgctcgtggccgcggcggtgtacgcgctgcgggtctactacgtgcggggcttctacgtcgtcacctacgggctgggcatctacctgatcaacctcctcatcggcttcctctcccccatggtcgaaccggagctcgaggccgggcccgggctcccaaccagcggctccgacgagttcaagcccttcatccgtcgcctccccgagttcaagttctgggcctcagattcccgcacggcacacgatcccgccgccagaagcctccgcgcggtcgacggggacgcgtcccgcgcccggcataggatcccgccgcgccgtcgtcgcccggcacaggatcccgccgccagaagcctccgcgcggtcgacgaacacgcgtcccgcgcccagcacaggatcccgccgtgccgtcgtcgcccggcacaggattccgccgccagaagcctccgcgccgtcgtcgtggtgatggatcctccgtcggaaccagcagacattgaatcaggagttggtgatgttacgacacctgaacgaggcagaccaaccatggtacgtggttccatgacggcaggtcgtcgtggcgcaggatttacactggcagggcgtagtgccggtcgtggcactagttgtgtgatgcgcgatagtaggagtgccggaaggagcattcgtggtggccgaagtgttggtattgacatcgatttaaatgctcaaggtcgggaagatgatgaaccaattgaagttgaagctgaaattactgcaaataattcgaaggagaaatatgacaaggcagattggtcatccatgaatactagaactttttgtgaaatatgtgttgaagaggttgaagctgtactaaatattgtaattgttatgcacgggcatcctgattggaagaaactgaaatatggccctccagaaaatgaagatttcatgacacaaatgtttgaacatattgcagtggatggatctacatcatgcgctctaggtgaattttatgatgtggaaaatcatgagactgaggttgatggtattgatggagttgattttggcacatttgaggcagactgtgatgctcaatatgatgaatttgtgtctccttttgctagtggcagcaagtcaactcagtcgaagagaggcgtctcaactcagtcaaagaaaagagctagtcctactgttgttaatagcccactgaagcgctcaaagaatcccatggttaaggtcatgaataagattcataatactttggagatcaattgcaatatttcaaacaaagtaatgcttggtgagtataggcggagcatagggatgtatttaagtcattcaaaacaaatgaaggaagacttctatggttga

SEQ ID NO: 16116 - DNA, 321 bp, Zea mays
  Peptide Sequence Number=SeqID_59491
atggcacagaagattcacttcacatgcaaactgagacttggctgcttagagactgaaattggttgtggttttggaaacaaacttctagagacagtaatggtatgttttcaaactgacactgagaatgagttcaaggctattcagtcaaagattgtacgtctacgagcagaaatttcaggagccattgatcatggggatcctactcatgtggtagatgagaatgatttatccttgaagagattaggggaattgaaggagcatcttaatgatcttcagacagaaaagaatggaaggctgcaaaaaattgacatccacaagtaa

SEQ ID NO: 16117 - DNA, 912 bp, Zea mays
  Peptide Sequence Number=SeqID_59492
atgcctcgctccctcttgcattcatcgcacccttccgccttccaggcctccagatggggtgcgccggtgttctctggagggatccgcgtcagggctgccccctccggcgatctcaccgcccggagagctcgcgctcgtggtgccctggctgcaacctcccgccagtggtcatctagagggatgaccaccagccttgtggtggagagaagcgagccgggctgcggcctccccctaccctcagcttcaaggatgttcatcatccgcgctggggaggagggcgagccaagttggggtcccgccttccgcatgggctggcggcccgcttcttcctccagcattcgggggagaagggcattcaccagccttgcggagggggcgaacttcgggtacgcgggaccgaccgactacaggcaccgccagtcgccgcgtgcccggttcctcggcttggatggcttcagcgccgcctccaacgctgcctcctgccgtttggtcggggcgtggctgttcgtccacctcacgggcgacggtcgcgccgtgcgcgggttcaccacatccacggcttctcccgtgccaccggccgcacctgggggtctgaggacgggagcgaggacctcttcgcgcgtgctgagacagccgccgcccaccagtgcagaggtggccgctgtcgtcggtgctgaggtggtcgctgccgctgaggtggccgccgccgtcggtgctgaggtggtcgcctccgctggcgagtcgctcagagctagctatcccgcggccctactggtgtggagggtggtggagcgtgcaggcccacggtacgggaccaggctgagcggctacacgggctccggaccaccccaggagactaatgtccactctctagcttcggacccgaggttgtcagacgcacaggacttatag

SEQ ID NO: 16118 - DNA, 288 bp, Zea mays
  Peptide Sequence Number=SeqID_59493
atggctgctcaattcggatgtcgtcatgtcaggacagatgggaaccgtgcaagtgggttagataaaaggtactatctgaaagactgcaagaccaataggccgggtttatggggacagaccccaccagattggcatacacggctaggtcccgaccctgggtccccatctgcatttgacacgggagccctcgtctttggctgtggccattcctgcatgtacctgtcggaagcctggaaccgtggggaatccagaagggtttccggaggaaggcaaacttcagctccatag

SEQ ID NO: 16119 - DNA, 384 bp, Zea mays
  Peptide Sequence Number=SeqID_59494
atgacgtggaaactgtccccacactcttcgctctggccgataaatgcgccagagccgccgagggccgtgcatggcacttggccccacaaaccggagctgcccagtcgggtggctcggaggggtaacaacggctcataccctgtgcatcccaacggtcgccacagcgtcgaggagtgtcgcgagatcattgacctcgcaaaacgcgtaagtgagcgacgcgagcagtcttccaaagacggctccccacctcgtcggcgacctagcaaagaaaaggtggacgacagcgaggtggttgcggctgaatgggacctcgggtatcagtcacccgagggggacctgaaggatgtcttcgctggaggctcctactccgatggggacaactag

SEQ ID NO: 16120 - DNA, 990 bp, Zea mays
  Peptide Sequence Number=SeqID_59495
atgagttcacttttctctctgttccaaattattcttcactttacatttgcacaagtggtccttggaatggtgaaaacacccaaaactacacaagctttggacatggtccaacccacagcagtgccaacagcaccttcctcagtcaaaactactgcaccagatcatgtcagcttgcccccgcccccattacctgctaaccagcagagtgttgctcaactttctgccccgttttcatctggcttgtctaatgtgggatcgaccatggaccctcctactatttcagcaaatccaccacaatcagcacaagcaaaaggataccttatccatcagatgccttcatcagctcctcagccatctcaacatccaaatatggccctacctcatgctcctccacagtattccaatgttccatcacatatacctatagttcatagtcagccacagcaacctttgcaaagtcctgcaatatataatcaacagttgcaaccacctttgccccaattgtcaaggccgccttttcctcatcagatgcattcacaagtaccaaattcatttgggttgactcatgcaaatgctccgcagcacatgttacaacaaccaatgtttcatccggttgcgaatcctcaaactaatttcctccctggccaaccaccattgcctagccagccaccaccacagcagctgtaccaggctagttcacactacaatacacaaaatacgactccaatgcaagttgataggggcgctccctgggggcgggcccctgatgctcccactcctggctctcatttccctggacaattacccgggttgcccggacaaatgacccaaggaattggtggtatccaggcaggccaagcaccactgacacctgagatggaaaagatgctagtccaacaagtcctgggcatgtccgctgagcagattaacatgttgcctccagaacaacggcaacaggttcttcaactacgagacatgctacggcaatga

SEQ ID NO: 16121 - DNA, 642 bp, Zea mays
  Peptide Sequence Number=SeqID_59496
atggggggcggcggcggatcctccgggccggagctgtcgacggacaacatgaaggggatagtcctggcgctgctctccagcggcttcatcggcgccagcttcatcatcaagaagaagggtctccgccgggccgctgtcgcctccggcgtccgtgcaggtcgccccccctcctgtccctctcgtactgttgaccgtggtagctggggcaggccggttttctggtcaaaagagatgtcgactttggtcggtttggagcgttttctgaattctggtgatggcatgcgcaggtgtaggcgggtactcatacctcatggagcccctgtggtgtttctgagcgaaggttttcctctttcagtgattgtaggtgagattgccaatttcgtggcatatgctttcgcccccgctgttctggttactccccttggagcactcagcataattgttagtgcagtgctggctcatttcattctgaacgagaggctgcatgccctcggggtgctcggctgcgtgatgtgcattgcagggtctgtggtcattgttatccacgctccacaggagcaggagattacttcagttaaggaaatatggaacatggcgacacaacctggtaaggactatcatcggtgtgattctgtcttgtag

SEQ ID NO: 16122 - DNA, 477 bp, Zea mays
  Peptide Sequence Number=SeqID_59497
atggtggacaaagtacaaatcaagaatgaaggaaaagaccaactggaaatgtcttggctcgagcagccaagactctgctcagtctgggtgcaccggactgtccggtggtgcaccggacagtgtccggtgctctcacctaggttgggcgatgtggaagctcctccgaagccgaggtcgagtctgtctttcctggccgaggtcgagtccgagcccctggttcgggtgaggcggagaccgtcggctgaggccagggcggagtccgagccctggggtcgggcggagcggagttcgtcgtcttccggggctgagcccaagtccgagccctgggtcgggcggagcggagttcgccgtcttccggggcttagcccgagtccgagccctgagtcgggcggagcggagttcgccgtcttccggggcttagcccgagtccgagccctaggtcgggcggagcggagttcgccgtcttccggggcttag

SEQ ID NO: 16123 - DNA, 1161 bp, Zea mays
  Peptide Sequence Number=SeqID_59498
atggcgcctcctgttgacgtggctggtctgcgccctaggttgggcgatgtggaagctcctccgaagccgaggtcgagtctgtcttccgtggccgaggtcgagtccgagcccctggttcgggcgaggcggagaccgtcggctgaggccagggcggagtccgagccctggggtcgggcggagcggagttcgtcgtcttccggggctgagcccaagtccgagccctgggtcgggcggagcggagttcgccgtcttccggggcttagcccaagtccgagccctgggtcgggcggagcggagttcgccgtcttccggggcttagcccgagtccgagccctgggtcgggcgaagcggagcttcctatggtgcctgcggccgggcctgactgcctgtcagcctcactctgtcaagtggcaccgcagtcggagcggcgcaggcgacgctgtctttctgtcaggccggtcagtggagcggcggagtgacggcggtcacttcggctctgttggctgggggacgcgcgtcaggataaagctctacgacctccaggaccggctgggcctcagccagccgagcaaggtggtggactggctgctcgacgccgcgcaggacgagatcgacaagctgcctccgctccagttcccgccgcaagggcaggacctcgtcgcccatctcccgccgtccatggtggcgcccttcgccaacgttgcagccgaccgggccgccgccgccgctgccgccgcgaacgcgtcggccgcgatggccgaaggcggcaaacgccactgccacggaggcatcaaagggctcatgggcatgggcctcaacaattctatcggcctcgccaacgccaccatgccgctggctcacggcttgtactacacgcccggtgagtcttggaccaatggaggcaatgccgccgtccatgatcatcaggtgagccacggcggcacctcgcctcagacggtggctcaccactcgccgttctcgtctctgctgtctcttgctgctccggggccccagctcgtcttctactcgccggaaggcggcggcttcgccatgaaagaagccaccgatcatcagttcgctgtagatagcctcgatcactcgcaaggccagctctcactgagctcagctagaagcttccttcaccccggcaaccagggatga

SEQ ID NO: 16124 - DNA, 711 bp, Zea mays
  Peptide Sequence Number=SeqID_59499
atggcgcctcctgttgacgtggctggtctgcgccctaggttgggcgacgtggaagctcctccgaagccgaggtcgagtccgagcccctggttcgggcgaggcggagaccgccggctgaggccggggcggagtccgagccctggggtcgggcgaagcggacccgagtccgagccctgggtcgggcggagcggagttcgccgtcttccggggcttagcccgagtccgagccctgggtcgggcggagcggagttcgccgtcttccggggcttagcccgagtccgagccctgggtcgggcggagcggagtttcctatggtgcctgcggccgggcctgactgcctgccagcctcactctgtcaagtggcaccacagtcggagcggcgcgggtggcgctgtctttctgccaggctggtcagtggagtggcgaagtgacggcggtcacttcggctctgtcggctggggggcgcgcgtcaggataaaggtgtctggccacctttgcattaaatgctcctgcgacttggtcggtcggtgcggcgatttggtcaaggttgcttcttggcgaagacagggcctcgggcgagccgggaacacgtttgccgctggaggggggcctcgggcgagacggaaatcctccgggctttatgctgatgggggttaccagctgagaattaggagccttgagggtacccctaattatggtccccgacagtag

SEQ ID NO: 16125 - DNA, 1200 bp, Zea mays
  Peptide Sequence Number=SeqID_59500
atggcagcagcagccgtcgcctccagttccaccccgcggccgctccggttggcgcagcgcggggcggtctctgcgcacgcgtcccaccacgtcagcgccccgccccaccgctcccgcaggccgcggctctccgtctcggcctcagccggggtggaggggaccagcgggtcggagcggttctacttcaacttcaccgggttccccttcccgctcggcccgttcctcaaccgccgcaccatccgcaccgaggcggtgaagggcagcatatggctgttcgagcaggagcaggcgctgggcttcagcagcgtctccaccaacatccgcatgacggtcatcaagctcaagtccggtgggctctgggtgcacgcgcccatcgcgcccacgaaggagtgcatccaggcacgcaccctgcccgaccccataggcccataccatcctcttgtttcttctcccatcgagttctactcattatgttgttggttgcagatgctcaaggagctggacgcgccggtggagcacatcgtgctgccgaccttcgcatacgagcacaaaatcttcgtcgggcccttctccaggaagttccccaaggctcagatatgggtggcgcccaggcagtggagctggccaatcaacctgccgctcgagttcttcgggatcttccgggccaagccgctcaaagatgaggatgacgccacgccctgggtcgccgaaatcgagcagaaggtgctcagctctccggaagttgggattgggccatatgtggaggtggcgttctaccataagccttcacggacactactggtgaccgatgctgtcatatttgttcctcaacagccaccggagtgtatcagcaaagaatctctgttggcatctgcgaagaatggactggcagtgaagctattgagcaaagggaaggaggttcccgatgaaccagttgttgacaataagctaaaccgtcagaaagggtgggagagaatggtacttcaaatactatttcttggtccgtcaaatctacttgagccaaatgcaagttttgctcaaatgtcgcaaaaattgatcgtctcacctattgtcaagacgctcgttttcagcaaagttccagagaaggaaataggaacaaaagtcatcttacaaggacgaccactagactgtgttaacagagcacatcaaccaatggcacaacaaaaggagatacgctag

SEQ ID NO: 16126 - DNA, 975 bp, Zea mays
  Peptide Sequence Number=SeqID_59501
atggcgcgcccttcaccgccaggtcatgccgccacctcctggccacgcatcccgctgcaggcacccggatctgtgccaccaccggcccatccgaggcagcgacgaggtacctcggtcgcctgcgtcgaagacctcccaccaccgctgcgacttgaggaatggcaggcattgttgtgccttcaacactgtcgcgatgtcgtcgacgcggcccatctgaggcagggacgtcgtacccccgtcgtcgaggtcgaagacctcacgccaccacctcgacttgaagccttcaccctatcgaggtacccatcccctagcctgccgccgagttactttgagttttggggacagggcttttctactgggcttcctgagagattgcaattgtcccttgtgcgaactataccagggctggagaactgcctaatgctaagacctgcatatgcagttgaatatgattacttacccgcatatcaatgctcaagatcacttatgacaaagaagattgagggtttattcttctctggccagataaatggaacaacgggatacgaagaagctgcagctcagggtataatttctggaatcaatgcagctaggcattctgatgggaaatcattaattattcttgagagggaaagcagttatataggaactcttattgatgatcttgttacaaaagatcttagagagccctatcgcatggattcatctacacttgaagccatattaaagaagccacatgtacaatataaactccttgacgagcatggatgcggaaatgaaaatttatctcgaattgagaaggaatgtatagagattgatatcaagtatgaaggtttcatcgcacgacaacaaagtcaattacatcagatgccgccatggagcgtggagacggcgctcaacgcactgctctccctcctccctgacctctccctcgacctcctctccctggtcaatctcctgctccagttctactaa

SEQ ID NO: 16127 - DNA, 294 bp, Zea mays
  Peptide Sequence Number=SeqID_59502
atgtgccttactgcatggcagttggcaaatattgagatgagatttgcactgctgactgcagagagacgcaggcagaatacggctgtggaccctttagagggtcttgttggagccagcctaaggctgaaccatatacagaaccttatattggagacagcgatgcaacggtaccatcttatagaacagatcctgttcaagcgcttcgaagttcagatcgaggctgcattagctttacttcaggagttcagctcatggcctgatgcctcacccgagaaagaaaaatgtagaatatga

SEQ ID NO: 16128 - DNA, 407 bp, Zea mays
  Peptide Sequence Number=SeqID_59503
atggcgccacaaccccagccggcccccttcttccccatggccgaacatctccatggctggcgctcccctttccttggttccccatggctgctcgttcagcgatgccggtccaaaagacagcagtcccggactccctctgtgtcgcttgcatgccacccgctcgaccagccccaccgtctctgcgcgactcgctgctttgtgctgcgcagtgaacagcacgccgtcgacgctcgtcgggtgtttgctgtttttgcgcagccccatccgcgacgtctttcacccccggataggcaccccgtgttttacgtggagaagaaggcaagccgctcgacgctcgtcgatgttcggagcgatgcacaaatcggaatcgccatcgtccttacaaacgccgattgggtttgtttatg

SEQ ID NO: 16129 - DNA, 255 bp, Zea mays
  Peptide Sequence Number=SeqID_59504
atggagagtcatgatctccgggcaaaagggagtcacagcttgtgggtaaagtgcacaacctctgcagagtgtatgaaaactgatatatcagccgtgctcgtagttatgagcggccaagggagctccggtggcaatgagattgatggttttggtattgactctggtaatggttgtcagcattgcaacccctgctcaggagaagatgaagctgtggaaggagactaccaggagttccaagattatgacgagttctag

SEQ ID NO: 16130 - DNA, 645 bp, Zea mays
  Peptide Sequence Number=SeqID_59505
atgaaacgacttgccggcactccgaaccccccgctcgtgaaaagagacgaagctcaacacatatcccggcggcggggacggggcggctccgctcggaggggccatccactccggttgcgggtcaccggagagaggacgaagcaaaccatcggcaacaagggcctccagatcgtccgccgtgacggtggagaaaggccacgggtcgtgcggcgaaacaacggtcacccggtcggccatcaccaagcagaagaggtggtggcggagtggacaaggacaggcggcacctttggcaggcgaagcaggcgacgcttcacctccgccatgatgaccgcgtcaaaaagggaccgggaaaggggatactctaaaagggatcattctctgcgaaggaagcgggccctgagcccccctactgatcagaggttcgaaggctggcccctcggaaaggttcaacagccgcctcagagcactcgggctccgagccctcctactgatcagaggttcgaaggctggcccctcggaagggttcgacagctgcctcagagcactcgggctccgcccccaccactggtcagaggttcgaaggctggcccctcggatgggttcgacagctgcctcaggccactcgggctccgcgccctctactga

SEQ ID NO: 16131 - DNA, 663 bp, Zea mays
  Peptide Sequence Number=SeqID_59506
atggtgtgcgggtcgccgtcggggatggccggagttggccggtccacgtgcgcaggcagggatgctcgttggcggcgagggagaggttcacgggatgccagagaagatgtgggtgcaaggaattggacggagacacaccggttagctttgtccacgcgcggcggcggaagaccgaagtccggtgaggtcgatctcgggcctccggtgaagtccggcctggtccgagagcttggaaagcttcacgggccactggcggagctagccgaagcactggctcgacttgggggtggctggagtgggctggccacggtggccgaagctctggcggcaatagcgggcggaattgagctcgccggagctaaggagagggggctggccggtgaagcgtcgagcacgaggcagcgcagagagaggtcaagttcaaacacggattgggcccaaatctttgagattaaggccacgatcccgttgagagatctcttcctctcaggattcgagttagggatcaaggtgaacatccttgatctttggctcaaggggatggcgccagcggtcgacggcggggtgaaccggccgtccgcgggggagaacccggccgccggtgggctcggcggtgattcgccgtcggtgacccagttcttaggtaacgggcaggcgccctag

SEQ ID NO: 16132 - DNA, 261 bp, Zea mays
  Peptide Sequence Number=SeqID_59507
atggagagtcatgatctctgggcagaaagggagtcacggcttgtgggtggcaatgagattgatggttttggtattgactctggtaatgctagtccactacagccaaacaggatacttgctgagtatgttgatgtgtactcacccttgctctacacaccaacccccccatccccaggttgtcagcattgcaacccctgctcaggagaagatgaagctgtggaaggagactaccaggagttccaagattatgacgagttctag

SEQ ID NO: 16133 - DNA, 273 bp, Zea mays
  Peptide Sequence Number=SeqID_59508
atggggcactgtgaatttgtcgccgttgatgaatctttaccacggatccgccgcgcagcgtgggcgagctcgcaacctcctcaacagccggtgagaacttctcctatagctccgccatgggctagtaatgctgtagctcgggttcgatttgtgaatgggggcgtggatggtggaatcgactgtgaccggcgatggtgttcgccgcgggtgagcacgccgccgtgtatttttcgcctgaggtcgcagatggcttcagcgccgtcgattggatag

SEQ ID NO: 16134 - DNA, 399 bp, Zea mays
  Peptide Sequence Number=SeqID_59509
atggcggagcgagggcgcgcgcgagcgcggggccgagccgccggcgtcgggcgcggggccgggggagggctcgccaggggagggggggctcgccagggaggggggcttgccgaggcggggagcagggcgcggtcaaggggcggcgcggggagaggctcgccggggacgcggctcggcggggcagggtgggcgcgggaccggggagggcgcggccgcgggcggcgcgcaggggcgcggccgagggtgacgctgggaccggggcgacgcagggcgcgcgggcaggagggtcgtgcggaggagaagaaggggagggggaggagagagagagaaaagggaaggggaggggaaaaactcacctccggggatccaaactctggcaatctcgactccaaaccctag

SEQ ID NO: 16135 - DNA, 222 bp, Zea mays
  Peptide Sequence Number=SeqID_59510
atggactccgcctcgcccgaccccagggctcggactcaacctcgactccggacgacggactccacctcgcccgaccccagggctcagactcaacctcgactccggaaggcggtctccgcctcgacccggactcagcctcgacctcggaggagcctccgcctcgcccgaccccaggctcggaccaaccacgtcataggggggccatcattaccctacccctag

SEQ ID NO: 16136 - DNA, 213 bp, Zea mays
  Peptide Sequence Number=SeqID_59511
atgaagcatcgtcccgggttggagaggttgttggagactacccatgtggagcttgacgggaagctgttcgtcaacacgcagcaggcccctacctggcgcgccaactgtcggcgtttcgaccccgtggggtccctggaccgacgagtcgggtgcgcttgcagtagggggttacaagcgtccgcgagggagagtgagagagagactgtccgctag

SEQ ID NO: 16137 - DNA, 133 bp, Zea mays
  Peptide Sequence Number=SeqID_59512
acattgtggtacaggtggttatgagattgatggttctgattatggttatggtgctgcattgcaaccactgcccagcgaagatgaagctgtggaaggagacttccaggagttccaagattacgacaagttctag

SEQ ID NO: 16138 - DNA, 273 bp, Zea mays
  Peptide Sequence Number=SeqID_59513
atgggggagggaggagagggggagggggaagctcaccggcgacggggacggggcggccgagcggggcggccgaacggcgacggggaggggcggcggcctaggcaggggcggcggctagggcagggggcggactgtaaccttgctgatggagagtacgtcctcgtgccggagcaagaagctgctcaggaggtagccccggattcagcacccgagcctgcaccagaggatctgcctgccacggccttggaaggcaagccccgattttatgcataa

SEQ ID NO: 16139 - DNA, 393 bp, Zea mays
  Peptide Sequence Number=SeqID_59514
atggttgatggtgtaacttggcctacaaccctaccaccagattggacggtcgagtgggatgctgctccaacaggagaggagcaggaggggcattggttgctggctactactgagctgctttctttgggcaatgattcacccaatggccttgttccccaaagtggaaacatgcacggcctcctccttgctctggagctgcttggttgttctggttggttgctggggcaggaaggcgaggtgcctggttgctctgacgctgatactgatttcctccctgctggtggttcttacaatactgctgctgaggaactgcctctggtactactgctgttggttctgacgctgatgctggtgctagtgaccttgcttgaattactgaggtgggttgcttga

SEQ ID NO: 16140 - DNA, 474 bp, Zea mays
  Peptide Sequence Number=SeqID_59515
atggcgacccggacaggaggcaacaagcttacagacatcaagcacaagtctatccgagcaaaagccctcactcgattggatgggacaaccctaattgatgctcgttcacggtcacggaggcgcaaggacctcaatcgtgtacactcacaaatttggatcgaacggggacggaagagtgggtcgacagagagggtgtctgcggcggcgttctatgatggcgacgcggtgttctgggattgtggttgcggtagagttcaaatggctgacacaataagcaacccgaggatccagacacgtcgcgctatgatcgtgatacagccattccgacgacatcgtggaccaacggggaaaagcggcaccggcggtcagggcaaaatccttatgaatttagagatacaaggctccaaagttgacccaattccactgaaattcagacttaaccacttaggggtccttgggtccttctgcaaataa

SEQ ID NO: 16141 - DNA, 543 bp, Zea mays
  Peptide Sequence Number=SeqID_59516
atgaccattgagcagatgtgcccgatgcagacccaagcagtccaaacaattggtcagaccttagcagcgatgcagcagcagccacgccacctcaacctcaggtgcaagtctagatgccacagagacaagtttctgcagctgtcacgttatgcgccagaagatgttaatacagatgctaagaggcagtaccgtttcctgagaggattggttgatccccttcactaccagatactctgtcactgtcactgcctggtgggcccgcttgggcagctcgatcttcttcctcaacagaacgcaatttctacttcgccatgggtctcgtctgtgggcaactccctgaccccggcgggtgtccctggcgcgtcgcgggatgccgtcgcgcatgcgcgtgtcctcggcaagagaagaccgccgccgtggggtcggtggttcctcgctgtcgtcaaatccggccatgggccaccattcaccatggtggaccctctcttcatctcctccttcggtaaggatccctctactgggttcgccttcctctccaattag

SEQ ID NO: 16142 - DNA, 234 bp, Zea mays
  Peptide Sequence Number=SeqID_59517
atggctgagatgcaggggaaggttgcctcccagactccacctcctgctgaggcgagggggaagagtcatgctgctcctgctcctgctcctggcgtcggcgctcctgctccttgtgcaggcgacgatgcagtctctctaggtgactggactgacctgacactgtgcgacgcagtgggtgctccgccaggcgagaagacaaaaaggggatcactgacttacgtgcagtgcatctaa

SEQ ID NO: 16143 - DNA, 321 bp, Zea mays
  Peptide Sequence Number=SeqID_59518
atggcgcgcggcggtattggtgcattggcgaagaatttcgaccgcccaaggtccccccagcgcactggtgtcacggatttggctccttgcatcacagttaacctgccagatcaacaggcagaaatacttggccacaaacgccggattgcacggcggcgcatatctctctttctctctttcttttggaggacatttctaatcatattattcaacaaagatgtatatgcagatgtaattatggacattgatccacaacccatcacactcaatcaaagatccaaatcaaacaaatatcataagaacaagcattcaagcatataa

SEQ ID NO: 16144 - DNA, 372 bp, Zea mays
  Peptide Sequence Number=SeqID_59519
atgggctaccgcttcagtggtgtcgtccgtcctgaatccaatcgtcttggagtcaagagaatgccaacccagctgaaggggatgagcctccaaagtcagccagactcggaaacgtggtacccgatgctcctcgtacaactgcaccgtgtacaaagggggcgtaaggtaaccggtggagttaagcagttcccacaagatggaaggaaagccatcgtgagaaaggaagtcagagctgaaacgagtgtctcctccactggcgggggcagggagatcctcgatggcagtctcgagagcttgctcctggtcttcctcgtggacagctccttgctcagggatgagcacgtactctccgtcaacgagattgcaatctaa

SEQ ID NO: 16145 - DNA, 216 bp, Zea mays
  Peptide Sequence Number=SeqID_59520
atggacttaccaaatagcttaaccaagcttggccctaaattgctaagtgtaccacaaaaaccttcaagtaattgcaatctcgttgacggagagtacgtgctcatccctgagcaaggagctgtccacgaggaagaccaggagcaagctctcgagactgccatcgaggatctccctgcagccccagcatttgaagacaagccccggttttatgcataa

SEQ ID NO: 16146 - DNA, 813 bp, Zea mays
  Peptide Sequence Number=SeqID_59521
atgaacgtatgtgagctcactcttgctgtctcacacccccccacacaggtcaagaacagatccccagaaattttatatgcaattttggatccgatactcggcgccataggctatgacgccaagatgaaagacatgtaccgggaggcgttgtggcagaagagaggtcgtccttgggagtcatatccggacgtatctagtaaggatgctcctgttcctcctaaacttcctgtgcctaactgtgactgtggcagactggcttgggagcacctgaggtgtttctttttccagtggatcgacggtcatgataaatttgaccctcgatatcttcttttcgctaattggttgtgtggaaggactagtcatgagcgttttaagcgttggatacctcctcccccgaatcctccaccaattacggatgcggagaaggaggtagcaacaaaaagaaggatggactcaccgcctcgatgcgattgtggagaccgtgctgtcatcgacgaagacattgtgaagcacttcgtgtgtccgaacattgattatccatacgggtggcgtaagtgtcgtttcagagagtggttgtatggtcctttgtcccattggccagaggcacaggagacgagaaaatgcagttgggagagttacgacgacaaaggagaggtgatgcgcacaatagagtccaagagactaatgggacagaagatgcgttgtggatctcagctcgtcgattcgtacattaacgatcgcatacgcgacatgcgtaggtacgcgaaatctgtcttttatgacagcccgaagcgtgcagagttaggaggttga

SEQ ID NO: 16147 - DNA, 492 bp, Zea mays
  Peptide Sequence Number=SeqID_59522
atgttggataatcttgctgatcgtctcaagggaaagattgaatgtggcgtaaactatatggccgatgaggcgcatgcaagatatgttcaggaaaaaatggcgacagtggatctgatggaggaggaggacgacgacacatctagattgagtgaggtaggattacatggagaagagaaggacgatacatcaaggttgagtgagctcatcgcactagctgaggcaggattacgtgctcaagagaaagaggacgagtttatgtctcaggccgccgaagaggtagaggcggcttattacaagcagaagtctgatgaggctgaggctgaggatgagctattctcccaagctgcagatgaagaagaagccaattattacaagagaactattgacaagtgtgatgcaggacaatgcagcaagtggaatgaggttgtcgttgaggattgcgcgacggatgactccgaagatgagttacttatagattgtgattctgattga

SEQ ID NO: 16148 - DNA, 132 bp, Zea mays
  Peptide Sequence Number=SeqID_59523
atgggtgccgccgcggctcggggagcgccgccgtgggtggccgtcagtgacggtcaagttaccgaggattctgaggttcagctggtagagactgctgagcaggagctcgttgaaggcaagttgtgcccttga

SEQ ID NO: 16149 - DNA, 69 bp, Zea mays
  Peptide Sequence Number=SeqID_59524
atgaacgagtctggtgtggtatggcaattagtgttttgttttcaaaaaaagaaaaaggagatcgggtaa

SEQ ID NO: 16150 - DNA, 150 bp, Zea mays
  Peptide Sequence Number=SeqID_59525
atgggcagagcgcgagagagggtgaagctgagcgaaatgaggcaaggggtgtgcgcggggcaccagtggggctctaagaaagggagctggggcgcgtgggcgggcgtcgtggccgagaaatccgggttctcaaatccaaattcaaactag

SEQ ID NO: 16151 - DNA, 747 bp, Zea mays
  Peptide Sequence Number=SeqID_59526
atggcggtcacgatcacgtgggtgaaggcgaggcagatcttcatcagccgcggcaaccccaccgtcgaggttcaacattttgctttgccaagtcttccaggggccgtggacgtgggcctcagcgacggcagctacgcgaggggggccgtacccagcggcacatccactgttttcagaccagtttgcaaatctttaatgtctccagtcttttatatttgggttagttatggtggtaccccagccctcgcctctgaccagtttgcacagttacatattttcatgatggacagtggtgagagctgtccctacttcaggttacatattttcatgattccacttatatatgcctatagaagggcagactggtacaatggtgaaaaaggtgtcgggtccaatggcaaacctcttcactataagggaacaccattccatcgtattatccctggcttcatgattcagggcggtgacatagttagaggcgacgacaaagggagtgagtctatatatggaggcatcttcccagatgagaatttcactgtaaaacatacacatccagttttacataactactatcaagacaagctggtgagttgtgttgtacaccacgtctcaccaatgattgacttggaagctgcagctcctgaaatgggtgatccaaggaatggataccgtgtacgccatagaagggggcgctgggacttacaatggcaagccaaggaagaaggcggtgatcaccgacgctggtga

SEQ ID NO: 16152 - DNA, 975 bp, Zea mays
  Peptide Sequence Number=SeqID_59527
atggctcgtagaagatcccacaagaacaagaagacacctccaaaggaaaataatgagactaaccctttgaaggaagaagaagaaaatgaacgatggagaccaaacgatgaatccacctctccaaaaggaacaaacgatgatacatatcaaaagctcaaagaagaaaatgagaggctaaagatgagcttgacacaactaaaagggaagtgcatacctcaaccttctcaagataaccgtaatcacatggtgaagaagcttgagacgggaacaaccgaggcatgcactaactcccttgaagaaaatgtcaaggacttgaggattgccaagaggaaggaacaaaagaagaaaatcaacacctcttccaaaagcctcaaccatgcctccataaaagcgcaattccccggcccacacactcgagcacgccccctggcccacacgctcgagcacgcgccgccccgggggatccgcctccgcctcttcctcggccgtggcggtgagcgcagcgccgcccccagtgtagatcttgaggcgacgacgaagcttcaagcccacgcgcccctcgagatggaggcgtcagcggcccttgacgaaaccctagccgacgtgctcgaccacctcaagccccacactatcgctctcctccaccttctctacaaccgctgcccacctctagctccgcctcctccctacgcgaaatgggtgggcatcgcgcgggcacagctccatctctgggcacgctgggtggcggcgcggcgcggatctagacctggtcgatcatcacgcgtcgtcggcagccaggtaaatctgactgattcttctccttacctgcttctcccggtgtggatctcggctctcgacgagtttcagggatccgtagcggcggcggccatggacaagagccctggtgctgcttctcacttacgtccttcctcgctggtcaacgcgatgcgaagctcgcaggagaagaacacgtag

SEQ ID NO: 16153 - DNA, 855 bp, Zea mays
  Peptide Sequence Number=SeqID_59528
atggcccgtatcaggtgcactgcacgtaagtctatgatcccctttttgcctacccgcttggcggagcgtcccctgtgtcgcacggtgccaggtcagtccagtcacctggagagactgcatcgtcgcctgcacgaggagcaagagcgccgacgccaggagcaggagcagcaggactcttccccctcgcctcagcgggaggtggagtctgagaggccactttcccttacacctcagccagagatgccccctgcaccacctcagggcatctcggctgctggaggagaccctgacggagacggagacgacgacgacgccggtggcagttcgagccacgacacggagctttcggaggagccgaagtcggagggatggatcgctagacccatcactcgtgacgccgttcaccagtgggaggctacttgcttggtgcaccgtccagacgatgatctctggggtgcagaagccttctcagagcactattctattactgagagggatactgtcgaggcagccttgaaagatgcagcacgatgggcactttctcagtattgctcgttgttcagcggggtagctgatggcctcgacctgaaatactaccctcgccgttcgaccggcagtgctggaggtgtgattgcctcgccagttggcgagggcaatcccaggctgaacaacatggtcaacttggctgtcgtgctcaacacagagttggaccacacccttgatgagttgggcaaggttcgagcggaggttgcggaattgcgtgctgagtgcgcagcacgccactatttggatggtggttctcccgcccctgtcgggattcaacacccttaccatttgccgctgaaagggaaatag

SEQ ID NO: 16154 - DNA, 582 bp, Zea mays
  Peptide Sequence Number=SeqID_59529
atgacccctgaggcctccgtggaaagctcccggatggcctcggctgccctccccaccaacgaactcttccggtgggtgaagggaatgatggggaaggcggattactccgtcgtggtcccgatgcgccccgagcagggctacgtgtccctgaggttgcgcatctttacccacaagtcatgttacccatctgccaagggatcgcgacttcccatacacctctaccgaggaggcgaggcagggaccgccatcgcagcaaaatcctcccgagggcctccctacactgaccactcccctactgcccttgcccctttcgggggtggagaggcaggggtcacggcgacgaagactccaacgaggaatggagtttatatggccaggggagcggcgcgcgtgcagccgatgctcgcgaacacagagaaggagatgaagtccgaccaggggggaaaacggcagatccaatcgcctgggcctgcgatgcggagtctgttcgggaagctgagaactgggtcccgtctgcagagtaacgagcacgcgcggggagactggctagtggagcccacacgatccgcgaacgcaggagag

SEQ ID NO: 16155 - DNA, 1014 bp, Zea mays
  Peptide Sequence Number=SeqID_59530
atgaacaaaaagaccggcattcaaggtgccattacaaacgggactccggttccgtccccgcggcagcagctatggtccctggacggacgcggccaccggaaggctctcgttcgcgtccccgctcaagggacgcgaaccagacatcaaagccaaagagccggaggccggcccgtaggcggcactgacggcctccacggtggggaagcttcccccggctgccaccacgtcagcaccgacgacggcgtccgcctctccaccaacgccgcaccggcgaacgcgggccgctccaaagcgcaccggcaggacgcctcctccgcagagctggggtatggtttccaccaccagaagctggaagaggaggtggccagccaacccgtgcgggaggtagagccccggctcgcctcgctctccgccccagcaaggatggtgaccaccggcgaggggatgcagccgggccacgtgatgaaaatccttgaagccgaacgatggctgaaagcgggtgaaagggcggacagccgtgcaggcggcatgcaaccgcgccaagtgggcgtgcccctccgacttccaacgcacccagcatggaggcccgggcccacgcgtcatgcaaccggcgcgccggttgctacgtacgagcaactgcaccgccacccgcaccactaccacgcctcctcgactgcggaaccagtactgcgactcgaggcaaccctgcgtacgacccagcagtgccagccaggcgcgacggtcaatacggccaaaaatgggccggcagtaatggtggtggcaggcgggcaggagcagcggtcacgtcgtcagccaagcttacgtcccatccaggggcagcgagagaaccctctctcatggcgtgaagacggcgcgcccgtgttccattcctcgaacggctcgcgcacgtgcaacggccacctcgcgaaccactcgccccgtcgcattaactccgtggtgggacaggcggcgcctctggcaggggaagcgagcgacgcttcgccttcgccataa

SEQ ID NO: 16156 - DNA, 1311 bp, Zea mays
  Peptide Sequence Number=SeqID_59531
atggcaggcgatcccccgacggctgcggagaaggagaccctggtctcctccttcatcgagatcaccgccggccagaccctcgagactgccacccagttcctccagatgacgagctggcacctggaggaggcgctgcagctgttctacatcgacggcgaggccgcccacaccgccgcgcattcggtggacccgtcgcctgcggcggcggccccgtcggcactagcggcggcggccggggtggaagaggcgatgaggttcgctccacccccggcggctgcactgggcgatgcaatgtcgcatgggtttggggtcagggaggacgacgacgttcgcgcgcccctgccggtgaagagggagactctctacggcgagggaatcgtgtccgtcatgcgacctaatgcatcagctgcatttcgtaactttgaacaagaagcaagacaatctgctgtttgggactctgagcagaatgttgcatctagttctggtgataatcttgcttctttataccgtccaccttttcctttgatgttcaatggatcctttgacaaggcaaagttagaggcttcttccctggacaaatggctattaatcaatttgcagtcgacagaggaatttagctctcacatggtttactatgacaccagtgaggggaggaaggtatgcacctattaccatttggtgtccatgcctgctattctcctaattgaccccgtcaccgggcaaaaagtacatgcttggaatggaatggttcacccagaccgtttactcgaggatttactaccttacctggataaaggtccgaaggggcaccatgcagctcaacctcaaaagcgcccaaggaaagttgatcaggaagcttctacgggcaagcaaggcaaaatcgctgtagaggatgaggatgaagaactagcaagggcaatagcagcttcgctagaggtagtcattgaagcatcagacgccagtgatgatgatatggctgaagctgaacctgaggaggaaaatgagcccagcttaaacatcaagcctgattatcctcctctccctgaagaacctaaaggaagcagggagcttctctgcagggttgcgattcggctaccgaacaatcaaaggatccaaagaaacttccttcacacagatcctatcaagctcctgtggtcattctgcgctcctcaggttgaggacggggagaagagggctttccacttcgtacaggccattcctggagcatcccagaagctgcagtttggaagcgacctaactttcaggaaagctgggctggccaactcgatgatcaacctcttgtggggctga

SEQ ID NO: 16157 - DNA, 939 bp, Zea mays
  Peptide Sequence Number=SeqID_59532
atggcggggatgtctcgcgcgatccgcaacttcgccgccgcgtcccggcgaaccctgaccgctgcttcggggccggcgctgccgaaggaggcggcggcggcgggggcgcgggtgagggcggcggcgcccgggcgcatggggcgggatcaggaggacgggaggcgcgtgcagtgggtgttcctcgggtgccccggggtggggaagggcacctacgccagccgcctctcgcagctgctcggcgtcccgcacatcgccaccggcgacctcgtccgcgacgccctggccacccctggccccttctccaacaagaagtttctgaccaaacgagaaggcagaaaagaggccccaacagccgcgctcctattcagaaatctatctgaacagtttgctgaggttgtcagccatggaaaactgcttgctgagattgtcaatcatggaaaactggtgtctgatgagatcatcataaatctgctgtcaagacgtctggaagagggagaggaaaagggtgaattggggttcatccttgatggctttcctcgaaccataggacaagcggagatacttgaaggagtcacagacattgatttggtgatcaatctcaaactccgagaagaagctctgcttgcgaaatgccttggcaggaggatgtgcagccagtgtggagggaacttcaatgtggcctccattgatattgagggtgaagatggtgggcctcgaatgtacatgcccccactgttgcctcctccacagtgtgaatcgaagctgattgctagagcagacgatactgaagaagtgactgaaccagtggaggagttctacagagcacgtgggaaactgctggagttcaatctgcctggtgggatacccgaatcatggccgaagttactgcaggccctgaacatagaagaccccgacaataagcgatctgcagcagcatga

SEQ ID NO: 16158 - DNA, 210 bp, Zea mays
  Peptide Sequence Number=SeqID_59533
atggaagccaccgcagttctcctcctcccagtcgtcccttgcgcggcgatgctccaagtcataagaataatgatctccatagagaagggaacgttgagctggtgcttgaggttcactgatgcctcttcaggattagaaattctgggcggggtaatgccaattgagttccagcaggctttcgcgaagttgcatctgaggaaaagatgttaa

SEQ ID NO: 16159 - DNA, 717 bp, Zea mays
  Peptide Sequence Number=SeqID_59534
atgactgcaaaatcggagcagacaccacgaataacggagctgcatgtaagggtggactgcaacggctgcgagaacaagatcaggaaggccctgcgtgccatcgatggtgttagcgaagtgtatatagatcaagcaagccacaagatcactgtggtcgggatggccgacccatggaggatggtcaaggccatcaggaaggccaagagggtccccaccatcttctcccacaccgacccggccgccgcagccgaggctgatcagccgccgcctcccgctgccgaagccgaagaagccgaagccaaaggggaggcccaggcgccagcgccagcgccaccacctcccgccgacccgccagcagccggcgacagagcagaggagaccgcgccagctgatacgtccgcgccggaggagcacaaggaggccaaaccggcagaaaccccggcggctgtggacgccaccgtggtggtgcgcacagtacgtgaccacccgtacgggtacggcgctggcggccatggccaccgcatgtgcagtgaggcgaaccaccccgtagacagcttttacagccaccatcgcccgacgagcccttacgtggccgagtacggcgccggcggcggctatgctggctttccggtgcaagaaggcaggggcaaagaggatgccatcaatatcacttgtatgttcagcgatgagaacccaaacgcatgcagcatagcgtaa

SEQ ID NO: 16160 - DNA, 207 bp, Zea mays
  Peptide Sequence Number=SeqID_59535
atggaagcaaaacttgcagcattagacactgctggggctgaggccgagtggcttcgtgatttcctattggacttaccggatggtatttaccttaatgtattacaagagtcttataaaggtgagatgtcctacagaacatcttttgaggaatacacctatatgagtcagactgctggtcaaagtctatgggacttgggtaatctctaa

SEQ ID NO: 16161 - DNA, 693 bp, Zea mays
  Peptide Sequence Number=SeqID_59536
atggccccccctgtgacgtggtcggtccgagccctgggttgggcgaggcggaggctcctccgaggtcgagtccgagccccgggccggacgaggcgaagaccgtcgtctgaggccaaggctgagtccgatccctgggctcgggcgaggcgtagttcgtcgtcttccggagccgaggctgagttcgagccctggggtcgggcgaggcggagttcgtcgtcttctggagccgaggctgagtccgagccctggggtcgggcgaggcggggttcgtcgtcttccgaagccgaggctgagtctgagccctggggtcaggcgaggcggagttcgtcgtctgaggccgagacgggggccgagccctggggtcgggcgaggcggagcttcctatggcacccgaggctggacttggctgctgtcagcctcactctgtcgagtggcacagtagtcggagcgacgcaggcggcgctatcttcttgtcaggcgatccttgcattaaatgctcctgcgatacggtcggtcggcatggcgatctggccaaggttgcttctcggcgaagactgggcctcgggcgagccgaagctttgtgctgatgggggttaccagctgagattaggagtcttggggggcgccgaacatggtgtttccagtgagttgctaacgggtaatccgagtggacgcccgtgccccattcgttag

SEQ ID NO: 16162 - DNA, 1173 bp, Zea mays
  Peptide Sequence Number=SeqID_59537
atgccttgcgtccttccaccttccgagcccccggatggggagcgcccgcggtccttccgccttgtcatcgttggaggaacgcaacttcgcggaagttggtacctttcagccatcgttcggcttcaaggattttcatcaggcagcccggctgcatcccctcgccggtggtcacccgagacggtgaccaccagtttgatggtggggagaagcaagccgggctgcgacctcagtcctgccctcagcttcaaggatcttcatcatccgggctggggcggaggtcgggctgagccggagctctacctcccgcgcgggttcgtgggtcaccttctccctcagcattcaagggagagggcgctcaccggcctagcgggagggttggacttcgacaacgcggggctggccggcggcgagcgtcgtcagcttcagcgcgttgggctcgctggctcagctggctctggctcggctcccggtgccccctcctaccgcgagagcggtcgtcgcgccgcgcgcactgggggaccgtacaagacgttgcgcgctgctagggcggcgttcgtgttcttgggctgtcctgcctttgccccgatggcttccgtcgtcggcgctgaggtagtggcggctgaagaagtcctcgtcgccgacgggatcaccgccaccatccgtgctccgggcctccggctctttggctttgatagcttgtcctcgcccctcgagtggggacgtgggcgagggcctcgttgcagcagcgtccgccctgaggccatcgctgccgctgtttggccacctggagcggaggtcgttgtcgctgctgccggagcggtcgtcggcgagccaccaggggttttgtcttcccgcaggccctccaatgtggggggttgttcgtacctgcgggggtggaaccggagttccgtttgtaatggtaccttgagtgtcggtgtctgttcattgtggctgtcggggcctgaacatagcggagatcctccgaccgcgttgccgtccgaggctcggtcggacttcgccgaaggtggagttgacgccgagggtgctgttgctccccttccatcgacgtctgagcctgcaggatcgccgagaaaacccgaaaagccgtttcggcagaaaggtttccgagcattaagacttgttcggtcagcggaatcgcttatccgagcgtga

SEQ ID NO: 16163 - DNA, 441 bp, Zea mays
  Peptide Sequence Number=SeqID_59538
atggtcggttcaagggataactctgaagtctcccccagcaacatcatagagccgacatgggaaaccttgtcggctgatgaacagttccagttcgaggagcacaaagagcagctgatccaagaagcaaaggcgaagttcctggccaacttcaagttggacaggaacaacaaagtcgttcggcaacgggcgacagatctagctttgcttcgacctacagcgactacctccgagcccgagtccgagccctgggtcgggcggagcggagttcgtcgtcttccggggctgagcccgagtccgagccctgggtcgggcggagcggagttcgtcatcttccggggcttagcccgagtccgagccctgggtcgggcggagcgaagttcgccgtcttccggggctgagcccaagtccgagccctgggtcgggcggagcggagcttcctaa

SEQ ID NO: 16164 - DNA, 1119 bp, Zea mays
  Peptide Sequence Number=SeqID_59539
atgcggtcgacactggcagccaacgcggatcgagaggacttcccttccatggaggctggggcggatgggattctggagagcgtctgggatctagtgctgctgtggttctgcctcttcatagtaagagttcacttgacgctgagctggtggctggggatgaacatagttagttaccttgagaagatgcgtgtgctgcagtctgaaatcattcctggtgtcaaagcaatgttcctcctgaaggtggttgcagatgaagggcacctccacctcgatgtagcaaaaggggcaagggaagagaagcatgaatgggccaacaagagatcagctagaagacgatctcaaagtaaacagaaactaaaccacatgtacctgcagcgcgaggaagggtggcatgtggtggaggtggtggttggtgcctgcctctgtctgcagggaggaagccgtagttgtagcaagcctctacctccattaattgcttatcgctggcctggtgattctggagagcggatgggatggcggcgatccgggcgggagagagctgggattgcggcgagagaggagagtggggcgaggacagccggatctgcgcgtcgaggaggagatctgcgccacgacatgggaggggatcgcgcagacgggtgggggagcacagcgaggagagccgaggtcgggagcacagtgagccttccatcaacggagcgcgagcgtgggcaccgggcgccgccgtcgtcggggcttgatgtcgcgccgccgccaggatggggcttggggtcggtgcgcgccacctccatccgccaccttccatccgggggaagaggagttgcgccagccgtcggggttgcgggcgtaggggtgtggcggcggctttggcgcggtggatggcggccgcggatggaaaggaatcgcggcgtgctcgcgcgcggatggaaacgaaacacgggggctgagggtggagaaatcgtgggggtcaggcgttgcgggcgcaggggtcatgcggcggatttggcgcggcggatggcggccgcggatggaaagaatcgcggcgtgctcgcgcgcggagggaaacgaatcgcggcgtgctcgcggcgggcagaacagggatgtggacgcctacactaa

SEQ ID NO: 16165 - DNA, 846 bp, Zea mays
  Peptide Sequence Number=SeqID_59540
atgcagtactcgtgcaagcgctacttcgtgctcgaggacaccacgctccgctggttcaagtttgcgccatcctccaagcgtgaggcgtccacactttcctcggcgcacggttctgcctctgcagccgcgacacccgcgcgtgccctcacctccgccgccgcgatgccctccgccctcgcgacgctgcggcctcccccgcgatgcccgcgcctccgtccccgcgatgctcgcgcctacccctgcgacaccgcgcgcgcacgcctcctccccgcgatgccggcccccgtctcctccaccgcgtacaaccggctccgcaatcctcggccccgcgctcccagagtgggcgcaggtgacaccatggctgtgcccgcgactcccctccgcaatcctcggcctcgcgcttgctctctcgagctcagatgggctcccgccctagcccctgacaccatgctgtgcccaaccctaaacctagccaccacgccgtcaacaacgccaccttccttccttgccaccacaccttctttagatggaaggcgcgactgggatgtcgctctgcggtcctcacctcctcgtcgttggcggtcgcgcgacctcctgaccatcgtctctgcccgcgagatcccccccgactcgcccacctctccgtccacagccgcctccatcacgcacctcctccacgccgatgagaaggctcgcccacctctcagtccacgaccgcctacgacgcgccttcggaataaagatctctcgaagcacccggtggatgggttctctactgggctggtcgacgacagcaatgtcttcgagtggcaggtcaccatcatcggaccgcctgacaccctatag

SEQ ID NO: 16166 - DNA, 459 bp, Zea mays
  Peptide Sequence Number=SeqID_59541
atgacggatgcggagaaggaggtagcaacagaaagacggatggactcaccgcctcgatgcgattgtggagaccgtgctgtcatcgacgaagaccatgagaagcagttcgtgtgtccgaacattgattatccatacgggtggcgtaatgagacgaggaaatgcagttgggagagttacgacgagaaaggagaggtgatgcgcacaatagagtccaagagactaatgggacagaagatgtgttgtggatctcagctcgttgattcgtacatcaacgatcgcatacgtgacatgcgtagggccgcaaaatctgccttttatgacagcccgaagcgtgcagagtataggaggttgaaggcggcggatgagaagagagcacaggatgcaagggaatgggaagcggctagagccgagaaacaaatgttggataatcttgctgatcgcctcaagggaagtgagtga

SEQ ID NO: 16167 - DNA, 255 bp, Zea mays
  Peptide Sequence Number=SeqID_59542
atggcctatctggcggagcgagccagatgggacgccggtcttgttccccgtagcctgagtcagcttggggcaggcccgcgccctaggttgggcgatgtggaggctcctccgaggtcgaggtcgagtctgtcttccgtggccgtggtcgagtccgagcccctgggtcgggcgaggcggagaccgtcggctgaggccagggctgagtccgagccctggggtcgggcgaagcggagttcgtcgtcttccggggcttag

SEQ ID NO: 16168 - DNA, 231 bp, Zea mays
  Peptide Sequence Number=SeqID_59543
atggtcgagattcacagcaggcgcccaagacttttccgaaagcgtggtacaggtagattacaagggcagcacggcgaatgcaatgagatggagcagaggggtacggtggagcaggagcttgggaatgagggtgtggatttgctaccatggatgagcacgacgtcaagagccaaggcgcagggcaaggatggtcagaagtttgagttctatgcacaaacaaataaattctag

SEQ ID NO: 16169 - DNA, 612 bp, Zea mays
  Peptide Sequence Number=SeqID_59544
atggagcccccgtgcgtcagcggactcggatcaggccaaggcgacaagcttcgtccagctctgcatcaaagaaggaaggaagttatggaccgcacctactacaagggcggcatcaaggcgtactggaagcgccggggctactaccgcatcgacgccgccgctgcgcagcgccggccgccgctccccaccgcggagctcggaggtggcgtgggtgtcgcccaggcccagccgccggcgccgacgctggagggtgcctcggggcggcgccgatgccgcgggtggcgcgtgcgccgcggccagctgcggcggcggctgctccgcgcgctgtcgccgcgccggtggctcatgcggctccgcgacgcgtacgtgtccgccatgctgcggctggcgtcctcccccgccgtcgggtacggcgccggccagccctactgcggcacggcggccttcgcgcggccggcgcagctcaaggagtacgaagataaggtgctggtggagatctacaggtccatactcgcgggcggcgggcctggccccatcgccgtcactaccggcagcaacggcgccggtgcgcctgccgccgccacactacggctaccgacggctgctgcttga

SEQ ID NO: 16170 - DNA, 972 bp, Zea mays
  Peptide Sequence Number=SeqID_59545
atggaaggggagtcctctcgaccagactccacgtccgcaatcccatccgaatccctctcgatctgcgtccgtgttgtccatggaaggagaatcagacaccccagcctccatggaagggaagtcctctcgatccgcgttggctgccagtgtcgaccgcatcattttgtttggcaagcggctggtgtcggctggaaggaggtttcagtcaatggggcagtacgactagggagaactcaagaagaggtgctaaagagaaactatggcccagaggttgatgtttggagtgcaggagtgattatgtacatattttccctgccagagccttctatcagaggaactaatatggataagggtaccattttgaaaacattaacagttttggacactcagcttcctgttaaacaagcatttaaaataatgcatgatgagggtcttgctctggttcctctttgggatgaccgccagggaaccataacaggcatgctcactgtatcagattttgttttaatcttgagaaaggggatattgtgcattggtgtgctaaaacgttctaggcagcagaaagcaatatcacgggagcaagcagccaaagatctgcaagagttggagaaatggagagaagaacatgaggcattgttacttgctgaatggttcatcttcatccatttgaatatggacataaaaacaagagctaaaatgactactattttgagacagaggaactttctcgaagttcatattattggttactgcatgtacaggggggaagagctgcttgcgtactggtggagagaggatcattggttgaaagcgatgtttctacatatgaggtctgtaattaaggttgaggaagagttggttggggttcctgtgaaaggtggactatatgagattagggatatcagtgcgcttgtacgtttaaggccaacgtgggaggatcttcgcagctacttaaggccgcaaacgttttga

SEQ ID NO: 16171 - DNA, 489 bp, Zea mays
  Peptide Sequence Number=SeqID_59546
atggaattgctccactacgagatggagtgggggcagggagcaccgcacgcctgtaggcgatgccagccatgtccttctcctccccctaccatgcgatgcgacagcggacgacggaggggtcgagggcgcgagtcggatgcctcctccccttccacgcgatgcgacgacggaggggtcgagggcgcgagtcggacggctcctccccttccacgcgatgcgacggcggaggggtcgagggcgcgagtcgggcgactcctcccccttccacgcgatgcgacggcggaggggtcgttaggcgacgtcgaggacagggcgaggggcaacgccgaggacgccgaggacgctgaggacagggcgtggagggaggcagcgcgcggtatctccttcggtgggggagggggcggacgcggcggcgggatgggtggggagcagatgacgatgcgcggcgtgggggattgggtgtcgcggcctcgtggggggcaggggtag

SEQ ID NO: 16172 - DNA, 672 bp, Zea mays
  Peptide Sequence Number=SeqID_59547
atgctggcactactgcctggtggccggaaaaagagagagaaaggagagattgtggtggccgtagatcagttaatgggtgggggagatggggttggagccgtccgatctggtactaacggctctcatcagatctgtgggtaccggatgggtgttaatccctggccgttggatcataatcgagcacaacgttcagtagagattggatgtggcgtaaactatttggccgatgaggcgcatgcaagatatgttcaggataaaatggcgacggttgagctgatggaggaggaggaggacgacacatctagattgagtgagcttatcgctctcgcagaggcaggattacatggagaagaggaggacgacacatcaaggttgagtgagctcatcgcactagctaaggcaggattacgtgctcaagaggaagaggacgagtttatgtctcaggccgccgaagaggtagaggcggcttattacaagaagaagtctgatgaggctgaggttgatgataagctattctcccaagctgcagatgaagcagaagccaattattacaagagaactgttgacaagtgcgatgcaggacaatgcagcaagtggaatgaggttgtcgttgaggattgcgcgacggatgattccgaagatgagttacttatagattgtgattctggttga

SEQ ID NO: 16173 - DNA, 441 bp, Zea mays
  Peptide Sequence Number=SeqID_59548
atgatgcttgccgaaggtgttcgagactcagaaaacggaaacaaaaataaattacaaatgtaccttcggcttgaaggagagaaaatacaagtgtggcgcaaaagtgaatgccaagtcagcgtgaacaatcctagaggaaaacgaatgtgtccattccacctgagacgattccaccttcaggaaaatgatctgaaggaggcatccaagccaatcggctaccaaaactcgaatgtcctacgagtgttttggagagaacatattcgctctccaattctgggttccgggtcgagagcttcacagtatggtcccccggtgatgtcgcgatcccagcttgccgcatacacagatgctacgaacgtcgtcagtgtggccgtgcagctgaattccgaggtggtactcggccatggtgaagtgggcgagggcgacggaagtggtgggtga

SEQ ID NO: 16174 - DNA, 411 bp, Zea mays
  Peptide Sequence Number=SeqID_59549
atgcggagttcgtcgtcttccggggctgagcccgagtccgagccctggggtcgggcgaagcggagttcgtcgtcttccggggctgagcccgagtctgagccttggggtcgggcgaagcggagttcgtcgtcttccggggctgagcccgagtccgagccctcgggtcgggcgatgcggagtttcctatggcgcctgaggccggacttggctgctgtcagcctcactctgtcgagtggcacagcagtcggagcggtgcaggcggcgctgtcctcttgtcaggccgaacacgtcaagagggagatcgtcaccgacgaaaagcctgaagcttcgggaaagaagaacgatgaaaggacttcgtcaaaggaggccgacaacaagcacaaggaatcccggttctatcaagtcacatag

SEQ ID NO: 16175 - DNA, 267 bp, Zea mays
  Peptide Sequence Number=SeqID_59550
atgcagctaggcccggacagtcaggccacctcgccccaggatgctaacaaccctggcccgctagtcagcccgcgctcgcgttcatgcgcacgcgtctgcttggctagatatgatctcggtcattgctcgcagatccgatggctgagaatacgccgtaccacttcgcgtgtgatttttgctaaagagactctcggttctcggtgctcaggaggagatgctggcaacatggaggactttgaggagttccaggactacgacgagttctag

SEQ ID NO: 16176 - DNA, 789 bp, Zea mays
  Peptide Sequence Number=SeqID_59551
atggcgccccgcatgctctatgacgacggcggctctcagcccccttacggaagcaaggggacggccctcttacagagggttggccgcgcggggaaggacgggacggcgctcgccaactccggcttcacgttacaaaaccccacctccactcgcaaaccaggcgccgagaagcgaagcaacggccgaaggcaaagacgtggccgagacgaacttaagaagcgacgccttcaggaagggagtgacgtcaccgtgacgccatcgtcgcctgtccgcgatggaccgggctttcacccaaggaagatagcgctgggatgcgacgacctcaacaggggaagcggcacccatgggtgtcaccgtcgccgagactttcgctcaagagcccccagcacagcgtctggccgaaacctcgagacacagcaagctgccttcaccatcgtcgctgccccgacgccccacacaatgatgaagattttggggcctgttgccaccatcaccaccttgcacaagcccgagccactagccgacgctgccgcagacgagaggaggtcccgccaccgccattctggtcgactttgtaggcctgtcgatgcaccaacgccgaactccacccggctcatgcactggcccgggaccagcctgccggcgcctccgatgctggcacgcggaggcggtcgacctcacgcgcgccagatccagcccttcgcgcatcagctgcgcaagcacgcagaccaggcacccctccagccccctgagcagcagcgatgggcggacgccgccgccgtgggctag

SEQ ID NO: 16177 - DNA, 171 bp, Zea mays
  Peptide Sequence Number=SeqID_59552
atggcgcaccggacagtccggtgcgccaccggtgcgccaacggtgcgccaccgggaagacactaccgtggaccagcctggccccactggcagagggtgcaccggacagtccggtgcacaccggacagtccaggctcctaagccagaaacactaaatcttgttttcagctga

SEQ ID NO: 16178 - DNA, 1605 bp, Zea mays
  Peptide Sequence Number=SeqID_59553
tttcgccctattcacccccccctctaggcgactatcactcctccactcatacctccgcttccactccgccacccactctgcccactcccgtcactcctattgctccatccacctccacagccattcccgctacctccactacgcctgcttccactactcctgctcccgctcccgcttcagctcctcctgtccctccacctcgcttccgggagcgtgatgagactgaggtccgtcccctggtttcggatcctcgtctgtttgatcttcagcgtgctactgcagcacgggtacgtcggttcaggtacgtacccgtggagtcttggctaccagctcagagagacccaacagctggtgttcttttcagcacacagattcaggagtctttcttcagagctcagatgtctgctcagatagcgctgcgagtgcaccgccttttggatcttccagcttttctgcttgcagccggtgctgagtctgaggcgcatctcacctatctgcctggcctcctgacccttctgactatcagcggcagatatgttgaggagtgggtccgcgtcttctatgcctctgtttggattgacccggatcatcactggatgaggttccgctttgagcgagaggatgtcacgatcactgccagtcagatccgtcagctatttggattcccagagtcgacgactcgccttcacagcctctgctacggctcttctgaccttcctcgtcgccctcacggcggtgtggctccagggacagctcacgtcgcggctctgttccgcccgcctttcacagatgggtcgcgacgttctccagcagactttactacagcagcgaagtacttatatgagctcatcagacggacactcctgccgaggatgggatacagggaggctaccactcatattcagctttggctccttggtgccctggtatcccactctgagtttgatgttgtggactttctgatctgtgagatcgaggacaccgttctggatgggattcgtgctcgtcggcagctaccttatgctcactacttgtgccacatctttgtgcagctgattcagccacctcaatttcagagcactcttgaggcctcacgccttgtatttggatcttaccgtcctgctcctgagattccagtgccagcttctgcttctgtgtttgactctcaggccgaggatgcagctcttcgacagtttgacactcagggtacagccgctgatgatgatgatgatgatgatgatgattttggggttcctcctccgcctccgcctcctatgcctccacgctcacatgatcatgaggctgggagttctcgtgctgcccctgctcctcctccggctatggaccctgctcttgcggcgattctggccaacctggcagccgagcaggccaggttatccgagacgatgctctcgatgtttcagagcatgcaggacaggcaggatgcacttcagcagcagctcattcaggatagggcagagaatagggcattcatggctctcatgcttcagcattctggtatctcagcacctccggttcagtctgctccgcctcctccgcttcacgctccagtggtgccttcgattttgtctggaccccctgttg

SEQ ID NO: 16179 - DNA, 609 bp, Zea mays
  Peptide Sequence Number=SeqID_59554
atgaccgcacgcgaccgagaacgccaccacacgtgctgcgcgcggcgcgaatcatacgacgacgagggtatgacggggctgtgcgcaaggggtagacgaagctcaccttacgacaacggcagatggcgaggcgggtcgacggtgcacggcaagatacggatgcggacagcgatcgcggatgctgcacaggctcctccacataacaacaggacacgcacggacgcgtcggtgaggcagctgcgcgggcgcgatgcctggcgagtggctgtgaggcggctccgggcgtggcgagacgatgctgatgcggctgtaatgacgagaaggtggcctgaggaggggttgcggcatgccgtggccgacgatggagctcgcgcgaccggcgaagtcgacgcgaccaggggaggggaggacggcgaggagcaggcacgggtcgaggcgatgcgaggactgccggcgactggcgggcaccatcggcgtgaccagagcaagtgctcggcgcggggtgccgcgacgtcgggcttggccgccacgggacaccggaccaccgcgttgggcgagccgcgccgaggggctgctgtgcgtgggcgtgaggtgaggcaaggggagtga

SEQ ID NO: 16180 - DNA, 1875 bp, Zea mays
  Peptide Sequence Number=SeqID_59555
atgaagggcgacaaggcgggcgggagggacaggggcggcgccagcaggccgctgcgcctcgagtcgcagcggttcaggctgctgtccatcgtcgtcggctgcttcgtcatctgcctcgtcttcctcctctcctcccgccccgacgccgccgccgccttcggcaccgtgagtgtgagccccaaggcgtcgctggtggccgcgcgccgtccggtggcggtcaagaccgtgcgggcttcctcctccgccgacggagccttaggtggagatttccacgtggacatcctgccgcagcatcgtcaggagcagagcctcgagcggaccggcgacaagacggccacagaatgggtcagagacacggtgatcgtggaggagaggagcggcgccgagaccagcgaggcggagacggaggagaccgagcccgaccgtcacgacagtgccactgccactgccgcggcgtccaacaccgacgaccagcctgcagtaccaggtgcggagaaggcagtccaagacaccgccgcgatcaccgggcagccggctgccgaaacaacgtcggcgactgcgccggacgggacagaaaagacgggagctgctactggtggtggtagtggtcagagcaaggtccaggagcagccagctcggcaacggccacaagaggagcggcacgacgagccagcacaatctggcggggaccagcagcagcagcagccgcggccgccgctgtgcgacttctccgacttccgcagcgacatctgcgacttggccggcgatgtccggatggacgccaacgtgtcggcgttcgtcgtcgtcgtcgacccggcgacgagcggttccgatcaggaggagcacaaggtccggccttacccgcggaagggcgacgagacgtgcatggggcgcatcacggaggtcacggtgcgcgcgacgggcgacgcggcgggggcgccgcggtgcacggagacgcacggcgcgccggcggtggtgttctccatcggcgggtacacgggcaacatcttccacgacttctccgacgtgctcgtgccgctctacaacacggcgcggcggtaccgcggcgacgtgcagctggtgatggccaacgcggcgccctggtggctggtcaagtacgacaggctcctccgggcgctgtcgcgccacgcgccgctggacctggccagggcaggcgcggcgcgggaggtgcactgtttcccgcgcgccgtggtcagcctgcgcgcgcacaaggagctcatcatcgagcgcgaccgcagcctggacgggctcgccacgccggacttcacgcggttcctccggcgcgcgctctcgctgccccgggacgcgcccacgcgcctcggcgacggcacggggaggaagccccggctgctggtcatctcgcgccaccgcactcgcctgctcctcaacctcgacgccgtggtccgggccgcggaggaggtggggttcgaggccgtcgtcaacgagtcggacgtggccaacgacatctcgcaggtcgggggactcatcaactcgtgcgacgcgatggtgggcgtgcacggcgcggggctcaccaacatgatgttcctgccgccgggcgccgcgctggtgcagatcgtgccgtggggcgggctgcagtggatggcgcgggccgactacggcgaccccgcggaggccatgggcctcaagtacatccagtacgagatcggtgtcgccgagagcacgctcaaggacaagttccccagcgggcacaagatcttcaccaacccgacggcgctacacaagaaggggttcatgttcatcaggcagacgctcatggacggccaggacatcaccgttgacgtcggccgcttcagggaggtgctgctccaggtgctcaacagcctcgcacagtag

SEQ ID NO: 16181 - DNA, 170 bp, Zea mays
  Peptide Sequence Number=SeqID_59556
atgggtacgggttttttaatgggcatagacatttttcacgggtacgggtttgggatggcaaaacccagcgggagaacggacgagctcgttgacggccccaacgcgtcccacatctcggcgctggcgctggactactgggagacgcggctggtggagggaagtggcggcgg

SEQ ID NO: 16182 - DNA, 1713 bp, Zea mays
  Peptide Sequence Number=SeqID_59557
atggctgcgctggcccgcggcgcggccatgaaaggcggcggcgacaagaataagaaggtggcggcaggtggcaggttgctgtccgtcgtcgccgtcggctgcttcctcctcttcgtcgtcgtcgtcttcacgctctcctcccgacgctacgccaccctcgtcctcgacgctcgtgatcgccgaggtgacttccacccgtcgcagctgcaggggggcagccacggcggcggcggcggcgagggtgacctcaagcatctgcttgttgctcagcggagcaacgacgacgacgacaaggcggtcacggaagcggagctggaggaatcagggatcagaggaaagatcagcatcaacgtcgtcggggccggggggcaagcggagatggaggaggcggcgccagagagcagcgccgccgccgccgccgccgccgacgcgacatctaactccgacgacgaccgagcaaggccaggagacatcatgacacgtgcagctgcagcagcctccgtgaagcagcagcggcaaccgctgtgcgacctttcgggctcacgagctgacgtgtgtgacctcaccggcgacatccgcttgaatgccactgcctccgaattcatcgtggtggacccagcggccgcggacgacgggccaacaacggcgtacgagatcaggccgtacgcacggaagggcgacgccacgagcatgggccgcgtcaccgcggtcaccgtgcgcgtgcgggcgacggccgacgcggcgccgcgctgcacggtgacgcacgccgagccggcggtcgcgttctccgtcggcgggtacacgggcaacctcttccacgacttcaccgacgtgatcgtgccgctgtacggcacggcgcagcgctaccgcggcgacgtccgcctcgtggtcaccgacgcgggctcgtcgtcgtcgtggtggctggccaagtacgacgcggtgctgcgcgggctgtcgcgccacccgccgctccacctgcacctcgccaaggccgcgggcgaggtgcactgcttcggccacgtcgtgctcggcctgcgcgcgcgccgggagctcatggtcgagccggacccggacccggaccgcggccgcccggacggggtcgggatggccgacttcgcgcggttcctccggcgcgcgctctcgctgccccgggacgcgcccacacgccccgccgccgccagcagcgacgacaggaggaagccccgcctgctggtcgtctcccgccgcggcacccggcggctgctgaacgcggacgccgtcgcgcgcgtggcggaggaggtgggcttcgaggccgtcgtgagcgagctggaggtgagccgcgacgccgcgggcgtgggccggctcatcaactcgttcgacgcgctggtgggcgtgcacggcgcgggcctcaccaacatggtgttcctgccgccgggggccacggtggtgcagatcgtgccgtggggtggcctgcagtggatcgcccggatggacttcggcgatccggcggatgccatggggctcaggtacatccagtacgagatcgccgtgcacgagagctcgctcgcagacaagtacccgagagatcacgagatcttcaccaacccgaccgcgttgcacaagaagggcttcaagttcttgaggcacaccttcttgatcggacaggatatcacactcgacgtcgatcgcttcagggtggtgctactccaggcgctccggaacctcaccgagtaa

SEQ ID NO: 16183 - DNA, 513 bp, Zea mays
  Peptide Sequence Number=SeqID_59558
atgtcgcatagcaggaaaaatgaaagaatcaaaggaggcattgatgagcaagcggacatagaagctggggagtatacgtgcgagtgcaaacagtgggaacatacagggtacgacaaggcaatggatgtgttggatgagctcgatggctttctatgccgattggagccagacattggatgtaatgagtcatgtgatgttagtgatgatgaggaaaaccaggaaggagaagtaaataataataatgctggccatggaatggaagatgacaattcaattacatgccataaaatggatgagcataacaccatgactggatgtgaacatgcgttaacattaataacagctggtaaccaggtggacaacatgagaattccacctgaggttggtgatacaagttctccgtgtcacgtagcacatgaccgaatggaacagattgatgcatcctcagaagctaaaaagctgcagatagaactggaccgtgtctccaaggaaaggaatgagttgaaaaattaa

SEQ ID NO: 16184 - DNA, 429 bp, Zea mays
  Peptide Sequence Number=SeqID_59559
atgactttcaaggatgttgatgatgcatataaattctataaatggtatgcatatgaagttggatttccactgaagaaatacagagagaagacattcagtaagtggataaattgttcacgtgaagctgcaaaatttgaactggttaacttggagcataaccatgagttcataactgacaaagcagagaaacaacatttacgttgcaacaaaagtagggatgctgagttcataaattttgttgacgcaatgcatgatagccgagtgccgcaacattgcatagttgattttatatcagacatgcatgatgggccagagaacgagggcagcaaggagacaaagaaaaactgcacaaatgatatagccaaacttttggctttctttatggaatgcaagaaacagaatccacaattttttgtgattttcagctag

SEQ ID NO: 16185 - DNA, 1338 bp, Zea mays
  Peptide Sequence Number=SeqID_59560
atgacggtggcaggcgggcgggagcagtggtcgtgtcgtcggccaggctcacgtcccatccgggggcagcaagagaaccccctctcacggcgtgaagacagggcgcccgtgatccgttcctcgaacggctcgcgcacgcgcaacggccgccctgccaaccactcgccccgtcgcattaacttcgcggcgggacaggcggcgcttctagcgggagaagcgggcgacgcttcgccttcgccgacaaaccacgccaaaaaaggctggccccccgaggggttcaacagccgccttagatcgcgtgggccctacacccactactggtcagaggttcgaaggccggccccccgaagggctccacggccgcctcaggctactcgggctccgcgcccattactgatcaggggttcgaaggctggcccccgaagggttcacagtcgcctcagacgccgagcgagggatgaccaggggtacgttcgatacatagccgaggctcgggctgcgctcccgagggctcggactcgggctaagccccagaagacggcgaactccgctccgcccgacccagggctcggactcgggctaagccccggaagacggcgaactccgctccgcccgacccagggctcggactcgggctcagccccagaagacgacgaactccgcttcgcccgaccccagggctcggactccgccttggcctctgccgaacgacctccgcctcgcccgacccaggggctcggactcggcctcggccatggaagacagactcgacctcggcttcggaggagcctccatgtcgcccgacctagggcgcaggccagccacgtcaacaggaagcgccatcatcgccctaccccgagccgactcgggccgcagagaacaagaccgggaggacgtcagcaaggactcaaccgctccgacagctgtccctccgccaggctccgttgctcctccgacagccacgacatcacaccagctgggttccaagatctctccggctgccacatcggcgtggccttcttagagaaggttggccgcgcgggggcgaggacgagacaggcgctctcttggggccgctcgcttccctcacccgcgtggacgcttgtaaccccctactgcaagcgcacccgacctgggcgcgggacgaacacgaaggccgcgggatttccacctctctcacgcccgtctccggccacctcgcttccccccttcgcgctcgcccacgcgctcgacccatctgggctggggcacgcgacacattcactcgtcggcttagggaccccccggtctcgaaacgccgacagaatcattcataacttcaaggttcaaaacccctaa

SEQ ID NO: 16186 - DNA, 414 bp, Zea mays
  Peptide Sequence Number=SeqID_59561
atggagaagactacccttggtagaggcaacctgcttgctagagctgagagggccgccctgggcagaggcagcccgagcaccaaagaaggtagcacggcggtggcgtggcctggagcatcgatgggcaggcaactgcggggtgagcagtccagcgacagggaggagctccagcggcgcggcctaaagcgtcagcaggcagatggccacaatgtggcagctatggaaaggagtcttgacggtggcagagcgaagtcatggggtgatggttgttggggcggtcggcttggtctcatgccaacacagagagaggctccatggcgacgtggcatgctgatggctccatctggaggtctggacgtgtggggaagaggaggcctcaatgggcataggcggtggcgcacgcttcgtgggtag

SEQ ID NO: 16187 - DNA, 918 bp, Zea mays
  Peptide Sequence Number=SeqID_59562
atggcctcccatctcgagcgtttccagtccgaggtgacactcaacctggtgcgcaacctgctcggatggggcgcgccggcgttcgccggaaggatccgcgccggcgcctctcccctcggcaatctcgccgccggggagttcgtgctcttcgtctcctacctctcctgcgggttggcgctgccgatctcgcccttcttcctgctgctgctagaggagctcggcctccaacttcagcacctcatgccccactccatcctccaggcggccgtcttcgcccacctgtgcgagatgtttgtgggggtggcgctcttccaccagtgctcggacgaaagggtgttgcgcagcgaccttccagagatggaaagcgagttgagctgcgactccatctttcgcatgaacttcattgcctcctgcagcggcctcatcagctcctccctgaacttcaccagcacctcgtgcggccaggccaccaggcgccgtgcgctgccgcgcctccacctctttggctttaatggcctcgatgtcgcctccaatgatgagggctccttcgccttgatgcacacatcgaggaggccgccgccgccgttggcaagctgcagcaccgggttgctgctagcgccgctgttcccagtggtcgccaccgtgttcaggctgcgctacgacggcgctgagggaggatgcccacgggcggtggtagtgatcgctggtccggttgccgacactgaagacgccgcccgggaggtcgtacaaggcgccgtggagacagcggtcgcgcgcttccagcgcgaccgtgctgatgtcgagctcgacgtgtcgaggctggataccagcatacctaagaaagagttggtgacccggccccaggaggacctgcgggatttagaccgggaagccaatctgtgtgtccggaccccctag

SEQ ID NO: 16188 - DNA, 639 bp, Zea mays
  Peptide Sequence Number=SeqID_59563
atggcggacctccccccaaacgcgcacaccgccggcctggggcacccaccactggccgcgggcctgggcgcggcccccgcttccctggctgccggcatcgcctccctgggcctgcctgctgccggccagacccaccccatgggccccggccgctccctggcagatgccgaggctccctacatcgtcggcctcaggcccctccgcgacgtctcttccccggccctccgtcgaggctctccaccggggtttcctgccctcgcggcacccccccgtgcccaacacaagtgcctaagtgtaaaaaggtggacaaagtacaaatcaaggataaaggaaaaatccaattggaaatgtcttggctcgagcagccaagactctgctgagtctgagagcaccggactgtccggtggtgcaccggacagtgtccggtgcgccaggctggctcgagcgaactggccgctctcggaaattcaccggcgacgtacggctataattcaccggactgtctggtgtgcaccggactttccgtgtaagggcgagaggctccaagttgtggagattcctcgcaaacgggatttgagaataagcaagcaaaacactgtggtattcaagtgggtctttggaccgcttgagaggggttga

SEQ ID NO: 16189 - DNA, 1701 bp, Zea mays
  Peptide Sequence Number=SeqID_59564
atgaacagacaccagcacttcaaggtgccattacaaacggaactccggttctgtccccacggctgccaccacgtcagcaccgacggcgacgtccgcctgtccaccaacgccgcactagcgagcgcaggccgctccaaagcgcaccggcaggacgcctcctccgcaaagctggaggatggtttccaccaccagaagctggaagaagaggtggccagccgacccgtgcgggaggtagagccccggctcacctcgctccccgccccggcaaggatgatgaagatccttgaagctgagggcgggaccaagtcgagctggtggtcaccgtcttgggtgaccaccaacgaggggatgcagccgggctgcctgatgaaaatccttgaagccgaacgatggctaaaaggacagaaggagccaaaaccaccacgcgcgatgtgcgcaactgcccagcggttactagcattcctccactttcgcccagaccagcgggtgaaagggcggaccgccatacaggcgacatgcaaccacaccaagagggcgcacacttttgacttcgacgcgtccagcatggaggcccaggcccacacgtcatgtaaccggcgcgccggttactacgtgcgagaaactgcaccgccacttacgccagtaccgcgcctcctcgactgcagaaccagcgccgtgactcgaggcgaccctgcacacggcccaacagtgccaaccgagcacatcgatcacgggtcagtcagccgcgggagaaggcgcaacggtcgatacggccagaaatgggccggcagtaatggtggtggcaggcgggcggaagcagcggtcaagtcgtcagcaagctcacgtcccctcctgggacagcgagagaaccctctcccacggtgtgaagacgacgcgcccatgttccgttcctcgaacggctcgcgcacgcacaacggccgccccgcgagccactcgtcccgtcggaccgagaaaggggatattccgaaagggatccttctccgtgaaggaagcaggcctcgagcccccttactgatcagaggttcgaaggctggcccctcggaagggttcaacagccgcctcagagtgctcgggctccgcgcccactactggtcagaggttcgaaggccggcccctcggaagggttcaacggccgcctcagaccactcgggctccgtgcccactactgatcaggggttcgtaggctggcccccgaagggttcgacagccgcctcagacgcagagcgagggatgaccagggccaagtccggcctcgggcgccataggaagctccacctcgcccgaccccagggctcagactcggcctcgaccccggaagacgacgaactccgccttgcccgaccccagggctcggactcggcctcgaccctggaagacgacgaactccgcctcgcccgaccccagggctcgtactcggccccggaagacgacgaactccgcctcgcccgaccccagggctcagactcggactcggcacccggaagacgacgaactccgcctcgcccgaccccaggggctcggactcgaccttggcctcagacgatggtctccgcctcgcccgacccggggctcggactcgacctcggaaaacagactcgacctcgacctcggaggagcctccgcctcgcccgacccagggctcggacagaccacgtcacaggggggccatcattatcctaa

SEQ ID NO: 16190 - DNA, 855 bp, Zea mays
  Peptide Sequence Number=SeqID_59565
atgcagcaggcccctacctggtgcgccaactgtcggcgtttcgaccccgggggggtccctggaccgacgagtaaatcgtcgtcgcgtgtcccagcccagattggtcggcgcgagacggagcacgaaggggggcaaaaaagggaagacaggcaaaaggggaaacccgcggccttcgtgttgccccgcgcccaggtcgggcgtaaggagaggacccagagttcgtcgtcttccggtgccgaggctgagtccgagccttggggtcgggcgaggcggagttcatcgtcttccggggccgaggccgagtccgagccctggggtcgggcgaggcggagttcgtcgtcttccggggccgaggccgagtccgagccctggggtcgggcgaggcggagcttcctatggcgcccgaggccggacttggctgctgtcagcctcactctgtcgagtggcacaacagtcggagcggcacaggcgacgctgtcttcttgtcatgccggtcagtggagcggcgaagccatccatgcattaaatgctcctgcgatacggtcggtcggtgtggcgatccggccaaggttgcttctcggcgaagactgggcctcaggcgaaccgatgctttgtgctgatgggggttaccagctgagattaggagtcttgggggtacccctaattatggcccccgacaaggttgctgagcgcgcaagacctgagctttcaccgccgcctgagccatatgatcctgaggccgatccagccatgaaagcagcattagaaacaataaggattgccgaagaagccgttgacgaagctgtcaacaaactcctaaatgaagctgccgagaagatattaaaagaggactga

SEQ ID NO: 16191 - DNA, 168 bp, Zea mays
  Peptide Sequence Number=SeqID_59566
atggccgccgccgtgggggtgggtggcgccattgcacgcgtcggtcgggttgggggaagattcagtatcgggcggatcaggatgattccgcgttatactcggtgtacacctttgatcctggatccaacggtgggatttgcttaccggttcgcgcagggaagtgtctaa

SEQ ID NO: 16192 - DNA, 207 bp, Zea mays
  Peptide Sequence Number=SeqID_59567
atggaggttcaatgccaaaccagcttttgccagaatgaagatggtttcctcaagttgctgagagcatgcacagtttgcctcggaatcaggagccagccagagtatgatggtcatgaattcgtcgagcatggcacagagaagtgtgtcatggctgtattgtcacacccgggttttaggggcacaggatcaccaggggtgcaaacataa

SEQ ID NO: 16193 - DNA, 516 bp, Zea mays
  Peptide Sequence Number=SeqID_59568
atgacgccgcgcacaagaaaaatcgcgcgcaagtctaccaggccaattggcgtaccccgccatcaactagccccaaggcatgaggacagtagtagtggtagcaatgatcctatcggagatctggaagctcaagtagaacagcttcgatcagagctccgtcacaggaacgaagtatgggtcgaggatggtcagcgaataaacgagttgagaacggacatccgacacttgcaagaccaacttgctgaacgagatttagcgctcgattgggctgttaactcacgttcacttgctttgtccaaggaagccaaagctcgagcccgcatggaggagcttagcacagtcatggacaacttacaggtttactataatacactacatgaggaagttcatgtattgtattcacaactgcaccctaagtacatgcggatcctgtcggaatggaagcaggatcttctggagcagcgggtgaagcccttggtggggaactggacctttttaggccccctccttcaatga

SEQ ID NO: 16194 - DNA, 174 bp, Zea mays
  Peptide Sequence Number=SeqID_59569
atggggaagcctggcccatcactcctcatgctcctcctctgccgaggctggggcaggcagatcctcgatggcaggctctggtgctggctcctgggctacctcctgagcaactccttgctctggaacgaggatgtactccccgtcagcgagattatagtctatcgaatgcaatga

SEQ ID NO: 16195 - DNA, 192 bp, Zea mays
  Peptide Sequence Number=SeqID_59570
atggggctcggtgtatgcggctcgctctgccaaggtggcaatgagactgatggttttggttatgtctatggtgctggtaagtggtattctttccgtttggaaagggttgtcagcattgcaaccactgctcaggagaagatgaaactgtggaaggagacttccaggaagttccaagactacgatgagttctag

SEQ ID NO: 16196 - DNA, 150 bp, Zea mays
  Peptide Sequence Number=SeqID_59571
atgggcgggggcctcctagcagcagcacccgccctgaggtcagtgctgccgctgttcggccccccggagcagaagtcgtcgtcgtcgctgctgctggagcagggatgtttgtgcgagcgagaattgcttctcgcggaaggtgatgagtga

SEQ ID NO: 16197 - DNA, 819 bp, Zea mays
  Peptide Sequence Number=SeqID_59572
atggccgccaccacgccggcgcctccctcccacggcggcgggcgcaacggcaccctccctccgccgctgccttccaacgagtccttctccaagttcttcgagtcctggatctcggagcagtcccgcgacctcgaggagctgcgcgccgcggcgtccgcggacccccccgcgcccgagtccgagctccggcgcctcgtgggccaggtgctcggccactacgcgcagtactaccgcgccaaggcggcggccgcggccgacgacgtgctctgcatgttcaccccgtcctggacctccaccaccgagaacctctacctctggtgcggcggctggcgccccaccgccgcgatccagctgctgtacaccaagtccgggatgcagctgcagcaccagctccccgccttcctcgacggcgggggcctcaaggacgacctcggcgacctcggcgccgcgcagctccaggccgccgaccagctgcagcgccgcaccatccggagggagcgcgagatcgaggacgccgccgcgagcgcacaggaagcgctgacgacggcgacgatggtggagctcgcgggcggcggcgggagggacgcgggggccatggaccgggagatgcaggcgaaggcggaggggatgaggcgggtgctggagatggcggacgcgctgcgcctcgagacgatgcgcgaggtggtggcgctgctccgccccgcgcaggccgtgcacttcctcctcgccgccgccgagctccacctcgccgtgcacgacttcgggcgccgcaaggacggccgcgccggcaacgtcgccgccgccgcgccgccggagtga

SEQ ID NO: 16198 - DNA, 1617 bp, Zea mays
  Peptide Sequence Number=SeqID_59573
atggatcaaattcaacccaagaacatcccacacaatgaatcactgcctctaggccagaagcttctcctgcatcatggaagtgatgcgccccttagaattggtcattcaagtcatggaaatatgggacttagaataaatgatcttccatcttcaagtcgcactgtgcagactctaggttatagagttgggaacccaggaacctcgcatgctccctttgttcattttcatgctggaagttctggtagccatttaccagaccctgctgtgaattatccacataggtctgaggaaggcttcgctccagtgggttcccatatggacaacagaagggctgcaatgaagcgaaaaggtcccagtgtacaccctgcagggatcagtgctactggttattatgttggaagttcttccagtactcagccatctaactctgtgcagccaaatgcagctccacttgctgagccctttctccgtcaaatacctttaagcattgaccaaagtggttgggatatccaacacttgattcaccaagaagggtttcagaggaatgtgagagcacgccacagtagtattccattagtacccagatcagcttcaacatacccattaaacataaacagtgttcatgtgccgtcattcggttcaaccgcaagtgcttcctcaagtgcaccagtggaaatgaaccaagtgcctgtttctttgccaacaagaactctaccatcaggtgcaccaggtatgactagcagggtcccaacagggagggcttactatcctgtggttggaagcagcagcagcagctcaagtgttggtgctgtcccaactatccacggatcatctggcgctgcaatgtttgctaacggtggctatgttcctagtagtgttcatgctggaactgttccgatcttccctaacccagcgcctgctacttcatctggctccagagccatgccccaccagatggtcattcagagtcatccagctgctacttccgcagcaacatctacatccatgcggaccgcccaaccatcattacctgccagaaccgcagcggcttccagacatgcaaggcatgtgtcagcagggcttgccaacaacggaaggtacagaagggccaggagctcttactacaggcttcatccattgatggtagaggcagaggtagatagcctttttcttccctactgtttcaatgaagttgagtttaagtctttgtcgaacctgaaactgatgttgctgctggtcgtgaagcggttcatgatggaccacttggtcttctacgaatcgagagcagcagctgctgacccccacagggacatgagactggacattgacaacatgagctacgaggacctgttggctctgggagaagctatgggcaatgtcaacacaggcctggccgatgaaaaagtttccgagtgcgtgaaagaagtggtctgctgcagttctgaccacacgcagatggaccaagacgacggaagctgcgccatttgcctggaggactacagagacaaggaggcgctgggaatactcaagtgcaggcacgacttccacgccggctgcatcaagaagtggctgcagacgaagaactcgtgcccggtgtgcaaagcggccgcggcctag

SEQ ID NO: 16199 - DNA, 246 bp, Zea mays
  Peptide Sequence Number=SeqID_59574
atgacgagaaatatggtaaatcgcagtttgccctcctcacgcgacctgagacgtggtctcccattccggttatggtgggtacaagtgcggtcactgcacgacggcagtcggggtcagtggggcattgtacgccaaggcggttctctggaggacatggttgctgcagtgacttggccatccaccttaccaccgtgttggactgtcgagtgggaccccgcctcggccgaggaggagcatgaggagtga

SEQ ID NO: 16200 - DNA, 114 bp, Zea mays
  Peptide Sequence Number=SeqID_59575
atggacgggagtaggggcacatccaccgtcgacatgagaaacattctttatggcactagcagattatgtctgagccatcgattatgcaggacacatgatctggcgcagagatga

SEQ ID NO: 16201 - DNA, 795 bp, Zea mays
  Peptide Sequence Number=SeqID_59576
atgacttcccacggatcctcagatgacggaaatgcactgtcccacactgacgggcttgcacgagagggctttccccgtattttgtgggaggtacttcaaggggccggatacatgacgcctcctcagtatgcagtgcagcagttcgagaagcaccgagtgccccgctgtagggtgaggatgaccttggagcctcatcccctacagccaggctggcattcactggactctgagtcctttggataccgggttgaggacacgattgaggcgattgctctgcacgggttgaccactttctgcggattccatcccttggagctgtctacccaccccattggcttgttccccgtggaaagggaggacgacccaatgtggaaggatcgggtggagcatgccaaggacatctgggctatctacctaggtcagactgcgcacttgaccgtacggtgcatgaatgctctgtaccgtctgcaagtgatgcgtggtgaggcaatgtctcatctgatggcactattggaggcaacaaagatcaccttggacaatagagaggagcttgtggttgatttgtccactgagatggtggaaaaggacttgcaggtggagcagctatccaatgagatccaagagctggaggaattagtgggtaccagggagaacaccatcgaggagatccaggacatggaggccaacgaggatgtcgacattgtgggaggagaggagcctgcctccaacgtggacactgctggctctgagagaccaccttcccccgagtcgagtgttgcctcgttcgctcactag

SEQ ID NO: 16202 - DNA, 297 bp, Zea mays
  Peptide Sequence Number=SeqID_59577
atggcgcttcctattgacgtggctgtcttgcaccctaggttgggcgacgtggaggctcctccgaagccgaggtcgagtctgtcttccgtggccgaggccgagttcgagcccctgggtcaggcgaggcggaggtcgttcggcagaggccagggcggcgtccgagccctggggtcgggcgaagcggacccgagtccgagccctgggtcgggtggagcggagttcgccgtctttcgggacctagcccgagtccgagccctgggtcgggcggagcggagttcgccgtcttccggggcctag

SEQ ID NO: 16203 - DNA, 432 bp, Zea mays
  Peptide Sequence Number=SeqID_59578
atggctccatcattttggactatgccatgcaccacctcgtcgcctccgtctatgccgtgcacgccccattgcttgtgctcggcgtgccccgtcacctgcacccatatggcatgctttgtcaaacccacccacatctaccaccatcatggacagaccgctccatcggtccccaccgccccgatggatagttcctatgatgagccgccggtgtaccgcccagtcaccatccaccatgaccccaaccacgttcacccgatggtgactcgcgtcgctcggtcgttgttctccgctcccattgatcggttagtcatgatggccgacactcctctagacacctcctcggttccctcctccgttcgtgccagcctcgtcgatccccactggtgttgcgctatgatggagtacgtgaccctactagtcaaccacacttag

SEQ ID NO: 16204 - DNA, 324 bp, Zea mays
  Peptide Sequence Number=SeqID_59579
atggtggaggaagagaccatgtcgttgccgattggcggtgatctcgaggaagtagtggtgaggtcacaggtccttcatcacgaactcgcactgaagtgcggcgatcgtgtgttgaagaagagtgacactagatgctatgagcatgatgccgtcgacgtagagcaggaggtatatggtgtcgttgccgtgccgatggatgaacatggacgtgtcagacttggcctcgatgaagctgagggaggccaagtaggaggcaaagcgactataccaggcctatggcgcctacttgaggtcgtacaaggagtagttcaatcggtagactag

SEQ ID NO: 16205 - DNA, 429 bp, Zea mays
  Peptide Sequence Number=SeqID_59580
atgcagtacactctaatggctatatttgaaatagtgagatactttaatggtgattcagagtttagtgatcatccagatagcttgcgggtgactcaactcaaggtctacacattttcccttggtgaaggagttagcgaactgcaacatggtcgagacgctgagaacgcgaacgtcactggcggtaacacgctcgaggacgaagtgaaggttgatctccacatgctacatgcgtggatgctagtctacgctgacattgttgcagtagacgagggtggagcgctcgagggagctatggagctcctggagaagctagcgaagctaggaggccttggccacaccgttgaccacagtgttgtactcggcctcggcgctggagcgggagatgacgggctactgcttcacaacccaggatatgaggttggcacctag

SEQ ID NO: 16206 - DNA, 2379 bp, Zea mays
  Peptide Sequence Number=SeqID_59581
atgaaggacacaaagaagcccacgcgggcgtcgtctcgcttaggcgggagggtcgtcggcgtggcatccatgcttctcttcgtctcgttggggttcgttctcggcgtgacctcctccaacgccatgttcatccgatactacctccctttcatgccaccgttacgctctagtgctgcgccgtcgtcttcgcctccgccgctgacgacaccactgacaccgtcgcaaacgccgccgccgccaccgccgctgccgcaaaacccgcagctgcggtcggcgggcttcctttccccgagcggcgtcatgcacaacatgaccgacgaggagctgtactggcgagcgtccatggcgccgatggtccgccgcacgccagacagccgcgtgcccaaggtggctttcttgttcctggtcaggggggagctgccgctccggcccctgtgggagaagttcttcgcgggccacgaaggccggtactccatttacgtgcacgcccacccgtcctacaccggctcgccgccgacggactccccgttctacggccgctacatcccgagccagataacgaaatggggcgacgcgagcctggtggaggcggagcggcggctcctggcaaacgcgctcctggacctgggcaacgagcggttcgcgctcttctccgaggcgtgcatcccggtgtacgacttccccaccgtgcacgccttcctgaccggctccgacaccagcttcgtggactgctacgagaacggcggcagccggtcgcgctaccggcccttcttcgccacccgcaacatcacgctggcgcggtggcgcaagggcgcgcagtggttcgagatggaccgcgcgctggcgctggagtccgtcgcggacggctcctgcttcccggcgttccgcgacttttgcgtggggcggagggagtgcctcatcgacgagcactacctgccgacgctggtgagcctgctggggtggggccgccgcaacgccaaccgcacgctcacgtacgcggactggaagcggcccgtcaaccggcacccgcacacccacggcccggacgaggtgacggaggagcggatcagggagatcagggaggaaggcggcaggcggtgcttctacaacggcgccaggagaggcatctgcaacctgttcgcgcgcaagttctcgccggacacgctcgagccgctgctccggctggcgcccaaggtcatggggttcgggttgagctgggaatcacaggcagagagtcgactcgagtccaccatcaggctatcaggactcaggaggagaataagctctttcttttgcgaaccatatacacagttggacaaatggttgcccaccttgttcttgcgccacctggggttgagaaagggggggaggatgttggggcgaaggcaaagacgccacccttcgctcgaggccttcgctgcagtcgttggtccggcggaggcaaagcaggccttcgctgcagtcgctggtccgacggagacaaaacaggccttcgctgcagtcgctggtccgacggagacaaagcaggccttcgctcgatacggcgccagacgaaggctgcgacgtcgtcatctcaccaagcggcctcgtccagctcagaggcccacaaacagaagggctcaccgctctgcagctctgttcgcctgctcgctatgctcgggcactcggtcgggcggtcagcggctatccggctcgggcgttcggcctcggcgggcgtgccgcgtgcggcagcggcagccaagccagcaggcagcagcgggccagcggtcgggcctggcgctggcgtggcggcctggcgctggcgtggcggcctgggcggtcgcgcagtcgcgcctggcgcctagcggcctgggcgccggaccgccggtggaagactcgcgtgggtgcccagaaggccagaagacttgcgcagcgtctgcggctctggcgttggcgtctccgcgtctagatgctctcggcgcggcggcggctgaacgctggactagggtagcgactagcgaagctgctgggctgcggctgaagacctgctcctcgcgttattgggccgcgaccggggctgcagcccaggcagccccggtcccatcaacggaagatgtcaaggatcttctacccctctgctccgcgatccccgtcatccaaggccgccatcaacgccctcctacccacgccgtcgatggaaggtggccgaggttccaccccatcgtgccctcctccccatctgctctgccccaccatcctccccatgtcgtcgatggcgcgcgcagatcccaggtggccgaggatccgccccaccctcctcccccaccttctaggcctctgtcgtgcccccgcatcgcgagattcccgtcgcgagagcccctgaagaccgcctcttcatag

SEQ ID NO: 16207 - DNA, 264 bp, Zea mays
  Peptide Sequence Number=SeqID_59582
atggagaaacgctctgtcctggacaatggccataaaatcgcagccttatacaatggctactgctctgctgcctcgttgaggggaatcggatttcacgcacggcgccgatcgctttgctttcgatgcaaattaacatggcttgttcgtgcaaaagctgctagtgtacatgcccagcctgaactgctcgggcccgttcggcagtgtaaaaacgcggcctctgctgtatctgttggtgctacattgactatgaggggccttatttag

SEQ ID NO: 16208 - DNA, 471 bp, Zea mays
  Peptide Sequence Number=SeqID_59583
atggctgaaaggtaccaactcccacggagttgcattcttccaacgacgaggcggaaagatggcgggtatcccccatccgggggcttggaaggtggaaagacacgatgcataagggagcgcaaagacacagtcgccttccaagggggtcaccctccttttgaaggcgactctccctacttgcgtccccagccgtcgtgggctgagtcttctccaacacactccaaggtcctcccctacggcgcgggggctgggtcccacacgtcatgcaagcaggcccagaacagaagaagccaaaccgccgcgcgcgcgggaccgggaaagggggataccccgaaaaggatccttccccgtgaaggaaccaggctccgagcctccctactgatcaggggttcgaaggctggcccctcggaagggttcaacagccgcctcagagcgcgtgggctccacacccactactggtcagaggtttga

SEQ ID NO: 16209 - DNA, 660 bp, Zea mays
  Peptide Sequence Number=SeqID_59584
atgggcaagtccggcgcaaaaaagaagaagccggccaccgccgccgccgccgccgccgcaaagccgccgcccgcctcggttgagctgaaggcaacgccgtcctcgtcttctttacccgcggcgaacggtgcggcgccccaccaggtggtggacgcgggcgtcctcttgcgccgcgcacacgagctcaaggaggagggcaaccgcctgtttcagtcgcgcgactacgccggggcgctgcgccaatacgagctggcgctccgcctcgccccgcgcggccatcccgaccgcgccgtcttccacagcaatcgcgcggcatgcctcctccagctccgccccgtagaccacgaggccgtcgcgcaggagtgctccctcgcgctccaggccgagccacgctttccgcgcgctctcctccgccgcgcccgcgcgctcgaggcgctcggccgccacgagctcgccctcgccgacgcgctggcgctccttgcgctcgaccctgaccaccgcgaagccatcgacctctcctaccgactacgctcccgtgtcaacgcatcctctgctgcctccgcttcctcggcacccgagcccaccagccggccctcccccgctgcccttggaggttgctgctttggccttattcaattggggaaatgtgcacatgtgtga

SEQ ID NO: 16210 - DNA, 1730 bp, Zea mays
  Peptide Sequence Number=SeqID_59585
atggcgcctcctgttgacgtggtcggtctgtgccctaggttgggcgaggtggaggctcctccgaggtcgaggtcgagtctgtcttccaaggtcggggtcgagtccgagcccccgggtcggacaaggcagagaccgtcggctgaggccggggctgagtccgagccctggggtcgggcgaagcggagttcgtcgtccttcggggctgagcccgagtccgagccctggggtcgggcgaagcggagttcgtcgtcttccggggctgagcccgagtccgaaccctggggtcgagcggagcagagttcgtcgtcttccggggccgagctcgagtccgagccctggggtcgggcggagcggagttcatcgtcttccagggctgagcccgagttcgagccctggggtcgggcgaagcggagttcgtcgtcttccggggctgagcccgagtccgagccctggggtcgggcgaagcggagtttcccatggcacctagggccggacttggctgctgtcagcctcactctatcgagtggctcagcagtcgaagcggcgcaggcggcgctgtcctcttgtcagaccgatcagtggagcggcgaagccacctttgcattaaatgcccctgcgatttggtcggttggcgtggcgacttggccaaggttgcttcttggtgaagactgggcctcgggcgagccgaagctttgtgctgatgggggttaccagctgagatttaggagtcttgaggcccccgagcctctacatagggcgagaggacggtcaaggacagactcgaatttttttacatacgcccctacgtcgcctttccgcaaggaggagggggggaagcgccatgttgccctcggagggcgccgaacatggtgtctccggcagcccgactgcatcccctcgccggtggtcacccaagacggtgacctccagcttgacggcggggagaagcgaaccgggctgcggcctcttcccctccctcagcttcaaggatcttcatcatcagtgctggggaggggagtgtgccgagttggggtcggtccctgcgcgggcggcggcccgctccttccctcagtgatcgggaggaagggcattcgccgttcgtggcgttggcagctgccgcgtgcctggctttctgagccgggtggcttcagagccactcccggcgccgccttccgccacggcagccggaagaggttcctccaccgacgagctagccggtgccgcccatggactgacctccaactctacggccttctgcccgtccttgcctctcgagttgggggcatgggcgagggcctcatggcagcagcatccaccctgaggtcatcgctgctgctgttcggccctctggagcagaacacgggcagaggcagagttggcttcgaaaaagaagatgtggtcggccggagcctggccgggtcgtctgctggcggaaccaacaccggagttgagctgccgaggccacaagccgggctgatgtcttcgggagacagctggccgaggcctcggggtggccggccgagccgcctgctcgagccggattcctggagaagaccctggcggcgatggcccgggtgtggtgccgatgtcgtccttcagagtggagatcctccgaccgcgtcgccgtccgaggctaggtcagaccccgccgaaggtgtagttgacgccgagggtgctgccgcccccttcaactgtcgacgtccgagcctgcaggatcgggttgtcttgta

SEQ ID NO: 16211 - DNA, 951 bp, Zea mays
  Peptide Sequence Number=SeqID_59586
atggggctgatggacttgcttgcaccaagcggcgttatccacaacatgaccgacgaggagctattctggagggcgtctatggcgccgaagggacatcgcacgccttaccaccgtgtgcccaagatcgctttcttgttcctggtgagaggggagctgccactgcggcctctgtgggagaagttcttcgcggggaacgaccaagagctctactccatctacgtgcaccctgatccatcctacaccggctcgccgcccagggactccgtgttctacggccgcatgatcccaagcaaggaaacgaagtgggggcacgtgagcctggtggaggcagagagccggctgctggcgagcgcgctcctggaccacagcaacgagcgcttcgtgctgctgtccgaggcgtgcatccccgtctacaacttctccaccgtctacgccttcctcgccggctccgccaccagcttcgtggacagctacgggaacggcgactgccgcgcgcgctacgacaggttcttcgccgagcgcaccaacatcacgatcgagcactggcgcaagggcgcgcagtggttcgagatggaccgggccctggcgctcgaggtcgtcggcgacgagccctacatccagatgttccgcgacttctgcgtcgggcggtggcgctgcctcaccgacgagcactacctgccgacgctgctcaacctgctggggtgggcgcgcaacgccaaccggagcctcacgtacgcggactggaagcggccgcaggggatgcacccgcacacccacgacggggcggaggtgacggaggagctgctcaacaggatcagggaggacggcggcaaccgctgcttctacaacggcgcccgcgccgggatctgcagcctgtttgcgcgcaagttctcgccggacacgctccagccgctgctgcgcttggctcccaaggtcatgggctttgggtga

SEQ ID NO: 16212 - DNA, 522 bp, Zea mays
  Peptide Sequence Number=SeqID_59587
atgctggtagactacacaatggtactcgatagaccaagtgtgtcagttgaaggcccaacgcagcagggtatagagagcgtcgtggaagtgacacccgcaagaggcgtcacgagtgatgggtctagcgatccatccttccggctctggctcctccgaaagctccgtgtcgtggctcgaactgccaccggcgtcgtcggctccgtctccgtcagggtctcctccagcagccgggatgccctgaggtggtgcagggggcatctctggctgaggtgcagtggaaggcggcctctcagactccacctcccgctgaggcgagggggaagagtcctgctgctcctactccttctcctggcgtcggcgctcctgctcctcgtgcaggtgacgatgcagtctctccagctggctggactgacctggcaccgtgcgatgcaggggacgctccgccaagcaagaaggcaaaaatgggatcacagacttacgtgcggtgcacctgatacgagccatctacagaagatatcgtaa

SEQ ID NO: 16213 - DNA, 726 bp, Zea mays
  Peptide Sequence Number=SeqID_59588
atgcacaaaaatagcaaacctctggtgagcgtcgacggcgtgctgtccactgtgcttcacggaacagcgagccggcagtgcacggagacgtcggggctgctgcgcattttgtcgagcactcgcagagcatgcatagcgcgggactgcagggagacgctgctgcaggggtcgaccacggattgcatggagggagagtgtgttgtccacggctgggagaggaaaacaagggcgctggtcatgggaaagagcagcgaaggggcgagctcagagaggggcgctgcgcagggcggctgcttttggatcgaagagctgggcgcagggaactcggacgccatggacagggaactcgaccaggggaggaagaagacacggagggcgctcggctgctcgccatggatagcaggacgtgcgctgcttgctgctggaatttctgggcgcctgctcttccctacgcaatggcaaggccgagctgggagagggaatggagcagcggcgctgcgcatggctgctactgggcgccggccatggagttcctgctcgccagcagggagcagggaaggcattgtgaagggcgtcagcttgcacccaggaagctcctgctcctgctgcaaggggcagagggaggaggacgccatggataagagctcgcagggtcgagctgctgctgctccatggatgggaggggaggaggatggcgtgggggagaagaaggctgctggcggctga

SEQ ID NO: 16214 - DNA, 339 bp, Zea mays
  Peptide Sequence Number=SeqID_59589
atgactctgggtacgtccgttacatggccgaggctcgggctacgctcccgaggtaccctaggacatttccgagaccagcaggagcgattttgtaacggaatcccaccagagggaggcatcgagccctcggaccctatcgaatgggtccgggtctggcaaatcacctgcagtcggccaggtcgaactgaccgcagtcacttcgccctttcactgaccgatctgacaggaaaacagcgccgctcaacccgctccgactactgtgccagccacccgggcaaggctgacaacagcaagttcagcctcgggcgcaaccggaagctccgcctcgcccgaccttag

SEQ ID NO: 16215 - DNA, 690 bp, Zea mays
  Peptide Sequence Number=SeqID_59590
atggccacggttgccccgtctcctccttctgcggcgaggagggtggtgaggcaaacccagatgctgctcttccaccacggggggaagacatcgtcgagttcgccgccgccgagcgagctgacgaccgtcgttgttgctgtcgcgctacggggggaggagtaccatgtcgtagctgccgttgagggacatgaactcgagactcccgaagcagagcaccgtcgtgggctgaagaggttgctgaagactacccatctggaactcaacggggtgttgttggttaacacgcagcaggcccctacctggcgcgccaactatcgacgtttcggacccggggggtccgaaggccctgaacctcccttttatagatgcaaggagagggtccaggtgtacaatggggggtgtagcttatgcgctaacgtgtctggcagagaggtgcttgagccctgtgtacatgccaacgtggctgtcagagaggtgctagagccctgtgtatgcgataacgtggccgtcggagaagtgcctgagccctgtagaagcgcagctgacggtgctgttgggatccttctgacgtctccttgcttccgtagggggctgagaaccaccgtcgtcatggacgcacgtggggagccatcattgcctgttactgggacgagccagatgggacgccggtcttgttccctcgtagcctga

SEQ ID NO: 16216 - DNA, 444 bp, Zea mays
  Peptide Sequence Number=SeqID_59591
atggcttaccagagagctcggtccacgcgcggtggcgggcgaccgaagtccggcgagggcgatctcgagcttccggtgcctagtccgaggacttggaaagcttcacgggataatggcgaagctaaccgaaggtttggtgcggcttgggcgcgactggagagagctggccatggcggacgaggcttggaaagcttggcgggcggtggcgcggcgtgctcggggcaaattccggtgatctctggcttgggcaagacttgtgagcacgcgaggagggatggccgaggctcggggctgctttataggcacgacgcggcgcacaggcggccgtggaccggcgagcgcgcgtgggcgggcgctggggagcgcgggtgcgcgaacgggcgtgaaccaggggtgtcagccacggtcaaacacgtggaaccgttgcctctacccaagttctaa

SEQ ID NO: 16217 - DNA, 396 bp, Zea mays
  Peptide Sequence Number=SeqID_59592
atggctcaaaggacttctggcatgctgggggtccacttgaactcaaccttctttgccaataaggctgttgttgggggccttcggcttccgaagcatttgagaacaagtccccaacattggcgcccacctccagtgaactcacttccactttttgagtttcgaacaccttcggcaagcatagaccttcgtcatgccgccaaagaaagcttcagcaacagcgactgccgctctgcagccgctggaccccaaccaggagaccctcaatcttcgggaggcccgaagccagaagaggaaggccaccagtccaacgcctcaggaggacgacttggatcaagagatcagaaatatggagatgctccatcagcaggtgcaaaggaagaaggaaaagatggctag

SEQ ID NO: 16218 - DNA, 120 bp, Zea mays
  Peptide Sequence Number=SeqID_59593
atggcgaactcaatggagggtaagaggccgcgaatccacatgcagagagggaagaacagcggtgagaaggtctcgggcgggcgagagaaactccgggttttcaaatccaaattcaactag

SEQ ID NO: 16219 - DNA, 135 bp, Zea mays
  Peptide Sequence Number=SeqID_59594
atggcgagagtagcgtgtaccctccgtggcaagaggctggacggtggttccacgtttagtaagcatttctgcaaaacagagtctttgatcattgagaaaccttaccttgactcccttaagccagcatacccttga

SEQ ID NO: 16220 - DNA, 615 bp, Zea mays
  Peptide Sequence Number=SeqID_59595
atgcagaggaagggcgagtggcacaaaggtgtcgttaccaacgattatgtcgcagtgatccctgcccacagagacgcgcgacccgcggcggccatggagctgcggcgagcgattccggtgaacccagccaccgttcttgcacgagatgtcgacgaggatcatcgatgtgaactcgcgaagaccagaggctatcgtatgttctcacaacggcgcagcagacgccggacaatggtgattggtgacccgcgtcgtcttctctcccacggccgagccacggcggccgccagtgcccacacggtggagacccactggcgcacaccgcgcatgcacaaaccaggtcccgtggccaaattccccggtgctatggctagagaagcgcaaggcggacacgatggaggtgtacttaccagctgcggctcgacacagggctctgcccacgcgcaccatagaggagaaagagaaagcggtggacgtagggagagggaagggaatctcgtgcggttgaatgagtctgttgaagagattgacacggggttggggaaagggatgacgaatcggtcccacatggcagcggttctggtctggtatgcctggacgcggctggggcgctggtga

SEQ ID NO: 16221 - DNA, 234 bp, Zea mays
  Peptide Sequence Number=SeqID_59596
atggagcccctggcgaaggtggagttagagttgtcaagtctattaagtattgctttaactcttcgaaagccttttgctgagccggatgatgaggacatcactatgagtacaactacagcagcagcacctccacatcaagcgccacttccttcattagctgggccaatcactcgggcccgtgccagagatcttaacttcgtcatgctactgaagaatgagggcccagaagaatag

SEQ ID NO: 16222 - DNA, 159 bp, Zea mays
  Peptide Sequence Number=SeqID_59597
atggctcgccggacgtcaaccccgtgccgcagacctatggtgcgcgtgggcagagccctgtgtcgagccgcagctgatcattatgttaattggaacatggagaatcacccgggaaaacagtgctaccacaagggtttatggacgcccttggttgattaa

SEQ ID NO: 16223 - DNA, 438 bp, Zea mays
  Peptide Sequence Number=SeqID_59598
atggcaagacaaagcaggaagggaaacaaaatgtgcacatgtgaaatgctatctagtagaagcaaacaagactccctctttccaatttttctaattaaaaaggagaaaagaaaacagagcattcaacaacctcactgcctcatcatcgaaggccagctcgaggcggtcgacgtcgctgtcccacctggtggtcgtcttctaggcgccgacgtagaggcggtggtcggcaaggaagcggatgcccagcgcctggatccaggtgaagtcgcggctcgtggcggggttgtggttgccgatgaagtgtgcgttgatgtggaggccagcgtcggtgaagacgcagaagtcccagtccctgctgccgtggaagtagaaggtactgccgccaaccaaggagaccccagtgagccggctctaacctcaacgatttctcgggcttga

SEQ ID NO: 16224 - DNA, 306 bp, Zea mays
  Peptide Sequence Number=SeqID_59599
atggctcgccccagtctcaggcggctattctgggtccacagcagcgcccgactccaccgcatgggcgggtccggagccgccacgtgtccagagaaggtggtatactccaaggcatcaacagtggtccggacccccacgggagagcgccggatccccggatatatagtttggaccccaaggttggtcctggacctccacgtgtgcaagccggacccctgggatagggtccggaccccctgtatggggtccgggccgcccacagcggcatcccaaggacccaggcgggggtccgtgaaagtcgcctag

SEQ ID NO: 16225 - DNA, 654 bp, Zea mays
  Peptide Sequence Number=SeqID_59600
atgggtagacgggtatgggtagttccaacccgtacccgtacccgtacccgtctacccaacgggatgacagtctcctcagctgatgatgacccgagggatgttggagttatgaccagagaagaactgaaactagatttttcaaaatcagatacgcgtaacacagagaatgctgaaattactaaaaggagaagggtgctctttcgggagaacatacctgttgattccaagctctgtgcaaagacatctttgctatattgctataaaagatctacaagggcttctgttttctcactggaacaacttcaatgggataactttgctgatagttttgaggtaacatctcaaaaaatggatgttcaggtttacgatcctttttttatcttgcgattctcaattcatactcttcacatgggttacattgaacctgctcaatttgcccgattagggcttcttgcaatcacacttgttagtatagcatctcctgatcatgaattaaggatgttgggctacgagtgcctaggaacattcaaaaaatcccttgagtatgctcagagaagtaaggaaacctggcagcttcagctgcttctaacataccttcagaatgggatatccgaacagtggcagttgctgtttttgctgcagaagcatctttga

SEQ ID NO: 16226 - DNA, 558 bp, Zea mays
  Peptide Sequence Number=SeqID_59601
atgcagctgggccgcctgatgaaaatccttgaagccgagcgatggctgaaaggtaccaacttccgtgaagttgcgttcctccaacgacgacaagacgaaagcaacgcgggcgctccccatccgggggctcagaagccgtcgtggactgagtcttcaccaacacgctccaaggtcttccccctacgacacgggggctgggtcccacgcgtcatgaaagatggcccagggcagaagaagccaaaccaccgcgcgcagaggaccgggaaaggggatactccgaaagggatccttctccacgaaggaagcgagccccgagccctcctactgatcagaggttcgaaggttggcccctcagaagggtttgacagccgcctcagagcactcgggctccgcgcccactactggtcagaggttcgaaggctggccccttggaagggttcgacagccgcctcaggccgctcgggctccgtgcccactactagtcagaggctagcccccgaagggttcgacagccgcctcagagcatgcagagcgagggatgactctgggtacgtctga

SEQ ID NO: 16227 - DNA, 642 bp, Zea mays
  Peptide Sequence Number=SeqID_59602
atgacgctgtcccccgaggacatcatcctggctcgtggcctcggcaacccgactccggcgtcggtcccgccagtggacggcccggccaggctccggctgacgaagcctcttttcgagctaactctgcccctgtccgtgctggcaccgctgcctccggctccggctcatcgtagagcggccgagggcctcgacagccgcaatgaacagacaccggcactcaaggtgccattacaaacagaactccgggttccgcccccgcaggtacaaacaaccccccacgttggagggcctgcgggacgacaaaaccccaggtggctcgccgacgctcgctccggcatcagcgacgacgacctccgctccgggcggccaaacagcaacaacgatgacctcagggcagacgctgctgcaacaaggccctcgcccatgaccccactcgaggggcgaggacaagctaccaaggccgtggagccggaggtcagtccgctggaggcaccgactgtctcgtcggtagagaaacctcttctggctgcctcggtgggaggtggcaccggaagtagcgccgaagccgctcgggccggagagccaggcacgcggcagttgccagcgccacgaacgacgaacgcccttccccccgatcactga

SEQ ID NO: 16228 - DNA, 673 bp, Zea mays
  Peptide Sequence Number=SeqID_59603
atgacgacggcggttctcagccccttacggaagcaaggagacgtcagcaaggacccgacagccccgatagctatgcttctacagggctcaagcgctcctccgacggccacgacatcacatgaacagggcaccaacacctctccaacagccacgtcggcatgtgccattaggcaggagccaaacaacgagctgagcgtggaggtggagctctcatctcaacagaagcggacggggcgggcatcgcacggaaggtatgggttggcgttgggcattgcgtacgtggaccacgccttctccatctgcgacgaggatgacctcgtcgtcagcgtcatcaggagctcgcgcggggcgcatgtcaaggagatccccttcgccatcgtgctactggccttcggggcgctcgacgccatcggtaggctcctcatggctgtcaaccgcgtcggaggggaccgcacccacagtgccaaagattcacacttagccaataaaaagaccaagaaatgggttcaaccaaaagagcaagggacaaccgaaggctgccctgaggagcttcgctataattcaccggactgtctagtgtaccaccggacagtgtccggtgctccagaggagagcgactctgaactcgccagcttcggatttccgctccgctataattcaccggacatgtccg

SEQ ID NO: 16229 - DNA, 1047 bp, Zea mays
  Peptide Sequence Number=SeqID_59604
atgtcgcgcctcctcgactgtgaaaccggtgtcgcgactcgaggcaaccctgcgcacggcccagcagtgccaaccaagcgcatcgatcatgggtcagtcagccgcgggagaaggcgcgacggtcgatatggccaaaagtgggccggcagtaatggcggcagcagacagacggaagcagcagccaaatcatctgcaggctcacgttccctcctggagcagcaggggagccctctcccacggcgtgaagacgacgcgcccgtgttccgttcctcgaacggctcacacaacggctgccccgcgaaccactcgtcccgtcgcattgactccgcggcagggcaggcgaagcgggcgacgcttcacctccgccataatgaccgcgtcaaaaaagggaccgggaaaggggatactccgaaagggatccttctctgcgaaggaagcgggccccgagccctcctactaatcagaggttcgaaggctggcccctcggaagggttcgacagccgcctcagagcactcgggctccgtgcccactactggtcagaggttcaaaggctggcccctcggaagggttcgacagccgcctcaggccactcgggcttcgcgcccactactgatcaggggttcgaaggctggccccccgaagggttcgacagccgcctcaaaacacgcagagcgagggatgactctgggtatgtccgatacatggccgaggctcgggctacgctcccgagcgtcgcctgccctgctccgactgctgtgccacccgccagggtgaggctggcagcagccaagcccagcctcaggcgccataggaagctccgcctcgcccgaccccagggctcggccctcgcctcgacctcagacgacagactccgcctcgcccgaccccagggctcggactcaacctcgacctcagaagacggtctcccgcctcgtccgacctcagggctcggacttagcctcgacctcggaggagtcaccgcctcgcccgaccttgggctcggaccgaccacgttacaagggggcccatcattaccctacccctag

SEQ ID NO: 16230 - DNA, 729 bp, Zea mays
  Peptide Sequence Number=SeqID_59605
atgccgcaaacccatggaccaagcgagcacccatccctcggccacgacctcgaccacgaccacgagcacgtggcatgggagatccgcggccaggagagggatgcgaggcagcagcggggtgagaggaagatggatgatggggaggctaggaaggtggctcagtggaggaggcagggcctccagaccgtgagggagcccgcttcgtacgagcagctagggtgcatgaagacaccctctgagaggagaccaggaagcacagacgatctcttcctagatcatgtcaaacacattgatgcgggcgagactgtttggagcaaggaggaggaggaagacgcgactctccccaaggacgttcatttgatttccgcccttcgggagaacggtcatccgggacaaagaattaaggtacctgtagtacctatgcatgttagcggtcgtccagaactcccgctcattagagacatgaataaattccgtctcttcccgcatgggcagccgaatgtcatgcactcgcatgttgctgccctaaatatctgcatcagagaagcccagaatatgggcaaaacgacgataactgactttgtgccagttaccctggatgaagaaatacatgactgggtaatcatacccatcggcttcctcatctactttgtttatccagagggtggcatagaactgagctaccacctcgtcgttccaggggtattccatggtcataatgtttcgtaa

SEQ ID NO: 16231 - DNA, 137 bp, Zea mays
  Peptide Sequence Number=SeqID_59606
tgatgccctgctgggtcaccttggtagtgatcaatggagagtcatgatctccgggcagaatgggaatcacggcttgtggagatgctttggtacaggtggttatgagattgatggttatgatcatgcttatggtaatg

SEQ ID NO: 16232 - DNA, 510 bp, Zea mays
  Peptide Sequence Number=SeqID_59607
atgagcgagtgcggcgtggaggggtatgtcgtgctcgaggtcctccgccctgacccagtattcgagctcgacccgacggccatggtgccttgctcaccggggcctcttcttctccgatcccgactccaactctccctctctccttcgcctggcacatcctcggcagcgtggcagcctgcttcttcaccggcgcggcggcctgcttcttcgacgacgcggaggcctgcagcggcctaccgagcggacggatccgcggacgaacggatctccggcgcctggcagatcttcggcgcgcggcctaccggttgtggacggatctccgctgcctggtgccctggtatatcctcggtgtcgcggcttgcttcttcaccggcgccgcggcctgattcttcgaaggcacagcgacctgattcttcgacggagcggcctgccggttttgtccaggcaggcagacgcggcagcctaccggtcttctccaggcgggtggatctccagcgctcctcgagctag

SEQ ID NO: 16233 - DNA, 296 bp, Zea mays
  Peptide Sequence Number=SeqID_59608
gccgctccgtcgaagaatcaggtcgctgtgccttcgaagaatcaggccgcggcgccggtgaagaagcaagccgcgacaccgaggatataccagggcaccaggcagcggagatccgtccacaaccggcctccgcgtcgtcgaagaagcaggccgccgcgccggtgaagaagcaggctgccacgctgccgaggatgtgccaggcgaaggagagagggagagttggagtcgggatcggagaagaagaggctgcgcaagcgcaggagagagtaaaagtttgtagtgggcccgtcctgtaa

SEQ ID NO: 16234 - DNA, 306 bp, Zea mays
  Peptide Sequence Number=SeqID_59609
atgaccggagctcaggacgccgagcagcagaggcacggatccgctggagacacggagcagcagaagcagcggagccgccacgccggtgaagaagaggctaccgggccggtgaagatccacccgcctggagaagaccggcacgcctgcctgctccagctcgaggagcgctggagatccacgccggtgaagaagcaggccgccgcgccggtgaagaagcaggctgccgcgccgccgaggatgtgccaggcgaaggagagagggagagttggagtcgggatcggagaagaagagactgcgcaagcgtag

SEQ ID NO: 16235 - DNA, 273 bp, Zea mays
  Peptide Sequence Number=SeqID_59610
atgacgtccaggcgcatttctgagcaaatggaacgagcgccggggctgaaaacgagccgagccgagctcggctcggctcgtccattccacgagctggcgaaagaggctcggctcgaccttggctcgcgagccatattctggctcgcgacctacgagctggaacgagccagctcggctcggctcgctgcaaaaacgagctcaaagaaggggctcggctcggctcgttcgaggctcgcgagccgctccgagctcgagccggctcacgagctttga

SEQ ID NO: 16236 - DNA, 462 bp, Zea mays
  Peptide Sequence Number=SeqID_59611
atgggcaagaacaagaagggcggaagttcgtcgcaccactccggcgacaagcggaagcacgagccaagtcccccctcggaggacttcggtgactccgagtactcagaggaggagttttcctccgagtccgaggggtccccggtctacgcctctaccccggtgtcgttcgatgactcggacgattcccaggggatcgttgccgaggtgtggacgtacatccgggccatcgagcgctctgggctcaagggctcggatgagtcggagatctcctcagacgaggagaactcctccgactcgtccgaggaggagagcggcggtgacggcgaggatgacggtggcgatggaggcgacgtcggcggcgatggcgacggcggcgtcgatggcgacggcgacggcaagggcgacggaggcaacggcaagggtgacagcggcagcagcaaggccagtggcaaagcaccactg

SEQ ID NO: 16237 - DNA, 258 bp, Zea mays
  Peptide Sequence Number=SeqID_59612
atggctgaaaggacaagcggcgcctctggcaggagaagcgggcgatgcttcgccttcgccgcaataactgcgcccaaagagggaccgggaaagggggataccccgaaaaggatccttccctgtgaaggaaccgggctccgagccccccttactgatcagaggttcgaaggctggccctccgaggggttcaacagccgcctcagatcgcgtgggccctacacccactactggtcagaggttcaaaggccggccccttga

SEQ ID NO: 16238 - DNA, 240 bp, Zea mays
  Peptide Sequence Number=SeqID_59613
atggccagggccaaggtgctgaaggaggtgaggaacgtcgcagcaatgatctccatggagaagggtgcattggccataggtaaaaaggaaaacctgctactgccaggatcgtccatcaagaaggtaccatggttgtcggcgtttcggacccacgaggaccgtcaaccgaccagtgaatttgtcgctgtgtgtccctgcctagatggattgatgcaagatggaacacaagagggagaatga

SEQ ID NO: 16239 - DNA, 1221 bp, Zea mays
  Peptide Sequence Number=SeqID_59614
atgaggacccagtcctggaagctccagaggatggtcaacagcttcctctgttttttttgtttgggtcaacctctgccacctactggcctcgacctcaacttcccgccagttcctgtgggaggtgaagatgcgcctcttcagaatggccacattttagagggccatcctgtggttgggcctgtgatgccagggaatgtgtctgctgtccttgctttaaatgctgctcctattaatgggccacaagaagttgatggcccagttattcaattggatcctcttgttccagaatcatttaattggtccaagtccttcttgtcgtcagagattccctcaacgttgctggagccggaacttgagtccctgtcttttgcaattcccaagggctacccaaaggataaattcctagatgatgttctctcagaggatccacaaccatcaaactctgagcaggaagagaacatttctggtgtccctggctcggccattgtggaatcagagctaaggactatgtcttccaaggtgatccggaacctaggggccaaattatgtaacatgtcagatgaagacttatcagacaacaacttgaagaagaagaagctcccccacccccgcgcgtcgtctctcctgcaccagctctccctgcaatccctccagctctccctgtcgtgtcgcctccacagcgcccaccgaggtcccgctagcgtggcccccgacctcgtcgctcagtgctggcgcgagatcgaggccatcggccccaccactccgcgattcgccaacaccgccgacccaggcgcctcgtcctctgccttcgactccaccggctcgtcgttcggccacatcgggtgcctatgctcgatctatcgcgccgcctatccatcctcattcattgcgtccgtcctcagcttcctcttccaccttccccgcgatgcctccccgcatcatcgcccaccagcatcatcacgcaggcctcgctcgagacaaacatggcagtggattgggtgtttggttctctttgcagtagcaattggaggtgaacaggaagacactgtagaggcactctcgcgcgctgttcaacgcagtggcagcagagcaccggacaatgtccgatggtgcatcggactgtccggtgtgccaacggagcaacggctacttcgcgccaacggtcgtctgcagaaggcattaaatgcgctacagtacgcgctagagtcagagcagagctag

SEQ ID NO: 16240 - DNA, 114 bp, Zea mays
  Peptide Sequence Number=SeqID_59615
atggcccggagatcccggccaagccgtttgagccgtgcggattccgcgcaggttccgtatgagctgcgccccgaccgggaggttgttgacagccctgacgcgtttccgatttaa

SEQ ID NO: 16241 - DNA, 486 bp, Zea mays
  Peptide Sequence Number=SeqID_59616
atgccgccacgcacaaggctaacggcgcgcaagtcaactggaccaatcggtgtgccccggcatcaactggcccctcgacatgaaagcagtagcagtgggagtaatgaccccataggagatcttgaagcccgagatcagcttactgatcgggacttagcacttgactgggcagtacagtctcgtttgctggcatgtgctaaggaagcaagggctcaggcccgaattaaggaacttagctcaactgtcgacgacctgcaggtctattgcaatacgttgcatgaggaagtccatgtactgtactcgcaactacaccctagtgcacctgcacaccctgctgaggcggaagccggaccctctcacgttgtgggatgcgcgctgggtggggagttagacctttttgagccccctccttccatgaggttggttgacgtctggactcccacacctgacgatgaggccgccaagagtaatgggaagcaggactaa

SEQ ID NO: 16242 - DNA, 139 bp, Zea mays
  Peptide Sequence Number=SeqID_59617
atggactctaagatcgccgctttgtgcgacgagctgcgcaagctgaacatggaaatggtttccctaggtaccttggattatatctcagttgagccaaccttacaagagccgattttcatggcacatcttggtgacaagg

SEQ ID NO: 16243 - DNA, 388 bp, Zea mays
  Peptide Sequence Number=SeqID_59618
ccatcaggagcaacgagtaatgaggtcggctggaacggcgacttggagcggcggccggcaccggagaagccgagtagggcgcggctaggatggaagccaagcgctggggctgggcagagcatcgggaactccatggcgagggagctcggtcggccagagaaacgcgggctggggcagggaggagcgcggcggccatggaggtggggagctgcgcgctatagagatgggcacacggcacgcaggggagctctggccggcgctggagctgcagaggagctcggccgggaactcgacgacaaccgccatgggaagaagagaagggagctcggactggaggtagcagacagggcacggccggtaccttctggagatgaattcgtgggcaccg

SEQ ID NO: 16244 - DNA, 474 bp, Zea mays
  Peptide Sequence Number=SeqID_59619
atggccggtacagacatcgtccgagatgaacgaacaacacgccgtggccaggggtgtttttggagaagaaatagaagtctagggtcttttctgcagttgtcagcgactgttttaaatagtgccttggactctttcggggtattcaagaagacgagggcctctgtgcaagtctgccagcgcgggcgcggttctcggagttccgtgaaggaaagttgtattcaagacttagataatatatctttattatctatgcactctcatgagcattacatggctatcattcttatatatatacctatatggttatatttagaagacgaagaagagagtgaagtgactgaagagaagacaccaccacctttggaatctcaggcagggacttggctctacttcgacatctgcgagtccgagcctgactcacctatcaacgaaggcaagccccggtgcatgcaacccctttcctcgtgtttttaa

SEQ ID NO: 16245 - DNA, 342 bp, Zea mays
  Peptide Sequence Number=SeqID_59620
atgcatatatcttacgcattgcattcattagattgtaatcttgccgacggagagtacgtgctcatccccgagcaaggacctgtccaagaggaggaccaggagcaggcttcagaggctgctattgaggatctccccgtagccccagcaattgaaggcaagccccgctatggtgggtacaagtgcggtcactgcacggcggcagccagggtcagtggagcattgtatgccaaggcggtaccaatgcaggaaatggttgatggtgtgacttggcctaccaccctgccaccgggttggacggtcgagtgggatgttgctccggaaggagaggagcatgaggaatag

SEQ ID NO: 16246 - DNA, 2019 bp, Zea mays
  Peptide Sequence Number=SeqID_59621
atggagagggaccgtcaagacgctacgcagaaacgccgggcggttgtcaggatcgctaatcctatgcgcgaggcgaaaaaggcgcgggggagcgtgaaggctgctgcctctagcggtagcaagccggtggcggctgtgaaaccggccgcccccggacacagcaaggcggcggtgagtgcgaaggctgccgcccctagcgggagcaagccacccccgggcgggctcgggaaaggacgaaggccgctttcgccggcgcgacgtattgccgacttcggcacggacatcagtgtcgaggattatcttgtctgttcgggtgaggggcaactgactattgtcccgcctccggtggcgactacttcgccaacagcggtggtgggggcgaagggtgccgcgcgggacccgtgggccactttctacgcgagcggtgagattctgtcggcttctgctgctaaggacgtggcaggctccatgtctcagcgactgagggaagcgtcgcagcagctgtcacagcagctgaagcaagcggccgacttcgctgatctcgtcgcgtcgggtgccctgactgcggacgttgctgccatggtcgagcgtctccgggcacaacatgcggatgctgtgcgggagaagtcggctgcggaaagcaagaaccgcaagctgtcggagaaggtggccgccatggaggacgagaagacggatctccggcgccaactggcggaggagaggaggctgcgtaggccaaagccaaagtggcgctgggtggagggcagtctcgcccgccaacgcgccgaggagctggaggcgaggttcaatgccctgcgcagccgcgtggacaaggccgagtcttcgacgagcgcggaggagctgctggtgctcccaaccattgtgacaggtttcatgtccttcgcctccctcgtcacctgcgagggggccatgaatgctttgtcccgtgaggggtgtaggcattacgaggtcttcgaccaagcggacgaaaactttgaacgtcaaatcttcaaggtcgaagaccctatggtgaagcagtcggcgggggcactctttgataggatgtggggtccgcacgggcgagaggcggtcagggatcggtccgatcgagcgatagagcagatggcgcatgccgaagacgtcgaggaccttgttggtctgaacggcgcgctgcccgaggccacggaggtcaatccggtgccttcctcagatgccggtgaaggcacctcggcgacccccgcgcctactgcgaccggtgaaggccccgcgccagctcctgcgccgacgagcgaaggcgacctgaaggtggtggccgagccagctgctgagccggcaaccgaagaccccacagccgcggccaggccctcacaggttcttgggtttgggcctgcacacgcaaccgctactgacaatgctatttttgtggcggcttcgaccgtggctgctgatgatgattcgtttggctctttgtctaagtgttttgagtctgatgattctgggagttcgattgtgtggacggaggagtcttcagacgaggacttggattattttgcggcgttggacgtggctgcggcggagacttcgccgcgtgtggtgggtgctgaggatcctccgggtgcgagtactgggtgtaggcggcgaagggcggtggcgaaacggagagtcatggaattaccactagacgcgcagagcagcggaagacgtctcgatgtagacgaacgcgtcgatcagtgccgtgcagtcgtcggcgtccttcacgtcctcgcacggttcgtcctagtgctccagatgcagcacctccgagggcatatttctaacagtaataggcgtcattgtggtgagatggagagtggtcgtcttcgtgtggacgggactggtaagcgggaattgttgtcctcgccggctggggctagtgtgggtgaaggggagctgcaaaatctttttgagggtgaggaattgaggataatgctgttcaactacagagagatgggtatcatcccgaaggttgagccaatgtaa

SEQ ID NO: 16247 - DNA, 669 bp, Zea mays
  Peptide Sequence Number=SeqID_59622
atggtaccgatccggggagggagaaccgcgccgcctgtagaggccgcaatctctgtcgactcggtcgccgccgccgggagcaccgccggcgcgtctacgcccgtctgggctgccgccgcgtgcgcccctgcctggagcgccgtcagcgcgtcggcgcctatccgggctgccaccacgcgcgcccccatggggatgcgcggctgcccactatgccgcctgctctcgcgctgcttccctcgccagcctgagctcttcgtcggtgttgtcgtcgacagaagcagagctgccagctctactgccgcgcagaacctcgagctctgttgccgccgcacgtgcagcatccgccgcctccgctgcttctacttccgctctcgccactgccagttccgccaccgccaaccgtgctgccctcgccgctgtcgctgtagccgctgctgctgctcgctcgcgttcttgtgccgtggcgacctcggcctcctgctggcgccgcgcactcgaagtggccgagcgtatggacatggtgggctagtgaggggtcgctgcgtgtggaagaggctgtctcagacgaaaggttgctcgtctgagcaggggaggaaggaacagttggagctcttgctgtcgactgagtgtggggagaggcacgggaaggagatgagcacgagatgttag

SEQ ID NO: 16248 - DNA, 1104 bp, Zea mays
  Peptide Sequence Number=SeqID_59623
atggggaggctagaaccccaggcagaatgggaatcaaggcttatgggtaaagtgtgcaagctctgcagagtgttagaaactggaggtgaagctagcaacatggatgactttgaggagttccaggactacgatgagttctacgtcgtcgacgccaaggactgcaaacagagtgcctttgaagtcggcgataagacgtatgttatttgtagatcagatgatgatttgaaaacatctgctgttaaaattcacgacaagctcactcagacttggctctcacccacaatacttggggaacagccacttctaaccaagtcacagtctgtgattcctgtcagtgatgagaagatattagttatcgagaagggtgttcccttgaatgagtccatctggttccttgagatagacaccccctttgttaagcaacaacggaaaatcaaggaaacagaagttgtttcttggagcaagggagtaatcggcgttggccaaaaaccagttgtgattagtggtccttctggtgttggtaaagggacattgattgcaaagttgatgaaagactatccatcgaagtttggtttttctgttagccacactacaagatctccaagggaaaaggaaatagatggtgttcactaccacttcacagaacgaatcaagatagagaaagatataagcgagggcaaatttcttgaattcgctcatgttcatggaaatgtgtatggcacaagtatcgaagcagtcgaatctgtaactgatgagggaaagaggtgtattctcgacattgatgtccaaggagctcgatccgtgagggcttcttctcttgaagcaatattcatctttgtatgccctccatcgttcgaggaactagagaagcgccttcgggcacggggtactgaaacagaggagcaaatccagaaacgactcagaaatgctcaggctgaacttgatcagtccaatgaaccaggtctctttcatcatcttttggtcaacgatgaccttgagacatgctatgagaatttgaaggcggtgcgcctggacgaacaaggggccttaagattggctcagttaactccttttgacaagggcttatattggcgttttagatga

SEQ ID NO: 16249 - DNA, 1251 bp, Zea mays
  Peptide Sequence Number=SeqID_59624
atggctgtgcctccgcggtgggcgaacctcaacatcgacctggtgacggagatcatgaaccgcatcccgtgcgcaatcgaccgcgcgcggatggccgccgtctgccaggcgtggctcgcggggatcgcgcgggcagaggatctgacatttcagctcccgtcgctcttcctcccacccgcggacgtgactggcgtctactgctacctcagcggttgccgcgagcacagcatgttgcccttgcccgggccccgctacttcggctcatacgacggcggctggttcttcctcgcctacggccagactcgcgggcaccggctgctcaacatccgcaccggagactcccacgcgctacccgacatggtcctggatcaagccgctcacgaaacacacagcatggtcatcctcgccgccgccatctcgtccacgcctgatgacttgtacgacgccgcgggcatcgtcacctatcagccggacctcgacgcgccgcgccgacgccacttcgcgttctggagccaaggggatgcggtggccgtctgcaacgttttgcccggcgcgccagttgcagttggggcgggttgggaaccggaggacgtcgtgtactaccggcgcaacttccttttcctcacccatgctgggcatatcgtcgtgtgcaccccgatatatgaaaatgatgatggtgggaatatcctggtagtgccgtggaagttaatgcccttcctggaacggaacttccgtgactgcgtatgggaatgggaatatcctgctagtacggtcatccgcgcttgctaccttgtggaatcccgcgggctactgcatatggtcgtcaggctcgctgcccatcatcacgcgccgacgtcgtggttcaaggtgttcgacatgcagcctttcgatatcatcgagccagacgatgataacgaggaggctgatgagaggagctggacctggtacgaggtggaagcagtattgttggaccggatgctgttcgtggggcgaggatgctccaggtcctacgaggtgagtcagtacccggggttcaaggacggcatcttcttcttggatgatcagagcttctacgacgccgagatgatgttcggtggagtcagtgagaggcagtacccttgcaacgacatcggcaggataaaatggcaacggttgagtgagctcatcgcactagctgaggcaggattacgtgctcaagaggaagaggatgagtttatgtcacaggccgccgcagaggtagaggcagcttaa

SEQ ID NO: 16250 - DNA, 1224 bp, Zea mays
  Peptide Sequence Number=SeqID_59625
atggctgtgcctccgcggtgggcgaacctcaacatcgacctggtgacggagatcatgaaccgcgtcccgtgcgcaatcgaccgcacgcggatggccgccgtctgtcaggcgtggctcgcggcggtcgcgcgggcagagcgtctgacatttcagctcccgtcgctcctcttcccgcccgcggacgcgaatgacgtctactgctacctcagcggttgccgcgaacacaacatgttggccgggccccgctacttcggatcgtacgacgacggctggttcttcgtcgcctacggccacacttgcgggcatcggctgctcaacatccgcaccggagattcccacgcgctacccgacatcctcgtggatcacgtcgctcacgaaatacacagcatggtcatcctcgccgccgccatctcgtgcccgcctgagttcgcgccatgcgccgcgggcatcgtcagctaccagccggagctcgacgcgccgcgccgacgccacttggcgttctggcgccaaggggatgaggtggccgtctgcaacgttttgcccggcgcgccagttgggccgggctgggaaccggaggacgtcgtgtactaccggcgcaacttccttttcctcacccaaggtgggcatatcctcgtgtgcaacccgttatatgaaaatgatgatagtgggaatatcctgctagtgccgtggaagttaatgcccttcccggaatggagcttcttccgtgattgcatgtgggaatatcctggtagtgcggtcgtccgcgcttgctaccttgtggaatcccgcgcgtcactggatatggtcgtcaggctcgctgcccatcatcacgcgccgacgtcgtcgttcaaggtgttctacatggaccctatcgatatcatcgagccaggcgatgacgacgaggaggctgatgagtaccttaggacctggaactggttcggggaaaatgcatgggggggccggatgctgttcgtggggcgaggatgctccaagtcctacgaggtacgtgagtaccctgggttgaaggacggcatcttcttcttggatgatcggagcttctacgacgccgagatgatgttcggcagagtcaatgagaggcagtacccctgtagcgacatcggcaggtggtcgccgccggaagggccgctgccttcccacgtcgaactctacttcccggagcgggttccatcttacaattctcctccggcttggcttctccattga

SEQ ID NO: 16251 - DNA, 306 bp, Zea mays
  Peptide Sequence Number=SeqID_59626
atgggcaatgactatgtggaactcgatatgcttaacttggagataactgatcgaactgagggtgaacttcgagggacccagtgcacgagagaaggtcaagaagatcaagggatccctcgcctgaccgccatcgcagcaaaatcaacccaaggacctccctacactgaccactcccctgctgcccttgccccattcggttcaatcaggagcgacgtcttatcgtcgaacgacctgaaggtgaacgcgcttctccacgccgtgcggcacctccgcctagatgcgccccttcctggaacctccccgtag

SEQ ID NO: 16252 - DNA, 195 bp, Zea mays
  Peptide Sequence Number=SeqID_59627
atgcgtgaaaatggcattacaaacttggaactaagatattctaaacaaccattaaaccctggtcatgttttccaattagcatctaaaaacgatgcaaatgtgattagtctcttaaattatgaggacaattcgtaccgatatgttatctctgcaaacatacaacatcgacttatcgatatcgctaaaaaggattag

SEQ ID NO: 16253 - DNA, 1821 bp, Zea mays
  Peptide Sequence Number=SeqID_59628
atggctaaaccagaggggccgaccattggcgtgaagctgtccgtggacaaagagaagaagaaggtgctctttgctgagtccaacaaggagttcgtcgacgtgctcttcagcttcctcaccgttctgctcgacaccatcgtccgcctgctggacaagcagtctcagttgggttgtctcgaccaactgtacaagagcgtggaggacctcaacttggagtacttccaaaccagtgcttgcaaggcgatgcttctgaaaccgctcaacgcggcttccggccactgctgtcgcctcaagatcaacgtcgatggaagcgttccaagggtggtctatgtctgcaaggacacgcggtgcagcgctcttagcgacaacgcgttcagttcgttccctggcacgatctgcaaatgtggtaaggtcatggagtccattggacagtgcccaaaatacgatggtgacactgaaaccgccgccgccacttgttcagaggatggagtttttgtgaaaggttgcttgaagtttatcgtcactgatgatctccaggttgcgccagcatctacctctcttatgatgtctgtcttcgagaaatttggtgtgcttgatccagctgtcctagagcagcaggttctgcagttcagttcagaaaagataacatgcttgctgaagagattgttgacgtctaagcaacctctcactgatcattatttcgaagctcctgttccacaagatgatgcaagcctagaagcgcttgttcagaacttacatcctaaacaagaaaacgaggaccaggaaatgccaggaaacctgaagatcagggttcttctgacgaaggacaactccgccctgctgtatgctgaagttggtgtcgattttgtggactctctcttcggcttattaagcattccactgggatccgcaattaagttatatggccagtgctcggcaaaaggctgcctcggtaatgtttacatgagcatagatggtagtgtccaagtattcgtcagagaggagtgccagagtctccttctggacccaaagttgccacccttctttggttgctgcgcttctaagatccttcaggttgacgaattagctccaagagaactgacgatcaaagcctgctttgtttgcttcaagagtttagggttttcaggttgtagtcgttgtcacgatatcccttacaaaaattctttgcgacgctatgaagctttttgcgcaaatacggtgaagtccattaaactttgtgaggcgaatccaaaagaaccaaacggtggaagcgagaaaggcgaagtatatgtaagtgggaagacgaatttcctggttactgatgacctgcgtgttcttccactctcattaacatccactgttaagattgttagtgattccaaaattcagacgtcgaatcttgtggtcaaagaaattacactaacaaagtccaaggttatggagctacagagggttgtcctgctgctgagtcgtaccacactcagctccgtgcttctacatcctaagaagaccaagaagctgcaccattaccatcgcgtgagccaagaggacaagcgatttgcattaataaatcactatagaagtgatgttgcttctactccaccaagagggtcgaaaagaatgcggcaaacaggtgggatgtgcgggtgtgagatgattggggagactttgcctcatgcaaatatacgggatgaatcgccagagaagcgtcaccgcgaaaaaatgggaaggatgcgggttctattggaggcggagaaaatggagtttccctcaaatacgttttttcagggccttttagcaatctcttggagatgctcttag

SEQ ID NO: 16254 - DNA, 363 bp, Zea mays
  Peptide Sequence Number=SeqID_59629
atggcaagaggcagtggcacaaggccacggcgactcctcgagcagaggaacccgaccgagcgcagcaacgcaaatcttcaatctcaaatccctgctgcgagaaaaggcgaccttcacgtagaggaccggatgctggaacatgccggcttcgtcgaccactcatgggccaccactgccacttctgatgctgctgacaaggaagcggccaaaaacgatgcgtggctgagacacgtggccgcggcgctactcggcagccgtagcgggatcaggagaccgttcctggaggcgttgtccaggtgcctgggctcccctgacgccggcctagtgggggcgtgcctgacgatggcctggtggaggttataa

SEQ ID NO: 16255 - DNA, 960 bp, Zea mays
  Peptide Sequence Number=SeqID_59630
atggcgtggaaaatgagtcctcaacctccctgtacttcaaatatatggtttctctatcctccacggtctatttgtgtatccgtatgcgagcttcgagctctattagaacccacctctcatttgctcgctcgcattcacacttcgtctgattggttcggtggatggctagaatcatttcatacaggttaccaatcatcacatgctggagcacagtcaacgctcgcggccgctctggatgtggacagcctgccaaccaatcatacgatgaaagacatgtaccgagaggcgttgtggcagaagagaggtcgtcctcgggagttatatccggacgtatctagtaaggatgctcctgttcctcctgaactccccgtgcctaactgtgactgtggcagactggcttggggacatgagaggtgtttctttttccagtggatcgatggtcctgataaatttgaccctcgatatcttcttttcgttaattggttgagtggaaagaccagtcatgagcgttttaagcgttgggtacctcctcccccgaatcctccaccaatgacggatgagaaggaggtagcaacagaaagacggatggactcaccgtctcgatgcgattgtggagaccgtgctgtcatcgacgaagactatgacaagcagttctgttgtccgaacattgattatccatacgggtggcgtaagtgtcgtttcagagagtggttgtatggtcctttgtcccattggccagagccagaggtaaaggaaaagagatacatggcgtgggcggcagaagaggtcaaatttgatccagtactctgcaaatgtggtattgaagctaagtatggattagttccttcggagcttggtgttggatatttttgtggacatatggtcgattacgatgaggagacgaggatatgcagttgggagagttactacgacaaaggagagagattggaagcggcgtaa

SEQ ID NO: 16256 - DNA, 168 bp, Zea mays
  Peptide Sequence Number=SeqID_59631
atgacgactgacaggccgctcgagctcttacacatggatctattcggcccgattgcttacataagcatcggcgggagaaaaatctcatacccaagagaccttaatgggattcttgagacgggctcaaaacgagttcgacttaaggatcaagaaaataagaagcgataa

SEQ ID NO: 16257 - DNA, 585 bp, Zea mays
  Peptide Sequence Number=SeqID_59632
atggtttctcagggccggaccccaggggcttcgggcttcaccttcgacaactgggacgaacgggacttccgcctcggccggaacccaggggctcgggaacacagccctcgggcctcggaagaacgggtcttcgcctcgcccgaccccagggctcggactcaacctcgacgctggatgacggactccgcttcgcccgacccagggctcggacacagcctcgaccttggaagtcggtctccgcctcgcccgacccagggctcagactcagcctcgaccccagggctcagactcgacctcgacctcggaggagcctccgccttgcccgacctagggctcggaccaaccacgtcacaggggggccatcattaccctacccctagctcgctcaggctatgggggacaagaccgacgtcccatctggctcgccccggtaaacaaataatgatggcgccccgcgtgctccatgacggcggcggctctcagccccttacgaaagcaaggagacgtcagcaaggattcgacaaccccgatagctatccttctacagggcccaagcgctcctccgacgaccacgacatcacatga

SEQ ID NO: 16258 - DNA, 1128 bp, Zea mays
  Peptide Sequence Number=SeqID_59633
atggcggtggcaggcgggcggaagcagcggtcgagtcgtcggcatgctcacgtcccctcctgggacagcgagagagccctctcccacgacgtgaagacgacgcgcccgtgttccgttcctcgaacggctcgcgcacgcacaacggctgctccgcgaaccactcgtcccgtcgcattaactctgcggcaggacaggcggcacctttggcaggcaaagcaggcgacgcttcacctccgccataatgaccgcgtcaaaaaagggaccgggaaaggggatactccgaaagggatccttctccgtgaaggaagcgggctccgagcccccctactgatcagaggttcgaaggctggcccctcggaagggttcaacagccgcctcagagcactcgggctccgcgcccactactggtcagaggttcgaaggctggcccctcgaaagggttcaacggccgcctcaggccactcgggctctgcgcccactactgatcaagggttcgtaggctggcccccgaagggtttgacagccgcctcagagcacgcagagcaagggatgaccctgagaagctccgcctcgcccgaccctagggctcgggctcaacctcgacactggacgacggactccgcctcgcctgaccccagggctcggacacagcctcggcctcagaagacggtctccgcctcgcccgaccccagggctcggactcaacctcgacgctggacgacggactccgcctcgcccgacccagggctcggacacagcctcgacctcggaagacggtctccgcctcgcccgacccagggctcggactcagcctcgaccccagggctcggactcgacctcgacctcggaggagcctccgcctcgcccgacctagggcttggaccaaccacgtcacagggggggcatcattaccctacccctagctcgctcaggctacgggggacaagactggcgtcccatctggctcacatcggtaaacaaataatgatggcgccccgcgtgctccatgacgacggcggctctcagccccttacgaaagcaaggagacgtcagcaaggattcgacagccccgacagctgtccttctacagggcccaagcgctcctccgacggccacgacatcacatga

SEQ ID NO: 16259 - DNA, 768 bp, Zea mays
  Peptide Sequence Number=SeqID_59634
atgtcggggggactaagaaacaaaagtgcttctatgcttgaaaaagttgaggttgcctcgaattcatcttttggtgcagatgttgatcctagggcaatagaccttgccatgagaatcgccgaaaggatgttccttaaaatgaaggaagatgaggcgaagaacaatattgaagaagaaaatgatcgatggagatcaaatgacgaatccacctcttcacaaggttcgtctttcaaatccacttctcatatgtgctttatcgctaatgggagtgacagtgaaagcgaaagtgaggatgaggaggagcaagaaagtgatagtgaagatgaggatgatcttcaacaattcttcgctcagctaagcaagaaaaatcagatgagcttgctcaaactcatggaaagagcggaagaacaaaaagaaatgcttcataagcaagaagacttcctcatcagaaaaatcgaagacttagagaagttgaccaaagagcatgagaagctaaagtgctctcatgatggtttggtccaaagggcaagttcaaccggggtccagagaggttcaaccgtggtccagggcaagttcaaccagggtccagagaggttcaaccgcggtccagggaaagttcagtcggggtttttttcttggacctcactgtctgacctgcagtctgccagtctgactggcaaactgactgtcagcctgccccaggcggttgaaccggtcctagaggcggttcaaccggtcctccacagccaaaatcagtccaacggctag

SEQ ID NO: 16260 - DNA, 657 bp, Zea mays
  Peptide Sequence Number=SeqID_59635
atggttgccccgcctcctcctccgtcggcggggaaggtgatgggatggacccggatgttgttcttccgccacgcggggaagacgtcctcgattccgccgccgacgggcgggctaacggccgccattgtcgctgtcgcgcggcggaggaaggagtatcatgttgtagccgccgtcgagggacatgaactcgagactcccgaaacggagcgtcgtcccgggttggaaaggttgctggagactacccatctggagcttgacggaaagctgttcgtcaacacgcagcaggcccctacctggcgcgccaactatcggcgtttcgacctcggggggtccctggaccgacgagtaaattatcgctgcgtgtcccagcccggatgggtcggcgcgaggcggagcacgaaggggggaagaaacaggcaaaggggaaacccgcggccttcgtgttgccctgcgcccaggtcgggtgcgcttgcagtagggggttacaagcgtccgcgtgggagagagcgagagccttatgcgtcggcccgttctcccgcgcggccaaccttctcgtacgagagccctggaccttccttttataggcataaggagagggtccaggtgtacaatggggggtgtagcagtgtgctaacgtgtctagcagagaggagctag

SEQ ID NO: 16261 - DNA, 210 bp, Zea mays
  Peptide Sequence Number=SeqID_59636
atgccgccgttgagggctcctatttatacgcctagtgcattccaatttggcgggccccatttgtcattgattttcgctattctagcgaatggaagggaccttcagccttgggatgaaggtgtacacgatatgaaaggcacggtttgggagatggatgatctagttccaaagctaccaatggagaagcttcggcttggcggtggaaaatga

SEQ ID NO: 16262 - DNA, 309 bp, Zea mays
  Peptide Sequence Number=SeqID_59637
atggcaaaagctctgttaatccggcctctcaagggcactgtgcgggggtatttgttgggggccttcggcttccgaaggtatcctcggactcgagtcgatatcacagtaggagaagcccaaataatacgaaggttgatacagcgccgaagatgtgagcaggaaagcttcggcgtggtagcagaaaaggaaaccgacttaaagatgaaaaggccattcagacctcggtggattactatagaattactaccaaatgtaaagggcatggatgtaattttgtatgggctgtgtcccgtgcctataaataggtga

SEQ ID NO: 16263 - DNA, 410 bp, Zea mays
  Peptide Sequence Number=SeqID_59638
atggatcctggcacacatatgcgatgcacccggctctgcccttcggaaatgggtgtgacaccaccctcacaactactgtcggcccgcccttccgatccagctgtataccgtgtgccggcgaccccctgccaaaccaagcgggtgaggtttgcattcactgcaagcaccacaccgccccgcattcactacccttcccccgtatcccgcagccacagtgctacccccgccccgacagctggttcgaagcccccgcctggaagctgcgaccgcattgaagatgaggatcttgaaggatggacgacgattcggcgcaggcgtggacgcgccgcccacgcaggcctaagctgcgtccaagcggagcctcgccttctctcagcccatgcccctgcctctgatggtaagcctacgag

SEQ ID NO: 16264 - DNA, 504 bp, Zea mays
  Peptide Sequence Number=SeqID_59639
atgccggagacaaatcagactgcctccaacactgaagttgactctatgaacaacgcgcctaatgggccagggctagaagaggcaccaggcctcgtggatgctgctgctggccttgagccggaagggctgtccccttctctttcggcgtccttcatcaacaacttcacccacccagcagcccgacccctgctccagcaacaccagcaagccctatcaagcccgaagaagagaggaaggcatggggtcaggccgatccttaggagcaagcggctcgcggcggttgtctggccatgcggcaacatacaagagcgcgctcgccaagtcctcatgaagcggctggggatcttgcctagcattggccagccaacaactgccgctaatggtgaagctgcactggagcactacatcaacctcttcaagggtccgctgacgaccgtggctcttcaggcactgctacccctctgtggaattattccacaggggcagacagtgcagggaacttga

SEQ ID NO: 16265 - DNA, 1056 bp, Zea mays
  Peptide Sequence Number=SeqID_59640
atgggcgcggaggcagcgcatgggcatccgcagcagcagcctccctcgtccctccgacccggcagggaggccgcggcgccgcccgcggtggtggggctgcagctctcggcgctgatcgaccacgtcgcgcgcgtcgactggtccctcctcgaccgcgtccctggcgaccgcggcggctcgcagcaggtatccattgatgagctgaatcatattcttgatgaagtgaatgcccacatccttccttcccgcaatgatctcactccggtaactacaatagccggtggaagtgttgccaacacaatccgtgggctctcagctggttttgggatatcaactggaataattggagcttgtggagatgacaaccagggacttctgtttgtcaacaatatgagctttagtggtgtagatctcacaagattaagggcgaaaaaagggcacaccgctcaggccaatgaatttagaaaggaggatttcaaaggctccaagtggctcattgtgagatatgcacaacagaacatggaacagattgtcgaagctattaggattgcgaaacaggaaggcctttcagtatcattagatttggccagtttcgagatggttcgtgactctaggtctaaacttgttaaccttttggagactggtaacattgacctttgcttcgccaacgaagatgaagctagggaggttatagggggaagcctggaatcagatccagaggaggcgcttgcattcttgggcaagtactgcaaatgggccgtggtgacacttgcttcaaagggatgcatggcaaagcatggcaaacaggtcgttcgagtcccggccatcggggagagcaacgcggtggacacaactggagcgggcgacctgttcgcgagcgggttcctgtacgggctggtgaaggggctgccgctggaggagtgctgcaaggtcggggcgtgcagcggcgggtcggtgacgcgggcgctcggcggggaggtgcggccggagaactggcagtggatgtacaagcagatgcacgccaggggcttgctgctcccggagctcaagaactga

SEQ ID NO: 16266 - DNA, 507 bp, Zea mays
  Peptide Sequence Number=SeqID_59641
atgggaggtggcgctgccccggtcccgtgccctcaggctcccgccagcagggaggtcgagatgtttataaacatcaaggagcatgttcttgttcctgagcatcatgtgctcacaaatgaggagaagaagacgctattggagcggtacatgttaaaggaaactcaggctaaatgtgaattatctatcaagaagggtataattaggatcacacaaggagttcagagcgggaaggcggggaggagtgtgaccaagttaagccttactgtttgggacttcactctcctagtgacaccttctttacctgctgtttttggtgtatcctggcaatatttctttttaccgtgttccatttccattcctgtgctgtgcaactgttatgggactgggtgcaatgggctgcgcttaatgggcctgcttggcctagcagaaccggcagcaacagaaggcagtgttgggattgctgctgccctagccaaaccagcagcagggacatgtcttgtgcaatag

SEQ ID NO: 16267 - DNA, 561 bp, Zea mays
  Peptide Sequence Number=SeqID_59642
atgcgcgcaccatcgttttcgccgtcgtcggacgtctcattcgtcttcacagccttcatcttgttcttcctccccaacctgctgcccccgcccacggttgcaaccgcgggccgaccgacgctcgtggacgcagctcaaggagcgggtgatacaaacttcttggggtcgtccacaaatttggagactcccaagcaacctctaaccgtcaaggaactcgaggttccaagagtaacaaatccgcacacggttaagtttgcaacgagctcaagaacaagagaatgggagaatcgagatgaaattgacagcgagttcgatcgagttcacctcacaccaagggtccttcaaatgattgaaggagatgcgattgcgggtgtgaaagctctgactgtcagacaggtcagagcagaggtggcaggtgaacagtaccgaaaccggttgaaccggtttcaggaccggttgaaccggttttgggggctgaaaccaaactttgggtattttgaagagaacaaaaggggagactttgtgggaagtaaaatttgtttttctcaagggcattcatga

SEQ ID NO: 16268 - DNA, 69 bp, Zea mays
  Peptide Sequence Number=SeqID_59643
atgagccatgcaatgcgcctgggcgccctgctgcctaccgctcgtcgtatttggaacagatatagataa

SEQ ID NO: 16269 - DNA, 420 bp, Zea mays
  Peptide Sequence Number=SeqID_59644
atggctcttatgctacaacattctagtgtcttagttcccccggttcagactgcaccacctcctccgcttcaggctcctattgtgccagcacttcagtcaggacccccttttccttctgttggtccttctccgctccggccggtcaccctggctttcacgtcaccggttctcagctctgtctgccctcagccgccagtgccactagcttctgttgtttccactactgctgtggcagtatctgtgatcacttcagttccggcagcttctacagcgcggcctcagtccgagtcagtaccagctccagcttctacagcagatcctggatccgagactgactctgaccccccgccggcgttcgctctgctacctcgaccgcgactggatgcgcccccgccgcctcctcccgcttcagatgtgtag

SEQ ID NO: 16270 - DNA, 687 bp, Zea mays
  Peptide Sequence Number=SeqID_59645
atgccgcgcacgaagaatgtgtcggcgccagggggaggcgatgatgaggatcctcgtcgccccttcaggcaggtcaagggcaagacagtacacttggagcagcaggaaggccgcaagaagcggcgtatggacagagcagcccgtgcagcggcagcagcagccgctgcgcaggccgagtttggagatcagccacagactccgtcagatcagattgcataccgtgttcgtcgcctcgcctcccggcctcgctcctccactcacaccactgcttccactccaccacccactctgcctgctcccgtcacccctgttgcgccatccaccaccacagccatacccgctacctccactacaccagcttccactgctcctcctcccgctctcgcttcagctcctcctatccctccacctcgatttcgggagcgcgatgagactgaggtacgaccacttgttgcggatcccagactttttgaccttcagcgtgctacttcggcacaggtacgtaggttcagatacgtacctgtcgagtcttggtttccggctcaaaggaatcctgatgcagttgaccttttcagcacccgttctcaagagtccttttgcagagctcagatgtcagcacggattgctctgcgagagaaccagcttttggataatccctacttctgcttgtttcacagctgtttctaa

SEQ ID NO: 16271 - DNA, 351 bp, Zea mays
  Peptide Sequence Number=SeqID_59646
atggcccacgtatcgtggtctgagcacgccccctatcagtggaatggacaggcgcacgtcttatccataatgaatgtgaaggcgcgcgtagcccagaggcgtcatgctaggttccgcccgttggcttatgccgcacgcagtatgccacatggcagcatcgggtctccgcctgagcggggagcaggagtgtatgcggataggcccgaatcccaccagaccaggtctggacacgtgttggcactggaccccgcctgggctctaattaaggcccgggtgtgttctgtcctggaaccttgggaccctactgttggtggcccggaccccatacgggggatctggatcccattctag

SEQ ID NO: 16272 - DNA, 243 bp, Zea mays
  Peptide Sequence Number=SeqID_59647
atggctatctgcacgcaacggtcgactctgacagatcaacagtgcaacgtagaagtcagagcaggaagtcagacgggcaccaaactgtccggtgccgcaagaggacaaagctccaatgaacacaccaagaaggagataatgaccggtgacaagtccgcaattggggaggactccgtcaagagagtccggcaacaaatagaaggaggaatcctcttcctccatcaagtcgcatcgaaaaggtga

SEQ ID NO: 16273 - DNA, 564 bp, Zea mays
  Peptide Sequence Number=SeqID_59648
atggagcttggcggagggacagctgtcggagcggttgagtccttgctgacgtcctcttgcttccgtaagggggctgagagccaccgtcgtcacagggcatgcggggcgccatcattgcctatctggcggagagagccagatgggacgccggttgggcgatgtggaagctcctccgaagccgaggtcgagtccgagcccccgggtcgggcgaggcggagattgccggctggtgccggggcggagtccgagccctggggtcgggcgaagtggagttcgtcgtcttctggggccgagcccaagtccgagccctgggtcgggcgaggcggagatcgtcgtcttctggggccgagcccaagtccgagccctgggtcgggcggagttcgccgtcttccgggacttagcccgagtccgagccctgggtcgggcggagttcgccgtcttccgggacttagcccgagtctgagcactgggtcgggcggagcggagttcgccgtcttccgggacatagcccgagtccgagccctgggtcgggcgaagcggagttcgccgtcttccgggacttag

SEQ ID NO: 16274 - DNA, 1080 bp, Zea mays
  Peptide Sequence Number=SeqID_59649
atgaccctcgacgacagcggcgtggcggttcgccagaccagcggccgggaccccctccgcgggatccggatctccgatgcaccggctgaagccccccagaagcgccagaggactgcagatggggccaaggaggccagctcccatgcccacggagcgacgatcgccccgcttctagagtcactggaaagtccagggcccaaggcttcttcctccgccgctcccaaggccatgcctcctccgccagatactaggcccaccgacgggtctggctctcagcagcaggaatctgctgagggcggtgccgacggtccgcccccagctgctgccaggacagcgccagcggcttcccatgccctagccgggggtccggcggcagcggcgccagcgtcaggcagcgtcgcagtggcggaggaagtcctagttgggggatttgcgcccactcccaacaccgggggtgatacaggaggcacgtccagctccaaccccccgcctgctccggaggagaaggaggtggtatttgggcggcgacttcggtcgggtgccgatcaagaagcggtgccaatccccctcccccgcatgctgtcccgtgcccaccaggtccttagtgaaactgaggcattcacctccgagcggtcccaactcgagcgggaccgcaaggagtacaagaaggacctccagaaggtgtgtgccagggagctggaggcgcaccggagggaaaagcaagtggccaggagggaggaggtcgtgacccagagggaggccctcacaacagagtaccaggctaagctgagtgctctggaccaaactctggaagcccagcgggcccagcatgtcaaggttgtggaaacgctacagaaatggcagcaagagctcgagggcaaggccagcaacaccgccctcgccgaggaaaatcttaaggcgaaggaacagtccttggacaggtgggagacggacctcgccaggcgagagacatatctcgcctttagggaagaaatgctcacccggcgatgcgagttgctggccgagcacgagctcgaagcggaggagaaagagaggaagctggaggaacagatctgctag

SEQ ID NO: 16275 - DNA, 75 bp, Zea mays
  Peptide Sequence Number=SeqID_59650
atggcggccgaaaaatggctcaagagatcattcagagaagtgaaaaaggcatccatgatgctagggagtttgtaa

SEQ ID NO: 16276 - DNA, 546 bp, Zea mays
  Peptide Sequence Number=SeqID_59651
atgaacgattctgttaccgacgaacaagtcctgatactcgaaacaaggggaaaagaaacgcagctttacaacacgacgacggttcagacgtcagcagggggagcagcagcaccctcggcatcgactccaccttcggcggaatccgacccggcctcggacagcgacatggtcgaaggatctccacctcgaaggaagatgtcagcaccgcacctgggccatcgccgccagggtctcctccgggaacccggcccaagcagacggccggaccggctgctccgtagcctcatccagctgtcccccgaggacaccagcccggctcatggcgtcggcagcccgactccagggttggtcccgccagtggacgacctggccaggtcccagccgccactacgacgcctcctcggcccgtggaagtcccctactcccgggccgatgaagtttcttctccagccaactctgcctctgtccatgctgacaccgctgccttcggcttcggctcatcgcagagcagccgagggttcctccactaagcaagagaagccttga

SEQ ID NO: 16277 - DNA, 629 bp, Zea mays
  Peptide Sequence Number=SeqID_59652
atggagcacacggggcgccatcattacttgttttacctgggtggagtccgagccctggggttgggcgaggcggagattcctatggcgcccgaggctggacttggctgctgtcagcctcaccctggcgggtggcacagcagtcggagcagcgcaggcagagttgttttcctgtcaggtcagtcagtggaggggcgaagtgactgcggtcacttcggccttgtcgactggaaagcgcgcgtcaggataaggtgtcaggcgatccttgcattaaatgctcctgcgatccggtcggctggcgaggcgatctggccaaggttgcttctccgcgaagcctgcccgaactgggcctcaggcgagtcgaaggtgcatccgttgcttgaggagaccctcgggcgaggcgcgaatctgccttggtctaccgttcctgctcgaggctgggctcggctttgtgctgatgggggttaccagctgatattaggagccttgggggatgcaccggagaggaatcactcgccctacgtgtacatatggagcaatgagggcgatcctgacctctacggggaatgggattttcaggagcggatgaaggtgcatttgaaggactgccttgagatgactcaggaattcat

SEQ ID NO: 16278 - DNA, 1050 bp, Zea mays
  Peptide Sequence Number=SeqID_59653
atgtggcccagcctcagacggcgacacgggcggaaggatctccacctcaaaaaaggaagccaacgccgcgcctggaccctcggcaatcgcactaagcctttgggcctcaaaagggatcgggaaaggagatatttcgaaagagtccttctcagcaaaggaaacaggccccaagccctcctactgatcaggggttcgaaggctggcccctcggaagggttcgacagccaccctagagcatgcagagtcagggatgaccctgggtacatccgttacatggccgaggctcgggctacgctcctgaggtaccctaggacatttccgcgaccagcgggaacgatttgtaatggaatcccaccggagggaggcaccgagccctcgaaccctatcaaatgggtccggctccagcgaatcacctgcaggctgcggccaggccgcatgagagaacaacaaggccggccaaggaataacaagaagagcattatgacctcagaggagtcaaaccactcctccgaggcctcgggggctacacccgacgggtgcgctcgcgcgcactcatcggaacaaaatactactacaaaagaccagtcaccttgcaaaaatccggatgacaacactattcaccccattccgaccactgtgccaaccaccaggataagactaacaacagtagtcaccgcctctcccgagttcagcctcgggtgcaacagggagttccgcctcgcccgacctcggcctcggcctcaggaggaatcgtcaccacgcccgagcacggtctcggcctcgggatggatcttcgcctcgctcgacccaggcctcggcctcagcctcggcctcgggaggagatctacacctcgctcgacccaggccttggcctcgggaggagatctacgcctcgcccggcccaggtctcagcctcagcctcagcctcgggaggagatcttcgcttcgcccgacccaagcctcggcttcggagacatcaccgcctcgcccgagacggcctcggaccgactacgcaaacggggaatacgacactgtcctccccctagctag

SEQ ID NO: 16279 - DNA, 207 bp, Zea mays
  Peptide Sequence Number=SeqID_59654
atggatgcgcagacaagagctagctacgacgctagtagtgggaaacttgagacacactatgtgcaaaatgagaatgacttagtaatacttgaaggcaatgacattaatgaccaacttgcgctttcagatggtgttgacgatgaaatggttgataatgatgatgagacctatgatccggctaaccccgacgcatatgaagattactag

SEQ ID NO: 16280 - DNA, 336 bp, Zea mays
  Peptide Sequence Number=SeqID_59655
atggcggagcgcgcggactccgcgcaatctgttgacacgctccggccacgttcgcgaccttataggcagccacgaccttgggctcgcatattccccctctgttccttgccatcgcgatcaccatcattgcagaggagcaccggaattcctcgtcgcaccttctcctccgctgcggcagtacgcccagctgtggacatagctcgtagcggtgaaattcttggtgagaacctccctatcctgtccgcctcgaccctgtgcgcgttttgtacacacccgtatgggttttggcctgcttttgcgctgtgttgcctgctcgtcggacctctccgccgttga

SEQ ID NO: 16281 - DNA, 513 bp, Zea mays
  Peptide Sequence Number=SeqID_59656
atggccttgctctccacaatggaaacatgctctgtttccaccctgagctggtgctgcttaactattctgctgggcgattctgatgttgatgctgaggatactgcctttggaactgctgctgctgaggtgctgaaatgtggggaaggtatgattcatcagctaatagtgcaaaggatcaaccaagcctctcaagaaacgatactgcctcttggcatctgtgttgacatcctcaagagcatagcaggacagctgcagaaacttgtctcggtactcactgacagacataggcccttgcttgagtgccaggaattcctccttcttcactgtcatcagacctgcaggaacatggtactgacggaagctatctctgaattcttcctaggaaagagtgtcgaggttggcatgggtggcgaggcatctaaggcatctgaggctgaggtgggggttgctgctgttgctgctgaatggcagccagagtctgaccgatggcttgaactacttgagtctgcatga

SEQ ID NO: 16282 - DNA, 141 bp, Zea mays
  Peptide Sequence Number=SeqID_59657
atggccatgatgggttcaacatcggaaaagatgtacctcttccaggtgaagaagcagcaaatttttgttgcttctgttcctaggtggtgcccaaagaagaaaatcaggactgaagctgcgggaggaagggtcctccgttaa

SEQ ID NO: 16283 - DNA, 747 bp, Zea mays
  Peptide Sequence Number=SeqID_59658
atgaactccgcctcgcccgacccagggctcggactcgggctcggccccagaagacaacgaactccgcctcgcctgacccagggctcggactcgggctccgccccggaagacgacgaactccgcctcgcccgacccagggctcggactcgggctcggccccggaagacgacgaactccgtctcgcccgacccagggctcggactctggctcggcctcggaagacgacgaactccgcttcgcccgacccagggctcgaactcaggctcggccccggaagacgacgaacttcgcttttcccgaccccagggctcggactcgggctctggcctcagccgacggtctccgcctcgcccgacccaggggctcggactcgacctcggcctcggaagacagactcgacctcaacctcggaggagcctccgcctcgcccaacccagggctcggaccgaccacgtcacaggaggcgccatcattaccctaccccaagctaactcaggctacggggaacaagaccggcgtcccatctggctcgccccgataaacaagctccagcgctcctccgacgaccatgacaccacacgaaccgggtgccaaaacctctccggctgccacgacggcatggccctcttacagagggttggccgcgcgggaaaggacgggacggcgctcacaagtggctcatggcatcatcgcgaagggtgcatcgaggcgaagcaacttcatgcagagcgcgtggccttcagatga

SEQ ID NO: 16284 - DNA, 369 bp, Zea mays
  Peptide Sequence Number=SeqID_59659
atgcaggatactgcacggcgtgcgctttcacagtactattcgttgttcagcggggtagctgacggcctcgacctgaagtactacccccgccgttcaaccagcagtaccagaggtgtgattgtctcaccagttggtggcatggtcaacctgatcgccgtgctcaacaccgagctgggccacgaccttgacaagttaggcaaggctcgagtggagattgcggaactgcgtgctgagcacgcggagtgccgccatcaggaggatggttccactgcccctattgggagtcagcacccttaccgctcaccgccccatggtcatcatgcttatggcacccctgactgcaggaccaagatagacttggagccatag

SEQ ID NO: 16285 - DNA, 660 bp, Zea mays
  Peptide Sequence Number=SeqID_59660
atggtgacaggacagtcggtccacctagagagactgcaccgtcgcctgcacgaggagcaggagcaccgacgccaggagcgggagcagcaggactcttcccccttgcctcagcaggaggtggagtctagaagccaggcctcctctgtgcctcagctagaggtgccccctgcaccaccacagggcaccccagctgctggaagagaccctgacggagatgacaacgacagtgaggagcaagagccagaaggatggatcgcccaacccatcactcgtgatgccgctcgtggttgtcatttccacgacgctctcgacaccttgctacgtcgggccttcgaccgacacacttggtctctcgagaaccattgttatgtctaccatcgtagtcgcgggttatacccagaccagtgggaggctacctgcttcgtgtaccgcccggaagatgatctccagggtgttgaggcctacttagagcattattctatcactaagcgggatactgccgaggcagccatgcaggatgttgcatggtgtgcgctttcgcagtactgcttgttgttcagcggggtacctgacggtctcgacctgaagtactaccccatcattcgaccgatagtaccggaggggaagaaggcgaaccgccagatcgtctacactgactaa

SEQ ID NO: 16286 - DNA, 378 bp, Zea mays
  Peptide Sequence Number=SeqID_59661
atggcgttctctccctctctgcccaactccggcgaacccggagccaccctagctcgcgcctacctcaactccggcgacctcaccaccgcggagaggagcagcgccgcccgcagtcgttcgcccctccacggtctgatcccctccattcgatctttatcgcacggcccagatcgcgggataccgcttcgcgcacgcgcgccctacgcccctggcccgcctgccagcgcccaagcccgctggcgctgggcccactcggtcagtgcgccctccccctctatcgctgacgcccctggcccacctgtcagggctcgcctgcccacacgcgcgccctcggttgctgatctaatctcagccgttggttttagatctgacagttag

SEQ ID NO: 16287 - DNA, 144 bp, Zea mays
  Peptide Sequence Number=SeqID_59662
atggtcaacctggccgccgtgctcaacacagagttggaccacgcccttgacgagttgggcaagcaccctaaccgctcactaccccgtggtcgcttcgactatggtaccccagactgtaggacccggatagatttggatccatag

SEQ ID NO: 16288 - DNA, 507 bp, Zea mays
  Peptide Sequence Number=SeqID_59663
atgggtctagcgatccacccctccggatctggctcctccgagagctctgtgtcgtggctcaaactgccatcgacgtcgtcgtcgtctccgtcaggtccctccagcagccaggatgcccctatggtgggtgcaggggggcatcctctagctgaggtacaggggaaggcggcctttcagactccaccttctactgaggcgagggggaagagtcctgttgttcctgctcctgctcctggcattggtgctcctgctcttcatgcaggcgacgatgcagtctctccagtgcacctgatatgggccatctacaaaagacatcgtaagcacaagagtaagagtggaactatgagaccagaaacctcggcagagcaagtactgtgcccggaccccattgatggccctacggcgaagccaactactcctctggttcctctaattaatcagctaaggggcggtctggcagactcggtcatgggcatcacgctggcgcaggggcaccagagggcgtag

SEQ ID NO: 16289 - DNA, 516 bp, Zea mays
  Peptide Sequence Number=SeqID_59664
atggcattgctacgtaccgtcggcggcggcgggcggtctgcttcactcgagccagagcgacggcgagcaaaaggagcagcggaggaagaagagcagcaagacggcgggcggctagggtttaacggagcgcggaaggcaaagttcaaacagcgccgacccccgcccccttttataggcagggcgcggctcttcgggaaacccgcaattcgacaggccgcgacgcttcgggaaacccgcaatccaacagtacgccgtccatcaacggtcacatcaaaaacccccgcggaaccacttcgagcgagggcagcgtctccgccatctagcgacgtcttcggcaccagaacccaaaaccctaacccctaccctatgaacttcactatagactccaaaaaccctagtttcccggagatccatgaagagaatggcgtgggtgaacaggtcaatgcgaaggctgtcctcggcaccactacacagtggcgcaaccttgttccggccaacaaacaacgacagcattaa

SEQ ID NO: 16290 - DNA, 81 bp, Zea mays
  Peptide Sequence Number=SeqID_59665
atgagtttctatgcaaaacagctaaacaaggaaatgtacaagggagcagtgttggctgattcagtaaattcagaggactga

SEQ ID NO: 16291 - DNA, 672 bp, Zea mays
  Peptide Sequence Number=SeqID_59666
atggaggcccaggcccacacgtcatgcaaccggcgcgccggttgctacgtgcgagcaactgcacgccacccgcaccactaccgcgcctcctcgaccgcggaactagtaccgcgactcgaggcaaccctgcgcgtgacacgacagtgccagccaggcgcatcgatcacgggccagtcggccgcgggagaaggcgcgacggtcgatgcggccaaaaatgggccggcagtaatggcggtggcaggcgggcagaagcagcggtcacgtcatcggccaagctcacgtcacctcgtgggacaacgagagaaccctctctcacggcatgaagacgacgcgcccgtgctccgttcctcgaacggcccgcgcacgcgcaacggctgccccgcgaaccactcgccccaccgcattaactccgcggcgggacaggcggcgcctctggcaggagaaggaccgggaaagggggataccccgaaaaggatccttctccgtaaaggaaacaggccccgagcctccctactgatcagaggttcaaaggctggcccctcggaggggttcaacggccgcctcagagcgcttggggttccgcgcccactactggtcagaggttcgaaggccggcccctcggaagggttcaacggccgcctcaggccactcgggctccgcgcccactactga

SEQ ID NO: 16292 - DNA, 351 bp, Zea mays
  Peptide Sequence Number=SeqID_59667
atgtccacccacgcgcccagctccctttttagagccccgccagtgccccgcgcacacccctcacctcacttcgctcgacttcaccctctctcgcgctctgcccacgccgccagccaccgccggagactcgcgcccgcgttcccggccatccagctcaccggagaccgccccaagcctccccgagctccactccaggtgagacacccgttcccgtgcccaatttcccttattgcgccctgtgttcgtccaatttcgccttcaccggtggccgaccgcgacgacaacgagcagcccgaggttcctgagtgtgttgttggagacctccctgagcaacaacctggtgaaggctag

SEQ ID NO: 16293 - DNA, 237 bp, Zea mays
  Peptide Sequence Number=SeqID_59668
atggctcaccggagttgctccggcctgcccaaggccttcccaccgccgttctcccttctctgcccgtggattcatggcctcttcctcgccattgagttcgccgtggcgccctctccctctctgcccaactccagcgaccccggagccaccctagcttgcgcctgcctcaactccggcgacctcactaccgtggagaggagcggcgccgcttcgcgcacatctgtttccctagtctga

SEQ ID NO: 16294 - DNA, 321 bp, Zea mays
  Peptide Sequence Number=SeqID_59669
atggcaggatccaattcaagtggtcacggtggaaaccatggagatggagagccccctgtctctcgggctgaattgcatcagatggccgactcactcgtgggggccatggaaaggatgttaaatgaatgtttacccacaacaggaggtcgaaggctacatcatcataatccagaagaatttaaccatgaagaatccagagatgagaattctggtttcggccatgaattcgatccctttcgtgatggccgtagaggttatggtgatggtcgccacactaatttcgataatttgcgtggaaggtgtcatgcacacggacactga

SEQ ID NO: 16295 - DNA, 1626 bp, Zea mays
  Peptide Sequence Number=SeqID_59670
atgccatcctcttcttcttccgccaccgccacgccgccggccgccgcctcgtctgaggagacgttgagccatattgaagatatgcagcggttgggctactttggcggcggagtcgctcgtgctccggggacggaggaagtccccgagccggagggcgagttggttgttttcgaggcgttcttcgccgccggactccgcctgcctgcgcaccggaaaagggtggttgagggcggagttgcgcagttcgggtcgtgcactttcacgccgaagaccggcaagaccacgatgccagtagtggagttggtcccgtgcgcccgcaataagtggggcagttggaatgagttttggttttatgttgctgaggctactgtcgaaggccatcaagggctccctgtgtccgaaatgtgttctcactattactctgcgtatccgcctttcgaagtggcagaagaggatacagacgaaggggcccttcggtacgccgccggtcagagcagcgggcgtgatttggttgaagagtttacggcgtacggggtctggcccttggcgcacggctgggcgctgggcgaagtatgccctcgccagatgccctttcacggaggaagggaggtgcgaagtcctgccttcgcactgagtttgcggaaccgtgacccggccgccttcgtgcgtgatgcagaagacttggcggtgcgactcgtggggcgctacgtgccgaagacggaaggccagcgcagttttgatatccgtgggtcaaacgatcgcttgaacagggtctttgaattaaatcaactgccgtacgacggctaccctggtcaggacgaagcagaccgccgcgggaagaaaccggcggtggaggccggaggcgaccctgcgctggcggccgccacctcttcgaaaaagagaaaattagtgatggacaaggatcgccaagcggcggcgcggaaacgccaggcgaccgtgagggttcatgaagcccggccgaaaaggcagcggggagcatcgaaggctgaggcctccggcggaggcaagccgccattgccggcgaaggcgggtgcctccgcgcctggcaaggcgccggaggcgacggtgggcgccggaggccccaagctgtcgaaggtggtgccgtccgccagcggagtggcggaggctgcgaaggcggcccgatcgctaccgccgcccggcaaacgcgttgccgacttcggcactgagattgatgtggaggattatcttggggggttggacgagggcccgctcgctctagttgtgcctggcgcggcggtcgcgacggctgcgccagcgccgaaggcgggggtagagacccttggcgctggaggtgaggtgactgccctcgcgttggtcagagacgaggcagacgcggcgacccgccggctgaaaggagcaatggaggcgctgagtcaggtggctgacttcaccagcagtactgcgtcgggggcccttacggcgacgttgtctgccgaggtcgagagacttcggacgcaacacgcggacgctgtccgtgagaagtcggcctccgacagcaagtgccgcaagctggcggagaaggtggccgcccttgagaaggagaaggcagacctccggcgccagctgatggaggagagaaggtag

SEQ ID NO: 16296 - DNA, 387 bp, Zea mays
  Peptide Sequence Number=SeqID_59671
gcgaccgtgtaaggttcatgagcccgccgaaaaggcagcggggagcatcgaaagctgaggcctccggcggaggcaagccgccattgccagcgaagccggggttggacgagggcccgctcgctctagttgtgcctggcgcggcggtcacgacggctgcgccagcgccgaaggcgggggtagagacccttggcgctggaggcgaggtgactgccctcgcgttggtcagagacgaggcggaggcggcgacccgccggctgaaaggagcaatggaggcgctgagtcaggtggctgacttcaccagccgtactgcgtcgggggcccttacggcgacgttgtctgccgaggtcgagagactcggacgcaacacgcggacgctgtccgtgagaa

SEQ ID NO: 16297 - DNA, 362 bp, Zea mays
  Peptide Sequence Number=SeqID_59672
atggaaggtgtgacctctgcacccaactctccagggaaggcgcggtctactctctatggcctcccgcaatcaacggtctcttgccccaccgcgatgaccttgccctggctccccatggaaggccgtggaaggtgcgaccgagccccagctcaacatggaaggcgcgatccactctcctcgccccatcatcggcgtccactatccattgaagagtcccgccttcccagtcccccttccccacagatggccggcgaacccatcgccaccgtgccatcggggcctgaatccgtggccgaggccgaccgcctcctggcactggccgagtcggagctctcacgggcaggcacgctcttcgcgcccag

SEQ ID NO: 16298 - DNA, 888 bp, Zea mays
  Peptide Sequence Number=SeqID_59673
atggattcagctgactccatagccgacaaggcaattggaagaatgcaagagattgcggacaagatattttcggtagcgagggaaacaatccgtcctggacgcgggttgacctcatttgacgctaccaaacttcgtgtagcattggaggatatagcttgcatgctggagcaagactctctggtgttgcaagagaatttggacatcgtgaacaacatggacaagtatggcaaagtcattgcaaagtgggatagtagagcaacaaaaatttacacaaaaatttgtgtagaagagttttacattagtattggccatctcaaagtaggaaataccatgttggtgcaggcaatgccagggtgtattatgttcaaaacagcccccctagagaatgaggacgagctaaagattatgttcggacccattgtgtgcacaaatgaaagaacccttgttcctggcgtcgaggatgcaaattcatcacctgatgatcatgtcgaagccactttaggtggaggtgaaaacagcacacctgacccatgctcaaatgccactgggaagcgtaaggttcgtcatgattctcctaaaccaaagaaggtaaaagataccagagaagagtacatgaaacgcctagtggcggcttttgagtcccgttcgatgaacactaacaagtccatcacctctgctgagaccgaccctgttcgtgtcgaggttattgcccaattgcaacaagtcattgatgatggttcaccagaaggcagcgacttacatttttttgcgactcatctgttgattgagaaaaagtatagagatgtatttgcatcactgaagacaaaagaagggaggaacgcttggctgcgccgtgctttcgagatggaacttaaaaagtccacttag

SEQ ID NO: 16299 - DNA, 372 bp, Zea mays
  Peptide Sequence Number=SeqID_59674
atggatttaaggatatctgagggttctggtactaataccaccttggatgaccaatcgatacaatcgccgaccagaagggcaaaggtttgggagtattttctacaagagttagttgaggttgatggagtgatgaaggctgtttgcaaatactgtggggcgaagctgacaagtaaaaggaattcaggaacaaatagccttagaaaccatgttgcggatacatgtcctaaaattccagttgaggaccgcaagcaattcattgctacaatgagaaaaaggacaggagaaggttcatttgtgtttgaccctcgaaagactcgtgagtgcatggttaagtggtgcatcagtgccgaggtcgcattcaacaaagtttga

SEQ ID NO: 16300 - DNA, 252 bp, Zea mays
  Peptide Sequence Number=SeqID_59675
atgacggtggagaagggccacgggtcgtgcggtggaacaatggtcacccggtcggccatcaccaaacagaagaggtggcggcggaaaggactaggtgaccggtttcctttctctggctattccctcgggttgcgaaaacctaagagggaggcaagtagcaagagtaaaaaaccgtcaccgggatcgggaaaggggatacctcgaaagggatccttctccgtgaaggaaacaggccccgagcccccctactga

SEQ ID NO: 16301 - DNA, 819 bp, Zea mays
  Peptide Sequence Number=SeqID_59676
atgtcttcttcctccctcatgcgtcgtgtctttccatcttccaagcccccggatggggggtacccgccgtctttccgcctcctcgttggaggaacacaactccgtgggagttggtacctttcagccatcgttcggcttcaaggattttcatcagccggcccggccgcacccccacgccggcggtcacccaagatggtgaccaccagttcctgggtggggaagagcaagccgggctgcgatcttggtcccaccctcagcttcaaggatgttcatcatcctcgctggggtgggggccaggctgagccggcgctctacctcccgcgcgggtctgcgggtcaccctctcccgcggcgttcgagggaggaggcgctcactggccctgcgggtggcgcagacttagacaacgtggggctgatcgacggcgggcgtcgtcacctccagcgtgtcggagtcgtcggctgggctcccggcggcccctccggctgccgcgccgtgtgcacgggagtgccacccacgatgccgcgcgctgctagggcggcgttcgtgttctggggtggccctgcttttgcactgggatggcgccctcgcgcagaggccggtgccccactcgtctgggaggatttgagtggggatctgccggggggctggtggcccccgccatcagcgccgaggcggaggcggctcgagaagtccccatcgccgacggggtcaccgccaccatccgcgccccgggcctccggttctccgtacttgtcctcgcccctcgagcgtcggcgtgggcgagggcaagattgcagcagcgcctaccctgaggcctga

SEQ ID NO: 16302 - DNA, 228 bp, Zea mays
  Peptide Sequence Number=SeqID_59677
atggccggtacgcacggcagggatgagcggggagcgtgccatgaccaggggtactcgtggagaagaattagaaacccgagggcatttctgcaatctgtcaaacgtgaagaagaggtagaagtccctgaagacaagacaccaccaccttcggaatcccaggctgggaatagtttctacttcgatatctatggatccgaacccgaatcacatgtgataggagttgcttga

SEQ ID NO: 16303 - DNA, 2319 bp, Zea mays
  Peptide Sequence Number=SeqID_59678
atgaccgagctgagggactcctacgcctccgggatacggatacctcactcatcaccttctgcgataaaaccctacgaacgagtaagagtacacgtaagcggcaaggccgacttagccgagggactcctacgcctccgggatacagatacctcactcatcaccttccgtgaaaacagcaccctcggcgtcaactacaccttcggcaaagcccgaccgagcctcggacggcaacgcggtcagaggatctccactccgaaggacgacatcagcaccacgcccgagccatcgccgccagggtcttctccaggaatctggctcgagcagacggctcggccggccaccccgaagcctcagctagctgtcccccggggacatcagcccggctcgtggcctcggcaactcaactccggcgctggccccgacagccacaacgaacaaacatcggcactcaaggtgccattacaaacggaactccggttccgcctccgcgggtatgaacaacctcaacaccagggagcccgcggggcgacaagctccgggcgactcgccagcgacctctgcagtagcagccatggcggcgctgacgacctcgacggtggggaagctttctccagctgccaccacgtcagcaccgacggcggcgtccgcctctccaccaacgccgcactagcgggcgcgggcagcaacagttcgccttccccggcatggctggaggacgcctcctccgtagagccggaggatggtctccaccaccagaagctggaagaggaggcggctagccgacccgtgcgggaggtagagccccggctcacctcactctccgccccagcaaggatgatgaagatccttgaagctgagggcgggaccaagatcgcagcccggcttgcttctccccacccaggagctggtgaccagcgggtgaaagggcggaccgccatgcaggcggcatgcaaccgcaccaaacgggcgcaccctttcgacttcgacgcgtccggcatggaggcccagacccacacgtcatataaccgacgcgccggttgctacgtgcaagaaactgcaccgccactcgcaccactatcgcgcctcctcgactgcggaaccagtaccgcgactcgaggcaaccctgcgcatgacccaacagtgccaaccaggcacatcggtcacgggccagtcaaccgcgggagaaggcgcgacggtcgatacggccagaaatgggccggcagtaatggcggtggcaggcgagcgaaagcagcggacaggcggcacctttggcaggagaagcgggcgatgcttcacctccgccataatgaccgcgtcaaaaaagggaccgggaaaggggatacctcgaaagggatccttctccgcaaaggaaacgggccccgagcccccctattgatcagaggttcgaaggctggcccctcggaggggttcaacagccgcctcagagcgcttgggttccgcgcccactactggtcagaggttcgaaggccggcccctcggaagggttcaacggccgcctcaggccactcgggctccgcgcccactactgatcaggggttcgcaggctggccctcgaaggccaagtccggcctcaggcgccataggaaactctgcatcgcccgaccccagggctcggactcgggctcagccccggaagacgacgaactccgcattgcccgaccccagggctcggactcgggctcagccccggaagacgacgaactccgcatcgcccgatcccagggctcggactcgggctcagccccggaagacgacgaactccgcctcgcccgatcccagggctcggactcgggctcagtcccggaagacgacgaactccgcctcgcccgaccccagggctcggactcgggctcggccccggaaaacgacaaactccgcctcacccgaccccagggctcggactcagccctggcctcagccgacggtctccgcctcgcccgacccaggggctcggactcgacctcggcctcagaagacagattcgacctcgacctcggaggagcctccacctcgcccaacccagggcacggaccgaccacgtcacatgaggcgccatcattaccctaccccaagctaactcaggctaacggggaacaaagaccggcgtcccatctggctcgccccggccttcgcctggtgccgaatcaagcgaagggtgtccctgcccgtttcgtctctgtcagaccagcgattgcagcaaaagcatcgagcgaagggtggcgtctttgccttcgccccaacatttgccctccgagggaccagttcgacaaagtcacctggtgccgaagacgtcgctag

SEQ ID NO: 16304 - DNA, 966 bp, Zea mays
  Peptide Sequence Number=SeqID_59679
atgaacgcgctctcccgcgaagggtgccggcacttcgaggtcttcgaccaagccgatgaagattttgagcgagatatctacagggttgaggaccccatagtgaaggactccgccggagccatctacgaccggatgtggggtccgcacggtcgcgaggtggtcagggagcgggccgagacggcgagggctcaggcggcgcgtggcgagagggtggatgacttcagggcgttgaacagcgcgctgcctgacccggagccgatcccggcggaggccgtgtccggggccgccctggagccgcccccggagaccgtggaaggcgctccggatgcccccgcagccgctgcggccgccggagaccttccccttgagaccgccgaaggcgcgccagatgcctccgcagccgctgcgccgagtgctgaggatcctgcgacggtggcggcggaggcgacagcggaggcaacggcggaggctcctgcaacggctgggtcttcgcaggttcaagattttgggcctgcgcacgcaaccgccactactaattttttggcggcttcgaccgtggatggtggtaataattgtgatggttctgcatctgagttttctgattttgctgactctgggagctcggttgagtggactgaggagtcgtcggaggaggacttggactactttgcggccttggacgtggctgtggcggaggcttcaccgcacgctgcggacgcggaagatgtgcctggtcctagcaccgggcgccggcgacgaagggcggttgcgaagcgcagagtgagtgaagcggaggtgggtcggcttcgtgtgagtagggctggccggcaggacctgttgtctttgccagccgccgcaagtactggtgaaggggaattacgaagtctttttgcgggtgaggagcttaggataatgttatttaattatagggagatgggaatcattcctaaggttgagccgatgtag

SEQ ID NO: 16305 - DNA, 1086 bp, Zea mays
  Peptide Sequence Number=SeqID_59680
atggaaatcgccgcccacaaatcgccgcatttctcccaccagtcgcacccctaccgcacgggcatatcccgcatcttgcagtcgcgccccggtagatccgcatccaccccatccccgcaccgcatctcacagtcgcgcctcgtccccatcctcactccattctcgtgcgttgtcgatcgatgctaccccaccatccccatcccattcgcttgcgctagcggccgacgcgtcgaccgtggccctcgcccccgtgtcggcgctcaatctccaggccaagtgccgagcagtagaagggcaagatctacatcctcatgccagtcatggccagttgcccaccccggcgcctacgctcgagaagccacccgcccacgcgtggtggagttcagcggtctcatgaaatcggagttgcagcacgttagggaggtcgtacgctggggcgccgactacctgctcaaggccatggcgcgcctggacacccaggatcatcggaccgatgaaatgaaaagcgtgggcaagccgatgaacccccatccttctcggcgtggtcccaggaatactacagccaggtgtctacttaaggatgatggcaaaggtgtcggagagccacttgatgaagtggtctgtgtaagattgccatgggctcacggagtttacaacctttttataagagttctctcaagctatcctacggatgtgagtgaatcttggacagaaaatgcagattacataatggtcccagccaaagagcaagttaatgcactatcaaaggaattgtttgcgctttcaagtgtcacagccaaagggcaagttgatgcactatcaaaggaattgtttgcgctttcaactgtcacaggtgttggggcgaaggcaaagacgccacccttcgctcgatgccttcgctgcaatcgctggtctgacagagatgaaacgggcagggacacccttcgcttgattcggcaccaggcgaaggcctgcgacggcgtcatcccacagtgcagcctcgcccagctcagaggcccacgtacctataaataccgccgcacagtgctcgtgagaggccagattaatagagctattgccatctag

SEQ ID NO: 16306 - DNA, 254 bp, Zea mays
  Peptide Sequence Number=SeqID_59681
acgccgcgcagaaatcggaggccgccgccatcatcggccccaacctcgcgaacgaacacggcgcagggagcagagatcggctgcgtgaaatgtggaggccgcggagcacaggggagcgcgagattgggggattatggcggctgcgggatgctatcgcgaccaagattctggaggtggcggccgcgggatggagaggctatcgcgaccgagatttccagaggcagaacacagccgcatgtggacgcctacaatga

SEQ ID NO: 16307 - DNA, 297 bp, Zea mays
  Peptide Sequence Number=SeqID_59682
atgacgatggaaaccacatacctgtggggctccttcaccagagtcttcttcgtgctctgccacaccacctatttggagtttgttgccttccacttcatcgccttctcgcctccacggcgcgtcgccggcttagtcccagcaagtggcgacaatctacgagaaaagaaaggtgcaagatcagggaaacttgggcatgaagaattagcggcctccatcaagcagcagatgcgttgcaatctacatgaaagtcttggctattacttaagaatgacatctatactttctatccaagtttga

SEQ ID NO: 16308 - DNA, 285 bp, Zea mays
  Peptide Sequence Number=SeqID_59683
atgggcacccaccacctcgccgtggaaaggccatcccgagcgtccaccggccaaattgaccccgcctccataatcccctacctctgctcatgccttaccacaattccgtcgacgcagaaccgggctaccagcgaagaaccgccgcggaacttcaccggcgaccggttctcccccgccgcggaccgccttccccccgacaccgttaccccccctcctccctctaacgcgtgggcccgcgccaacggcgccgtccccgcgctgtttccctctccgtgggccggctga

SEQ ID NO: 16309 - DNA, 654 bp, Zea mays
  Peptide Sequence Number=SeqID_59684
atgcagagttcgtcgtcttccggggctgagcccgagttcgagccctggggtcgggcgaagcggagttcgtcgtcttccggggctgagctcgagtccgagccctggggtcgggcgaagcggagtttcctatggcgcctgaggccggacttggctgctgtcagcctcactctgttgagtggcacggcagtcggagcggcgctgtcctcttgtcaggcctgtcagtggagcggcgaagccacctttgcattaaatgcccctgcgattcggtcggctggcgtggcgacttggccaaggttgcttcttggtgaagactgggcctcgggcgagccgaagctttgtgctgatgggggttaccagctgagatttaggagtcttgagggggaccagcctttctcggttgcgttttgttccggtgggtgcgcgcgagcgcacccgccgggtgtagcccccgaggcctcggaggagtggtttgactcctttgagggcgagaggacggtcaaggacatactcgacttttttacatacgcccctgcgtcgcctttccgcaaggaggagggggaaagcaccatgttgcccttggagggcgccgaacatggtgtctccagcgagctgctgacgggtaatccgagtggacgcccgtgccccatttgttag

SEQ ID NO: 16310 - DNA, 627 bp, Zea mays
  Peptide Sequence Number=SeqID_59685
atggctgaggaccccccggatggggaatacccgcaatccttccgtcttgtcgtcggaggaacgcaacttcgtaggagttggtacctttcagccatcgttcggcttcaaggattttcatcaggcggcccgactgcatcccctcgccggtggtcacccaagacggtgaccaccagcccctgggtggggagaagcaagccgggctgcgatcttggtcccgccctcagcttcaaggatgttcatcatcctggctggggcgggggccgggctgagccggagctctacctcccgcacgggttcgtgggtcagcctctccttcagcattcaagggagagggcgctcactggccctgcgagaggggcgaacttcgacaacgcggggttggccgacggcgggcgtcgtcagcttcagcgcgttgggctcgccggcttggctcccggtgccccctcctgccgcaagggcggttgtcgcgccgcgcgcacgagaggaccgcccaagtcgtcgcgcgctgctagggcggcgttcgtgttctggggctgtcctgcctttgctccggtacggtgcctccgcgcggaggtcggtgctccgctcgtccgggaggatccgagtggggatctgccggtgggctga

SEQ ID NO: 16311 - DNA, 417 bp, Zea mays
  Peptide Sequence Number=SeqID_59686
atgggcaagaacaacaaacgcaagcgcgagccaactcctccatcagaggactttggcgactcagaatactcagaggaggagttctcctctgagtccgaggggtctccagctcccgtctctcccccagcgtcgtccgatgactcggacgactctcaggggattgccgcggaggtgtggacttacatccgggccgtcgagcgctccgggctcgaaggctcaaatgagtcggagtactcctcggacgaggaggactcgcccgaggagggcggcgaaggtgacgacgacgacgacggcggcggcaggggcggcaacggcggcagcaggggcgacaacggcggcagcaggggcagcgacggcggcagcatgggtagcggcggcggtggcagcagcaagggcagcaacaaggccagtggctga

SEQ ID NO: 16312 - DNA, 927 bp, Zea mays
  Peptide Sequence Number=SeqID_59687
atggtcggtctgagccctaggttgggcgaggtggaggctcctccgaggtcgaggtcgagtctgtcttccgaggccgaggtcgagtccgagcccctgggtcgggcgaggcggagaccgtcggctgaggccagggctgagttcgagccctggggtcgggcgaagcggagttcgtcgtcttccggggctgagcccgagtccgagccctggggacgggcgaagcggagttcgtcgtcttccggggctgagcccgagtccgagccctggggtcgggcgatgcggagttcgccgtcttccggggctgagcccgagtccgagccctggggtcgggcgatgcggagtgcgtcgtcttccggggctgagcccgagtccgagccctggggtcgggcgaagtggagttcgtcatcttccggggctaagcccgagtccgagccctggggtcgggcgaagcggagtttcctatggcgcctgaggctggacttggctgctgccacctttgcattaaatgcccctgcgattcggtcggctggcgtggcgacttggccaaggttgcttcttggtgaagactgggcctcgggcgagccgaagctttgtgctgatgggggttaccagctgagatttaggagtcttgagggtacccctaattatggtccccgacagaagaaatggaacctgaacttcgaccttactacgagaggaagaagaatgagctcggggacggcggcgcttgggctcagggacggcggcgcactcggcgctcgggctcggggatggcggcgctcgggctcggggacagggacggcggcgctcgggctcaggctcgggctcagggacggggacgacggcagcctggcggcgcaactgtgtcagctcgggcgggacgagttagggttcctgcaggaaccaacagtccttttatattataaataa

SEQ ID NO: 16313 - DNA, 1782 bp, Zea mays
  Peptide Sequence Number=SeqID_59688
atgtccatgccacaatccttcctcctcctcccctcctttttacccccacctcccttagttcgcctcgcctcgcggccgccatcgtcgccatccctgaccgccctcagattccaccgcgtcgacgccaagctttccccgccactcctcgcggcatcccacagtcctcctggcggcttccgcggatactgtgattctggcggcagcgatggaggaagcggaggtgatggcgggcgaggaatggattctcctggccctggggacgggtggtggtgggagcggtggctccaggccctccacccggagttcttcctcctgttcctgctcctccagtccggcgccgcatccgcgctcgctgaggccctcagcacttccggtgatgacgcgggggacgtatgggaggtgaggggcggcaagcgcactcgcctcatgccggacccaacctggacctcctatctcattgctggggacgacggaacaaagcgggaggacggggatgaaaaggttggaagcatctctaaggacctggccgccctacggaggcagctggggcggtcgtggcggcggtacgccgaagttgctgttcatctgttactccctgacggataccctcatagtgtcagcagcgactaccttaactactcgctctggcgcggcgtacagggtgtggcgagccagatcagcggggtgctttccacacaggctctgctctatgcggttgggttagggaaaggagcgatacccactgctgctgcggtgaattgggtgctgaaagatggcctcgggtaccttagcaagatcatgttgtccaaattcggacgccattttgatgttaaccccaaagggtggcgactatttgctgattttctggagaatatggcttatgggctggagattctgactccagtgttccctcacctgtttgttccaattggggcggctgctggtgctggccgctcagcagcttctttgatacagtctgccaccagaagttgcttttacgctggatttgcagtacaaagaaactttgctgaggttattgcaaagggtgaagcgcaaggaatggttagcaaatttgttggcatagggcttggcattgcattggctaatcacattggctcatctgtaccattagctcttatttcgtttgctggaattactgcagttcacatgtattgcaacctcaagtcatatcaatcgattcagctgagaacactgaatccttaccgcgcaagcttggtgtttagtgaatatttgttaagtggacaagttccatcggtcaaagaagttaatgatgaagaacctcttttcttcaatttgtcacttggtgcttcacgtcaaagtaagattttgtcagcggaagcaaaagatgctgcagatagaatatgccggcggttacaaatgggttctaagcttagtgagataattgagagtaaagaagatgcttgtgcattgtttgatctttacaaaaatgagcaatatctgcttatggattacaaaggaaaattttgtattgtacttaaagagggatcttctcccgaagacatgctcaaatctttgttccatgttaactatctatattggttggaaaggtatatgggtttcaaaccaagtaatgttgcttcagaatgtagacctggtggaaggcttgaagtatccctggattatgcgcagagggaattcagccatgtcaaacatgatggttctgatggtggctgggttatggatggtctgattgcaaggcccttgcccgttagaatacgaataggagatggtacttcttag

SEQ ID NO: 16314 - DNA, 378 bp, Zea mays
  Peptide Sequence Number=SeqID_59689
atggggcaggggcaacacgcgggggtaggcgcaaatgggggaccaagtggagggaggcgaggatggaagtggaaccgccccatggtcggccaagcagggaaggggggttcgccgctggcaaggggcatgggcgccgcccacacgtgcccaggggagtcgctgccacacccgacaagggaaggccgcgcccggcctggggacgagggccagccccgcctggcctactcgttgctctgcagcaggggcaacgggggtgctcggccagggagcccacccggcgctgcacacgaagggtcgcgcccggggttctcaagaggaggggcagccgccacgaccagagcttggccgacccgggggctagccggtccgattcgatag

SEQ ID NO: 16315 - DNA, 819 bp, Zea mays
  Peptide Sequence Number=SeqID_59690
atgaatttctcctcctatttcttctcttcctcctcgtcatcctccgacaagaagtcgtcgtcgtcgtcatccaagcgccggcagcaggcggcgcagccgcagccggacgccaacacgacgcggtacctgggcgtgcggcgccggccgtggggccggtacgcggcggagatccgagacccggccacaaaggagcggcactggctgggaaccttcgacacagccgaggaggcggccgtggcctacgaccgcgccgcgcgctccctccgcggcgcccgcgcgcgcaccaacttcgcctacccggacctcccgccgggctcctccgtcaccccctacctctccccggacctcacctcgggcgacaacgccacgcagctcctccagcccttctacgccgaccccgccgcatcccttgctgcggcggcggcccctgccgcgacgaacggcgcggcgggctacggcgccgccggcgactacgcctcctacggctatagcgccgaggacatgtccgctctcatggaagacctcgccatacccgacgacctgactgccgactacggcgctgaagacgccggcggcggctccgtgaacatgccctccatgtacagcggcggcggcggcgccaatgccagctccggtagcgggtggtgcgacgcgtcggagttcagcgcgtacggtgcgccgacgaccgccgcctcgcacggggtgtacttcgaggaagggtacgtgcatagcccgctcttctcgccgatgccggccgtcgacgacgcctccgccgacggcttccagctcggcggctcctcctcgtcctactactactga

SEQ ID NO: 16316 - DNA, 399 bp, Zea mays
  Peptide Sequence Number=SeqID_59691
atgagaaggccacctgcagtgatatgtgatagaatggtattgaaagggtatcagttgcaaagggaatctcaattaaaaggattgacgagcttaagtttctttgtgaaccaggttttctcggcttttgggtattttcataaaatagccacctttgaaaaggttgcaggttttcagtggaaatttgctcatgttgcattcagtaagccagaatacctccaagattcagatattgtaatgaacagattccatgtgagatacgttttccttttggcgaaagaatcctttcgcaagaacattcattgtaacattgaaggttgggaacaacaccttggattagagcatacagccactaccccaaaaatgtcctacttaggcaacaaccagatgaacaggatatga

SEQ ID NO: 16317 - DNA, 255 bp, Zea mays
  Peptide Sequence Number=SeqID_59692
atgggcagcagcgtgcagtgggtgggtgcttgcttcgtcgtgggctcgtggcgggtccagcagcagctgcaggtgcaagcaaccgccgccattactagctatgactacgagtctacgatgacgatcgcgagcaagggtgcatgcatgcaggggccggggatgctcatgtctgctgggactgctgggagcagcgtccagacacggatcgttttccggacaagcttcagtagggctccatgggctcagaagctgtag

SEQ ID NO: 16318 - DNA, 780 bp, Zea mays
  Peptide Sequence Number=SeqID_59693
atgaagcgatcgccgcagcatccaatccaaacgcacatccggaatcgatcgcagccagacgatggcgccgacgacgacgctcatcgtcaccgtgaacctggaatgctgccgctgcagcagcaagatccagaagatcctctgcggcattcagcaaggcacctcaggctccagactgtgaggttcttctgctcgatcgatcgatggacttgttcatatgcatgccatgacaatatgacatgttgtactacaacagaaggagagttcaccatcgagaagatcgtgtacgagaaggacaaggtgttggtcacaggcccattcgacgccgacaagctgtcctgcaagctgtggtgcaaggcgggaaggatcatcaaggacatccaggtcgccaaaccaaaagacgaaaagcctaaaaacccttcatgcaagctggtatacccttattacccttgctaccctttccagctgtgcccgcagcagcagcccggtgcatggccctgcagcggcggctgcccacatcctcactgtgggtgccagtccaagccgccgccgccgccggttccaccaccacctccacctccacctccgccgcccatgccgccggcgtgccagtgctccacgtggccgtcgtgctactgcggcggctacccgccgcccatgccgccgtcgtgccagtgctccacgtggccgtcgtgctactgcggcggctacccgccgcccatgccctacccgatgatcgtctgcgatgacagcccgccctatggcgcctgcaccgtgatgtaa

SEQ ID NO: 16319 - DNA, 456 bp, Zea mays
  Peptide Sequence Number=SeqID_59694
atgggcaagagcaagaaaggtggtggttcttcgcatcactccggcgacaaacgcaagcgcgagccgactcctccctcagaggacttcggcgactcagagtactcggaggaggagttctcctccgagtccgagggctctccggctcctgcctctccccaggcgtcgtctgatgattcagacgactcccaggggatcgccacggaggtatggacttacatccgggtcgtcgagcgcgccgggctcgagggctcggatgagtcggagtactcctcggacgaggagaattcctctgacccgtccgaggagggcagcggcggcaacggcggtgacggcgacgacgacggaggcgacggtgacggcgacagcgacagcggcaagggcggtgacggcagcggcaagggtggtagcggcgacggcggcggcagcagcaagggcagcaacaaggccagtggctag

SEQ ID NO: 16320 - DNA, 189 bp, Zea mays
  Peptide Sequence Number=SeqID_59695
atgggggtcctcttcggccttctcttcaacaccaaatatgggtacaccgagtctgctagggaggtgctggaggcgtgccaggatatggatataacttgttcatctgtcgaccattggcgcgtgagagccgttgctccgctggctcaacggacagtccggtggcacaccggacagtccggtgaattatag

SEQ ID NO: 16321 - DNA, 720 bp, Zea mays
  Peptide Sequence Number=SeqID_59696
atgtcctctccccaccttatgcgtcgcgtcttttcaccttccaagcccccggatggggggaacccgccgtcttttcgcctcattgttggaggaacgcaactccgcgggagttggtacctttcagccatcgttcggcttcaaggattttcaccacacagcccggttgctcccctccgctggtggtcacccaagacggtgacctccagctcctggatggggagaggcaagccgggctgtgatcccgccctcagcatcgggggtgttcgtcatcctcgctggggcggggagcgaggcgagccggggctctacctcctgcgcgggttcatgggtcaccctctcccgcggcgttcgggggagagggcgcccactggccctgcgggcggcccggacttcgacaacgcggggctggtcgacggcgggcgtcgtcacctccagcgtgtcgggcttgtcggcttggctcccggcggcccctcctgccggagggcggctgccgcgccgtactcgcctgttgattatctgaaccgcttcaccaagcatgagtcgccccgtgtcaaggtgacgagtgagaagatggttggccgaggccccaggggtaaccggtcgagccgcctgctcgggccggattcccggagaagtccctggaccgcgtcaccgttcgaggctgggtcggacctcgctgaaggtgtcgtcgatgccgagggtgctacagcccccttctag

SEQ ID NO: 16322 - DNA, 129 bp, Zea mays
  Peptide Sequence Number=SeqID_59697
atgaccgacaggccgcttgagctactccacatggacttatttggcccgatcacttacataagcatcggcgggagaaaaatcacaaacccaagagaccttaaagggattcttgagacgggctcaaaatga

SEQ ID NO: 16323 - DNA, 399 bp, Zea mays
  Peptide Sequence Number=SeqID_59698
atggtacaaacagcagcaagaaagattgcttctgtgaaaattatacggaacaagcagactgggcactcagaaggctatggttttattgagttttcctctcgaggtgctgcagaacatactctgatgaacttcaatgggcagatgatgtcgaatgttgagataacttttaagctgaactgggcttctgctagcattggtgataagcgtggagatagtggttctgatcacacaatatttgttggtgatttggctcatggtgttactgactccatgttggaagatgtgttcagagctaagtacccttcagttagaggagctaatgttgttgttgataggatgactggatggcccaaaggatatggtttcgtgcgttttggagatctgaataatgcattgtga

SEQ ID NO: 16324 - DNA, 366 bp, Zea mays
  Peptide Sequence Number=SeqID_59699
atggcgtacggcaaccgcgtcaccaccttcgaggactccgagaaggagagcgagtacgactatgtccgcaaggacatgaagcattggcccctcatagctcccctgccgtcctacgggagaggaagggacgagcctggcgcaaggtacaacaatttcattggaggatccaatctcactgacgtcatcatcacaggcaaaaatggaacgatcaacgggaaggggaaggtctggtgggacaagttccacgccaaggagctcaagttcatccgcggccacctcctcgagctcctctactctgagaacatcatcatctccaatgtcaccttcgtcaacgcgccgtactggaacctccacctaaatgattag

SEQ ID NO: 16325 - DNA, 738 bp, Zea mays
  Peptide Sequence Number=SeqID_59700
atgtcaacctgctttgctgattgtccctccccaggcccacgaaagaatgaccttacgatttattggtcccttgggcctttcgtgaggtcttttactcttctagtggacccgggggatatctgttccccacaagcccccgatctttgggttgattttgaggtaatcagcccaaagatcccaggtccagcttgcaggaccctgaacttcattgggtgcagcccccgagcttcgagtagattttggaaaataatctactcgaaggtcagcattatgtcatccatatcatgctttagaggcaagaacaacaagcgcaagcgtgagccgactcctccatccgaggacttcggtgattcggagtactcagaggaggagttctcctctgagtccgaggggtccccggctcccattcctctgcgtgagtcgtctgatgattcagacgactcccaggggcttgcggcggaggtctggacttacatccgggtcgtcgagcgctccgggctcgagggctcggatgagtcggagtactcctcggacgaggaggactcgtccgaggaggacggcggcggcgatggcgaggatgacgatgacgacgacgatgacgaaggcggtggtggcggtgacggtgacggcggcggcaggggcggcagcagcggcagcaaggatggcgacggcggcggcagcaggggcgacagcggcggcggcggcagcagcaagggcagcaacaaggccagtggctaa

SEQ ID NO: 16326 - DNA, 1605 bp, Zea mays
  Peptide Sequence Number=SeqID_59701
atggagtggcaccaaggcaaaattgttgttgactggacggatgaggaattagagcatacttcagaggcagttggatatggcaaaattattgttgactggacggatgaggaattagagcatacttcagaggcagttggatatggtgttgtgaagagttacctctgcgcgggcagttcgtcgttcgatgaccccgacgtggttgaggtgtcttcggccaccgccgcggctgcggggtgggcctccggccaccacaagaggaagcggagccaggtgatgtcaatatcgcatcctttgttcactgcgccaccattggacaagaataagcaaactgttgtatgccctatggattggccaaagcatgccaaggacatcgctggcccaagcacatatgcttcaaaatatatcgattcctgtgttgacctgaaagtgtttcaagatgaggcagtttacaactattctgatgactgtccctatgcgggatttgaagactatatgtatgatgaagatgagtttgaggttgatggttatgatgctctgcttattgaaagtgagtttaaatttggtttgtctgccaagtttgataacctccatgctccacctgttctggaggtttctttaccatggatgcagaagactgctattgatattgcaaataagaccaaacccactaaggttgtagatgataaaatcgaagaaaaatacaaggccttcaaacgatttgatactgttgatgatcatagtgatcattattattcaaagccaacgtcgagaaaggttcaggtgccatcaaaagactgggtgaaacgtatacagcatgagtggaaagtcctagagagagatttgccagatactatatttgtgagggcatatgaggatagaatggacctgcttagaggtgtcattatgggaccggctgggactccttaccatgacgggctcttcttctttgacatatactttcctcctcggtatccaaatgtcccaccgatggtgaattaccgtgctggtggtttgcggcttaatccaaacctgtatgattgcgggaaggtgtgccttagcctcctcaacacctgggacggcagcggatgtgagaagtggaatccggccaattcaactatgctgcaggtcctggtctctatccaggctttggttttgaacgcaaagccctttttcaacgagcctggctacgctatgcatgctaacacggctcacggggagaagaaatcgctggcatataacgaggacacgttcctgctatcctgcaggacgatgttgtattctcttcgaaatccaccaaagaacttcgaggatttcgttgctggccatttccgccagcatgggcgcaacatccttgtcgcttgcagagcctacctggacggtgcccaggttggatgcctatcgggcgatggagtgcaggacgttgatgaaggcgacacgagctgctcggtgaggttcaagcagtcactgaagaaactcgttgaggagctgttgacggagttcactgtgaagggcgcggactgcggcaagttcctcaccgaggagaaggcaaagaggtcgtctggagcttgctccacatggacagcggacaccacattgaggctgtaa

SEQ ID NO: 16327 - DNA, 207 bp, Zea mays
  Peptide Sequence Number=SeqID_59702
atggatgtcggcctcgcttccgcggtcaccgcgctccggacctgcaccgatgtcgcacacgtgctcgagcagtttcgcctcgtctggtgcggcaagctcgtccgggacgcccgcgccgtcgctccgtcaagggcctctgcttcgacctcttcatcattagggggtggaaacagagctttcaatgcatgctggaggtgcgcgatgtga

SEQ ID NO: 16328 - DNA, 2121 bp, Zea mays
  Peptide Sequence Number=SeqID_59703
atggccactgtgaacaactggctcgctttctccctctccccgcaggagctgccgccctcccagacgacggactccacgctcatctcggccgccaccgccgaccatgtctccggcgatgtctgcttcaacatcccccaagattggagcatgaggggatcagagctttcggcgctcgtcgcggagccgaagctggaggacttcctcggcggcatctccttctccgagcagcatcacaagtccaactgcaacttgatacccagcactagcagcacagtttgctacgcgagctcagctgctagcaccggctaccatcaccagctgtaccagcccaccagctccgcgctccacttcgcggactccgtcatggtggcctcctcggccggtgtccacgacggcggttccatgctcagcgcggccgccgctaacggtgtcgctggcgctgccagtgccaacggcggcggcatcgggctgtccatgatcaagaactggctgcggagccaaccggcgcccatgcagccgagggcggcggcggctgagggcgcgcaggggctctctttgtccatgaacatggcggggacgacccaaggcgctgctggcatgccacttctcgctggagagcgcgcacgggcgcccgagagtgtatcgacgtcagcacagggtggtgccgtcgtcgtcacggcgccgaaggaggatagcggtggcagcggtgttgccggtgctctagtagccgtgagcacggacacgggtggcagcggcggcgcgtcggctgacaacacggcaaggaagacggtggacacgttcgggcagcgcacgtcgatttaccgtggcgtgacaaggcatagatggactgggagatatgaggcacatctttgggataacagttgcagaagggaaggacaaactcgtaagggtcgtcaaggtggctatgataaagaggagaaagctgctagggcttatgatcttgctgctctgaagtactggggtgccacaacaacaacaaattttccagtgagtaactacgaaaaggagctcgaggacatgaagcacatgacaaggcaggagtttgtagcgtctctgagaaggaagagcagtggtttctccagaggtgcatccatttacaggggagtgactaggcatcaccaacatggaagatggcaagcacggattggacgagttgcagggaacaaggatctttacttgggcaccttcagcacccaggaggaggcagcggaggcgtacgacatcgcggcgatcaagttccgcggcctcaacgccgtcaccaacttcgacatgagccgctacgacgtgaagagcatcctggacagcagcgccctccccatcggcagcgccgccaagcgtctcaaggaggccgaggccgcagcgtccgcgcagcaccaccacgccggcgtggtgagctacgacgtcggccgcatcgcctcgcagctcggcgacggcggagccctagcggcggcgtacggcgcgcactaccacggcgccgcctggccgaccatcgcgttccagccgggcgccgccaccacaggcctgtaccacccgtacgcgcagcagccaatgcgcggcggcgggtggtgcaagcaggagcaggaccacgcggtgatcgcggccgcgcacagcctgcaggacctccaccacttgaacctgggcgcggccggcgcgcacgactttttctcggcagggcagcaggccgccgccgcagctgcgatgcacggcctggctagcatcgacagtgcgtcgctcgagcacagcaccggctccaactccgtcgtctacaacggcggggtcggcgatagcaacggcgccagcgccgttggcagcggcggtggctacatgatgccgatgagcgctgccggagcaaccactacatcggcaatggtgagccacgagcagatgcatgcacgggcctacgacgaagccaagcaggctgctcagatggggtacgagagctacctggtgaacgcggagaacaatggtggcggaaggatgtctgcatgggggaccgtcgtctctgcagccgcggcggcagcagcaagcagcaacgacaacattgccgccgacgtcggccatggcggcgcgcagctcttcagtgtctggaacgacacttaa

SEQ ID NO: 16329 - DNA, 1422 bp, Zea mays
  Peptide Sequence Number=SeqID_59704
atggggggctcggagcccggttccttcgcggagaaggatccctttcgggcaactggcgtgccggttgctcgacgcgtgggcctgggttccaagctggcgtgtcagaagtcggagaagcgcgtccatctggcgcggttgcatgccgcctgcatggctgcccgccccttctgcccgttggtctgggcgaagatggggggtcgcctgggagggccttggagcgtgttggagaagactcggcccgcggcgcctgggggcgcaccgccgggtcttcccgtcttccaagcccccggatgggggatatccgccgcctttccgcctcctcgttggaggaacgcaactccatgggagttggtacctctcagccatcgttcggcttcaaggattttcatcacgcagcccggtcgcaccccttcaccggcggtcacccgagatggcgacctccagcttgatggtgggggaaagcgagccgggctgcggcctctgccccttcctcagcctcaaggattttcatcaccaaggctggggaggggagagtgccgagttggggtcggcccctgcgtgggcggtggcccgctccttcactcagtgatggggggagaagcgggcattgcccgtggcgtccggcagctgcagcgtgcctggtcttcagccgcgagtggcttcggggccccttgcggcgtcggcgtctgccacggcagccggaagaggttcttctgccggcgcggcggccgggaccggccacgggctgacctccaacttctacggccttctgcccgtccttgcctcacgagttttggcacgggcgggggcctcctgacagcggcatccaccctgaggtcagcgttgccgctgttcggccccccggagcagaagtcgccgtcgtcgccactgctggagcaggctgggggtagcgacatcagtatgaacagaggcggagttgactcgagaatggggaacctggttggccggagcctagccgtattgcccgtcagcggagccgacgcccaagtcggtcagtcgaggcctcggatcgggctagcgcccttggaagccggttgcccgaggcctcaggggagcccctggacctcggcgctgcccgaggctgggtcgggctttgctgtagacgtcgtcgatgccgagggtgctacggctcccttcggcgtgaagacccgagcctgcaggatcagatcatcttgtagcgtgcgctttctgcggccgccgaggccagaagaacacgccctcgccgcgcttgcgaagctgcgtcttttttcctcctgcttcgagcatctggactctgtcggtaacagggacaaagggacgagtgaggtatccgtatcccggaggcgtaggagtccctcggctcggtcagccttggctgcttacgtgtacctcgtcgtttccaggatccgctttccgaagtag

SEQ ID NO: 16330 - DNA, 345 bp, Zea mays
  Peptide Sequence Number=SeqID_59705
atggggacagtggccaggacaagctccagcgtcgcagccacagtggactggtgttgggtggacgcaggcacctccaggcacttggacacctccaccactccaaggatcgcagccagtcccgggatgggtgccaccggtcttccagccaccggcgggctctcaaccatttcaagcgtggatggcaccgccaccgacgggggttcagcgtcacatgctcagggagctcagggatcggagggtgctgtcaacgtccaagacttcctcgtccatggttctggagggagtggccaccttcctggtggcggaggagggagtggccaaaactcacatagcccgccggagtga

SEQ ID NO: 16331 - DNA, 354 bp, Zea mays
  Peptide Sequence Number=SeqID_59706
atgggcacggcggcgcactcggcgctcgggctcggcggcgctcgggctcggggacggggacgacgacgctcggagatggagacggcgacgctcggagatggagacggcgacgctcggagatggagacggcgacgctcggagatggagacggcgacgctcgggctcggagatggggacggggacggcggagttgggctcggggacggcgcggtctggcgggcgcccagctcggagacggtggcgcttgggctcgggctcggcgacggcgtggcgggcgctcacggctcggagacggggacgggaacgacggcgcagcagcctggcggcgtagtatcagctccgggcgaaacctaa

SEQ ID NO: 16332 - DNA, 432 bp, Zea mays
  Peptide Sequence Number=SeqID_59707
atggagctaggagggtggtgcagcaattctctggccacaaacagcgccccaggcgcagccctagacgccctggatgtttgcgcgggagtgtgctaccgcgcagagtgtacagtagcagctgcaccagaggtcgtgcggcccagaggccttacgttaggctccgccctcttgcttacgtcacgggcagtcggccacgtggcagcatcgggtctccgcctgagcggggagcaggagcaatcccgggaccctgctgagagtggcccggaccccacacagagaggcccgggactcgtcccgggggtccggtttgtacccgcggaggtcctggactctgcccggaggtctggggcccgacactttcccatggggtccggacccaccgttgatactttggaggatattgtcttctctggccacgtggcggccctatag

SEQ ID NO: 16333 - DNA, 1676 bp, Zea mays
  Peptide Sequence Number=SeqID_59708
atggaggcacggcagcacacggtgctcgacggcctagccgctgagacggagccggagctcgaccagttcatggaggcgtaccacgaggtgctggtgaagctcagggaggagctgacgaggctgctgcaggaggcaatgaagttcatgcagaagatggagctgcagctcagtctgctttccatctctggaaggtcgctgcacaacaccctttcgtccgaacgctggaggaagaagcgtcgcccccacgaacatctcgcagaggtgggagaagatggccgcctgaaggatggagtggagcgtaaggtgctgatgttggaggccgagctcctccagcagcagcaggacgaaaggccagaccggcagcaccaacccacaggagaggcaggagacgaagagcacgaactccccggcggcgagaccgccgaggagagaggcgccgacgcggatccttccggcgaacaccggcgcgccccatccgagcaggttgcgcaccaagttgagtgccacctcggactggaagcgcccgggatggactggcaaagccatggcaactacggcggcggaaagcagaggagcgcaaatgcaatggggaaatctcgctcgccgtgcactgaagcagcccaacctatgacacggggggccgggcccacaagtcatacagatggtgggcgggcctccgagtgccgaactgccacgaggagtgtggagaagacgaaccgccgcgcgcgcccgaaaagcgaaccgtcgcccgcggtagtgtgccccttcatctccgctaaaaacaacggcccaatcgctgacacggggggcctaggcccacgagtcatactccttgggtctcggttcctgggtgcggagaaggcgaaccgtcgcgcgcgcccgaaaagcgaaccgccgcccgcggtagtgtgcctcttcatctccgtcgcaagaaacaagccgcccagtctctggcacgggggcccaggcccacgagtcatactccttggggcggcggctcctggttgcggagaaggcgaaccaccactcacgccagcactgcgccttctcggggccgtcgcagaagacatagaagacgtggcagttagcgtgaccgaaggcggactggcagtgattatgtcagcaagcgcacggaagcggcgcgccaatcgccagtcaagctttggccccacctgcaggctcgtatcctcccctgagggccaccacgtggcgagagaagacaatatcctccaaagtattaatggtgggtccggaccccgtgggaaagtgtcggacccctgcatatacggaccagacctccggacagggtccaggacctccgcgggtacaaactggacccccgggacgggtctcgaacctctctgtgtggagttcgagccactatcagcagggtctcgggattctgggacaaagaatacccaggccttaatcaaggccaggtgggggtccggagccgacacgtgtccggaccataccgaatacgctcctgctccccgctcaggcggagacccaatgctgccacgtggccgactacccgtgacgcaatgtgccgcctcagcattaaatgagctctgtccactccactggcagacgatgcggtacgcccatgctgtcgcatgcgctgcactcatcatgacacgcgcgtaccaaggaagttgcggcgagatatcaacatt

SEQ ID NO: 16334 - DNA, 198 bp, Zea mays
  Peptide Sequence Number=SeqID_59709
atggctcacggcaccctcgcgcgaccagcgcggctcgagcagccccggcacagccactcgcgcccttgcgcgtcgcgcaggacggttcgtgatgatgatgaggaggatggttatgattatgcttatagtaatggtaaagaagaaggtgtcaaggcggatctccaggagttccaggactttgatgagttcgaggattag

SEQ ID NO: 16335 - DNA, 1539 bp, Zea mays
  Peptide Sequence Number=SeqID_59710
atgaatctagaccgttcgtttcatccagggcgatccgaccgtgctccgcccccgcccccgccccctccccctccctcgtcccagccgtccctgcctttggcaaccaccccgcccccatccatcgtcgtgcaggcaccgcctcactcacccttcggcggcgtcacccacgaggccgatccaccgccaacagcccgccaccgccaccacccgcctccgcgccgtctcgccgtccccgtccccgccctcccccgtgggctcgttcggcttcgacgcactcaaggagaccttctccgtggacgtgtcggtggccggcgcgcgcccgctccgtgtcccacccgtcgcgccttcaccatcgcgtcctcgcgcctcgccgcgctctccaacgtcaccgtgtgcgtcgagctctgcagcggcaccgtcgactggggcgaggcgcccgtgctgccctccgtcaccgctggggaccagccggcggtgctcggcgctgcgggccgggcgtgcgccgtgctcgccgctgccctcgcggcgcccctcggcgccctgctacaagacgttgccggtgtgctcccgggacacaacttcgcctcagtgagggatccgcagcttctcttgtcctgcttcggcaagcctcagactaaggatgctaggataaatgctatgcgttcagctatatctgagacatttcctgagcccaatcggaggttgttgcagagaattttaaaaatgatgcacactgttgcatctcacacttctgaaaatcgaatgactgcatcggcagttgctgcctgtatggcgcctcttctgttgcgtccacttctggctggtgaatgtgagatggatgaagtatttgatatggatggtgacgattctgcgcagcttcttgctgcagcaaacgccgcaaacagtgctcaaggaattgtcgcaactctcttggaggaatatgagggcatttttcatgatgaacacctcatatgttccttgtcacctgaatctcaaattgaagatagtggtactgaagcatcaactgatgatggtaatttggaagccaagggcaatggatttcatgatgcagaaaatgatgtagatcaagaattggatgatgacaatggcgtggagcatatacttagtgggaaattgagtgagagcagtggatatgctggcagtgacctctatgactacaagaatggcaatatcatgattgatgaaaagaccaacgtgctgaccatcattatattcttttggtgtctgaaatatcagttctatgactataatgtggatacaattgtgaaatgggaataccttgaacacgggccaactaagagagggttcactatgattgtagaagaaaattcagtgttctgcatacccatgattcttctgcctcatgagcatgcggatgcaatcttgggccttaatgatgttcgggtcgtacaaccatttagtcccacaaatgatattgatccaacctcaatttatctctctcaatttgctattgacagggaaccacttctcctagcacgtttcatgagaactaagtga

SEQ ID NO: 16336 - DNA, 369 bp, Zea mays
  Peptide Sequence Number=SeqID_59711
atggaaattgtaaagactgatttgaggaataagatggggagtgactggctcaatcataggatggtctgcggtctgattcgattgttgatgcagaaacaagaagctaagtggaacaaatacaataattcttcatcgattagttccgccactggccccaagggcaccctcttccccatgtgcggcatgaacctcgccttcgaccgcgacctcatcggccccgccatgtacttcggcctcatgggcgacggccagcccattggacgctacgacgacatgtgggctggatggtcatctgcgatcacctgggtttgggcgttaagacagggttgccctacatctggcacagcaaggccagcaacccgttcgtaa

SEQ ID NO: 16337 - DNA, 276 bp, Zea mays
  Peptide Sequence Number=SeqID_59712
atgatggactgtgcttgtctggaggctcaccctgatagggaattcttggtgacagtcactgtaaaaaagattggtgataggtggtggtacaatgcatgcaaaaaatgcacccgcacagctgtggctcatggagattcctacaagtgcagcgatcaagtttgtgctaacgttggcacgcccatccaaaggttactcggcatctcttcacttcaattgcctccattctacctttgcctcccaacaactctcgctgttttgactcccactcatgtctaa

SEQ ID NO: 16338 - DNA, 522 bp, Zea mays
  Peptide Sequence Number=SeqID_59713
atggaaatcactgtccgcaatgcgacgatcctctgcagttacttctggcgaagtagctccagcagtagcattaagtttaggtgtccacctggctctggaaagggaactcagtctcctattatcaaggatgaatattgcttgtgccatttagccactggtgacatgctgagggctgctgtggcggccaagacacctctaggtatcaaagctaaagaagctatgaataggggagagcttgtttcagatgatttggttgtgggcattattgatgaagctatgaagaaaccctcatgccagaaaggtttcattcttgatggctttcctagaattgtgactcaagcacagaagcttgatgagatgttggcaaagcaaggtgccaatgttgacaaagtcctgaactttgcaattgatgatgttgtattggaagaacggattactggtcgttggatccactcagccagtggtaggacttaccactcaaaatttgcacctccaaagtctccaggagttgatgatacttag

SEQ ID NO: 16339 - DNA, 144 bp, Zea mays
  Peptide Sequence Number=SeqID_59714
atgggacttcttttatgtcaaaaaaggttttgtttaaggctctcagtaaccgacaagagattggtggctctagaagagatcgagaaagacaagattatggttgccaaagcttacaacaagaaggtcaaggctaagtcatcctaa

SEQ ID NO: 16340 - DNA, 78 bp, Zea mays
  Peptide Sequence Number=SeqID_59715
atggggaccagatcacaagaggacgacgaggagtcgtgggcgcgtcacgcgcaaggagataagggaggaggtctataa

SEQ ID NO: 16341 - DNA, 1164 bp, Zea mays
  Peptide Sequence Number=SeqID_59716
atggctgaaaggtaccaactcccacgaagttgcgttcccccaacgacaaggcggaaagactgcgggcatcccccatccgggggctcggaaggtggaaagatacgatgcataagggagcaaaaagacatggtcgcctttcaagggggtcaccctccttttaaaggcgactctccctacttgcgtccccagccgtcacgggctgagtcttctccaacacgctccaaggtcctccccttatggcgcgggggctgggtcccacgcgtcatgcaagccggcccagggcggaagaagccaaaccgccgcgcgtgtgcatgcaaccgcccagcggttacgagcattcctccgcttttcgcccagaccagcgggcgaaagggcgggcaaccatgcaggcggcatgcaaccgcgccaagtgggcgcacctctccgacttccaacgcgcccagcatggaagcccacgcccacgcgtcacgcaaccggcgcgccggtcgctacgtgcaagcaactgcaccgccactcgccccaccaccgcgcctcctcgattgcggaatcagtaccacgactcgagacgacccagcgcgcgacccagcagcaccagcctggcgcgacggtcaatgcggccaaaaatgggccggcagtaatggcggtggcaggcgggcgggagcagcggtcacgtcgtcagccaggcttgcgtcccatcctggggcagaaccgggaaagggggataacccgaaaaggatccttctccgtgaaggaaacaggctccgagcctccctactgatcagaggttcgaaggctggcccctcggaagggtttaacagccgcctcagagcgcgtgggctccacacccactactgttcagaggttcgaaggccagcccctcggaagggttcaacagccgcctcaggccactcgggctccgcgcccactactgatcagggtcgacagagccgaagtgaccacagtcacttcgccgctccactgaccggcctgacagaaggacagcgccgcctgcgccgctccgactgctgcgccactcgacagagtgaggctgacaggcagtcaggcccagcctcaggcaccataggaagctccgcttcgcccgacccagggctcggacttgggctcagccctagaagacggcgaactccgctctgcccgacctag

SEQ ID NO: 16342 - DNA, 1128 bp, Zea mays
  Peptide Sequence Number=SeqID_59717
atggccgtcgcctttaattggcactgttgggtcatgtgcagggctgcctcgagtcgcggtactggttccgcagtcgaggaggcgcgacattcggcgcaagtggcggtgcagctctttgcacgtcgtaactggtgcgccggttacatgacatgcaggcccacttcttttgcgctggtccaccggatgtggtcgaagccgaaagggcgcacagttgcggtgcggttggatgcctgtcgcgtggcagtccaccctttcgaccaccggtttctgcaaagatgggagagctcttgtaaccgcgaggcggttgcatgcctcgcgtgctgcggttcgccttcttcgcgcttcggatcagctcgtatgacgtgtgggacccagcccccgtgtcttagggggagaaccctggagtatgtcagtggagactttgcccgtgacgctaaggggtgcaacattgccttcctcttgctgtcgttggaggagcgcggcctcgtggagactggcgctcttcagccacagctcggcttcaaggattttcgtcgtgcagcccggctgcattccctcaccaatggggagagggcgctcaccggccttgcggaggaggcgaacttcggcaacgcgggaacggtcggctgcaagcgtcatcagctccagcgtgcctggctcgctggctctgtcgcggcctccgacgctgcctcctaccgcttgatccgggcgtggccgtccatccatcgcgcgaacgactgttgcgccgctggggcgtccgccattcatcggcgtggcgctggcgcgcaggtggccgctgtcgtcggtgctgaggtggtggcagccagagaaggtttctccgccgacgggaccgtcggcgccatctgcggccggacccctggctctttggctttgatggcttgtcctcgcccctcgagtggagacgtgggcgagggcctcgtcacagcagcgtctgccctgaggtcatcgctgctgctgtttagccacccgaagcgggggtcgttgtcgctgctgaaccctcgactgctctgcgatgagccggagccggaggcagtggtgttggcgcggatagaggcggagtcggctcgaaaagagacttcatcggcccgggagctggcggcttcctag

SEQ ID NO: 16343 - DNA, 564 bp, Zea mays
  Peptide Sequence Number=SeqID_59718
atgtcagatcttctttccatctcacgccgagttcggaacagacgctgcccatgtcgcgcggactccggtgattccacaaccgaacccggtggagctaccagtgatctcgggcaatggcgccaacaacgcggactctgcatcagtataaaattcagcccctctttacccctagccatcgtcatcacgggtgaaatccccccccataaaccaagctcgcgggggaactcgtcggtccgccgtggaaccacgtccataccgtcgctcgggatccgattgctcgccttggggcttcaccgcgccgcgctggtcaggcccgtggctttggccgggcaggttttcgcccagaatcgcgaattgggcggaccttccatcacggagcttcttctcgtcgcgagccgcaccgattgtgcccggattcgtgccgcgggattggtgcgtcagggcgcggatttggtttgctccgacgaggtcgcgaccgtcgatttgggcggcgctgcctcgggtggatgttgggaagaagatggccctcgggccgttggattcacaagcgacgatctggattag

SEQ ID NO: 16344 - DNA, 303 bp, Zea mays
  Peptide Sequence Number=SeqID_59719
atggggctcggtgtatgcggctcgctctgccaaggtggcaatgagactgatggttctggttatgaatatggtgctgtaaataataatctgaccaaccaaaaggaactgcttgacttatccccacataaagctagtccactacagccaaacaggatacttgctgagtatgttgatgtgtactcacccttgctctacacaccaaaccccccatccccaggttgtcagcattgcaaccactgcttaggagaagatgaagccatggaaggagacttccaggagttccaagactacgacgagttctag

SEQ ID NO: 16345 - DNA, 258 bp, Zea mays
  Peptide Sequence Number=SeqID_59720
atgggcaagaacaagaaaggtcgaggttcgtcgcaccactccagcgataagaggaagcgcgagccaagtcctccctcggaggactttggtgactccgagtactcggtggaggagttctcctccaagtctgggggaggtaatagccgagttatgctcgaccccgtcggtgtttttagaggtaacagccgagttatgactgacactgtcggcgttttagagataacagccgagttatggctgacactgtcgatgttttag

SEQ ID NO: 16346 - DNA, 393 bp, Zea mays
  Peptide Sequence Number=SeqID_59721
atgttgttcttctaccacgtggggaagacgtcgtcgattccgccgccggcgggcgggttgtcggccgccattgtcgctgtcgcgcggcgggggaaggagtatcatgtcgtagctgccgtcgagggacatgaactcaagactcccaaaacggagcaccgtcccgggctggaaaggttgctggagactgcccatctagagcttgacgggaagctattcgtcaacacacagcaggcccctacctggcgcgccaactgtcggcgtttcgaacccggagggtccctggaccgacgagtaaattgtcgccacgtgccccagcccagatgggtcggcgcgagacggagcgcgaagggggaagaagcctgtggcggaaccgcccgaattattccagcttaa

SEQ ID NO: 16347 - DNA, 144 bp, Zea mays
  Peptide Sequence Number=SeqID_59722
atggggagtcatgatccccgggcagaacgggaatcacggctcatggatgatgatgatgatgattatgactatggtaatggtaaagaagaaggcgtcgaggcaaatctccaggagttccaggacttcgacgagttcaaggattag

SEQ ID NO: 16348 - DNA, 525 bp, Zea mays
  Peptide Sequence Number=SeqID_59723
atgggtcccatcgatagaattgttcgacaactacagcctggggtcggacccccgtggaacggtcctaggcctcaatgtgcttcgacaatagccaccttcgaaacaaatcaagaaaaagataaaggcattagcttcgtcataacaatacaggaagacgaagatagaagtcaaacgaagccggaagaagaggatgggcaggtgaggagggggtttgagaactacgagtgggactcggtcgtcagcgacctagggcgcatgctcgtgaatggggaacagggaggctacaggtgggacctggttgttgggaccatcgccttcctctcgctcagctcagtcgggacagcgccgcggggcgatggtagtgatcctctgggcgtggacatggtggggacatcagacgtggcaacggcgagcacagagggcgtgacatggggcgattatgcggtgaaaaggtcggggctgatatatgggataggggtgtcggcaagacagcgcggggcatgcagcaacattgagagcacctag

SEQ ID NO: 16349 - DNA, 609 bp, Zea mays
  Peptide Sequence Number=SeqID_59724
atggaccctggagaaccataccggcggcgcaagaagcaggtcgggcgcggggtagaagcttcccggtgctgcggggttcatgcgggtcgactgggatggatgaattcctcgccggtggggacgaagcgctgctgtccgccgtggaaccgcgtgacaccatggccgggacctcacggtcgcgttgggcgcccacactgggaccctagcgccctggcacttctacctctacgcctctgtctaccgctcacgcttcatccgatcgtcggtcgcgcatggtctggctgcgccagggcagtgcccaggtggccgctgagtgcttcacggtgggacttcaacgttgaaccgctgcaagctgggaatctccgtccctatggtgaggttgttacttttgttctactaaattgggctggtatttacttatacttagtaattgctaataaaattttgaccaactttaaaaagcaatgctcagctctaaccatcctctttgaactcctgttatatagtaaagatgtgacattcgatcctgtgccactatgcatcatatgtgtgagacttggtcccagcacacctggtgtttatgttcgcgcccgggttttggacccctaa

SEQ ID NO: 16350 - DNA, 285 bp, Zea mays
  Peptide Sequence Number=SeqID_59725
atggcgcttttccccccctcctccttgcggaaaggcgacgcagaggcgaacgtttcacccgtcttgcagacattacagaacatcggagataaagaaatgcggaagcgattacataacttacatttatttaaaaaggtttcaaggaaggtaatcaagttcaaggaaggtaatgcaagaattgttttatcaatcaactcctatcacctaatgcagcaagcaagtgagaaagattttaaaaacatcaagggaggtggcaaatgcaccggggcttgccttcgttcgtag

SEQ ID NO: 16351 - DNA, 615 bp, Zea mays
  Peptide Sequence Number=SeqID_59726
atgcagtcggcatgcaaccgtgccaagtgggcacaccccttcgactccaacgcgcccagcatggaggcccaggcccacacatcatgcaaccggcgcgccggttgctatgtgcgagcaactgcaccgcccctcgcgccactaccgcgcctcctcgattgcggaaccagtaccgcgactcgaggcaaccctgcgtatgacccaacagtgccagccaggcgcatcggtcacgggccagtcaaccgcgggagaaggcgcgacggtcgatgcggccaaaaatgggccggcagtaatggcggtggcaggcgggcggaagcagcggtcacgtcggaccgggaaaggggatacccgaaagggatccttctccgtgaaagaaacaggccccgagcccccctactgatcagaggttcgaaggctagcccctcggaggggttcaacagctgcctcagagcgctcaggctccgcgcccactactggtcagaggttcgagggccggcccctcggaagggttcaacggccgcctcaggccactcgggctccgcgcccactactgatcaggggttcgtaggctggccctcgaagggttcacagctgcctcagacgcagagcgagggatga

SEQ ID NO: 16352 - DNA, 558 bp, Zea mays
  Peptide Sequence Number=SeqID_59727
atgtctttgcgctcccttatgtatcgcgtctttccaccttccgagcccccggatggggaacacccgcaatccttccgccttgtcgttggaggaacgcaacttcgtggaagttggtacctttcagccatcgttcggcttcaaggattttcatcaggcagcccggccgcaccccctcgccggtggtcacccaagacggtgaccaccagctcctgggtggggagaagcaagccgggctgcggtctctgcccctccctcagcttcaaggatgttcatcatccttgctggggcggaggccgggctgagccggagctcttcctcccgcgcgggttcgtgggtcagcctctccttcagcattcaagggagagggcgctcaccagcctagcgggaggggcggacttcgacaacgcggggccgatcggcggcgtgtcgtcagcttcagcgtgtcgggcttgccggctcagctggctctggcttggctcccggtgcctcctctcgccgcaagggcggttgttgcgccacgcgcaccggaggaccgcccaagacgtcgcgcgctactag

SEQ ID NO: 16353 - DNA, 324 bp, Zea mays
  Peptide Sequence Number=SeqID_59728
atggcgccccggacctcccgagctaggggtccgacgggcacttgtggaaacccagacaggcttgacgcgaaacctttggaggtttgcgaacgtctcttccaaattggtgataagataattggacctcttagtctttacaactatgttgtcaatatatacctcgatgttgtggcgcacttggtgagtgaaacaccggagcatacatcgctgatatctcacccgacatttttaaggcaaacgatatggagacataataaaggagctgaaaggggcgatgaaggaggtgtcgtgttgatcgctctccttcgtggtgatctggtgtag

SEQ ID NO: 16354 - DNA, 366 bp, Zea mays
  Peptide Sequence Number=SeqID_59729
atggcgcggtgcagggctcggtcggtcggcgctcgcgtccgttcctggcgtggcttggggcgcgttcggctggggtcgcgggcaggtcatcggacacctcaccgcacagttgtgcctccgctgccgtcgaccaaggtcctcgctacgtccttgccgttgctcaagcactctagagtcgtctctcgaggtaaccaacctccccatgcccttaattccccatttactgccctgctgtccgagcaattgctcgccggagctgagctgcgtcgccgccaggccactccgctgcggatcgtgccctctcgtgcctctgcgccggtgtcatgcccacggtcgagtccgacgtgtcacctcgaactcgcctga

SEQ ID NO: 16355 - DNA, 522 bp, Zea mays
  Peptide Sequence Number=SeqID_59730
atggtcccacgtgtcagtgacgtaagcgagggtggcgcgggagaaggacgccttagccacatcgttagccatgacacgatactcagcctcagcactcgagtgggagaaaacgggctacgaacagacgaggttgtctcccaagaatacaacgtagctggacgtagagcatcgtgtgtccgggtagccatcccagtcagcatcggtgtagataacaagcttggttggtgtgaatcaccgaaggagaagattgaagttgatggtgctgcgaaggtagtgaagaatctgcttgacaacaacgaggtgtggctcctgaggatcatgcatatgaaggcacacctactgaacaacataggagatatctggccaagtgaaagtgaggtgctcaaaaaatacttcaaggaagatcaaacttccaaacaacatatcctagacaagaactttttgaaaatgccacatgtacttcggaccgttcgggccctcctagcggaccatctgcgacacctcaatgaacttcgaacatga

SEQ ID NO: 16356 - DNA, 596 bp, Zea mays
  Peptide Sequence Number=SeqID_59731
atgggattcgactggaaactacctactatcacgcctgggcactggggcctggctgctgagctacctttcttggacaatgcatcgcccaatggtcttgctctccacaatggaaacatgctctacctcctccttgcactggggctgcttgattgctatgattggttgctgggacaggaagacaaggtgtctgttgattctgcctctggaactaacttcctccttgctgactgttctagcgatactgctgctgatgttgagggtactgcctctgaaactgctgctgagacctgctggaacatgataccgacaaaaattatctctgaattcctcccaagtgatggcatcgaggtcggcatgggtggcgagataggactcccaccaagactgagctgctcccctcaacagacggggggccataagaaccttctctctgtcatcacactgagcggtgtgcaactcacgctccacgttacacaaccaatcttcagcatccatggggtcagcagagtgagcgaacactgggggatgacctctcatgaattcagcacgcttatctctgggcatctgaggcatctgtacttgcatctgaggttgag

SEQ ID NO: 16357 - DNA, 639 bp, Zea mays
  Peptide Sequence Number=SeqID_59732
ggctcttcttcctcgcctcagcaggaggtagagtctgtgaggcgctgctctcctgtgcccccgctggaggcgccccctgcaccaccactgggcgtcccgaccattggagtagctatgggaggagaccccaacaacagaggtggcgacaacagtagctcgagccacagcactgacctttcggaggagcaggagcatgagggatgggcacagtcgctgggcatacccagaccactaggagctgaggcggccatgcaagatgtcgcatggcgtgcgctttcgcactactgctcagtcctcggtggggtggctgatggtctcgacctgaggtattacccccgccatccacctggcagcacaggaggtgtgattgcctcacctgttggtgagggcaatcctaggttgagcagcacagtcaacctagccgccgtgctaaacacggagctggaccacgctttagacgagctaagtagggctcatgctgagatcacccagttgcgggctgagcgcgcggagcgccgtcacctagcgaatggctcccccgcctccgtcgggactcagcacctgtaccgctcacctcagcgtggacaccatgtctatggcaaccctgactgtaggaccaagataaatttaggaccgtag

SEQ ID NO: 16358 - DNA, 2955 bp, Zea mays
  Peptide Sequence Number=SeqID_59733
atgccggtagtcgagttggtcccttgcgcccgcaacaagtggggcaactggaatgaattttggttttacgttgctgagggtaccgtcgaaggccacgagggacttcccgtgtccgagatgtgctctcatttttactcggcgtacccgccctttgaagtggcggaggatgatgtggacgaaggggcccttcggtgtgccgccggccagagcagtgggcgcgacttggttgaagagtttgtggcgtacggggtatggcccttggcgcatggttgggcgttgggcgaagtatgccctcgccagatgccttttcgtggtggagagatggtgcggagtcccgccttcgcgctaaatctgcgaaaccgtgatccggccgcctttgtgcgtgaagctgaggatgaggcggtgcggcttgttgggcgttatgtgccgaggaccgagggccagcgcagctgggagatccgcgggtcgaatgaccgtttgaatagggtcttcgaattgaaccaactgccatatgacggctatcttggtcaagacgacgcggaccgccgggggaagaaaccggtggtggagactaaagacgaccctgcaccggcggccgccccatcctctaagaagaggaaactaggtactgccatgggaggacttggggtgtccgaagggtttgctagagagttgatgaggacatgcgcggccccgggggaaaggatgtcttcgcccgaactccgggagtcttcggctcggatgctgaaggttaccgggggttgctggcctaggaatgttcctatcccccgcgcggccagcggggacgtttttacatctcgcatggttcgcaaatggagagtttttccttacgggtggaatattgctgctgttgtgtcggcagtgatggacaaggatcgccagggggctgcacaaaagcggcaggcggctatcaggcttgttgaagccaggccaaagaggcaaaagcgtgggtcggtgaaggatgcggcccccggcggaggcaagccgccggcggcggagaagtcaggcgtccctgcatccagcagggcgccagaggcagcgacgggcgccggaggctccaaagtgtcgaaggctgtgccaccgctcagcagggtggcggaggccgcgaaggcggcccgagcgttgccgtcggcaggcaagcgtgtcgccgacttcgccaccgacatttgtgtggaggactatcttggtgggtcggacgagggccagcttgctatggttgcgcccgccgcggcgattgcgacggctggcacagtgccgaaggcgaggggcgaggctcttggctccgaaggcgaggtgtcggccctcgcggttgtcagggacgaggcgggcgcagcgacccaccggctgaagggggtgacggaggcgctgagtcaggtgatggaggcgctgagtcaggtggctgacttcgccagccgtactgcgtcgggggccctcacggcagctgtgtctgccgaagtcgagagacttcggacacaacatgctgacgctgtccgtgagaaatcagcctccgacagcaagtgccgaaaactgacggacaaggtggccgtgctggagaaggagaaggctgaccttcggcgccagctggcggcggagaagagggaggccaacgaggccatcgccaaggagcaggctgctcaggcggaggccaaactggcgcgggcggagggcaatcttgccaaggagctcgccgaacatctgcaggagcggctcaccgccctggagagccgcgcgaagggggccgaggccgcggtgcgtgcggaggcagaacggacgcgcacacagcttatggatacatatcgtgagctgggtgcgcggaccggtgacttcgaggtgccggaccgagagcccgggcttcgctgtctgcagtgggtgcaggaggagctgcaggaactccccgctgtcgtggggggttttatgtcgtacgcctccctggtcacctgcgagggggcgacgaacgcgctctcccgcgaagggtgccggcacttcgaggtcttcgaccaggcggatgaagattttgatcgagatgtctataaggttgaagacctcgtggtgaaggattctaccggggccctctacgaccggatgtggggtccgcacggtcgcgaggtggtcagggagcgggcggagacggcaatggctcaggcgttgcgtggcgagcgggtggacgacctcggggcgctgaacagcgcgctgcctgacccggagccgacccctgcggaggccgtgtccagggtcaccctggagccaaccccggagaccgcgctgatcgcgacggctgcccccacacctgctgcggccggcgaaggcctgcccccaaaggtggccgaaggcgcccctgatgcccccgcagctgctgtgccgagtgctgaagatcttgcggcggaggcggtggaaataacgacagaagcggcggcggagccagcggcggaggctcccgtagcgtcagggccttcgcaggttcaagattttgggcctgcgcacgcaaccgctactgctaaatttttggcggcttcgaccgcggaaggtggtaatgaatgtggtggatctggatctgaattttctgagttttttgatgttgctgattctgggagctcggttgagtggactgggtcgtcggaggaggatttggactatttcgcggctttggatgtggctgcggcggagatctcgccgcacgctgcggacgcgcaagatgtgccgtgtcctagcaccgggcgccgacggcgaagggcggttgcaaagcgtagagttagtacggaggaaaggtctcggctccgtgtgagtagggctggtcggcaggaactgttgtctttgccggccgccgcgagtacaggggaaggggaactgcggagtctttttgcaggtgaggagcttaggataatgttatttaattatagggagatgggaattattcctaaggttgagccgatgtag

SEQ ID NO: 16359 - DNA, 186 bp, Zea mays
  Peptide Sequence Number=SeqID_59734
atggcgccccatgcttctctcttcctctgctcatcctcaagctgcgccctgttgagcaacatcatcgtttactccatggggctcatcgtcgattttgtctttcggagagtgatcctggagttcaataaaaatgtgagagaagtccgtgcaacaagtgcaaggagctcgaccggatgtctaaactga

SEQ ID NO: 16360 - DNA, 390 bp, Zea mays
  Peptide Sequence Number=SeqID_59735
atggaggacggcgaggtggccgcgactgagcgggacctcgggtatcagtcgcccgagggggacctgaaggatgtcttcaccggaggctcctactctagtgaagaaactagatggacccccgagggatctcgtgctccccggtctacggagctgaagcatgccttcctccggaaacccttctggattctccatgggtctagacttccgatagatggggacccaaggtcgggacctagccctacggcaagtaccaaaccaagaagggctccgcaatgctccccccagctaggaaggaccctccaaggtaacgcatacgtgtacgacagctcggtggggtctgtccccataaacccggcctataggtctgcacacattcaagacgagttataa

SEQ ID NO: 16361 - DNA, 579 bp, Zea mays
  Peptide Sequence Number=SeqID_59736
atgcctcgctcttcttgtcaccatcgtgctcttccgccttctgggcctccagatgggaggagcgcaaccccatgggggttagcgaacttccgccgtcgctcggcttcaaggattttcatcacgcaacccggtcgcaacctccggccggtggtcatccacaaggatgactaccagccttgtggtagagagaagcgagccgtgctgcggcctccccctgccctcagcttcaaggatgttcatcattcgtgctggggaggagggcgagccgagtcggggctccgccttccgcatgggctggcggcccgcttcttcctccagcattcaagggagaagggcgttcgccagccttgcgaaggaggcgaacttcggctacacggggtcggccgtctaaggcgctgtcagctaccgcgtgcctggctcctcggcttgggtggctttggtgccgcctccggcactgcctcttgccgcctgtgcggggcatggctgtccgtccaccgcacgggcgacggttgcgtcgtttcagtccgggtggccaagttgcatgtccggacccccttgggtcgcggttctaggtactag

SEQ ID NO: 16362 - DNA, 462 bp, Zea mays
  Peptide Sequence Number=SeqID_59737
atgtctcctcgggagctctggactcgtactcacaggggtccggtgtccctctgcggaggaccggacccaacgacgcttcctgggatgtattatccttcctcgccacgtggtgcccttaggcctgcccatgtggtgaggtcgggtgccgctccccgtatgacccaggggtgtcgtgcgggtgcagcgccttcataccgtagaagagggtacccctgcttcagggtaccgacagtggcccccgggcccgcctcaggggaggatgcgagcctacaggtggggccagagtctgattggcggttggactgctgctcctgcgcgcctgttgatgcagttactaccagcccgcctatggtcatgccaactgctacgcctattcccacggctgactggcccgtgaccatcgtacttaatgtcactattgggccatgcacggggtgcctcgagtcgctgcactggttctaa

SEQ ID NO: 16363 - DNA, 813 bp, Zea mays
  Peptide Sequence Number=SeqID_59738
atgcaggcggcatgcaaccgtgccaagtgggcgcgccccttcgactccaacgcgcccagcatggaggcgggcaggagcagcggtcacgtcgtcagccaggcttacgtcccatccaggggcagtgagggagccctctcccacggcgtgaagacggtgcgcccgacaggcggcgcctcaggcgggagaagcaagcgacgcttcgccttcgtcataatgaccgcgtcgaaaaagggaccgggaaagggggataccccgaaaaggacccttctccgtgaaggaaacaggctccgagcctccctactgatcagaggttcgaaggccggcccctcggaggggttcaacggccgcctcagatcgattgggttctgcgcccactactggtcagagcgggagcgatcttgtaacggaatcccatcagagggaggcatcgagccctcggaccccgtcaaaggggaccggctcaccggaaacaccatgttcggcgccctccgaggacaacatggtgctttccccccctcctccttgcggaaaggcgacgcaggggccaatgggcacactatcggctcgcccgaggcccagtcttcaccgagaagcaaccttggccacatcgccacgccgaccgaccaaatcgcaggggcgtttaatgcaaagccaagcccggcctcgggcgtcataggaaactccgcctcgcccgaccccagggctcggactcgggctcagccccggaagacggcgaactccgctccgcccaacctagggctcggactcgggctcagccccggaagacgtcgaactccgctctgcccgacctag

SEQ ID NO: 16364 - DNA, 651 bp, Zea mays
  Peptide Sequence Number=SeqID_59739
atgcaggcggcatgcaaccgtgccaagtgggcgcgccccttcgactccaacgcgcccagcatggaggtccaggcccgcgcgtcatgcaaccggcacgccggctgctacgtgcgagcaactgcaccgctactcgcgccattaccgcgtctcctcgactgcggagtcaataccgcgactcgaggcaaccctgcagtgccagccaagcgcgacggtcaaatgcggacaggcggcgcctcaggcgggagaagcaagcgacgcttcgccttcgccataatgaccgcatcgaaaaagggaccgggaaagggggataccccgaaaaggacccttctccgtgaaggaaacaggcttcgagcctccctactgatcagaggttcgaaggccggcccctcggaggggttcaacggccgcctcagatcgattgggttctgcgcccactactggtcagagggacatgatcgtgcctcgcccgagcctagcctcgggcaagggaagccgaccccggagaacctacgtctcgcccgaggacccccctccagcaatgggcacactatcggctcgcccgaggcccagtcttcaccgagaagcaaccttggccacatcgccacgccgactgaccaaatcgcaggggcgtttaatgcaaaggtggcctga

SEQ ID NO: 16365 - DNA, 510 bp, Zea mays
  Peptide Sequence Number=SeqID_59740
atgaccatcaggcgacggcggcgctcagaccgcggcggaggcatcgccggaacacggcgggttctcggtccagagcaccagacggcacgcagaggcggagataatgggagaaatagatggcaaatgtgtggggcatacctacttgagggcgtgcaacagggaggcttctccccgacgagcttgcgaccgagcggtcattctttgcgccggtgtgaaattgccgacgccaaaatcatacggtgctcgaatcaagcacgtgtacaccacccacggggcccaatgaagctccaggaaccgacatggggaccccgacgctggtctacgcgtgtgtcgacggtgcgttgcggcaccgcggcgaaggggcgcgtcgcgggtagattcgagcgcagaggccgcgcggtcggcgttgagaatgatggagggacatgccggggaggtcgacgacgagctacaagcaggctaaacaatcgcagtacgcaatctggaggagaggcgcgcgactggagttga

SEQ ID NO: 16366 - DNA, 297 bp, Zea mays
  Peptide Sequence Number=SeqID_59741
atgcaggcggcatgcaaccgtgccaagtgggcgcacctctccgacttccagcgcgcccagcatggaagcccaggaccacgcgtcatgcaaccggcgtgccggatgctgcgcgcgagcaactacaccgccacccacgccactgccacgcctcctcgactgcggaaccagtaccgcgactcgaggaaaccctacgcacgacccagcaacgccagcctggcgcgacgggaccgggaaagggggataccccgaaaaggatccttctctgtgaaggaaccaggctccgagcctccctactga

SEQ ID NO: 16367 - DNA, 387 bp, Zea mays
  Peptide Sequence Number=SeqID_59742
atggcccgcgccagcgcctataaagcccccagggaccttgaccgtacccctccgcacgtgctcgacctcaccggagcccaaccccaccgtcgtttgcccgtgcacagcgtgtccgcggccgcccgatccccctgccaccgtagaccggccaacaggacccttcccaaccccgtccagccctcggagaggactgagcacacctcggtgaagctccccgagcgaggaatcggagtttgcttcgtcggagaggccagtccacggtcgtcggactccacccgaccaccggcgagcgtagaccgggtaatcctctacttcattcttcgattcattgtgcacacagcctctacgtcaccccgtgaagctcattgtgcctttggattgaactag

SEQ ID NO: 16368 - DNA, 483 bp, Zea mays
  Peptide Sequence Number=SeqID_59743
atgggcaagagcaagaagggtggtagttcttcgcatcactccggcaataagcggaagcgtgagccgactcctccctcggaggacttcggcgacttggagtactcggaggaggagttctcctccgagtcagagggctcaccggtccatgcctctcccccggcgtcgtctgatgactcagacgactcccaggggatcgccgcagaggtgtggacctacatccgggccgtcgagcgcgccgggctcgagggctcggatgagtcggagtactcctcggatgaggagaactcctcggactcatccgaggagggtggcggcgacggcgatggcggtgacgatgacgacgacggtggcgatggtgacggtggcggtgacggcggtgaaggcgacggcaagggcggtgacagcggcggcaagggtggcagcggcgacggcggcaatggtagcaagggcagcagcaggggcagcaacaaggccagtggctag

SEQ ID NO: 16369 - DNA, 1167 bp, Zea mays
  Peptide Sequence Number=SeqID_59744
atgggtcggcgcgagacggagcaagaaggggggaaaaagacggagggagacaggctagggggttacaagcgtccacgcgggagggagcgagaggcttacgcgagcgccgtcccgtccttccacgcgcggccaaccctctgtaagagggccctggaccttcctttgataggcccggagaggttttggcgcccggttcgtgtggtgtcgtggccgtcggaggagcgctggagcctggcggaaggacagctgtcggggctgtcaagtccttgcttacgtctccttgcttccgtaaggggactgagagccgacgtcgtcatagagcatggtaatgatggtgcctcctgtgacgtggtcggtccgagccctgggttgggcgaggtggaggctcctccgaggtcgaggtcgagtctgtcttccgaggctgaggtcgagtccgagcccctgggtcgggcgaggcggagaccatcggctgaggccagggctgagttcgagccctggggtcgggcgatgcggagttcgtcgtcttccggggctgagcccgagtctgagccctggggtcgggcgaagcggagttcgtcgtcttccggggccgagcccgagtccgagccctggggtcgggcgatgcggagttcgtcgtcttccggggctgagcccgagtccgagccctggggtcgggcgaagcggagttcgtcgtcttctggggccgagcccgagtccgagccctggggtcgggcgatgcgaagttcgtcgtcttccggggctgagcccgagtccgagccctggggttgggcgaagcggagttcgtcgtcttccggggccgagcccaagtccgagccctggggtcgggcgaagcggagttcgtcgtcttccggggttgagcccgagtccaagcccttcgggcgatgcagagtttcctatggcgccagaggccggacttggatgctgttagcctcactctgtcgagtggcacagcagtcggagcggcgtaggcggcgctgtcctcttgtcaggccggccacctttgcattaaatgctcctgcgatacggtcggtcgacgtggcgacttggccaaggttgcttcttggcgaagactgggcctcgggcgagccgaagctttgtgctgatgggggttaccagctgagattaggagtcttgagggtaccctaa

SEQ ID NO: 16370 - DNA, 102 bp, Zea mays
  Peptide Sequence Number=SeqID_59745
atggctgcaacggtcggcttcgctaggaaaggaaggagatcacgcatgttcactgtcaggtggtgcactggactgtccggtgagaactatgtctttgcttga

SEQ ID NO: 16371 - DNA, 989 bp, Zea mays
  Peptide Sequence Number=SeqID_59746
atgccaagtgctggaggtagtggaagtagtcagtgtgtgcgactgcggcgaggacaaaagcgatgtgtagtggaagcggtaggtggagaagtggacgcaggcagtcgcaaggtgtacaggggccagagctatcatagtaggcgagaaggctccgggggccacaagaacattgcgaagatagaaaggtccgagaagaaccaaatcacctacagagatgcaatgaaggtccacccaaggacaggccaagccaggccacatagagatgcagccggtccatgggttgtagggaaagggcgaaggggcatccctctagccacccccacccccatagtcacccttcatctgatagcaaagacccacctaaaactcgccctgccccgggcctgggctaggagggaggggcgtggagcccacggccaaaggggacagacgagcgtgaagacaagccccccaaggatgaagtcattgcaaaccttgtggaaacaagggaaatgggaccgagcgagtgatccaaatctagaggtaattgtagcgctcattgaagccacggaggaggttaaggacatgatgaggaggataaggtcgcacagcggacgtatgactggcgagggtatcggcaacagtgcgttcatgcttccaggcgagagcaacgacgcgttcgtgctcccaggcggcagccactactgccttagcagtcatgagggccatgacaaagctggattgggcagccacaacgtcgatgggtggcagagcatccgacaaagcggcggtggccgatacagggagatccgcgggaggggggtctacgggcctactaggaaagacagaggcgacatgggttgcccaggccccgcgccgagcagaggcagcgataggcaggcaccggctatggcagtcgtgccagcaacaacagctaaagaggtcgttgcgccggtggctggaggaaggggcagcaagggcaacgacggtggctcagtggagaggaaggg

SEQ ID NO: 16372 - DNA, 483 bp, Zea mays
  Peptide Sequence Number=SeqID_59747
atgtcgggaaatatggtaaccgccggggtcagtggagcattgtatgccaaggcggtacgctacatgatatggttgatggtggtagacagacgcgaacactgtctttgtgctgatgtagtctcagaattccctaaagtcccgattgtcgaattgtttcccattgtctactgtcaactcggagggaactccgaagcgatagacaatgttctgctagaaaacttttgtgatgtcttcgccgttattttttacacagccctggcttcaatccacgtagtgaagtattcgattgcgacaaaagcaaatttaaggttgccttgcgtggtggccaatggtttgacgatgtcgaggccccaacactgcagtggccaggtgtgggcgatgaacttcgtaaattgcgagggggcacccatccgaggtgatgaggacatcctccactattacccgttggcaaagacgcaattggcccagttggcccaattgtag

SEQ ID NO: 16373 - DNA, 993 bp, Zea mays
  Peptide Sequence Number=SeqID_59748
atgcaggcggcatgcaaccgcgccaagtgggcgcacctctccgacttccaacgcgcccaacatggaagcccacgcccacgcgtcatgcaaccggcgcgccggtcgttacgtgcaagcaactgcaccgccactcgcgccaccaccgtgcctcctcgattgcagaatcagtaccgcgactcgaggcgacccatcgcctcagagcgcgtgggctccacacccactactggtcagaggttcgaaggccggcccctcggaagggttcaacggccgcctcaggccactcaggctccgcgcccactactgatcaggggttcgaaggctggccttcgaagggttcacagccgcctcggacacagagcgagggatgaccatgggtacgttcgatacataaccaaggctcgggctgcgctcccgagggctcggactcgggctaagcccccggaagacggcgaactccactctgccggacccagggctcggactcgggctaagccccggaagacggcgaactccgctccgcccgacccagggctcggactcgggctaagccccggaagacggcgaactccgctccgcccgacccagggctcggactcgggctcagcccctgaagacgacgaactccgcttcgcccgaccccagggctcggactcagccctggcctcagccgacggtctccgcctcgcccgacccaggggctcggactcgacctcggccacggaagacagactcgacctcgacctcggaggagcctccacatcgcccaacctagggtgcggaccggccacgtcaacaggaggcaccatcattaccctaccccaagctgactcaggctacgggaaacaagaccggcgtcccatctggctcgctccgccagacaaggtaatgatggcgccccgcacgctctatgacgatggcggctctcagcccccttacggaagcaagaggacgtcagcaaggactcgacagccccgacagctgtccttccgctag

SEQ ID NO: 16374 - DNA, 111 bp, Zea mays
  Peptide Sequence Number=SeqID_59749
atgcacgacctcctccttgcactggtgctgcttggttgttctgatgaggaaactgcctctggtactgctgctggttctgacgctgatgctggtgttggtgaccttgcctaa

SEQ ID NO: 16375 - DNA, 660 bp, Zea mays
  Peptide Sequence Number=SeqID_59750
atgggggatgcccttttttccttccgccttgtcgttgggggaacgcgactccgtgggagttggtacctttcagccatcgttcgtcttcaaggattttcatcatgcagcccggctgcacccctccgccggtggtcacccaagacggtgacctccagtttgatggcgggggaaagcaagccgggctgcggcctctgcccctccctcagcctcaaggattttcatcatcagtgctggggaggggagtgtgccgagttggggtcggcccctgcgtgggtggtggcccgctccttccctcctgttgacgtggtcggtccgcgccctaggttgggcgatgtggaggctcctccgaggtcgaggtcgagtctgtcttccgtggctgaggtcgagtccgagcccctgggtcgggcgaggcggagaccgtcggctgaggccagggctgagtccgagccctggggtcgggcgaagcggagttcgtcgtcttcaggggctgagcccgagtccgagccctgggtcgggcggagcggagttcgccgtcttccggggcttagcccgagtccgagccctgggtcgggcggagcagagttcgccgtcttctggggcttagcccgagtccgagccctgggtcgggcggagcggagttcgccgtcttccgaggcttag

SEQ ID NO: 16376 - DNA, 93 bp, Zea mays
  Peptide Sequence Number=SeqID_59751
atggctgggaaattctttggactgggcctcaattaccagaaaactcaggggtctctgcgcaagaggtacgagacccagtgcacagtcagatag

SEQ ID NO: 16377 - DNA, 60 bp, Zea mays
  Peptide Sequence Number=SeqID_59752
atggcaatcggggtcagtgaggcattgtatgccaaggcggtacctccttgttttggttga

SEQ ID NO: 16378 - DNA, 279 bp, Zea mays
  Peptide Sequence Number=SeqID_59753
atggctagggatccactacgaggcctttacaaagttccactagcttccgaaaacccgctacagtttataggaagatccagtacagggttcctggctgacagccatcgcagcaaaatcaaccagggacctccccgcactgacctctcccctactgcccttgcccctttcggctacttcaacctgctgctcaccaagatcctcagcaacgagctcttctactcgccacaatacaagcaagcacaggatatagggaaaattaacattacaccaagcatgtaa

SEQ ID NO: 16379 - DNA, 372 bp, Zea mays
  Peptide Sequence Number=SeqID_59754
atgaggaatagggcaaggcctagcccactactcctcctgctcctctcctgctggagcagcatcccactcgaccgtccaacccggtggcagtgtggtaggccaagtcacactatcaaccacatcctaaagagtacctgcaaaaattgtgccacaagcaaggttgagtatactaatactcagctagacttacccggttacaaggggtcaagcagtctcattagctgcgagaagccggcgattcgaatcgagtttttaaaccttgcaagggagatcctcgatggaaggctcaggagctggctcctggtcttcctcgtggatagctccttgctcagggacgagcacgtactctccgtcatcgaggttgcaatataa

SEQ ID NO: 16380 - DNA, 192 bp, Zea mays
  Peptide Sequence Number=SeqID_59755
atggcgggcggaaataagctcaccggagctaaggaaaggtggctggccggagaggagatatggagccaggaaatctggtctgtctccctgcccaaacccgaggcaaatcccagttgttttgatgctcatgcttactttggttcacataaaatgatggttcttggtttggcttttgagaaaaaccctgagtga

SEQ ID NO: 16381 - DNA, 561 bp, Zea mays
  Peptide Sequence Number=SeqID_59756
atggcagctggagaggttttggcacccggttcgtgtggtgtcgtggccgtcggaggagcgctgaagctcggcggaaggacagctgtcaaagctgttgagtccttgctgatgtcctcttgcttccgtaagggggctgagagccgccgtcgtcatagagcgtgcggggcgccatcattgcttgtctggcggagcgagccagatgggacgccggtcttgtttcccgtagcttggggtagggtaatgatggcgccccctgttgatgtggtcggtccgtgccctaggttgggcgatgtggaggctcctccaaggtcgaggtcgagtctatcttccgaggccgagatcgagtctgagcccctgggtcgggcgaggcggagaccgtcggctgaggctagggctgagtccgagccctggggtcgggcgaagcggagttcgtcgtcttccggggctgagcccgagtccgagccctgggtcgggcagagcggagttcgccgtcttccaggactgagcccgagtccgagccctgggtcgggtggagcggagttcgccgtcttccggggctaa

SEQ ID NO: 16382 - DNA, 963 bp, Zea mays
  Peptide Sequence Number=SeqID_59757
atgggggcccacgcccacgcgtcacggaaccggcgcgccggttgcaacgtgcgaacaactgcaccgccgctcgcgccactgccacgcctcctcgactgcggaaccagtaccgcgactcgaggcaaccctgtgtacgacccagcagtgccagccaggcgcgacggtcaatacggccaaaaatgggtcggtagtgatggcggtggcaggcgggtgggagcagcggtcacgtcgtcagccaagcttacgtcccatcctggggcagggaagcgagcgacgcttcgccttcgccataatgaccgcgtcaaaaaaaggctccgagcctccctactgatcaggggttcgaaggctggcccctcgaaggggttcgacagccacctcagagcgcgtgggatccacacccactactggtcagaggttcgaaggccggcccctcggaagggttcatcgactgcctcaggccactcgggctccgcgcccactactgatcagggcgggaacgatcttgtaacagaatcccatcagagggaggcatcgagccctcggaccccgtcgacaggggaccgggtccggcagatcacccgcaggtacttttgggcgcgcctctgggcctctagccgacccctagcaaatggggcacgggcgtccactcggattacccgccagcagctcaccggagacaccatgttcggcgccctccgagggcaacatggcgctttccccccccccctcctccttgtggaaaggcgacgcaggggcatatgtaaaaacgtcgagtctgtccctgaccgtcctctcgccctatgcagaggctcgagggctactctcgcaaactcggctccggccaaaccgttgacagcgtcaacataccagcccgagaacttggaacccgaccgtgcacccgggctacggccaactcacatgagggaacgaccagaccagccgaagcattgcgcgaggcattaa

SEQ ID NO: 16383 - DNA, 813 bp, Zea mays
  Peptide Sequence Number=SeqID_59758
atgtcttcgcgctcccttatgcattgtgtctttccaccttccgagcccccggatgggagacacccgcaatccttccgcctcgtcgttggaggaacgcaactccgtgggagttggtacctttcagccatcgttcggcttcaaggattttcatcagtcagcctggctgcatcccctcgccgatggtcacccaagacggtgaccaccagcccctgggtggggagaagcaagccgggctgcgatcttggtcccaccctcagcttcaaggatgttcatcatcctcgctggggtggaggccgggctgagccagagctctacctccgcgcgggttcgtgggtcagcctctccctcagcgttcgagggagagggcgctcagtggccctgcgagaggggcggacttcaacaatgcggggctggtcgatggcgggcctcgtcagcttcagcgcgttgggttcgctggcttggctcccggagccccctcctgccgcaagggcggttatcgcgccgtgcgcacgggaggaccgcccaagacgtcgcgcgctgccagggcggcgttcgtgttctggggcggccctgcctttgcaccggtacggcgcctccgcgcggaggtcggtgccccgctcgtccgagtggggatctgccggcggtctgacggcccctgtcgtcggtgccgaggcggaggcggctcgagaagtccccgtcgccgacgggatcaccgccaccatccgcgcttcgggcctccggctctttgtacttgtcctcgcccctcgagcgtcggcgtgggcgagggcagggttgcagcggcgttcgccctga

SEQ ID NO: 16384 - DNA, 345 bp, Zea mays
  Peptide Sequence Number=SeqID_59759
gccgtatctgccccgacgtctcacagttgagtgacagccctaggtgccaggaagaggtctgcgccggacttttgcaaagattcgcacgtttgcgacctctggcgacatttgaacactggaagaaacaaaccgccacgtgttcgacgccgtctgccgcgccagagcacgcccgcgccgcgcccgagccaagccggtgccctgccattcccaaccccgtccagccctcggagaagactgtgcacgtctccgtgaagctccccgagcgaggaatcgggctctgcttcaccggagaggccgacccaaggtcaccggacttcaaccgaccgccggcaaccgtgaaccgag

SEQ ID NO: 16385 - DNA, 453 bp, Zea mays
  Peptide Sequence Number=SeqID_59760
atgggcaagaacaacaagcgcaagcgtgagccgactcctccatcggaggagtttggtgactcggaatactcagaggaggagttctcctctgagtccgaggggtctccggctcccatccccctgcgtgagtcgtctgatgactcagacgactcccaggggcttgcggcggaggtctggacgtacatccgggccgtcgagcgctccgggctcgagggctcggatgagtctgagttctcctcggacgaggaggactcggacggcggcgaggacgaagatgacgacgacgacgacggtggcgacggcgatggtgacggcagcaacggcggcggaggcagcggcggcaagggcgacaccagaggcggcagcagcacgggcagcaccagaggcggcagcggcgcgggcagcaccagaggcggcggcggcaagggcagcggcagcaaggccagtggctaa

SEQ ID NO: 16386 - DNA, 714 bp, Zea mays
  Peptide Sequence Number=SeqID_59761
atgcaggcggcatgcaaccgcgccaagtgggcgcaccccttcgactccaacgcgcccagcatggaggcccaggcccacacgtcatgcaaccggcgcgccggttgctacgtgcgagcaactgcaccgcccctcgcgcccctaccgcgcctcctcgactgcggaaccagtaccgcggctcgaggcaaccctgcgtatgaccaaacagtgccagccaggcgcatcggtcacgggccagtcagccgcggggaaggcgcgacggtcgatgcggccaaaaatgggccggcagtaatggcggtggcaggcgggcggaagcagcggacaggcgacacctttggcaggagaagtgggcgacgcttcgccttcgccatgatgaccgcgtcaaaaaaggctggcccctcagaggggttcaacagccgcctcagagcgctcgggctccgcgcccactactggtcagaggttcgaaggccggcccctcggaagggttcaacggccgcctcaggccactcgggctccgcgcccactactgatcaggggaacgatcttgtaacggaatcccatcagagggaggcatcgagccctcggacctcgtcaaaaggggaccgggtccgacagatcaccccgcagcaacttcactggaagacccatgttcgggcgccctccaggggcaacatggtgcttctccccctccctcctggcgaaaagcgacccagggcc

SEQ ID NO: 16387 - DNA, 456 bp, Zea mays
  Peptide Sequence Number=SeqID_59762
atggcgccgatgtgtagtggtatagtggtgaagatcggatccggatgcagagataaggcacacgtccatacccagcggtgcaactcgagctcccagctacgaccacatgctctcacgcgagacgcgacgcggggagggaagaagataaatcctaattgcccaggcggctgtcgcgacccgagcgctccagacccgtccaagagtagcgccttgagcctggccgcggagacctgcttccgtgggaaggccacggccgcggcatggttaggcgctgactacgccatctcgatgcgaagggattcctggaaccggaagcttgccaccgaatccgacgacagcgacggcgatgacgcccacgcgaaggcgaggagggcaaggaagaggagtagtgcagtgggtaccgtcgccatggaagtgggcagttccgcgaacgattcccggttcccatggcgatga

SEQ ID NO: 16388 - DNA, 440 bp, Zea mays
  Peptide Sequence Number=SeqID_59763
atgccaccgacgcggcccaagataaagatcatccacatcatcacgccggagatcatgaagaccgacgtcgcccacttccgggcgttcatgcagcggctcaccggcaagcctgcctgctgttccgacgtcacatcgacaccgccgccgccggtaggggagaggaggagacagagacgtccaagaagaggcgaggccgacactggctccggtgaccgacgacgagaggagcggtttcacggtgcaaggattggcggcgacaaggagaggaagatcaagtgcgaggtgaaggtggaggatcggaaagagctaggcttcgacgggtatgagtatgagctcggccgtagcgacctgtggatggacatggacctcagcccgggaggagggttcttgagcttcctcccggccttcggctcgtccaggatggacttggttggtgaaat

SEQ ID NO: 16389 - DNA, 264 bp, Zea mays
  Peptide Sequence Number=SeqID_59764
atgaacaaaaacactggcatccaaggtgccattacaaacggaactccggttccacctccgcaggaggccctcgcccatgcccccaactcgagaggcaaggacgggcagaaggccgtggagttggaggtcggtccgcgggtggcgccggcaagctcgtcggcggcggaacctcttccagctgccgtggcggaaggcggcaccgggagcagctccgaagccgctcggctcagagagccgggcacgctgcagctgcccatgccgtga

SEQ ID NO: 16390 - DNA, 345 bp, Zea mays
  Peptide Sequence Number=SeqID_59765
atgaagacaacgcgcccgtgttccgttcctcaaacggctcgcgcacgcgcaacggctacccggcgaaccactcgccccgtcgcattaactccgcggcgggacaggcggcgcctctggcaggagaagcaagcgacgcttcgcctccgccataatgaccgcgtaaaaaaaaaggctccgagcctccctactgatcagaggttcgaaggctggcccctcggaagggttcaacagctgcctcagagcacgtgggctccacacccactactggtcagaggttcgaaggccggcccctcggaagggttcaacgaccgcctcaggctactcgggctccgcgcccactactga

SEQ ID NO: 16391 - DNA, 240 bp, Zea mays
  Peptide Sequence Number=SeqID_59766
atggatggaggcaagaagagctttgaggtaccgagtgcacgggagaaggtcaaggagaccaggaacccaaagccaggagaaagtaccattctgagctctgctggaggagaaacagaaaagctaggagaagaacaagaaagattctcaagaaaatcctcccaaaagttgaagtcaaacggagaaagaacggaggaaaaatcacttagtgtgctgttggctggtgcacaggacagtgaatag

SEQ ID NO: 16392 - DNA, 195 bp, Zea mays
  Peptide Sequence Number=SeqID_59767
atggctgccccgcgaaccactcgcccccccgtcgcattaactccacggcggtacaagcggcgcctctggcaggggaagcgagcgacgcttcgccttcgccataatgaccgcgtcaaaaaaagggaccgggaaagggggataccccgaaaaggacccttctccgtgaaggaaacaggctccgagcctccctactga

SEQ ID NO: 16393 - DNA, 528 bp, Zea mays
  Peptide Sequence Number=SeqID_59768
atgaggacggcacgccctcggacgccgacgatgctgccgccgacgcggcccaagataaagatcatccacatcatcgcgccggagatcatcaagaccgacgtcgcccacttccgggacctcgtgcagcggctcaccggcaaggctgccttctgcgccgccaccgacgtcgtcacatcgacgccgccggtaggtgaggacgatgagacggagacgtccaagaagaggccgaggccggcactggctccggtggccaacgacgagaagagcggttttacggtgcaagtgcaagaagagacggcgaccaagaagaggaagatcaagtgcgaggtgaaggtggaggaaggaggcttcggtggttatgagctcggccgtagcaacctgtggatggacctcagcacgggaggagggttcttgagcttcctggaggaggacgaaggcgtcttccaaggcctggctgctgacattgacttcttgcagccttttggctcgtccaggatggactttgttggtgaaatgtacgcgtcttga

SEQ ID NO: 16394 - DNA, 69 bp, Zea mays
  Peptide Sequence Number=SeqID_59769
atggccctatcaaggaagagatttatgttgagcaacctcccggctctgaagataatattatgcttttag

SEQ ID NO: 16395 - DNA, 289 bp, Zea mays
  Peptide Sequence Number=SeqID_59770
gcggcaccgcggcgatgccctggtggtggcgtggcggacgtgcggtggtgcctgggggtcgcggccgatggggactgggattcggcggcgtcgcgttgctgctctggtggctggctgcgactatgcgatggtgcctaggggtcgcgggctcgcggctggtggggactggggactgatcactggcggcgtgcccctggtggctagctggctgcgactctatgcggcgtgcggcgtgcccctggcgggtggcggactggcggctggtggactgcgtcttccatggtggtga

SEQ ID NO: 16396 - DNA, 432 bp, Zea mays
  Peptide Sequence Number=SeqID_59771
atgggcaagagcaagaagggtggtagttcttcgcatcactcaggtgataagcggaaacgtgagccgactcctccctcggaggacttcgacgactcggagtactcggaggaggagttctcctccgagtcagagggctctccggtgtggacctacattcgggccgtcgagcgcgccgggctcgagggctcggatgggtcggagtactcctcggacgaggagaactcctcggactcgtccgaggagggcgacgacgatggcggtgacggcgacgacgacggtggcaacggtgatggcagcggtgacggcggcgaaggcgacggcgacggcaagggtggcagcggcgacggcggcgacggcagcaagggtggcagcggcgacggtggcgatggcagcaagggcagcagcaggggcagcaacaaggccagtggctag

SEQ ID NO: 16397 - DNA, 771 bp, Zea mays
  Peptide Sequence Number=SeqID_59772
atggaagactggtgtaaaagactcgagcatcttggccatgggatatgcaaagaacctgcgttttctgttcgggcctaccttatcaatctgcggagctactcaggaatcctagaaccagaagcaaccaatcaaaggagagaaggggaacagccagaggcagcaaatggtgggcaggacagtactcacgccagggcctcagagatgcgggcaaagtggtcgcggccgtacgccgtgttgaagtactcctccacttccggctgccaccgcagcctcgggctgtatgtgtaccgcgccgtttcagcagctgccggcggtgccgccgaggtgggggagtgggagtccatcagcggcgagggccgccggttgcgggccaaaggcggacggggaggtgatgtaggactgggtagggaagaagcgcggaacggcgagcacgaggcgggagaatcgagaacagaggcggcggcaagagccgagtggagcaagcaaactatgggttatgtgttttacagtgctaacaccttccccctgctcagagttggattatccccaattcacagcatttggaaatctcttcttcaacaccttatagtcttcccaggagccaatctttgcatcaagaactctgagtaccttcggactcgggttaaaaccgtacacgatgtgaaaagcatggtcgagacgaaggctgatgttgctccaaagctatgcgcaagggagcttcggctcaatggcagaaaaaggaaccgacttaaaggggaaaatgctatctag

SEQ ID NO: 16398 - DNA, 231 bp, Zea mays
  Peptide Sequence Number=SeqID_59773
atgggtaaacgggtgacccgatgggtgacccatacccacatgggtatgggtatgggggtaaatccatacccaccagtgtatatgggtgacccggtgggattatttttgtgtcgtggtctcaaatgcttgcctactccatattatggtgttccaaagaacgatggttgcactcaacccttctcaagtgatctaatgatcaacttgagtccatggttcttgaaagggaattag

SEQ ID NO: 16399 - DNA, 366 bp, Zea mays
  Peptide Sequence Number=SeqID_59774
atgcagatctcgaaagcactctctaacaagaatgtctatatctactcaagaagggccacagaccggtccggtgtaccaccggaccccaacgttcggccgcaatcagcgcgatctgctctgggccttccttcgactggccaccagaccgccatgtgtcagtcgcacgttgaagtagttgttgcagccaaagtaatcgttggagatcgaggtcccacgaaccaccagaccgtgaacagtaaggtccagttatttttagccaaaaatcccgaatgtgaagagttctcgtacagtgggtctagtgcacatgaacccggtccggtgctccaggtcgccgagttctacctgaagcgctctttggagaagtga

SEQ ID NO: 16400 - DNA, 981 bp, Zea mays
  Peptide Sequence Number=SeqID_59775
atggctcgacttagacacactgctcgtaagtcggtgattcctttcctgctgtctcgccttgcggagcgtcccctgcgccgcactgtgtccggtcagtcgagtcacctggagagactgcaccaccgcctgcgtgaggagcaggagcgccagcgtcagcacagggagcagcagggctcttcctccccacctgagcaggaggtggagtccgtgaggcgccgctcctctgttccccagctggaggcgccccctgcaccaccgtgggacaccccagctgttggaggagctactggaggagcacggagtcctctgagccgcaggaggcggaaaggatgggtcgcccgacccatcacccgtgacgccgctcgcggttgtcacttccacgacgcactcgacaccttgctgcgccaggctttcgaccggcacacctggtcaatcgagtatcgttgtgtagtctaccagcacagtcgcgggaggtacccggaccgctgggaggctacctgcctagttcgccgtccggaggatgacctccggggtgcagaggccgtttcggagcactactccatctccgagagggacactgcagaggcggctatgcaggatgcagcactgcgtgcactctcccagtactgttccttgttcggtggggtggccgacggtcttaaccttaggtactacccccgccgtcctactggcagcaccgagagtgtggttgtctcacctgttggtgagggtaaccctaggttgagcagcacagtcaacctagtcgcggtgcttaacactgagctggatcactctctggacgagctgagcagggctcgaacggagattgctgagttgcgtgctgagctagcagagcgccgccaccaggagggtggttctcccgctcctgttgggactcagctcccttaccgctcgccaccacgtggtcaccacacttatggttcccctgcctgtaagactaggatagatctggatccttag

SEQ ID NO: 16401 - DNA, 186 bp, Zea mays
  Peptide Sequence Number=SeqID_59776
atgactcgatatggggaaggggaagcgctgggtttatatagtatagggcacgagggcaggcagagtccgaccccgagaatcccgccagatgtagatgtaattgtggacattactccacaacccatcacactcaatcaagaatccaaattagacatgtatcacaagaacaaacattcaagcgtgtag

SEQ ID NO: 16402 - DNA, 618 bp, Zea mays
  Peptide Sequence Number=SeqID_59777
atgaagaatggacctggaagaaataattgctctggtggtagagttgaaaagtcaaaaggattttgtcctaacagctttgatcgtgtcctccttgatgctccatgttctgcgcttggcttgagacctcggctctttgctggtgaggaaactctagaatcgctgaaaaaacattcgaagtatcagaggaaaatgtttgatcaagctgtcaagctagttcgtcctggtggggtgattgtttattcaacgtgctactccaacctccccatggctaaccatcctgtgcttcagcccgtcgaccctgttctctcccagggcatcgatgtcctccaccctaccgatcccacgatcgtagattgggagcgcgtgaccctcgctgcctgcaacgccgccttggcccgcatggaagccgccgatcaggaagccgccgctgctcaacgcgaacgagacactgcagacgctcgtgtccgcgcggctcttgctcgtgccgcccaagaacgcacgacgaccatctcccacctccccgacgccgacgatgccacgtccttccgctacctccgatggtggcatccctcaagtcgatgcctcgactcctctcactgtagctctgctccaacatga

SEQ ID NO: 16403 - DNA, 561 bp, Zea mays
  Peptide Sequence Number=SeqID_59778
atggaggaggaggtagagtcatcctcggcgctggcccttttgctggtactggtggcgctcgtcgtggtgccgtcgatggcgctgctggtacgaggccggtggcgccaggccgcgccgtggagggaggagcgtcctttggctgtgactgaaagggctcgcggggtgacgaactcggtgcactcgtacgacgtggagacgcgcaggtggacgaggttacatcctgctggagagcctccgtctccgagggtcgcgcatgctacagctgcagtgggcaccatggttgttttccaggacaatctagttgagaattacagccgggttaacaagatttttaatgtggattctcaaccaatcaagagaagctttggaagagatggttctatggggttaataggattggagaatctcgaaaatacttgctttatgaacaattcaattcataaaggcgaaatgattctagcagatgatacatgcagaatcttggaaatactagcagatgagtaccagagcaaccatctagctcgaaatgattatgttatagttgatacatgccatgtgtaa

SEQ ID NO: 16404 - DNA, 366 bp, Zea mays
  Peptide Sequence Number=SeqID_59779
atgaacacacttgatcagccatccgcttcagcgccggcacatgtgtcgcgttatgcgatttcgttgtcctctcagcaggaacgacattcaaagcaagctgacaggtcatcatatatctcaaacaagcattctaaagctaacaacagggagtatggttttatgcttgtaagatatgagcagcgctatgctgtgtgcttgactaggctatggtatttatcttatagtacaggaaatacacagcgaagcggctcctatgttccattgaagaaaggaggcaattcaattctgaatgataagaaaaataccaagattcagcaatgccgtagcataggtaggtgtgactcttctgttgaggtggaactttga

SEQ ID NO: 16405 - DNA, 4821 bp, Zea mays
  Peptide Sequence Number=SeqID_59780
atggcgcctcctgttgacgtggcgggtctgtgccctaggcggggtgacgtgggggctcctccgaagccgaggttgagtctgtcttctgttgccgaggccgagtccgagccatggggtcgggcgaggcggaggtcgtttggccgaggccagggcggagtccgagccctggggtcgggcgaggcggagtttcgtcgtcttccgggtcttagcccgagtccgagccctggggtcgggcggagcggagttcgccgtcttccgggtcttagcccgagtccgagccctagggtcgggcgaggcggaggtcgtttggccgaggccagggcggagtccgagccctggggtcgggcgaggcggagtttcgtcgtcttccgggtcttagcccgagtccgagccctggggtcgggcggagcggagtttgccgtcttccgggtcttagcccgagtccgagccctggggtcgggcggagcggagttcgccgtcttccgggtcttagcccgagtccgagccctgggcccgagtccgagccctggggtcgggcggggcggaggtcgtttggccgaggccagggcggagtccgagccctggggtcgggcgaggcggagtttcgtcgtcttccgggtcttagcccgagtccgagccctggggtcgggcggagcggagttcgccgtcttccgggtcttagcccgagtccgagccctggggtcgggcggagcggagttcgccgtcttccgggtcttagcccgagtccgagccctggggtcgggcggagcggagttcgccgtcttccgggtcttagcccgagtccgagccctggggtcgggcggagcggagttcgccgtcttccgggtcttagcccgagtccgagccctggggtcgggcggagcggagttcgccgtcttccgggtcttagcccgagtccgagccctggggtcgggcggagcggagttcgccgtggcgcctttggcaaggcctgactgtctgtctgactcaccctttgcgttaaatgctcctgcaactcggttgctgaacaaggtcacaaaggatgggattgagaccactcgaggttccgagctcccgcaatcaccagtgagcccaggtgtcaggcgagcatccaagattgtagaccaaggctttaccaataatgccccagagctgagtaccaacaaagggagtttgctgaggtgtagcagcatccgcttcggggagaagcggaactcaatttttgcttgcgctccagacaatttggagcagaaatctggacaaacgttcgaagctgatgcccattctgcgctaaaattgtgctctggtatcgggagtgtagttatagccaagtgttctcacatatttgagagaaatggggacacctttgatgggaactgcagtttgcaagatatcctcaagcctggtttatggctctcaccggagaccctccgccggttttggcgtgtctctgagctgaagcctaaggattttcttgacattttgaatggttttggactcagtgccgtaaaagtgagaaatgcaagatttctatggaatttgtacaggtggacatcgcggcagagcaaagagttccaacatctgccaaggtcaaatgagacaatggtatccatacttgcagatgctcatatgctcagtcaagcagaatcactactgctttcattgattgatcatatgactccagctgtttctagtgaactattcagtcagattatccaggtgtattcagaagcaggcaaccttgggaaatcagttgcactttatgattatgcaaggggcaagcatttgattccttcagcttcatgctatcaagtacttcttcattttctaaccagaaacagaaaggatgaattgattttgagagtatatctggacatgcttgaagttggatttggttcttgcaccgaaggaaatattcttgattctgttgtcatggctttaatcaggaaaggtaaacttttggaagctcttggtattcttcggcaattaaagagtttgggtcttaaattaagcaagggagccttgtcaaatatagttgaagaatttaacaagaaaaaggatattggggatctgatgaatttcttggaagattggaggtgtatacctgagttgcgtctttgcaacagaatccttgcgtctttgtgcacaaatcttggtacttgtcaggcatggttggtcttccaaagtttggaggccttagggtttgctccagatgctacgacttttggaattttcatttttcacagctgtagagaaatgaaactaaaatctgcacttgtatatttatcagagtgctttgctaggcatgttaaacctggagtgtgtgcctataatgctattttaggtggtgttttcagggaggggctatatagacatgcaaagtatatatttgaagacatgattgaaagagaagtaacacccaatctttcaacatataagataattcttgcagggtattgcaggtataggcggtttgatgatattgaacaagtcttgaggcacatgaaaaccaatggtgtaaatgttcttctctctggaaactgtgtgctctccaaggccttatcattcttggggctagatcacctaggggtgaaaatcaagagagataatgtcactggtttcccaaaagctgagttttttgattcagttggcaatggattgtatttggacactgattccaaaatgtttgaggtttcattgtcacaagttttggatagcgcacttctcccagatattaactcagagctaatcagggcatctcagcaaggcgatgttgcaagtgctcttcttgtgaaagacaaagcttttcaatggggatatgacatttcaccagatagctgctctgagctattcaaggccttatgtgtgagccctgcttatgttatagatgtcattgaccttatggaggagatgccagatatactttacaaacttgatgctcaaaatctagatttggttgcccaaacattgagtaggaatggaatgtctgctcatgcaaaactggttttagaaaaaatgttgagagaagacttgtcaatcagtcacaatacatatacttatttaatgataggtttatgcgaagaaaggaacatagcagggttttgggaatgttggaatcttgcaacaaagtgcagatggtcacctgatagcaaggatatgatgggcctcatcagttacttgtgcaaatggggagtgattgaggaagccctgaaacttatgaactctttatttgactgctaccatgatctgttttttagtgcatattgtgcacttctcaaagagttgtgcaggacaggtcataccagcattggatgcgcaatgttggaggctctcaaagaaaagggtgtggctgtggatcgatcattattcttttatgtgatggagggcttcctaaaggagcaaagaactgctgaatcaattggaatgcatgacatgtggcttagcaaaagcaaagaacttgatgtttttacttaccgatctgtgttgccttcattaccatggctggacacagatcgagccaagaacttggtagaatctatgctgaccgtgaaacttactgaattctcatatcgcggttgcattgtgaatgaattaatgcaaacaaggaatataaaatgggccattccagtcttgcaagaatcagctcctgggaagctcagtgccactttgttaaattccttacttcaagcctatggttggctaaaaaattggagaaagttagatgcagttctttgcaagatgctaaagatgcatgccaccctttctatatctagctaccgctttcttgtgtgcagaatgtgtgagcaaagtcgtttttctagcgcttcaagccttagagcacttttccaacatactgacaagtcaagagaactgattgcatgcaacattctaatattttatctttttcaaagaagaaacagctcacagattcatgatttattgaaggacattgaaggtaatggtatttctcttgacaaaaccacatatgatttccttgtctatggatttcacaaatctggggatatcaatgattcagttaatgcgcttgatgcctgcattgctcagggaataaaaccaagcaaccgcagtctcagaatagtgttaagtcattactgcaggctaggaaaccatgagaaatcactagcattatttcacttgattgagcgcaatggatggaagcatggtttaatcattaagaccaccctagcttcatgtctcctttcatttgggagacaattggaagcaaaatcatgtctgaacaacctgagcaaaggtgagtttatcggatgttcaagcaattttgatgatctcatcaaggaattctgcattctaggagatttgaaaatgactctttatctgctaaatacaatgttaaagaaaggcacactgcctaatgaagccagttacagttctgttatatataaactttgtacattgaaggagttcgatcaggcacttgattttcttgctgaaatgcagctggcaagtctaaaatcaagtgaaatctcctgtgatgcacttgtacatggcctttgtgccatgggaagaccttctgatgctagaaaggttttggaaatgctaaccaccttgggatctgcaccatcctatggcatgtttagagttgtttttgataactattgcagaagtagcaatctacagaaagctgcggcacttctgcatgacatgcaacaagcaggacaagtgcccaactttgagatgcattggtctgttataagcaatttaagcagtaccaatgagaaaactgaaggacatggagagtgcattttgccaaacctttttctttctgcaaattccccttaa

SEQ ID NO: 16406 - DNA, 1666 bp, Zea mays
  Peptide Sequence Number=SeqID_59781
atgccgcgtgcgccgtggcaagtggttcggagttggtcggtgtatgggtccacgctgtcagtgggccagatcattgtgggcaacgtggagcgaggaccgaaagatgaaggtcacccggggcccacaggaccccacctgtcagggcgttgtgtcagggggaaaccttcgtggagactgaagaggaaggccaagttcgagggtgttcctcgtccactcttctcgatccgcaatgcgtgcggccgccggagacgccccgccgcggcgtgcgggggggagaagagagatgtggggagggagaaggagagctggggggggaaggagaaggagaaccaggtggctgaggggatcgtacggctgagagggaagttgcagtggctatctagatggaggctgagggaggtagagtctgtctcctgccactgcagggtagatggaggtcttaaaaccgttgtaagtgctaggaagtttgtccccggtgcaaagctgtgcatgcaacctgatatcataccaaacaagcgcaagtcaaggagctcacgcaaggagagatccaaaactcaatcaccactgctgcctgggcttcctgatgaactggctatttcctgtctcatgcgggctgctcggatcgaacacccaaatatgcggttagtctgtaaacgatggaaccgacttttgtctggaaattattattactccttgcgtaagaaattcggcatggcagaagaatggatctatgtcttcaaaagggaccgtgatcagaagctatcttggtatgcgtttgatcctgtaaaccagctctggaagtcattgcctccagttccaccagagtattctgaagctgttggttttggtagtgctgttctcaacggatgctatctgtacttatttggcggcaaagacccagtacatggatctatgaggcgcgttgtattttacaatgctcggataaacaaatggctacgagctccagatatgctgcaaaaacggcacttctttggttcttgtgtcataaacaactgcctttatgttgctggtggagagtgtgtagggatacagagaattctaagatccgctgaggtatatgatccgaacaggaatagatggtctagcattgctgaaatgagcacaggaatggtgccctctattggagtagtacatgatggcaagtggtatctaaaaggtctaaattctcatcgccaggtcgtgagtgaggtctatcttccagcatccaaaatgtggtcagccaccggtaatgaaatggtaacgggctggcggaatccaagcatttccctcaatgggcatctttattctgctgattgtcgtgatggctgtaagcttcgagtttataatagagagatgggatcatggacaaggttcattgacaccagacaccatatgggaagctcacggtctctcgaagccgcagcctttgtctcccttaatgggaagctctgcatcatccgtaacaatatgagtatcactattgttgatatattggacccaacaacagctactgaggtcgacagtgctccaagtttgagtttgtccatgtatgaagtggagtatacttacacaacctcagagcctgacttggaagctgaaatggaatggcaagctgactcatcaggaatttgcacaactgatacagttgatgtaggccgccgcacag

SEQ ID NO: 16407 - DNA, 588 bp, Zea mays
  Peptide Sequence Number=SeqID_59782
atggatcgcgagctcagccccaggggcaatgctccagggagagggagcggcggcgcgtcgtcatcgaagcacaagaacggcggcggcggcaagaagccgatcaaggtgctttacatcgccaaccccatgcgcgtccagaccagcgccgagggtttccgcgccctcgtgcaggagctcaccggccaacacgccgatccctccaagtacagccccggcgaccttgactccggcgctgccgcacagggtctgagccccagggccagggtcgcggacgtttcgtcggaaaccatcgtcgcaagccacagccctggcagtaaggccgcgccgcacggaggggactactacgacgtcgaggaagacgaagatgacgtcttcaggtcgcctcacatgctgctggagaacaattatacggtgttctcgccgccgacgctactatatgaccatcacccgcacagcaagttattttcaatggaaagcatcaaattaacaaaagacaattgcatgaagaaacgtcaaagacatcagattatagccaatggggaacaagagcagcaaccattagttcatactaagattattattttgtaa

SEQ ID NO: 16408 - DNA, 450 bp, Zea mays
  Peptide Sequence Number=SeqID_59783
atgaagtgcaagtgctcaacatgtgaagatgatggatggaagtgcagaagtggaaaagaaagtgcaagccaaagggacgacatatcgagccgagaaggccgcagcaacggtgaatccggccgggaaggccacgacagcgacagatccaacgaaggcgatgaaggggagggcggcgaggcgggtccagccgggcaggggcctgcgccggacctggtaggaagggttgacgccagcgacaggagaagctcaaaagcaggcacgggcaggcataacccagtgacgggggcgctggcgagtgagcaccggcgccgcctctgctggggaggcgtccatccaagttccaaggcacaaccgacgacacaacaggaggcgtcttggctacgcgtgcgcgagcagcagcaagggaggccaccggggaagctgctggcggcagctgcagaggctgggtaa

SEQ ID NO: 16409 - DNA, 291 bp, Zea mays
  Peptide Sequence Number=SeqID_59784
atgcctcatttctccaaacatggtggtcttcctcatgagaaagctgcacctcacctaaagcatcccataagagaagaaattgttgaattccaaccaaagaaagggggatttgatattagctatccattgcctgttctcaagggcctattccactgtcgtagaggtaagagctcttttggagcaagatctctgatggagcatccatttagccatttatctgtccagaaaaaggctacttctgaatcggaggctgggttcgcagcggagcatgacaatttctggtccaaatga

SEQ ID NO: 16410 - DNA, 342 bp, Zea mays
  Peptide Sequence Number=SeqID_59785
atgccacacccagatgtatgcctcatgtgtgatcaagcccaagagacaattcagcacctccttactgcatgcatttttgcccggcaattttggcacaaagttcttgctgtttttggcttggggcacctcactccggcagctgatgaggagtcttttgcagactggtggggaaagagaaacagagcagtgtttcatggggagtctccatccttacctagaatttttagatgtttctcagatgagtgtgttagctgggcaataacaggagctaaggagcttgagagccttggcttagttgcagctctgggcgaggtcgggtcaagttacggtaccagtttgtaa

SEQ ID NO: 16411 - DNA, 465 bp, Zea mays
  Peptide Sequence Number=SeqID_59786
atgtctccgatctgggtgttcaagtacggctcactgatcttgaacccaggcatcgccgacaacgccctcgtcatcgacttcatcggggactaccaccacgtggcgctgctatgtacccagttcctccttggttacaagaccaagatgttagagtcagtcaccctccgcttgcgcacgcctcgcattctctgtctcgccaccgcgctatcgcctctgctgcttcgccgcgtcgtcgcctctctactgctccatcagtccctaaagtgctgctgctccggcgccatgggtggcgccctctggcagctggctgccgggggcacgtggaggatgcagaatggtcctggtggtggcgacagcggggggccaacaactgcgagcggtactgtgctcctgcggtggcttcgaatgcagggaccgggggtccataatagcgcgcatctagctggctcagcatcgtgggtctga

SEQ ID NO: 16412 - DNA, 179 bp, Zea mays
  Peptide Sequence Number=SeqID_59787
ccgtcgtgccgtcaatggggctcagtgtatgcggctcgctctgccaagcttgggttcgcccccttggggaggagtgcggtggcaatgagattgatggttctggttatgactatggtactggcaaagatgaagctgcagaaggagacttccaggagttccaagactacgacgagttctag

SEQ ID NO: 16413 - DNA, 726 bp, Zea mays
  Peptide Sequence Number=SeqID_59788
atgtctccccagtacatagtgcagctgttcgagaagcaccgggtgccctgctgtagggtgaggatgaccctggagcctcatcccttacagccaggctggcgttcgttggactccgagtctttcggataccgggctgaggatactatcgaggccattgctctccacgggctgaccaccttctgtggttttcaccccttggagctgtccactcaccccattggtttgttccccgcggagaaggaggatgacccaatgtggaaggatcgagtggaacatgccaaggatgctaccaagatcaccctagacaacagagaggaacttgtggtagacctatccactgagatggtggaaaaggacctgcaggtggaacagatggccaaccagattcaggagcttgaggagctagtgggagccaaggagaacaccattgaggttcttgaggatcagctgatcaacactcaacaacaactcgaggaggctaaccaacatttggatatgcaccatcaggagattcaggacatggaggccaacgaggatgttgacatcgagggaggagtagagctggagcccgcatctagcctggacattgctggctcagggagacccccttcccccgagtcaagtgttgcctcatggcaggaagagcgcgtcgtggacagaatgaacgcattcctccaccaccgccacgcctcctaccatgcaagaactgatggctcagcagaatga

SEQ ID NO: 16414 - DNA, 819 bp, Zea mays
  Peptide Sequence Number=SeqID_59789
atggcccgcgcccgcgcttataaaaccctcccagacttagattgtacccttccgcgcaccctcaaacctcaccggagtctagctcgtcgccgtttgcccgtgcgcagcgagtccgcggccgcccaatccctctgccaccatagaccggccagtggagccattcccaactccgtccagccctcggagaagactgtgcacacctccgtgaggctccccgagcaaggaatcggagtttgcttcaccggagaggccagtccacgctcgccggagctctcaaccccgccggagtacgtggaccaggtaaaccactccaccatccttcgattccttgtgcacacggtcgctacgttaccccgtgaagctcaccatgccctcggattgaaccagttcgccgtggtttggccggtacactcgccgccgacgagaacacccgcctgcgcgcgtggaccgggcgattccggccatctccgacgtcaagccgtacctcaacgtgactgccagattctccccgagccaaccccacccttcgccgaacctccctcgccgccgactgtaatcttgctgacggagagtacatcctcgtgccggagcaaagagctgctcaggagtggactttacccctcatgcgacctgagacgaggtctccaattccggttatggtgggtacaagtgcggtcactgcacgacggccagtcggggtcagtgaggcattgttctctggaggaaatggttgctggaataacttggccatccaccttgccaccgggttggactgtcgagtgggaccctgcctcggctgaggaggagcatgaggagtga

SEQ ID NO: 16415 - DNA, 138 bp, Zea mays
  Peptide Sequence Number=SeqID_59790
atggggagttggagggagttggtggggggttttatatgcgagtggggagtgctcgggtgcagagtggtggtgatggagcaggtgacacgaggcagcaggggcagtgctttgattctcacggttggtccttttgactga

SEQ ID NO: 16416 - DNA, 579 bp, Zea mays
  Peptide Sequence Number=SeqID_59791
atggataaggtgcaaatcaatacaaagaatcagaggaaattcaactggaaaagattggctcgaagcagccaagaaactgctcagtctgggtgcaccggactgtccggtgcgccaggctggcatccgtcaacgacctgctctcgggacttcgtcggcggcgtacggctaaaattcaccagactgcccggtggtgcaccggactgtccggtgagccaacagtcggtcgggccaacggtcggccgcggaatccgcgctcgacgcgtggcaagtgccaacggtcggaaggggcaccggacagtgtccggtgcgccaacggctccaaagcgccaatggtcggcttcgccaaagaaggaaagaaatccgcaccggacagtgtccggtggtgcaccggactgtccggtgcgccaggcgacagaaggcaagaattgccttcctggaatgcactcaacggctcctaactgccttggggctataaaagggacccctaggcgcatggaggaatacaccaagtattctctaagcatacctaagcaccaagacttcgattccgcgcatttgattctttgtgatagcaactag

SEQ ID NO: 16417 - DNA, 2313 bp, Zea mays
  Peptide Sequence Number=SeqID_59792
atgacgactcaaggaggtttgcagccgacaagcaatgaagctaatatgtgcaccaacgacaatggtagccaacttggtacacggattgtggacgagattatggccgggaagaacgtcttctttgatcttcctgacaagttgactggtgagatatggaccttgaaattccattgcattggagcacaacctggaaaagaaattgtcatagtaaatattgataaagcttatgttgccttttacaacgtggtgtacataaaatcgaaacttggatattctgggagggacttcttgttttacaagaaacgatgtggcattgatcgatccaggctgttggcacttgattacatccaccaagaagaggccatgctgtctgataacatggatgagagaaaaataagttttgtgctcacaaaagatccacccagtgatctagaggtaagcataactcccatcaagcgtccaaggcagcgaacaaatgttgatgaagaaactatagaagtgtcgattgatgcatataaggagtggcttgcaatactacaacatgataatccagaaacggtattgtatgaacgacaaagcaatgatgacctaatattatcagatgaagaaattcatggcagcagcaaacctactgctaattggccatctcatgctagacgtcataggaaaagagatcgtgatgttattggtatatatgtagataacgatggagtcttcaaaaaggaggggcgtggtacccttaagggtatagcagcagccaccaagcgaatcaagaacggtgatcacaaacttaagattgaattttcatctaagcttggaggtcctgtaggaccaaacgctcgcacttttgtggatgaaatcgtattgtttacaaagaaaaaggcaccactcattggagtgaaaaagtggaaagatatagagctcaatgttagatcttctatagcctctgacgtactgcgaaggtgggagtttctaaccaatgaggacgcgcatgaaaagatctggtctattgctaaggagagatacaaaggatggcgatcaacgttaagctcaacatacaaggcatacaatagttatgctgaaaggatgaaaaacaagcctgaagatgtagacatcgtcgagtggcattacatggtgttgtattttggatctgagaaattccagaaaataagcagtcggaactcggaaaaccgtcagaaacaaagaacgaagcatataatgggttctagaactttttcccaaataagctttcaacagagagatccagaaactggtatagaaccaaccgatctatcccttttgatgactactcattgtaaaaatgatgaatggtcggaagaggcttcacgtggcatttatgagaacgcagctgagaaaattgctgagaaaatatatcaaacagaaaaatatcatctaacaagagaagaggaaaatgctattttccaaacaacattcaaggaaacaacaggatgtaaggcaaacagacttcatggtcatgggtacctatcaagatatccaacaagaagtcaagtgatggaatcaaagttcctcgaacaagctcgtgccacggttgcaaccaaccaaaaaaacattgaactcgaaagtcaggtccagttgttaaatgaaaaacttgcgtgtgaggttgcagaacgagaaagaatactccaggaaaaaatgcaagcactgcaagaagaagaagaaaaaaaaagacaagtgcttagagaagaaatgaggcaagaaatggttgctgcccttgctgttgtagcacaacagagcaaccgtgaaagcaccactccaatcgatccttcttccattgtccctactaaacctcctgaattcatcccagctgattctcctgcacctgcaccaagtagtgcaaacaacgttcgtacaccagacacaaacaataagaaagacaatatgccagcaaactatattagctcttacactctaaggaatgctgtgacaagacgtacaatccgcaagtgcaagcgagaagcaagcaggcaacggcagttgttctatcgcaattggtgcctttcgcaacgatttatggtctatcgcaacgatttttgcccattgcaagaagtgaataatcagaaacaagaattattggaatctgagtttggaagcctggctcgaaaaaatcccaaagttaagcgtgctcaacttgcaccccctctgggatgggtgactagatgtgaagttcttactggaaggaaaatcacagtcaccggagtttgtatgactggaatattggtctggcaggtcttaggtgtgctagacagcatgatggatgtgatcgatgaatag

SEQ ID NO: 16418 - DNA, 429 bp, Zea mays
  Peptide Sequence Number=SeqID_59793
ggttttccttccatcttgtgggaggtgctcaacttcgccggttaccctacaccccctttgtacatggtgcagttgacgaacgacaccaccaaggcggcatctatgaagactctgacgaatttttgcggctaccatcccttggagatggtgatgcacctcttgggactcttccccgctgagaagagggatgaccccatgtggtgcaaccgtgtgagccatgtgaaggacaccactaagctcaccctcgacagccgagaggacttcgtggtcgacttgtcctcagagttggtggaaaaggacctacaggtggaacaactgagacaacgcatcgccaccctggagcagcagttggcgatccgggacaacagcattgatgtcctggaaaaccagctccatgatgttgtagcatcccaaaaattcaaatcttga

SEQ ID NO: 16419 - DNA, 462 bp, Zea mays
  Peptide Sequence Number=SeqID_59794
atgcctcttctgtcattgcactttgggcatagggataagctggagcttaaagccatgaaagacggttctgcaaactatgctactttggaaaagaaagcaaagttgtatgaaaagttatccagaggcgagctacctgatgaagaagacaaggagaaatactgtgtggatttcttccaaaaaggtttcgatcgtgtctatgagcctcagataccagagtgtagccatagagccactgatggtgcggaaccagtaaacgatcatgaagattctatgcctaatgccaaaccattggaccttggccgagcaggcactacaatcgacagagatgaacacaagcgctttgtgagggaagttcatgaggaagtaactgaggcaaggcagaaggcctcaacgaacatggaggtggcggttgagaggagcttgtggagcctgtcaagtggcagggaccgatggataggctag

SEQ ID NO: 16420 - DNA, 300 bp, Zea mays
  Peptide Sequence Number=SeqID_59795
atgccgcccaaagagctgacggggttctactacgacctagagaagaatcgctacatccccatcaggggccccatccccggcgcgctttggcacccccgggagagcaccgcgctcggagacgactcgcccaagcggagcgtcatcgtgctctcgaagttcgtcagttgctccccgtccctgagcagcgcgatccgcgtcaacccgtggagcgtggagtccgtggaggaggccatgaacgccgcgttgcggatgccggaggccgagcagtggctatggcacgaaaagcactacagattctga

SEQ ID NO: 16421 - DNA, 552 bp, Zea mays
  Peptide Sequence Number=SeqID_59796
atgtccgttgcgtccccggcctcgcccacctcgccgcccgcgcccgcccctccgagccgcgtcatcgtctcccatcgcgtgccactacgcgcgttgccggacccgacggcgcccttcgggttcgccttctccgtcgacgctggcaccgtcgcgtaccagctccgctcggggctgcctgccaacgcgcccgtcctccacatcggcaccctcccagccgccgcggccgaagtcgcctcagatgagttgtctgactacttgctggccattttctcgtgctttcccgtgtacctccccaccgacctccaccaccgcttctaccatggattctgcaagcactacttctggccgctcctccattacctcctctcgctgacgccgtcgtcgctcggcggcctgccgttccagcggacgctctaccactccttcctctcggcgaacagggccttcgccgaccgcctcactgaggtgctgcgccccgacgaggacctcgtctggatccacgactaccacctcctcgcgctcctgacctgcctctgcaagcgcttcccatga

SEQ ID NO: 16422 - DNA, 453 bp, Zea mays
  Peptide Sequence Number=SeqID_59797
atggccacaagcctttccttgctgcgactccttcccaaggacagcaccaaccccctccttctccatcgcagcagcatcagtgcttccctcgccgcttgcatgccacccgctcgatgtattgcgcagccacattgtcgctgctcgttgtccgtcaacgcagcccctctgttttccccgttggcgcagcggccccgacgcctccacgcgctgccggttccctgttttataaagcgcagtgaacagcacgccgtcgacactcgccggttgtttgctgtttttgcgcagccccgtcgtcgtcgtcgttcaccccggagaaaaccccgtgtttgcgtggagaaggcaagtcgctcgacgctcgtcgatgttcgtagcgatgcacaaatcggaatcaccgtcgttcttgcaaacgccgatttgggtttgtttatgatatgttctatagaaaagttgtag

SEQ ID NO: 16423 - DNA, 342 bp, Zea mays
  Peptide Sequence Number=SeqID_59798
atgggggctggccttgctgcaggagcgtcgagcgccatgggagaaggagatgcagaggggcgctggcttcctgctggccgtggagcaggggacacgcccaggagaaggacagggagcgcgctcggctggaggttctgcttgcctgcagggagcgcacggctgctctccatccctgtagggcgagcgacagcaggggagagaggccgaccgtcgaggttgctgccccccgcgcacgctggagcttgctcgaggaaggggaggagacgccatggacagggaagctccctgcgcgctggctgctgtgcgtgggaggagttttttctggcggctgaaaatttttga

SEQ ID NO: 16424 - DNA, 540 bp, Zea mays
  Peptide Sequence Number=SeqID_59799
atggatgggggagggcgccatggggaagaaggaggagctccctgctcagccgaacagagaagggaagggagtggtgtgtgggagaagggagagggtggactgccatttatagagccaagctctggacatgtcagactgcaccagcaggtggcagatggtgacaaggatgatggttctggttatgactatggtaatacaggagatagagtctgtgaggagttgttctcctgtgctcccactagaagcaccctcttcaccaccactgagcgccctagccgctggagtagctgctggaggagacctagacgacagaggtggcgacagcagctcgagccacagcaccgacctttcagagtagcaggagctggaaggatgggttgcccgacccatcatgtgacaccccaggcttctcatggaagttcaccgaattcggagttaatcgatcgcgagaaacaaccaattttggagcatgttaaaacttttaattctcagaactcatgcagattcgaagatcattctcgaattataaatctcgtctaa

SEQ ID NO: 16425 - DNA, 123 bp, Zea mays
  Peptide Sequence Number=SeqID_59800
atggcgcccttcctcctcggctcaatggtgtggccgagcagcaacctcttctctctgtttcctgagaaaaccccgtgcttgcgtggagaaggcaagtcgctcgacgctcgtcgatgttcgtag

SEQ ID NO: 16426 - DNA, 741 bp, Zea mays
  Peptide Sequence Number=SeqID_59801
atgtcacatgtcgatgaccggtttgatcacatgcaatcctcatttgatggtcaattctctgatttgcatgatcgatttactgttgttgactctcagctagatgaggttcatacacagttcactgattttcgttctcatattcaatctactatgcatgatccaattatgagcagaatgaacaacatgcaaaaaagctttcaagataatatgagtgctttatccatccaatttgaatctcgatctaccagtgacagcattcactcactggatgaaagacagcaacaacttcataatgatttcagtcagttcacttccatatttgacagcttcagctctcatttttataatatgtatcctcgtcctccacctgttcaaatgaacctcaaaatcaagataagtcactcaaaacttatctcaaatctttcttatacccagaataattcttttgaactagcacaaatctttttctctatggtcggcgaaccgtccgggccagaaggtcggaccgtccgtgactctgccagagaggtttctgatcgtctggccatggtgggcggaccgtccggccttgacttttatgacagctctgataggtttcaaacagtcaatatagccgtaactggtggtacatcgggcaagcgtcatcgacttgttactcttggaggttgccaccttctagatggctcgggtgttgtctctaccgagctcttcgtgaagattgtggaggagccacgtgattga

SEQ ID NO: 16427 - DNA, 780 bp, Zea mays
  Peptide Sequence Number=SeqID_59802
atgatcgccggatttggaccccgaggtgagctccccctcccctcccctctccctctctctctcttcccctcccctcacctcttcttcctcccgtgtggccccctggcgcgcggccccggcgcgctccctccccgcgccccccagcgcgtccccgcggcccccagcggcgctccctccctgcagccccccggcgcgtccccgcgcggccccctggggtgcttcccctcgcccccccccggcgcggctcccccggccccggtggcatggccccttggcccccgacggcgcggcctcccggccccctgcgcgcggctccccagccctgaccaggcggcccaggcccacgcggaatcgcgcgcgcccacgcccgcactgggggaagtccacgacggcgtcgcgcgtagccgagctccggcgaacacctttggtgagctaccaagctctgtccacgtgaaccgagggggtggcggacagatgagtgtgttcccgcgagcggtggctggtgaattgggcgagacgcgccgcggccagaggaagaagaaggcactggcacaagcgctaggtggcttcaaccgtggcggtatctccggcgatcaccggacgctcctagcccgcaaggcagaggggaagtacggtgggggggtcaccggagtggcgtccagcgcatggcttttaccgacggccttatctggtcaccggcgacgtgaatcgcaacaatggtggcacgaatcacgacgaggagcggtcgtcggcgatgaagcggctgcgctggcggtctga

SEQ ID NO: 16428 - DNA, 768 bp, Zea mays
  Peptide Sequence Number=SeqID_59803
atgaagcccagtgcgtgggggagggcgacagggccacggccatcgggccagcctgcaggggacgccgacgagtcgggatgggtgttggtgttgccatggagtgaggtggacagtcctctaggcgcgccggcaaggagagcaggatatgcgctaggagacacgcctctaggtgcgccgacgtggagagcagggcgggtgttgggaaccgcgctgggaaacagacccgcgctcgcgggagtatggactccgaccggagttgcagaagccgtggtggccattattgcgggaggagcggctctggccgtgtggagggctggccgcaaaggagcggtggcagtggagagggggctggtgagggtggcggcacgctcaccgatgtggggtgcgtttgtggtggccgcgcctgggcggacgcctccaggggcccaggagccggtgtctgccatggagagggaggggaggaggcagtacgacaacggacaaagatggagggggaggggtctgggtggcagccgggctgggtcgtgtcgacaacgactggaggtgggagggaagggggctggcggctgcagggagaaggggaggagaaacctagcttttttctctaacgcgcaggagagctacgcatcttttatattagagagaagaaaagtctatctgcttgttgccctcaatgttccaaaatgggttattaagcccttgacaaaattaggagaaatttcttgtggaatggcagaaaagagactcgaggaggaaactgtcttatag

SEQ ID NO: 16429 - DNA, 540 bp, Zea mays
  Peptide Sequence Number=SeqID_59804
atggccccaacgagagcgctgcccgccctctggttgtccatggccgccgccgccagctatgtcgtcggagaaaagtactgcaggttgtgctatctgaagggcagttccatggtccccactatccaagcccagggcgacgtcgggctgctggaccgccgctgccttgccggctacgacttctcccacggcgacgtcgttgttttcaggttgtcgacggatcatgggatgaagatggtccagaggctgatcgcgctgccgggggattggattcagatcccggagaagcgggacatccggcaggtccccagcggccactgttgggtggaaggggacaatgccggcaacagctgggactcgagacactatggccccgtaagggcattctccctaacaatcattcttagcagattttcgtcaatctgttcagtttctttctttaacaagaactggttcggtatatacgttctaactttgcaagcttcaggttcctctggacctgatggaagggaagatcacacacataatctggccaccccatag

SEQ ID NO: 16430 - DNA, 582 bp, Zea mays
  Peptide Sequence Number=SeqID_59805
atgaccggcgcagacgcgtgtgctgccgtcggcctccctggtggggctcctcgacgtccgaacgatcgaagaagcaagaaggtagatgttgatcgccatctgagagtaaaagcatatccacacttcatggagaagaaaggatttgaatcctaccattcttcatctattttgggcagaatctacgatgagactgaggaaataatagcgcagcaatgtgacgaacagatccagataacgacactggcgtgcttcagtgaggtggagtcaaccccggaatgcacctccctatgggaacaccggtaccaggagtacttgacaaagagcaggggccttttcgatctgggcaaggaagaaaagaacgacgagttccagaaactctaccaacactacaaacatgcctgcgcgatctacaggatcgtgtacgagcgagcatggtgtaccaggagcgtcagcaggtgccgtttcgtgtggaacgtggctggagcggcgctgtgccacctccacgcgaccaagtacgcggcgcagcgcggggagaaaaccgcgctctgcccgctctcagttatccgccagctttacatctga

SEQ ID NO: 16431 - DNA, 453 bp, Zea mays
  Peptide Sequence Number=SeqID_59806
atgcctgcggacgaagtgaagctcgatctccacgtacttcgtgcgctgatgatgcacgagattggagaggtagatcttgctgaggttgtcgcaagagacgagggtggcgcgggcgatggggttgtggagctcatgaagaagttaacagagcaaggacgtcccgaccacgtcattggccatatctcgatacttggcctccgtgttggagctacgtcgagtgaacatgaggtactgcagtgtcccggtgaggctccggtagaccatcacattgctcactggggtgtcatcatcatcggagagcttcgcctaggtatcgaccagcgtggagcaaggcttgcagtcggacatgtcggtcccttccagaatgttgaggtcatactggcgctggtggaggaagaggccctaggggtgccgctccgcggtaaccctgaggaagtggtggagaggacctaa

SEQ ID NO: 16432 - DNA, 573 bp, Zea mays
  Peptide Sequence Number=SeqID_59807
atgaaaccaggacaattcgtgcttcggagaggggataacccagatacaggggggcaaattgcagttgaaatgggagaggccctttttttgatagtattgttggtcaagacccggttcatacagattgaaggatatggacggcaaaagacattcctagatcttgaaatgcggatgagcttcggcgatattatgtataacttgatctctataagagcaaaatcccccaaagatgtaaatgtaaaagctgagaacgcaccatcgagtgccggaaagaaacagggaagaagctccaaagtcgttcctaagggaatgcagagcttacagcgaaaaataaacgctgattccgccgaaagtaaaaggcgaagaagctccaaagacgttcctaagggaatgcagagcttacagcgaaaaataaacgctgattccgccgaaagtaaaaggcgaagaagctccaaagacgttcctaagggaatgcagagcttacagcgaaaagtcaacgctgattccgctgaagtaaaaggcgaagaagctcctaagggaggcttacagcgaaaagtcagcgctgatatgtga

SEQ ID NO: 16433 - DNA, 255 bp, Zea mays
  Peptide Sequence Number=SeqID_59808
atggcacccccctgcccccggcaacgaggcttcctggcccccagcgcgcggcccctcggcccccggtgcgtgcggcccctcagccccctgcgcgcggccatcctgaccccggtgcacgcggctcccggtggtaacgaggatgatggttctggttataaatatggtaatggttgtccgcattgcaaccactgctcaggtgaagatgaagtcgtggaggaggactttcaggagttccaagagtatgatgagtgctag

SEQ ID NO: 16434 - DNA, 759 bp, Zea mays
  Peptide Sequence Number=SeqID_59809
atggagattcctggtcacgcgagcgacggtgttgcagtggagatcacgacgccgcgaggatctctgctccccaaggtatctgcggcggcttctagttggcgcagacggaggtgggggtatcgggacccgatctatagggatgaggagtccccaggttggtgcgagtgcgccagtgaacttcgaatggaagaagtaactgcgggcctctcaaactatcgcatggcaatatgcgagggtcaaggaattgcttctcaggcaaaccagatgcctatgcagtatggcgaccgcgaccgtatccaagaactagtttctattgtaccacatggtgttcgtatgctggctgaaagtcttgaaaatggcagagcatctgagttgcagaactatggagttggaccctttggacaccatctcggtccggaatgtgcaataatgataccaaagcctgagccaaatgttgttgtcgaaaatttgtttaggcagatagcaagccctcatatcacagacaacaaattgaggaatacagcgagccctcagatcgggaggagcggctctggccgtgtggagggctggccgcaaaggagcggcggcagtggagagggtggcggcacgctcaccgctgtgggctgcgtttgcggtggccgcgcctgggcggacgcctccaggggcctaggtgccggtgtctgccatggagagggaggggaggaggcagttgaaagggaaatgtgcccttgggccatttctaaggattttggtgattaa

SEQ ID NO: 16435 - DNA, 276 bp, Zea mays
  Peptide Sequence Number=SeqID_59810
atgcgtcaacgtctgaaggaactagcagagaaggcctccacgatgattgcgatgcacagaagaatggcgaggaagaagatgaggttgtgctggacaaagtcgaagtatttgggtgacatatcgaggctcctggagtgtcagggctggggcgagagagctgcaccgcacaagcaaagccgcgatggtgctggagtgtcacgacatcgttgctcaaagaaggcgatgaagagcgcgaatagtcggggtagaccatgtgctagaggcgcacaacgatga

SEQ ID NO: 16436 - DNA, 327 bp, Zea mays
  Peptide Sequence Number=SeqID_59811
atgctgaacaaagaaaccacatttgaactagggaacaatttatgtgaggatggcaagaagtacgacaccgagaacacttgtagcagtggaagcacactgttgaaggcggtgttaagttttgctaaggcacgatccatgatggaaaaggaaaggggtaacctgctgaaagcccttggcacacaggttgcagaacctctgagggctatggttatgggagctcctttggaggatgctcaccacctcgcccaaaggtacgacagaatgcgtcaagaagctgaagcgcagcagggtgcagaggaaagaggtgtgagtgtgacccagcaatga

SEQ ID NO: 16437 - DNA, 576 bp, Zea mays
  Peptide Sequence Number=SeqID_59812
atgggtagaggcaggaggggtcatggttggcctcgccgcgctgatggcaagtgtgctctgagtcctccctctaaggattttggggactcggagtactcagaggaggcctcctccgagtctgatcattcgcctactccagcttctcctccggcgtcattcgaggactcagatgactccatggggctctccaccatggctcgggcgtactggcgcttcatcgagtgcgccgggctcggtgggtcggacgagtcgggggtctcctcggatgaggcggactcctccgactcctccgaggagtggagcggcagcgacggtgatgatgagggcgacggcagcagcagcggcgatgatgacaagggcgacagtggcagcagtgatggcagcaagggtgacggtggcgatgacagcagcgacgacggcaagggcgatggtggtgacgacagcagtgacggtggcaagggcaacggtggcgacaacagcaacgatggcggcaagggcaacgaaagtggcgatggtgacggcggcaggggcgacggcagcagtggtaaggccagtggcataatgccactggtttaa

SEQ ID NO: 16438 - DNA, 147 bp, Zea mays
  Peptide Sequence Number=SeqID_59813
atggcctcagagataggaagctttggcttcgggatggaggacttctcttatgacaaaacgaagggaaataaagaatgggcgacaaagctggaagccaaaggacttcggctggacatgttgacgaagctcaagtatgatgatggctga

SEQ ID NO: 16439 - DNA, 385 bp, Zea mays
  Peptide Sequence Number=SeqID_59814
tcgcatagagaacgatccggttgaagagcccgaagaactcgcaggagaagcccctgagcagcagtcgattggtggaggcaatgagaccctgcctactcaccttgggagtgttcaagggtccgtacaacctgaggcaaaaagggaatcacggctcatggagacattttggtttacaggtggcaatgagattgatggttctggttatgactatggtactggtaccgcgaggtcctcctcaggctttgagttcgcctgcgcggaagaagtcgtcgatggtttggtgggcggaatggccatgaatttcgccaaacccggcctaccgatgatagcgttgtatccgcagtcgaagcttgctacctcaaacctcaggaactcagtcctgtag

SEQ ID NO: 16440 - DNA, 858 bp, Zea mays
  Peptide Sequence Number=SeqID_59815
atggaggtgcaaatggggaaggccccaccatgtttgaatcccttcctaatggtaaaccctcttttgccccctcagcatgtctctccctggtcatccaagtctgtaccagtttttcaatttggcatgaccaatggtcatggagctttagatctatgtgaagaaagcaaaagggccaggaaggttgttcacttggagtacttgttcagcaaggttttaactccaagcgatgttggtaaactaaatcgtctactgataccaaggcaatgtgcagaggggttctttcctatgatttcagaggtaaagagtggtggagatgacattttcctcaattttgaggacacctccacagggttagtctggcgcttccgcttttgcctctggaataatagcaagacctatgtcctgaccaagggttggtctgtctttatcaaggagaagaatctcaagaaaggtgatattttatccttttatcgtgatgccagtaagtcgataagaacaaaccacttatttattcatatcaagccccacaccggtaccatgcctctaccacatcatgtgccaagtccggtcttctctccatctggcatggtgattgatgatcaggtccacgatagtcttaacatcggtaaaagccatggaattgctccatcttggaagcctttgtcctttggatctggggagttaatgccctcaactaatccgacgccacaacaaacaacatttccggaatcgacgtcactagcaaatagtattgtaatggcagaaaagcatttgcgactatttggggtcgacattgacatccctactcatcgttatggagatgagtcttccgatggattcatcaagaatatagcttga

SEQ ID NO: 16441 - DNA, 615 bp, Zea mays
  Peptide Sequence Number=SeqID_59816
atggcataccaactcgaggtacatgctggtctatcggatgtgcataatgtgttccacgtgtctcaactgaagaagtgtctccgtgtccctggaacagttaccaatggaagagctcagtgttcaagattgcctttcgctgacactgggccatccccgtcagattcttcttctaacggaactccgagcttagtgggtgaatgcgaccatgctgcggcgtcggttgcgatgtcccgatcctccgtgcgcctatatgatggggaggagcgcggttggtgctcggagcgccgacaattgctcgccggttcttcatcacctgcacggttccgtggagtgtcgtgggcgtcaactccggccatacctacggtgcccgcgggtggccgtggagcatcgccgtcgatcggggaaggcgcgagcaccatcttcgggcggactttggaccgtttgcgcgggcaaatttctcgccaaagtacgaccttcgccgcggatccgcctgtaccgcggccagtggtcaccgcctacttcaacaccgtagaagagtccgtgtctgaggatcctggtgagcagcagatagaagtagctgagcaggagctcattgaaggcaagttgtgcccttga

SEQ ID NO: 16442 - DNA, 66 bp, Zea mays
  Peptide Sequence Number=SeqID_59817
atggctcaggttttcaatgagtcttctaatatcttgcttgaggacattagaagaaacacattttaa

SEQ ID NO: 16443 - DNA, 813 bp, Zea mays
  Peptide Sequence Number=SeqID_59818
atggggcacgtcggcgtctcgggtcttgagcgcgcggtcgaggtcgcctgggcggtcgagtcgcagggcctggtggctcgtgtcgcggcgtcgggtcggctgctggcgctcggcagcgtcggcttctgttgggtgaagcaggggcggggcggctcggtgagagaagcgagggggaaggagagccagggaacggcgggcacgcgcaggggcagttgcgtaggattgggcagtcccggccggctggaggcacgtcctggtggcgcggcggggaaagacaggggagagggcgctggtgggaggaaaggcagagagagggagaagaaagtgtcacaacggacgacggtgaacgggttcgagcgcgtgtctaggcgaagggttggacggggttctgtcacgtctccgtggcttcttgggtccggccgtggggcgcggtcggccaagtcgggtcgcgggcttcctggtgtggtcctgctcggcggcgtggtcggcttcagtgcacggtgcgctgggcgcgtgtgggtccggtgcggtggcgcggcgcctgggcttcgggtgtcggtcttggctactcgacacggggatgagctcctggaggcgctgcggcttggtcgtcgagctagggtccatggcacaggagctcggctggagaagtgtgcgcgtcggctgggggcgctgctcggtgggcagggcgaggtggagcgtgcgcggggcctgggcgcacggctcttgggtcgctgcaggcttgtgaatgggcgcgcgcgtcgggtgcgcgttggggcggccagggtcggcctctggcaggggcgcgcgtag

SEQ ID NO: 16444 - DNA, 405 bp, Zea mays
  Peptide Sequence Number=SeqID_59819
atgggcaagaaacgcaagcgcgagccgactcccccatctgaagattttggtgactcggaatactcagaggaggagttctcctctgagtccgaggggtctccggctcccatccctctgcgtgagtcatctgacgattcagacgactcccaggggctcgcggcggaggtctggacttacatccgggccgtcgagcgctccgggctcgcgggctcggatgagtcggagtactcctcggacgaggaggactcgtccgaggagggcggcggcggcgatggcgaaggcaacgacggtgacgacgacggcgacgatgggggcgatggcggcgacgacgacggtgacggcggcgacggcggtggcaggggcggcaacggcagcagcaggggcggcagcaaggccagtggctaa

SEQ ID NO: 16445 - DNA, 96 bp, Zea mays
  Peptide Sequence Number=SeqID_59820
atgtgggtgctccatctgttgctgatcccaatgggtgtgctccttctgctgctgatcccaatgggaagaaaaacgtatccttgcatcttctcgtga

SEQ ID NO: 16446 - DNA, 693 bp, Zea mays
  Peptide Sequence Number=SeqID_59821
atgttggggctgcgcagatccggtgaagcacgcggtatggaggggatccggggctgctgcagcgcgcggcttgctgcgcattttgacgaacagccggcgggcaccacggagaacagcgaggaagggggctcgctgtttggggagagggagttgcgcagaggcgctgcgcggggcgccaaccatggaggaaatggagctcctactggtttccatgggagagtagggcgtagggatcaacagggtgctttggcgtgctgggaagaggacaatagggaagggcgttttcctggccggacagggaaaagcaggggcgccatgggaggggaggagctgctgcgccgccatggacatggacctcgccgaggtcggcccaagggtctcctgcgtgaccaagggggaaaacaagggcgagggaaagctatgcagggcgccgtgactgctggtcggagatggagttcggtctgcaatagagggggctcggccagggatctccacttcgagcagagcatgcagcgcaggagcagagggaaaaacggaatagggaggggtgctgaggtagaggggaagctgcaggggggtggcgccatggggagggccctgctctggcgtgctgcggcgttccagggagcagagtggagggaggcgaccttggctcagcaggagcagcccttgcctgcagcaccaaccgactga

SEQ ID NO: 16447 - DNA, 849 bp, Zea mays
  Peptide Sequence Number=SeqID_59822
atgaacgcgctctcccgcgaagggtgccggcacttcgaggtcttcgaccaggcggatgaagattttgatcgagatgtctataaggttgaagacctcgtggtgaaggattctgtcggggccctctacgaccggatgtggggtccgcacggtcacgaggtggtcagggagcgggcggagacggcgatggctcaggcgttgcgtggcgagcgggtggacgacctcggggcgttgaacagcgcgctgcctgacccggagccgacccctgcggaggccgtgtccggggtcgccctggagccaaccccggagactgcggccggcgaagacctgcccccaaaggtggccgaaggcgcccctgatgcccccgcagctgctgtgccgagtgctgaagatcccgcggcggaggcggcggaaacaacggcagaagcggcggcggagccagcggcggaggctcccgcagcgtcagggccttcgcaggttcaagatttcgggcctgcgcacgcaaccgatactactgaatttttggcggcttcgaccgcggaaggtggtaatggatatgcggaggcctcgccacatgccgcggacgcgcgaggtgtgccaggtcctagcaccgggcgccgacggcgaagggcggttgcaaagcgtagggttagcacggaggaaggggctcggcttcgtgtgagtagggctggtcggcaggaacttttgtctttgccggccgccgcgggtacaggggaaggggaactgcgaagtctttttgcgggcttgtacgatgaagttgtgtgccctcgcgtgcctgtgcctgcgagggcgttgtgtactttgtctggtatggttggttatgctgtgctg

SEQ ID NO: 16448 - DNA, 1158 bp, Zea mays
  Peptide Sequence Number=SeqID_59823
atggggaacactcgcagttcctccgccttgtcgtcattggaggaacacaacttcgcggaagttgccagcccggccgcatcccctcgccggtggtcacccaagacggtgaccaccagctcctgggtggggagaagcaagctgggctacgacctctgcccctcccttagcttcaaggatgttcatcatcagtgctggggaggggagtgctccgagttggggtcggtctccgcgcgggcagcggcccgctccttccctcagcgatcggggggaagggcgttcaccgttcatggcgctggcagctgccgcgtgtccggctctccggtccgagcggcttcggcgctgcttccagtgccaccttccgctgcggcagccggaagaggcttctccgccgacgagatagtcgatgctgcccgcggactgacctccaactctatggccttctgctcgtcctcgcccctcgacgtccgccctgagttcatcgctgctgctgttcagccgctcggagtagaagtcgttgtcgctgctgctggagcgggcggcgggaaccctcggcagctcttcaatgagccgaagccggaggcagcggtgttagcatggacagaggcagagttggctcgaaaagaagacttcgtcggccggagcctggccgggccatccactggcgggatcgacgccggagtcgagttgccgaggccactagccgggctggtgtcctcaggggacagctggctgaggcttcggggcggccggtcgagccgtctgctcgggtcggattcctggagaagaccctggcggcgatggcccgggcgcagtgctgacgtcgtccttcggagtggagatcctccgaccgcgttgccgtccgaggctcggtcggacttcgccgaaggtggggttgacgccgagggtgctgccgctccccttccgtcgacgtctgagcctgcgggattggttcatcttgtagattctgccatcaatatagtcgagaaggcccaaaaaatcgttttggcagaagagttttcgagcatgaagacttgttcggtccgcggaatcacttatccgagcgtgagtgacttatcgcagaaggtgatgagtgaggatcccactttcgaagtagtcgaaaagcacgaaagacgttctggcagaaaagatcttttctga

SEQ ID NO: 16449 - DNA, 1011 bp, Zea mays
  Peptide Sequence Number=SeqID_59824
atgcataaggggagcacgaagacatggttgcctttcaagggggtcaccctccttttaaaggcaactctccccacttgcgtcctcagccatcgcgggctgagtcttctccaacacgctccaaggccctccccctacgacacggggctgggtcccacgcttcatgcaagctggcccagggcagaagaagccgaactgccacgcgcggtgcgcgcaactgcccagcggttacgagcattcctccactttcgcccagaccagcgggtgaaagggcggaccgccatgcaggagacatgcaaccgcaccaagggggcgcaccctttcgacttcgacgcgtccagcatggaggcccaggcccacacgtcatgtaactggcgcgccggttgctacgtgcaagaaactgcaccgccactcgcgccactaccgtgcctcctcgactgcggaaccagtaccacgactcgaggcaaccctgcgcatgacccaacagtgccaaccaggaacatcggtcacgggtcagtcaaacgcaggagaaggcgcgacggtcgatacggccagaaatgggccggcagtaatggcggtgacaagcggacggaagcagcggtcaagtcgtcagccaagctcatggaccgggaaaggggataccccgaaagggatccttctccgcgaaggaaacgggccccgagccccccaactgatcagaggttcgaaggctggcccctcggaagggttcaacagccgccacagagcactcgggctctgcggccacaactgatcagaggttcgaaggctggcccctcggaagggttcaacagccgcctcagagcactcgggctccgcgcccactactggtcagaggttcgaaggctagcccctcggaagggttcaacggccgcctcaggccactcgggctccgcgcccactactgatcaggggttcgtaggctggcccccgaagggttcgacagccgcctcatacgcagagcgagggatgaccatgggtacgttcgatacataa

SEQ ID NO: 16450 - DNA, 378 bp, Zea mays
  Peptide Sequence Number=SeqID_59825
atggcggaaaaaggaaccggcttaaaggggaaaaggctatttagtcctcatatagttgtccgtactgttcacgctgacgcatacttgtttatgcattacgcttgtagttttaccttctaccaagccgaagcatttgagaacaagtccccaacattgccgcccacctccggtgaactctttcgaccaccttggtgcttgatgccaaaggggggagaaattaaggacaaagcaactggatcagctaaccactttgtgaatttcaaaatattaatgttaagatttcttggtgctttatctaaaccctcttattgcaaaaacaactctcttatgggggagaaattcgagtatgggaaaaagggggagtttttttatttttga

SEQ ID NO: 16451 - DNA, 243 bp, Zea mays
  Peptide Sequence Number=SeqID_59826
atggggccttctatgaccatattattacgtcacaaagagggggttttatgtcatatgatagtttgttgtgacggtgttgtgacaaaaagtccattgtcacagaagattgtaatgacgaaaaatgtattcgtcactacatctatgacactcgtaaatgtcacaaatagggttgtaaacgtcacaaaatgtgccaccacatcttgccacgtggatgatgatgtggcacaaagctatgacgaatag

SEQ ID NO: 16452 - DNA, 366 bp, Zea mays
  Peptide Sequence Number=SeqID_59827
atggcgtcctcccctccctgcttcatgggcgccgccccatctctgatgcgctgctcccgccatggagtgcctctgcgcgactccccctccccaaacagcgagcccccttcctctctgttctctgtggtgcccgccggctgttcgtcaaaatgcgcagcaagccgcgcgctgcagcagccccggatcccctccgcaccgcgtgcttcaccggatctgcgcagccccaacatcgacgccgttcaccccggagaaggcaagccgctcaacgctcgtcgatgtgcgaatctatgcacaaatcggaatcaccgtcgttcttgcaaacgccgtttgggtttgtttatgatatgtgctatagaaaagtggtag

SEQ ID NO: 16453 - DNA, 468 bp, Zea mays
  Peptide Sequence Number=SeqID_59828
atggaatcacttgtggttggacctggagtagaagggaaagaatccaagacccctacagaagcagttgttcaagtgttggcttcatcaaaatttcttcaaaatattggtcttgtacctgccacaaagaaaagcggcaatggtggtgatcctacacgtgtggcagaccttgaggcagaacatggatcagagaatagggcgctacagtttatgcgcctgttaacaacagttggttacagacttaaaaataaaaaggcaaaaaatagggttaatgtgattaatatcaacacaaatattttgattccatacttgcctagtttaattgcgatgggggtttacattgaagcttttgacgaagtattagccggcagaggggacttttgtgcctgtgtgggtgttcgaggggccgtgtcattgctcgaaaatgttggctatgaacatgtgaaggctgtaatttatctagaattctaa

SEQ ID NO: 16454 - DNA, 606 bp, Zea mays
  Peptide Sequence Number=SeqID_59829
atggggaagcgtgcgtaccaagaactaggtgaggtgaaaaacgaacaaggtgaggcagcgatcaagtgggttctaagcaaggtgcagtgcgggctcgcgcgcgccaatgaattggatcttaagatacctcgactcctccatcactaccgaaaacgggcactttgccgaatgtccgaagcactcggcaaagccgtaaaaacactcgacaaaggctttaccgagtgtcgcactcagcaaagaaggctcggcaaacagtgcatcggcaaacccttctttgtcgagtactttttctcgggcactcggcaaagaggtttgccgagtgccagggagcactcggcaaagaaaaacggtcgttacggcgacggggtgacggagacggcttctttgctgagtgtctgcctagtagcactcggcaaagagcccgtcaggcagggttcgggtgacggagacggcttctttgccgagtgtctgcctagtagcactcggcaaagagcccgtcaggcagggttcccatgtcaggttctttgccgagtgctctgtgcggcactcggcaaagcgtgcttctttgccgagtgccagcgacataacactcggcaaagtcactaa

SEQ ID NO: 16455 - DNA, 1944 bp, Zea mays
  Peptide Sequence Number=SeqID_59830
atgccgcgcacgaagaatgcgtcggcgccagggggtggcgatggtgaggaccctcgtcgccccttcaggcaggtcaaggggaagactgtctatttggagcagcaggaaggccgcaagaagcggcgtacggacagagaggcccgtgcagcggcagcagctgcagcagccgctgcgcaggccgcacttggagatcagccgcagattccatccgatcagattgctttccgtgctcgtcgtctcacctcccggtctcgctcctcctctcacacctccgcttccactccgccacccactctgcctgctcccgtcactcctattgctccatccacctccacagccatacccactacctcctctacgccagcttccactgcttcccctgctcccgctcccgcttctgctcctcctgtccctccacctcgcttccggagcgtgatgagactgaggtccatccctctggtttcggatcctcgtctgtttgatcttcagcgtgctactgcagcacgggtcggtgttgactctgaggcgcacctcacctatctgcctggccttctgacccttctgactatcagcggcagatatgttgaggagtgggtccgagtcttctacgcctctgtttggattgacccggatcatcactggatgaggttccgctttgagcgagaggatgtcacgatcactgccaatcagatccgtcagctctttggattcccagagtcgacgactcgccttcacagcctctgctacggctcttctgaccctcctcgtcgccctcacggcggtgtggctccagggacagctcacgtcgcggctctgttccgcccgcctttcacagatgggtcgcgacgttcaccagcagactttactacagcagcgaagtacttatatgagctcatcagacggacactcctgccgaggatgggatacagggaggctaccactcatattcagctttggctccttggtgccctggtatcccactctgagtttgacgttgtggacttcctgatctgtgagatcgaggacaccgttctggatgggattcgtgctcgtcgacagttaccttatgctcactacttgtgccacatctttgcgcagctgattcagccacctcgatttcagagcatccttgaggcctcacgccttgtatttggatcttaccgtcctgctcctgagattccagtgccagcttctgcttctgtgtttgactctcaggccgaggatgcagctcttcgacagtttgacactcagggtacagcaactggtgatgatgatgatgatgattttggggttcctcctccgcctccgcctcctatgcctccacgctcacatgatcatgaggctgggagttctcgtgctgcccctgctcctcctccggctatggatcctgctcttgcgactattctggccaacctggcagccgagctggcacggttatccgagacgatgctctcgatgtttcagagcatgcaggacatgcaggatgctcttcagcagcagttacttcaggatcgggcagagagtagggcattcatggcccttatgcttcagcattctggtatctcagcacctccggttcagtctgctccgcctcctccgcttcacgctccagtggtgccatcgattttgtctggaccccctgttggtacctctccgctccggccggtcactttggcgttcacctctccggttctcagctctgtctgtctgcagccgccagtgccaccagcatctgctgttaccactaccgctgtggcagtttctgtgaccgcttctgttccggtagctcctgctgcgcggccgcagtccaagtcagtaccagctccagcttctaccgcagatcctggatccgagactgactctgaccctccgtcggcgttcgctctgctacctcgacctcgaccggatgcgcccccaccgcctcctcctgcttcaggcgtttag

SEQ ID NO: 16456 - DNA, 69 bp, Zea mays
  Peptide Sequence Number=SeqID_59831
atggggcatctcgacttcgacaggggaggtaaatcccgtagatcaaaagggttccaagccaattcctaa

SEQ ID NO: 16457 - DNA, 430 bp, Zea mays
  Peptide Sequence Number=SeqID_59832
gtcaaggcttcgtctacccaagggacgcgatctcgcctcgcacgagcccagtcttgggcaggaactgcagtcccggatgaagttacgtctcgcccgagggcctcctcaggcaatgggcgcaccctcggcatgcccgaggcccagctcgggcaggcttcgtcaagaagcaattttggccaaatcgcctctccaaccgaccatgtcgcaggcgcattcaatgcgaggatcgcctgacaccttatcctcacacgcgcgcctcagtcggcaaggtagaagtgaccgcagtcacttcgccctttcactgaccgatctgacaggaaaacagcgccgctcaccctgctccgactgctgtgccagccacccgggcaaggctgacaacagcaagttcagcctcgggcgcaacaggaagctccgcctcgctcgaccttag

SEQ ID NO: 16458 - DNA, 456 bp, Zea mays
  Peptide Sequence Number=SeqID_59833
atgcaggtggcctacaaccgcaccgcggtggcacacccctttggcttcgtcagatctggcatggaggcccaggccctcacgtcatgtaaccggcgcgccggttactacgtgctagaaaccgcaccgccacttgcgccaatgacgcgccttctcgattgcagaaccggtgccgtgactcaaggcagccctgcgcatgacccaacagggccaatcgagcacaacgatcacgggtaccgggaaaggggatatttcgaaagggatccttctccacgaaggaagcgggccccgagccctcctactgatcaggggttcgaaggctggcccctcggaagggttcgacagccaccccagagcactcaggctccgcgcccactactgatgaggggttcgaaagctggcccctcggaagggttcgacagccgccccagagcactcgggttccgcgcccactactga

SEQ ID NO: 16459 - DNA, 930 bp, Zea mays
  Peptide Sequence Number=SeqID_59834
atgcacccgggctacaatcaggtcgcacgagggaacaaccaggccggccaaggcatcacgaaaggcattaagacttcagatgagtcaaaccactcctccgaggcctcgggggctacacccggcggttcaggtcaaggcttcgtctacccaagggacgcagtcttgcctcgcccaagcccagcctcgggcgggaactgcagtcccggacgaagttacgtctcgcccgagggcctcctcaggcagtgggcacaccctcggcacgcccaaggcccagctcgggcaggcttcgtcgagaagcaaccttggccaaatcgcatctccaaccgaccgtgtcgcaggcgcattcaatgcgaggatcgcctgacaccttatcctgacacgcgcgccccagtcggcaaggtcgaagaaaacaacgccgctcacctcgctccgactgttgtgccagccacccgggcaaggctgacaacagcaagttcagcctcgggcgcaacacgaagcttcgcctcgcccgaccttaggcctcagcctcgggaggaggtctccgccttgtccgaccccaagactcggcctcagcctcggcctcgggaggaatcacgtcctcgcccgaccctggcctcggtctctggagaagtctccgcctcgcccgaccttgggctcagaccgaccgcgccacaagggatacatcactaccctcccctagctagctcaggctacgagggaacaagactggcgtcccatctggctcgtcccaggctcaggcacttctccgacggccacgttatcgcctacgcagggctcaagcacttctccgacagccacgttggcatgtacacagggctcaggcacttccctgccagacacgggcacacagcgacaaatttactcgtcggtccagggaccccctgggtccgaaacgccgacaccgggtaa

SEQ ID NO: 16460 - DNA, 1620 bp, Zea mays
  Peptide Sequence Number=SeqID_59835
atgtcttcgcactcccctcatgcatcgtgcccttccaccttccgagccctcggatggggagcacccgtgttgccttcgtcttgctgctgttggaggagcgcgacctcgctggggttggcgcccttcagccatcgcttggcttcaaggattttcatcatgcagcccagctgcattccctcaccaatggtcatccaggatgatgaccaccagttcggtggtggggagaagcaagccgggctgcggcctctgccccgccctcagcttcaaggatcttcatcatccgtgctggggaggagggcgaggcaagtcggggcctgcctccgcgtgggccggcgacccgcttattcctccggcgttcgggggagaggggcatcctccagctgtgcggaggaggcgtcctccagccatgcgggggaaggcgaactgctgctgcttggacagggtgcagctgtcaccagcctcgcggagggggcgaactttgacaacgcgggctcggtcagccgcgagcgtcatcagctgcagcgtgcctggcacgctggctcagctggctctggcgccgccttcgatgttgcctcctgccgcttggtccgggcgtggctgtccgtccaccgcactagcgactgtcgcgtcgcgcgcaggtcgggcatcacgacgcctctgcgcggaggccggtgtcggcccgtccgcaaggacttgagtggggatctgccggtgcaggctggggcggccgccattcgtcggcgtggcgcgggcacgcaggtggccgctgtcgtcagtggcgaggtggtggcagccagagaaggtttctccgccgacaagaccgtcggcgccacctgcggtcggacccccggctctttggctttgatggcttgtcctcgcccctcgtgtgggggcgtgggcctttccacagcagcgtttgccctgaggtcatcgctgctgctgttttgccacccaaagcgaaggtcgttgtcgctgctggtgcagtggtcgccagcgagccacctggagtttgttgtcccgcaggccctctggtgtggaggttgttcatacccgcgggagtggaaccggaatcccgagtccctcggctcggtcggcctcggccagcactgcgatgagctggagccggaggcagcgacgtcggcgtggacagaggcggagtcggatcgaaaagaggcttcgttggcccgggagcatgtggcttcccaggccgaggaggtgcagcagcagcggctggagcttggccaggtcgttcgcgagcgggaccaatcccggagtcacgccgccgaggccgggagccaggctgaggtcctcgggggacaaccggctgaggctatggagcggctagctggggtgtctgctcgggccggaacccttgcggagaacctggtcgtgagggcccaagcgcagtgctggcgtcctcctccgaggtggagatccttccgcccgagtcaccgtccgaggctgggccaggatctaccaagggtggaaacgtcaccgagggtgttgctgctccccctgttgatgtccgaacctgcaggaacaatttgtctgaaggttctgctatcgaagcagtcgaaacgacacgaaagtcgttctggtagaaaagttttcaagcgttag

SEQ ID NO: 16461 - DNA, 549 bp, Zea mays
  Peptide Sequence Number=SeqID_59836
atggcccgtgcccgcgcctataaagcaccgagggacttcgaccgtacccctccgcacgcgctcgacctcaccggagcccaaaaccaccgacgtttgcccgtgcacggcgtgcccgcggccgccctatccacccgccaccgtagaccggccaacagaacccttcccgaccccgtccaaccctcggagaagactatgcacacctcggtgaagctccccaagcaaggaatcggagtttgcttcgccggagaagccagtccacggtcgccggactccacccgaccgccggtgagcgtagaccggatcgccgtggtttggccggagcacccgccgccgacgagagcacccgcctgcgcacgtggaccggacgattccggccacccccgccgtcgagccgtacaccgttgtgaccgccagaacctctcggagccaaccccgcccctcgccggacctctctcaccgccggaggtagccccggatccagcaccagagcctgcaccagaggatctgcctaccactgctttagaaggcaagccccggttttatgcataa

SEQ ID NO: 16462 - DNA, 558 bp, Zea mays
  Peptide Sequence Number=SeqID_59837
atggatcatcttcggacggagttatgtcaccgaaacagggtgtgggcagaagatggtcagcgtataaatgagttggcagctgatgtcagacgcctgcaagacgagcttgctgaacgagatctagcagtcgattgggccgtcaactcacgtttggttgcttgggatcgggaagccaaagctcgtgcctgtttgaccgagcttagtgcggcccttgacaacttgcaggaatactgcaatactctacatgaggaaatgccatcaaggactcgtgcgcaggatggtgcgggtacttcccatggtcgaaaagatactcctaatccaccacctgtaccaacaacactggccgaggctatcgctgccttggttaatgcgactgctgataatacccgcttcctacgtgaaatggcgggtaaccaattccagcagcaaggcggaagggctcctccccagggaccgcatgaaacctcatacctggacttctctgaaatgcgtcccccactctttgttaaagctgaaaatcctcttgaagctgatgagtggatcagggtaatggagtag

SEQ ID NO: 16463 - DNA, 681 bp, Zea mays
  Peptide Sequence Number=SeqID_59838
atgactctgggtacgtctgatacatggccgaggctcgggctacactcccgaggtaccctaggatatttccgagaccagcaggagcgattctataatggaatctcatcagagggaggcatcgagccctcagaccctatcaaacggtaccgggtccggcaaatcacctgcaggtcaaagctccgcccactcaagggacacgatctcgcctcgctcgagcccagcctcgagcaagaacaacaaacccaggaaaacagcgccgcctgcactgctccgactgctgtgccacccgccagggtgaggctgacaggagccaagtccagcctcgggcgccataggaagctccgcctcacccgaccccagggctcggactcaacctcgaccttggaagacggtctccgccttgccccaccccagggctcggactcaatctcgaccttggaagacggtctccgcctcgcccgaccccagggctcggactcaacctcgacctcggaagatggtctctgcctcgcccgaccccagggctcggactcaacctcgacctcagacgacggtctccgcctcgcccgaccccagggctcggactcagcctcgacctcagaggagtcaccgcctttcccgaccttgggctcggaccgaccacgtcgcaggggggtacatcattaccctacccctagctag

SEQ ID NO: 16464 - DNA, 1620 bp, Zea mays
  Peptide Sequence Number=SeqID_59839
atggagcagggaagggagctcgctagagcaggggacgcaagggcgccctgcgcagagaagaaggacgcggcttcctctcgcgcccgccgccggccgccgtctcgcgcaccccgctgccgccagctcgagcgccccgcgccgccactgcgcgccctgccgccgccaccccatgcgccccgctccgccagcccgcgcctccaccccgcgtgccgcccgctcgccagccccacgtcgcctggcctcctccgagcccgacgccgacaaggcggcgctgctggcgttcctctccggcgtgggtcacggcgccaccgcctgtccgcgctcgcgggcctccacctccaccacaacgccttctccggcgcgctccccgccgccctcgcggggctgaccacgctccaggtgctcgacctctccttgaacgccttcgacggcgtcgtgcctggcgcgctcgccaacctcacccgcctcgtcgtgctcgacctctccaacaactcgctgtccagtcgcgtgcgtgtgagcgtgctgtgctatgctgtgacggtgacgctcaacaacctaccgcctcttgtctccgttctcaagttgctattcctggaacaggcggaggtggcaaaccagatgcgtttctctcgtcatgccttggctggcatgcccatccctcggttttctgttcttggagatcatgctgccaaatcaaaagcaaagctcaagggtgctttctctttacttggactgaacaatgacaccttcaaaggtaaaggacctcatacctccaaaaggcttcagttgaaggacctgtcctggagatcaaaggatactactatcaatgtgaaagagaaccatgatcaagagacagtgcatgaggagaataccaagtcctgtgaacatgaatatgggagttactgcctctggtctactgaacacagggaagtaatgaaggatgccattgtcaagaagcttaaagatcaactttttatggcaagagctcattatcctagcattgcaaaattgaagcagcatgaagcatttacaagtgaactgaagcaaaacatccaagaacatgaacgcatgctaagtgacaccatcacagatgctgatcttccaccattttttgcaaagaagctggagaagatggagcacacaattgtgagagccaagtctagtgaagtaggatgctccaatgttgaacggaaacttaggcagctacttgatataactgaaaatgaagcttatttccatacaaggcagagtgcatttctatatcatcttggagtgcagactatgccgaaaactcaccattgcttgaacatgagattgacagtagaatattttaagtctggatcaagtcatgtggatcagttaaatgaccagaagcttgaaagtcctgccttacatcactatgtaatattttccaggaatgtacttgcagcttccaccactatcaattcaacggttatgaactcccagcttgtggttcatggtgcccccgttctccagatgccggctgccacgcgccccgaggccggcgagctcctggtgctcgacctctccttcaacgccttcgaaggcgccgtccctagcgcgctcgccaacctcaaccgcctaatcctagacgattag

SEQ ID NO: 16465 - DNA, 549 bp, Zea mays
  Peptide Sequence Number=SeqID_59840
atggccatcatcggagcaatcagagaggcagtagtcacatgcggccatgaagtctcgcatggcactggggttaccgagtccggagaaatcccaaccagagtcgggctcgtcatcttcctcggaacctgggggcccggaaatgacgctcgtcttcgtctcagatgcgaggtcaacgcccgacgtatcccccgctggggcgccggcatcgtcggctcgctcgatagccgacgaggtgccgcctcctgcttggccatggttgccccgcctcctcctctgtcggcggggaaggtgacgggacagacctggatgctgctcttccgccacacggggaagacgtcgtcgattccgccgccggcgggcgggctgaaggccgccattgtcgtcgtcgcgtggcgaaggaaggagtaccatgtcgtagctgccgtcgagggacatgaactcgagactctcgaaacggagcatcgtcccgggctagagaggttgctggagactacccatctggagcttgacgggaagctattcgtcaacacgcagcaggcccctacctag

SEQ ID NO: 16466 - DNA, 294 bp, Zea mays
  Peptide Sequence Number=SeqID_59841
atggcgagagtacgctcgactgcgagggtgacccgtgaaggggaggagactgaagccactgagacagctccgatctccaaagtcgggcaaggcggtgactcctccgaggtcgaggctgagtccgagccctggggtcgggcgaggcggagaccgtcgtctaaggtcgaggttgagtccgagccctggggtcgggcgaggcggagaccgtcttccgagttcgaggttgagtccgagccctggggtcgggcgaggcggagaccgtcttccgaggtcgagattgagtccgagccctag

SEQ ID NO: 16467 - DNA, 519 bp, Zea mays
  Peptide Sequence Number=SeqID_59842
atggcgcccgaggctggacttggctgctgtcagcctcaccctggcgggtggcacagcagtcggagcagtgcaggcggcgctgttttcctgtcaggtcagttagtggaggggcgaaatgactgcggtcacttctgtgacaccccagtgtcacctagggtttctcttaaaaatgccaaatcaagaaccatcatttatgtgaaccaaaaagatccaaatatcaaagttgtgccaaattcccttgaacacgtcctgaaaaagtttgaactcaaaccaaattcatttgacacggttttggcgcagtttgacctcgggactagacattctcacactggcaccttggtgacgctacaactccctgtccctagcctaaaaccgcgcgacgtccatacacaaaagacaaagcaaggtcaggtgaacaaatccttcacagcgatcttgcccaaatttgcgaagatttgcacccaaccagcgcttgaacatgggcagaggcaacgggcacacgtgttcgaccgtggctga

SEQ ID NO: 16468 - DNA, 1101 bp, Zea mays
  Peptide Sequence Number=SeqID_59843
atggtgaccaccagttcgatggtggggagaagcaagccgggctgcggtctccaccccgccctcagcttcaaggatcttcatcatccttgctggggtggagggcgagctgagccagagctctacctcccatacgggccggcgggccacctcctccttcagcattcaggggagagggcgctcaccggcctagcggagggggcggacttcgacaacgcggggccgattggccacaagcgtcatcagctccagcatgcctggttcgctagctcagctggctctggcatagcttccggtgccacctcccaccactgggcggagtgcggctatctgcccgccgtatgggcggctgttgtgccgcgcgcaccgggggaccgcccaagacttcgcgcgctgctagggcggcgttcgtgttcttgggttgtcctgcgcttgctccggcacgacgcctccgcgcggaggtcggtgctcacccatccgggaggacttgagtggggatctgccggtgggcaggtggctgccgtcgtcggtgttgaggtggtggcggctgaagaagtccttgtcgccgacgagatcgccgccgccatctgcgctccgggcctccggctctttggctttgatagcttgtcctcgcccctcgagtggggatgtgggcgagggccttgtcgcagcagtgtctgccctgaggtcatcgctgctgttgtttggccgcccagagcggaggtcgttgtcgctgctgcaggagtgggcggcgttaaagaaaccctcagccgctctgcgatgagccggagccggaggcagcgatgtcagcgtggacagaggcggagtcggctggagaagaaactttgtcgacctaggagcgggcgcggtgctgacatcttccttcgaggtggagatccttcgcccgtgttgccgtccgaggtcgggtcagattccgccgaaggcggagtcgacgccgagggtgctgctgccccccgcattgataatcgctcatccgagcgagagttactttcacggaaggtgatgagtgaggagtccctcggcttggtcggccttgccgcttacgtgtactccgtcgttttcaggatcccactatcgaagtag

SEQ ID NO: 16469 - DNA, 477 bp, Zea mays
  Peptide Sequence Number=SeqID_59844
atggggacatatatggcagttgacatgactgaaggtggattgacagtgggcgcgtcagcagacgtgctaaaacagcgcgccaatcaccaatcaggccacgttgaggcaagtcgcgtggtaaaagagttgtatgtgggaccaagccatgactcgccccagcctcgggcgactactttgggccagcaacagcgcctgaccccaccacatgggcgggtccggtgccgccacgtgtccagagaaagtgacatactctggggcatcaccagtgagtccggacccccatgggaaggtgtcggacccctgtatatacggtctgagcctccaagtttggtccaggacctccacgtgagcaaaccggacccctggaatgggatccgggccgcccacagtggggtcccagggttccaggacagagcatacccgagccttaatcaaaacccaggcgggggtccggtgccgacacgtgtccagacctga

SEQ ID NO: 16470 - DNA, 786 bp, Zea mays
  Peptide Sequence Number=SeqID_59845
atggcgaaatgggtggcgcaggcgaggatcgccgggatcgtgataccaggttgtcaagggcgtcaaacccctgactggccggaccacgactacgtagctcgtagccgccatccgttttctccgtgggctgtgctaattaaaaagcatgctgaggttgtggttgatgatgaagtggtgttaccagaattccagaagcattgcaggaggagacccttgccagagttctggcgggattgggatcgtcctattcctgcggaggcatggaaagcccataactgcataccagatgagcactatgttcagacgttgcttgcacaaagtggtctagaagaagaacttacgcggcgatcagtaacacatagtgcatgggatctttcagcttctaaagatcgtgaaagacgcgggtggcatcctgtaacatataaagtctctgatgctactacaagacttataaaatctataaaggatattgataatatatattacgagaccgaaaatagaagggagtggtgtacaagtaatggaaagccagccccctgcttcctttttgccaggaagtttacacgtggagctggtctgaagcttcttgattcagaaaagttagcgctaatggtactggcgtcgctgtgcgttacctcggtgccaatgacgatgacgcacgtaggaaaagttggcgccaatgaaacattgggagactgggtcttatatgacagagatggttctactcagggagagaacgagcatacgaatcaattccatgccctgaactttgaaccagagatctag

SEQ ID NO: 16471 - DNA, 417 bp, Zea mays
  Peptide Sequence Number=SeqID_59846
atgggaggggtcatccataccgaagtggttgcaacagagcctcggtatgggaaaaagcctacttacgggatgtatatcgatgtcagagccaagctcgggcgaggcggaagtcttcccgaggcgatggtcgagttctccctgacgtgcgccatagttaacggagtggtcgtctgcgggattcgtggtggagcaggtagccgaggcctagctcgggcaaggcgaagatggtgcctgagggcgagctccgcgtcgggcgaggcggagatggcgcccgagggcaagcccagcgtcggggtaggtatgcgcattaaatgcgggtgtcccccattggccttcgagtgtgctttatcccccttgtctaagacgggctcgggcgagacggatatggtggttctagggcaaggtgtccttaggtga

SEQ ID NO: 16472 - DNA, 237 bp, Zea mays
  Peptide Sequence Number=SeqID_59847
atgccatcctcttcttcttccgccgacgccacgccgccggccgccgcctcgtctgaggagacgttgagtagcgtgatggtggaggagttgcgcgccggcgactctgttgattttggtgtgtcacggatgacgtcagcccgcgttgaagatatgcagcggttgggctactttggcggcggagtcgctcgtgctccggggacggaggaagtccccgagccggaggaagaggatggttga

SEQ ID NO: 16473 - DNA, 963 bp, Zea mays
  Peptide Sequence Number=SeqID_59848
atgaacgcactctctcgcgaagggtgccggcactttgaggcctttgaccaggcagatgaagattttgggcgagatatctatgaggtcgaagaccccgtggtgaaggagtccgccggggccctctatgaccggatgtggggtctgtgcggtcgtgaggtggtcagggagcaggccgaggctgcgagggctcaggcggagcgtggcgagcgggtggacgacttcggggcactgaacagcgcgctgcctgacccggagccgacccctgcggaggctgcgactggagtcgccctggaaccaaccatggagactgcgggagacgcgccaggcgcgccaggcgcccccacatctgctgcggccggcgaagacctgcccccaaaggtggccgaaggcgcgcctaatgcccccgcagctgttgtgccgagcgtggaagatttcgcggcggtggaggcggaagcagcggcggaggctcccgcggcggcagggccttcgcaggttcaagattttgggcctgcacacgcaaccgctactactgagtttttggcggcttcgaccgcggaaggtgggaatggatatggtgggtttgtatctgagttttctgattttactgactctgggagctcgattgagtggactgaggagtcgtcggaggaggacttggattattttgcggccttggatgtggctgcggcggaggcttcgccacgcgccgcggacgcgccagacgtgccaggtcctagcaccgagcgccgacgacgaagggcggttgcaaagcgtagggttagcgcggaggaaggggctcggcttcgcgtgagtagggctggtcggcaggagctgttgtctttgccggccgccgtggggacaggggaaggggaactgcgaagtctttttgcgggtgaagagcttaggataatgttatttaattatagggagatgggaattattcctaaggttgagccgatgtag

SEQ ID NO: 16474 - DNA, 375 bp, Zea mays
  Peptide Sequence Number=SeqID_59849
atgtctttcggactcctcgaggaagagattttcatgtcaagtcagatcagcggcatccacaacagggtagggatgtccgcaagcatactaatcatgactatgatgcctacaatgtggaaaggaacgactcctgctatgaggttctcgcctaggcttaacaggttcaagcttcaagcaacctctcggcttccatcatcaagtcgttcatggaagaagacccaatacaacctcgagcaagtcatgcataaggaggatgtggctatacacagctacatcaagcattggcgcaacatgaaggttgacatctcgagcatgtttgaggatatgaccgtcgacgtcttctacgaagacctcaaggaccgggatctctcctag

SEQ ID NO: 16475 - DNA, 876 bp, Zea mays
  Peptide Sequence Number=SeqID_59850
atggcgtctcagggagtagtgggcggcggcggcggcggcggcggcggcggccggcacaggttcttcaaggtcctactgcccggctctttcgagatcagcctgtccctgccgcccaagttcgcggcggggctcggcgtgctgtgcccagcatggcgcgccgccgccaagctgcgggatcgcacggggaggtcgtgggacgtggagctccggcgagacgccggccaccaccgggtgtccttcacgggcggcggctggcgcggcttcgtctcggccaacgccctctccgcggggcagctgctggtcttcgagcaccgcggctgcctggacttcgccgtcgatcggttcgacgcctccgggtgttgctgtgacgacgaccaagatggaggaggagtcgttgttgccgagcacatggcgacgacgacgacgacagggacagaggccacggccgacaaggagtccggctgctccggccaagaggcggcggcggcggtcaagaggaggaggcggtcgccgctcagcacgaccaccaccgtctgcggcggcgatgacaacgacgagacgctctgccgccgcatcgagagggcttaccagctgcggttcttggacctgagcaaggacttctgcgaccgcgtgggctggtcgtcgtcgcgccaagtcgtgctctgcgccgccggtgacagcgggaagcgttggcaggtgagcgtgaaggtgtcggcaaagagcggcatgatgtgcgcgggctgggccgagttcgcgcaggacaacgggctcaccgtctccgatgcctgcgagttcgtgccaccaccactccatgcccatggctccggctccgacgtccttcaagtccacctcgtgaggggcggcggcacctcttga

SEQ ID NO: 16476 - DNA, 979 bp, Zea mays
  Peptide Sequence Number=SeqID_59851
caacctcgccgccgacctcgcctcccaccccgccatcgccgccgcggccaacgtgcgcgtcgtcgaccgcgccaacctcgtcacctaccgcgggcccaccatggtcgccaacacgctccacgccgccgccgccttcttgtggggcgacggcgcctcgcactgggattggttcatcaacctctccgcctccgattacccgctcgtcacgcaggatgatctgatacacgtattctccaagctgccgcgcgatctcaacttcatcgaccacaccagcgacattggatggaaggagtttcaaagggcaaagccggtcatcattgatccagggctctacatgaagaagaaagccgatgtgttctggattccgcagaggcggagtgtgcctacagcattcaagctcttcactggttctgcctggatggcactgtccaggccctttgtggaatactgcatatggggctgggacaacctacctcgcacagtgctcatgtactactcaaacttcatctcgtcgccggaaggatacttccacaccgttgtgtgcaacgcggaggagttcaagaacacgacggtgaaccacgacctgcactacatctcgtgggacaaccctccgaagcagcacccgcactacttgacggcggaggacctggaccgcatggtcgccagcgacgcgccgttcgcccgcaagttccacgaggacgacccggtgctggacaggatagacgaggagatcctgggccgcggcgcggacgtgccgactcccgggggctggtgcgctgggacgcgggagaacgggagcgacccttgctcggtggtcggagacaccgggcttgttgtgcctggccgtggagccgcgcggctgcagcggctggtcacgtcgttgctgtcggaggagaagttccacccaaggcagtgcaaactggagatagcaacatttggaatggaaggatatgcatgcatgggtgagattgaatcttag

SEQ ID NO: 16477 - DNA, 504 bp, Zea mays
  Peptide Sequence Number=SeqID_59852
atggatcatcgtcagccgccgccgaataagacggcggagcttgaccccgtgctgcactccatcggcttccagatcgaggaggtgtcgccgtcgcaggtcaccggccggctccccgtcacacccaggtgctgccaggtgctccacggcggcgtgtcggcgctggtggcggagggcctggccagcatgggcgcgcacatggcgtcgggcttccgccgggttgccggcgtcagcctcaccatcaaccacttccgcagcgccaaggtgggagacgtcgtcctcgtccgcgccgccccgctccacgtcggccgttcgacgcaggtgtgggacgtgaagctatggaaggaggatcagcaggggaagaaggggagtcagatatccgagtcaagggtgacgctgctatgcaacctgcccgtgccggacatcctcaagcacgctggcgatgcactcaagaagtatgccgacgcccccgccgcccaaaaacccaccgccaccagcagattgtag

SEQ ID NO: 16478 - DNA, 609 bp, Zea mays
  Peptide Sequence Number=SeqID_59853
atgggaggccgctccgctataattcaccggactgtccggaatgaacaacctccacaccagaaggcatgcgggataacaaactccaggcggctcgcctgcgaccactgcaccagcagcgacaacgacctctacctcgggcggctagacagcagcagcgattgcctcaaggcaaacgctactgtgaaaaggtcctcgctcacgtccccttacgagggacgagaaccagccattaaagccaaagagtcggaggtccggagcgcaggtggcacaaacggtctcgtcggcggaggcaactgcttcggtagaggaagcctcacctatggcgaccacgacctcagcaccgacgacaacggccacctgcccaccaacaccgcaccggcgaacggcgaccgccccagcgcgcaccggcaagtcctcactcccgtcctcgccacaggaacgaggacgggaccatcccagaacatgaacaccaccctcgcggcgtacgacgtgttgtgcgaccccccggtgcagccggcggcgccggaaggacctggacgtggccggcccgtgcaaggagcgaccgacacccatgcggcagacgggcatccacgctccgcccagcggtag

SEQ ID NO: 16479 - DNA, 162 bp, Zea mays
  Peptide Sequence Number=SeqID_59854
atggcctccttaatcgaggggaagcagtcggagatcaagaacccatctatgctcgattccgccccctcgttcgtccggttctcctactcaccatcgcggtgccgcgaggcgctgtggacggatcgtcaccgcattcgtcaccaatgtggaaccctcccataa

SEQ ID NO: 16480 - DNA, 732 bp, Zea mays
  Peptide Sequence Number=SeqID_59855
atgaacatccttgaagctgagggcagggggaggccacagcccggctcgctcttccccaccacgaggcctacggtcatcatcctggggatcgggaaaggggatatttcgaaaaaggatccttctcagcgaaggaaatgggccccgagccctcctactgataggggttcgaaggatgcgccctccgggtttcggcaaccgccccagagcactcgggctccgagccctttactaatcaggggttcgaaggctggcccctcggaagggttcgacagccgccccagagcatgcagagtcagggatgaccctgggtacgtctgttacatggccgaggctcgggctacgctcccgaggtaccctaggacatttccgagaccagcgggaacgatttgtaatggaatcccaccggagggaggcaccgagccctcggaccctatcgaatgggtccgggtccagcaaatcactcgcagtcacttcgcccctttactgaccgttctgacaggaaagcagcgctattcaccccgttccgactactatgccaaccaccagggtaaaaccgacaacgcctcggaagaaggcctccgcctcgcccgaccctgggcctcagcctcggccttgggaggagtcacaacctcgcccgacctcagcctcggcctctggagaagtctccgcctcgcccgaccccggcctcggaccgactacgctacaggggatacatcattaccctaccactag

SEQ ID NO: 16481 - DNA, 461 bp, Zea mays
  Peptide Sequence Number=SeqID_59856
atgtccggtgctccaaggaagcacggtctccggaactcgccagcctcgggttcgcgtggcagccgctccgctaaaattcaccggactgtccggtgtgcaccggactgtccggtgaaccagcagagcaacggctctcttcggcgccaacggctccctgcggtgcatttaatgcgcgcgcagcgcgcgcagacgtcagacatgcccataccggtgcaccggacatcaaacagtacatgtccggtgtgcaccggacactcaggagggcccacaagtcagaagctccaacgactagaatccaacggcagtgatgacgtggcaggggcaccggactggcatctccatcgccgaatgtcgggaactgctgcaagaaataccctcgagggcttgcggacatctggcagcgccccgagcccttgtcgggatgcttttccgacaaggcttccactggacaacggatgggg

SEQ ID NO: 16482 - DNA, 195 bp, Zea mays
  Peptide Sequence Number=SeqID_59857
atgaacattgttgggggagggccttcgtcgccgaagggctccgagatatcaactttgtcaagaaaagcaagtttcagaaatcaaaagcgagtggctaacaatcatgtctcccgcctggcatctatgttttggtccctacaggccgataagtatttttggccacccatgagctttagtccacgttttcatggctga

SEQ ID NO: 16483 - DNA, 207 bp, Zea mays
  Peptide Sequence Number=SeqID_59858
atgacgaagacgaggaagaagtcatggaaggtacagggatacctttgttctgtgcttggagatgcagagggagcagaagaacaactagagctgcgtagaagtgcaaggctgagagagctcaatgaagaagagtttgagtccgaagaagaagagtttgatgaagatgaggatgaggatgaggatgagatggatgaaaccggcgtgtga

SEQ ID NO: 16484 - DNA, 2757 bp, Zea mays
  Peptide Sequence Number=SeqID_59859
atgtcgtcctcttcctcttctgttgccgatacaccgtcggtcggcgcgtcgtccgaggagatgctgagcaatgtgacggcgaaggagttgcgcaccggcgacacagtggagttcggcgtgtcgtggatgtcctcggtccaccagctgacgccgaatgccgtggtggccctggcaaaatatgtctgggcaacgacttcgtacggcgggcagcccttggtcaaagtcttcgcgaagtattattgtctgcattggcagaaaaggaaagtcggaaataagattgctcaatttggatcttgcacatttacgccgaagaccggcaagacttcgatggaagtcgttgagttggttccctgcgcccgcaataaatggggcaactggtgggaattttggttctacgttgccgaaggcacagtcgaagaccatccggggctccccgtggccatcatgtgttcacattattactcagcgtacccacagtttgaggtagcggaggaggatgaagacgaaggggccctgcggtgcgcggcccgcatgagtagagggcgcgatctggttgaggagtttgtcgggtatgggatgccttcccgtggcgggatgctggtgcggagtcctgccttcgcactggatttgcatggccgagatcccgccgcattcgtgcgtgaggcgaaggatggggcagtgcgaattgttggtcgctacgtgccgaagacggaggcccagtggagttgggatatacgcggatccaacgaccgcctgaatagggtcttcgagttgaattgtttgccgtatggcggttatcccgggcaagacgttgtcgaccgccgcgggaaaaaaccggcggctaagactgaagacgaccccgcgccggaggccgccccatccactaagaagaggaagctatgtactgcgatgggagaactgggggtctctaatagttttgctatggagttgatggggacatgcgtggcccccgggggaaggatgtcttcgcccgagctccgggagtcttcggtgcggatgctggaggttactgggggtcgatggcctaagaacgttcctatcccccgcgcagccggcgaagacttctttacgtctcgcatggctcgtgacttgagagtgtttccttacggacggaatattgctactgttgtgtcggcagtgatgaacaaggatcgccaggaagctgcacagaagcgccggcggtcatcaggatcgggcgaggggcaacttgttgttgttccgcctgcggtggcgaccacggtgtctgtcgcggtgcctggggtgaagggtagcgctctcagcgctggcggtgagatttcggcggtcgctgccgtcaaggacgaagcgggcactgtgtcccgccggttgagggaggcgtcacagcagctgagtcaaatgtgtctgccgaagtcgagagacttcgggcgcagcatgctgacgtcgtccgggaaaaagtcggctgtggatagcaagtgtcgtaagctggcggagaaggtggtcgccctggagggcgagaggacggacctccggcgccagctggtggaggagaggagggaggccaaccaggccatcgccaaggcgcaggcgacgcaggcggaggccaaattggtgcgggtggaggggagtcttgccagccagcgcgccgaggaatgggaggtgcggttcaacgctttgcaggcccgcatggagagggccgaggcctctacacgctcggaagttgagcggacgcgcaaacagctcgtggactcgtaccgcgagctgggcgcgcggactgctgacttcgaagtgcccgaccaagaggcgggccttcgcttcctcgagtggttgcaagaggaattattggcgctcccgaccatcgtggagggatttatgtcctttgcctccctcgtcacctgcgaaggggcgttgaacgcgctgtcccgcgaggggtgcagtcactatgaggtcttcgaccgatctgatgaagattttgggcgcgagatttataaagtcgaagaccctgtggtgaaaggactccgcgggggccctcttcgaccggatgtggggcccctacggtcgggaggtggtcagggagcgatggcgcgtgtcgaggacgtggaggacttcggacccctgaacagcgcgcagcccgaagcggaggccaacccggttgtggccgaggctgaagtcgacctggcaccacccccggaaaccggtgaaggctccctcactgcccctgcggctgctgtgtccggtggaggctcgtcgccagccgctgcaccgatggtggagaatcccccgaaggcggttcaggattttgggcctgtgcacgcaaccgctactgctaattttgtggcggcttcgaccgtggtcgctggaaatgaatcagatgagtctatgtttaagttttctgattttgatgactctgggagttcagttgagtggacggaagagtcttcggatgaggacttggattactttgcgaccttggatgtggctgcggcggaggcttctccgcatgttacggatgctgaagttttgcctggtccgagtgctgggcgtaggcggcaaagggcggtggcgaagcgtagagtgagtgaagtggatggcggtcggcttcgtgtgggcagggctggcaggcaggaattgttgtcctcgccgtttggggcgagtgtaggtgagggggagttgcgaagtctttttgagggtgaggagcttaggataatgctatttaactatagggagatgggaatcattccgaaggttgaaccaatgtaa

SEQ ID NO: 16485 - DNA, 249 bp, Zea mays
  Peptide Sequence Number=SeqID_59860
atgtcggatccggccgggaaggccacgacagcgacggatccggacagggagacgcgatccagccaaagggacggcggatcgagccgagaaggacgcagcaacgtggatccggccgggaaggtcgcggcagcgacggatccaatgaaggcgaggaaggggagggagacggggcggttccacccaggcagggccctacgccggacctggcaagcgatgatgacggcgcccatcccgtcgccgctcgaagcg

SEQ ID NO: 16486 - DNA, 489 bp, Zea mays
  Peptide Sequence Number=SeqID_59861
atgctggcgacaggtggtggtggtggagatattggaaaaaggatcggtcatggtgggggtgatggtggtgatgatgatggtgacgatgatgactactttgatgattttgatgagggagaggaagaaggtgggcttttcaggaggcgaattgttgtacaagagctattcaatagggagttcgtagaagctgtgttgcaagaatggtacaagacgatgagtgatttgcctaccggtcttcgccaagcttgtgagatgggtttggtgagttctgcacagatggatgtgagggatgcaaatatcctcaatgtcaacccactcgcagacgaagtgaagatcaatcttgacatgattcatatgctgatgaaatgggttgccttgatgctcgagtgggagacaggagatgtccagcctggtgaaggtgagatactaaagcgctcttgcaagacttcgatagccagtggggttactgacctggcctccattacctaa

SEQ ID NO: 16487 - DNA, 437 bp, Zea mays
  Peptide Sequence Number=SeqID_59862
atggcggggtggaggtcgttttgtccagtggagctcctggtgggcgacagccatggcatgggtttgcaacagcgtggtgggctaggctggctggctatcgcgcccctcttggcgcgcaagtggatgtcgacggcgtcggcatgggttgtggctgagaggcgtccagtggccgacgaggtgcgtcggcagggctgcgcggccagccgggatggcagcagtagggccctcttctcgtttagtggcatggcggcggcgaccagtggcccaggcaggcgcatgatggttgcgacggcgacagagcgcccggcgacagctgacttcgattgctgcggggtgtcgcattccccagcactatctgtgaaacccgtggccgcgcggcgcgtcgccgtcgacgtgagcgatcacggtgatcaccgaagagaactagaggacgcaag

SEQ ID NO: 16488 - DNA, 468 bp, Zea mays
  Peptide Sequence Number=SeqID_59863
atgggcaagagcaagaaaggtggtggttcttcgcatcattccggcgacaagcgcaagcgcgagccgactcctccctcggaggacttcggcgactcggagtactcggaggaggagttctcctccgagtccgagggttctccggctcctgcctctcccccggcgtcgtctgatgattcagacgactcccaggggatcgccgcggaggtatggacttatatccgggccgtcgagcgcgccgggctcgagggcttggatgagtcggagtactcctcggacgaggagagctcctccgacccgtccgaggagggcagcggcggcgacggcggtgatggtgacgacgacggaggcgacggtgacggcgacagcgatagcggcaagggcggtgacggcaacgacaagggtggcagctgcgacggcggcgacggcagcaagggcagcagcaagggcagcaacaaggccagtggctag

SEQ ID NO: 16489 - DNA, 372 bp, Zea mays
  Peptide Sequence Number=SeqID_59864
atggtcatcgtgtcaatccctcgcgcggacagccgcatgccgccagatccggcagcgagacctcaccacttccttcatggagagccgcgcgggcctccttgcagctctctcagactgatgaatattcagattggtgaggcatcaaggaggacttggcttggcgaggaagctgatccacagtactcagatcgactgttgagagcatacaagagacctgtggaggttgacgcggaccaatcaaggtggtttatatccaaggatgcaattgtatctggccttggtcttctaggtatcaagcagggtggacctgaggcaacattttctaagtctcgtcgaaagagagtcatccgcaaaaaggtcacttcaggttga

SEQ ID NO: 16490 - DNA, 495 bp, Zea mays
  Peptide Sequence Number=SeqID_59865
atggccagagagaagacacggcgatgcagctcgacgtcggtgatagcggttctagaagagggtggggaaaacgcaggagagctcgattccaccagtcatcaagctttacagaaggttggtgaggtgatcctccggaggaattggaccaaggcgagttgtggaggtgggtccatgttcaccggcggaatcttgaactccggtgatggtgatttcactggtctggtgaagcagagctccagctcgagccttggaaagctctatgggactcaggggaaaccggtggcgggtttggttagggtggaacgtagctgggtgcagcggttcatcgtgaccggctctggtcgacgatggcgggcggcgatgctccctgctccgtgtccgaagagttttgtgccagggataaggagaaatgtcatccctaagtttggtttgtctgagtggcagacccgagagaaaatcctcgttatatcttcaagttccaatgccatcttctga

SEQ ID NO: 16491 - DNA, 750 bp, Zea mays
  Peptide Sequence Number=SeqID_59866
atgaggctccacagcttgtgctatggcacgtcagatcctcctcgtcaccctcacggcggagttgcccctcccactgctcacgtcgccgccctatttcgacctctgtccacagatgggtcgctgctttctccagcagacttcactccagcaaccaagttcctatatgagctcatgaggcgcacactgctaccgaggatgggatacagagagaccaccactcatatccagctttggctacttggtgccttgatctcacactctgagtttgacgtggtcgattttctgatttgtgagattgaggacacagttttggatggtctccgtgcgatgtcagctgccttgatccaacctcctcagttccagtccaccctcgaggcctccagactgcagttcggcttctatcgcctagctcctgaggacatagttctagctctatctccagcatcacaaatcagggttgaggatgaggccataagacagtttgaggatcagggtgcaattgcagatacttcttccgatgatgatgaggatctagggattccgccaccacctcctgtgccacctcgatccatgatcacgaggttggtggctccagtgctgctcctccggctgctcctccagcgattggccctgctttggctgccatcctttagtcgcttactcagcagcaggctcatatggccgcagaacaggcctgctaggcagcagagcaggccagtgtgggggacagatatcccccgggtccactag

SEQ ID NO: 16492 - DNA, 834 bp, Zea mays
  Peptide Sequence Number=SeqID_59867
atgggtttcatccaaggaaggacctccaagcagacgagcagggttaagacccttctacggctcgccttgtcccgccttgccgctgcccgccgtccccgcctcgctcgcaagtcgatttcccgcagcgatgttggacagctactagcactcggacacattgatcgtgctctccaccgtgcagagcagctcatagaggaggacaacatgctggaggcgttcaacataatagagctacactgcaatcgcctcattgagtgcgcaaagcagctagacaagccccatgaatgcggtgatgacattcgggaggcagccgccgggatcatgtttgcagctaggaggtgcggcgacctgccggagctgacgtttgcacgaaccatactgacaaacaagtttggaggcgagttcgcagagatggctaaggagggcgctggcgtcgtcgaccccatgttggtatggaagctaactggcaacaaaggagacatggagctcaagaaaaaggtggtgaaagaggttgctgctgagaacaatgtgctagtggacttctctgagctccaagaggttgagcatggcggcagcggcaacgtttcgcaccatcacaacgtcagccatgaaggcatataccaaactaacatggatggaagtttagagccatcgcacgacgaggatccatgtgatacttccaactctgatggagcaatcaatgggcatccgaaacaagagaacacgagaacttcgacacagcagcagccaccagcaattatgatctacatgatcgctaaaaagagaagcccaccttgccacgttatttacatacaacctaatacaggttcttga

SEQ ID NO: 16493 - DNA, 1173 bp, Zea mays
  Peptide Sequence Number=SeqID_59868
atggcgcaccggacagtccggtgcacccagccgaccgttggagctggccacatgtcgcgtggtgatcgcgcggtcgaccgtttgccgcaggcgccgttggctcactggacagtctggcatggggtgcaaccgagctgtgaccttgcaaacgcaaaaggagtgcgtttaaaccgaactgacagcatgttacatacaccaaaattggagttcccagacaagaggaacgacagtataaaaacctttgccccctccgacagacttcttcatcagtccacgagcaagccatcttcttcttcttccccgaccttctcccttaaggcctcaaccaagcaaaggtttgattttacataccagagtaacggacccagcgccagctggaacaacgaccagagactccggcatccagtcgaccaacgtacaatgggtttcatccaaggaaggacctccaagcagacgagcagggttaagacccttctatggcttgccttgtcccgccttgccgctgcccgccgtccccgcctcgctcgcaagtcgatttcccgcagcgatgttggacagctactagcactcggacacattgatcgtgctctccaccgtgcagagcagctcatagaggaggacaacatgctggaggcgttcaacataatagagctacactgcaatcgcctcattgagtgcgcaaagcagctagacaagccccatgaatgtggtgatgacattcgggaggcagccgccgggatcatgtttgcagctgggaggtgcggcgacctgccggagctgacgtttgcacgaaccatactgacaaacaagtttggaggcgagttcgcagagatggctaaggagggcgctggcgtcgtcgaccccatgttggtatggaagctaactagcaacaaaggagacatggagctcaagaaaaaggtggtgaaagaggttgctgctgagaacaatgtgctagtggacttctctgagctccaagaggttgagcatggcggcagcggcaacgttccgcaccatcataatgtcagccatgaaggcatataccaaactgacatggatggaacttcagagccatcgcacgacgaggatccatgtgatacttccaactctgatggagcaagcaatgggcatccgaaacaagagaacacaagaacttcggtgcacacaagaagatga

SEQ ID NO: 16494 - DNA, 858 bp, Zea mays
  Peptide Sequence Number=SeqID_59869
atgggtttcatccaagggaggacctccaagcagacgagcagggttaagacccttctacggctcgccttgtcccgtcttgccgctgcccgccgtccccgcctcgctcgcaagtcgatttcccgcagcgatgttggacagctactagcactcggacacattgatcgtgctctccaccgtgtacgaccccaccctatcatcgtctctaacctcccggcccgtcaaatggaggcagagcagcttatagaggaggacaacatgctggaggcgttcaacataatagagctacactgtaatcgcctcatcgatgaatgcggtgatgacattcgggaggcagccgccgggatcatgtttgcagctaggaggtgcggcgacctgccggagctgacgtttgcacgaaccatactgacaaccaagtttggaggcgagttcgcagagatggctaaggagggcgctggcgtcgtcgaccccatgttggtatggaagctaactggcaacaaaggagacatggagctcaagaaaaaggtggtgaaagaggttgctgctgagaacaatgtgctagtggacttctctgagctccaagaggttgagcatggcggcagcggcaacgttccgcaccatcacaaggtcagccatgaaggcatataccaaactgacatggatggaagttcagagccatcgcacgacgaggatccatgtgatacttccaactctgatggagcaagcaatgggcatccgaaacaagagaacacgagaacttcgacacagcagcagccaccagcaattatgatctacatgatcgctaaaaagagaagcccaccttgccacgtaatttacatacaacctaatacaggttcttga

SEQ ID NO: 16495 - DNA, 201 bp, Zea mays
  Peptide Sequence Number=SeqID_59870
atgcccaagcaaggcagcagcagcgacttggcagagtggcaggtctgtagagagcacaagcagacgggcgacggctactgggtactactgctgcaagaggctgagagcgggccgggaggggagtgcgtcgtcctcgtccccgcttgcggcgctcgtgccggagggtggtgcctcgagagagtacacggtttcggcagctag

SEQ ID NO: 16496 - DNA, 750 bp, Zea mays
  Peptide Sequence Number=SeqID_59871
atgggtttcatccaagggaggacctccaagcagacgagcagggttaagacccttctacggctcgccttgtcccgccttgccgctgcccgccgtccccgcctcgctcgcaagtcaatttcccgcagcgatgttggacagctactagcactcggacacattgatcgtgctctccaccgtgcagagcagctcatagaggaggacaacatgctggaggcgttcaacataatagagctacactgcaatcgcctcattgagtgcgcaaagcagctagacaagccccatgaatgcggtgaggacattcgggaggcagccgctgggatcatgtttgcagctgggaggtgcggcgacctgccggagctgacgtttgcacgaaccatactggcaaacaagtttgaaggcgagttcgcggcgatggcgaaggagggcgctggcgtcgtcgaccccatgttggtatggaagctaaccggcaacaaaggagacatggagctcaagaaaaaggtggtgaaagaggttgctgctgagaacaatgtgctagtggacttctctgagctccaagaggttgagcatggcggcagcggcaacggcaacgttccccaccatcacaatgtcagccatgaaggcatataccaaactgacatggatggaagttcagagccatcgcacgaatgtgatacttccaactctgatggagcaagcaatgggcatccgaaacaagagaacacgagaacttcggtgcgcacaagaagatga

SEQ ID NO: 16497 - DNA, 705 bp, Zea mays
  Peptide Sequence Number=SeqID_59872
atgggggatcctcggtcgtcgattgttgatccgatgctcaatattgcataccggttcagtgaggatggcctggtcgccgcccgtcagcggagtggacatggcttattaaatgttgaggcggcacatcgcctgccagtggagtggacagggctcattaaatgccgaggcggcacatcacctgccagtggaatggataggcggcgcggcttatccgcaataaatgcagaggttgcgcagcctagaggccttacgtcaggctccgcccactggcttacgtcatgcgcagtaggccacgtggcagcatcgggtctttgcctgagcggggagcagaagcgcacacgagtcctcggacccccacagagagggatccgggacccgtcccaggggtccagtttgcgcccgggggtcctggaccttacccggagtaggatggcggcggcggccccgacgagagcagaggtgctgtcgctcttccgttccttactccgcacggcgaagaagttctcggactacaacatccgcgagtacacgcgccgacgcgccgcggactccttccgcgaaaaccgcgccctcgccgatgcgtcggccgccgccgcggcgttctcggaggggaagaagcagctagaggttgcgaagcggcaagcggtggtttactctctctacgcccccaaggccaagagcgtgatggagttgaaggtgcagtga

SEQ ID NO: 16498 - DNA, 180 bp, Zea mays
  Peptide Sequence Number=SeqID_59873
atgggggatcctcggtcgtcgattgttgatccgatgctcaatattgcataccggttcagtgagttattttgttattctatttatgttcatgtcaagatcattaatgttaattggaacatagagcttaacttgagaaacacgtgccaccacaagggtttatggacgcccttggctgattaa

SEQ ID NO: 16499 - DNA, 357 bp, Zea mays
  Peptide Sequence Number=SeqID_59874
atgtttgaaaggcgagataagttgctggccgagcatgagctcgaggcggaggataaggagaaaaagctggaagagcggatccgacagttccaagcggcgcaggtggcaccgggcccccaggtggtggaggcgacgaagaaagcacttgaagatctccaggcgaagcatcgcgccggggtccagcgcatcgccgcatgggcgggcgaggcgagcatgactctggtgccgctagggatgagtcccatcccagtgtcggagctgccgacgtccatctccgacgtgctcccggtgctggactccgccgccgaccgcctccgacgcttggaccagattctcgacgcccacctggaggcctag

SEQ ID NO: 16500 - DNA, 51 bp, Zea mays
  Peptide Sequence Number=SeqID_59875
atggcgtccaaggccgggagggagtggcggcgagcaacagcttgtctctag

SEQ ID NO: 16501 - DNA, 438 bp, Zea mays
  Peptide Sequence Number=SeqID_59876
atggacagaggcggagttggctcgaaaagaagcttcgtcggccggagcctggccgggccgtccactggtgggaccaacgccggggtcaggcgcggtgctgacatctttcttcgaggtggagacccttcgaccgcgtcgccgtccgaggctgggtcggactccgtcgatggtggagttgacgccgagggtgctgctgctccccctattgatgacttatttgtcggcaacagaattgtttatccgagcgagagttacttttcacggaaggtgatgagtgaggagtccctcgactcggtcggccttgctgcttacgtgtactccgtcgttttcaggatcccactattgaagcagtcgaaaagcacgaaagatgttctggcagaaagaccttttccgaggaaaattttgacgcagatggggttccccccttcaagcccctaa

SEQ ID NO: 16502 - DNA, 1539 bp, Zea mays
  Peptide Sequence Number=SeqID_59877
atgcaggcggcatgcaaccgcaccaagggggcgcaccctttcaacttcgacgcgtccagcatggaggcccaggcccacacgtcatgtaaccggtgcgccggttactacgtgcgagaaactgcaccgccacttgcgctcgacaggcggcacctttggcaggcgaagcaggcgacgcttcacctccgccatgatgaccgcgtcaaaaaagggaccgggaaaggggatactccgaaagggatccttctccgcgaaggaagcgggccccgagccctcctactgatcagatgttcgaaggctggcccctcggaagggttcgacagccgcctcagagcactcgggccccgagcccactactggtcagaggttcgaaggctggcccctcggaagggttcgacagccgcctcaggccactcgggctccgcgcccactactgatcaggggttcgtaggctggcccccgaagggttcgacagccgcctcagaacacgtagagcgagggatgactctgggtacgtctgatacatggccgaggctcgggctatgctcccgaggtaccctaggacatttccgagaccagcaggagcgattctgtaacggaatcccaccagagagaggcatcgagccctcggaccctatcaaacgggaccgggtccagcaaatcacctgcaggcacttttggagcgcgcctctgggccaccagctgacccttatcgaacggggcacgagcgtccactcggatcacccattagcaactcactggagacaccatgttcagcgccctccgagggcaacatggcgctttccccctcctccttgcggaaaggcgacgcaggggcgtacgaaaaaagccgagtcagtccttgaccgtcctctcgctctgtgcggaggctcgggggctgctctcgcaaacccggctccggccaaaccgttgacagcgtcaacataccagcccgagaacttggaacctgactacgcacccgggcaacaaccagaaagcagtgccgccagcgctgctccgactgctgtgccacccgtcagggtaaggccgacagccgccaagaccagcctcaggcgccataggaagctccgcctcgcccgacccctgagctcggactcagcctcgactccggaaggcggtctccgcctcacccgacccctgggctcggactcaacctcaatctcggacgacggactccgcctcgctcgaccccggggctcggactcaacctcgaactcggaagacgctctccgcctcgcccgacccccggggctcggactcaacctcgacctcggacgacggtctccgcctcgcccgacccccggggttcggactcaacctcgacctctgacgacggtctccgcctcgcccgacccccgggcccggactcagcctcgacctcggaggagcctccgccccgcccgacctcgggctcggaccgaccacgtcaccgggggggccatcattaccctacccctagctagctcaggctacggggaacaagactggcgtcccatctggctcgccccggtaaacaagtaa

SEQ ID NO: 16503 - DNA, 1287 bp, Zea mays
  Peptide Sequence Number=SeqID_59878
atgggtcagtcagccgcgggaggaggcgcgacggttgatatggccaaaagtggaccagcagtaatggcggcagcagatgagtggaagcggcggtcaaatcgtctgcaggctcacatcccctcctggagcagcaggggagccttctcccacgacgcgaagcaggcgtcgtttcacctccgccataatgaccgcgtcaaaaaagccgccccagagcactcgggctccgcgcccactactgatctggggttcgaaggctggcccctcgaaagggttcgacagccgcccagagcacgcagagcgagggatgactctgggtacgtccgttacatggccgaggctcgggctacgctcccgagaggctcgggggctgctctcacaaactcggctacggccaaaccgttgacagcatcaacaaaccagcctgaaaactcggaacctgctcatgcacccgggttacaatcagagactgatgggcgcaattcaggtcaaggcttcgtctactcaagggacgcgatctcacctcgcccgagcccagcctcgggcgggaacagtagtcctaggcgaattcacgcctcgcccgagggcctcctcaagcaacgggcgcaccctcgactcgcccgaagctcagctcgggcaggcttcgttgtgaagcaaccttggccaaatcgcctcaccaaccgaccgtatcgcaggcgcattcaatgcgaggatcgctttacatcttatcctgacaacgttcctcagtcggtagggccgaaggtgaggctgacgatagctaagttcagcctcaggcgcaacaggaagctctgtcttgcccgaccttgggcctcagcctcaggaggtggtctcctcctcgcccgaccccagggctcggcctcaacctcgacctcaggaggaggtctccgcctcgcccgacccccagggctcagcctccgcctctgcctcggaaggtggtctccgcctcgcccgaccccagggctcggcctcaacctcgacctcaggaggaatcgcgtcctcgcccgacctccggctcggcctcaggaggagtctccgcctcgcccgaccttgggctcggaccaaccgcgccgcgggggatacatcattaccctacccctagctagctcaggctacggggggaacaagaccggcgtcccatccaggctcgccccggtaacaggtaatgatggcttcccgcgtgcgtccatgatgaaggtggttctcagccccctacggaagcaaggaggcgtcaataacatccccgcagccccgacagctgtgcttctatag

SEQ ID NO: 16504 - DNA, 585 bp, Zea mays
  Peptide Sequence Number=SeqID_59879
atgaagtctcacatggctttgggattactgagcccagagaaatcccaaccaaagtcgggctcgtcttcttccttgaaacccgggggcctgttggtcgagacggccgtcagtcggtcccaggttgaccacatatggtaccccggaaggcacgaggacaacgcccgacatgtcccccactggggtgccggcgtcgtcgacttgctcgacagccgacaaggtgtcgcctcctgcctggccacggtcgccccgcctcctcctcctacggcgaggaaggcggcgggacaaacccggatgctgctcttccgccacggggggaaaacgtcatcgtgtccgccgccacctggcgagctgatgtccgtcgttgtcgctgccgcgctgcgggggaaggagtaccatgtcgtagctaccatcgagggacatgaactcgaggctcccgaagcggagcagcgtcccgggctgaagaggttgctggagactacccatctagaactcaacgggaagttgtttgtcaacacgcagcaggcccctacctggcgcgccaactgtcggcgtttcgacccggggggtccttggaccgacgagtaa

SEQ ID NO: 16505 - DNA, 1512 bp, Zea mays
  Peptide Sequence Number=SeqID_59880
atgaaagcgacgcgaatgctccccattcgggggctcagaaggtacaaggacgcgatgcatgaagggagtgcgaagacatggttgccatccaagggggtcacccttcttttaaaggcgactctccccacttgcgtccttagccgtcacggactgagtcttctccaacacgctccaaggtcctccccctacgacacgggggctgggtcccacgcgtcatgcaagctggcccagacagaagaagtcaaaccgccgcgcgcggagcgcacaacagcccagcggttacaagcattcctccactatcacccggaccagcgggtgaaagggtggaccgccatgcaggcggcatgcaaccgcaccaagggggcgcaccctttcgactttgacgcgtccagcatggaggcccaggcctacacgtcatgtaaccggcgcgccggttactacgtgcgagaaaccgcaccaccactcgcgccagtaccgcgcctcctcgaccgcggaaccggtgccgcgactcaaggcaaccctgcgcatgacccgatggtgccaaccgagcacatcggtcatgggtcggtcagtcgcgggagaaggcatgacagtcgatacggccagaaatgggccggcagtaatggcggtggcaggcgggcggaagcagcagccaagtcgtcagcaagctcacgccccctcctaggacagcgagagaaccctctcccacggcgtgaagacgacgcgcccgtattccgttcctcgaacggctcgcgcacgcacaacggctgccccgcgaaccactcgtcccgtcgcattaactttgcggcaggacaggtggcacctttggcaggcaaagctggcccctcggaagggttcaacagccgcctcagagcactcgggctccgcgcccactactggtcagaggttcgaaggctggcccctcggaagggttcaacggccgcctcaggccactcgggcttcgcgcccactactgatcaggggctcgagggctgctctcgcaaacccggctccggccaaaccgttgacagcgtcaacataccagcccgagaacttgggactcgactatgcacccgggctacggccagtttgcatgagggaacaacccagaccggccgaagcatcacgaaacgcgctaagacctcgaaggagtcaaaccactcctccgaggcctcgggggctacactcagcggggctcgggctcaacctcgacgctggacgacggactccgcctcgcccgaccctagggctcggacacagccttggcctcggaagacggtctccgcctcgcccgaccccagggctcgggctcaacctcgacgctggacgacggactccgcctcgcccaacccagggctcggactcagcctcggcctcggaagacggtctccgcctcgcctgacccagggctcggactcaacctcgacctcggaagacggactccgccgcacccgaccccagggctcggactcagcctcagcctcggaggagcctccgcctcgccctacctag

SEQ ID NO: 16506 - DNA, 567 bp, Zea mays
  Peptide Sequence Number=SeqID_59881
gatgccaagcccatcaagacacccatgggaaccaatgggcatctcgacctcgacacgggagggctcgggctcaacctcgacgctggacgacggactccgcctcgcccgaccccagggctcggacacagcctcggcctcggaagacggtctccacctcgcccgaccctagggctcgggctcaacctcgacgctggacgacggactccgcctcgcccgacccagggctcggactcagccttggcctcggaagacggtctccgcctcgcccgacccagggctcggactcaacctcgacctcgaaagacggactccgcctcgcccgaccccagggctcggactcagcctcggcctcgaaagagcatccgcctcgcccgacctagggctcggaccgaccacatcacagggggggccatcattaccctacccctagctagctcaggctacagggaacaagaccggtgtcccatctggctcgccccgggaccccccggggtcgaaacgccgacatttggcgcgctaggtaggggcctgctgcgtgttgacgagcagcttcccgtcaagctctag

SEQ ID NO: 16507 - DNA, 216 bp, Zea mays
  Peptide Sequence Number=SeqID_59882
atgagctggtgtaccctagggcagagcatagcgaggacgactgttgttgctcccctagccctaggtgatggtcttcctcttcatctcgccaatctgaacacgtttgtgttcaagagctatggccttgtccagaagcttctagaaagatgggaagccaatcatcaacctatagtggatcaggggagctggagagggtgggtggcttatgactcataa

SEQ ID NO: 16508 - DNA, 216 bp, Zea mays
  Peptide Sequence Number=SeqID_59883
atggggccaggccgccaccatggtcgctgcggctcgactgaaattagtcgcagtgtgcggcatggtggtgttcgtcgctgcacggggactgtgaacggagttgattcacgccacgggtggtcatggacgggcgacgattcttcatcgccgagcatcggccgccggggaaccgcggggcgtcgggggcagcccgccttgactatcgattggaggtga

SEQ ID NO: 16509 - DNA, 342 bp, Zea mays
  Peptide Sequence Number=SeqID_59884
atggacctaacatggcagcacctcggcgccaagatccttggcgtcgaggtgccgaggtggaaggcgtgcctagccagagcagcaagcaccctagccgcagtgcctccaccaccacccccgatgacaatagagcagatgttccttatgcagactcaagcagtgcaggcgattgggcagaccctagcagccatgcagcaagtgcagcaacaacctcaaccccgaccgcatgtgcagatgcctcagctaccaagggataaacgtgtggaattcatgagaggtcatcccctgtcttcgcccactctgcagaccccatggatgccgaagactggttgcgcacagtag

SEQ ID NO: 16510 - DNA, 927 bp, Zea mays
  Peptide Sequence Number=SeqID_59885
atgatggatgcggagaaggaggtagcaacagaaagacgggtggactcaccgcctcgatgcgattgtggagaccgtgctgtcatcgatgaagactatgagaagcagttctgttgtccgaacattgattatccatacgggtggcgtaagtgtcgtttcagagagtggttgtatggtcctttgtcccattggccagagccagaggtaaaggaaaagagatacaatcagtgggtggaagaagaggtgaaatttgatccagtactctgcaaatgtggtattgaagctaagtatggattagttccttccgagcttggtgttggatatttttgtggacatatggtcgattacgatgaggagacgaggaaatacagttgggagagttacgatgacaaaggagaggtgatgcgcacaatagagtccaagagaataatgggacagaagatgcgttgtggatctcggctcgtcgattcgtacattaacgatcgcatacgcgacatgcgtagggaagcaaaatctgccttttatgatagctcgaagcgtgcagagtataggaggttgaaggcggcagatgagaagagagcacaggatgcaagggaatgggaagcggctcaagccgagaaacaaattgaaagtggcgtaaactatttggccgatgaggcgcatgcgagatatgttcaggataaagtggcgacggttgagctgatggaggaggaggaggacgacacatctagattgagtgagcttatcgctctcgcaaaggcaggattacatgaagaagaggaggacgacacatcaaggttgagtgagctcatcgcactagctgaggcaggattacgtgctcaagagaaagaggatgagtttatgtctcaagcggccgaagaggtagatgcggcttattacaagaagaagtctgatgaggctgaggcttag

SEQ ID NO: 16511 - DNA, 543 bp, Zea mays
  Peptide Sequence Number=SeqID_59886
atgtcgtcggtatcgaggaattgggcaaggcctagcccactactcctcgtgctcttctcctgccggagcaacatcccactcgaccgtccaacccggtggcagggtggtaggccaagtcacaccatcaaccatttcctgaatgtaaccgcggcggaagaaagggcggaggggcttaccggcggcgagattgctcagagaggttcacgggatgccagagaagatatgggtgcaaggaatcggtcagagactcactggatagcttggtccacgcgcggcggtggaagaccgaagtccggtgaggtcaatctcgggcctctggtgaagtccggctgggtccgagggcttggcaagcttcacgggctactggcggagctagtcgaagcactggcttgcccagaggatggctggagtgggctggccacggtggccgaagctctggcggcaatggcgggcggaattaagctcgccggagctaagggaaagtggttggccggtgagggtgagtgcggggcgaagtggggcgcgcctgggaaggctttatag

SEQ ID NO: 16512 - DNA, 99 bp, Zea mays
  Peptide Sequence Number=SeqID_59887
atggcgcagagggtcttcttcttcgcagcaggcctagatctcgcctcccgagagagaccccgtcggagaggagagatcctaggcccttcatctatataa

SEQ ID NO: 16513 - DNA, 450 bp, Zea mays
  Peptide Sequence Number=SeqID_59888
atgggcaagaacaacaagcacaagcgtgagccgactcctccatccgaggacttcggtgactcagagtactcagaggaggagttctcctctgagtccgaggggtccccgtctcccattcctctgcgtgagtcgtctgacgattcagacgactcccaggggcttgcggcggaggtctggacttacatccgggccgtcgagcgctccaggctcgagggctcggatgagtcggagtactcctcggacgaggaggactcgtccgaggaggacggtggcggcgatggcgaggacgacgacgacgacgacgacgaaggcggtggcggcggtgacggtgacggtgacgacggcggcaggggcggcagcagcggcaacaaggatggcgacggcggcagcagcaggggtggcagcggcggcggcggcagcagcaagggcagcaataaggccagtggctaa

SEQ ID NO: 16514 - DNA, 414 bp, Zea mays
  Peptide Sequence Number=SeqID_59889
atggccgcgccctctctgaaatcccaagagtcgggtgaagacggagccaacagcatagtgttcaccaagtgcgcgacaaaaagctcgaaccagtcgtcaatcatctcgacaacaaccacatccaagactccaccgtccaataattttgtctcatcgcccttcaaatccgagtcctcgtccataggatcgtcgttgacctcgcaacttcagctcgagttaattatggttaaccgactaggtctgataatttatgtgttggtcgatctcatgcttggaatggatgttgattgctacctcgactgtttagctaggttgacgataaataatcgcgtgatgtggaagaaaaaccaagttgaccccaaacgcgggctaatctgcaagctgaagctgaagaatcaacctgaagatggttaa

SEQ ID NO: 16515 - DNA, 441 bp, Zea mays
  Peptide Sequence Number=SeqID_59890
atggtgttcaccaagtgcgcgacaaaaagctcgaaccagtcgtcaattatctcgacaacaaccacatccaagactccaccgtccaataattttgtctcatcgcccttcaaatccgagtcctcgtccataggatcgtcgttgacctcgcaacttcagctcgagttaattatggtgggtgggatgttttcgaaaataaaacttgatggtggatctgtcaaaggccttgatggattcaacatcggaaaagatgtacctctgccaggatccactcgtagtaagcttttctgcaaaacagagtctttgattcttgataagccataccttgactcccatataaccagcatacccttgagagtcttttctttagtcggacatgggaatactgagaagtgtattgtacttgtaacgacgcacctacgctcaggtgagaaagtacactaa

SEQ ID NO: 16516 - DNA, 195 bp, Zea mays
  Peptide Sequence Number=SeqID_59891
atgacgaaggtgatgcttgccgaagatattcaaagctcaagaaatggaagtgagttcaccccacgatgtctaacaataggcgccgaggtggaaggcatgcccaacaagagcagcaggcaccccaggatgaggcaccccagttgcctccaccaccaccccaatgacaatagagcagatgtttctgatgtagactaa

SEQ ID NO: 16517 - DNA, 87 bp, Zea mays
  Peptide Sequence Number=SeqID_59892
atgggttcagccgccatcgtcgccgagaacacaaccatcatcggagcaaggactgacggggatccaccaaacgtcgccccatcgtga

SEQ ID NO: 16518 - DNA, 426 bp, Zea mays
  Peptide Sequence Number=SeqID_59893
atgactacccaaaaattcaggggtaaacaaggttttattaactgtctggactacgctattattaacaggatcagggatctacaacactgtaacctccttaatcgaccgcgtccgattagatcagacgatccaaaactaaccctcgcaatagccctgactatacgatcacagtcgcacagccttcatccaacggtcgagatgcttatctctaacattctaatcatggacgtcggttatcttattgatggcgcaggagccacccagtatctcaggcgaagaaacacggcggcacgctcacccgcggcagacgccatcgccgatgacagccaaatgcggcgccctaacccattttacccaacacgacggtatttacagagaggaggttatggtgatctcattcgaacaccccataccaggtattggtga

SEQ ID NO: 16519 - DNA, 432 bp, Zea mays
  Peptide Sequence Number=SeqID_59894
atgggtgctactggtatattatgtgattctacccatgatgcagtaacgaaagaatgcgttgctccagtatcaaataagacatttgcaaaatggtactcgactgaaaacgaagacgagctgcctggttgctttgacgctggtattgattccctccctactggttattctgacggtactgctgctgctgaggaaactgcctctagtactgctgctgctggttctaatgctgatgctagtgctggcatgattgctccgtcgatcagatgctggaaggtagggaagtccctcgagcacatggtagcaatggaagttgtacttgaattcttcccaagtgatggcttcagggttggcatgggtggcgaggcacttgaggcatctggacttgcacctggggctaaggcgatggtggctgctgctgcacctgctgcatag

SEQ ID NO: 16520 - DNA, 446 bp, Zea mays
  Peptide Sequence Number=SeqID_59895
agactaatttcgagatcaaaaatctaatctcccatctaatccaacataaagggctaattgcagggcctaaaactcatccaaaacaaggaagcacaatagcaagaaaaagggaaattttaggagaaatagataatgtacaaccaaaaccttccaaggatctcatggaacataaaaatataattaaagaatataggttcattcaaagttccaaaggtgaagactgtaatctcgctgacggggagtacatcctcgttccggagcaaggagttgctcaggaggtagtccaggagccagcaccagagtctgccatcgaggatctgcctgccccagctttggaaggttctctggaggacatggttgctggagtgacttggccgtccatcttgccaccgggttggacagttgaatgggacccaacctcggcagaggaggagcatgaggagtga

SEQ ID NO: 16521 - DNA, 129 bp, Zea mays
  Peptide Sequence Number=SeqID_59896
atgcggcttcatacccttagagatggtatggttttatattctaagaggtacttgattcatgttgggaatgagggaagtagcagcacgtccaccttcactaataataacgctgtccaggcacatccatga

SEQ ID NO: 16522 - DNA, 222 bp, Zea mays
  Peptide Sequence Number=SeqID_59897
atggtgatctcactgttccggtggggcagggccttgatccttgtttggagaagcttcacggctcctcggggaagctgtccagaggctcaggtgatgctaggggtctctagaaatggctggccacggtggccggcgctcgggtggctcgggcgggcggcgaagagctcgccggagctaatgacggggtctggtaagcgagggcttatgggttttgctgactag

SEQ ID NO: 16523 - DNA, 486 bp, Zea mays
  Peptide Sequence Number=SeqID_59898
ggcggattcgtctccctcgacgagctcactgcctggaacttccagcagaccaaggctgaccagtatcgctcgcgccgtgacagggattggggctggttctccggtctcgtgaattgcctcgtcgtggatggatggctggatgggggtaggcaaatccggatccgttgtgctactcgcaaagcacgtgggtgcctcgccggccactgtccgtggtcatacgctagctgcgacgcgccggccatcctgcttctcttttatctcgtcgccatggagctcgccgcgtccctgtgtgtgagctcgtcgaccttcactcttctccccatggtcggacaacctcgtcgatgctgctatttggtggtcgcctcttggcctgatctcgtcatcgcgtccgtgctcctcccttgcagctcgtccatcgttgctctcagccccgatgccgttgctccctggatggtggccgccgtacctcagatcgccggtgcttga

SEQ ID NO: 16524 - DNA, 114 bp, Zea mays
  Peptide Sequence Number=SeqID_59899
atggcgagagtagcatgtaccctctatggcaagaggctggacgatggtgtatctgtgctctcggttggcgtgaacccgggttgtccaaagtccttaggacaaggacaactatag

SEQ ID NO: 16525 - DNA, 186 bp, Zea mays
  Peptide Sequence Number=SeqID_59900
atggtgggcggtaattggctgaggaggaggagggggacgaggagcaggacggcggacgaggcagagcaggacgaggcacagcaggcggcgcagcaagacgaccttgtccagcagcaggcggcgcagcaggatgacgatgaagctcagcagaaccgccttcatgttcgagaagcatctacctgcaag

SEQ ID NO: 16526 - DNA, 300 bp, Zea mays
  Peptide Sequence Number=SeqID_59901
atggcgagactagcatgtaccctccgtggcaagaggctagacagtggtgtatctgtgctctcagttggcgtgaacccgatctggtggtacccaaggatgagccccagcagtgaagtcattcgcgggaggatgttggcctcccactttaaaaacaatactcttttgtgcgggagggtgttttgcctcccggggttatccaaggttcgtaggacaaggacaactgtagatgggcctaataacttggaaggttctgtcacagctggtatcggagtgaaacccatctcttcggatactacttag

SEQ ID NO: 16527 - DNA, 216 bp, Zea mays
  Peptide Sequence Number=SeqID_59902
atggccgtgatgggttcaacatcggacaagatgtacctctgccaggtaccaaactttgggattttaaatgataaagctgagaccggactagtaccagaaaggccaacacgaaatgatagtggagagatggcgagagtagcgtgtaccctacgtggcaagaggctagacggtggtgtatctgtgctctcgattggcgtgaacccggtctggtcttaa

SEQ ID NO: 16528 - DNA, 567 bp, Zea mays
  Peptide Sequence Number=SeqID_59903
atgcacactggtccactgttcagtgggtgcgggtatagggatggcaatgggtcgggttcggatcgggtatggggcagcaagtccccgtccggcattcgtgcccgccacgccacacagcttggctactggaagtccacggggaaggacaagcccatgcacagcaggtctggccgcctcgtcgtcgggacgaggaagacgctagtgttctaccgtggcagggcccccagaggggagaagactgactgggtgatgcacgagtactccatgggcgagaggaggagcagcgccctcctcagaggagcacagagtgagtgggtcatttgcagggtgttcacgaggaagcagcatccagcagtgatcagcaacgacaggaaactaccggaaatggaggaggctgccgtgcatgggcatgaccatcgctctcctggccatctccttgccacggaggcagcagacgacgattatgacagcgagcaggaatcggcggtgcccaagcaaacaccaggaagccacatcggcggtgcccaagccatggagggcgacgacgaccattatcagcaaagctga

SEQ ID NO: 16529 - DNA, 249 bp, Zea mays
  Peptide Sequence Number=SeqID_59904
atggcgtgccgccgtgtagtccctgcgcggcaccgctcggcctggctctgggaaggaggaagacgggattacatttgtaccttcggcttgacagaagggcgcagcctgtgtgaaattacatttataccctttacaatcgattacaatcatgacacaaactatcatgggtcaatctgtcttttcatctttaagtcggtgcaaccctttgtctcaaggaccttcggcttcgaagcagacccccaacagtag

SEQ ID NO: 16530 - DNA, 690 bp, Zea mays
  Peptide Sequence Number=SeqID_59905
atgggattgtccaaagtccttagcgcaaggacaactgtaggtgggcctaataccttgggaggttccgtcacagctggtatcagagtgaacccatctcttcagatattacgtgatatggtgcgtactaggaaaacagcgcgcaaatctactggacctcttggtgtgccacgacatcagctagcttccaggcacgaaggaagtagtagtggtagtaatgacccaattggagacctggaagccagggtggagcaactccggttagaactacgccacaggaatagggcacgtgagcaggacagtcaccgtatagcggaattgtcagccgaagtcagtcgcctgcagtacaaaatctcggaacgggatacagccattgattgggccgtcaactcgcgctctttcgcttgggactacaaagcgaaagctctagctcgtgtggtagagcttagtgcatccctcaaaagcctgcaagtgtactgtaatactttacatgaagaagtgcatgtattgtatgctcgactgcacctggacgtgcctccagacgttgctgcaatgggagccagaccatcggggacagcaaatgaagaacctgatggggagctggacctttttaggccccctccttccatgaaccttgttgacgaacggtttcctgtagcaggaaatggaacaacaaaggatgaagaaaactag

SEQ ID NO: 16531 - DNA, 729 bp, Zea mays
  Peptide Sequence Number=SeqID_59906
atgaccgcagtgcccacggcgagcacggctcggacacccgcccggcgtggctctcacgcgccccacctcgtacctgccacacctcgtccctgccccgacacggtcgtggcgtcgtctggcccagccccggcgcccctgctcggcgcggtggcaagaaaggacgcacgcccgtggcacggcttcccctacccgcccgacctcgctaccggcaccgacgcggcaggggcgcgcacgatcggcatcacccgtctctgctcgcggcgtgtctgccccggctggccccgacgtggccctccacgcacaaccgtggaggctcccgtgcgcggccgcgtgccccctgcttgcccagctcgcgaccgtggcgggccggcacggcacgatcgcggctatggcgcggtcggcccccggcacagccccacggctcgcgcagcgtgctcgaccccgaggaaccggggtgtagttcgcttcgccatcgtgccattaatggggctcggtgtatgtgactcgctctgccaagtgataccctgctgggtcaccttggtagtgatcaatggagaggcacttgctttgtatgttgatgtgtactcacccttgctctacacacctgctggagatgttcggattataggtggtgatgagaatgatggttttggtattgactatggtaatggagaagatgaagccgtggaaggagacttccaggagttccaagattacgacgagttctag

SEQ ID NO: 16532 - DNA, 333 bp, Zea mays
  Peptide Sequence Number=SeqID_59907
atgcagtcacaaaaatgtgttgctccagtaccaaataacacatttgcagaatggtacttgactgagaacgtagctagtgccactcctggggtctcctggaccatgtcagcctccagtggaaacatgcacgacctcctccttgcgctggaactgcttggttgttctggttggttgctaggacaggaaggcaaggtgcctggttgctctgacactagtactgatttcctccctgctagttgttctgacggtactgctactgctgctgctgaggaaactacctctggtactgctggtggttctggcgctgatgcttgtgctagtgaccctgcttga

SEQ ID NO: 16533 - DNA, 588 bp, Zea mays
  Peptide Sequence Number=SeqID_59908
atggcgggtggcgggggactgaaccggtcttcatcgagggggcagctgctgccgcaagagctgcttgacgatctctgcagccggttccttctgaatgtgcccaaggaggagctggagtcgttcgagcggatcctgttcctgctagagcaggcgcactggttctatgaggacaactccgttgagcacaaccccaacctcaagtctctctccttcaaggacttcacttccctcatgttcaagagctgcactgctctccggccctacatcgcgcacctggatgatatctacaaggacttcaacaactacaagtttcgtgtgcctgtgtccggtgccatcatcctagacgacacttatgagaggtgcttgcttgttaaaggatggaaggctggggccagctggagctttcctcgtggaaagaggaataaagatgaggaagaccacacatgtgctgttagagaacacactgttaattatgtctatgtgattgctgtgatgcgtgttagatctgatgggcagcctcgctgggttggaggcattggaggaggcgctgcctattcagagaatttggttccttgggggaatctgtga

SEQ ID NO: 16534 - DNA, 1074 bp, Zea mays
  Peptide Sequence Number=SeqID_59909
atggaggccgaggcggcggccaagagggcgcgggagggcggggaggacgccaccgcgccggtggcgggggccgaggcggtggtcgccggtgctggcgagcaggcgggaatctccgccgtcatcccaggatggttctccgagatcagccccatgtggcccggtgaggcgcactccttgaaggtggagaaggttctgttccagggcaagtcagactaccaaaatgtgatggtttttcagtcctccacgtacgggaaggtgcttgtcctcgacggagttattcaggtgacagagagggatgagtgcgcgtaccaagagatgattactcacctgcccctttgctccatcaaagaccccaagaaggtgttggttattggagggggggatggtggtgttttgcgtgaggtttcacggcatatctctgtggagcagattgacatctgtgaaattgataagatggtggtagatgtctccaagcaatttttccctcatctagctgttggatttgaagaccctcgtgtgtcattacacattggagatggggttgccttcttgaaaaatgctccagagggtacatatgatgcagtaattgtggattcttctgatccgataggtcctgctcaggagctttttgagaagcctttcttccagtcggtggccagagctttgcgtccaggtggagttgtatgcacccaggcagagagcatatggctacatatgcacatcattgaagatattttcgtcaattgccgccaagttttcaaaggctcagttaactatgcttggacaacagtacctacataccctagcggagttattgggttcatgctttgctccaccgaagggcctgctgttgatttccagcaccctgttttcaacatcgaggaggatgaacattctacgaaatcaaaaggaccccttaagttctacaactcggagatccacacggcatcattctgtttgccctcttttgcaaagagggagggttccttggagcatggtttgtggttttatgatggttttaagagggtgttgctgaaacagattgagaaaaacacgttttcttcatcaatttga

SEQ ID NO: 16535 - DNA, 300 bp, Zea mays
  Peptide Sequence Number=SeqID_59910
atgacgagtggggcaagggtgctgggaaggggcgggggcgggtggtgtcgcatgaaaagaaaggactgcaaaagacttggctgtgtacaaccaaagtccagctcggtctggcacaccggactgtccggtggtgcaccggacagtgtccggtgcgccaggctggtttccggtgaacaggccgctctcgagaaatgtttggtggcatacggctataattcaccggactgtggtggtgcaccggactgttcgggcgagaggctccaagttgtggagattcctcgcaaacgggagaaagactaa

SEQ ID NO: 16536 - DNA, 462 bp, Zea mays
  Peptide Sequence Number=SeqID_59911
atggaggccatggagggcaggtgggaggcgaatgccacactgtgttgcacgagtgcatataggtttgccccggttccttctctggtttcggcattcagcgtgcgtccaactgcgacgaggatcgccgttcgtaagatgggcgaggtggcaccgctgatcccagccacccggaggaggacgatgtctcgcaaggccgcgggggcagtggaggcggaccaacccgctgaagatgtatctgaggagaagacattgaagattacgatagctttgaatcaggaagctgaggcggtggcaatcgcatcaaaggaggagaaggggctgcaagacgaaccaaaaggaactgccaaagcacaaaaatgttcatttgatcttttagttacctacctcattgagaactggcaatgtgaatgtgttctgttcaaattggcaatctgtattaattatcatctaaacaacaaatag

SEQ ID NO: 16537 - DNA, 411 bp, Zea mays
  Peptide Sequence Number=SeqID_59912
atgaagggtccttgcaccccaacatgttgtacccttctttgtgcttctttcttctacctcttgttggttggttcagaacttgagccgcctgtgattgggagcaccagcttcgtagccggaggtgccacagcttggttgctttgcgaagccattgtcgtagttatggaagtgaccgatgaaaatgcgaggactttggctagaaaggtggttgttgtgaaggccttagatggaaaacaagccctcaagatcaccatcaagtctactggcattggagggcaagacagaacaagaaaccgacaatctggtgactttcaccatatagtccagtgcttagtgtcggacattcgtactatcaggagccgattgatgactcacgtgaaaaaggtggatgagaccaagaagcagaactag

SEQ ID NO: 16538 - DNA, 1356 bp, Zea mays
  Peptide Sequence Number=SeqID_59913
atgaggagctgggcgagggcggcgctgggcgtcgcggagctgctcgtcagcgcggccatccacctgggctacgccttctacatcttcggcaccgcggtcgccgccgacgtctcagcctccctcgtgaagggcctgatggccggcggcggcgtggccaaggacgtcgccgtcgatggtgaggacgaggccgcggcggtgctcgacgacggggccgtgccgcccatcgtgctggtgcacggcatcttcggcttcggcaaaggcgtgcgtagtagcttctgctttttgttaccggtcgttcgctttgtcacaggctcacaggtggactacggcgaggagcacagccgggagtacgggcactcgcggttcggtcggacgtacgcgcgaggccactaccccgcgtgggacgaggagcacccggtgcacctggtgggccactcggccggcgctcaggtgatccggctgctgcagcagatgctccacgaccgggagttcgaggggcacggcgacacctcggagcgctgggtgctgagcgtcacctccctctccggcgcgctgaacggcaccacgcgcgcctacatcgacgggatgcgcgccgagaaagaaggcggcgggcggtggctgcgccccgtctgcctcctccagatctgccgcgtcggcagcgtgctctaccactggctggacctcccctggctgaagcgctactacgacttcggcttcgaccacttcggcatgtcgcggcgcgtcgtgggcgtggcggggctcgcggagatcctgctcgacgccggcagcggcggcgggcggcgggggcccttcgccacgggggactggatcctgccggacctcaccatccagggcgccgcccggatcaacgccagggtgcgcacgttcccggccaccttctacttcagctacgccagccggcgcaccgccaggtcgccgccaggcagcgccggcgccacggtgccgtccggggtgacgaggatccacccgctgctcttcatccgcgtcctgcagatgtgccgctggcgctaccccgccggcgctgacccgccgtaccaggggtacagggacgaggactgggaggacaacgacggcgcgctcaacaccttctccatgacccacccgaggatccccgtcgagcatcccagcgtccaggtggagaaggatgaggattgccgtccgctgcgcccggggatctggtactacaagatcgtggaggcggaccacatgacgttcgtcatcaaccggcggcgaggaggcgtgcagttcgacctcgtctacgacagcatcttcgacaactgccggaaacatgtcttccggactgccccgccgccgacgctaccggtccagagctga

SEQ ID NO: 16539 - DNA, 183 bp, Zea mays
  Peptide Sequence Number=SeqID_59914
atgaaacacttcgatatctcccttttgctggtggagtgggactttgctcagattgtagccaaagtcccggaggagttccacgacaccagggaccttcctaagaattggcacgtccctgatgtactcttcctatcgaccttacatccagcattttcggaatctgagtatccaaccaagtcaaag

SEQ ID NO: 16540 - DNA, 287 bp, Zea mays
  Peptide Sequence Number=SeqID_59915
atgggcaccgaacatggtgtctccggtgagctgcaagcgggtcccctggcgacggggtccgagggctcgatgcctccctccgatgggattccgttacaagatcgttcccgctggtctcggaaatgtcctaggcaactggcgtgctggttgcgcgacgcgtgggcctgggccaccaagccggcgtgtcagaagtcggagaagcgcgtccacctggcgcggttgcatgccgcctgcatggctgcccaccccttccgcctgttggtctgggcgaaagtggggaattgctt

SEQ ID NO: 16541 - DNA, 600 bp, Zea mays
  Peptide Sequence Number=SeqID_59916
gacaagaaaacaaggggctatgttccttggaatgatgagatggataaggtactccttgatacatttgtggactattacaataaaggtgatagatgtcagaatgggtggaagtcttatgtatacacaactgctgtgaagaatgtttgtgagaagtgtaatgtcaccattacaaaggaaaatattagctctcgcagcaagacctttgataagcactacaatatcattaatggtttgttgtccactagtggttttagatgggattgggagaagaacaagctcaaagttgatagtgacactgtatgggatgagtacgttgagccacgtcatcctatccgttgggtttggagctggtcgaccgttggaggctttgtcctcatgtggcaccggacagtccggtgcacactggacagtccggtgcacatcggacagtccggtgcccctctgtccttctgcgctgacttctgtcgcgtgtactgttgcgcactgttcgctgtcagagtcgaccgttggcgcgaggtagccgttgctccattggcgcaccggacagtccggtgtacaccggacagtccggtgtacaccggacagtccggtgaattttag

SEQ ID NO: 16542 - DNA, 254 bp, Zea mays
  Peptide Sequence Number=SeqID_59917
ggaggattagggttgaaagagacccggctctttgtgggcgcctcaacgaggaagtagggcaccttggtgatattgatcctagggcaatagatcttgccatgaaaattgccgaaaggatgttcctcaaaatgaaggaagatgaggcgaagaacaagattaaagaagtgatagtgaaagcgaaagtgaggatgaggaggagcaagaaagtgatagtgaagatgaggatgatcttcaacaattcttcgctcagctaa

SEQ ID NO: 16543 - DNA, 273 bp, Zea mays
  Peptide Sequence Number=SeqID_59918
atgcagcaatgcaagtacggcagctgcacagcaccagtatcgtcacgctcttgctcatctacaggtacagcactgagccagccagagccgccgacgtggacgcagacggagcgtgtggaccgcttctggcaagtggcgactggcgacgcccgtgaattggcccgtgtgaagcaaaccgtcgccgcgcaaacaatacattatggcatcttcttcttcgtcaccgtctaccgcgactgcgtcgtcgaatgcgccgtcatcggagaagacaattag

SEQ ID NO: 16544 - DNA, 1332 bp, Zea mays
  Peptide Sequence Number=SeqID_59919
atggacagcgccagcagcctcgtggacgacaccagtagcggtggcggcggcggcgcgtccacggacaagctaagggctctggccgtcttcgccgccgcctcggggacgccgctggagcgcatgggcagcggcgccagcgcggtcgtggacgcggccgagccgggcgccgaggcggactccggttccggtgccgccgcggtgagcgtcggcgggaagctgccgtcgtcaaggtacaagggcgtggtgccgcagcccaacgggcggtggggcgcgcagatctacgagcgccaccagcgcgtgtggctcggcaccttcgcgggcgaggccgacgcggcgcgcgcctacgacgtcgcggcgcagcggttccgcggccgcgacgcggtcaccaacttccgcccgctcgcggacgccgacccggacgccgccgccgagctccggttcctggcgtcccgctccaaggccgaggtcgtcgacatgctccgcaagcacacctacttcgacgagctcgcgcagaacaagcgcgccttcgccgccgcgtccgcgtccgcggccaccgcctcgtcgctggccaacaacccttcttcctacgcgtcgctctcccccgcgaccgcgacggccgccgcgcgggagcacctcttcgacaagacggtcacccccagcgacgtgggcaagctgaaccggctggtgatcccgaagcagcacgccgagaagcacttcccgctgcagctcccatccgccggcggcgagagcaagggcgtgctcctcaacctggaggacgccgcgggcaaggtgtggcggttccgctactcgtactggaacagcagccagagctacgtgctcaccaagggctggagccgcttcgtcaaggagaagggcctccaagccggcgacgtcgtcggcttctaccgctccgctgccggcgccgacaccaagctcttcatcgactgcaagctgcggcccaacagcgtcgtcgtcgcctcgacggcaggcccgtcgcctccggcgccggtggcgaaggccgtgcgtctcttcggcgtcgacctgctgacggcaccggccaccgccgcggcgccggcggaggccgtggccgggtgcaagagagccagggacttggatcgaaagatattacgacatttcgaatttccagattccagatgctccctgccatccatgatccatctacatctacaggtggcaggggagctggtgcaggctgcagatacaccccacacccacagtccacagaacacagatggcagctggatgcatgtatcgaggttgcaaaaggctcttgggagtagctggcagtggcctagcaagctacctatctga

SEQ ID NO: 16545 - DNA, 207 bp, Zea mays
  Peptide Sequence Number=SeqID_59920
atggagattgaaggatttgttggagagcgatcaacggcggatgaatctgcctcaccaaaatcatcatctcacctcgccgttgtcgccgccgtcggccaggaacagggagcagagcggcgtgagcagtcggccaggaacagggagtcgtcggtgatgcagagcgatgccgcgagcaaggagcagagcgatgccgcgagcagggagtag

SEQ ID NO: 16546 - DNA, 1431 bp, Zea mays
  Peptide Sequence Number=SeqID_59921
atgacggtggcaggcgcgtgggagcagcggtcacgtcgtcagccaagctcacgtcccatccgggggcagcaagagaaccccctcccacggcgtgaagacaacacgcccgagcagcgggcgacgcttcgccttcgccgaaacaaccgcgccaaaaaagggattgagaaaggggataccccgaaagggatccttccccgtgaaggaaccaggctccgagcctccttactgatcagaggttcgaaggctggccccccgaagggttcaacagccgcctcagatcgcgtgggccctacacccactactggggttcgaaggctggcccccgaagggttcacagccgcctcagacgccgagcgagggatgaccaggggggaccgggtccggcagatcacccgcatgtacttttgggcgtgcctctgggcccctagccgacccctaacgaacggggcacggacgtccactcggattacccgcttgcagctcaccggagacaccatgttcggcgcccatcgagggctcgggggctgctctcgcaaacccggctccggccaaaccgttgacagcgtcaacataccagcccgagaacttgggccccgaccgtacacccgggctatggcccgctcgcatgagggaacaaccagaccagccgaagcattacgcaaggcattaagacctcgaaggagtgaaaccactcctccgaggcctcgggggctacacctggcgggtgcgctcgcgcgcacccaccggaacaaaatgcaaccgagaaaggctggtccccttgcaaaaaagtgcgacgaaagcctccaagcgagtgctaacactcccttcgaggctcgggggctactgtcggggaccataattaggggtaccctcaagactcctaattctcagctggtaacccccatcagcataaagctgcaaaggcctgatggggctcggactcgggctaagacccggaagacggcgaactccgctccgcccgacccagggctcggactcgggctaagacccggaagacggcgaactccgctccgcccgacccagggctcggactcgggctcagccccagaagacgacgaactccgcttcgcccgaccccagggctcggacaccgccctggcctctgccgacgacctccgcctcgcccgacccaggggctcggactcggcctcggccatgaaggacagactctacctcggcttcggaggagcctccacgtcgcccaacctagggcgcaggccagccacgtcaacaggaagcgccatcatcaccctaccccgagctgactcgggccgcagaaaacaagaccggtgtcccatctggctgtctccaccagataggctccgccactcctccgacggccacgacaccacactagttgggttccaagatctctccggctgccacattggcatgtactcagggcactag

SEQ ID NO: 16547 - DNA, 228 bp, Zea mays
  Peptide Sequence Number=SeqID_59922
atggtggtggccccctgggtgaggtaccttagccaagaatacgttcccatgttaacgtgggctgccagcacctaccgctccccctcttacccatatttcaagatatggcgcggggtcggggcacggttggagcgtgaggtgggctcggcgggcgctggcggcgcgtcgggcgcctgggcggctcgccagccggggtcgcgcggctcggacgcgctcgaccgcgagtga

SEQ ID NO: 16548 - DNA, 330 bp, Zea mays
  Peptide Sequence Number=SeqID_59923
atggcgacacatcttcacgctgacgcaaatagcccaatcactcctgctgagataccagacgttgatcaagattgggagaagaaaagccgcattggtgatgcatctattatgcttgccaagccacaaacctttatgaatgcaagcggtgagtctatgtatgatgatctggatttaccctttgcaaaactgcgtctgctgccaaagggtggccatggtgggcataatggtagtaactgtggaattgtggatcgatgtttagaaactgattataaacaatcagttagggttctggatttcttgcgggatttgttagcaaaatccactagataa

SEQ ID NO: 16549 - DNA, 141 bp, Zea mays
  Peptide Sequence Number=SeqID_59924
atggacaatgcggttatgacaagtcagagtcacggttatgccctagatgagtcctctaatgccccaactcgagtttcagatggcccacgtgcagcgtcgggaatggagtggatcttgagctccgcagatttggtgttctag

SEQ ID NO: 16550 - DNA, 162 bp, Zea mays
  Peptide Sequence Number=SeqID_59925
atggcggaggacaaggtgggacggatcttgatcggcgggttgtcttgggataccacggagcgcaccttcggccagtacggcaaggtcatcgaggcacatggctactttgggaacctcaaatccccttcgagattgcaggggattgaggtggaaatgaactaa

SEQ ID NO: 16551 - DNA, 396 bp, Zea mays
  Peptide Sequence Number=SeqID_59926
atggcagcctccttgctcacttgcgcgccctcctccttcccttcttccgctgacgtgcgggcccctggggtcagccacctccgcgcgcaagaccgatcacggacgcgtggggcctccttgtcagtccctcacctcaacgggatgcagctccgtcttcctcgcgccgtctgctccgcggattccgctcagcacgcgctgggttgttgcgcggctgtggatcacgcgcgggtcccgcgcgtcaggccttcgttcttccatgtccgcgcgcatcggctcagcagaagcgcaccaatcgcaagaatcagcgccatttccgtcgagatccatgcggaccgctggacccgaccgcggtggacgaattttggtggacccgagtcgatccccctgcacctatag

SEQ ID NO: 16552 - DNA, 738 bp, Zea mays
  Peptide Sequence Number=SeqID_59927
atggccttctgcccgtacttgcctcacaagttttggcatgggcgggggcctcctggcagcggcatcgagcctgaggtcggcgttaccgctgcttggtccctcggagcagaaggcgtcgtcgtcgccgctgctggagcgggtgacggcgcatcattcgtcggccttccgttgctccgcaggccttccccctcggagtggggttgttcgtacctgcggagggggaaccggagttccgttggtagtggcactttgaatgccagtgttttttgttcattgcggctgtcgaggcctgaacgtccggttgaccgaggccccaggggtaaccggttgagccgcctgctcgggccggattcccggaggagtccctggaccgcggcgccgcccgaggctgggtcgggctttgctgaagacgtcgtcgatgccgagggtgctacggctcccttcagcgtgaagatccgagcctgcaggatcagatcatcttgtagcgtgtgctttctgcggccgccgaggccagaagaacacaccctcgccgcgcttgcgaagctgcgtcttttttcctcttgtttcgagcatctggactctgtcggtaacagggatgtttgtgtgagcgagagctgcttttcgtggaagggacgagtgaggtatctgtatcccggaggcgtgggaatccctcggctcggtcggccttgcggcttacgcgtactttcactcgtccatgaggccctgtccccgacttag

SEQ ID NO: 16553 - DNA, 249 bp, Zea mays
  Peptide Sequence Number=SeqID_59928
atggcatcacgacgggtggaggaaggggcgagcaagcgacgacggggtggtgagcagggggcggcgggtggaggagggggcgagcaagcagcggcggggtggcgagtaggggtagcggcgggtggaggagaggtggttatgaaaaaatccgggaagttgacagtgtgcattgcttttagagatctaataaatggagctacaccaaaagatgaatatcatatgactcttgccaatatgtttattgcatga

SEQ ID NO: 16554 - DNA, 258 bp, Zea mays
  Peptide Sequence Number=SeqID_59929
atggccaccctttggcagcagacgcagttttgcaaaggccctacgaagagccacggcttccgcgagccgccgtcaccagcgcccgcggctgatgaagaagatgcccgacaggcgagggaggaggatgggacgcatcttgtccttgcgcggggttgtaagaaaagggaagagggaaggcgggacgccgaggcggcagatggcaaccgcatcgccgtcgctgccgccgtcgccgcagcgccgcagctcctcggagaatga

SEQ ID NO: 16555 - DNA, 645 bp, Zea mays
  Peptide Sequence Number=SeqID_59930
atgggacccccgtgcttagcttgcgaaaccctaggagcagcaattggcgaggcttggctggcggcgatggacgtggactcacgcatggcgacggagtccgactccgacgcacacggtggcagcgggtccgggagcgagacccccacggcgtccccgtctgtgtccccatacccatccgcggaggacgacagcaaggtccaggccttcctcgcggagatggagagctccatcagggacccctcgctccgggccaatgccaccgaccaggagatcgaccacgcgcttgaggtgaagccctaccctgccctgcccctcactgaatcaccgttccttgtttttcgcctcggtgtacctgatgaggccttttttggcacaacagctggttcagcaaatgttggaaaatctgtatttatcagtgcaatgctaagaacaatggcgtacaaggagcttgtggcagcggcagctcaaaagtacaagccaatacagtctgatgttcctagaacaacccttggccctattcaaattgaagcatatttaggcaaaggggctaatgatatagatgttgaattgaacaatgctctctttatagtgtgtatgattgaacaatgctctctttataacaaatcagaacattatgccttctaa

SEQ ID NO: 16556 - DNA, 564 bp, Zea mays
  Peptide Sequence Number=SeqID_59931
atggggggtctggcgccggtgagaaattgcgacgcgaccgtccaagttctggggtggggaggccacgacactactgggacgcccctacgaccctcccaagtcaccaatcgagaacggagcatgacccaggacgtaggccggcgacggcgctcctccgccagcgattcaattggtgactgggtactcgacgagatggaaaagggagctggagcggtcgggttatataggggcgggggcgagtccgagctcagattcacgaggatccgcaacgacccggcgagaaaccagcgtgtcgcgccggcggtcgcgggagttcgttgcctggttgcggccgctatcaccatccgatttgagctaggagagacgcctgccatcccgtgcccacacgccagagagagcacggcgcggttagagggagcgctgacgggagggccccacccgtcggcgcggatgcgacttgggctggcgttagatgtgattgtggacattactccacaactaatcacactcaatcaaagatccaaatcaaacaagtatcacaagaacaaacattcaagttcatag

SEQ ID NO: 16557 - DNA, 942 bp, Zea mays
  Peptide Sequence Number=SeqID_59932
atggcccgcgcccgcgcctataaagccctcccaggcttcgactgcactcttccgcgcaccctcaaacctcaccggagtttagctcgccgtcgtttgcccgtgcgcagcgtgtccgcggccgcccaatccctctgccaccgtagaccggccaatagagccattcccaaccccgtccagccctcggagaagactgtgcacacctccgtgaagctccccgagcgaggaatcggagtttgcttcgccggagaggccagtccacgctcgccggagctctcaaccccaccggagtacgtggaccgggtaatccactcaaccatccttcgattccttgtgcacacggtcactacgttaccccgtgaagcttaccatgcccttggattgaaccagttcgccgtggtttggccggtacactcgccgccgacgagaacacccgcctgcgctcgtggaccgggcgattccggccatccccgacgtcaagccgtacctcgacgtgaccgccagagtctccccgagccaaccccacccttcgccggacctccctcgccgccggttaagaaaaatagaaaatgtgatttaaataatgaaccagaagactgtaaccttgctgacggagagtacgtcctcgtgccggagcaaggagttgctcaggaggtagtcccggatccagcactagagtctgcaccagaggacctgcttgccactgctttggaaggcaagccccgacatatcccctcacgcgacctgagacgtggtctcccattccggttatggtgggtacaagtgcggtcactgcacgacgacagtcgggtcagtggggcattgtacgccaaggcggttcttctggaggaaatggttgctggagtgacttggccgtccatcttgccaccgggttggactgtcgagtgggaccctgcctcggctgaggaggagcatgaggagtga

SEQ ID NO: 16558 - DNA, 678 bp, Zea mays
  Peptide Sequence Number=SeqID_59933
atggaagcagaggggacgagggatcgggaaaggagacatttcgaaggagtccttctcagcaaaggaaatgggccccgagccctcctactgatcaggggtttgaaggttgcgccctgcggggttcggcgaccgccccagagcactcgggctccaagccctttattgatcaggggttcgaaggctggcccctcggagggattcgacagctgccccagaacatgcggagtcagggatgaccctgggcacgtccgttacatggccaaggctcgggctacactctcgaggtaccctaagacatttccgagaccagcgggaacagtttgtaatggaatcccaccgaagggaggcaccgagcccttggaccctatcaaatgggtccgggtccagcgaatcacctgcagacagcggccaggccacataaaagaacaacaaggccgaccgaggagtaacaagaagagcgttaaagacctcagaggagtcgaaccactcctccgaggcctcgagggctacacccgacgggataacaacactattcacactgttctgactactgtgccaaccaccagggtaagactaacaacactctctacgaaggcaaagaaacgtcagcaggacctgaggctgcacagccagctacgcttctacagggctcaagcacttctccgccggccacgatag

SEQ ID NO: 16559 - DNA, 324 bp, Zea mays
  Peptide Sequence Number=SeqID_59934
atgggtcagctcgagacggagcacgaagggggaaagaaaggaggagacaagcgaaaggggaaacctgcagccttcgtgttgtcctgcgcccaggtcgggcgtaaggagagggcccaggccatccttgcattaaatgctcctgcgatacggtcggtcggtgtggcgatctggccaaggttgcttctcggcgaagactgggcctcgggcgagccgaagctttgtgctgatgggggttaccagctgagattaggagtcttgggggtgtccatcgctcacttgcgagctcataaccgtttggatcttcaccaggtggatgaagaatag

SEQ ID NO: 16560 - DNA, 642 bp, Zea mays
  Peptide Sequence Number=SeqID_59935
atggcgcatgcggcggcggccgccgccgtgccgttacgtcgtccgctcctcttcctcaaggaggctcgactcctgtccacactcgcgacccccttacctgggctccgccacccgcgcgccctccgacccacaggccccttgccctccgatgccgaggacaccgacgatccagacgccggcgacggcgccgccgtgtccttcaagaagagccgcaacgaactgaagcgggaggcccgccgcgccgtgaagtggggaatggacctcgccaagttctccccacctcagatcaagcgcatcctcagtgccgcgtcgctggagcgcgaggtgttcgacgcgctaatgctcgtgaagaagtttgggccggatgtgcgggaaggaaggaggagacagttcaattacatcggaagtcttttgcgcgatgcacaaccagaattgatggatactctaatacaagcttctaaggatggagatgagaggaagttatataccttacttagtgaagatagatggtttgacggcctcctctgcaaagacatttcagttactaatgaagtttactctgtccatagtgttgaatttgatcgtcagcattatatttttctgtacacagcacaaatgatttctgggctgcagcttaattga

SEQ ID NO: 16561 - DNA, 357 bp, Zea mays
  Peptide Sequence Number=SeqID_59936
atggggggtctggcgccggtgagaaattgcgacgcgaccgtccaagttctggggtggggaggccacgacactactgggacgcccctacgaccctcccaagtcaccaatcgagaacggagcatgacccaggacgtaggccggcgacggcgctcctccgccagcgattcaattggtgactgggtactcgacgagatggaaaagggagctggagcggtcgggttatataggggcggggcgagtccgagctcaagattcacgaggatccgcaacgacccggcgagaaaccagcgtgtcgcgcggcggtcgcgggagttcgttgcctggttgcggccgctatcaccatccgatttgagctag

SEQ ID NO: 16562 - DNA, 300 bp, Zea mays
  Peptide Sequence Number=SeqID_59937
atgacgacgcgacgtgggggagcagtggaaccttcacgacgaagcagcggcgccggtgtgggtgcggtaaccctagcgacagtaaagggtcaacgaacgtccgaggcggcggcggatgcttgcaaacctcggaccatatcactgttcattttgatccagatcatcacacgatacatcggctccagacctataaccctagattgtttcctacggcatgattatccatggtggaaagaaaaagtgattgactcagacttgaaaagaaaagatggcctttgcccattgacgcctgagatatga

SEQ ID NO: 16563 - DNA, 948 bp, Zea mays
  Peptide Sequence Number=SeqID_59938
atgcaggcggcatgcaaccgcaccaagggggcgcaccattttgacttcgacacgttcagcatgagggcccaggcccacacgtcatgcgggcggaagcagcggtcaagtcgtcagcaagctcacgtcccctcctgggacagcgagagaaccctctcccacggcgtgaagacgacgtgcccgtgttccgttcctcgaacggctcgcgcacgcacaacggccgccccgcgagccactcgtcctgtcgtattaactctgcggcaggacaggcggcacctttggcaggcgaagcaggcgacgcttcacctccgccataatgaccgcgtcaaaaaagggatcgggaaaggggatactccaaaagggatccttctccgcgaaggaagcgggccccgagcccccctactgatcagaggttcgaaggctggcccctcggaagggttcaacagccgccttagagcactcgggctccgcgcccactactggtcagaggttcgaaggccggcccctcggaagggttcaacggccgcctcaggccactcgggctccgcgcccactaccgatcaggggttcgtaggctggcccccgaagggttcgacagccgcctcagacgcagagcgagggatgaccctggcctcgggcgccatcgggaaactccgcctcgcccgaccccagggctcggactcgggctcggccccggaagacgacgaactccgcctcgcccgaccccagggctcggactcagccttggcctcggatgacggtctccgcctcgcccgacccggggttcagactcgacctcgaaagacagactcgacctcgacctcggaggagcctccacctcgcccgacccagggctcggaccgaccacgtcataggggggccatcattaccctacccctagctagctcaggctacagggaacaagaccggcgtcccatctggctcgccccg

SEQ ID NO: 16564 - DNA, 864 bp, Zea mays
  Peptide Sequence Number=SeqID_59939
atgccggggaaggcgaactgttgctgcccagctaggatgcaacattccgtcctctgtcctcgctttcgtggcgaggacgggagcgaggacctgccggtgcgctttggagtggcccgcgctcgctggtgcggcgttggtggacaggcggacgccgccgttggtgctgacgtggtgggagctggagaaagcttctccgccgtcgaggccatcagcgccgcctacggaccgacctccggctctttggctttaatgtctggttcgcgtcccttgagtggggacgcgaacgagagccttccgggggctgcgtccgtcctgggaccatggctgctgctgcagaggtcgctggcgagtcacccggagcttgtcgccccgcaggctctccggtgtggaggttgttcatacccgtgggggcgaaaccagagttccgtttgtaatggcaccttgagtgccggtgtctgttcattatggctgtcgaggcctgaacatccaaagccggaggcagcggtgttagcatggacagaggcagagttggctcgaaaagaagacttcatcggccggagcttggccgggccgtccactggcgggaccgacgccggagtcgagttgccgaggccacgagccgggctggtgtcctcggaggaccgctggctgaggcttcggggtggccggccgagccgtcggctcaggccgtattcccggaggagaccccggcgacgatggcccgggcgtggtgctgacgtcgtccttcggagtggagaccctccggccgtgttgccgtccgaggctcggtcggacttcaccgaaggtggagttgacgccgagggtgctgcttctccccctccgtcgacgtctgagcctgcatga

SEQ ID NO: 16565 - DNA, 369 bp, Zea mays
  Peptide Sequence Number=SeqID_59940
atgactgaggatcctggtgaccagcagatagaagtagctgagcaggagctcattgaaggcaattattttgttattctatttatgttcatgtcaagatcattaatgatggtcaataccaggaagggtggtggaattgatttacctcccaatcgacacactcggaggatatttagacaacctcagccacaaccagcagagatggatcctccaccaccacctccaccagcaggagttgacccactggttgcagctcagatgaggatgatgcaacaaatggcagacattatggcagatatgcgtgctcagatgcagcaggaacgccaagagatgcgccaagagcgggaggagatacgtcgagagctgcgctaa

SEQ ID NO: 16566 - DNA, 960 bp, Zea mays
  Peptide Sequence Number=SeqID_59941
atggcccacgcccgcgcctataaagccctcccaggcttcgactgcactcttccgcgcaccctcaaacctcaccggagtttagctcgccgccgtttgcccgtgcgcagcgtgtccgcggccgcccaatccctctgccactgtagaccggccaatagagccattcccaaccccgtccagccctcggagaagactgtgcacacctccgtgaagctccccgagcgaggaatcggagtttgcttcgccggagaggccagtccacgctcgctggagctctcaaccccgccggagtacgtggaccgggtaatccactcaaccatccttcgattccttgtgcacacggtcactacgttaccccgtgaagctcaccgtgcccttggattgaaccagttcgccgtggtttggccggtacactcgccgccgacgagaacacccgcctgcgctcgtggaccaggcgattccggccatccccgacatcaagccgtacctcgacgtgaccgccagagtctccccgagccaaccccacccttcgccggacctccctcgccgccggtaagccgcgccacccttttctttcccgtggttactgtttacattgggggaaggactgcagactgtaaccttgctgacggagagtacgtcctcgtgccggagcaaggagttgctcaggaggtagtcccggatccaacaccagagtctgcaccagaggacctgcctgccactgctttggaaggcaagccccgacatatcccctcacgcgacctgagacgtggtctcccattccggttatggtgggtacaagtgcggtcactgcacgacggcagtcggggtcagtggggcattgtacgccaaggcggttctctggaggaaatggttgctggagtgacttggccgtccatcttgccaccgggttggactgtcgagtgggaccctgcctcggctgaggaggagcatgaggagtga

SEQ ID NO: 16567 - DNA, 633 bp, Zea mays
  Peptide Sequence Number=SeqID_59942
atgacttttggcaaagaagggaagaagcctacagatactctgagatggccaggggcttcagaggaagattccaccctaggcatgttaggtcaatccataatgccacctcaagtgacgacaggggaaacaatacccaaaggcagcagcacagctctcagtcgtcaggagcacaacaaagctctttcaggccaccggctcctagaggcagagggggtagaaacttcggaggaagatatggagatcagcctaggaaactgttttgtctattctgcggtgaagataaggggcacaccacaagaacgtgccaagttacgattcggaagcagaaagaaattgccgaagctgaagcacggcagaatcagccgaaacaggttctgcataccgcttcgtgctactctccctatgtcccggatcaacagccagaagggcaccaccacgctcagcaacagcgcgaccttcgggaggagtccaaagctcgcacagtcaacaacactgtgcctgagtcgaagcacatctattaaaggggagtttgttgacagcttcgtcaacggcttcttcggcaacccttattgtttcaagtgctgccctcatggcttgatcggcctcgagatcatatggttcaggcggcggtga

SEQ ID NO: 16568 - DNA, 834 bp, Zea mays
  Peptide Sequence Number=SeqID_59943
atgacggcaacaccgcgttgcggcagcggccaggggcggagggcccagtatggcccagtattgcctaagcaataccttgggtcggcccaaatagagatatggtcatcctccggctgccgcaccgcgcactgcgctgccgcgcgctccgccgctccacctccatgggtccgcgctgcaggcagcaggcctgcggactacagcctacaggatctgcgggctggccggctgtggctgggcgctggctgcctggtcgcgtgcctctacagctctgctactttcaccgaacgtcatccgcagtgtccatcttcacccgaaccagtcacggaggccaagcaggaggttcagacggggatcaaccagggcggtggccacgagcggacgtggaccgacacgaagggcgccgcgagcgcgtccaagaaccagaccccgtggaagccgtctcaccacagcggaccaccgattcggcgacgggagggaaggacgctggctgtggcattggatttcttggtgatggcttcaggaaggagcggcgtgggaggttgggtccgggatgcggtagcctattccctgcgcacggctcggcagcaaggagtggcaaggggaggatgcggcacacggcgaagtggtggaccaggtctgtgcatttatggccctcggggagcaagggaacgaccctggcgacttcccagccgagagaatcggtccaggcacaaccaaccagggaagaagaccggcctggcgaatgggccccacgcggcagtgtcacggcagagagacaggcgcgcgccgctcgggcctgcctgccagagccgtagcgcgcagagcggcggctag

SEQ ID NO: 16569 - DNA, 312 bp, Zea mays
  Peptide Sequence Number=SeqID_59944
atggcctggagcggtcgggcgccctggcgcgggtccaacggcttctggcggcacggtttggggaagcagagaggaatccctcgcctgaccaccatcgcagcaaaatcaacccaaggacctccctacacttaccactcccctactgcccttgctcctttcggggagaaagtaaaggtccttccccctttggaaggctgtgggcgaggagggattcgaacccccgacaccgtggacctcccctacagtatcgtcaccgcagtagagtttaaccaccaaattcgggatggatttgtgtggttcctctacgcctag

SEQ ID NO: 16570 - DNA, 402 bp, Zea mays
  Peptide Sequence Number=SeqID_59945
atggcaagcgcaagatcagtggaccccagcctggaagcagcaatcgtcctcgtttctcaggcaatcaacctcagcagttcaggcagaactagcgtccacctcagcagcagcagtagtttcaaaggcagtatcctcagcatcagcatcagaatcgccagaataatcagccaggaggaggtcgagcaacagcaggactacccaatagttcatttatttgtaaggtgtagggtgaacaaaattggggtgcttccgcaaaagttgggcttcgggttcctcaacctcgcttttatgcatagcaatacatacaatcaagcaaataatggatatggtaacattacaccaaagcatatgaacaaacaacgggctcatttgcaaacatacccagcgaaggggtacgaataa

SEQ ID NO: 16571 - DNA, 783 bp, Zea mays
  Peptide Sequence Number=SeqID_59946
atggctcacaggcacaaggatggggacagtggccaggacaagctccagcgtcgcagccacagtggaccggtgttgggtggacgcaggcacctccaggcacttggacgcctccaccaccccaaggatcgcagcaagtcccgggatgggtgccaccggtctcccagccaccggcgggctctcagccatttcaagcgtggatggcaccgccaccgacggggtgggtgccaccacctctggggtgggcagcacaacagtacccgtggatgcatgcacagcctcctcctcaccatggatcacagggttcagcgtcacatgctcatggatcggagggtggtgtcaacgtccaagacttcctcgtccatggtgctggagggagtggccaccttcctggtggcggaggagggagtggccaaaactcccacagcccgccggagtgaggaggacttcgaccgtactcctccacacacgctcgacctcaccggagcccgaaaccaccggcgtttgccccgtgcacggcgtgcccgcggccacccgagcccctaccaccgtagaccggccaacagagcccttcccaaccccgtccaaccctcggagaagactgtgcacgcctcagtgaagcgccccgagcaaggaatcagagtttgcttcaccggaggagccagtccacggtcgccggacttcacccaaccgccggtgaatgtagaccggcgttgtgaccgccaggacctcccggagccaaccccgcccctcgccggacctatctcgccgccggggtataactga

SEQ ID NO: 16572 - DNA, 324 bp, Zea mays
  Peptide Sequence Number=SeqID_59947
atgggttcaaaaaccctgagtacgaagtgtactttcgcaagtcttacccgtctaaggaaaaagactctcatggatatgctggctttatgggaatcaaggtatggtttcttaagaccagacccggttcacgccaaccgagagcatagatacatcaccgtccagcctcttgccacggagggacacgctactctcgccatctctccactcccattgcgtgttgacctttatggtattagttggcccgaggcaaagcttacccatgacgaggcatgtggccagttaaaaggtcctcaatcatcaagcctacatcgacatggtccttaa

SEQ ID NO: 16573 - DNA, 387 bp, Zea mays
  Peptide Sequence Number=SeqID_59948
atggggatgctatgggagtggtcagaataccccgaccatcattctcgagctcccagtgaatattcaacggcagcaaccgcaaggattgaccgtggtagcctccctttcttcttccctctcagcggccatggcggtcgtggctctcggttcgtcaatggtggccaagggactagggagacagggatttatactcctgatgaagaaaatcccgcggacatcgcgcgatttgaacgaacagaactcgacgcagggaggggatttcgcccaccaggttcacgttccgttggggaggaaacaactgccaagtgggtcccggatgacagcgagatgagtgcgtcacgggtccggcttcttgagggactgacgaatgggcccacgccacagtga

SEQ ID NO: 16574 - DNA, 924 bp, Zea mays
  Peptide Sequence Number=SeqID_59949
atggcgcaccggaccgtccgcgtcgagtgccctggtgcaccggacactgtccggtggcacatcggacagtccgtggtagtcaaggaaattcctatggatctccctcacattcgagtggagcatggagtcatcttggaggacagctcggaggaacttctgcctacgcccaccccattggtagagtcactggccttcgcagctagatcatcaacctcagcaccgcctacaccagcagttcatgctcctgcacctggaggcgacgacccagacgactctggggacgatgatgaggatgatgacgacgacgaagatgacgaggagaatgtcaacaaagaggccaacaatgttcagcaggactacttcatggggtttgggcctgtaaccaaacattacacatcaatgtttgagatagtgcacttccccaacctgctgcaagatgtgctgcatgcgttgggaacctacgtccgacccttgtacgagacaaggcgagtgtgcgagcctcctcgggcttgctattacatcactcgcattcacatcaaggtgatggatgcaggggatagagggttcaggactctatcagctcatgagtccctgacaccgctatccacctacgctgcttcggtcagtgatgctgccaggcggactctgtggtctctcagccacacctaccggcagcagcagcatgacatgaagtttaggcatcttcctctgcatctgagtggaggtagccagaccagcatcattccaggtggagctggtgaagatcggctcaacaccctagctggtgtagtggcaggtcttaacacagacctggacagtgccaccctggatctctctagggtgcacttggagctagaggatgcccatgccaggattacagccctggaagctcaacttcaaggatgggatccccctgaagcctag

SEQ ID NO: 16575 - DNA, 444 bp, Zea mays
  Peptide Sequence Number=SeqID_59950
atggaggcgaggtggagatggaggccgagcccggctgggcgcgaacgagcagagggagaagacgagggcgcgcgccagctggaaggaactgggaagccacggcaccggaggagcagaagagatggacgtgcgcgcacgaagctcgacggcggccatgggaatgagcttgaaggagcgcctgccatgggggagagagaaaagcaggaggcgccatgggagaccagggagaggggcgcgccaggcagagggagcgtgcagggagaaatgccggcgagccagggagctggggaagggactcaaggagagggagatctcggcgagctggagcagagaccgagcgccgcgagcaggacaaggcaccgcgagggagaagcagaggaagtaggcacagccagggaggaagacgcgcgtaggggagctgagcgcagagagaacgacgactga

SEQ ID NO: 16576 - DNA, 216 bp, Zea mays
  Peptide Sequence Number=SeqID_59951
atggcctccgccgtggtatgccataccccttcggccttggcatatttccttaagagcccctcaccttttagcgactcaacccgccatcctctggagctgtgctctgtgtctggcgagtctttcctcgaacccccttacttttccagaaattgtggcccagtccagagcttagagaaaataggaaaaatgaatttagaaattgaatttccaatgtaa

SEQ ID NO: 16577 - DNA, 435 bp, Zea mays
  Peptide Sequence Number=SeqID_59952
atgtcagagattcacagaattatagctgatatggttcctgagaaggacatggctgaagtgaccactgatagggcttcgcccttaaaaatgaaagagttggaagggacttattcggaggacatagagttggacataggacacctgccgcttgaagaagcacattcaaatttaaaggaagctggaaaccgttatgagcatgaggttaatggcttaaaagataaagtcaaagccaaagcagaaaaaagctctaaattatctgaagcccttaaaacgctttgggcacctgctttggcttcgctgctcgacgctcccttcgcctgcgcgagatctttagttcagtcggagcaatatcaggagaagagaaatattctgccgatgatattccgaaggcactcgagtttgtggaaaaagaaatcaatgaatttgacgaagtga

SEQ ID NO: 16578 - DNA, 393 bp, Zea mays
  Peptide Sequence Number=SeqID_59953
atggaaatcatcataccattcatcatcatcgtaggaattgtcctgacgaagctctctgcgttgaggtcttcgatcctggtcatcttgagtgagatgacgcatttcctcagcagcctcatcgatcttcttttgaagatcggaaagacaaagaatcttctccttcttcctctggacctgttggtggatggcttcgagtcgcggcggctggtgaacccaatcttcgtgcctaccgtcgagatcaagatgcaacttcatgaccaagcctccctgcgacgcattgcgagtgcacagaggcgtgatgtggtggtctcggccatggcctcgccgtcgctggagagcgccgccgtagcgtgtgagcgtaaggttgaagaagtgcgggtgtccgtggattag

SEQ ID NO: 16579 - DNA, 339 bp, Zea mays
  Peptide Sequence Number=SeqID_59954
atggcgagggctggaggatggggaccgctggtctgcaacagagagaggggctcgacgagcgcagtccaggcgctggggcgcggatggcaaggccagagcagagaggaacggcgtccagcggcacagggacagtggtcgcgagctagtgaaggtgagcttgaccacaacagagaaggtcggacgctggatgaagcagggcgcgccatggagaagaggaaggcgcgttggagaagatgggagcagagagctcggcggccaccatggctgggtcgtggagcagagggaggcgcagaggccgacggccaagggggtgcgctagggctcggcgaccatggctga

SEQ ID NO: 16580 - DNA, 189 bp, Zea mays
  Peptide Sequence Number=SeqID_59955
atggaggccaagtcacaccagcaatcaatcatcctaaggagtacctgcaaaaattgtgccacaatgaccgcacttgtacccaccataaccggaatgggagaccatgtctcaggtcgcgtgaggggatatgtccactgccaggttcactcaggaaaaagagaagaaaaacagatgttcacgaccaattga

SEQ ID NO: 16581 - DNA, 186 bp, Zea mays
  Peptide Sequence Number=SeqID_59956
atgtcgaagctcttctacacacagcttcggctctgcgccaaccttcgtgttctttgtgcttcttcgtaccgtggctctgatccgagtccgaagatacctgttaatgcatcaatttctggtaagcgcaggggtacttgcgcaaaagaccctaagacacagagaactgctagatggaatgcaggttga

SEQ ID NO: 16582 - DNA, 1092 bp, Zea mays
  Peptide Sequence Number=SeqID_59957
atggggggcatccgccgtcttttcgcctcatcgttcgaggaacgcaactccgcgggagttggtacctttcagccatcgttcggcttcaaggattttcatcatgcagcccggtcgctcccccccgctagtggtcacccaaggtgcttcaaggatgttcatcatcctcgctggggtgggggccgggctgagccggcgctctacctcccacgcgggttcgcgagtcaccccttcccgcggcgttcgggggagagggcgctcactggccctgcgggcggcccggacttcgacaacgcggggctggtcgacggcgggcgtcgtcacctccagcgtgtcgggcccgttggcttggctcccggcggcccctcctgtcggagggcggctgccgcgctggcggcgttcgtgttctggggtggtcctgcctttgcaccgggatggcgccttcacgcggaggtcggtgccccactcgcccgggaggatttgagtggggatctgccggggagccggtgggccctgccgtcggtgccgaggcggaggcggctcgagaagtccccgtcaccgacggggtcaccgccaccatccgcgcctctggcctccggctcttcgcacttgtcctcgcccctcgagcgtcggtgtgggcgagggcaagattgcagcagcgcccaccctgaggcctgcgctgctgcagctcgaccatccggagcgggggtcattgtcgtcgtagtcagagcgggcggcggcgagccgctcgtcggtcttctgttgctccgcaggcccacccccatggagtggggttgttcgtacctgcggagggggaaccggagttccgtttgtaatggcaccttggatgccagtcacgaacagaggcggagttggctcgagaatgggaacctggttggccggagcctagctgggttgtccgccagcgggaccgacgccggagttgaccagccgaggcctcgggtcgggctggcgcccttggaagatggtcggccgaggctcctgaggcaaccggccgagccgcctgctcggaccggattcccggagaagtccctggaccgcgtcgccgtccgaggctgggtcggatctcgctga

SEQ ID NO: 16583 - DNA, 255 bp, Zea mays
  Peptide Sequence Number=SeqID_59958
atgaggggaaaaccctctcgtgtgagactgttcgtgtgggaaagtgcaaaccctccgtcagtgggcacatgggaagtcatctatgcaaggcggaaattaactaacggtaaaaataaaagggaggatggggaagcctggccaatcactcctcatgctcctctcccgctgaggtggggtcccactcgactgtccaacccgatggcagggtggacggccaagtcgctccagcaaccatatcctccagagtacctgtaa

SEQ ID NO: 16584 - DNA, 987 bp, Zea mays
  Peptide Sequence Number=SeqID_59959
atggaggtccgttgccaaaccagcttttgccagaatgaagatggtttccccaagttgctgagagcatgcacagttcgcctcggaatcaggagccagccagagtatgatggtcgtgaattcgtcgagcatggcacagagaagtgtgtcatgactgcatacattggatccagtccgcaccatgtggaatggagtgtcactgctgctgggcacagattcaaagacacctgtcaagtcatcgctcgcaaggcattgagggccctgtggcagcagctgcttgaggatgacccctcagtcgtgtacctcaccgcatacctgctcaccctggatgcgcaatatgatttcttggcttggcaccaccgtcagatgattgcccgagcagaagatgcagagaagcgcaaccgtaagctccatgtggatctcaccacagctcaagcccgtgtagctgccttggaaagtcatgaagtcattgttgttgaagccctgaagcaagccaaggatgagcatgtccagaagttgatggaggcctacatggtaacccataaccaacgtagagccctgcggatccaagagcccgcttcgtccaatccagttcaacccatgagagctgaagatccccagattcttgaaggtcactcggtctctaccagaggagaaaagaaggcttgggaactcccggaaggagccatagtcttagaaggaattccagtatcccctcaggctatggataagcaagagcaccccgaatcctccctagatcccccgccagagttgtttgagctcctcaccatgaagaagattctagcaccgtcccgtgagatcaaagaaaaagctgcaagcaccccaccagcaccgccgccctctaaggagctacaagagccagtcccgcttgaagaagagtgcaaacccgttctgccatctcagtcgccgccagaagaagtcatcaacatcagctccctcttaacccatccaggagatatctcagattga

SEQ ID NO: 16585 - DNA, 237 bp, Zea mays
  Peptide Sequence Number=SeqID_59960
atgaccgcgcacgcgctccctctcccactctccctcccactgcttggtgggaccggcctgtcggcaccgattcgtccgcgcacgcgcccgctctcgctcgctgctcggtgggacctccctgtcagcgctgatcggtcgttcgcctgctcaccctcgctgcctgaaagtcgcctagagggggtggataggcggaaactgaaatttacaaactttaagcacacttcaagccagggttag

SEQ ID NO: 16586 - DNA, 321 bp, Zea mays
  Peptide Sequence Number=SeqID_59961
atgcccactgtggcgcggggcccacaggtcggcggcctcaaccggtatctacgcgcgcgctctgtttcaccatacaagtgggcccaccttgctagtcacttccgctctcgtgtggaaccgggccaccccgagcgtacacctgccactgccacgcgggaccacctcgtcagcaccttcctcgcgaccgaagctaagtccgcgtcgctggtcaacggaacgcgccaaaatcgggagccgaacctgtcgatttcccctcgcctaggcgataaaaatggatccccaagccctcgcccagtaaacctagctcctaggagcaattag

SEQ ID NO: 16587 - DNA, 915 bp, Zea mays
  Peptide Sequence Number=SeqID_59962
atggccgagaagccgcccaagcccaagcctcccctgccgtcgaagccgaggcccgcggcgggaataccaacgtcgacgccgggtcccggcagcaggttggccgcgccgcctttgaagaagcccacgctggcgccgccgccgcaggtgctcccgctgaagccgccgccggcgcaccagtaccggcagcagcagcagcagccgggcggcgcgcggaagccgcgggggtaccggcagcagcagcagcaggcgcaccggcgcgggggcgggtgctcgtgccgccgcgcgtgctgcctggccacgggcctggccctgctggcgctctgcctggcgctcgccgccgcatgcctcgcctacctctactaccgtccgcgggcgccgtcgttccacctgcggccgctggcccccgtgcggctccgcctcggcggcaactcctcgtccgcggtgccggccatggacgccaccgtcggcgcccgcctggtgtcgtggaaccccaacgagcgggtcgcgttccggtacggcgacggcgagggccgcgtcgcgctggccggcgacggcgacggagacggagacgtggcgctcgggtgggcccccgtgcggggcttcgcccacgcgccgcgcagcgtcgccgccgtcgcgttcgtggccaccgccaggggcgtggtgctggacgacgccgtcgcggcgcgcgtgcgcgacaggtaccggcgaaggcagcagcggttcagggtggtcgtggacgcccacgtcggcgtccgcgtcggggcgctacgcacggggatggtgccgctcaggctgctctgcgacgacggcgtgatggccgcggggtcgcctgacgggaccgccgcggggcccatgagcaagtgccagaccgtcgagctgataccgcaggcgccagcagagctgaagacggcgtaa

SEQ ID NO: 16588 - DNA, 465 bp, Zea mays
  Peptide Sequence Number=SeqID_59963
atggcgagactagcatgtaccctctatggcaagaggctagacggtggtgtatttgtgctctcggttgatatgatgcgcactaagactacccagcgtaaattgactggagctcatggtgtgccacgacatcagttagccttcaggcacgaaggaagagtagtggcagtaatgacccaattggagacctggaagcccgggtggagcaactccggtcagaactacgccactagaataggccacatgccatcccggactcgtgcacatgatggtgcgaggacatcccgcggtggggaagatactcccaatccgccaccggtacctcctactttggccgaggctattgctgccctggtcaacgccaccgctgataatacgtgcttcttgcgcgaaatggcaggcaaccaattccaacggtacggaggcagagtcccccctcaaggaccgcgtgatactacttatttgtaa

SEQ ID NO: 16589 - DNA, 213 bp, Zea mays
  Peptide Sequence Number=SeqID_59964
atgcacctcaccgccggtgatctgccaccgcaatttgcgcccgcctgggagatttgtgtcgcgggagaggtaccttcggacatatatcaaagagggagaacctcaaaagatacgaaggttggcagtgccgaagctgtgaagcaggaaagcttcggcatgttcgcagaaaagggaaccgacttaaagatgaaaaggccatttagacctcgatag

SEQ ID NO: 16590 - DNA, 897 bp, Zea mays
  Peptide Sequence Number=SeqID_59965
atgcggtgggacgcagccgaggccgaggcggccctcgagcggatctgggacctccacgaccgcctcagcgatgccatcctcgccgtctcccgcgcgcacctcctcctgcccgctcccccgccccctcccgtgccgtccgcgccctccgccaaaggggcccaccgcatcggcgtcggtaggaacgggtgcgtcttcgtcaaggacggcgccgccggcggcggaggtgaggcgctggccgccgccgcggaggccctggccgaggccaggagcctgcacgccattcgctccgcgctcgaggacgtcgaggaccacctcgagtttttacacactgttcaatcacaacagcgggctgagcgagatgctgcaattgctagactggagcaaagccgtctagtccttgctatgaggttagcagaacatcgaggaaagaagtataaagtaatcgatgaggccttggcatttgttggtgaagtgagtgacaagagtcaatttatctcacctgaggatgttcgtgctacccatagccgatcagaggataacgcagatgacaacaggggcagtggttcaaggataatgtcaaacgtgttatcttgcagtttatcattagccaagaattcatttcgactggacaagatcgggggcactctcggtaacgctgcagtgtttgcaattgtaccagtacccagctttgttaggccatctccagtacactacatatttcactctctatttcaaactttactcgagttggccttacttttatcattgctcactcatgctcttccaactggcgggttgcacttagggcttatttggttggaaccctcaaccctgcatgtcaggcaaaccatctcatccccaggcgttcaaaatccaacgtctgggagcgctgcctga

SEQ ID NO: 16591 - DNA, 489 bp, Zea mays
  Peptide Sequence Number=SeqID_59966
atggacggcagagcagttgctccggcgagcctgtaccggccggataacgcaatgaccagcgctcaggagcgggtgctctggcttcgtgattacctaacggagttagtggatgcgtggcgcacgatcgttaagcagctaacgccggtgaggatcatcccggccagccgcagtccaagtgggtacgacgagctcaccgtcgaccgggtccgagccaatctgagcgctaagatctttactcccctcagttatccacttgcgctgggcatgaatcgcggcggctgggatcggggaggtgggctagcatggccagagccagacgaacatggcagcggggccaatttggctagtggcgctctaagaggggctgaccacggggaggtggtgggctctctggcggtgctcgggggaggggaggagcggaggctggcgggcaccggcgaggtgcacagcgacggtgataatggcggcacagtggtggcgatgggatag

SEQ ID NO: 16592 - DNA, 714 bp, Zea mays
  Peptide Sequence Number=SeqID_59967
atgatccagctgctgttcgtcgtgctggtggcggaggcgtccctgacggcggcgctgctcttcaagacgccgctgcggaagctcgccgtgctagtgatcgaccggctcaagcgcggccgccacgcgcccgtcgtcgtcaagacggtcgcgggcgtcatccttgccctgctcgcttcaacgctctacagcatgacacagatcgccggcagcacgagcgactccgactctggcggcgggcccacccccaccgaccaggtgctcttctcgcgtcacctcctggaggcgtgcctcatgggtggctgttcaagcggttgtgttgattctgagctgagtactattctttcagggtactccttatttcttgctctagtgattgaccggctccaccaatacatcagagatttgcgccggtttaaaaaggacttagaggctgtacgtaagcataataaaatgttggaggaggcaaaacatggaaactcggaggaggcaaagaaataccaggaagagattgccactctgaacaaggagatgaagaaactgaagctacaagtccaagaaaagacagaagaggtccatgtttcagaggacaaggcacttgctatccaaaaacaatccgaaggcttgctgactgaatatgaccgcctgctggaggataatcagcatcttcggacacagctgctgtcaattgaccgcaggctttccaactcttcttga

SEQ ID NO: 16593 - DNA, 663 bp, Zea mays
  Peptide Sequence Number=SeqID_59968
atggtcgcacccacatccgcgcgattcccgagcactacccacacgcccgacccctactcaaaccccctcccacccgctctgccatttcctccactcacagacagctcccagtccaccctcgattgtgcgttgtctcttccccgagctcagaggaccactgttgttcaccgtgtccgtgcgcccgttctgctgccactattgaggcctcgccgtgcccattacctcggtgaattccgcctcggtgtccacaactcgagacatgcctcaatttactctctccccctctggttctctcgcccgtgctcaccggagcttctccgcgcagccggagagccgccaccattgacccacgccctcgccatgtccctatcgccgttcaagggtcccagaatctcttctcaagcggagcagccgctgcgtcttcccgaggctggcgagttctggaggccgctgttccttggagcaccggacactgtccggtgtacaccggacagtccggtgaattatagcggagtgcctccgaaaattcccgaaggtggcaagtttgagttgaagtcctctggtgcaccagacactgtccggtggtgcaccggacagtccggtgccccagaccagaggtgccttcggttgtcccttagctcctttgttgaatccaatatttga

SEQ ID NO: 16594 - DNA, 372 bp, Zea mays
  Peptide Sequence Number=SeqID_59969
atggtgttcaccaagtgcgcgacaaaaagctcgaaccagtcgtcaattatctcgacaacaaccacatccaagactccaccgtccaataattttgtctcatcgcccttcaaatccgagtcctcgtccataggatcgtcgttgacctcgcaacttcagctcgagttaattatggtgggtgggatgttttcgaaaataaaacttgatggtggatctgtcaaaggccttgatggattcaacatcggaaaagatgtacctctgccaggttctaactttgtgctgttgttgatggtgttaagtgccggtgggctcggccttcttataagtctaagtaacccttctatacttcttattgaggatgatcccttaagctag

SEQ ID NO: 16595 - DNA, 354 bp, Zea mays
  Peptide Sequence Number=SeqID_59970
atgtgtgcggcttctactgcaccggctaactcgcaaacaacttggacaatgcgtgctaccttccctgaatatgtggttgctcttactacaattgttggatctgtgcttttcacggaagcaactgaactgggaaagaaggccagggagttaaaaaaagctgctgaagccctacaccaagaagaaagaagtgggaacaagggccggaaatggcgcaaaaatgtgaaggctttagaaaaggagttattactcctggaagatgacatgaaggctctagaagagatgtatcctcaaggagaacaggttaattgtttcaatagcttgggttgcacatattgtcatatacttgttgattga

SEQ ID NO: 16596 - DNA, 318 bp, Zea mays
  Peptide Sequence Number=SeqID_59971
atgtcagaccaaagagtcggtggtctcccaccggctgctatcgatatagtaagggaagaaatagctggggcgttccgagataagctcggagggtaccccttactacagtatgaagacacagtgcccgtgcggctatctctagccacgcggtggacagcacccgaccccaacacgtgggccgtcccaaaggacgccatgtggacagaagaggtgatatactccaggataccatcagtaggtccgtacctcctcaagaaagcattggacccctgtacacatagcccggacctccgagtacggcccgggactcccaagtga

SEQ ID NO: 16597 - DNA, 594 bp, Zea mays
  Peptide Sequence Number=SeqID_59972
atgcccgaccatcataattccctgacaaccatctcgtggaacacgctgcgcgtcggcgacgtgtcccaaactgcagtgcacctggacgaggctggcggagacgtgaacgtcggagaccacgtggcggatgcggatgagggagtggagctaagctcatgcgttcagcgggaggcacacggaggccctgagatatatagtgggtgggggcacgaggcgaagggaggcgaggatgagcagaaagtcggcgcaggtggcgctgatcggcgcttgggacttgggaagaggaagctccagttcgaggagcacaaggagcaactgatccaagaagcaaaggtgaagttcttggccaacttcaaggtggatagaaacaacaaggtcgtttggcaacgggagactgatctggcttcgctccgacctactacgactaccccgaggttgtcacgaccagtcacaacccctttatgggatgacgatagacatgtaccctgggaaaccacaacctcccatgcatatcggcgaatctacacatgtctggaccgtccgcatgtgagcgcgaccctcagagccagcggcggccagtcctattttaaatga

SEQ ID NO: 16598 - DNA, 420 bp, Zea mays
  Peptide Sequence Number=SeqID_59973
atggcggcgcgaagggcaggaagggcggttctctcttctctggctagatctctcgggttgcgaaaacctaaggggcaggcaggaagtggagcaaagaaccgtcaccgtgccctctctgggggatataaagaccaaggcgaggacggttccaacgttctgcccggaccggacgcgggattcaaaaacgcgaagcgaaacggccgctcctcaaacggctcgcgcacgcgtaacggcgaccccgccaactactcgccccgtcgcattaactccacgactggacaggcggcgcttctggcaggagcaacgggcgacgcttcgccttcgccggaacaaccgcgccaaaagagggaccgggaaagggggataccccgaaagggatccttccccgtgaaggaaccaggctccgagcctccttactga

SEQ ID NO: 16599 - DNA, 712 bp, Zea mays
  Peptide Sequence Number=SeqID_59974
atgacgaactctgcttcgcccgaccctagggctcggactccgccctggcctctgccgaacgacctccgcctcgcccgacccagaaactcggcctcggcctcggccatggaagatagactcgaccccggcttcggaggagcttccacgtcgcccgacctagggcacaggcccgccacgtcaacaggaagcgccatcatcaccctaccccgagccgactcgggccgtagagaacaagaccgggggatgtcagcaaggacccaaccgctccgacagctgtccctccgccaggctccgttgctcctccgacagccacgacatcacaccagcagggtgccaagatctctccggctgccacattggcatggccttcttagagaaggttggccgcgcggggacgaggacgggacaggcgctctcttggggccgctcgcttccctcacccgcgtggacgcttgtaaccccctactgcaagcgcacccgacctgggcgcgggacgaacacgaaggccgcgggatttccacctctctcacgcccgtctccggccacctcgcttcccccttcacgctcgcccacgtgctcgacccatctgggctggggcacgcggcactcactcgtcggcttagggaccccccggtctcgaagcgccgacaaggattatccgccaagcggattgcactctcattatcacataggagtcgatctttctcagatt

SEQ ID NO: 16600 - DNA, 177 bp, Zea mays
  Peptide Sequence Number=SeqID_59975
atggtctcccattctggttatggtgggtacaagtgcgatcactgcacgacggtagtcggggtcagtgaggcattgtacgccaaggcgataggtgctctggaggacatggttgctggagtgcttggccgtccaccttgccaccgggttggacagtcgagtggaccgacgaatctctag

SEQ ID NO: 16601 - DNA, 870 bp, Zea mays
  Peptide Sequence Number=SeqID_59976
atgacttctcacggatcctcgaacgaagggaatgcacagtcccacacggacggacttgcacgacagggtttcccccgtatcttgtgggaggtacttcagggagctcgttacacgatgcctccccagtacgcggtgcagctgtttgagaagcaccgagtaccccgctgtagggtgaggatgaccctagagcctcatcccctgcagccaggatggcgttcgctggactctgagtcttttggatatagggctgaggatactatcgaggcgattgcccttcacggactgaccaccttctgtggtttccaccccttggagctgtccactcaccccattggtttgttccccgtggagaaggaggacgacccaatgtggaaggaccgagtggagaatgccaaggatatttgggctatctacccaggtcagactgctcacttgacggtgcggtgcatgaatgccctatatcgtctgcaagtgatgcgaggagaggcaatgtcccatctgatggcattgttggaggctaccaagatcaccttggataacagggaggaacttgtggtagacttgtccactgagatggtggaaaaagacttacaagtggagcagttgtcagatgagatccacgagcttgaggagctagtgggcaccagggagaacaccatcgaggttctcgaggatcagcttatcaacactcagcagcagcttgcggaggctaaccatcatctagatatgcaccaccaggagatccaggacatggaggccaacgaggatgtcgacatcgagggaggagatgagcctgcctccagcttggacactgctggcttagggagaccaccttcccccgagtcgactgttgcctcatttgcgaagtag

SEQ ID NO: 16602 - DNA, 240 bp, Zea mays
  Peptide Sequence Number=SeqID_59977
atggtctcccattccggttatggtgggtacaagtgcggtcactgcacgacggcagtcggggtcagtgaggcattatgtgccaaggcggtttaccttgcaaggataaaaactcgattcgaatcgtctgcttctcgtgctctggaggacatggttgctggagtgacttggccgtccaccttgccaccgggttggacagtcgagtgggaccctacctcggcggaggaggagcatgaggagtga

SEQ ID NO: 16603 - DNA, 384 bp, Zea mays
  Peptide Sequence Number=SeqID_59978
atggaggaagagaagaaacagttagggaggtcatcgaagaagatgagcttgcattctaggacacgtttgaagatttcagcagcggtggatatgatggccacaaataaatccctagaacaaaacctccgcaagacaagtgttctggatgaggaggctgagtcgttgcttggtgaggctaacgttcgtttggagagggcggatgcagagcccttaagagagtgcagcacaactggagatggaagtttttttgaagcccaagaggcaaagaaaatggaggaggaggcgaaggctaggatgcgagagcttttgcttgctcatgatggtggcgttgctgtaacggccgaggcgtcaattgcgccctccaagcggagcgtagagctttag
